United States Patent Application Publication US 2007/0067865 A1 - sequence listing, part 23

SEQ ID NO: 140653 - DNA, 118 bp, Arabidopsis thaliana
ccttgtgcgagaggcgtacttgacaagtatttcgaagtaagtaagacaaatgaactacattggggtcatagagtgtacgtgtaatgaaacagcaatttcagtgaggatacgctcaaaa

SEQ ID NO: 140654 - DNA, 414 bp, Arabidopsis thaliana
acccacgcgtccggaaaagacaacattcggtgctgatggcatcctcatgaccagacctggctcatcagctgaaccaagcgagaaccactcaagccgactattttcaagtggttcacgtcatgccacaacccaacgggttccacagagctatgaatctgcagctgcagcaaggcctgggcatgaggatgccattagaaacttcgagctccttaccatcggcgctggaaagaagaggagatgaagatagggagagagaagtttgatgagagtgaaaagactacattcggtgctgatggctctctcctctgaacataggaaagacatgtcctcgaattgttttttaaccgtgggaacaagatgagaaagtgagagagagaaagagagttaatgtaatctgcctctcccaatctctca

SEQ ID NO: 140655 - DNA, 443 bp, Arabidopsis thaliana
  unsure (1)..(443): unsure at all n locations
gtgaaaacgaaatcctaattccatggccgacaacgacggagcagtgagtaacggcatcatagtcgagcagacgtcaaacaaaggacctcttaacgccgttaagaaaccaccgtctaaagatcgacacagcaaagttgacggaagaggaagaaggattcgtatgccaatcatttgcgcagctcgagtttttcaattgaccagagagttaggtcacaagtccgatggtcaaaccatagagtggcttctccgtcaagctgagccttctatcatagccgccactggaactggcactactccggcgagtttctccactgcttctctctccacttcttctccgtttactctcgggaaacgtgtcgtcagagcggaggaaggagaatccggcggcggaggaagangagggttaacagtgggacacacaatggggacttcgttaatgggtg

SEQ ID NO: 140656 - DNA, 450 bp, Arabidopsis thaliana
cggaagcgtgggaaaaaatatgtattgtagagagtccttgtcgagtctccagactttgaacgtagcaaagagtctcagctctttgttccctaaacaatcagctctcatcaacccgatctccgctggacgtcgaaacaacctgcctcgtccaaacctcagaagacgatgtaaggtcaccgcttcacgggctaatattgaacaagaaggtaacacagtgaaagaacccattcagaatattaaagtaaagggatacataacggcccaagaagagtttctggagggcataacttggtcgagaggtctcgatgacattgctgatatccgcggcagatcattgctcgtcgagcttattagcgccaagactgaccagcggattacggtagaagactacgcacaacgtgtatgggccgaagcccctgatgagaagtacgagtgcgagtttgagatgcc

SEQ ID NO: 140657 - DNA, 430 bp, Arabidopsis thaliana
agcaatgagaaaaaaaaaaaagtaagaacgagagagagaaagccatgtctgcgaaaacaatcctatcatcagtagttttggtggttctcgtcgccgcatcagcagcggctaatatcggattcgatgagtcaaacccgatccgaatggtctccgatggtctccgggaggtagaagaatctgtttcccagatcttaggtcaatctcgtcacgttctctctttcgctcgcttcactcaccgatatggtaaaaagtatcagaacgtggaggagatgaagcttcgattctcgattttcaaggagaatcttgatttgatcagatccaccaacaagaaaggcttatcttacaaactcggtgttaatcaatttgctgatttgacatggcaagagtttcagaggagcaagcttggtgctgctcagaactgctctgccac

SEQ ID NO: 140658 - DNA, 441 bp, Arabidopsis thaliana
  unsure (1)..(441): unsure at all n locations
gaacatcttgctgccgttgagattatgcaacttaagcatatcatcatccttcagaacaagattgatcttattcaagagaatgttgccattaatcagcacgaggcaattcagaaatttataatgaacactgttgctgatgctgctccgatcgtccctgtctcagcacaactgaaatacaacattgatgtggtgtgcgagtacattgtcaagaagatcccaatccctgagaggaattttgtgtcacccccaaatatgatagtgattcggtcttttgatgtcaacaaacctggttatgaggttgatgagatcaaaggtggagttgcaggtggaagtatcctacggggtgttttgagagtcaaccaattaatcgaaatccgacctggtatcgttaccaaagacgagcgtggcaactcanaatgcactccaatttactctcgcatc

SEQ ID NO: 140659 - DNA, 441 bp, Arabidopsis thaliana
cccaagcgtccgcaatatctttagctagagagaaaaaaagagtgaggaaactagagagagagaccacccaataatggtgaggttcgagaaggttcatttagtgttagggttagctctggttctaactctggtcggagctccgaccaaagcccaaggacctgtttgcggtgcaggcctgcctgacaaatttagcagattaaacttccctgaaggcttcatttggggaaccgcaacagcagcatttcaggttgaaggagctgttaatgaaggttgcagaggtccaagcatgtgggatactttcactaagaagttcccacatagatgtgaaaatcataacgctgatgttgctgtggatttctatcatcgttacaaggaagatatccagttgatgaaagaccttaacactgatgcttttagactttctattgcgtggcccagaat

SEQ ID NO: 140660 - DNA, 438 bp, Arabidopsis thaliana
gttaatttcccgacagctaaagagcctacttacagtgctgaagggtttgagcttagtgttgcgacgaaccatttgggacattttcttctcgcaaggttgttgcttgatgacttgaagaaatctgattacccttcaaagcgtctcatcatcgtcggatccattaccgggaacacgaatacattggcgggtaatgtaccaccgaaggcgaatctcggtgatttgaggggtttagccggcggattaaacggtttaaacagctcagctatgattgatggaggagatttcgacggtgcaaaggcttacaaagacagtaaagtctgcaatatgttgacaatgcaagagtttcacaggcgtttccatgaagaaactggagtcactttcgcttcgctttaccccggttgcatcgcctccacaggtttattccgagagcacattcct

SEQ ID NO: 140661 - DNA, 418 bp, Arabidopsis thaliana
cgggtcgaccacgcgtcagagacactactccggttgaatcatcagcagctgttgaaacttcaactcgtcctaagaggctctgtagacgagtcttggattttgaagccgaaaatggagaaaaccagaccaacggtgacattagagaagcaggtgagatggaatcagctcttcaagagaagcagttagattctgggaatcaagagttaaaagattgccttctttcggctcctagcacgcccaagagaaagcgcagccaaggtaaaagaaagggagttcaaccaaagaaaaatggcagtaatctagaagaagtcgatatttcgatggcgcaagctgcaaagagaagacaaggaccaacttgttgcgacatgaatctatcagggattcagtatgatgagcaatgtgactaccagaaaatgca

SEQ ID NO: 140662 - DNA, 440 bp, Arabidopsis thaliana
agcggacgcgtgggcggacgcgtgggtgggtttgatcttgaccacgacgagaaagacagcagttacaacagaatcaagagcttagtgactgaggaactaaaacagtatttcagaccagagttcttgaacaggttagatgagatgattgttttcagacagttaacaaagctggaagtcaaggaggatacagcggcggcggcggcggttactcctcaagaggtggtggtggcggaagctacggtggtggaagacgtgagggaggaggaggatacggtggtggtgaaggaggaggttacggaggaagcggtggtggtggaggatggtaattcctttaattacgtttgggattaccaatgaatgttctctctctcgcttgttatgcttctacttggttttgtgtgttctctattttgttctggttctgctttagatttgatgta

SEQ ID NO: 140663 - DNA, 431 bp, Arabidopsis thaliana
atcaagccaagtaaaaaaaaaatcctaatctttgcgtcaccgttcgtgtttcctcttctctctagggttctccttcaacagttttccagtaaacatgagtcgtcatcctgaagtgaagtgggctgagactaccgagaagattttcctcactgtagtattagctgatactaaggataccaaggttaacctagacccagaaggagtctttgatttctctgcgaaagttggtccagaaaaccacgtttatgagctcaaactggaacttgccgataaagtcaatgttgaggaaagcaaaatcaacattggagagagaagcatattctgcataattgagaaagcagagccggaaaggtggaataagctactccgtgtgaagaagcccccacactatgtcaaggttgattgggacaagtgggttgatgaggacgatg

SEQ ID NO: 140664 - DNA, 438 bp, Arabidopsis thaliana
  unsure (1)..(438): unsure at all n locations
cacaacttgtaacttcaaatagattactttcaaagaagagagagagaaaaaagatggagaagaacatgaagtttccagtagtagacttgtccaagctcaatggggaagagagagaccaaaccatggctctaatcaatgaagcttgtgagaattggggcttctttgagatagtgaaccatggattaccacatgacttaatggacaagatcgagaagatgacaaaggaccattacaagacatgccaagaacaaaagttcaatgacatgctcaagtccaaaggtttggataatcttgagacagaagtcgaagatgtcgattgggaaagcactttctacgttcgtcacctccctcaatccaatctcaatgacatttcagatgtgtctgatgaatacaggacggccatganagactttggtaagagactggagaatcttgctg

SEQ ID NO: 140665 - DNA, 58 bp, Arabidopsis thaliana
  unsure (1)..(58): unsure at all n locations
aactgnaacaattttgtgttatttcaagtttttttatgaatgtgtggttggtcttctc

SEQ ID NO: 140666 - DNA, 440 bp, Arabidopsis thaliana
tctatttccccttttacgctcttttctttcttcattttctgtggaaattttcagagcttttctgtgtaaattaaagagttcttttttgaaggaaataggcaatctcatcctgagaatcaaacaaccggaaaattcaataaatgaaacgcctttaattgttttctcttacaaaacttctaagcagattactttggcggagacccatctgattggtatttttgcagatattccgttcttggagtaccaactggcctggagctacattccttagcctggagtaaataataggctgaccctttgaaatcaacatggtttcctcaagaacttaataacttttcgctggtttctgtcctggagcgttgttgtgtgtttggtcagaggtattaataagtccaatgcaaggtccacgaagcactggtgattcatcgactggaataaat

SEQ ID NO: 140667 - DNA, 353 bp, Arabidopsis thaliana
  unsure (1)..(353): unsure at all n locations
acgcgtcaagngaaggaaaggttatagcgaaatagatagagatagaagagagagaaaggacgaagaaagagagttcctttaactctctcttcttcctctgcaaatctgacatattgaaccaaaccaaaggaagccctctttgattagggttttgtgtcaagattctggagagagcttttaggtgagttttgtgtatctctgatgttgatgttattgaaattgggactcttctccacttaacttggagttgttttgttttttgattgagcttttgagatcttgaaaattgagatcttggagttgtttgtttctaagtgacctaaatcttacaagatgtcctgggttcgattcac

SEQ ID NO: 140668 - DNA, 296 bp, Arabidopsis thaliana
cggacgcgtgggcggacgcgtgggcggacgcgtggggcatagtcaagagccatcacacagtacctatcagaggaatacagtgagaaaggtgaaaagcttatctcccaagactgcaagaaagtcaaggcaaccactaacgtatggcttcaagttgaaggtcaacagtttgaccctaacgcctctaaccttgccttcgaccgtgtctttaaaggcatgttcggcatgacaactgaccctgccgctgtccaaaacctcaaaggtaacctccaaaaattcttggatgtcaacaaggctag

SEQ ID NO: 140669 - DNA, 453 bp, Arabidopsis thaliana
cccaaacgtccgagatagatcaagatgtatcttcacgcggaaatgcggcattgacagctttacattatgacagcaactcaagacttcttgtttctggtgatcataacggaatggttcgcctttataggttcaaacctgagccatacctaacagaaaacagttttatccctttccaaggaagcttaaagaaaggaaataaccatattgttcaaagtgttaagtacatcaagcttactggttccataacctgtattcagaagagccaaaactcaaaacatctcgctattggatcagatcaaggacatgtttctctggttgacattgaggaagcaaatgtgttatacacaaaacacattgcaagtgatatatgtccagggatcatctccttgcaattcgagagttgcattgtgcaaggcttcgagaagaacgtgttagtggttgctatgagagact

SEQ ID NO: 140670 - DNA, 412 bp, Arabidopsis thaliana
ccttaatataaaaccaaacatcaatctctcgccgttaaggttacatctgtcgccgccgctgagaccgccacttaaggccgtctcctccgctctatccatatccaaaacagctataaagataaacttccagagcttggtgaaggagcagcaaccctagttttcaatccctaaagatattagttctccagcgagttgacacaaaacccgattacgtttcatccggcgactcgctttgatattccatggattctcagttgaatccttccaagagacgcaagataagtgtcaggcacagatgcgttgcgtgctataagatgttcaatagacgagaacacctcgttgagcacatgaagatttcctaccactcacttcagcagcctcgctgtggggtttgcctcaagcactgtaaatc

SEQ ID NO: 140671 - DNA, 443 bp, Arabidopsis thaliana
cccacgcgtccgggcaatggcaaaactcgcaattttcaccactcttatggccatactcgtaatgacatctcaaggaaggattccaacagaaggaggagagaaagaagcagaggctgacagaattacgtcacttccaggtcagcctaacgtcacgttcgagcagttttccggctacgtcaccgtcgataaactctccggaagatcactcttttattggctcactgaagcttctgacctccctctctccaaacctctcgtaatttggctcaacggaggaccgggatgttcgtcggtagcgtacggtgcgtcggaggagattggaccattcaggataagcaaaggtggttccggtttgtatctcaacaagttcgcatggaactcaatctccaatctcttgttcctcgaagctcacgccggcgtcggcttctcttacactaaccgct

SEQ ID NO: 140672 - DNA, 363 bp, Arabidopsis thaliana
aagatcttcagagtctacaagggaagatcaaagtaattaaataagctgaagtaagaggaagtgatgttttctcttatgtctggactatggagttacatgtttagcaagactgagtttaatgtgcttattcttggtatcgacaaagctgggaagacgacatttttggagaaactgaagacgatatactcaatctcggaaggtcttcctcatgatcgaattgttcctactgtggggcttaatattggtcgcattgaagtctccaatgctaaaattgtgttctgggatctgggaggtcagcctggtttgcggtctatttgggagaaatactatgaagaagcacacgcgttgatatatttgattgat

SEQ ID NO: 140673 - DNA, 280 bp, Arabidopsis thaliana
gatagggaagtagttggattatgtgaatgtgggtggttttctaaatagatagttggaattagataatggcttaaaaagcttttgggtgtaggagacttggaaacaatggtgtttttttttttcttttctttctgtttcttgtctagtcggtttatgatttgcttgtgttcttcttagctacgttttgtggtgtgtattgctttcttctttggcaatgttgaacaccttttgttgttgaattcatctctgaaacatatgaatatgttaaagtttctgactc

SEQ ID NO: 140674 - DNA, 68 bp, Arabidopsis thaliana
gacaaattctatcggattctcaactgtctgatgaaataaatatgtaatgttctataagtctttcaatt

SEQ ID NO: 140675 - DNA, 409 bp, Arabidopsis thaliana
cacttcatcaacctatagatctcactcacataatcaacctacaaaacaaaaacaagaatgggtagatccaacgagcaagatctgctctctaccgagatcgttaatcgtgggatcgaaccatccggtcctaacgccggctcaccaacgttctcggttagggtcaggagacgtttgcctgattttcttcagtcggtgaacttgaagtacgtgaaacttggttaccactacctcataaaccatgcggtttatttggcgaccataccggttcttgtgctggtttttagtgctgaggttgggagtttaagcagagaagagatttggaagaagctttgggactatgatcttgcaactgttatcggattcttcggtgtctttgttttaaccgcttgtgtcgacttcatgtctcgtc

SEQ ID NO: 140676 - DNA, 381 bp, Arabidopsis thaliana
ttcaatggttgagagagaaaagagtaaaaaagcacatggcctcattaccattggggcctcagcctcatgctcttgctccgccgctgcagcttcacgacggcgacgctttgaaacgccgtcctgaattggattctgataaggaaatgtctgcagctgttattgagggaaatgacgctgttactggtcatatcatttccactactattggaggcaaaaacggcgaaccaaagcagaccattagttacatggctgagcgggttgttggaacaggttcattcgggattgtttttcaggcgaaatgcttggaaactggagaatcagtagccattaaaaaggtcttgcaagatcgacgctataacaaccgtgagttgcaactaatgc

SEQ ID NO: 140677 - DNA, 442 bp, Arabidopsis thaliana
cccaagcgtccgcccacgcgtccgcccacgcgtccgcggacgcgtgggtgaacataacgttccggaacacggccggaccggagaagcaccaggctgttgcgttacggagcggcgcagatttctcaatcttctatagttgtagtttcgaggcttatcaagatacactctacacacattctctaagacagttttatagagaatgcgatgtctatggaacggtcgattttatatttggaaacgcggcagttgtgtttcaaaactgtaatttatacccgaggaaaccgatgccaaatcagttcaatgctatcaccgcccaaggccggtctgatccgaaccagaacactggtacatcaatccaaaactgtacgattaagccggcggatgatcttgtttcgagtaactatacagttaaaacgtatttgggtcgaccgtggaaagagta

SEQ ID NO: 140678 - DNA, 109 bp, Arabidopsis thaliana
cttcatggcattgtccccttgtatccatttcatatctatgtcgtttcgtttatctttgtagccgttttggcaccactgcttaaataaaatgccaatcctatcataactc

SEQ ID NO: 140679 - DNA, 58 bp, Arabidopsis thaliana
atttatcctgaggaagttaaatacatttatttgtaaagaagtttgcttttctgatacc

SEQ ID NO: 140680 - DNA, 288 bp, Arabidopsis thaliana
cggaagcgtgggcggacgcgtgggcggacgcgtgggcggacgcgtgggcaactatggatgaagagtacgaagtcatagttctgggtactggtctcaaggagtgcatccttagtggtcttctctccgtcgatggtcttaaggtacttcacatggacaggaatgactactacggtggagagtcaacttctcttaatctcaatcagctgtggaagaagttcaggggagaagagaaggctcctgctcatttaggttctagcagagactacaatgttgacatgatgccaaagt

SEQ ID NO: 140681 - DNA, 388 bp, Arabidopsis thaliana
cccaagcgtccgcggacgcgtgggtgcgtatcagctttcgtctttattacatcgaagttgctactgtttatgccatgtatcgggtaccaaaacagtgatctctgcatccaaaaacttctctttgattggccattcagaatcatactcagagttcagaagctagctactactaataggccaagcgttttacatcatcaagaacaagaacaagaacaagaacaagaacaagaagagaagactatggttgataaagataagaactcggaattgatggatagagttaggttgttggaagtagctgttgagcaagagaaagtaactaaagctgctttaatggttgaattggaacaagaaagagcagcttcagcatcagcagctgatgaagcta

SEQ ID NO: 140682 - DNA, 463 bp, Arabidopsis thaliana
  unsure (1)..(463): unsure at all n locations
cccaagcgtccggtcncttcctgtgaccaagcaccctggtcaagaagttttctctggttcaacttgtaaacaaggagaaatcgaagcggttgttatagccactggagttcacaccttctttggtaaagctgctcaccttgtggacagcactaaccaagttgggcacttccagaaagttcttacatccattggaaacttctgtatctgttctattgctattggtatagcgattgaaatagtcgtcatgtaccctatccaacaccgaaagtacagagatggaattgacaatctcttggtcctcctgattcgtggtatccccattgctatgcccacggtcttgtctgtgactatggctatcgggtctcacaggttgtctcagcaaggtgctatcaccaaacgtatgacagccattgaagaaatggcgggaatggatgtcctttgcagtgacaaaaccgggacacta

SEQ ID NO: 140683 - DNA, 175 bp, Arabidopsis thaliana
tctaaaccttccttgttcaagagtctttatgtatgtgtctctttcatttaaagccgttggttttatttatgtatgcagagctttatgctcagtttgtaacctataggtcttacttggattgtaagccaagcaataagacaacatcaaataaaaggggatttggttttctggggtt

SEQ ID NO: 140684 - DNA, 378 bp, Arabidopsis thaliana
cccacgcgtccgcggacgcgtgggatcactttataacaaattaaagtctacgttgagatatggctttaaaaacatggaagccattcataactgttgtttctctacaatttggatatgctggattgtcgatcatagcgaaattcgcactgaaccaaggcatgagtcctcacgttctagcgtcgtatcgccatatcgtcgctacaattttcattgctccatttgcctatttcttggatagaaaaatacggccgaagatgacgctatccatcttcttcaagatattgttgcttgggttattggaaccaacaattgatcagaacttatactacactggtatgaagtacacttccgccactttcacagctgcaatgacaaatg

SEQ ID NO: 140685 - DNA, 449 bp, Arabidopsis thaliana
ctctcgtacaaaatacaaatgaaccgcagaaagtgaatgggtttttgctggtggcctctactgctggatatgcatatagcgataaagatagagcctggattggagctatggctgagaaattcagaggatgacatgagctgttcatgatgatgttatctttgactggtgaaacacttcagttcctacagaaatttctcgaggccataaaccagattctggaaaaccaaagagaataatggcaagtgattagataacagtaagagattaatggatggagaattcttgcttgtttccatgttaccttgaggcgtaccacctttctgattgctaggagtatgccgggcattacggaccttacgtcaattatgtcatgtttaacagtgtaaacctgtggacagcattttgtatcagaagaattttaatgagctatgtagcctaaattttaaaat

SEQ ID NO: 140686 - DNA, 417 bp, Arabidopsis thaliana
  unsure (1)..(417): unsure at all n locations
aagaatatagataacaaggttagatacggagttgtctttgggaatcaaaagcatcttccatcncgtgtcatgaagaatgtcattgaagtcgagaaatctgaagatagaaacgaaaagtattggtttcatgaagcacgcgttcccttatatttgatcaaagaatatgaagaaagtttgcatagggtggtacacataccttttatcaagaagccatcaagaaaaatatcaaagctccagaaaaggcaactaaaagcttctcgagcaaacatattttcttatctagcctctcggagggacaacacggagaagtgttcttgtgcatcatgccatctcgatgtttttttgagggattcaataacatgcagtacttgccaaggtttctgtcacaaggaatgtactatgagttcacaacacaca

SEQ ID NO: 140687 - DNA, 440 bp, Arabidopsis thaliana
  unsure (1)..(440): unsure at all n locations
acacaacgcagctaagaaacctccttaaagaacaaagaaaaaacttggtgaaatcgattctcttcaaagatcgtcttcctaatcactttcaacaactcgatcaatccttactgattctgattctgtatcgaatttgatacagagacgatgccgaagaacaaaggaaagggaggaaagaacaggaagagaggaaagaacgaagctgatgacgaaaagcgagagcttatattcaaagaagatggacaagaatacgcacaagttcttcgtatgctcggtaacggtcgatgcgacgttatgtgcattgacggtgttaagcgtctttgccatatccgtggtaagatgcataagaaggtttggattgctgctggtgacatcatacttgttggtctaagagattacaggatgatanagctgatgttatactcaagtatatgtctgat

SEQ ID NO: 140688 - DNA, 423 bp, Arabidopsis thaliana
  unsure (1)..(423): unsure at all n locations
ctccaccgccgatattctcacgccggtatgattcgaacaacattcgcgaccgccatcgctcatttccacacgcattctcatggaggagctcaagctcgtcctctacagaacaacacacgagaagtaatccattgtcctgaagcttggttagtcaaaatcgtatctactttgttcgtgtacagagttccagattcagatctctgtttctgttacttaagcaagaatctaaatccgtttatctcctttgaggttgtgaagaaattggataacaatcctcacatanggtttcgattttgggagtttagtagattcaaattgaacattcgtcattcgttttggacttataatttgctaacgagatctctttgtaaagccggtttgcacgatttagccggtcagatgtttgagtgtatgaagagcgat

SEQ ID NO: 140689 - DNA, 321 bp, Arabidopsis thaliana
gtgagaaattcgaaatctttgcgagctcgtctcgcccagaatctcgatttctccacctttcctcttcaattcatcttccaaatccctaaaaaaaagactcaaactttttaattttggtccaaaaaagactcaaactttcttcatcaatggcggagaaaatcacgagagagacgtcgttacctaaagagagaagcagcccacaagctctaatcctgggacgatacgaaatgggtaagcttctcgggcatggtaccttcgctaaagtttacctcgcacgtaacgtgaaaacaaacgaaagcgtagcaatcaaagtaatcgaca

SEQ ID NO: 140690 - DNA, 312 bp, Arabidopsis thaliana
ctttctcgagaacgtgattcgtgatgctgtcacttacaccgagcacgctaggaggaagactgtgaccgccatggatgttgtctacgctctcaagaggcaaggaaggactctttacggattcggtggttaattagagtttttcagatccgcgtttgtgttttctgggtttctcacttaagcgtctgcgttttacttttgtattgggtttggcgtttagtagtttgcggtagcgttcttgttatgtgtaattacgctttttcttcttgcttcagcagtttcggttgaaatataaatcgaatcaagtttcacttt

SEQ ID NO: 140691 - DNA, 450 bp, Arabidopsis thaliana
cttcaataaatctccaccttactttaagaacaagaaaaacacagtattaacaaatggcaggaatcaaagttttcggtcacccagcttccacagccactagaagagttctcatcgctcttcacgagaagaatgtcgactttgaattcgttcatgtcgagctcaaagatggtgaacacaagaaagagcctttcatccttcgcaacccctttggtaaagttccagcctttgaagatggagacttcaagattttcgaatcaagagcaattactcaatacatagctcatgaattctcagacaaaggaaacaaccttctctcaactggcaaggacatggcgatcatagccatgggcattgaaattgagtcgcatgagtttgacccagttggttcaaagcttgtttgggagcaagtcttaaagcctttgtatggtatgaccacagacaaaaccgttg

SEQ ID NO: 140692 - DNA, 304 bp, Arabidopsis thaliana
gaaactcatcgattttcaaaaccggagctcagagactgatctcggaaagtaaatcgcacccatggcggagaaaagctgtcactatcatgaccagaaacttcatgaccaacaggcttctcgccagaaatcaattcgttattgatgttcttcatcctggaagagccaatgtttcaaatgctgagcttaatgagaaattggcgacgatgtatgaggttaacgacccagatgctatcatctgtttcaagttcacaactcactttggcagtggtaaatcttctggatatggtttgatctatgatactgt

SEQ ID NO: 140693 - DNA, 357 bp, Arabidopsis thaliana
atctgatccacattcattgtatataatcttatggcatttctggtcatttagtctcaagcaaaatggataagagatggagtctacaaggtatgactgctcttgtaaccggtgcagccagtggaatcgggtatgccatagtagaggagttagcaagttttggagctataatccatatatgtgacatctctgaaactcttctcagtcaaagtttaagtgaatgggaaaagaaagggtttcaagtgagtggttcaatctgtgatgtagcttctcggcccgatagagaaaaactgatgcaaaccgtctcctcgctgtttgatggcaaactcaacattcttgtaaacaatgtttggtgtaata

SEQ ID NO: 140694 - DNA, 453 bp, Arabidopsis thaliana
  unsure (1)..(453): unsure at all n locations
cctttgtgtcacacaaataaacaccataaactaaacaataaaccatacaaaaaaatatgaaaatcctctcactttcactactcttgctcttggccgctacggtctcccacgtccagtcttcggcatccgttccagggctcatcgaactcctcgaatcgaacaccatctttgggaacgaagccgaactcttagagaaagagggactgtccatcaactaccccaactgcagaagctggcaccttggtgttgagacctctaacatcataaacttcgacacggtgcccgcaaattgcaaagcctatgttgaagactacttgatcacttccaaacagtaccaatacgactccaaaactgtaaacaaagaggcatatttttacgccaaaggacttgccctaaagaacgataccgtcaatgtttggatcnnttgactagacgacactctcctctctagta

SEQ ID NO: 140695 - DNA, 189 bp, Arabidopsis thaliana
gcgtccgaagtagagcaagtgatcccgccggtgaaggttgaagacggcgaaagcacaactcatgaaacgcgacggatgcgttacggagaggagtttctttcttctcgactttgcaggcctccgatggtcactggactggagaaatcactggacctctcttcttccttcctccattgaacgatgatggtg

SEQ ID NO: 140696 - DNA, 454 bp, Arabidopsis thaliana
ccgactttcaacgaaaactcagtgcctcgtccctctctttcaaaaaggtttttggttatggcgacgaagaaagtgatagctatatgtcagtcaggaggagagtttgtaactaataaagatggctcattagcttattctggtggtgatgcttatgccatagacatcgatcaggacacttgtatgagcgatttcaaatccgaattagctgaaaatttcgggtttagttgggagaatatgacactcaagtacttcctcgctggaaacaagagaaccttaattactatctctaaggataaagatttccaacgcatggttagcttttccgcagacgcagcaaatgtcgaaatcttcgtcttacccgaagaagccgaagcaaggaatgtctccaacatgccagctagtagatcaagtaggacaactgcatcagaagcagtggtacctgtagtgtctgcag

SEQ ID NO: 140697 - DNA, 227 bp, Arabidopsis thaliana
cggacacgtgggcggacgcgtgggcggacgcgtgggttttgagataaaaaaagacactttgactcatctttcttcattctctcatgttgatgattcctctccaacttctttgatttctttttgttaattcaaaacttcaactttgctgcttctatttcaaaagctcaaacaataaagctgtaaccaacgtttgaaacttctatatttgtctaattgatgtttgaacg

SEQ ID NO: 140698 - DNA, 431 bp, Arabidopsis thaliana
gggtcgactacgcgtccgcggaagcgtgggcggacgcgtgggcggtttacggtccatggggaagaccagacatggcttacttcttcttcactagagacatcctccacggtaaatcaatcgacatttacagaactcaggacaatcaataactggcgcgtgacttcacctacatcgatgacatcgttaaaggttgtgtcggtgcgttagacactgctgagaagagcaccggaagcagcggaaagaagcgaggacaagctcagctacgtgtttacaatctaggaaacacgtccccggttccggttgggagagtggtctcgatcttggaaggattgttagggataaaagctaacaagcatcttatcaaaatgccaagaaacggtgacgtgccttacacgcatgcaaatgtgagtttagcgtataaagatttcggg

SEQ ID NO: 140699 - DNA, 172 bp, Arabidopsis thaliana
cgcgtcaggtggatctcatggatgaatgtcagaacggggttgattcaaaggttgagctctgctaggaattggtcagttaaaattaaccgccttattctagttcttgttgtaagtttagctgtactagtcatcattgtgacgcctaacataacttataatttattccatgcat

SEQ ID NO: 140700 - DNA, 431 bp, Arabidopsis thaliana
tggaaattattatctctttctcttccattattatcttaaagtgagaaatcaataagatgttggagaaagagtttttcacggagtatggtgaagcaagtcaatatcagatccaagaagttgttggcaaaggaagctacggagttgttgcttctgcggaatgtccacacacgggaggcaaagtagccatcaagaagatgacaaatgtgtttgaacatgtctcagatgctattcgtatcctcagagagatcaagcttctcaggcttcttcgacatcctgatatcgtggagatcaagcatatcatgcttcctccttgtcgcaaggaattcaaagatatatatgttgtttttgagttgatggagtctgatcttcaccacgttcttaagctcatgtgttccatagagatctgaagcctaagaacatcctcgctaatg

SEQ ID NO: 140701 - DNA, 357 bp, Arabidopsis thaliana
tggagctcaaaaagtgtaagagacaaccaacaaaaaacgattcatctcttctcctatcctctcctcttcgaattcaacgtttggagaatccagcagccgcaaaatggcttcgcttgtgtattctccattcactctatccacttctaaagcagagcatctctcttcgctcactaacagtaccaaacattctttcctccggaagaaacacagatcaaccaaaccagccaaatctttcttcaaggtgaaatctgctgtatctggaaacggcctcttcacacagacgaacccggaggtccgtcgtatagttccgatcaagagagacaacgttccgacggtgaaaatcgtctacgtcgtcct

SEQ ID NO: 140702 - DNA, 435 bp, Arabidopsis thaliana
  unsure (1)..(435): unsure at all n locations
cgacacaagatcgagaagcttcggaaacgttatcgcggcgaaaaacaacgagctcttaatcgaccaggcaagttctcttcctcttgggatttgttccctatcttggatgctatgggattcgctccggtgactccggcagccgtagaaacttacgatcccgatgtggatcatgatgatgagagtaacggtttggatggatttagggttagatcgaagaggtctgggaagtttagcggtggttactctgattcacctcgagaagtaggagatggatatggggttagatctanggcaaggagtaacatgaaaatgtatggtggtttcaagtctgagtttgattcagatcacgattcangaagtggatttggattgaaaaggaaatacaatgggaatccaaaggttagtgctgatttcgatgctgattctgatgatgag

SEQ ID NO: 140703 - DNA, 377 bp, Arabidopsis thaliana
ctctattgaaaaaatcagaaaccctaaaatcgccactctctcgtctctcttcgcggtccattctgcttcatctctcccggcgaaaccttaatcgaacagctcggattcgatcctattctctgttgttttctaagaaagatggagtggaatcgggagactctagtgttcctttcgcaatgttttcttaacacgctctctccgataccggagcctcgtcgaacggctgagagagcactctcggatgctgctgatcaggctaactacggcctagccgttctccgtttggtggctgagccagcaatcgatgaacagacgcgtcacgccgctgctgtcaactttaagaaccatctccgttcgcgatggcatcctgctggtga

SEQ ID NO: 140704 - DNA, 139 bp, Arabidopsis thaliana
aaccgcccaagcgtccggaagaactttgtgtttagagattatgtacattctgaaatcgagtagatttgttgtgtatatgtataatcatcatacaaagtacaaacattgtaaatcaaaatccagaggaacttttagcact

SEQ ID NO: 140705 - DNA, 144 bp, Arabidopsis thaliana
ctcttagttgattaaactgagattgtagcctcgcatttgcttgagatttttcgttggctgaggactctgaatcctggatcttatctcccatgtttgcatctgtagtcacagttgcatttccacgtgcccgagcgagtttctcag

SEQ ID NO: 140706 - DNA, 138 bp, Arabidopsis thaliana
ccaaaacctgtttcttcatctttttttctctttaattgattcttgtcttctctgttttgtgtgccttgtaattcttcaaaacctgtcaaaattgttacattgtatgtgagttttttcaattaagatcctgagttggtc

SEQ ID NO: 140707 - DNA, 425 bp, Arabidopsis thaliana
caaatcttaaacgttttactttgtgctgcactactcaacctcaatggccgcctcaacaatggctctctcctcccctgccttcgccggtaaggccgtcaagctttcccccgcggcatctgaagtccttggaagcggccgtgtgacaatgaggaagactgttgccaagccaaagggcccatcaggcagcccatggtacggatctgaccgtgtcaagtacttgggtccattctctggcgaatcaccgagctaccttaccggagagttccccggagactacggatgggacaccgccggactttcagctgaccccgagacattcgcaaggaaccgtgaactagaagttatccacagcaggtgggccatgctcggagccctaagctgcgtcttccctgagcttttggctagaaacggagtcaagttcggag

SEQ ID NO: 140708 - DNA, 434 bp, Arabidopsis thaliana
ccgaaactttcgagctttcacggacctacaagagcgtcactatattctaccaatgctcctctgtgcttcctaacctttctagctatacatgtcctgagataggtcccatctcagtgtctgaaagccctgaaaaatatcctgagagctgtcgttccagtttcaccgtgaaggttcccacgagtttcgatacaaaagagaaagagttgaatgtgaccaatttggaaagtgttttaagaaaaggatttgaggtgacggtggtgatcaatgagaatacatgtcaggaatgtttatcctctcttggaagatgtcatgtcttcaacgaaaacttaacaccaggagttaaatgtcgtccaccaagtgactctgagggttcttgtggatataatcagacctcaagtacgttcctctgctattgtaaggatccgtatagccta

SEQ ID NO: 140709 - DNA, 286 bp, Arabidopsis thaliana
agatttcagaccgaaacctaaataatattgagtaagtttattcgaagaagagatgaagagacaaagagcaatcgagttagatcgagtgaagaagacaatgttgaacatagattgggacgatgctttgggcgatgaggaagttcccgagctcgagatcatcgctactgacaaaattccgccgcgtgaacctactctttccggctatgaacccgccgtctctgtgcgatccctcagggataacgaactcgacgatcatctgaagcgtcagagatcacttcttactcgt

SEQ ID NO: 140710 - DNA, 430 bp, Arabidopsis thaliana
accagagtaaagcttgaaactttggactaaaagaatggcgtctttgggtgtgtcggaaatgcttggtactccccttaacttcagggcagtttcaagatcgtctgctccgttggcatcaagcccatccacgttcaagactgttgctctcttctctaagaaaaagccagctcctgctaagtccaaggctgtctctgagactagcgatgagctcgccaagtggtatggtcctgacaggagaattttcttgcctgatggtcttttggatagatcagagatcccagagtacttaaacggtgaagttgctggagattatggttatgacccatttggtcttggaaagaagcctgagaactttgctaaataccaagcttttgaattgatccatgcgagatgggctatgttaggagcagctggtttcatcattcctgaa

SEQ ID NO: 140711 - DNA, 369 bp, Arabidopsis thaliana
cggacgcgtgggcggacgcgtgggccatggctcagtatatcccgatgcttgagtactatagcggcgggttaccgatggcttgcacgatgtatgcatcgtccgagagttactttgggatcaacttgaaaccaatgtgtaaaccttctgaggtttcttataccattatgccaaacatggcatacttcgagtttctccctcatcatgaagtcccaaccgaaaaatccgaacttgtggagctagctgatgtcgaggtcgggaaagagtacgagcttgtgatcacaacctatgctgggcttaaccgttatagagttggtgatattcttcaggtgactggattctacaattccgctccacagttcaagtttgtgc

SEQ ID NO: 140712 - DNA, 436 bp, Arabidopsis thaliana
cccaagcgtccgctcggaattgtttttgcagaaagtctctcatctgaactcagaaaatctccgagttcgtatatcttctccgtttgagcaatggcgttggtcatgcacacatacaagggaaacaaaggtgccaataaggcacttattgctgcagagtatgcgggtgtgaagatcgaggagtccgcagactttcagatgggcgtcactaacaagtcacctgagttccttaagatgaaccctattggaaaggttcctgtgcttgagactcctgaaggtcccatatttgagagcaatgccattgcccgatatgtgagccgtaagaatggtgacaactctttgaatggatcctcccttattgaatacgctcacattgagcaatggatcgatttctcctcattggagattgatgctaacatgttgaagtggtttgctccaa

SEQ ID NO: 140713 - DNA, 280 bp, Arabidopsis thaliana
cggacgcgtggacggacgcgtgggcttccctgatcgtgtcgaaatcctgtgtttaactggaaccgagtcttttgatgtaaaaggtcaacaactcataaagacacttcaaaaaggttttccgacaaaattcttatcttctcagatgtcttccaaattcgggttaacgggtggaataccggagcgacgtgttcgacccatctgggatgcaatcgattctcgtcagttcaagaatgctctaaagcttgtcacttcgcttctcgctaagtaccctaaatctcct

SEQ ID NO: 140714 - DNA, 211 bp, Arabidopsis thaliana
atagcagccaaaagcaagggacaaatccaaagagaacttcttgacttaaaaagaaaggcacttgccttcaagcgtcaagggaaaactggagatgctgatgaattatacagtaaggccagtgttttggaggcacagctagcagaactggcaacccccaagatggagatgaaaggctcagcttctgcaattaaacctgaaaactacatggatg

SEQ ID NO: 140715 - DNA, 307 bp, Arabidopsis thaliana
gcttaaagagcaaggacaagatgtggcacgaagcgagaagatcggagaagaaggttcacgatatgatggacgctgctcggaaaagagcacagcggcgagctatttacttagctaaacgccgtggagatcctattcagtcgattcaagccgttggttcccgctaccgagtattccgtgatgatggtctttaccaagccaccgaagatcaacagggcttgattccttggaatgggaagcatgatgttatgattgatagatttgatggtcgtgctcttctggattttgtgcgtgaggctggttcgagaag

SEQ ID NO: 140716 - DNA, 219 bp, Arabidopsis thaliana
cgcagattacgtttctctttcaccggttctcgcctactgacgtcttccttccattctttctctcatctgataaccaacctccacatgtctctctcgtcggactccagcgttcctactgtttcgacggtcactatatcctactcagagctcaacgagagcaacatagatttgtctgcaatgattgaatatcgatttggacctaatgtacttggaatcctc

SEQ ID NO: 140717 - DNA, 99 bp, Arabidopsis thaliana
cccagattcagaacgggtagttgttttgtaaaatcgtaaagcaaattgtaccacattatgcgtgcagcttaagatgatgattctatttgtttacatttg

SEQ ID NO: 140718 - DNA, 271 bp, Arabidopsis thaliana
acggacacgtgggggcacatagcttgacatgtatggatctttatgtgtttgcaacgccatacaggatcacttgggactactatttctctgccatagatcatactttgaactttgattcgtgggaagagaaagctgaattggaatatgtgcaggagcatggcgtttcagtgtttctaatgccatcaggaatgcttgggacgttgctatctttgagtgatgtgttacctcttttctccaatactgcttggggacagaatgcgactttggcgtt

SEQ ID NO: 140719 - DNA, 427 bp, Arabidopsis thaliana
tattaaattactagacttggtttagttattagattaaataacaaattattaagggaatataatcttgattgattaatctaaattgttgtagtttgagatcgttgttgagccggatccattgttgctagtcctatttcttaaaatccaaccgagttgccaaggtgagggtaggatctgtggaaacatagtatcacctttacttttgtatttctgaatttcatttgtataagattagacattgggtgctgattgttaaaatgttaggattatatattaaatattgttgattcagtaatcaaacaatgaatttgtactaagggatttagacaaattcactcctctcttagctcacaaataatcaaaggaaaagaactaggttgcttaaacaaaaagctagggtttgctctgtaatagtagtctcttgtat

SEQ ID NO: 140720 - DNA, 283 bp, Arabidopsis thaliana
tcccagacggcctagctgcaggcggaagtcaattcacgagtgactaatggcaatcgtagtacatattgatcattttgcactaatagaaaactttttggtggaaaagtcacggtatgtggaatatcatcgctcacaataattacagacaagtctacataacacaaaaaggcaggatgcccgtgacgtgtacgtgtaagatgaaccaaatcctcattgcatttgatttttccattataaggggcacgtacatgttcggcagtacctcctgtaaatactccgccgg

SEQ ID NO: 140721 - DNA, 420 bp, Arabidopsis thaliana
caaaatttgaagaagaagaaaaacctctgagcttccaatttcatggcgcttcttcagagagcttcttatctgcgtctctattatttacggctcatgggttctcgacctcgtctcttctcgagctctctctctcctgctcttcaccgtcacagctcgacgctctcctcgcctccattttcctctccaagtcccaggttaaagtttcagttaaccagtgttttgagtcaaagactgatacaacgaaatgctatttcatcgaggttcttgtctactgaggcttcccaagagactaccacatctaagggttacagttctgaacagattcaagtgctgggaggcttataccctgtgagaaaacgtccaggaatgtatatcggtagcactggatctcgtggtttgcatcatttggtttatgagata

SEQ ID NO: 140722 - DNA, 233 bp, Arabidopsis thaliana
tgtgcttagaaacatagagagtagcttaatcaagctgaagcaagatggatcggttacagtggcacagtgaatcaggaaccaagggcacacttctgagtattgaatatatttttatacaacaaaacatctatttagaaccaaggggacaagtgaatctaacacttttttctttattgaacaatttggttcgttgtgttgtaactgttgttcattgaaagcttcggttcgttttc

SEQ ID NO: 140723 - DNA, 523 bp, Arabidopsis thaliana
gtccgaaaatatttctcttacttacactttcttcatcttcttcacataaaccctaaacccctttttctcgctctcttcctggtttaaaatgttctctccattgacgaagagagctaagcaaagctcacgcaacgaaaaaactccacgcaatcgagtccctccgccggattctccagtaactccggcaactcaaaatcggaacaatttcatctcagatcgtcccgccactggaactcctgctccttgggctcctcgtttatcggttctagctagagtttctcctggaaacaatggtgacaaaggagttgattcagatcaattaaagcctgtattcgttggagagtttcctcaattgttgcgcgatgaacaaagttatcctggtgatgcttgtgtatccggtggaatggataaagagacctgtctttcttggtttattactggaagtaaagtttttgtatggagtcatttgacgactttaccgtcgagaaaatgtgttgttcttgaacttcctgttgttgttttg

SEQ ID NO: 140724 - DNA, 378 bp, Arabidopsis thaliana
aaaaaaagctattgtttgaaagaagaagaagttaactatggcaaaggatgtggaagccgttcccggagaaggatttcagacaagagactatcaagatccgccaccagctccgtttattgatggagcggagctaaagaagtggtctttctacagagcagttatcgcagagttcgtagccactctcctcttcttatacatcaccgttttgacagtcatcggttacaagattcagtccgatactgatgccggtggcgtagattgcggcggagttggaatcctcggtatcgcttgggcctttggtggtatgatcttcatcctcgtctactgcaccgccggtatctctggtatgatccttctttaatcttgattttggtttgg

SEQ ID NO: 140725 - DNA, 267 bp, Arabidopsis thaliana
accacgcgtccgcccacgcgtctgcccacgcgtccgatttgctctctctctctcatatccgagtcaagctttccgatttgcgatggacggtggagcggtaggatctcagcagcctcaccttattctagccaacacgcgcttcctcatcactcagccatatgttccatacatcgagaaagtccagctcaagtctgaggttttggatttcatcagatcccatggtatgagctccattgtacgaaaccctaaatgcctcttcggtgctgg

SEQ ID NO: 140726 - DNA, 174 bp, Arabidopsis thaliana
cccacgcgttcgcggacgcgtgggctccatgcttggaaccttcaaggctgaaatgaacattgtggacactgagactatttctgttgatggtaagctcatcatggttgtctccaacatatagcctcttatgcttccatgggctgagctcggcattgacattgttatcgagggaac

SEQ ID NO: 140727 - DNA, 305 bp, Arabidopsis thaliana
  unsure (1)..(305): unsure at all n locations
ctaaaaaacttgaatccgatcttcntcttcttcttcttcttcctctgcttcttgtgttctctgctgctgctgctactactggtttcttgcaatggtaactttgagtatatttgaaaacctgattttgatgcgccgtatatgacagatttttgtgaatactgagggctatttttcttttatcactaatctttgttgtttggtattgatgtagttaatcatttgtagttgtatgttgttatttttggtgagatttaagccctgtgatgatgactctaatgagtttgagtggttccgcttggtttttt

SEQ ID NO: 140728 - DNA, 349 bp, Arabidopsis thaliana
cttactaactaaagagccttttacttgcgccacactctcaccgcaatggccgcctcgacaatggctctctcctctcctgctttgaccggaaaggccgttaagctatccccggcggcctccgaagtatttggaacctgccgaatcaccatgcgcaaagcctccaagcccaccggtccatccggcagcccatggtacggatccgaccgagtcaagtacttgggtccattctccggtgagcctccgagctacctcactggagagttccccggtgattacgggtgggacactgccggtctatccgccgatcccgagaccttcgctatgaaccgtgagctataagttatccaca

SEQ ID NO: 140729 - DNA, 374 bp, Arabidopsis thaliana
cggacgcgtgggcggacgcgtgggcggacgcgtgggcggacgcgtgggttcagacccagaaggtactggaggattcattgagccaagatggctagcatacggagagatcatcaacggacggttcgccatgttgggtgcagctggagctattgctcctgagattttaggaaaggctggtctgattccagcagagactgctcttccttggttccaaaccggtgtgattccaccagcagggacatacacttactgggcagacaattacacactctttgttctcgagatggctctgatgggattcgctgagcaccggaggttacaggactggtacaacccaggatctatgggaaaacagtacttcttggggttagaga

SEQ ID NO: 140730 - DNA, 381 bp, Arabidopsis thaliana
atcaaaaccatcacagcaaaaaaaactcactcactagaaaagtttgaaaatggcgaaggcagataagagaccagcggagaagaaaccggcagagaaaactccggcagccgaaccagcagcagcggcagagaagaaaccaaaagccggaaagaaactcccgaaggaaccagccggcgccggagacaagaagaagaagagatcaaagaagaacgttgagacatacaagatctacatcttcaaggtgttgaagcaagttcatccagatatcggaatctccagcaaagccatgggaatcatgaacagtttcatcaatgatatctttgagaaacttgctggtgagtcttcgaagcttgcgaggtacaacaagaagccgacgattac

SEQ ID NO: 140731 - DNA, 140 bp, Arabidopsis thaliana
cttgattgtgtgtgtgattttgttttttcatttttgtgagataacattacaaatttatttgatcagagagttgagaatccgatagaataggtcacgcaaagcggaaaacaaacgttaagtcgggaaattaaaacccaaga

SEQ ID NO: 140732 - DNA, 384 bp, Arabidopsis thaliana
cccacgcgtccgcccacgcgtccgcgaaaccctagtcgatttcgagatccaaccaactctgctccttatctcagcttgttgaatttgcgaagtatgggagacgctagagacaacgaagcctacgaggaggagctcttggactatgaagaagaagacgagaaggtcccagattctggaaacaaagttaacggtgaagccgtgaaaaaagggtacgtgggaatacacagttctggattcagagacttccttttaaaaccggagcttctcagagctattgttgactctggatttgaacatccatctgaaggtaataaacgatatttcaatctattggtttggagtgagcttaaacatgtgctaaagccaccaatttaaaagatatgg

SEQ ID NO: 140733 - DNA, 377 bp, Arabidopsis thaliana
gaaaccaagtttgtatagaaggaaatggaagctcagactggaagtcactcgagttcattaagaggtcagaagaagtagctgttgttatcgacgaaacagaagacttggggtcaggtttcgatgatgctgagatattcaaaggggaaaaggaagcgagttacgaaggcggttattcggagaatctgttcacttgaacttgcaccttttcctgtaatcatcatagggtttgattttgtgattctttcttagggtttgatttgtattattaatagaagtctttaccagctttaagttgtatcccagaaactaatagttactcttcttcttcttcttcctcttcttcttctttactcagtaatgagaacaaaaaccatttt

SEQ ID NO: 140734 - DNA, 394 bp, Arabidopsis thaliana
cccacgcgtccgcccacgcgtccgcccacgcgtccgtgcagtttcagatttataatcgcttgcctaagtttcaattcatcttcattccgggagaaaaagtcgcgatacttgagctactcagctttagggtttaacatgttaaggtctctgatttggaaacgatcacaggcatattcttcagtcgtcacgatgtcttcaatcagtcagagaggaaatgaaaggcttttgtctgaagtcgctggttcacattcaagagataataagatattggttttgggaggaaatggttatgtaggttcacacatatgtaaggaggcactgagacaaggtttctctgtatctagtcttagcaggtctgggagatcttctcttcacgattcgtgggtcgatgatg

SEQ ID NO: 140735 - DNA, 349 bp, Arabidopsis thaliana
gcggcattagaagaataactttttcatttctctctcttcccgctcctccttcctccttctcctctctctttgacattccaccgagaaaaaaaaagaaagaagttgaaatttcaactctctctctctcaccctccgacccatttctggtcttgtcatttctacaattagacttctcttagatttcccttgttcttgtctctttccgcggatttcgattccgacacaatcccaaacaagatagctgtttattcgaaataaagaaaatggaaggagggtctgttaatgaatcgcattctaatgcggaccaaatgtttgacacaactatagaagagttatgtaagaatctctg

SEQ ID NO: 140736 - DNA, 399 bp, Arabidopsis thaliana
cttcttgtttccttcgctcgattctcttctcttctcctactaaccttcgttcaaatcaccatctccccactttcttccccaagaattatctcatttgctctcattccacttcttctcgcttcgaatcgctctcggtttcatcgatcggaactggatctaccaagaaatcatccgatactcggagaaaggtaaagagcatggctacgacaaatataggaaaggaggagaagaaaagagtcgagatttatgatctcgaagagaatttagtgattgatttggctaaattcacagcagatctctccgataagttttgtaaagagagaggcgctttcaccgtcgttgtctccggtggctctctcatcaaatcactccggaaattagtagaatctccttacgttg

SEQ ID NO: 140737 - DNA, 203 bp, Arabidopsis thaliana
ctggttcaatttccatggacggaccttgacctctctgcttcccttcgtgcattttctctctctcacgatcctctctctttctagtgtttgtttgatcctctgcgtactctgttcgtcttcgcgcttcagataaaacaagtcctgcagattgaagatctgatgtcttatcgattgcgaagtgtggataaagatgaactggttac

SEQ ID NO: 140738 - DNA, 381 bp, Arabidopsis thaliana
gctcgaagaaagagacgaaaatggcactgagaaatgcaattcttcgtcacctgagggttccggtgcaaaccctaggattgaatcagtctaaaattgggttccttggtacgatccggtcattttcttcgcacgatgatcatcttagcagagaagctgtcgtcgatagagtactcgatgttgtcaagagcttccccaaagtcgatccctctaaggtgactcctgaggttcatttccaaaacgatttgggattagatagtttggacacagtggagatagtgatggctattgaagaggaattcaagctggaaattccagacaaagaagctgacaagatcgattcttgctctctcgccattgaatacgtttacaatcatccaatgt

SEQ ID NO: 140739 - DNA, 405 bp, Arabidopsis thaliana
cccacgcgtccgcggacgcgtgggcggacgcgtggggaaagttcttcaaattcgcggttgaattttgtttctcggagaaattatcatcaccctatacgatcacattatcgcttctgagatcaacgacgatgcagcaattactgttcgctgttgttctcttcgaggttgttgtgataatggcgctttccttcaagacgccgattaggaagctgttgattatgagcttggatcgttccaagcgtggtcgtggaccggtggtgattcagacggtttctgcgacggttattgtgcttctggtgacgagcgtgtacaatatgatggggatccagaagcgttggatcgaagatggtgtagtgaatcctacagatgaggttatcatggctaagcatctccttgaatcgactc

SEQ ID NO: 140740 - DNA, 379 bp, Arabidopsis thaliana
cacacgcgtccgcggacgcgtgggcggacgcgtggacggacgcatggggattttaaactgttctgatctatttgagatttctcaattccactcaaaatcctttaaagcttgtctctttttggtatctcggaatcactttggggaaatcaagaggagaagtgacaatggatgcgtttagaagacaagcgagtaagcttagagaccaagtcgcaaagcagcaactggctgtgataaagcaattcagtgggactggttatgaaagctcagatgtaatggtgattgatgagcttgaaatgcaaaggcatcatcaactcgataaactttaccgctctactcgttctgcaaaggagttccagagagatattgttaaagcagctga

SEQ ID NO: 140741 - DNA, 401 bp, Arabidopsis thaliana
ctggtcggctggtttatccataagattttgaaacaacgtaaggtgcctgagaagatatgtacatattctgtaatggtttggcttttcaatccgtttacattcactattggaaccagagggaactgtgaacccatcgtttgtgccatgatattatggatcattctctgcctaatgcaaggtaatttgttacaagctgcattttggtacgggcttgttgtgcatttcagggtctatcctattatctatgccttgccaatcatcctggttcttgatacccaggtatttagatctggtcaaaagccggctcttttgtattggaataccggtcaggccaagacacctgccagtaacatggagagaaaaacattcctcttcaatctcttgaccaccttgaaaagttt

SEQ ID NO: 140742 - DNA, 387 bp, Arabidopsis thaliana
gtcgccggtgtccaccgttttagtcttcctctcccgccgaagtgttctctccgtacttttagcgtcctcgccaatggcaagcgcactcaatctctgctaccacatcacttctccgtattcaaccaaagtcaccgacttgttacctccttgagtcacaatgtttccaacaaatctgatgcagaggcagagcgttcctgtgatgaaggagaaatgttggataagaataggataagcaagaaaaacccgtttgtttcggaagagcttctcaagaagttgaagagatatggactctctggaatattatcctatgggttacttaatacagtctattactctacagctttcctcttggtctggttttatgtggctccagcaccgggaaaaatg

SEQ ID NO: 140743 - DNA, 337 bp, Arabidopsis thaliana
gcggcttttaaactatgtgaaggaggagaacctccataacaagaagcggattctctcagttttccggcggcggaggaacacaaagccaccggtttttagacacacagatttcattttcagttgttaaatggtaactagagaaacgaagttgacgtcagagcgagaagtagagtcgtccatggcgcaagcgagacataatggaggaggtggtggtgagaatcatccgtttacttcattgggaagacaatcctctatctactcattgacccttgacgagttccaacatgctttatgtgagaacggcaagaactttgggtccatgaacatggacgagttt

SEQ ID NO: 140744 - DNA, 127 bp, Arabidopsis thaliana
accaacatgtgccgatcctgatctgctttccggtgtgatccgcggacaatggcagctcaacggatacattgtttcggattgtgattcggtagatgtgttgttcagaaaacaacactatgctaagact

SEQ ID NO: 140745 - DNA, 318 bp, Arabidopsis thaliana
taaccccggagggaagaaatggagacatggagggaaatgagtttacggacaacggttccatcaaagagactgtagatgctgctgttggaatgctcaacgaaaaaagagctcatgagggagaagtttctggtgaagaaaaacgaagcaacgagaattgggattcatttcagaatattttgatgaggcacgatgatggctcacatgtgcattcaatggatgtcatccgtcaggagcatttcacacatagaggcgctagtgtgggtgcaaattctaatgggttgcaaacaaagaacactgcctccggtgattccatcatca

SEQ ID NO: 140746 - DNA, 201 bp, Arabidopsis thaliana
accacgcgaccgcccacgcgtccggacaaagtagctgatgtccttggggctcttccttctaaagatgcctcatgggacgatctaatcaatgtttctgtgcaacttcgtttgaacaagaaatgggattctatgatcttggtgtgtgagtggattttaaggaagagctcctttcaacctgatgtaatctgcttcaatttgctt

SEQ ID NO: 140747 - DNA, 389 bp, Arabidopsis thaliana
gtcagagagaagtagagcttttgagactgagactggtgacgactctgtgtctgggcatcaagaagagcagccgcttgctgaagatattgctagctcggttcagcggtcagcctctggtgaatttatgagaaaatgtgaaggatcaggtgattccgagtctgtgttggacaagtacaatctccatgatgaggcacagtctaagacaggttcctcgagtgccgggaaagatatggtacaggattgtgacatctctaaagtatccgaaggctcttctagcttgagtgctggatcatgagagatgaaacgtacgtctggtggtaatggtggagatgatgagaaccagactgctatcgaagatggatctatccatcaacgttgtgaacatgcat

SEQ ID NO: 140748 - DNA, 380 bp, Arabidopsis thaliana
agcttttgttcattcatcttcagttgactccaatggacatagcatgatcaaaacattcctctcagatgaatcagctatggtgacggcctatggttttccagatattgaattcaacaaatactctactgtaaatagcaaagatggctcttcttactttttcgttcctcagattgagttagatgagcacgaggaggtctctatattagcagttacattggcatggaatgaatctctctcttacacagttgagcaaacaattagttcatatgagaaatcaatttttcaggtttcttctcatttctgcccaaatgtagaggatcactggttcaaacatctaaaaagttctttagcgaagcttagtgttgaagagatacatccac

SEQ ID NO: 140749 - DNA, 251 bp, Arabidopsis thaliana
atccgagatagaattaagggtaggttagaggaaaaccatagtggtaatcaggaaagaggtttcggggctccatgggcgagaagaagagaaatggaagacgaaagaaaatcagctcctaaaagcagcagagaggaaagtaagccagagccatctcttgggaagaggaaaagctttgaagaggatcatcatagtcataagcgatcaagggattcatttgcagctccattgcctttcagtgagattctcaagag

SEQ ID NO: 140750 - DNA, 358 bp, Arabidopsis thaliana
tgaagatgaatatgacattcctttggtttctaagagaaccagtaatccagaagctacaacaaatcgtcatagccctattaataatgctatgagaaactcggctattggttccatcaagtcctcaccagcaatgaggtctccttgaacaagcccgactcggtcagcttcttcagccactagaagttcaatgatgaaaccagcattaccgtcatcttcatctgttcaacgttcgactctgaagtcaccgttgcgagatgatagatctgttgttgctaaagagaggaacggttttgggaaagctccttctgtgtctaaaagtgatgattaggattctgaagatgataaaccattgagtgct

SEQ ID NO: 140751 - DNA, 143 bp, Arabidopsis thaliana
tgaagaccaaagttttcagtctctttattgttttatcgttttcttttgaagtattttagcatctagtttgtcggagatagaaacaagttttagcaaaactaaaagggggatacaatgtctgtcagatgctcattttagacttt

SEQ ID NO: 140752 - DNA, 426 bp, Arabidopsis thaliana
aggacgcgtgggcagagatctcttcatggctccaattactgtcggcgatgttgtaccagacggaactatctctttcttcgatgaaaatgatcagcttcagaccgtctctgttcactctatcgccgccggtaaaaaagtcattctctttggtgttcctggtgctttcactcccacatgcagcatgagccatgtgcctggattcattgggaaagcagaggagctgaagtcaaagggtatcgatgagatcatttgctttagtgtgaatgatccatttgtgatgaaggcatggggaaagacataccaagagaacaagcatgtgaagtttgtagcagatgggtctggagaatacacacatcttcttggacttgagcttgatctcaaggacaagggtcttggtattaggtcaaggagatttgctctgttgct

SEQ ID NO: 140753 - DNA, 229 bp, Arabidopsis thaliana
agaagattgaggttagctcgaaggagcatacctatgtgattggtttggaagatgaagaagagaacaagagtgtgatggttgaggttagaggacttgagatgcttgttggaaaggattttaacatgtcctggaaaatgggtatcaattaatttacatgtgagagttggtaaactattgaggaggagaatgagattatttaaaaaaaaagggtaatgttttgttcttctcc

SEQ ID NO: 140754 - DNA, 422 bp, Arabidopsis thaliana
actaattcaaattttctccattctctcgttccaattattatttacttttttcacccaataaaaaaaaaaccatgcattcacttccggtgaatctcgtcctcaccgtacttacggtgttcctaacatcaccggcgcaagttatcggataccgtccatatccaccaaaaaccaacggctccgatcaaatcttcgacgcttcaaaaaaattcgaaggctcatcgaatctcgtccgcctccgttaccacatgggtccagtcttaaccaacaacatcaccgttcacccaatctggtacggcacgtggcaaaaatcccagaagaaaatcatccgtgagttcattaactcaatctcagccgttggatctaaacacccttcagtctccggttggtggaaaaccgtacagctttacactgaccaaactgga

SEQ ID NO: 140755 - DNA, 430 bp, Arabidopsis thaliana
ctcttccttatctcttggaaaccaagaagcatggatcgtgtggtcttcttcttcctcatcgcagctacgttactagcaggttctctcggatctaccgtcatctccggcgaggttaccgacggtttcgttaacccgatcaggcaagtcgtcccggaggagaacgatgaacaactcctcaacgcagaacatcacttcactctattcaaatccaagtacgagaagacttacgcgactcaggtagagcacgatcatcggttccgtgtcttcaaagctaacctaagacgagctaggcgtaaccagcttctagatccgtctgccgtccacggcgtcacgcagttctcagatcttactccgaaagaattccgccgcaagtttttaggactgaaacgccgagggtttcgtcttcctactgatactcagacggcgccta

SEQ ID NO: 140756 - DNA, 152 bp, Arabidopsis thaliana
agaaaacaaatctgtatttttaattcacacaagtaacaacaaaatcttgaaaatgttcagagagattgaaacaaatagacatgatacataatcaagattttgttgttacttgtgtgaattaaaagtaaagaaaacaaatctgtatttttgct

SEQ ID NO: 140757 - DNA, 424 bp, Arabidopsis thaliana
attcgtcagctcactctttcctctccagaagaaaccctagacatctcatcgccaaaatgttcagatctatgctcgtccgatcttctgcctccgcgaagcaggcggttatccgccgtagcttctcctccggctccgtccccgagcgtaaagtcgccatccttggtgccgccggtggaattggtcagcctcttgctctcctcatgaagcttaatcctcttgtctcttccctctccctctacgatatcgctaacactcctggagttgctgctgatgttggtcacatcaacaccagatctgaggttgttggatacatgggcgatgataacttggccaaagctcttgaaggagctgatctcgttatcattccagctggtgtaccaaggaagcctggtatgacccgtgacgatcttttcaacattaatgc

SEQ ID NO: 140758 - DNA, 189 bp, Arabidopsis thaliana
gcaaggtttaaagcttcttttaagatgggatgtctttaatatgtagaacctcgtttttggttataattttcgttgcatgtctctcttctcttgtactattcacacttgttgtttgctgtatcttcttcttcagtttgctttgctacgattgtggtttttggagacattatagctcattaactgtttgtg

SEQ ID NO: 140759 - DNA, 427 bp, Arabidopsis thaliana
  unsure (1)..(427): unsure at all n locations
cccacgcgtccgcccacgcgtccgcggacgcgtgggaaaaatctatcaataatcacttcctctctctctctctctctcttatacaacactcaagaagcgagacacagaggagagattttgtttcagagatcaatggccgggactggattgtttgctgagattcttgatggagaagtatacaaatactacgctgatggtgagtggaaaacttcttcctcaggtaagagtgttgccatcatgaacccggccacgaggaagacacagtacaaggttcaagcatgcacgcaagaagaagtgaacgcggtgatggaactggcgaaatcagctcagaaatcgtgggcgaaaactcctctttggaaaagagctgagcttcttcacaaggctgcagcaatccttaaggacaacanagctcccatggctgagtctc

SEQ ID NO: 140760 - DNA, 390 bp, Arabidopsis thaliana
caatcagaaaggctgtcggggagaagataattccttcaacggataatcgaaagcagtatcacagtaaagctcagcgagtaagattgtctttgctctttttgagaaaatctcatgttgttactatgatataacgttgcagaagcatgaagacatacatcagttttttccttttttcttgagcgaaactaggaaggacaaaatacatttaaatgatcttataaggcactttactccatttatacctttttgtactctcgtttccctttcagttttgaatataatgactttgatgtttttttgctgtgcataacaggaaatatttgaaaacaacaggaaagacataactgtggccatgatgaagaattatccacagcttctacgtaaattcat

SEQ ID NO: 140761 - DNA, 401 bp, Arabidopsis thaliana
caaaaccagtggagtccaatctatgatgttgctgctatacttacctccatccagtccttgctctgtgaccctaatccgaattctcctgcaaactcggaagctgctcggatgtacagcgaaagcaagcgcgagtacaacaggagagtgcgtgatgttgttgagcaaagctggactgctgactagtagtagtttgttgtaagcgttgtagctctctctactttctctcaatcacgattcagcaacagctttcttctcttttcattcatgtcttgtgtttccaaaactatttaagtgattccatgctttgatgtaacccaacatccttaaaaaaacaactttgtaccaaaccatctgaattattcacttttgtgtatatatgtattacgatttacttgctagct

SEQ ID NO: 140762 - DNA, 343 bp, Arabidopsis thaliana
  unsure (1)..(343): unsure at all n locations
cttcggtgaacaatcaatctcgaagaagacgaacataaaattttcaatttctctgtaatcttcgcttcttgcgaaaccaattctctatgtcaggtaatcaagaaccaatcttggtgaaagaagagagtgtggttggtataccaacaccactcttgaagcttaaaagttggcaatggtgggttcttgtatccgttaacatctttttccttattggtggtcaagctgcttcggttcttcttggtaggttttactatgatgaaggtggaaacagtaaatggatggcaactcttgttcaaacggctgcttttcctatactctatatcncgcttttgctacttccgtc

SEQ ID NO: 140763 - DNA, 390 bp, Arabidopsis thaliana
cccacgcgtccgcggacgcgtggggttcgagaaaaatttcgattctcttgctcgtaaaagcttcttttgattctctttgactctgttttgtggatagctcctgaagaagaagaagatgatggtagtgaacagctttgatctatggcaaaaagatgttttcttctctgcagctgaagaggttcaaaaatctacagatataatggagtctgcttatagattgtggattagagagaagaaagatgagatttgtaaggaacttcaagcagctttaggtacagctaaatggcagttggaggagtttgagaaggcagtgagattgagtcataaacggtgtggggataatgattcttcatccacacggcataaacagtttgttaccgctattgaaaa

SEQ ID NO: 140764 - DNA, 392 bp, Arabidopsis thaliana
caacttttgtcccacaacgcagaaaagtcctctctttctctctctcgaataataatttttcatttgctgcgtccttttggtgcttgaagcgatgaccatggcagcaaatctagcgcgacggctgatcggaaaccgatcgactcagatccttggagccgtgaactctagctcaggtgcggctagttctgtcgctagggctttctgctcctccaccactccgatcaccgcaactctcttccctggcgatgggatcggtcccgagatcgccgaatctgtcaaaaaggtgtttacaacagctggtgtaccaattgagtgggaagaacactatgttgggactgagatagatccgagaacacagagtttcttgacatgggaaagtctcgaatctgtgc

SEQ ID NO: 140765 - DNA, 391 bp, Arabidopsis thaliana
accacgcgtccggggaatttggataaagctgcctcttggattggctaatcttgtggaggctgcagttagtgaaggatttagatatcaccacgcggagcctgagtacttgatgcttgtatcttggatctctgaaactcctgatacaatcccagccaatgcttctcatgttgtaggtgctggtgctttggtcatcaacaaaaatactaaagaggagaggagtgggtttttcaaagataaaaatgtgtggaagctgcctactggtgttatcaacgagggcgaggatatatggactggtgtagctagggaagtggaagaagaaactggaattagtgcatattttgtcaaagtactggctttcaggcaaagccacaacgccatcttaaaaaagaaa

SEQ ID NO: 140766 - DNA, 397 bp, Arabidopsis thaliana
atagaaaatggatcagttcaaaggtgagcctcgtctacccaagttcgccgtccccaagcgctacgatctccgcctcaatcccgatctcatcgcctgcaccttcactggaactgtagccatcgatctcgacatagtcgccgatactcgtttcatcgttctcaacgcagctgatctctccgtcaacgatgcctccgtttccttcactcctccttcctcctctaaggcgcttgcagctccaaaagttgtcttgtttgaggaggatgagattctcgtgcttgagtttggtgagattcttccccatggagtgggagttctgaaacttggtttcaatggagtactaaatgacaaaatgaagggattctacagaagtacttatgaacataacggtgagaagaag

SEQ ID NO: 140767 - DNA, 390 bp, Arabidopsis thaliana
accacgcgtccgctcagtcgaaaacaatggcgtcttcttcagcgacgctctctctctgctctactttctctgctcattgcaatgtcaattctcgccgttctagcactatcctctgttctctctctaaaccttcgcttaatttggctaaacctctgactggatttctttctccttccactgcgtcgacgtctcgaaccgcattcaccgtcgctccgaaattcgcggaatcagtcgtcgaagctgaaccggagactaccgatatcgaagctgtggtggtttccgatgtttcggaggttactgaggaaaaagctaaacgagaagagattttcgctgttattatggttggtggacgccaatacatagtgtttccagggagatatctctacactc

SEQ ID NO: 140768 - DNA, 381 bp, Arabidopsis thaliana
gtcgctctcttttctctatctcaatctcaccttctcaatttacagttttgccatccatcaacaacgagagacgacgccttgctatcgccgctcgatctcaccgactatcacgccggaagattcgtaagagacctcctgatagagatatgtcctccatagtttcaatcccggagcttcctcgccggcgggattctgaggaaagcctgcttttagattctcgaatcagtgtagctgaaggagatacatcgaatacagatgtagaaggagacagagatactacttctagtattagaacacagcctccccctcgtaaaggaagaaatcttagtagcagcagaatcaaattctacggtgttgaattatcaccagataatgttgctg

SEQ ID NO: 140769 - DNA, 392 bp, Arabidopsis thaliana
cgaaaaaccgttatgagagcatagtgctactagtggatcggtaaacaataaatgccgtaataaaaatctaaacgtcacgcgcgtgatgaaaaaacaggaagtaaatcgtcgacgtcgttattcaactaccatttctggatcacaactcccacacactcttttaaatcaaaacaaaatatctctttcctgttagagacaatggacggattgatcagaggtttggtcgacgtggctatcggaggaaaccaacgccgcggcggagacgatggtggtgatgatgaaggcaactcgagggacgagagatccagatctacttgggctaatgtggtttccggtgaggaagaggatcagaatcgcgcgggaggatcgtcgcacggccgtcgccagaattc

SEQ ID NO: 140770 - DNA, 263 bp, Arabidopsis thaliana
ctagttctaagatcgcgagccggccgcccttttttttttttttttgcaagattgataaatatatcgtctgattgataatttcgatctgcatgactatatgaattggttatgtttgttttgatagttaatatctgttattttcatttttgtataacaaataatgttatgtttgcgaatgaattaagtttccattttcttactaaaaaaaaaaaaaaaaaaaaaaaaagaaaaaagagaaaagaaaaaaaaaaaaagggcggccg

SEQ ID NO: 140771 - DNA, 396 bp, Arabidopsis thaliana
cacattttgttcacacagagatagacatggcttccgatataaacagaagaagatcgttctctcttctagtcttgattattgtgatgctttatgggcataaaggtgattcaaaatgtgatttcgaagcaattttcaacttcggagactcgaattcggacactggcggattttgggctgcttttcctgcccaatctggtccatggggaatgacttatttcaagaaaccagccggtcgtgcttcagacggtcgtcttatcattgattttctagccaaatctcttggaatgcctttcctaagcccatatttgcaatctattggatcggattttcgacatggcgcaaactttgcgacgttagcgtccacggttctcttgccaaacacgtctttatttgtct

SEQ ID NO: 140772 - DNA, 100 bp, Arabidopsis thaliana
agacaatccgtaaaggctgtggagagacacatgcagacatttcatcatcgtgagaagaagaagactggtttggctggtgcacatgggacgctttctacac

SEQ ID NO: 140773 - DNA, 405 bp, Arabidopsis thaliana
cccattcgctgccttcgggatcatcctcccattcgctgccgccgacggaagacactcctcttttggggcctcgaacattgtcgtcgcagccaaaaacctttgcaaatgtcttcatcgccatcgtcggcgccggcgtgctcggacttccgtacaccttcaagaagactggatggctcttgggcctcctcacactcctcttcgtatcctccctcaccttcttctgtatgatgctcctcgtccacacccgccggaaactcgagtccctctccggcttcaacagcatcacttctttcggagatctcggcgaatccgtctgcggccctgccggtcgtctcgtcgtcgatgttatgcttgtcctttcccaatctggcttctgcgtcagttaccttatcttcgtcgccacca

SEQ ID NO: 140774 - DNA, 404 bp, Arabidopsis thaliana
aaaaaatatgaaaatcctctcactttcactactcttgctcttggccgctacggtctcccacgtccagtcttcggcatccgttccagggctcatcgaactcctcgaatcgaacaccatctttgggaacgaagccgaactcttagagaaagagggactgtccatcaactaccccaactgcagaagctggcaccttggtgttgagacctctaacatcataaacttcgacacggtgcccgcaaattgcaaagcctatgttgaagactacttgatcacttccaaacagtaccaatacgactccaaaactgtaaacaaagaggcatatttttacgccaaaggacttgccctaaagaacgataccgtcaatgtgtggatctttgacctagacgacactctcctctctagta

SEQ ID NO: 140775 - DNA, 350 bp, Arabidopsis thaliana
aattttcccgtcgtctctgaattttccctttttctcttcttcactccaccgccttccccgaatcacttcctctgcctgatctaattcaatctccttcctagctcaaagaagtcaatttacacgagcagatctctgcactcaaaactcctggatcttcatttctgggcttcaatttagagtttttttatattaaatgggttggagatacaaagctggtctgttcttgattggcactgttgttatcatatgggtcacctccgctgaagttactcaggatatctttacagcctataagcagccatttgcagtcacatatcttggagcttctcttatgattgtttaccttcccg

SEQ ID NO: 140776 - DNA, 396 bp, Arabidopsis thaliana
aggacgcgtgggcggacgcgtgggcggacgcgtgggtcggtctcaggtgggcagtgattataacttcgtctccgtgtctgttcaagctcccattcttgtggccttcacgcttcaggaacaaagaccagtatctctctgaaagactacttctcggaaattttcgtctccatggcacccgtgagggggattcttggcttgcaaagggcagtgtccatttggaaggaaagtaacagactgactccagctttgagatcattcagcactcaagctgcatccacttccaccactccacagcctcctccacctcctccgcctccggaaaagactcatttcggtggtctcaaggatgaagatcggatttttactaatctctatggtctgcatgacccatttctc

SEQ ID NO: 140777 - DNA, 381 bp, Arabidopsis thaliana
aggacgcgtgggcggacgcgtgggcggacgcgtgggcggacgcgtgggctctggcgaaagctaagaggtttcggttacggtctccatctccgatcaaatcacgaagtttctatcggaaattttcagtgatacataccgtcagagattttctttacgagagaattgtcgccgacatactaaagcagagttttgggtgggaattagtaagatttcgactttggaattgggagatctttccattatgggttctgagcaaaacgacagcacaagcttctctccttcagagccaaagctctgcgtcaaaggatgtggcttcttcggatctccatcgaacatgaacctctgctctaaatgctacagagacatccgaaccacggagga

SEQ ID NO: 140778 - DNA, 372 bp, Arabidopsis thaliana
aaaaacttcaaaccaaaaaaaataaatgggagaggttcaagaaaatcctaaactcttatatcagcttttcaaatctccatgaataatattaacaaatttgttctgatctattttattttatttttggtatcaggaagagaagaaaccagaagcagcagaggaaaagaaaatggaagagaagaaaccagaagagaaaaaagaaggagaagacaagaaagtggatgctgagaaaaaaggagaagattctgacaagaagcctcaagaaggagaatctaacaaagattccaaagaagattctgctccggcggcgcctgaggctccagcaccgcctcctccgccgcaagaggttgttcttaaggtttacatgcactg

SEQ ID NO: 140779 - DNA, 371 bp, Arabidopsis thaliana
accacgcgtccgcggataacgtttatgagatcccgcatgtaaggattgttgggaatgtttgctttactaattttcctagcaacactgctttccgagggtttggaggcccccaaggtatgcttataactgaaaactggattcaaagaatcgcagctgagcttaataaaagccctgaagaaatcaaagagatgaactttcaagtggaaggatcagtcacccattactgtcagactcttcagcactgcacattgcatcagctctggaaagagctgaaagtatcgtgcaacttcttaaaggcccgcagagaagctgacgaatttaatagtcataatcggtggaaaaagcgtggtgtagctatggttcccacaaaa

SEQ ID NO: 140780 - DNA, 367 bp, Arabidopsis thaliana
aagaacttcaaggatggttgctcgaattccgagaaattggtggaagtgctaaaacgtgtcaagaaacagagtgaacaactttcttctgcagcaaaagaccaagtggaagctgcaaaccctgtaactaacgtctctgtgtcaaaggatcattttgataggacagtaacaactctcaacattgcggttacctggtttcatctgtatcactattcaaaatccttttccattctagaacctttgtttcaaaatattcagcggctagacgagacaatcgcacttcaaatctgcttcttgttgctggatatttcactggcttgtcgtgatgctgtaaattttttggctgtgtttgactatatggacaaagctt

SEQ ID NO: 140781 - DNA, 99 bp, Arabidopsis thaliana
attacaactccatcttacaacactgaactactagttttggctgagaatttggcactgagaatgcttcctgcatttgctacaccgactggaatcccaatt

SEQ ID NO: 140782 - DNA, 413 bp, Arabidopsis thaliana
attctctagatcgattttggatttagatctctttgtttctactgcttttcatcgttggatctgcgttttgcaaagggagatacagaaaggaatagctttgaattgacaaggtttctctctaatccaaccgaatctcaagcttccatggctctcaatctccgtcagaaacagactgaatgtgtaatccggatgttgaatctgaaccaacctttgaatccaagtggaactgcgaacgaagaagtttacaagatcttgatttacgataggttttgtcagaacattctatctccattgacccatgtcaaggatctgcgtaagcatggagttacactcttctttctcatagacaaagatcgacaacctgttcatgatgttcccgctgtctactttgttcaaccaactgaatccaacct

SEQ ID NO: 140783 - DNA, 410 bp, Arabidopsis thaliana
agcctgccggagctgatctcattttcgaacaaggagacaacattacggggaaggtatcaagagacgaagtagcgcgtatatgcatcgctgctttagaaagcccgtatgctcttaacaagaccttcgaggttaaaagtacggttccgtttagcgagcctttcacggtagatcctgagaatcctccaccggagaaagactacaatgagtatttcaagactctgaaagatggaatcaccggtaaagaagctttagaacagagcactgttgcagtttaaaccaggttttatctacttttgtaactgtgtgttgtctcatcttcgttaaaaatctttccaaaagtaaaaacaacaacaaaagagtcgtgtagaaacatgtttgtatactccatatatcgtacattgtagataaga

SEQ ID NO: 140784 - DNA, 412 bp, Arabidopsis thaliana
accgaagctgaaagttttctctgacaagtctgatgatgtttctgatacaactatggacgaaatggtagagaagctagatttgaatgaaggcgtcaaagcaaagttcttccttaacttgataaacctgtgcgactcagctggtgaaaagctcttggttttcagccagtatctcattccactaaagtttcttgaaagactagctgctttagctaagggatggaaactagggaaagaagtttttgttcttacaggcaataccagttctgagcagcgtgagtggtcaatggaaacgtttaacagttcgccagacgccaaaatattctttggttcgataaaagcatgtggagaaggtatctcgcttgttggagcatctcgcatactaatattggatgttcccctaaacccttctgtg

SEQ ID NO: 140785 - DNA, 252 bp, Arabidopsis thaliana
aaaagcctttataactctttctggggtttttaattctctcaacgaacaaaaaaaaaaactcaactaatattctccatcctctttcttcagatttaagagaaagcttatcgttatattctctcttctcttttctttttgactcccacaagaagaaagcaaatttctttttctcaggattgcttgaaaactgtagaaatctttaaggtttttttacaccaataagagtcagagagagagagagagagagaaaga

SEQ ID NO: 140786 - DNA, 358 bp, Arabidopsis thaliana
gtcctcttccattttcaccggtgttaagttctctccgatcttagctccctttaactccggagatagccgccgctctcgatatctaaaagatagccggaataaagttaggtttaatccatcgtcgccgcgtctcactcctcatcgtgttcgcgtcgaagctccgtctttaattccctataatggtctttgggcggcgcagccaaattcgcataagggacgtttaaagaggaacattgtttcgggaaaagaagctaccgggatatcactttctcaaggacgtaatttctgtcttacttgtaaaaggaatcaagctggaatcagaagagcattacctagtgcctttgtggatagaactgca

SEQ ID NO: 140787 - DNA, 385 bp, Arabidopsis thaliana
accacgcgtccgagcaaatgtgttatgtgtgagtgagattgtgtgagagaaaagaagaagataagtgagagagaaagagagaaagagagaaaatgaagttcttgttccagtgtccatgttgctcttgcttctgcttcatgaaaccaaagccgggcaaaccaaaagctgttggagatacaaaaccaaaggaggagaagaagaaagaggtgaagaaagaagagatcaagaaagaggagaagaaagaagagaagaaagaagagaagaaggaaaccaaagcagagaaggctgagtgaaaactctactttgagaaaatgtaattaattatcccatttttattattatttatctgctatttgatgattatgcaagtaataacatgttattt

SEQ ID NO: 140788 - DNA, 292 bp, Arabidopsis thaliana
accacgcgtccgagctgttgagcctactatcatcgaaggaaaagtgttccgtgagctatctgagaaagagagagaacaagtagccaagaaaataacggtgatgggtaggtcatctcctaacgacaagctcttacttgttcaagcactacggaaaaatggagatgttgttgcagtcactggtgatggtactaatgatgctcctgccctccatgaggcagatataggtctctctatgggtatatcaggaactgaagttgcaaaagagagttctgacatcattattttggatgac

SEQ ID NO: 140789 - DNA, 410 bp, Arabidopsis thaliana
ctcctctccctttgagaaatccctaactctttgctcttctcttcccggcgatctatctctccgatttgggtattgaaatggcaactcctatggttgaagatacgtcaagcttcgaagaggatcagcttgcttccatgtccaccgaagatatcactagagctactcgtcttctcgacaacgagattcgaattctcaaggaagacgcgcaaagaacaaatctagaatgtgattcttacaaggagaagattaaggagaatcaggagaagattaaactcaacaagcagctgccttacttggttggcaacattgtcgagattttggagatgaatccagaagatgatgctgaggaagatggtgcaaatattgatcttgactcgcaacggaaaggaaaatgtgttgtgttgaaaacg

SEQ ID NO: 140790 - DNA, 133 bp, Arabidopsis thaliana
aagacgcgtgggcttaaagttgttagcgcatgtgtaatcatgtttctataaatgtttctgtgttgttctctttctctctaatgttgtaaaactcagacatactttgaatttataagacttctagtgtttgtat

SEQ ID NO: 140791 - DNA, 175 bp, Arabidopsis thaliana
cccaagcgtccgcaatatccacattcttcctcatttgagtattagatccaacgaaacgtctctttcattctctctgataggcaacaatggcgcatatgaacatgattgggtttcccaccgagactgacttgtccgatgcaatggttgagtacactgccactctctctgccaagtt

SEQ ID NO: 140792 - DNA, 397 bp, Arabidopsis thaliana
acttatcgcaggaggtaagagtaagaagaccaaaaggactgctcctaagtccgatgatgtctacctaaagcttctcgtcaagctttaccggtttttggtgaggagatctaacagcaacttcaatgctgtgattctgaaaaggcttttcatgagcaaagtcaacaaagctcctctttcactctctaggcttgtagagttcatgactggcaaggatgacaagattgctgtgttggttggaactatcactgatgatttgagagttcatgagattcctgccatgaaggttactgccttgaggtttactgagagggctagggctagaattgagaaagctggtggagagtgcttaacctttgaccagcttgctctcagagctccattgggacagaacacagtt

SEQ ID NO: 140793 - DNA, 407 bp, Arabidopsis thaliana
cccacgcgtccgaaaacataagctaagaaaacgaaactcaactaattttgttatcacccaaaaagaagttcaaacacaatggctttcgctttgaggttcttcacatgccttgttttaacggtgtgcatagttgcatcagtcgatgctgcaatctcatgtggcacagtggcaggtagcttggctccatgtgcaacctatctatcaaaaggtgggttggtgccaccttcatgttgtgcaggagtcaaaactttgaacagtatggctaaaaccacaccagaccgccaacaagcttgcagatgcatccagtccactgcgaagagcatttctggtctcaacccaagtctagcctctggccttcctggaaagtgcggtgttagcattccatatccaatctccatgagcactaa

SEQ ID NO: 140794 - DNA, 403 bp, Arabidopsis thaliana
gaagagagaaagagagaaagagagacagagataatggcgtacagtgcgtgtttcctacaccagagcgcattggcttcatcagccgcacgatcatcatcttcctcctcatcccagcgtcacgtgtcgctctccaaacctgttcagatcatctgtaaagctcaacagtctcatgaagacgataactccgccgtctcccgccgtcttgctctcactctcctcgtcggcgccgctgctgttggttccaaagtatctcctgctgatgccgcctacggtgaagctgcaaacgtgtttgggaagccaaagacgaacacagacttcttgccatacaatggagatgggttcaaagtgcaggttccagcaaaatggaacccaagcaaagagattgagtatccaggacaagtcc

SEQ ID NO: 140795 - DNA, 213 bp, Arabidopsis thaliana
accggattggcaatttgggcggtaactctcgccggaattcttgccggaggtgctcttcttgtgtacaacacaagtgctttggctcagtaaatcttaaagttgttagcgcatgtgtaatcatgtttctataaatgtttctgtgttgttctctttctctctaatgttgtaaaactcagacatactttgaatttataagacttctagtgtttgtat

SEQ ID NO: 140796 - DNA, 398 bp, Arabidopsis thaliana
ggcgtttttatttggatgcgctttatagattcagaaatttctatctaggattagaggagcttctgaagaatcactttgaggaagaagacaacatatctcacaagtgagcaatgggagcgattgctggagaagagctgaagaaaatggagaagacacaggtgcatgttgcccgggaagagaagatattggttctggtgagactgagacctctgaacgagaaagagatcttggctaatgaagctgcggactgggaatgcatcaacgacaccaccgtattgtacagaaacacgttgcgtgagggctcaacttttccttctgcatactcatttgatagagtgtaccgaggtgaatgcccaaccagacaagtttacgaagatggccccaaggaagttgctctc

SEQ ID NO: 140797 - DNA, 132 bp, Arabidopsis thaliana
agcaggttatctcgctagaattgaagcatggggaaactgatgcaaattctaaaggttacttgggtcaggtggctgatcttcaatccacactatatgcatttcacgtgataagttcaagcctcgaatctgctt

SEQ ID NO: 140798 - DNA, 399 bp, Arabidopsis thaliana
gccacactcttaacaacacaactcagaatcgctctcgccgctgtttttctgtgaagagttatgatgccgaaagctgcgtgggaaccagaataccacagagtatttgtggacttatgcgtcgagcaaaagatgttagggaatcaacctggaacgcagcatatattgaaaccttttctacaaagaactggcgctaggttcaccagaaaccagcttaagaatcactgggatacaatgatcaagcagtggaagatttggtgtagacttgttcaatgcagtgatatgcaatgggatcctcagactaacacttttggtgctaatgatcaagactgggccaactatttacatgtgaatcctgaggctgggcagtatcggttgaatcctccatcgttcctcgagaaa

SEQ ID NO: 140799 - DNA, 407 bp, Arabidopsis thaliana
accacgcgtccgctagattaaaatcctaagctaaggaagaagaaggttttgatgttagtgaaaggttagattttttattccgatcttggtcagtctcctccaatcgtgatttctcttctggatccaagctgatgagctctacgtcttcctcccagatggttcagctcgtagctgacaagcatgtacgttacattctgatggcagaaaagaaagagagttttgagtctgtggtgatggatcatctaagaatgaatggtgcatactggggactcaccactctcgacttacttgacaagctcggctgtgtttctgaagaggaagtcatttcatggctcatgacttgccagcatgaatctggtggctttgccggtaacactggacacgattcacatatcctatatacactc

SEQ ID NO: 140800 - DNA, 261 bp, Arabidopsis thaliana
gaccatacgtcgtcgttttgttcatcttctatttgcatgcacttgtttgttgtctcggagactctgttttggtgaggacagactcactttctcaagtcctagcaaagactcagagtcagagacccttctatgcaaaagtggtattttcaggtttgggttcttcacgcctgttaattccactactcggttacatgatgtagggatttggtacgaaaagattcgaatccagactgtggtttgggttgctagcaaagactctcc

SEQ ID NO: 140801 - DNA, 348 bp, Arabidopsis thaliana
accacgcgtccgttttgttttaacgacatgtatttggtgttgcacatacgaaaccgtggcgaaattattacttgcaccagcagaggagctatcctatcaatacaaggaaaaactttgaccacatatctgattccgttactgatgattaccgtacgcgtactaagatgcatagaggtagtacaaaaggtcaaggggcatcctttgtggcaagcgactcccatgtgaaactactgatcacgtcgttcagggtgcctgagcttttcatagagattccagaaactgctactgttggctcattgaagagaatggtgatggcagcagtgagcactttactgactgatggacacc

SEQ ID NO: 140802 - DNA, 350 bp, Arabidopsis thaliana
accacgcgtccgagaccggcgacgaatcgtcggcgagaaagatgcgacgtaaagtacccacgtcgatcgaatctctagacgccgatatactgtgcatcatcttctcttttcttgatttgttcgacctcgttcattgtaccgtcgtctgcaattcctggaatgctgttatcaaaaggctgaagctgctacaagcttcttgccggaagatgcaccatctcggttccgactctcccagtagctccacgtcacttgatcgtccagctgagatagatgtggaggattttgcgatgaagcatcacaagatggcattgttaaagggtcgaatcgaaattgaacgatgggaagctcat

SEQ ID NO: 140803 - DNA, 380 bp, Arabidopsis thaliana
atttgtaagctgttgatgtgaattcttttttatggttctcgattgtttaatgatttgattgtttggttatatttgcatgtgggttttgtgtgtgtttggaaatttgaatgaattgatgtgaaaagttgtaactcttgtttttgttgatttaaaaggctaagttttgaaaattttcatttctgtggagagaggtagtgttggatatgagtgatattagctatgtgggttttgtatgcttttgaattttgaaatgaattgctatgaaaagttgtaacctaagaaaggtagtgttagatggaaattagattagtatgtgagttttgcatgttttagaagcttgaaatgaattgctttgaaagtttatagctttacgctgatat

SEQ ID NO: 140804 - DNA, 414 bp, Arabidopsis thaliana
cccacgcgtccggagatctcattctccctctcgcaattctccgtcccctcgaatccaacaaaaagattttaatgtaaaatcactctattgatccacaatgtcgatgatgttcccatcgtttcagttgctagaacttaacataatatcagctcaggacttggctcccgtcgcacgcaagacaaagacttatgcggttgcttgggttcattccgaacgtaaacttaccacccgtgtcgactataatggcggaacaaacccaacttggaacgacaaattcgtattcagagtcaacgaagaatttctctacgctgatacttcagcagtggttatcgaaatatacgccttgcattggttcagagatgttcatgtaggaacagttcgtgtcctcattagcaaactcattcctcctaatcg

SEQ ID NO: 140805 - DNA, 375 bp, Arabidopsis thaliana
ggcttattgctaggtcaccaaacctgaagagcttgaagttaaaccgtgcagtaccgcttgacgcactcgcaaggttaatgagttgtgcgccgcagctagtggacttaggagtagggtcttatgagaatgagccagatcctgaatcttttgcaaaactcatgactgccattaagaaatacacatcgttaaggagcttgtctggctttttagaggttgctccactctgcctcccagcgttctacccaatttgccaaaaccttatctctttgaacctcagctatgcagctgaaatccaaggcaaccacctcattaagcttattcagctttgcaagagacttcaacgattatggatattggatagtattggtgacaaag

SEQ ID NO: 140806 - DNA, 399 bp, Arabidopsis thaliana
aaaggaaaaaagttgctctcgcttcaggttttttatttcccgccaattatttcgacaaaaatggctcctaaatcggataacaccgaagctatcgtactcaactttgtcaatgagcaaaacaaacctctaaacactcaaaatgcagctgatgctctacaaaagtttaaccttaagaagactgcggtgcaaaaggcacttgatagtcttgctgatgctggaaaaatcacgtttaaagagtatggtaagcagaagatatacattgctagacaagaccagtttgagattccaaactctgaagaacttgctcaaatgaaagaagacaatgccaaacttcaagaacagcttcaagagaagaagaaaactatcagtgatgtggaatcagaaatcaagagtttgcag

SEQ ID NO: 140807 - DNA, 399 bp, Arabidopsis thaliana
aatcatgagacttgttcgtcatccaaacatcgttgagttaaaagaagtcatggctacaaaaacaaagatcttctttatcatggaatacgttaaaggcggtgaacttttctccaagatcgttaaaggaaagcttaaagaagactctgctcattttacaagacggtttgcttcatactcagtgtggaactccggcgtatgttgcaccggaggttttgaggaagaaaggttacgacggagctaaaggtgatatttggtcgtgtggtattatcttgtacgtgcttctcgctggattcttaccgtttcaagatgagaacctaatgaaaatgtatcggaagatcttcaaatcggagtttgagtatccgccgtggttttcaccggagtccaagaggttgatttcaa

SEQ ID NO: 140808 - DNA, 400 bp, Arabidopsis thaliana
cggacgcgtgggggagaagataatgttgtcaaggtgtgggatttgactgctggaaaacttttgcatgagtttaagagtcatgaagggaaaattcagagtctagattttcatccccatgaatttctgctggcaacaggttcagctgataagactgtaaaattctgggaccttgaaacattcgagcttattggttctggtggaactgagactactggggtccgttgcctaacctttaatccagatggaaagagtgtgctttgtggattgcaagaaagtcttaaaattttctcatgggagccaataagatgtcatgatggagtggatgttggatggtcaaacttgtcggatatgaatgttcacgagggaaagcttctcggttgctcatacaatcaaaattgtg

SEQ ID NO: 140809 - DNA, 411 bp, Arabidopsis thaliana
aggacgcgtgggcggacgcgtgggaagaaagtgtatgaaggacttgaaggtaacaactgtgctcccaacgcagctacttttaggacattgatatttcatctttgttatagccgattgtacgagcaaggctatgcgatcttcaagaagagtgtgtatatgcacaagattccagatttcaacactttgaagcatttggttgtgggattggtggagaacaagaaaagagatgacgctaaagggttgattagaacggtgaagaagaaattccctccgagtttcttgaatgcgtggaagaaactcgaggaggaactcgggctgtattcaaaaaccgatgcttttccatcttctgcaaaagaggctgctgctgcttaatagctcaagagcatttcgattgaacatcttaatttgttg

SEQ ID NO: 140810 - DNA, 401 bp, Arabidopsis thaliana
gaagaaacaaagcgtgcctcttctctctttcttcatcattctcatcaagctttcttcttcaccaaattcccaacactatcattcccttcttcctctataaagaatcatcacttcttcttcttctcaatggatccttgggatacttataacataccactagaccaccaacaccgtctccgtaaccgccgtgaccaccgtcatccttccttctcctctactctcctcgaccaaatttaccgctccatcgacgattcctctactaactcctcatccatgagaaaaaccaaacatcagaaccgcgaggacacgcgtgtttctgctaaccgccgcgacgatttcaacagatccaagaatcttaaaaccatagaacctgttttcttcaaacattcaagctcaagctc

SEQ ID NO: 140811 - DNA, 402 bp, Arabidopsis thaliana
agggaaaactgccatttctggactggatttgtccactgtcgctgggaatctagctgctccttactacaaagacatcgttgtgaacgcaacacttatgggccctgagctccaagtccagattggtcccatgggagaagatacagggaccaaaaacgcgatcttgaacggtgttgaggttctgaagatgagcaattccgtgaacagccttgatggagagtttggagtggatggtagaaccactggcatggggaagcatggtatggtagcaaccgcggggtttgtgatgatgtttggagctttcattggtctgggagccatggtttacaagtggaagaagaggccacaagattggcagaagagaaatagtttctcctcttggttgctaccaatacatgctggtga

SEQ ID NO: 140812 - DNA, 389 bp, Arabidopsis thaliana
gccagagaggtgaggcggtttatggctggtcattttgaccgacagcagatggatactgcttatagagatttgactttcagggaatcaaacgctagccatgttcccaatttccagaggccacttttgaggaagaatgtagggggaagaatgtctgcaggccggaggaggagttttgatgatagccaactgcaaattggtgacatatcaaattttgttgatggtccagcttccctgaacgaggcccttaacgacggactgaactcaagttctgattggtgtgccagagttgcagcttttaattttctccaaactctgctgcagcaaggcccaaaaggtgctcaagaagtaattcaaagttttgagaaagtaatgaaactatttctccggca

SEQ ID NO: 140813 - DNA, 386 bp, Arabidopsis thaliana
ctcttctcgtcctagctctgtaactgacgatgaagatttcttctttaaacctccaaagaacaaatcttcaagtggtggtttctcactttctagattctcctctgttttcaagaaagatcccaaaaccaatctccaccaccactcctcctcctcttccaccgcaacaaccgccgcagctccgtcgtcggtgaagagaatgagctcaacagctaaagaagtaatacggaaatacatgaaaaaagtcaaaccattatacgaaaaattatctccaaaacagagctccaatataaaaacagagtcatcatcatctctcaaagattccggtaacaacatccgtgggaccaccaccgtaaccaccgtcaccgccgctccaaccgttgtctcct

SEQ ID NO: 140814 - DNA, 388 bp, Arabidopsis thaliana
caggggcagaccttgagtcggctatacaaaattgcatgggctaccaagatgacggtgaaggtttcatggttggggtgcagataaatcctgtatcaggattgccttctggatatccagacttgcttcgtttcgtcctagaacatgttgaagaaaagaatgtagagccacttcttgagggtttgcttgaagctcgtcaagagctaaggccacttctgctgaagtcccatgaccgcctcaaggatctgttattcttggacctcgctcttgattctactgtcagaacagcgattgaaagaggatatgagcaattgaatgatgctggacctgagaaaatcatgtacttcatcagcctagttcttgaaaatcttgccctctcttcagatgacaa

SEQ ID NO: 140815 - DNA, 273 bp, Arabidopsis thaliana
accacgcgtccgcagggactactccaggaactgtctctaacaaagaatggtgggcagcaacggatgagaaattccaagcatggccaagaaccgctggtcctcccgttgttatgaatcccattagccgtcagaatttcatcgtcaagactcgtccggaatgagaaaataataagttcaatgctttgattttcagaataagatgaacgatgacgatgttttctaaatccgagcttgtactaaataacaatacattacaacacggtttgcggaact

SEQ ID NO: 140816 - DNA, 372 bp, Arabidopsis thaliana
cagacttccagatcagtagcttctacaacattaacatcaacacctatgttgttgtttgtaagatttgtgtgaagtcatgttcttgattcccaagggtatcaagaacatgacttcactcaaacatctagacatatccaacaacaacatttcaagtcttcctccagaactgggtttgcttgagcctacacttgaggttctacgacttgacgggaacccattaagaagtatcaggaggccaattctagaaagaggaacaaaagctgtgttgaactacctgaaagacagacttccagatcagtagcttctacaacattaacatcaacacctatgttgttgtttgtaagatttgtgtgaacaccagattgattttat

SEQ ID NO: 140817 - DNA, 418 bp, Arabidopsis thaliana
accacgcgtccgcccacgcgtccggcgagaaacaatgcatcactaaatggaatggtgacattatggacttcaagaggcaccttaaggctaaagccggacttgaagattgaagatagagagtcgagtcttcttctcttgatggaaaatggaaaagactcagattggggtcacatgctaagagagagagagggaaggctttggtttttttgatgggtttgggaatggtttttaacgagttctaaagccacacacttgagagacagagaaaccatactcactaatctctgcatttccttaagaggtcagagattctttctatattagtattatcattatcatgtgcaccttctttttttttcgttattgttgttgaacgtttttttgaaggcgaaacagagagaaaagtaatattttttgg

SEQ ID NO: 140818 - DNA, 165 bp, Arabidopsis thaliana
cacaaaacaaatcccaaagcttcagaggaagaagaagaagagagtgagaaacaatggcgtcgacgactctctcaatcgcaacaacaatccgttcctcttctcctctcacttccgcttccactcatcacttcctttccaaacccagcgcaatcgaattcccatttc

SEQ ID NO: 140819 - DNA, 205 bp, Arabidopsis thaliana
ccgcccacgcgaccggaggatgaggatgttgaatatgagggggatcatgggacacagtacttagggaggccagttggtagagctgaacatgacgaggatgcaagtgattttgagccggaggagaatggtgtggaagaggatatagaccaaggagaagacgatgacaatgataactcaggtggtgctgggaagtcagaggctccgc

SEQ ID NO: 140820 - DNA, 401 bp, Arabidopsis thaliana
gtcacaaggtttccaattttcgattcacgatggaaatggcggaaggggaaggaactacagaggagaactacgacgtagacatcgcgaccaccgcttcttcattaggcggctccggcgtcttccatatcatcaatgacatagtcggattcgtcctctatatgcaccagcagatcccttcggtattacaagacatgagccttgaatttgaaggattgcaaactgaatttatggatttggagacgaatcttgcagaacctcaagtgaaaccactggttagaagaaaactgatgagtagaaagagagaggtgaagaatgagattaagaaactggagaaactgatgaaaaccatctctagtctccgaagtgcgctgcagttaatgatccgtgaagctcctggcatt

SEQ ID NO: 140821 - DNA, 417 bp, Arabidopsis thaliana
cccacgcgtccgcaaaggagcaacccggagctctatcatagttccttctgttcaagagatggtgaaggagaagatgatcacgacggttcctccgaggtatgtacggtctgatcaagacgtagctgagatagccgttgattctggtctaagaaaccagatcccaatcatagacatgagtcttctgtgttcttcaacctccatggattctgagattgacaagcttgactctgcttgcaaagagtggggattttttcagcttgtaaaccatggaatggagtcaagtttcttgaacaaagtaaagtcagaggttcaagacttcttcaaccttcccatggaagagaagaagaatttgtggcaacaacccgatgagatcgaagggtttggacaagtatttgtggtttcagaagagcagaaact

SEQ ID NO: 140822 - DNA, 412 bp, Arabidopsis thaliana
gaacgatttcgctgagattggttggagattcaggactgggatttcgaaactatctgggaacttacctgtgtctgagttcacaaagatcgcttcgaatttcttacaattgagttcagaagatgtggatccgaaagattacgacgtaatcggagttacagaggaattagttgcgtttgtgaaggatcttgcgatgcatcctgagacttggttggattttcctttacctgatgacgacgatagctttgatgactttgaattggccgatgctcaatacgagcacgctttagctgtagaaaggctagcaccgagcttggcttctttgaggattgagctttgccctgaatatatgactgagaattgcttctggaggatttactttgttcttgtgcatcctaaactcagtaaagaccat

SEQ ID NO: 140823 - DNA, 222 bp, Arabidopsis thaliana
accacgcgtccgtacagatcgtggattgttcgatttcttgggaaagaagaaagacgaaacaaaaccagaggagactccgatcgcttcagagtttgagcagaaggttcatatttcagagccggagccagaggttaaacacgaaagtcttcttgaaaagcttcaccgaagcgacagttcttctagctcctcaagtgaggaagaaggttcagatggtgagaagag

SEQ ID NO: 140824 - DNA, 345 bp, Arabidopsis thaliana
cccacgcgtccgcacaatctctctctttttacaccggcgataattttccgatcccgattataagatggcgaaggaaccagttcgtgttcttgttaccggagctgcaggataataaatcggattggataaccggccaaacatgtttcacatctcatgggtcgaatctccggtcccctccggtttaaaaatgatgggctaataacaaaagtcaaagactcaaaaaagttgttagttaagtctgcgtcgaatcacttgcaaacagtcaatagcttcatttcaatcttcggtgaagaatcaatctcgaagaatgacgaacataaaattttcaatttctctgtaatcttc

SEQ ID NO: 140825 - DNA, 199 bp, Arabidopsis thaliana
ggagcacaacaggcgggaaagagtgtatcggatgcggcagcgggaggtgttaacttcgtgaaggacaagaccggcctgaacaagtagcgattcgggtcaaatttgggagttataatttcccttttctaattaactgttgggattttcaaataaacgatctttgatcaagaattgcattatatatatataaatatattgc

SEQ ID NO: 140826 - DNA, 288 bp, Arabidopsis thaliana
tttttgtctcattcccgatcagatctcaacgacgacgagccatggcttcaactttcagcggcgatgaaactgctcctttcttcggattccttggcgctgccgccgctctcgttttctcctgtatgggagcagcgtacgggacagcgaagagcggggttggtgtagcgtcgatgggtgtgatgagaccagagcttgtgatgaaatcgattgttcctgttgttatggctggagttttaggtatttatggtttgatcattgctgttatcatcagtaccggaatcaacccta

SEQ ID NO: 140827 - DNA, 411 bp, Arabidopsis thaliana
tttccataaaacctagtagtggaaacatgactaagaaagtagagaacaacagagaagcaagcagaaagtatcctcctagaagtagagaatcatcttcagcaatccaaaaccaattcatggcattaacacctctacgtgatatagttagccaggttgctcatgatcttagcatcggtgaggtcatcaatttcagacataaaggagataatatgttgcgggtctcagatttgggatccaattgttgtggggttcaagatttactggctccaagcagtaactatgatcatgacaacatcagtaacatttcgatgaaaataaatccgcatataagaaaagaagctgtaacattttcgtcatatgatggttatgctcatgacaactttggtatattcagttttagtatagtacata

SEQ ID NO: 140828 - DNA, 151 bp, Arabidopsis thaliana
gaaagacacacgtctaacgttaacacacagagagatcagattgcgacatcaaattctacaagacacattatgaacacacatattaatctggaacctgtttcaacatccttggctaaaactaatacgccacggtcccaacattttcacgcat

SEQ ID NO: 140829 - DNA, 407 bp, Arabidopsis thaliana
agaagatcgaattcaagaagaagagatggagaatggagcaacgacgacgagcacaattaccatcaaagggattctgagtttgctaatggaaagcatcacaacagaggaagatgaaggaggaaagagagtaatatctctgggaatgggagacccaacactctactcgtgttttcgtacaacacaagtctctcttcaagctgtttctgattctcttctctccaacaagttccatggttactctcctaccgtcggtcttccccaagctcgaagggcaatagcagagtatctatcgcgtgatcttccatacaaactttcacaggatgatgtgtttatcacatcgggttgcacgcaagcgatcgatgtagcattgtcgatgttagctcgtcccagggctaatatacttcttc

SEQ ID NO: 140830 - DNA, 374 bp, Arabidopsis thaliana
cggacgcgtgggttttcatcgatcttcaaattccagaaaaaactcgatgaatcttcaagctgtttcttgtagcttcggattcctttcgagtccacttggagtcactcccagaacttcgattcgtcgcttcgtaatccgagcgaaaacggaaccgtcggagaaatcagtagagattatgaggaaattctccgagcaatatgctcgtcgctctgggacttacttctgtgttgataaaggagttacttcagtcgttattaagggtttggctgagcataaatattcatatggtgcaccgctttgcccttgcagctgctgaggttggacaaggcttttggaattgtccgtatgttcaaatgagagagaggaaggagtgc

SEQ ID NO: 140831 - DNA, 252 bp, Arabidopsis thaliana
actgatcaagccttggatctttactgaaattaaagagcaccggcattgggacattacctctggagaaagacttaacatcatgaacgacttcgtacgttttggtcgtcaacattggggatccgacacgaaacgagttgagacaactaggcatttcttgctggagtggctaagctacacatttaggtagatacctgtcggtttgcatgatgtgatcccgcagcacatcaactggcgtccgccttcatactttgg

SEQ ID NO: 140832 - DNA, 366 bp, Arabidopsis thaliana
atgctcgaagcttgtgccctttcattattatgtcaacaaccctcctctattgaagatttcttcaatcatcttctccacaacaaaaaaataaccctaatttacacagaaaatatgtggggaattggaggaaattactactggcgaaagaaaaacaacaacggatgagaaagcgaagcgatcgttgtggtattcgcttggatgtctagcgaagaacgcaatctaaatgaaccatgtcgatctctattcttctcttctttgggattctctcgtttgccattctcaatttctcaacatgtctgttttcatctccttctctcatctctctgttttctaatctctctgtttcataaattgaattctcttttg

SEQ ID NO: 140833 - DNA, 425 bp, Arabidopsis thaliana
ttctccatggctgtgattcaagccaatcaggttcttgaagatcagagccaggtcgaatccggtaattttgggacttttgttggtgtttacgatggtcatggtggtcctgaagctgctcgttatgtctgtgatcatctctttaaccattttcgagaaatatcagcggaaacacaaggagttgtgacgagagagacgatagaaagagcctttcatgcgacagaagaaggattcgcttccattgtgtcagagctgtggcaagaaataccaaatttggcaactgttggcacttgttgtttggttggagtgatatatcaaaatactctttttgtggcaagtcttggagattcacgggttgttcttggaaagaaaggcaactgtggcggactctctgctattcagctgtcgactgaacacaatgctaacaa

SEQ ID NO: 140834 - DNA, 388 bp, Arabidopsis thaliana
attgggtgacattgttcctgctgatgctcgtctcctcgaaggagatcctttaaaaattgaccaatctgctcttactggtgaatcccttccaaccaccaaacacccaggagatgaagtattctctggctcaacctgcaagcaaggtgagattgaggctgttgtcattgccacgggtgtccacaccttttttggcaaggctgctcatcttgttgacagtaccaacaatgttggccatttccaaaaggttttgacatcaattggtaacttctgtatatgctcaattggattggggatgttgattgagatattgattatgtaccctatccaacaccgcacatacagagatggtattgataatctattggtgcttttgatcggaggaatccca

SEQ ID NO: 140835 - DNA, 122 bp, Arabidopsis thaliana
aaaaagctcctgctgctacccccccataagtcaactcctccttctttcagatcaccttcatcttctttttgctcctctgatactggttcatgattaaagcacagccagctaatggatctgga

SEQ ID NO: 140836 - DNA, 248 bp, Arabidopsis thaliana
ctgtttttgacgaacacaccaagctctagtagatcggtatcagatgcatcgtaggtttctccaatttctcacaattcagtccaaaattttgagtatgtcgtcattctggtctgtcaattttagtcagttgtaaaccttgcttttgcgatcggaatcgtaaaaatccgatcgttcggttatattcgttttgtatttgagtccaacatcgggtaatgggtaaagtacctgtaggagcgactgttgtttgc

SEQ ID NO: 140837 - DNA, 367 bp, Arabidopsis thaliana
cgagtaaatagttagttccagaccaattctacaacagaaacaaaagagagaaaatgtctttttcaggttatagcttcatcgtactaacattattgtccatcgtcttaactcaaatctatggtttgagaagctttagccgaatggacgatctccaaccggcagaaacactagcggttcacaaccagattcgagctgcggtcggggttgctccattggtgtacgaccaaaaacttgctgcccatgcacagaggtacgctaacgtacgttcccaagactgcgccatgaaatattccaccgacggaacgtacggagagaatatagccgccgggtgggtccaacctatggacaccatgagcggtccgatcgc

SEQ ID NO: 140838 - DNA, 289 bp, Arabidopsis thaliana
gaaaaagatacgaactactcgtcgtaaatctctaaagctaggacgcataacgagtagcagtgatgcaacaggaggtgaaaccgctcctcgcgtgacaaaacctcaatactcatcatcatctacagtggagatttcaataacaaagtctcagccaaagcttgaaactcaagagaaatcagtgaaggccaaacaagagatacagaaagtgaagatagaagaagcagttatgagaggataagaatataaggctactgctgtggatgcgaaacctgaagagcacaaaccaaac

SEQ ID NO: 140839 - DNA, 420 bp, Arabidopsis thaliana
aatcggtccacctttatactttgttctgaagaattataactacagctcagaatcaagacatacaaatcaactttgttccattaacaagtgtaatcctaactctcttttaaatgagattgcaagggcttctttgactccggaactaagctacatagctaagccagctgcttcgtggctcgatgactttcttgtgtggttatctcccgaggcgtttggatgttgcagaaagtttacaaatggtaccttttgcccccctgatgaccagcctccttgttgccctcctggtcaaacgagctgtggcctaagtgaagtatgcaaagattgtaccacgtgcttccggcatgcagatttaagtagtgaccgcccttccacaacacaattcaaagagaaacttccttggttcctcaacgcgctcccttc

SEQ ID NO: 140840 - DNA, 137 bp, Arabidopsis thaliana
taacacacacaccttcaaaatggcatcaagctcactcctcaaggcttctccggtgttggagaaatccgagtgggtcaatggataaaacgttctcttccgtcagccttcttcagcttcggtcgtcctccgcatccgtg

SEQ ID NO: 140841 - DNA, 378 bp, Arabidopsis thaliana
gagaatttgcgcgacaacaacgatcgatcagtcgtcgtcttctcagatcttgttcttcaaaggattctatgccgcaagagcttcgattgtatcctctctgaggattgggtaatacccaataccatggataacaatagcgagcgcaaaggaaaacgaatcgataaggataatattcgtgtcaagcggaaaactttgcaagctttgctcaatgattgccagagagccctcgagttattaaacttagccgaagtcagttctgaagacgatgaagatgataaaagcaccggcgagggaagtgggtcacaagagagcaggggagaagtttcttcttccgatcgagaagatcctgaagctgatgaattatatgatctcatcaaa

SEQ ID NO: 140842 - DNA, 411 bp, Arabidopsis thaliana
  unsure (1)..(411): unsure at all n locations
tctctctttccgtcttcatcgtcctcccggcttctgcgattttgtttagtagcgccggaccggagtagttaaaaccctagcccagtctatttaaagattcaccgagtagtcttctagtcctgcgtatacttcttcttcttcgtttatacttagaagatgaattgtgcaatttccggcgaagttccggaggagcctgtggtttctaagaagtcgggtttgctttacgagaagcggctaatccagacgcatatatccgattatgggaaatgcccggttactggtgagccacatactcttgatgacattgttcncatcaaaactgggaagatcgtaaagccgaaaccattacacacagctagcatccctggattgcttggaacgtttcagactgaatgggacagtttgatgcta

SEQ ID NO: 140843 - DNA, 387 bp, Arabidopsis thaliana
aacacgcgtccgaagactacgaaatgatccaaaacttgaagacccttaagagactactaagtcgtcgatagcttcaacctctcttttcttatctctcaaatattttattcttattctctaccatatatcttcacctctctattctatataaatgcataaacttgagtcacgctgataagtaaattaagaaaggaatattcattaagatggcatcttctatagtctcttccatgtttctctttctccttcttcttcttgtatttccacatatagataatgtccttggcgcacgaatggaactccgtgaacttggagagataaattatgctgatccactaggttttactcggcccattgtccccattcatgttccgggttttccgcctc

SEQ ID NO: 140844 - DNA, 409 bp, Arabidopsis thaliana
cgatcacttcccaaattattgattttttttacccatttctctcatcgcacggtgatattgagaatcgccgacctgaatcgatcggaaaactttctctgattaccggcggtcaacaccgctgaacacatatgtttgtttgacgacctcttctctccgcgatctttacctcaacaacgagatctgtttccacgaaagaaaggaggatgtcgacgccagcaaggaagaggttaatgagggatttcaagaggttgcagcaagacccacctgcgggtattagtggtgctccacaggacaacaacattatgctctggaatgctgtcatatttgggcctgatgacacaccatgggatggaggtactttcaaactctcactgcagttctctgaagattatcccaataaaccaccaac

SEQ ID NO: 140845 - DNA, 410 bp, Arabidopsis thaliana
caaaaacgagctgttcatatatattttaaagaacaaaaactaaaaaaaaaaaaaaaaaaaaaaactttgacaaaaaaaaaaaatgtcatatggatacgacgatgaggatgcaaagaggaaaaagagatatgtaattatctctatctcctctgttcttttaatctccatggttgtcgctgttaccataggtgttagcgtcaacaagtccgataacgctggtgacgaagaaatcacaacttctgttaaagccatcaaagatgtttgtgcaccgacggattacaaagagacttgtgaggatacactaaggaaagatgcgaaggacacatcagacccgttggagctggtgaagacagcttttaacgcaacgatgaaacaaataagtgacgtggcaaagaagtcacaaactatga

SEQ ID NO: 140846 - DNA, 270 bp, Arabidopsis thaliana
gtttctgaggggataaccattttttttttcttcttaaaaagtttttttttttgtcaattggtcttcttcttcctcatccgctcgcttacatttaatttaataataataaaaatcggtgttcatttttatataaaagtatcaattttgtgtttggttgatccagccgtagtcgtagtagatctacaatctctgaaattccatgcccacatctccgccgtcctcttgagatccttctcttcagatcagtttcatgcacaacttgagttgcat

SEQ ID NO: 140847 - DNA, 382 bp, Arabidopsis thaliana
cccacgcgtccgctctcactgtaatcccttagatcttcttttcaaatttcaatggcgtccggtgatgttgagtatcggtgcttcgttggaggtctagcatgggccactgatgacagagctcttgagactgccttcgctcaatacggcgacgttattgattccaaggtctgttacacgccgagatcggactccgagtgatatcgatgatctcatcctcgacggatctgttccgatcttgtgtttctctgttacttgattcgattactctgttactattctcgttctttgttactactactactactactgttacttgtattttcccaaatcggtacgttcatcttcctgcttctgtgagcccggagatcgatcggattttttt

SEQ ID NO: 140848 - DNA, 347 bp, Arabidopsis thaliana
cggacgcgtgggcggacgcgtggggatcattcacaatctctctctttttttcaccggcgataattttccgatctcgattataagatggcgaaggaaccagttcgtgttcttgttaccggagctgcaggacaaatcggatatgctcttgttcctatgattgcaagggggataatgcttggtgctgatcagcctgtgatcctccacatgcttgacatcccttttgcagcagaagctttgaacggtgtgaagatggaattggtcgatgctgctttccctcttctaaagggtgtggtggctacaactgatgctgttgaagcgtgtaccggtgttaatgttgctgtcatggt

SEQ ID NO: 140849 - DNA, 362 bp, Arabidopsis thaliana
attatttctaagctaagaaaatctttaaaaataacaaagcttctaaaataataatccgacctaccggattcaaaccattgatctgaagatcatctataaaccagtccttgatctataaactaaaataagggaagaaaaaaacaagagagagaaatagagaatgaagtcttttgcggctaaggtagaagagggagttaaaggaatagacggaaagccgtcggtaggtccggtgtaccggaatcttctgtcggaaaaaggttttcctccgattgattctgagatcaccactgcttgggacattttcagtaaatcagtggagaaattccctgacaataatatgcttggatggcgtcgaattgttg

SEQ ID NO: 140850 - DNA, 363 bp, Arabidopsis thaliana
cccacgcgtccgcccacgcgtccgcccacgcgtccgagtaaacgttaatacacagatctccagcaaaaggcacatagataaattcgaggcagttcctgattctaaaagattggcagttggggctcaaataggatcacccaagagatctgttctcccaagaatgtccactttatcccgagaaacatcatttaagggcttagagaagccaacgagaaagctagctcattactcatctttcaatagccactccagtgatgacacagaaagcacacgatctactgactcacagctccagtcccctaaaggttcgtttttgaagtccaattcgtttaattctttgagctctagatcaaaagtgagacc

SEQ ID NO: 140851 - DNA, 216 bp, Arabidopsis thaliana
cccagaataatagtaataagaataataataatagtaatcgtaattccaataatctcgagagtaatcgtttgatcaattgacaaaaaaatcatggagtccaggaaaaactctgatcgtcaaatgcgtagagctaaatgcctttcagctggtgagaggatgaagacgaggtcgccctccgtgaatgtgatcggaggtggtttcggtgggatttcagct

SEQ ID NO: 140852 - DNA, 384 bp, Arabidopsis thaliana
gtagtatataccatcttcgagtgacatcattcatcacgaaaagaaactatagtgaatgcttgcgctctgttgttactgcagataaaaaagagaaaaaaagatgctgaagaacctacaaagtatatgggttgtggagactgtgacaatctgagtcgctccatcacggtgcctgctgctacagatgacatagaagttctgcagaggatttcaaagaagttgtttgggtcattttgcttgggtaagtgcgtctcagctgctttgaaaagatggttttgcagttgcgatttactgagcatctatcgagtccttcctcacatgcaagacgcagcttagttgaattttcaaattttataaaagatggatgagactagtttgaaagattaa

SEQ ID NO: 140853 - DNA, 395 bp, Arabidopsis thaliana
accacgcgtccgcccacgcgtccgcccacgcgtccgcaaaaagacaattctttgtaataaatatcttcaattcgtaaatgtcttggcctttgtcgttttcaaacttcaacatcagcatcacgtgattggctaatacaaataaaattttctctttattttattattttgccacaagccgtgaaaagatggagaaaatgaatgtccgttttatgattgtgttgatggtaatgtctctggttctgggtttttcgtcggcagttgatttcagatggaggaaaactgcaggattctcagatagattcaccagagctgtttcttcagtcgtgttcccagttcatggcaacgtttatcctcttgggtactataatgtaaccatcaacatatgacaaccacca

SEQ ID NO: 140854 - DNA, 337 bp, Arabidopsis thaliana
gatcaacgaaagtgtgagtttgaggtgaaagatgacggcgacgatagatcggaggttatcaacgctgaatccaaacgcgccggtgtttgatccggtggaatttcgtgaggtggaggatttttcaccgaaatggtgggatctagtaacgacttcgaaatggttccgtgacttttggctcagtgctaactctgagaatgagttcctcggcggcgacgatttctcagttatggaagaagagttcgaggagatgatcgcatcgtctgatggtggatccatggctgatacagttacagaagcagatgtggctagttatttgaagatgcgtttgaacatagcg

SEQ ID NO: 140855 - DNA, 353 bp, Arabidopsis thaliana
cccacgcgtccgcccacgcgtccgcccacgcgtccgggaagatgatggagaacactgttcggagattgaatctccgccgtctcttggaactcataggagattgatttctttgcttctgtggttgtttccgaaagaaggaagaaggaagagaatattggaggagcagttgaattcgtcgttgaggattaagaagactaatcaacggttgatgctctttcaacctttgtttaattatcgtaaacgcaacgaccaattttcattactctcttaagatttttcttttctaaaagaaacaacagtttgaagtttattatacacacttgtgcaagttgcttaacaaagtcatagaattt

SEQ ID NO: 140856 - DNA, 404 bp, Arabidopsis thaliana
cccacgcgtccgcccacgcgtccgttcggacaacaatgtcacaaaaagtctgatcctttctctttagatttggcttcgagaaatggctcgcgatcggcgggaaggtctggagatcaaggtggtgaatccaccggcggcggcgacaaacaatgtggctgtagaaacgtctccggcgacggcgacgaggagacggagacaacaacaacgagcttcgttcgctgagtttagaccgtttaagctttggtttccatggcttgttccagctatcgtggtggctaacattgcccttttcgccatttcgatgtttattaacaattgtcctaagaactcggcttattgcttagctaggtttcttgggagatttgcttttcagcctatgaaagagaatcctcttctgggtcctt

SEQ ID NO: 140857 - DNA, 412 bp, Arabidopsis thaliana
actaatttgacatatgcaaaggatttggttgatgtcatgtatcgtgacaatggaccggatttcggagcagcaagtgatggtgatggtgacagaaatatggttttaggaaacaaattctttgtcactccttcagactctgtagctatcatcgcagccaatgcacaagaagcaattccatatttccgtgctggtcctaaggggctggcacgttctatgccgacaagtggtgctcttgatcgtgttgccgagaagttgaagcttcctttcttcgaggttcccactggatggaaattttttggaaatcttatggatgctggaaaattgtcaatctgtggagaagagagctttggcacaggttctgatcacatccgtgagaaggatggaatatgggctgtgttggcgtggctttcga

SEQ ID NO: 140858 - DNA, 409 bp, Arabidopsis thaliana
gttgatgaatacttgatgcaatacctgatggattacgaagacaaaaagttccagaatgtgtccaaggaaggactgaaggttgggaaagattcaaaagacaaggagctgaaggaagcattcaaggagctaacaaagtggtggaaaggaaatctcgctagcgaaaacgtagacgatgtcaaaatcagcaaccgtttggctgacactccatgtgtagtcgtaacatccaagtttggatggagtgctaatatggagaggatcatgcagtcccaaactctctcggatgctaataagcaagcttacatgcgcggaaagagagtcctcgagatcaacccacgacaccctatcatcaaagaactcaaggatagaattgcaagtgacccagaggatgagagtgtgaaggaaacagcac

SEQ ID NO: 140859 - DNA, 421 bp, Arabidopsis thaliana
caaacatccacgcgtttgttggcactgccacaaacaggaaattttggtagtttcaattggtaaacatgtactgcgtattgatactacaaaagttggcagaggtgaagtattctctgctgaggctcctctccagtgtccccttgataagctgatcgatggtgttcagattgttggtaagcatgatggagaagtgacagatttgtcaatgtgccaatggatgaccacgcgtctggtttcttcttcagttgatggcacgattaagatatggcaagatcgtaaggcacaaccacttgtagttttgaggcctcatgatggacatccagtcagttcagccacgtttgtgacatctcctgagagacctgatcacatcatacttatcacggggggtcctctaaatcgagaaatgaaaatctgggtctct

SEQ ID NO: 140860 - DNA, 241 bp, Arabidopsis thaliana
accacgcgtccgatgaattcttgcgtgtttcaaatttttatgttgtaatatatattgttggattctagattcgattcgtgattcttgtttttgattcttaatgtggtatcatagtttggatcgttcaaaaagttgtaagtcaaaaaaaaaaaaaaaaaaaaaaaaaaaaaaaaaaaaaaaaaaaaaaaaaaaaaaaaaaaaaaaaaaaaaaaaaaaaaaaaaaaggggggccgctctaaag

SEQ ID NO: 140861 - DNA, 415 bp, Arabidopsis thaliana
caatcctcaatctcagtctctctgttgactccgactgttatataaaaccatacaaataccttcagattcactacttcaaacctcaaagcaaccactgaatctcgactttgatcaattgagagagaaatgaacaccggcggtggccaatacacggattttccggcggtggaaactcacggaggacagttcataagttacgatatcttcggtagtttattcgagatcacatctaagtatcgtcctccgattataccaattggtcgtggagcttatggaatcgtttgctctgtgttggatacggagacgaacgagctagtaccgatgaagaagatagctaatgcttttgataatcatatggatgctaagcgtacgcttcgtgagatcaagcttcttcgtcatcttgatcatgaaaaca

SEQ ID NO: 140862 - DNA, 214 bp, Arabidopsis thaliana
accacgcgtccgatcatttcttcttcttcttcctcactttgttcatcatcttcttctccgatctaggcaacaatggctacaccagaagcttcctcagcacgagatggattcgtatacatggcgaaactcgccgaacaagcacagcgttaccaaaaaggggttgagttcatggataaagtcgctaaagctgttggaaaagacgaactcaccgtcg

SEQ ID NO: 140863 - DNA, 353 bp, Arabidopsis thaliana
cttgtctgcttgttttgctttgatccgtcgtttatactttgttgtggtgagtggaatttgcttcaaaataaatcctgaaattattacgagattctgaaccagttccatttgatataatataataatataaacaatacctgaatctttaagtcaatacttactacaggtttgttatcaaaacaagttcttctctgttttagtaaatgtttcttctgtctcagtctcactagaacgatctgtccatgagattttctcgtaaagggttattatggctgaaggagttgtgttgtttggagttcataagctttgggagcttctgagtcgagaatctgcgcgattgaatggaattggtg

SEQ ID NO: 140864 - DNA, 332 bp, Arabidopsis thaliana
gcgtgggcggacgcgtgggttttttttttctttttgttcaacgaatctctatctctctctagattttggggattttgctctctctccctctctgtctctctttggtgctcgtagctttctgtctcccaattgagagaaggagggagatagaaacgtcgatgggcttaattgtggatgatgataacgatggagaagttttgattccgccgccgaatttttcaatggtagaagatgaaatttaccgatctgggtttcctgagctggagaatttcggattcttatcaaccctaaatcctcgattcatcatttatctgtgtcctgagccataccct

SEQ ID NO: 140865 - DNA, 263 bp, Arabidopsis thaliana
gtaaaaaacaaaactttactaattcaatttcaaagtctcttcttttctccagatactctgttttaccattcaaggaaaaaggataaatcttgtagaaagaagatgccaaaatgatttttttatttagaaattaaacagcgacgtcgttttgcagctacagtgcgatcatctaatcagtcagtgtcttcaagtttaaaccgcatctctagtctctctctacttctctctgtgtacaatattcggaaagtgaggaagatacactg

SEQ ID NO: 140866 - DNA, 256 bp, Arabidopsis thaliana
cccacgcgtccgtggatgtttaagcaaaaaccatggcttctcgctgtgagctacttctgatctgcgtcttctctctcttaattgcttttgctcactccaagacattgaagcgagatgtgaaagctttgaatgaaatcaaagcctctttgggatggagagtggtgtattcatgggttggtgacgatccttgtggagatggagaccttccaccttggtctggtgtcacgtgttctacacaaggagactatagagttgt

SEQ ID NO: 140867 - DNA, 252 bp, Arabidopsis thaliana
ttcattcttaatttctcaaaaatcttatctttctccctcatttttcccgtcgagggttccttaatctccttcctaggaacgtttcatcgatttcatatttgctttccttaatccacaacgtttcttccttcgtttttttctgcaattttgttttcctttacaccaaattcatctcttagtcttgtccaattttcgattttttttccgacaatcctgattgtttgtttttttatctgtcgggatttcgaatgg

SEQ ID NO: 140868 - DNA, 252 bp, Arabidopsis thaliana
aaaacttgttcactaagaaaaaatcaaaatcaaatcagagcaccaaaaccgactcagatctagatcggatttctccaatggctctcgaatgggttgtgttaggttacgcagcagcagctgaagcgatcatggtgattctcttgacgatgcctggacttgacgctctccgcaaaggattagtcgctgtaactcgtaatctcttgaaaccgtttctctcgataatcccgttttgtctcttccttcttatggata

SEQ ID NO: 140869 - DNA, 266 bp, Arabidopsis thaliana
gagcttagagctccatcatcaaatcttatcaatggcttcctcactcgtctcatcttttcaacccaggtcagcatttttgggagatagaaatgtgttcaaggtctcaagcacaccttttgctcaagtgggttactccagtaagaccattgagtgcaaagaatcaaggataggaaagcaaccgatcgctgtaccttccaatgtaaccattgcattggaaggtcaagacttgaaagtgaagggtccattaggagagctggctttaactt

SEQ ID NO: 140870 - DNA, 252 bp, Arabidopsis thaliana
atctacatattaaccatgaagcttcttgggttcgccttagctattctattagttgtggcgacttgcaaacctgaagaagagattacttgcgaagagaacgttccattcacatgtagccaaacagatcgtttcaacaaacaagatttcgaaagcgacttcatcttcggtgttgcatcttctgcttaccagatcgaaggcggcagaggtcgtggacttaacgtttgggatggcttcactcaccgatacccagag

SEQ ID NO: 140871 - DNA, 264 bp, Arabidopsis thaliana
ggagaaaaacattattccgcaggttgctctatttgatttattgaagaagtttgatggagaaactgtgacagaggtggttcggcctaagctggccagaatgagataccgtgtaatcaaatctcctcgttacttgatgttccatatggttcggttcaagaagaataacttcttcaaagagaagaaccctaccttggttaacttcccagtgaaggacatggagctgagggattacataccatcattgcctagagcaccagaaggcga

SEQ ID NO: 140872 - DNA, 260 bp, Arabidopsis thaliana
cggacgcgtgggttgcataggagcaccccttgctttgaatatagattcaatcttgtctccgtttggtgcaaccattttgttcctcgtcatcacgtttcatctcttggcttttgttgctggttactttttcactggtttcttcttcagcaaggcacctgatgtaaaagctctgcaaagaacaatttcctatgaaacaggaatgcaaagtagtcttctcgctctggccctcgctacaaagttctttcaagatcctctcgttg

SEQ ID NO: 140873 - DNA, 265 bp, Arabidopsis thaliana
aggataactatggcgacccagaagttatcattgccgagaatggttagagaaaatactcaaagctcatttcctaaatttcaatattattttatttttgatgaaaaacgaagtttgaatttttcttttggttttcaaggatacggagaagaccttggagagaagcacaatgacgtaaactttgggacacaagatcacaacagaaaatattatatccaaaggcatctcttgagtatgcacgacgccatttgcaaggacaaagtgaacg

SEQ ID NO: 140874 - DNA, 254 bp, Arabidopsis thaliana
ggaggatcctgcgaagaccaaccagtctgttaattttgtataaacactgaaacgaagaagatcttccgagaatattctctccttctcacgcataccctagaatattgtttcgtctctcttccttctaggtttgcttatttgccccaactcgacgcgaatcatcagcttttagagattctgtcaactcaaagattgtttctgaattggaagcttacagaggtttagcttgagatgatatgactagtcagcaggag

SEQ ID NO: 140875 - DNA, 262 bp, Arabidopsis thaliana
caaaaacaatcggcgagaaaaagggggaatcagtttcttgcaagtttcaacaaggacgatcagaataaatcttagagaaatcggaaaattctcttactcgggttttgcatcggtgaatatgaattgcgaagtttgtcagctaaaggaactggaagtggaatccttcgagatacgcgaagttttgcgctgcattctacatacgattgtctttcatcgtgcgcttggtcttatccgccctaaagatattgatttggagcttttt

SEQ ID NO: 140876 - DNA, 264 bp, Arabidopsis thaliana
cttttatactcaaggttgggtgtctggcactggcggtagcataacgatgaaagttcatgatgcttcgattcctaaaccggagcaacttatcgtcatgtctccttcaggtgttcaaaaggagaggatgcaacctgaggatatgtacatcttatctgctaatggatccatcatatctacaccctctccaaagccatacccaaataagcctcccaagtgtaccgattgtgctccacttttcatgaaggcatatgagatgcgaaatgc

SEQ ID NO: 140877 - DNA, 258 bp, Arabidopsis thaliana
cctcaacttccaaatctctgacagaaaagcccttatctttctcaccgtcggcgagtttgccgactctcacggcggagagacttatcaaaggattcaatttgatgcctacacgcgacgtcaatgtcatcgatgaagaaggttctgaggctccgagactggtcgagagagcattcgatttgccggcggcggttgaccgtcgtggctccggtggttctccgtcggttcaagattttggtcaccatgctggttactacaaac

SEQ ID NO: 140878 - DNA, 261 bp, Arabidopsis thaliana
ctattatctttgttgtcgagaataacttgtgggccattgggatgtctcacttgagagccacttctgaccccgagatttggaagaaaggtcctgcatttgggatgcctggtgttcatgttgacggtatggatgtcttgaaggtcaaggaagtcgctaaagaagctgtcactagagctagaagaggagaaggtccaaccttggttgaatgtgagacttatagattcagaggacactccttggctgatcccgatgagctccgtg

SEQ ID NO: 140879 - DNA, 386 bp, Arabidopsis thaliana
cccacgcgtccgatttcaacgtttcgttttcctgtacctcttttaagaataaaaaaaaaaaaaagaaatgggaaaaatttcattagcgatatgtctaacgttgcttgtcacattaagcactgtttatgaaacacaagggacgttctcattacccctttacttgaaaaatttccccaaactgggcaaagactatgaggctttcgcaaacaaaggtatatcggactttttgggtgacctaaagggtatgtgtcctaaaaccgcagagttcaaggatttctttgaaaacttgaaggattacatggccttcttcaattcagcagcacccgggtcaaaagacaaccagttcgagatgttcgtaaaatctgaaaagctgttcaaggctttgt

SEQ ID NO: 140880 - DNA, 363 bp, Arabidopsis thaliana
gccatggcttcggctactttctctgtggccaaaccatctcttcagggtttttctgagttctcaggacttcgaaactcctcggctcttccctttgcaaagaaatctccttccgatgagttggtttcctccgacagtttccaaacttcggcatgagaaacaatggtggatacaggaaaggggtgaccgaggccaagataaaggtagccatcaatgggttcggtatgattggtatgaacttcttgaggtgttggcatggtcgtaaggactctcctcttgatgtcgttgtcattaacgacactggtggtgttaaacaagcatcacatctcctcaaatacgactcaactcttggaatctttgacgctg

SEQ ID NO: 140881 - DNA, 399 bp, Arabidopsis thaliana
gcaggaggaagaagacgaagaagaagaggagcagctactaccatggttctcaagacggagctttgtcgtttcagtggacagaagatttacccaggaagaggaattaggtttatccgatctgattctcaggttttcttgtttcttaactcaaaatgtaagaggtacttccataacaagttgaagccatccaagcttgcatggactgccatgtacagaaagcaacacaagaaggatgcagcacaagaggctgtgaagagaaggagacgtgccaccaagaagccatactcaaggtccattgttggtgctaccttggaagtaattcagaagaagagagctgagaagcctgaagttcgtgatgcagccagggaagctgctctgcgtgagatcaaggaaagaatc

SEQ ID NO: 140882 - DNA, 130 bp, Arabidopsis thaliana
gtaaactttaacccaccgagttaaatccatctctgcaaatcatcatagaaggcttttcttatctttaggtttcaatgtatcaatccacgaaaagctctttgtatgtagattgttgtagctcttttgaact

SEQ ID NO: 140883 - DNA, 367 bp, Arabidopsis thaliana
cggacgcgtgggctcgttgttgtctcatggagagcacggagcagccgaggaacatctccggatcgatgcagagccctagatctccgtcttcgcatccgtatctgtcagtctccgtcacagatcctgtcaaattaggcaatggcgtacaagcttatatctcttacagagttatcaccaagactaacttgccggagtaccaaggacccgagaagattgttattagacgatacagtgatttcgtctggttacgggatcggctttttgaaaagtacaagggcattttcattcctcctcttccagagaagagtgctgtagaaaaattccgctttagtgccgaatttattgaaatgaggcgagcagcattggg

SEQ ID NO: 140884 - DNA, 247 bp, Arabidopsis thaliana
caagaccttagagactctgatcctcgacttcaacgatttaaccggtgaaatcccttccggtttaagtaactgtaccaatcttaactggatttctctgtcgaataaccggttaaccggtgagattctctaaccggttaaccggctattcgacagagaaatccagttaagattggcacagttacttaaaccggaagggatttcaccggttaaatcgttgaagtcgaggatcagagtctctaaggtcttg

SEQ ID NO: 140885 - DNA, 405 bp, Arabidopsis thaliana
atttcactctctctcttgagtttattcttctctgctgtatcaatcaaatcaacggagtttgagtttcttttccgattccggcgatggggtcagtccccgatccaggcgagttaactgagttagctcagccgagtttcgaggagtttcagaaacagacgtcgttgatgactagctgtactcttctatggcaagagctctccgatcacttcacttctctagagcagaatctgatgaagaaatctgaagcgttgaagcagatgattgaaactctagataaccagactcagacctcgctcgagtctctgaagcgtagagaggtaacaatcgaccatagcgttgagatcgtagctgggaaagtaggtgaacgagctagagctgctcttgaatcgttagagaaagctagag

SEQ ID NO: 140886 - DNA, 351 bp, Arabidopsis thaliana
gttatttcaaagcctttgacaatgggttcctttggagatgtgttggctgttccgagctatgacacaataagcagcaaatttcgttgaagcaaaacaaacaatttgccaaatcaacaatattttgggacttgtaaaataaagaagatcttggggagaagaagacccaaccaattttaattttaatttttttttttacaattacagtttcgtatttttatgaaatggattttgtttccatcgacagatataaatgactggattttgtccggtttgtctctccaattttcaggagtatttgtattccaataaataatcttttactacgtgtaatgcaaacaacttcagtggtac

SEQ ID NO: 140887 - DNA, 316 bp, Arabidopsis thaliana
cattttctctcactttctcgagaaaatataacttcagaacttttcagagttagtttgacttcaaacgtgggaaaaaatggccggaagtcttgtaaaatgcagcaagatccgtcacattgtgagactcagacaaatgctccggcgatggcgtaacaaagcgcggttatcttcggtcagccgttgtgtaccgtcggatgttccatctggacacgtggcagtttgtgtgggtagcggttgcacgagatttgtggtgcgtgcgtcgtacctgaaccatcctatcataagcaatcttctggttcaagctgaggaagagttt

SEQ ID NO: 140888 - DNA, 427 bp, Arabidopsis thaliana
ctctcttcctcaaaaaaaacacacaaaaaacacgtttaaaacaaaaactaaaaatatagaataatggcaagagttcaactattgttatgcttcaccattctatttgcatctgtgacccttcttgacctagtatcatcacacctgaaatttaagccatctttgcctcaaatcgaagatccaaagacggtgaaggatgtagagccttacaccgttaaagtagtaatggtctttgtggccgacctcgagaaggaatgtcccaagacatacaagttcaaggccttctttgagaaacttagaggattcgccaagtatgtttgcccaataagaaggattggccaagtagattacgaccgggacatgaaggccaaagccgggggtatcttcaaggccatatcttcttttgcgattggaaagattagggaggaaa

SEQ ID NO: 140889 - DNA, 395 bp, Arabidopsis thaliana
acagcttcttcataaatctctctctcttctcctctcttctcaaagatcgaacctttcgatttcagtctcttcagagttctttcgttttcatcgaaacaatggcgaagaacgttgggattttggctatggatatctatttccctcccacctgtgttcaacaggaagctttggaagcacatgatggagcaagtaaagggaaatacactattggacttggccaagattgtttagctttttgcactgagcttgaagatgttatctctatgagtttcaatgcggtgacatcactttttgagaagtataagattgaccctaaccaaatcgggcgtcttgaagtaggaagtgagactgttattgacaaaagcaagtccatcaagaccttcttgatgcagctc

SEQ ID NO: 140890 - DNA, 243 bp, Arabidopsis thaliana
ttcgaaaccaaaatctctctctcgtttgactttccctctctcccgtcgtttcaccggaaaaaaacaacagaaaaaaaaccgacgggagagaagaacaaacaataatggggaaaggaggacgtgagaagatatcatcaaacgaagaagaaagagaaggagtcatggctacagatttcttttggtcttacaccgatgagcctcatgcttcgaggagacgtcagattctgtcttgttaccctcaga

SEQ ID NO: 140891 - DNA, 374 bp, Arabidopsis thaliana
cccacgcgtccgcacatatcttggctctacagggaatgcaacaagtgataaagaagtagagaggttattgaaagatgcagagagctacactttagcaaaccatatcttctggggactatggggaatcatctcgggacatgtgaacaagattgagttcgattacatggaatatgcaaggcagagatttgaacagtactggcttagaaagcctttgcttcttgaaggatgaagcagattcgcattgaaaagccgatatacaactaaaagtttctgcaattaggtcaaaagaaaaaaagaaaatttagtagactatatgttgctattgttactctcatcagtttgtgtgtttcttcccttctatatagaggtttgtt

SEQ ID NO: 140892 - DNA, 388 bp, Arabidopsis thaliana
  unsure (1)..(388): unsure at all n locations
cccacgcgtccgcccacgcgtccggttaacttgaacacgaagttaatgaaactatcaggaagtgtgatttgtagagttgtatttggtatcaatcttaaaggaagtaaacttgagaatctttatgaggaagttattcaaggaaccatggaggtggtggggagttttgcagcagcagattacttcccgatcattggtagaatcatcgataggatcacagggttacatagcanatgtgagaagattttcaaggcaatggatgcattttttgatcaatctataaagcatcatctagaagatgagagtattaaggatgatatcattgacttgctcctcaagatggaaaggggagagattgaacttggggagtttcaacttactcgagacaaca

SEQ ID NO: 140893 - DNA, 250 bp, Arabidopsis thaliana
gcaaagactaaaacatccttctttactatatatatctttcgctccactacgaaggttattttcgtaattcgacacaattccttacagagaataagcgaacagatcaacaactactctgctcttacaggcgacgacgtcaacaacaacccaaaataccaaaaaccctcaaaagtctcaaacaaaactcaaaacccaacaattaaagaaacaacatttcaatatacagatttacttccttttacagattttc

SEQ ID NO: 140894 - DNA, 396 bp, Arabidopsis thaliana
cggacgcgtgggcacaaaagctatctccgaggttagagcaatggcagctgtgaactgccatttcttccagctatcacgacatctcaaaccttctaggccttctttttcctgctctgcttctcaaccttcacaaaacaacattaaggtaatcataaatggagctgctaaggaaataggtagagcggctgtggtggctgtgactaaggctaggggaatggagttagctggtgctgtcgataatcattttgttggcgaagatattggcttgctgtgtgacatggaggagcctttagagatacctgtagtgagtgatctaacaatggtgttaggctcaatatctcagggaaaagaagtcggagttgtgatcgactttacagacccatcaacagtgtatga

SEQ ID NO: 140895 - DNA, 391 bp, Arabidopsis thaliana
cacacgcgtccgtgtctctcttcttcccgcggagctttcagtttttgtttggtattgcttggtgtggggaagattagatagtgtgaagaatggcagtagctacacattgtttcacttcaccttgtcatgaccgtattcgatttttctcaagtgatgatggtattggtaggcttggcattacaagaaagaggatcaatggcactttcttgctcaagattttacctccaatccaaagtgctgatctcagaacaactggtgggagatcctcacgtcctttatctgcattcaggtcaggattctctaaggggatatttgacattgtgccattaccatcaaagaatgagctgaaagagctgaccgctccgctgttgctaaaactcgtgggtgtttt

SEQ ID NO: 140896 - DNA, 380 bp, Arabidopsis thaliana
cggacgcgtgggcggacgcgtggggcagtgtacaggagaacgggtcagggttcatcctatggtgcaggtgtgaaactcggtttggtccgagctgagtatgctgtagatcacaacaatggaaccggtgctctgttcttccgatttggagagaggtattaaggtaatgtgagaagcaggctcatgttatccaccttagtcttttcattttctctgttgaggatctgctatttttctcttttttccttttcttttgtgttttctttttttttttctacttctttttcaataattgtttaatgttagtgtttgatgacgttgctgagttgtgctgagaatcgggaaagagtttgttcttcgtaatatgtctagacttttgtagg

SEQ ID NO: 140897 - DNA, 391 bp, Arabidopsis thaliana
cccacgcgtccgcccacgcgtccgctagggtttttcgcctctttctcaactctcttctcgaaaacctagcagtcgtctctttctcagttctccatgggaaagtctaaatccgccaccaaagttgttgcagagattaaggccactaagcctttgaagaaaggcaagagagagcctgaagatgatattgacaccaaagtgagtcttaagaagcagaagaaagacgtgattgctgctgtccagaaggaaaaagctgtgaagaaggttcctaagaaggttgagagctctgatgattcagattctgaatctgaggaagaggagaaggctaagaaagtcccagccaagaaggctgcttcaagcagtgatgagtcatctgatgactcttcttcagatg

SEQ ID NO: 140898 - DNA, 211 bp, Arabidopsis thaliana
cccacgcgtccgcccacgcgtccgcccacgcgtccgcccacgcgtccgagagcttatcttggtttgttgtgaaggttttggtactagtggtatctctattgttgccaacaagtgcagaaagctgaaagtgcttgatttgattgagtctgaggtcacggatgatgaagtggattggatctcttgtttccctgaggatgtaacttgtttggag

SEQ ID NO: 140899 - DNA, 326 bp, Arabidopsis thaliana
aaaatagggtcttatcaatattttgcaaataaaccaaaattaaatacagacttgtttaatttctgaatctctctcttcctctttctcgcgagctttttctctctgggtttagggttccggtaattttgcgacgacaccgagcgattcgtgcctccctccccttcctttgacttcggttctaacttgattaccagtgagaagtaggctaagatggaaatcatgtcaagagagaatgagactgctttgtcaggtcctaggccgatggaatggtctaccgtcccacacagtgcttctcaaggacctggtcccaatggcaagaaccggac

SEQ ID NO: 140900 - DNA, 219 bp, Arabidopsis thaliana
atcacaatggtttggttaatgaaagtttttgtctttgtgacattactctctttagtgtttgtaataacagaatcagctcctgaatctgctcttatcaccaaacttcctggtttcgaaggcacttttccttcgaaacattactccgggtatgtgacaattgataaggaacatggaaagaatctatggtattactttattgaatcggagaagaatccatca

SEQ ID NO: 140901 - DNA, 214 bp, Arabidopsis thaliana
cggacgcgtgggcaaaatcagcaacttctctctcgagtttcagaactttgtattcaactccaggatcggttacaaggtcttgaaggagaaaattagtaagcagtgctgatatgattctacggcttttggatcttgtaaattggtatgttaattgttagatttggaaaaacgacgtttgcttataatgtcttgtttgatttcttgtattggaatg

SEQ ID NO: 140902 - DNA, 211 bp, Arabidopsis thaliana
cccacgcgtccgagagaatggtagaagaagaggagttgcagtttcacgaggagtatatgaacgaaagagatcctagcatccttcactttcttttagcttcaggagatgatgtctctagtaagcagcttcgtgatgacttgatgacaatgcttatagccggacatgaaacatcggcggcagtattaacatggaccttttaccttttaacaac

SEQ ID NO: 140903 - DNA, 217 bp, Arabidopsis thaliana
gagagatcttaacacaaaacaaagcaaacaccaaaaaaaacagagatgggtttggttacagatgaagtgagagctagggcagagaaatacacaggagatgagatatgccgtgagaagacaaaggagtttctcaaggaagtttctatgcctaatggtttattgccattgaaggacattgaagaagttggttacgacagagagacaggtattgtctggc

SEQ ID NO: 140904 - DNA, 217 bp, Arabidopsis thaliana
cggacgcgtgggcggacgcgtgggcggacgcgtgggttaaaaaagaaatgaggccaaaagcagtgtgggagcctgagtatcacagagtgtttgttgatttatgtgtggagcaaacgatgctagggaataaaccagggacacatttttcgaaagaaggttggaggaacacattaatatcgtttcaggagcaaacaggcgccatgtacgatagaatgca

SEQ ID NO: 140905 - DNA, 217 bp, Arabidopsis thaliana
gtaaagatggaacttcaccggttcttaaccaagcacccttggttaacttttctggtcacaaagatgaaggctatgctatagactggagtcctgcaaccgctggaagacttctttccggggactgcaagagtatgattcacctgtgggagccagcttctggttcatgggctgttgatcctattccgttcgctggacacactgcaagtgttgaagattt

SEQ ID NO: 140906 - DNA, 214 bp, Arabidopsis thaliana
cggacgcgtgggcaacttggcttttatctaataaagcccctccctctccgataaaccttaaataaaaccggagggagagcaaaaaataaaaacaaaaatatacaaaaacaaaaacaaaaaatcataaaaaatgattggaaaagttgtggtctcggtggcctccatcctcttaatagttggagttgccataggagtcgttgcctacataaacaaa

SEQ ID NO: 140907 - DNA, 214 bp, Arabidopsis thaliana
tggactccaatttctctgatcattccctctaatttcggatttttgcatcttctccgatcatcttcaccactatgggtgcttcatcttctacagacgacaaagaatcatcggagaaacgagaaatcgaaagccttgctgcttcaaccggagctcttcctctgcttaaacgatccttctccaaactcgtcgattctcaaaccaatactgttccttt

SEQ ID NO: 140908 - DNA, 213 bp, Arabidopsis thaliana
cccacgcgtccgagcgtttactgtgagtctctcaaagaaaccaaaggcagagaaaagagataacacacacaaaaaaaaatggcatcaacctcactcctcaaggcttctccggtgttggacaaatccgaatgggtcaagggacaaagcgttctcttccgtcagccttcttccgcttctgtcgtcctccgcaaccgtgccacctccctcaccgtc

SEQ ID NO: 140909 - DNA, 210 bp, Arabidopsis thaliana
gaaaaaaccaccaaatcagtttcgttgtcccaaatccaaaattcctccttcttcttcgctgtaacgctttatacctaatcggagataaaacaatgcaatcgtcgaaaggacggcggaaagttggctccacaaccgccggagccggtatagattcggcggagaagctcgacgagctcttgatatcgtctgccatttgtaacggtgaagatt

SEQ ID NO: 140910 - DNA, 215 bp, Arabidopsis thaliana
  unsure (1)..(215): unsure at all n locations
natccgagaaaaaccaaaaaatcctttgaaacttttttagcctgtcgcttctctttccatcgtcttcctcgtgaacgaaacttctcgatcttcttttcttttttttcacctgtttttcggtatcacgagaatactacacttcccactccactttatcggatatatttccttgattttctccgattgtggtcaatctggaaaattattgagaatct

SEQ ID NO: 140911 - DNA, 180 bp, Arabidopsis thaliana
agacgaaatctcgctcgctttcgccgccgtgaaatttgaatctccgatgactacaacgattccgatatgtccacggttgatttcgaattcgaattttgatattgtgactccacgatgtcggtcttctcacctattgctctcaccagaacgtttgttgagaagaattacaaagatttgaag

SEQ ID NO: 140912 - DNA, 208 bp, Arabidopsis thaliana
gccatggcttcggctactttctctgtggccaaaccatctcttcagggtttttctgagttctcaggacttcgaaactcctctgctcttccctttgccaagagatcttcttccgatgagtttgtttccttcgtcagtttccaaacttctgcaatgagaagcaatggtggatacaggaaaggggtgaccgaggccaagataaaggtagcca

SEQ ID NO: 140913 - DNA, 325 bp, Arabidopsis thaliana
agcgattatggcgagcaagatgagtctccgttactctctctttttgatcttcttctctctcatttcactccaaggttttgccaagaagaccggagatgtgtcggaattgcagatcggtgtcaagtttaagccaaaaacatgtgaagttcaggctcacaaaggtgatacgatcaaggtgcactatagggggaaacttactgatggaactgtattcgattcgagttttgaaaggggtgatccgtttgagtttaaattaggaagtggtcaggttatcaaaggttgggatcaaggtttgccaggagcgtgtgtaggtgagaagaggaag

SEQ ID NO: 140914 - DNA, 208 bp, Arabidopsis thaliana
cccacgcgtccggccaaatttgcagactttcccaggaccaaaattatattaacaaaaagttccttttttctgatcaaattgtgaaattcgcttgcttgctttcttcacagtcaattaattctctaacaaaacattcttcgatcgttcgttttcatcttctatgcttctctgatcagacacaagaatacaaccaaagaaactcactata

SEQ ID NO: 140915 - DNA, 207 bp, Arabidopsis thaliana
gtttggtattataggcgatatgggtcagacattcaactcgttatccacgttggaacattacatggagagtggagctcaggctgttttatttcttggagatctttcttatgctgatagatatcagtataatgacgttggtgtgagatgggatagctggggtcgttttgtggagcgtagtaccgcttatcaaccgtggctttggtctgc

SEQ ID NO: 140916 - DNA, 207 bp, Arabidopsis thaliana
gagagatctaaatatccgccatggacagagcacaattgatcttgttaggtctacctatattcttgttttgttcggatctcttcaacctcttcactcctccgcctcctaaacctcagcctcaccgtcctcatcagccaccgcatattcctcaccagcatcgtcctaatgcgatcatccccgaaaccctagactttccttcacagaaga

SEQ ID NO: 140917 - DNA, 215 bp, Arabidopsis thaliana
agcgtgtaccaatctctcccgctctgtctctctctctctctttcctccatctctctgtgttcttcttacagacaccgagaatggcggatcctgatctgtcttctcctttgatccaccatcaatcctccgatcaacctgaagttgttatctctatcgccgacgacgacgacgacgagtcaggactcaatcttcttccagccgttgttgaccctcga

SEQ ID NO: 140918 - DNA, 211 bp, Arabidopsis thaliana
aaaaaatctcgagacaaagatacaatggcgagccgaaacagagcactcttctctgtttccactcttttcctctgtttcatcgtctgcatctccgagcaatcgaacaatcagtcttctccagtcttcgcctgtgacgtcaccggaaacccttctcttgccgggcttagattctgcaacgcggggttgagtatcaaagcccgagtcaccgatc

SEQ ID NO: 140919 - DNA, 215 bp, Arabidopsis thaliana
cggacgcgtgggttcaactttctttcttatttcagtaaacgagagatatgttttcaatctcaatctgattctttctcgcagcggctaattctagtgtcgctaatagggtctctgtttcttcaaatttagttctttaaattcactacgaagatttttgttatggcgagtagaaagctggttcgagatttactgatcacaaagcagcctcttctcca

SEQ ID NO: 140920 - DNA, 204 bp, Arabidopsis thaliana
cccacgcgtccgcgaaaatgggtgcgtacaagtatgtatctgagctatggaggaagaaacagtccgatgtgatgagattcctccagagggttaggtgctgggagtacagacagcaaccttcgattgttcgtctcgtcaggcctactcgtcctgataaggctcgtcgtttgggttacaaggccaagcagggctttgttgtgtacc

SEQ ID NO: 140921 - DNA, 326 bp, Arabidopsis thaliana
atggcgattcgttgtgtagcgagtacaaaaaccctagccggcttgaaggagacatcatcgaggctattgaggatcagagggattcagacttttacgcttcctgatcttccttacgattatggcgcattggaaccggccattagtggagagatcatgcagattcatcaccagaagcatcaccaggcttatgttactaattacaataatgctcttgagcagcttgatcaagctgtgaacaagggagatgcttccactgttgttaagttgcagagcgccatcaaattcaacggcggaggtcatgtcaaccattcgattttctggaagaa

SEQ ID NO: 140922 - DNA, 343 bp, Arabidopsis thaliana
gaaccttctcaggggtatttatgcttatggttttgagaagccttctgctattcagcaaagaggaatcgtccccttctgtaagggtcttgatgtgattcaacaggctcagtctggtactgggaaaacagcaactttctgctctggtgtcttgcagcagctggacttctcccttatccagtgtcaggctttggttctagctccaactagagagcttgctcagcaaattgagaaggtcatgagggcccttggtgattaccttggtgtcaaggttcacgcctgtgttggtggaaccagtgtccgtgaggatcagcgcatcctccaagctggtgtccatgttgttgtt

SEQ ID NO: 140923 - DNA, 359 bp, Arabidopsis thaliana
acgtatggatcctggagaagaagaaacagagcaattaaagaaagagtatgtaactttcatgaaaggagttgtctctgctcctctaaatctaccaggaactgcttatcataaagctcttcagtcacgagcaacgatattgaagttcattgagaggaaaatggaagagagaaaattggatatcaaggaagaagatcaagaagaagaagaagtgaaaacagaggatgaagcagagatgagtaagagtgatcatgttaggaaacaaagaacagacgatgatcttttgggatgggttttgaaacattcgaatttatcgacggagcaaattctcgatctcattcttagtttgttatttgccggac

SEQ ID NO: 140924 - DNA, 352 bp, Arabidopsis thaliana
cccacacgtccgcccacgcgtccgcctgaccttagtgacgtcgaattggctaacgaagttgactaccttctccgcaacaagtggattccttgtgttgaattcgagttagagcacggatttgtgtaccgtgagcacggaaacactcccggatactacgatggacggtactggacaatgtggaagcttccattgttcggatgcaccgactccgctcaagtgttgaaggaagttgaagaatgcaagaacgagtacccgggcgccttcattacgatcatcggattcgacaacacccgtcaagtccaatgcatcagtttcattgcctacaagcccccaagcttcaccgaagcttaat

SEQ ID NO: 140925 - DNA, 352 bp, Arabidopsis thaliana
aacggtttttctttcttagaatcattcatatttcagacacaaaggcagagaaacaaattcttgtaacaatggcaggcagagagattctccataagatgaaggttggattatgcggatctgacacaggcagaggtaaaaccaaggtgtggaagaacatcgcacacggttatgactttgtgaaaggcaaagcgggccatccgatggaggactatgttgtgtctgagttcaagaaagtagacggccatgatttgggtttgtttgctatctttgatggtcacttagggcatgatgtagccaagtacttgcaaaccaatctctttgataacatactcaaagagaaagatttttggac

SEQ ID NO: 140926 - DNA, 340 bp, Arabidopsis thaliana
acgaaaaaaaagaaaggaggaagaagtatcgtttcgaaagaggggagtctcaggaaaaaaaggacagaatttttttccggtgacagtgtcggtgtctctgacgctcctctctgttttcaatctttctccgtctctccctgaatgccttcgtccgtattcaggaaaattgcggcgattcatggttggaggagcgaatacttaaagggcacaatggattcaagcgaagcaaaggacacaccatcttgtggctgtatatagatccaagttgatttgtaggtttttaaaaaaaaatacgaaattttgttttagttgtgtaaatatataaataggagtgccaaag

SEQ ID NO: 140927 - DNA, 334 bp, Arabidopsis thaliana
cggacgcgtggggatgaatgtttctggagaatgtgtaggccgtgaaagatgcgaggaattagccaagtcttcttcgttttaccggaaagtttactcggaggatgtgccatatatgtttacactagaatggtcaacaagttcaagattgaaggatgtaatgcaccaattccaaaagcatttggactatcttcaagaattttggtctgtcttggacaatatcgataaatctctatgtgttgttgatgtcaagcaaccagctcgtgcctctgctattcgccggattgatgctgggaatgattgtatcatcattgttcatatcgacttcaaagaccct

SEQ ID NO: 140928 - DNA, 357 bp, Arabidopsis thaliana
acggggaaaccaagatgtgcatgtccataatgccttgggtaaaattatcatagacagtaacaacaaccccgagcatttcctgaccaccaatccttactacgactctaaggttgtgggtaagtactgcgagaaacgtgatcccactctggctgttgtggcatacagaagaggacaatgtgacgaggaactcatcaatgtcaccaacaagaactctttgttcaagttacaagccaggtacgtagtggagaggatggatggtgacctctgggagaaggttcttacggaagaaaatgaatataggaggcaacttatagaccaagttgtgtctactgctttaccagaaagcaagagcccaga

SEQ ID NO: 140929 - DNA, 351 bp, Arabidopsis thaliana
acgctcgaccacatctttctcctttggtggcaaacacaacgacagatagagagaaacgatggcgtcgaactcgcttatgagctgtggcatagccgccgtgtacccttcgcttctctcttcttccaagtctaaattcgtatccgccggagttccactcccaaacgccgggaatgttggtcgtatcagaatggctgctcactggatgcctggcgagccacgaccagcttaccttgacggttctgctcctggtgactttgggtttgacccacttggacttggagaagttccagcgaaccttgagagatacaaagagtcagagctcatccactgtagatgggctatgctcgctgt

SEQ ID NO: 140930 - DNA, 355 bp, Arabidopsis thaliana
acggagatatacaatgaggccatacgagatctgcttagctcggatggtacatcactgaggctacgagacgatcctgagaaagggacagttgttgaaaaagccacagaggaaactctgcgagactggaaccatctgaaggaacttctatctatttgtgaagcacagcgtaagataggtgaaacctcattgaatgagagaagttccagatctcatcaaatgatcagactgacagttgaaagctctgctcgtgagttcttaggcaaagaaaactccaccaccctcatggcgagtgtgaatttcatcgatctagcaggaagcgagcgtgcttcacaagctatgtcagctggtacaagac

SEQ ID NO: 140931 - DNA, 325 bp, Arabidopsis thaliana
aaagtcattgtggagccaacggcaaatgggactagctctcttcaaaagacatcagatgcaatcagtggaaaggaagtgcaggagaatgctagtggaaagaaagttgcaagaaggagaagaaagagttgctaaatctcaaatgattgtaacacagagagaagatagggcaaatgaaagcgataagattatcaagcataagggaaaagaactggaagaggcacataagaagattgatgctgctaacctcgctgtgaagaaactagaagacgatgtcagttcgaggataaaagatcttgctttaagggaacaagaaactgacgtgttg

SEQ ID NO: 140932 - DNA, 351 bp, Arabidopsis thaliana
acgcggaaccgtcaatatccgcaattcaaatcccgtccctcacaatgaatcatccgatcaggttgctgtggatattgattaccaccacaatatgttagcttcacaccttaaggtgaattcaaaggaaactattgtcggctggtattcaactggtgctggggttaatggcggtagttcgctgattcatgatttctatgctagagaagtacccaacccaattcacctaactgtggatactgggtttactaatggtgagggtactatcaaagcttttgtctcttcaaacctctcactcggtgatcgacaactcgttgcacattttcaagagattcctgttgatctccgcatggt

SEQ ID NO: 140933 - DNA, 356 bp, Arabidopsis thaliana
tcgaaccacgcgaccgcggacgcgtgggcggacgcgtgggcggacgcgtgggcggacgcgtgggcaagtaaaaaaaaaatcctaatctttgcgtcaccgttcgtgtttcctcttctctctagggttctccttcaacagttttccagtaaacatgagtcgtcatcctgaagtgaagtgggctgagactaccgagaagattttcctcactgtagtattagctgatactaaggataccaaggttaacctagacccagaaggagtctttgatttctctgcgaaagttggtccagaaaaccacgtttatgagctcaaactggaacttgccgataaagtcaatgttgaggaaagcaaaatca

SEQ ID NO: 140934 - DNA, 356 bp, Arabidopsis thaliana
acgaaaccataccataaaaaacatgaaaatcctctcactttcacttctcttgctcttggccgctacggtctcggcatccgttccagggctcatcgaactcgtcgattcgaaaaccatctttgggaacgtagccgaactcttagagaaagagaaactttccatcaactacgccaactgcagaagctggcaccttggtgttgagacctctaacatcatagacttcgacacggtgcccgcaaattgcaaagactatgttgaagactacttgatcacttccaaacagtaccaatacgactccaaaaccgtgtgcaaagaggcttatttctatgccaaaggacttgccctaaagaacgaca

SEQ ID NO: 140935 - DNA, 347 bp, Arabidopsis thaliana
acgctgtttttcacgccggagatagagagagagaagtaaaaaagcgagaaaaagctagaaactttagaatacccaataatggatccgatcgaatctgtcgagtacaatggcttcgagacctctaacggtaacgtcgaccatggttggaagaaagtcgtgtacccgaaacgtcaccggaagcaaaaacaagcggatcaagcgacggcaaatggtggcaaaactgttgcttcaaatggaaccgtagctaacggcggagataacgttttccgttcgttggaagagcaagctgaggatcgtcgacgacggatcttagcggcgaagatgactgctattgattcagatgatga

SEQ ID NO: 140936 - DNA, 350 bp, Arabidopsis thaliana
acgctcaatacaagaatatctacaatctctagaaaatggcgatcacttacttgcttcctctgtttctttctcttatcatcacctcctctgtttcagctaatttccaaagagacgttgagatcacttggggtgatggtcgtggacagatcaagaacaatggagagcttctcactttatctctagataaatcctctggttctggattccaatccaaaaacgagtacttgtttggtaaagtctccatgcaaatgaagcttgtccctggaaactccgcaggaacagtcacaacactttacttgaaatcacctggaacaacatgggacgagatagatttcgagtttttagggaat

SEQ ID NO: 140937 - DNA, 381 bp, Arabidopsis thaliana
agcggacgacgtgggcggacgcgtgggcgcaactctttgtcgcgaaccttagctatcgtgtcctctactatctaacccgacccttgtatcttcctcctttcgtagctcagatcctctgtggattattatttagcccaagtgtgctcgggaacacacgtttcataatcgcacatgtattcccctacagattcacaatggttcttgagacattcgctaacttagctctcgtctacaacatcttcctccttggtctagggatggacctgaggatggtgcggatcaccgagctcaaaccggtcatcattgcttttacagggcttcttgttgctttaccggttggtgcctttctttactatctcccgggaaatggccatccagaca

SEQ ID NO: 140938 - DNA, 378 bp, Arabidopsis thaliana
agcccacgcgtccggtttgctatataaatcctccaatttctcaatattctaaacaaattatatattttcttacttacttgttctcttgtaatggatttctctccgatcaactgcctcattttcgatttggatgacacattataccctctaaaaactggaatagcgccagctgtcaagaagaatattgacgattttctagtggagaaatttggattctcagaaagtaaagcttcaagcttaagagttgaactcttcaagacttatggaagtactctcgctggtcttagggcgttaggtcatgatgttcatcctgatgaatatcacagtttcgtgcacggaaggttaccgtatgggtcgatcgaaccagacaacaagcta

SEQ ID NO: 140939 - DNA, 381 bp, Arabidopsis thaliana
acgctcggtttcaagaagaggatcttacaagcctcaggcataggcgacgagacatacgtcccaagatccatctcttcatcagaaaacataacaacgatgaaagaaggtcgtgaagaagcctctacagtgatctttggagcactagacgaactcttcgagaagacacgtgtaaaacctaaagacgttggtgtccttgtggttaactgtagcattttcaacccgacaccgtcgttgtccgcaatggtgataaaccattacaagatgagagggaacatacttagttacaaccttggagggatgggatgttcggctggaatcatagctattgatcttgctcgtgacatgcttcagtctaaccctaatagttatgctgttgttgtg

SEQ ID NO: 140940 - DNA, 350 bp, Arabidopsis thaliana
acgtcgtttcccaagattcgaactatctcgtcctgtctcggctttgtctcgtaccaaatgtcacttgagtctcctgagagctcgtgggaaatccagcttcctcactcgcagcaccgctactgatgaagctgttgaaactagtagtaacagtggattggatttggttgaggttggattcttgtctggtgttcatggccttcaaggcgagatttgcataaaaccaaacactgattttcctgatttacgtttctctaagcctggtagaagatggttaaaacaacaattgttgggacaagataagattgatgaggttgaattagtcgaaggaagacctcatcctgcgcagaaga

SEQ ID NO: 140941 - DNA, 350 bp, Arabidopsis thaliana
acggtcacactgttaatctcgccctcgaagcaaaccaagtagcgcatgtgaattgcggaaactgcatgatgctactaatgtatcaatatggagcaagatcagtgaaatgtgccgtttgtaactttgtcacatctgttgggggttcaacgagcacgactgattcgaagtttaacaattaaaacttggatctatctacctatcaatacatagtgagttatgagcaatatagaggaagcatcaaatctttttcactctctcttcgatcaagaatccggcagtgatgagtttgaaaccattttcggaagtaaatgaaatatgtaattcgtcgaaatttctgactttggtctctt

SEQ ID NO: 140942 - DNA, 352 bp, Arabidopsis thaliana
acggttagtcaccaaaaaaaaaaaaaaacacaaaaagtttcaatggccgcctccacaatggctctctcctcccctgccttcgccggaaaggctgtgaacctttcccccgcggcatctgaagtcctcggaagcggccgtgtgacaatgaggaagactgttgccaagccaaagggtccatcaggcagcccatggtacggatccgaccgagtcaagtacttgggtccattctctggcgagtcaccgagctaccttaccggagagttccccggagactacggatgggacaccgctggactttcagctgatcccgagacattcgcaaggaaccgtgagctagaagttatccacagca

SEQ ID NO: 140943 - DNA, 352 bp, Arabidopsis thaliana
acggcaaatcgtgggaagagattcatcttctctctgtgcgttcatcggatctcggagcttttggttcgtcgtcaatggcggaagatacggagacaaaagtacattacgaacgaagatcctaaaaaacacaacaaatctggagatctatggatcgcgattcaaggcaaggtctacaacgtctccgattggattaaaactcatcccggaggcgacacggtgattcgcaatctcgttggtcaagacgtcaccgatgctttcatcgcatttcatcccggaaccgcttggcaccatctcgaccatctcttcaccggttaccacatcagagatttccaagtctccgaagtctcacgcg

SEQ ID NO: 140944 - DNA, 371 bp, Arabidopsis thaliana
attttcacaaacaacctctcgtcttctaggttaatccaatttcgtcgattcatgaagttcacaattctcccatcggaaaattcttcgtaatcgacgacgaagagatcatgagtaccgtcggaggtatagagcagttgatacctgattccgtttcaacgtcgttcatcgaaacggtgaacggttcgcaccagttcacgattcaaggttactctctagccaaaggcatgagccctgggaagtttatacagagcgatatcttctccgttggtggatacgattgggcgatttacttctatcctgatgggaagaaccggagggacagtcctcgtatatctctttgttcatcgctttagcgagtgattctaatgata

SEQ ID NO: 140945 - DNA, 286 bp, Arabidopsis thaliana
agatcaccaagaagataacacaagagcccacacatcgtacgccacgtggcagattcacctctttataatcctctctccctcacggtttctacgacattttcacaaagccacaccaactcactcacaaaatctgtagaatcatctttcaacaatggcttccactgctctctccagcgcaatcgtaagcacctctttcctccgccgtcaacagacaccaatcagcctcagatccctcccgtttgccaacacacaatctctcttcggcctcaaatcttccaccgctcgc

SEQ ID NO: 140946 - DNA, 352 bp, Arabidopsis thaliana
acgcacatttgcatcgataataactcaccaacactctctctgtctccatcgaatgtttcctctaactctcaacaaaaatgcgcaaacaatttgtttttcttctgcctttcttgtcacgtctctaccatgtagttatagccggaggagaacggttaactaacggcggtttttcaccggagataaatccgttcacacccaaagcgtctttagtacgttactggaacaaacagatccatcaccaatcacccggctcagcctttctcctctccaaggcttcaccacttaccgccgtcgcctccgccaccttcgccaaactcgcctccgaaaacgctcttccggatcgcctccccga

SEQ ID NO: 140947 - DNA, 352 bp, Arabidopsis thaliana
acgtccaatccttcatcggagctcgttgtcgccgcctcactgtatatcgttgccgtcgttgtatcaacatctcaaggaagcttcgttagatgcggaaaacgtcatggacgcgaacaataccttcgattctgatctgattcacgccatttttaagcacatttgggcccgaagatttcgcgaaagggagaggagcgatgccattgatgctacggaagctgaggttgctctgggaacaaccaagaagaacagacttgcttctgcaaacgcaaatgctttaaaactcagctgtgaacttctcaagagttttgtctcagaggctgtgcagcgcgctgctataatcgctgaagctgag

SEQ ID NO: 140948 - DNA, 386 bp, Arabidopsis thaliana
acggagtctcttgaagccaaagcacagagagctctcgattgtccttgtatagcagatttgcgtaatggctcttgcgggtctcagttctccgaggcattcctttgctttctcaaaagcactgctgaagaaaagggatcagactgcgtgaatccatttgtagcattgcaaagctgtatcaatgccaatccggatgcattctctaaatcagttacaggggacgaaaaagaaaccgagaaaaaggaagagcagcctcctgtgcaagaccatagaatcatccctcctctctgggccaaagacccgcctcgcagtggcaattccaagctttagaatatcaacaacaatggagtcagcatcagaagctagtctctcctcttttgattcttttc

SEQ ID NO: 140949 - DNA, 381 bp, Arabidopsis thaliana
agcaagctaaaaatctcatagatcagagtcgtcgtcgtcaacttcatcatcacaaaaatctcagctttgtctctcttattcctcctttttctgctccttccgattcttcatcgcgccacttgtcttcttcttcttcttccgatatgtctgcttctgattcctcttcctctcttcccgttactcttgacaccatcaaccccaaggttatcaaatgtgagtatgctgtccgtggagaaattgtcaacattgctcagaaattgcaagaagatttgaagactaacaaggacgcttatccctttgatgagattatctactgtaatatcgggaatcctcaatctcttggtcaacagcctataacattcttcagagaggttcttgctt

SEQ ID NO: 140950 - DNA, 382 bp, Arabidopsis thaliana
aaattgttctatgttcctgaaatgggattaaacgagcaacaaaatgttccaagtcagaggaagatcatagtttttatagtcttagcttttataccaatagctctgtttcgactctgttttaataatccattctcctccattaaagacacctctcttcaagactctgcagctaacgttgtgatcactagcttctcttcatcttctcaagaagaagaaagccaagagagttttgatcatatacaagatgaacctttatgcgattatacgcaagggaactgggtcagagacgagattggtccactctacaatggttcaacatgtggaacaatcaaggatggtcagaattgtttccgccatggtagacctgattccggttatcttt

SEQ ID NO: 140951 - DNA, 396 bp, Arabidopsis thaliana
caaaaaaacagaaaaccacaaagaaaaaacaaaataaaaacaagaaataatggagatgaagaacatctttgtggccctctttatctcggccgtgttagtgagctcagtctccgcggctacaatggagtctccagcaccatcaccaggtgcttcctctgcctccaccgtagcttttccggtggttggctccattgttgctgcatcactctccgccttcttggctcttctcttgcagtagaaagacaagagtcctcaaaatatgagaaggagatatataacaaaactctttttttgttctgattttgttccttagaatctatgatgacaaataacccattttgatgtataatctcattgtgtaagttattacactaatatatatgagtatatgataat

SEQ ID NO: 140952 - DNA, 392 bp, Arabidopsis thaliana
gaaaaaatgagcggcggaggaaacaacgtcgtgaacaaagtgttctacgcgacgtcgtatcatccgattcaagccggaagtatcgacggaactgatgttgctccacatgataacggcgtccgtcgagctcttctctgttataacgctggcttatatgatccttctggtgattcgaaggctgttggagatccttactgtactctcttcgtgggtcgtctctctcatcacactacggaggatacacttcgagaggtgatgagtaagtatggcaggattaagaacttgcgcttggtaagacacattgtgacgggagcttcacgaggatatggttttgtggagtatgagactgaaaaggagatgcttcgtgcttatgaggatgctcatcattcact

SEQ ID NO: 140953 - DNA, 336 bp, Arabidopsis thaliana
ctcttcttgattatcgtccagggattgcaacagagagaaagtaacgatgccggcgaaacagaggacagctaatgtcaacaggaatcctgatctgatcaggggagttggtaaatactcaaggtctcagatgtaccataagagaggtttgtgggcaatcaaggccaaaaatggaggcgttttcccccgccacgacgctaaatctaaggttgatgctccggtggagaagccaccgaagttctatccagctgaagacgtgaagaaacctctccccaacaggcgcacggcataaccagccaagctcagagctagcatcactccaaggacagtgcttatcat

SEQ ID NO: 140954 - DNA, 211 bp, Arabidopsis thaliana
gtgatctcttttgggttgaggtttgtactaagagtacgtctgtctagtttgggattgtactttttgttgttgttgttagtttgtaacttgtgatgcttccctccccctagctctcttattacatgggcgttgtaaactgtgtgtactactactactagtctctacggtatgtactttttttttcctcaccataataataccttctggttct

SEQ ID NO: 140955 - DNA, 391 bp, Arabidopsis thaliana
cgtcgagcttcgttcgtctctcagaagaagctgcaaatatggcgacagcgtatcaaccaatgaaaccagggaaggctggtttggaagagccactcgagcagattcacaagatcagaattactctctcctccaagaatgtcaagaacttggaaaaagtgtgtactgatttggttcgtggagctaaggacaagagactgagagttaagggtccagtcagaatgcccaccaaggttctcaagatcactacccgtaaagctccttgtggtgaaggaaccaacacatgggacagattcgagcttagggtacacaagcgagttatagatcttttcagctctcctgatgtggtcaagcagatcacctccatcaccattgaacctggtgttgaagttga

SEQ ID NO: 140956 - DNA, 394 bp, Arabidopsis thaliana
ctcacttctgacgtgtttcccttcttcggtttctcatcctcacgtccgccggatttcgaggaaacgaagaagaagaagaacaacaacaacaaaagccttttgagatatggacagcttctggcaattaggtgatgagctacgaggtcagacgagagcatcagaggatcacaaatggtctactgttgcaacgaagctagctgagcaaactagaatgaaaggggagaggatgaacaatcttgatctctccaaaggttacactgagtttagaccaagtgagaaattcagtttccaggagaacaatcttaacttcaacatgttgaatttggatggtaaatttggtgaaagcatcatggggaagacttcgatgcagaacaatgtttataatatgaatact

SEQ ID NO: 140957 - DNA, 339 bp, Arabidopsis thaliana
aaatgaaaggaccagttgatttcaacaaaattattgattacgggaacaaggataaatgaacgggccaatttcccccaaattggaaaatccgaaaggagttcccaacaatttgcctaaacacaataatccaaaatataatgagaataaacctgttaataaagtagagacacacacaagaggttaagttggagcagggtttgaaggttgtaaagattttcaaggagcataacagcaagacatgcattttggatgatttctcgttctacgaggctcgacaaaagactattttggagaagaaagctaagcaacaacaatcccagaagcaggcaagagaagaaa

SEQ ID NO: 140958 - DNA, 322 bp, Arabidopsis thaliana
cggacgcgtggggaaagtttctcaagaaactcttcttcttcttctctgccaagctctgtaaacgttggagctctgtttacttatgattctttcattggaagagcggccaaacttgcgtttgtggcggccattgaagacattaatgctgaccagagtatcctcaggggcaccaagcttaatattgtcttccaggacactaattgcagtggatttgttggcaccatgggagctttgcagctaatggagaacaaggtggttgcagccattggtccacaatcttcaggaattggtcacataatctcccatgtagctaatgagcttc

SEQ ID NO: 140959 - DNA, 300 bp, Arabidopsis thaliana
ctcaaagtcaattgctgttctgtgattccagagtgtttgtttctctgtcataatctcttctagttgcggtttgttgggctctcactttctctttcagccgatttgatctttcgtttcttgtggtttgacttcacttgaagcaagctcttttattgatcttattgtctcctttatgttctgatgattccgcattgtgaaatcactacagattttggggttgtgatatgaataatctggggaattttggggtttggggattcgggttcttctccttatctatttggtttgcggttctgcaac

SEQ ID NO: 140960 - DNA, 387 bp, Arabidopsis thaliana
cccacgcgtccgtggtgatctagttttcaaagaatcgattttgccaagtgggttcttcttgataacctttcttcttctttgaaatgggttcttctgtggagcagaacattcttgttactggtggtgctggctttatcgggacgcatactgttgttcaacttctcaaagatggttttaaggtttcgatcatcgataattttgataactctgttatcgaagctgttgatagagttagggagcttgttggtcctgatctctccaagaagctcgacttcaatctgggtgatctaagaaacaaaggggacattgagaaactattctccaagcagagatttgatgctgtgattcattttgcgggtcttaaagctgtgggtgagagtgttgaaa

SEQ ID NO: 140961 - DNA, 393 bp, Arabidopsis thaliana
ctagacaaagccatccagttgcgcccacttgagcccgctcctattcagcatctagctcgggaattcatggtcaagacccgccgtagaaagggaatgagcgaagacgtcagcggaaataaattctttgatgaagcgatgatggtagagcttgcccagcaaacaggcgatctccatctgcagatgatttgatgatctctgcacttttttcatataaatcgtgattcaggactagtagtagtatcttctcttctctatatatgtgaaaggagaacaagaaaatgtggatcagttttgtaattgatgtgtcaaatttacgttgtaagttgagagattttaatgaactcaacagtccacatggtcacactcacacatgactcgcaaatagttgacagg

SEQ ID NO: 140962 - DNA, 388 bp, Arabidopsis thaliana
cgtgatgtggcttgggcaccgaacttgggtctcccaaagtcaaccatagccagtggttcagaagatgggaaagtgatcatatggaccatagggaaagaaggtgagcaatgggaaggtactgttttgaaagatttcaaaacaccagtgtggcgggtctcgtggtcgttgaccggtaatttgttggctgtttccgatgggaacaataacgttacagtgtggaaagagtctgttgatggagagtgggaacaagtgactgttgttgagccatagattgttgtttgtttgtttggttatcttttgttttgtggtaatatcaaaatgtggtgtgttctgtatacaatttctagggacctgtttctctctatacgtttctcaggaaagtatattc

SEQ ID NO: 140963 - DNA, 332 bp, Arabidopsis thaliana
cccacgcgtccgcgtaaacttattgctttcttccttctggtagttccccaaaactcaaagtactctttttctgtgtaaacaaaaaaaaaatcaacgtttcaatctcggttccattcattctgtttcatgggattagagatcaatgctccaatggtggagtgagcagcttcgtacagctccttagcaacctctctagctcccatggatcttgcttagaaataggaaatggagagcaagattcggtgactatgccgcttacgcaacaagcgagtgtagcgtgtgagaaagttaaacagatgaaggatttgagtcaaggctacaacattgttgca

SEQ ID NO: 140964 - DNA, 390 bp, Arabidopsis thaliana
gtttgatcatcttgtgagaaaaataatggctgcttcagtgatgctatcttcggtgacattgaaaccagctggtttcacggtggagaagacggcggctagaggattaccgtcgctcacaagagctcgtccctccttcaaaattgtcgccagtggcgtcaagaagatcaagaccgacaagcccttcggaattaacggcagcatggacttgagggacggcgtcgacgcctccggcagaaagggcaagggatacggtgtttacaagtacgtcgacaagtatggagctaacgtcgatggatacagtcctatttacaacgagaacgagtggtcagcgagtggtgacgtgtacaagggaggagtcaccggattggcaatttgggcggtaactctcgc

SEQ ID NO: 140965 - DNA, 386 bp, Arabidopsis thaliana
cccacgcgtccgtagtaaagcttcacccatggctgatttcattgctttcagaaagattagagacaaattgggaggtcgcatccggttgctagtatctggaggagcacctttgagccctgagattgaagagtttttgagagttacttgttgttgctttgtcgttcaaggctacggtctaacggagacacttggaggaacggctttgggtttcccggacgagatgtgtatgctagggacagtcggtattccagcggtttacaacgagatacggcttgaagaggtgtctgaaatgggctatgacccgctcggagaaaatccggcaggagagatctgtataagaggacaatgtatgttttcagggtattacaagaaccctgaactcactg

SEQ ID NO: 140966 - DNA, 387 bp, Arabidopsis thaliana
cccacgcgtccgggctactgtcactactcatgcctcggcctcgattttccgaccttgtacttcaaagccaagattcctcaccggttcttccggtaggttgaaccgcgacttgtcgtttacatcgatcggttcatcggccaaaacgtcgtcgttcaaggttgaagctaagaaaggagaatggttgcccggtttggcatcgcctgattatctcaccggcagtcttgccggtgacaatgggtttgacccgttgggtctagcagaggatccagagaacttgaaatggttcgtccaggcagagctggtcaacggacgatgggctatgctcggtgtcgctgggatgcttttgccggaagttttcaccaagatcggaatcataaatgttcctga

SEQ ID NO: 140967 - DNA, 390 bp, Arabidopsis thaliana
tcttgttgctatcgtctctctctctcgggtcaaaattagggtttcgtttcactatccagagtgtatacaaaggttgttgtggagcttttatcagatcacaggaataagatggaggtatttggaaaatctcccatggttgttacatctgccaatgttatttacttgtctgcaattctgggtcgcgattgcgatggacacaaatgtgattggaaatgtgagaatgaaaatgtttgtgggaatatgtatcgctgcaaactaactggactaactcatgtctgcgacaagaactgtaaccagcggattctctatgataaccatagctctttgtgccgagccagtgggaggattttccctctctcgtccgtcgaggagcatgcggttaaaggtgtt

SEQ ID NO: 140968 - DNA, 388 bp, Arabidopsis thaliana
ctctgctcagcttttccgaccaaaagatccaagcgcaagatcaactcaaaatcaatggattatctcggaatcgacatgagctgcgcgatcggatctctccggaacggtgacttcccggagaaagattgtcttcttcctctaatttcaaagcttctcggttattgcctcgttgctgcttcaatcaccgtcaagctccctcagataatgaaaatcgttcaacataagagtgtacgaggcttaagtgttgtggcatttgagcttgaagttgttggttacacaatttcacttgcttattgtttgcataaaggtcttcccttttcggctttcggcgaaatggcttttcttttgatccaagctttaatcttggtggcttgtatctattattatt

SEQ ID NO: 140969 - DNA, 369 bp, Arabidopsis thaliana
  unsure (1)..(369): unsure at all n locations
cccacgcgtccgcccacgcgtccgcccacgcgtccgcccacgcgtccgactttgtgagcaaagagcgagaaaatgagcggagccggtaagaaaatcgcggatgtggctttcaaagcttcaaggactatcgattgggatggtatggctaaggtccttgtcacagatgaggctcgtanagagttctctaaccttcgtcgtgctttcgatgaggttaacacacagctccagaccaaatttagtcaggaacctgaacctatagattgggattactataggaagggtattggagctggcattgttgacaagtacaaggaagcttatgacagcattgagattccaaagtacgttgacaaagttactcctgaatac

SEQ ID NO: 140970 - DNA, 390 bp, Arabidopsis thaliana
atcacatttcttcctcttttctctcttttttctcagtcttcaaagagtttcttagtaacccaaatcaatggcaggtatcaaagttttcggacacccagcttccattgccaccaggagagtcctcatcgccctccacgagaaaaacctcgactttgagctcgttcatgtcgaactcaaagacggtgagcacaagaaggagcctttcctctcccgcaacccttttggtcaggttccagcctttgaagatggagacctcaagctcttcgaatcaagagcgattactcagtacatagctcaccgatatgaaaaccaaggaaccaaccttctccaaaccgactccaagaacatatctcagtacgcaatcatggccattggaatgcaagtagaaga

SEQ ID NO: 140971 - DNA, 259 bp, Arabidopsis thaliana
ggcgaagaagaagatcgtagtagcccgataatgaagctacgattgagacatcacgagacgagagaaaccctaaaacttgaattggccgatgcagacactctccatgatctccggcgacggatcaaccccacggtgccttcctccgttcatctctcgctcaatcgtaaagacgagctcatcacgccttcgccggaggatacgctccgatctcttggtttaatatccggtgacctaatttacttctctctcgaggctggcg

SEQ ID NO: 140972 - DNA, 395 bp, Arabidopsis thaliana
tcttcacctctctctctgtgtgtgttctgtgttctctctctcgcgcgaagcggttctctttcttttgtttatttgtttttatttgtttttctcttatacggaggagagaagatggtggcgcctgctttgttaccggagctctggacggagatccttgtaccgatttgtgcggtgattggtatcgccttttcgcttttccaatggtacgttgtatctcgcgtgaaactcacctctgacctcggcgcatcgtcttccggtggagctaacaatgggaagaatggatacggtgattatctaatcgaggaagaggaaggtgttaatgaccagagtgttgtcgctaagtgcgctgagattcagactgctatttccgaaggtgcaacttcattcctattcac

SEQ ID NO: 140973 - DNA, 251 bp, Arabidopsis thaliana
gctcgagactgtagagtgaagtttgatttatttagagagataagttaaaaaaaaaatggtcggtatggatttgttcaaatgtgtaatgatgataatggtgttggttgtctcttgtggtgaagctgtttctggagctaagttcgatgagctttatcggtcaagctgggctatggatcattgtgtcaacgaaggcgaagtcacaaaactcaagcttgacaattactctggagctgggtttgaatcaagaagca

SEQ ID NO: 140974 - DNA, 252 bp, Arabidopsis thaliana
attttgatttgttttgtaactgtttctctttctctggagctttcttcttcttcttcaataatcgatttaggtttttcaaagctaagtgtttgtgttgtgataatgactagtagcgaggaagtagttgaagtgacggtggttaaagcacctgaagctggcggaggaaagttatcacgtcggaagattcggaagaaagacgccggtgttgatggtttggtgaagtgggagagatttctcccgaaaatcgcgctt

SEQ ID NO: 140975 - DNA, 247 bp, Arabidopsis thaliana
cccacgcgtccgcggacgcgtggggcgaaaatggaggttccaggttcatcgaagaagatgatcgcaacgcaggaagagatgtctgcagctaagatagcacttggatctagagatatgtgcgctcatctcttgattccgctcaacaaatgtcgtcaggctgagttttaccttccatggaaatgtgaagacgagcgtcacgtttatgagaagtgtgaatacgagcttgttatggagagaatgcttgcga

SEQ ID NO: 140976 - DNA, 243 bp, Arabidopsis thaliana
ataacaataagaaagaaagaaaaagaaaaccagagatggcgatgacgacagcatctacggtatttgttctaccggccaatgtcacctcggtcgccggcgcttcgtcgtccaggagctccgtgtctttcttgccgatgagaaacgccggttctaggctcgtagtcagggcagccgaagatcctgctccggcttcctcttcttcaaaagattctccggcagctgccgctgctccggatggagcta

SEQ ID NO: 140977 - DNA, 252 bp, Arabidopsis thaliana
ctttagggttttagtttcttctcctcaaaaaatggcgatgtatgttatctacgagtcttcttccggctatggtctcttcgaggttcacggactagatgagatcggacagaacactgaggcggttcggacttctgtctccgacctcagtcgctttggccgtgttgttcagctcacagcgtttcatccctttgagtctgctctcgatgctctcaaccaagtcaacgccgtctctgaaggtgttatgactgatga

SEQ ID NO: 140978 - DNA, 283 bp, Arabidopsis thaliana
accgtttttgttataacgcacgacgccgtttcaaacaacttccttattagctagctccctcccggcggcaaacaccagaagatccaccggttttgatctggttgtttgtcgtcgatatggcgaggatctcgtgtgacttgagatttcttctcatcccggcagctttcatgttcatctacatccagatgaggcttttccagacgcaatcacagtatgcagatcgcctcagttccgctatcgaatctgagaaccattgcactagtcaaatgcgaggcctcataga

SEQ ID NO: 140979 - DNA, 253 bp, Arabidopsis thaliana
aaaacgctcgtcttcttcttcttcttcttcttatattacttcttcctcccacacagacaaattttgtaacgaagacgggatcgcgataagatcacggtgatcgaaaagccctaagaagtattttcaagggaaagggacttaaagatgcatacttttggttacagagcaaatgctctgctcactttcgcagtcacggctcttgctttcatttgcgcaatcgcgtccttctcagacaaattcagcaaccaaaatc

SEQ ID NO: 140980 - DNA, 249 bp, Arabidopsis thaliana
gcaagggaactgttgagggattttcgcatgttatgtttgcaactggtcgcaagcccaacacaaagaacttagggttggagaatgttggcgttaaaatggcgaaaaatggagcaatagaggttgacgaatattcacagacatctgttccatccattcggtcagtaacatccccaacagcccagatggatggaacagatgtctgtgaatattcgtctgggctgttggggatgttactgaccgaatcaattt

SEQ ID NO: 140981 - DNA, 246 bp, Arabidopsis thaliana
aaatggtctcataattctctctatatcttttatcactttcgaagattcctcttctcgcccacaaatcaaaatcatttcttttgccgactaattgaatttcttagaattcaacatacgcaatgaaaatgttctcgtcacaaagattagactaatccgactgtgtttttaatcaatcatcattttatttaggggagagaagttgtaaagttttgatttttttttctgggttttttctgtgagacccag

SEQ ID NO: 140982 - DNA, 247 bp, Arabidopsis thaliana
cccacgcgtccgcggacgcgtgggctaacatggacggcaatgtcgccgccggtgatgtcacggacggcgacttctacggttaacttacgacgtatcagcctacggagagatcgcgtctgtgttagagccacggcttcgtctagcgccacggtttccggcggaggagtagtagaggcggtagaattggcagagataggagaaagaagcaagaaatggaagtggaaaggagaatattctgttaactact

SEQ ID NO: 140983 - DNA, 288 bp, Arabidopsis thaliana
atccgcatttgccaattttcttgtaaattcacctctttccttcgtctatctatcctcccttccgcaacattgattttgtttgatgatcgttgggttttgaaagaagagcaatgagcaattatgcagccggactcggtaagcctggctcaggtaaaaggagaatcagagatcttttaaatcaacctgataaccgagtctgcgctgattgtggcgcttctgatcctaaatgggcatcagcaaatatcggagtattcatttgcttaaaatgttgcggtgtgcacaggagcc

SEQ ID NO: 140984 - DNA, 254 bp, Arabidopsis thaliana
cagacgcgtccgcccacgcgtccgaaaaaaaaacacaaaaagtttcaatggccgcctccacaatggctctctcctcccctgccttcgccggaaaggctgtgaacctttcccccgcggcatctgaagtcctcggaagcggccgtgtgacaatgaggaagactgttgccaagccaaagggtccatcaggcagcccatggtacggatccgaccgagtcaagtacttgggtccattctctggcgagtcaccgagctac

SEQ ID NO: 140985 - DNA, 283 bp, Arabidopsis thaliana
cgaaatcacttcgccagcgttattgttaacaagaatcatcagattagtcgccgtagatctgaatcaacgtcgtaacagtagcagaattttgcggtgaaacgatggttttggttacgtctgtgcgtgattacattaaccggatgcttcaggacatctccggcatgaaggttctcatactcgactccgaaacggttagcaatgtaagcattgtgtattcacagtcagagctgcttcagaaagaagtgtttctggtggagatgatagattcaatatctgtgtcaaa

SEQ ID NO: 140986 - DNA, 287 bp, Arabidopsis thaliana
aaccggtcctccaaatcgaatgcttacttcaagaggtaccaagtgaagttcaggagaaggagagatgggaagactgattacagggcaaggatccgtcttatcaatcaagacaagaacaagtacaacacccctaagtaccgttttgttgttcgatttaccaacaaagacattgtggcacagattgtatctgcaagcatagctggtgacattgttaaagcttcggcttacgcacatgagcttcctcagtatggactcactgttggtcttaccaactatgctgcagctta

SEQ ID NO: 140987 - DNA, 252 bp, Arabidopsis thaliana
aagatggagtctcaaaggtatgactgctcttgtgaccggtggagccagtggaatcggttatgccatagtagaagagttggctggttttggagctagtatccatgtatgtgacatctctgaagctaagctcaatcaaagtttaagcgaatgggaaaagaaaggttttcaagtaagtggctcagtttgtgatgtagcctctcgtcccgagagagaagaactgatgcaaaccgtctcctcgcagttcgatggcaa

SEQ ID NO: 140988 - DNA, 254 bp, Arabidopsis thaliana
aaaaatcacatttttatataactgttaacataataatctcagcctcatcaacacacatatatagatagccaacatcacacaaacatagagattccaaaaaataaaaataaagaaaacataaatcctctgaggaaaaattccgatgagatgacagaaggtggagaatattctccggcgatgatgtcagcagagccattcttgaccatgaagaagatgaagaagagcaaccacaacaagaacaatcagagaaggtt

SEQ ID NO: 140989 - DNA, 248 bp, Arabidopsis thaliana
attttcgtagccgcaagactcctttcagattcttacttgcagctatgggtaaagagaagtttcacattaacattgtggtcattggtcatgttgattctggaaaatcgaccacaactggtcacttgatctataagcttggtggtattgacaagcgtgtcatcgagaggttcgagaaggaggctgctgagatgaacaagaggtccttcaagtacgcatgggtgttggacaaacttaaggccgagcgtgag

SEQ ID NO: 140990 - DNA, 250 bp, Arabidopsis thaliana
cggacgcgtgggctttcacaacaaaaaaactcttttctttttgtctgctcgtttttcttttcataatgggagccttggaagcagaaagagccgccaacaatgctacggcgttagagacacagtcgtcaccggaagatctcggtcaaccatctcctctgcgtaagatcatctccgtcgcttcaatcgccgccggtgtacagttcgggtgggccttacagctttctcttctgactccttacatacaactcct

SEQ ID NO: 140991 - DNA, 284 bp, Arabidopsis thaliana
gttcgagcccattcacgatgatgaagagcttggtaactccaatttcgccgtcgtcctcgtaaaaatccccatgttcaacgaacgaaaggtttataagctatcaataggagcggagtgtggactttcctggccgtccgatcgtctcgtgattcaagtgttagatgactctacagatcctactgttaagcaaatggtggaagtggagtgtcaaagatgggcaagtaaaggaatcaatattaggtatcaaataagagagaatagagttggttacaaagccggtgctt

SEQ ID NO: 140992 - DNA, 204 bp, Arabidopsis thaliana
ctttgtttcgtttttcaggtaaaagatagaagaaggagagatgaattggaagttaagcaattctctcactttcactcattctcttctcgtgtaatcttttggtgttcttgaaaccacttttttttttgtcaattcctctgtttccttggaattgttttctgcttttttaagaagatgattacgatgaatgtggtgcggagatta

SEQ ID NO: 140993 - DNA, 247 bp, Arabidopsis thaliana
ctagctggtaccaatcttaaacccctctccgattttgatttctgcttgaaattgttttccccgagatctcaatttcgataatcggaaaacgaaaaagatggtttggtttcaatgcgaagactgtggagagagtctgaagaagccaaaggtcccgtctcacttcaagatgtgcagagccaacaagttatcgtgcatcgattgtggagaaatgtttgggagagatactgtgcaaggacataaccaatgc

SEQ ID NO: 140994 - DNA, 278 bp, Arabidopsis thaliana
cattaccaaatcatcaacttaatcgtttctctcaaatttagggttttctcttttctcgaaagtcttgcggttttctgaatcatctctatctggtttgagggtttcgtttgatatctggagaaaggggtttctggaaacaaggagttcataattcgcgatcttgatctatcgatcttcatttatatataaaagcgtgaatgagattatgatggagtcgaaaggtggtaaaaagaagtccagcagtagtagttccttattttacgaagctcccctcggtt

SEQ ID NO: 140995 - DNA, 249 bp, Arabidopsis thaliana
ctcagagcatcttagccatttgggctactcaagttatcctcatgggagctgttgaaggctacagagtcgccggagatggtccattgggagaagcagaggacttgctttacccaggtggcagcttcgacccattgggcctcgctactgaccccgaggctttcgcagagttgaaggtgaaggagctcaagaacggaaggttggctatgttctctatgtttggattcttcgttcaagccatcgtcaccggaa

SEQ ID NO: 140996 - DNA, 254 bp, Arabidopsis thaliana
cccacgcgtccggttctttcttcttaatcacagctcagcctgacgcaaccgctcaggctgatctcttccaatttacagccatttcccagctcagatctctgatccggtgagatctctctcaaggaaaaggagttagagcatcatcaagatgaaggcactcattcttgttggaggcttcggcactcgcttgagaccattgactctcagtttcccaaagccccttgttgattttgctaataaacccatgatccttc

SEQ ID NO: 140997 - DNA, 278 bp, Arabidopsis thaliana
cccacgcgtccggtgaaagggaaattgagaaaaccctagaacaagtacggtctctattttgctttaatgggtcgcgaatctgtggctgttgtgactgcgccgccctcggcgactgctccgggtactgcttcggtggcgacctcgcttgctcctggcttccgatttcatccgactgatgaggaactcgtgagctattacttgaagaggaaggttctgggccaacctgtacgcttcgatgcgattggagaggtcgatatatacaagcatgagccctggga

SEQ ID NO: 140998 - DNA, 282 bp, Arabidopsis thaliana
cacaacgccggacgacaatgggtattgatctgatcgccggaggtaagagtaagaagaccaaaaggacagctccaaagtctgatgatgtctacctcaagcttactgtcaagctttaccggtttctggtaaggagaactaatagcaagttcaatggtgtgatattgaagaggcttttcatgagcaaagtcaacaaagctcctctttctctatctatgcttgtggagttcatgactggcaaggaagataagattgccgtcttggttggaactataactgatgatt

SEQ ID NO: 140999 - DNA, 280 bp, Arabidopsis thaliana
cccacgcgtccgtagagagatttttgctttctcaatttattattttttgtgtctctctctcgcccgatttggagtttttagggtttgatttttgtaatgtgagaaaggtttcgttatgttaaagaggcactctatcgccattctctccagaatcgcaagcttcgattcccataaaacccttatgtcttcctttaccgatcccctttttctgcgatcgctttactctcctcgatccatcgccatcagatttcatggagattttgctcatagactctacaaa

SEQ ID NO: 141000 - DNA, 249 bp, Arabidopsis thaliana
cattcacacaacaattcacacaatttctcgtttttttttgtttatcatcaaaagttttaatctaaattacgtatcaaattccgagcaagatgactattcttgttgaacattttgttcctgattcaagagtggatgaaaagaaagtgatagaggagagggataatgaattggtgttggatggaggttttgtggttccaaaatcaaaggaaactgatgcattcgatgctcctgatatgaatttcttgggca

SEQ ID NO: 141001 - DNA, 256 bp, Arabidopsis thaliana
cccacgcgtccgcgcgtttctcttaagcttctctcacatttctctttcaaatttcttcgagtctctctcgctctctccgtttcttcgcggtctctctctctcagatctctccgaaacattcttcgtagtgaagcaaaatggggttgagtttcgccaagctgtttagcaggctttttgccaagaaggagatgcgaattctgatggttggtcttgatgctgctggtaagaccacaatcttgtacaagctcaagctcgg

SEQ ID NO: 141002 - DNA, 243 bp, Arabidopsis thaliana
tcctaatccgtttagcttttaaaaaaataagaagacatatttatcaacttgatcaacttgagcaagttgcagcagatattttcctcggccaagatctagagttttgagaatggcgatggtatcaggaagacgatctactctaaaccccgacgcacctctttttattccggcagctgtacgacaagtggaagatttctcaccggagtggtggcaattggtgacaacttcgacttggtaccctga

SEQ ID NO: 141003 - DNA, 250 bp, Arabidopsis thaliana
cccacgcgtccggaaaagaaaaaaaatggctgcttcatcttcctctttcactctctgtaatcacaccacacttcgtactctccctctgagaaagacccttgtcaccaaaacccaattttcagttcccacaaaatcatcagaatctaacttctttggctccacactcactcactcatcgtatatctccccagtctcttcctcttctctcaaaggcttaatctttgccaaggttaacaagggtcaggctgca

SEQ ID NO: 141004 - DNA, 279 bp, Arabidopsis thaliana
atacgctgtcaatgttgttaagcatatctttgacagtcatgtggtgtttcagtacaactgcactaacacaataccagagcagttgttggagagggtcaatgtcattgtagatgcttcagaagctgaggaattcagtgaagtaacttcaaaggccctaaactcacttccttacgattcacccggtcaagcctttgtggtttttgagaagccagctggggtccctgctgttggaaagttctccaacacattgactttcgttgttaaggaggttgacccaag

SEQ ID NO: 141005 - DNA, 283 bp, Arabidopsis thaliana
agcaggtgctatgggttgtagtgattcacaaccatccacaaagctaccgttgcctacttttggactcgcatcttataagctgaaagtatctgtgtggaaccaaaatagaattcaagagtcccaaaagatgacttctttgctacaagctgcagataaatggctcaagcgtctgcaagttgatcatccagactacagattcttcacctctaacagtccacaaatgaggtgaaaatgaaagatacattcttgaccatggatttggctctggtctgatcaaaagacc

SEQ ID NO: 141006 - DNA, 287 bp, Arabidopsis thaliana
atccgcaccacataaccacttctgtctctgcgaatctccataagactctttgagaagctttcctctgtttctccgccgttatgggtagctccggcgacgttaactggaaacttgcggaccaccccaagcttcccaaaggcaaaactatcggtttgattgttctcgatggatggggtgaatctgatcccgatcaatacaattgcatccataaagctccaactcctgccatggattcccttaaagacgggaagcccgacacatggaggttgatcaaagctcatggtacc

SEQ ID NO: 141007 - DNA, 245 bp, Arabidopsis thaliana
cttctcccaatctcatcttctccgaaaacctttcttctctcaaatttctgtgaaaacatgtctgacgacgagcaccactttgaggccagcgaatccggagcttccaagacctatcctcaatcagccggtaacatccgtaaaggtggtcacatcgtcatcaaaaaccgtccctgcaaggttgttgaggtttcgacttccaaaactggcaagcacggtcacgccaaatgtcactttgttgctattga

SEQ ID NO: 141008 - DNA, 244 bp, Arabidopsis thaliana
cccacgcgtccgcccacgcgtccgcggacgcgtgggcaaagacaaatgcaaaagaactaaaagagtctggtttctgttctgtcctaatttctctctggcgaaagctaagaggtttcggttacggtctccatctccgatcaaatcacgaagtttctatcggaaattttcagtgatacataccgtcagagattttctttacgagagaattgtcgccgacatactaaagcagagttttgggtgggaa

SEQ ID NO: 141009 - DNA, 333 bp, Arabidopsis thaliana
gaaagtttggaattcaagatgactcaatctatctgttcgtcgtcacaagatcaatcttcttctcctcgctctttgatcacaccacgcatatcggcgacgaagtttcaccgccgcagggggaggagtgtatttaacatgctggttcagagggaaatgtcaccaaaggctaagtttgtgccacggaaacgatggggtaagagtatatggtatactgattcttcatgcggaaccaacatcgagtctatgaaagagacgggacatagtcttacctcatgggttgaggcagagtcattgcagcatttatctgcaaaatattgtcctcttggagctcct

SEQ ID NO: 141010 - DNA, 332 bp, Arabidopsis thaliana
gtttagtgtgataatggtcatctggcttgtactttgtgctgcaccaaagtgaggaacagatgcccgtcgtgtacattaccgataggttatgttcgttgcagagctatggagaaggttatagaagcatctagagtctcgtgtctaaatgccaaatacgggtgcaaggagagtacctcctatggaaaccgttttagtcatgagcaggtatgtgttttcaccccttgttcttgccccatacttgactgccactacactgggtattacaaggatctcaacaatcacgtccgtgctgaacacaaagatgatctgatctcgttcgtgtggaatactcg

SEQ ID NO: 141011 - DNA, 318 bp, Arabidopsis thaliana
cggacgcgtgggcggacgcgtgggcggacgcgtgggcggacgcgtgggcggacgcgtgggctgaagctctgaggaagacatgatttcgtctctctcagcttcttcttcattggtttcttctttcgtcgccgttaaagcgactccggtcaccggacctctgattccccgtcgcgatcttctttctattcgtatcagagctagctcgaatcagaatagttctggttattgttttccagaaaagtttaaatcttttgccaaatcagcgattctcatcggtgctgctgtttcaatgaccggaaagttttcaactttaccggt

SEQ ID NO: 141012 - DNA, 160 bp, Arabidopsis thaliana
accaaaaccccacaaagcttggaaagagccacaaataggtcaaagaatgggtgaagacaagaagacggcaagggagacggtggaggaggaaccacttagcccatgttcacggctgttcaattcgccggattttaactgtgcaataatcgttacaatggga

SEQ ID NO: 141013 - DNA, 371 bp, Arabidopsis thaliana
cccacgcgtccgtgcacgaaatgctcattgatcggtccaatttgctatcagaatcatttgagtacatagtgggcgcaagccctgaagcacttcatggtggactgttcatggaattcaagaatgaggaagctacaggtcctggtgttctacgagaatggttctatctggtatgtcaggagatattcaatccaaaagataccctcttccttcgatctgctgatgattttagaagattctctccaaacccagcatccaaggtggatccattgcatcctgacttcttcgagttcacgggtcgtgtgattgccttagctttgatgcacaaagttcaagtgggtgtgctgttcgatcgtgttttcttcttacaattg

SEQ ID NO: 141014 - DNA, 399 bp, Arabidopsis thaliana
cccacgcgtccgcccacgcgtccgctctctctctgcctcctttcggattcaaatctcagatctagctcaaccatggcgttgctcgtcgagaagacctcaagtggccgtgaatacaaggtcaaagacatgtctcaagccgatttcggtcgtctcgaactcgagctcgccgaagttgagatgcctggactcatggcttgtcgtaccgaattcggaccttctcagccattcaaaggcgctagaatcaccggatctcttcacatgaccatccaaaccgccgtactcatcgaaaccctaactgctctcggtgctgaagtcagatggtgttcctgcaacatcttttccactcaagaccacgccgccgcagccatcgctcgtgactccgccgctgttttcgcctgg

SEQ ID NO: 141015 - DNA, 282 bp, Arabidopsis thaliana
gaaagagagctatggaaaacagttattgcattctgttcaggacagtcaatttgttcattcgattaaagacagtggtgcgttacctgcggttttggggagcttgttcgttgtgtctgcaactgttggtacttctctgttcttcaaaggagctaataattgaaacagaagaaacaaaattttaaaaaattgttgggatttgttgttgttcttgaaagattgaaaaagaactatgtgatactttgtactattcttttctataatttattgtgtgttttgttattg

SEQ ID NO: 141016 - DNA, 195 bp, Arabidopsis thaliana
cccacgcgtccgcgaggattaggattaccggaatcacagggtatgaagagtatccagcctcgcccaatgttgcagttggagaagtaaatctttgacacaaaatgtttcttgaatgttaaaatttttctgatcttctctatgtaattttgtaaggaccctggtcatttcatttctgctgagattccttttattaat

SEQ ID NO: 141017 - DNA, 374 bp, Arabidopsis thaliana
acaaaatctgagattcgcgaaggaagaagaagagttgtcttgagagattgatagagatggacaacaatggagttaaacccgctgtttccgccatggaagcctttgaaaagcttgagaaagtaggtgaagggacttatgggaaagtttacagagcaagagagaaagctactgggatgatcgttgctttgaagaagacgcgtctccatgaggatgaagaaagtgttcctcccactactcttcgcgagatctctatcttgcgtatgctcgctcgtgatcctcacatcgttaggttgatggatgttaagcaaggaataaacacagaaggaaaaactgtactttaccttgttttcgagtatgttgatactgatctcaag

SEQ ID NO: 141018 - DNA, 343 bp, Arabidopsis thaliana
cccacgcgtccggcagccaacgacagttatcaaagcttaagccgttttagggttttatccttttgctgagatccaatcatggcggatgttgaaccagaggttgctgctgctggagttcccaagaagaggacgtttaagaagtttgccttcaaaggagttgatctcgatgctcttctcgatatgtctactgatgatcttgtcaagctcttctcttctcgtattcgtagaaggttctctagaggtttgacaaggaagccaatggctctgattaagaagctgaggaaagcggtaatcatttcttatatagtcttgaatgtttggttagttcttaagttgctcgttt

SEQ ID NO: 141019 - DNA, 344 bp, Arabidopsis thaliana
gtcaggtgagacttcattggccgtaggcaaaactgaggatccgacgcagccgaagctcaagcctttacattgggataagatgaaccctgatgcaagccgttctatggtgtggcacaagattgatggtggctccttcaactttgatggtgatctcatggaggctttgtttggatacgttgctcgaaaaccaagtgaatcaaacagtgtaccgcagaatcagacagtctcaaacagtgtaccgcataatcagacttatatccttgatcctcggaaatctcaaaacaaagcaattgtgcttaaatctttggggatgactaaagaagagatcattgacttgttaacag

SEQ ID NO: 141020 - DNA, 392 bp, Arabidopsis thaliana
caacaatctctccggcaatccctaaacacggcggcattcccacggtggttcacttgcacggaggtatccacgaaccaactagcgatggaaatgcagattcatggttcaccgctggtttcaaagaaactggttccaaatggaccaaaaagactacacattacgtcaacaagcaacaacctggaaacatgtggtaccatgaccacgcggcagggttgaccagagtcaaccttcttgccggtttgttaggctcttacattctccgtcatagctcagtcgaatcgcctcttcggttacctaccggacgcgaattcgatcgtcctttggtcatctttgaccgatcttttcgtaaagatggttccatttacatgaacgctacagggaacaatccaacg

SEQ ID NO: 141021 - DNA, 399 bp, Arabidopsis thaliana
gtggatttagatggtgatggaaccatcgatttccctgagttcttgtacctaatggctaagaatcaaggtcatgatcaagcgccgcgtcacactaaaaaaacaatggtggattatcagctcactgacgatcagatcttagaattcagggaagccttccgcgtattcgacaagaatggtgatggttacattaccgtgaatgagctccgtactactatgcgctcccttggtgaaacccaaacaaaagctgagctccaggacatgatcaacgaagcggatgcagatggtgacggaaccatcagtttctctgagtttgtgtgtgtaatgactggtaaaatgattgacactcagtctaagaaagaaacgtacagagttgtgaatcaaggtcagggtcaagtgcag

SEQ ID NO: 141022 - DNA, 224 bp, Arabidopsis thaliana
gagaaaatggagatatcagttgcatcggtaacagtttctgtagctgtagttgttgtgtcatggtgggtatggagaactttacagcgggtttggcttaaaccaaagatgcttgagagttacctgagaagacaaggtcttgccggaactccttacacgcctcttgtcggtgatttgaagagaaattttagcatgctggctgaggcaagatccaaacccatcaacct

SEQ ID NO: 141023 - DNA, 216 bp, Arabidopsis thaliana
ggcgaaaatgttctacttcagcacgcattctctactcgataagaagatgatgtcaactacgatacaagccatcaagatatcaaagcaactaggcaatgtcattttttatgacttgaatctccctttaccactatggcactccagcgaagaaaccaagtctttcatacaggaagtgtggaatcttgcagacgtcattgaaatcacaaaacaggaaca

SEQ ID NO: 141024 - DNA, 214 bp, Arabidopsis thaliana
ggtcaaagtcttttttagaccccctttatttctaattttcccttaataaaatagtagagagtaaactataaaagcaaacaattaaattcattagcattaaaaacataacaagatctttagaaccacaataatagtttgatactaaataagtaaactcttagagaggtaagtatatataaccaactactactagagaggtaaacaaaacattcct

SEQ ID NO: 141025 - DNA, 224 bp, Arabidopsis thaliana
atccggagaattgggactcgccgtacactttgcattacactgagtacgatggtaaaactggagctacagggacgaagaaaacaatggaggttgatgctgtcattggagctgatggagctaactctagggttgctaaatctattgatgctggtgattacgactacgcaattgcatttcaggagaggattaggattcctgatgagaaaatgacttactatgaggat

SEQ ID NO: 141026 - DNA, 218 bp, Arabidopsis thaliana
cggacgcgtgggcattcatcttcttcttcttcaaacaaaaaatgggtttcttaaagttatctccaatgatccttctcctagcaatgatcggcgtttcatatgccatggacatgtcaatcatctcctacgacgaaaaccaccacatcaccaccgagaccagccgtagcgactcggaggttgagagaatctacgaagcgtggatggtggaacacgggaag

SEQ ID NO: 141027 - DNA, 221 bp, Arabidopsis thaliana
gcgaagttgaatgcttcttcatcatctttcaaggactcgagtctttttggtgcctccattaccgaccaaatcaaatccgaacatggatcttcctcgttaagattcaagagagaacagagcttaaggaatctagcaattcgagcccaaaccgctgcgacttcaagccctacagttacaaaatccgtggacggcaagaaaacgttgaggaaaggaaatgtggt

SEQ ID NO: 141028 - DNA, 226 bp, Arabidopsis thaliana
gacagagcttcatcatccatgtattagtagaaatgtggggatgcttcttcagcagtataagtgttttggatcatcagcagcttctttaattcagagaaaccctttgttttcgtcgttggattcgaaagatgttagctactttaaggagatattaggtgaaaaaaacgtggttgaagataaagaaaggcttgagactgctaatacagattggatgcataagtacaaa

SEQ ID NO: 141029 - DNA, 215 bp, Arabidopsis thaliana
cccacgcgtccgccaaattcgatccgttttccggcgataatctccgatctagatccgatggcgaaagaaccagttcgtgtgctcgttactggagctgcaggacaaatcggatatgctcttgtacctatgattgcaaggggtatcatgcttggtgctgaccaacctgttatcctccacatgttggatattcctccagctgctgaagctttgaacgg

SEQ ID NO: 141030 - DNA, 136 bp, Arabidopsis thaliana
tccagatcgaacctttctcaggttcacacattccctagaaacattgaatgtccagagattcatgaaaggaaagaggacgtggtgaccagatagtacaccatcaaccttcacacacgccttcatattcgtaccttta

SEQ ID NO: 141031 - DNA, 228 bp, Arabidopsis thaliana
tacatttcaaacatatagaagaaacagagaaaaagagagagagacccctaatggctgagaaagaagaagtgaagcttttggggatatgggcgagcccttttagccgtcgggtcgagatggctctcaaactcaaaggcataccgtacgagtacgtggaagagatactggagaacaaaagccctttgcttcttgctcttaaccctattcacaagaaagtccctgttcttg

SEQ ID NO: 141032 - DNA, 226 bp, Arabidopsis thaliana
ctgaaggcacccctgattgcttagctggattgacatttgtaattagcggaacacttgacagtttagaaagagaagaagcagaagatctgattaagcggcatggtggtcgtattacaggctctgttagcaagaaaacgacctaccttttgtgtgatgaagacattggcggaaggaaatctgaaaaagctaaagagctgggcactaagttccttacagaggatggcct

SEQ ID NO: 141033 - DNA, 219 bp, Arabidopsis thaliana
tgaaaacgctcttgagcatcttgttcttgctagtatggctatgattgcgagtggacaagaatctgaggttgcatcgattgatgttagtattgggaatatttacatgtcgctgtgccggtttgatgaagctgtgttttcatatcagaaggctcttactgtgtttaaggcttctaaaggagagactcatccgacggttgcgtcagtgtttgttagattggc

SEQ ID NO: 141034 - DNA, 216 bp, Arabidopsis thaliana
ctgcacttgggacattgatgatgatcaaagtggtgatagattgtcctcttttattatggtattcttttcgaaattggtggaaaacagagacaatttataggtcggtgacttgcaagtcgtcgtttaaaatgttaagaaaaatcttgtaccattgttgtgttatgtttcctctttgagtgtctgtgttttatctaagtcttgagctataagctgtgg

SEQ ID NO: 141035 - DNA, 227 bp, Arabidopsis thaliana
gcttctctatctggtagccatggcttcggctactttctctgtggccaaaccatctcttcagggtttttctgagttctcaggacttcgaaactcctctgctcttccctttgccaagagatcttcttccgatgagtttgtttccttcgtcagtttccaaacttctgcaatgagaagcaatggtggatacaggaaaggggtgaccgaggccaagataaaggtagccatca

SEQ ID NO: 141036 - DNA, 222 bp, Arabidopsis thaliana
cggacgcgtgggctttccttgtgttccctccaccgaacgaggccgcggcattttgatctccggcgattccaaatccgacaccattctctactgcaacggccgctctgtcttcatccggagcctccgccaactccaagacgtccaagtttacggcgaacatggctatgctgttaccgttgctcgctactctcccaacggcgaatggatcgcttccgctgatgt

SEQ ID NO: 141037 - DNA, 226 bp, Arabidopsis thaliana
tgtgtattgagcttcatctccttcaaatggcttccttatcaaccacttccctaagcttcaaagctccgtccaccacaatttcacaggttttaaggaaagcctcaagttctcagtctgtgacctttggtcgtttcacgtcttcaacaaagagccttcgtcttcaaatcagttgtgccgcgaaagcagagacggtgcagaaagtgagtgacattgtaaaagaacaatt

SEQ ID NO: 141038 - DNA, 210 bp, Arabidopsis thaliana
ctctcattaaaaacgtgtttttttttaccggtcaccggtttatggaatgactgattaccggctacaaccaacgatgaatctttggaccaccgacgacaacgcttctatgatggaagctttcatgagctcttccgatatctcaactttatggcctccggcgtcgacgacaaccacgacggcgacgactgaaacaactccgacgccggcgat

SEQ ID NO: 141039 - DNA, 224 bp, Arabidopsis thaliana
cggacgcgtgggcgctttgatcgaaatggcgtcgtcttctccaactcagctagctcacgtcccgattcctccagaaccaggaggaaggtcgccgacacaagaagctaatgagccaccagttccgatttacattgtgacggatccgtttcaacttcctgctgatttcctaaacccttctcctgaaaagaaattggttatcggttttgactgtgagggtgttgacc

SEQ ID NO: 141040 - DNA, 216 bp, Arabidopsis thaliana
cggacgcgtggggtttcggggtaatactttgggaactagcaacattgagattaccatggagaggaatgaacccaatgcaagtagttggagcagttgggttccagaatcggcggcttgagatccccaaggaacttgatcctgtggtgggaaggatcatcctggaatgttggcaaacggatccgaatctgcggccgtcatttgctcagctgacggaag

SEQ ID NO: 141041 - DNA, 227 bp, Arabidopsis thaliana
gaagaagaagaagacaacgacgacgactttgaagaagaacaaactcttccttcaatctcaatctctctctcagatgggttgtggtggaactttgttctacccacttctcataactctctccgttgctctaatcacttacaacatcatcatctccgctaatgctcctctcaaacaaggcttcccaggccgatcttcttcctccgatatctccattgacccagtcatcg

SEQ ID NO: 141042 - DNA, 223 bp, Arabidopsis thaliana
cgagcatgtctccaacactaatctctttatgttcaacactatgatcagaggttactcgattagcgatgagccggagcgagcattttctgttttcaaccaattgagagctaaaggtttgaccttggaccgattctcgtttatcacgactcttaaatcatgttctcgtgaattgtgtgtttcaattggtgagggattgcatgggattgctttgagatctgggttt

SEQ ID NO: 141043 - DNA, 216 bp, Arabidopsis thaliana
cggacgcgtgggtctgtgttcaaaacaagttcattcgatctatagagacgaaacaaaaagagagatcgtacgcaaaagtttccgatatggctcgctcgtttggagctaacagtaccgttgtgttggcgatcatcttcttcggatgtttatttgcgttgtcctctgcaatagaagaggctacgaagttaggatcagtgatagggatagatcttggta

SEQ ID NO: 141044 - DNA, 222 bp, Arabidopsis thaliana
cgcaaaacgacgattctgatctcgcttgtctgatttcaaaaacaatgagaagatagttctgattatataacacacaaaccctacttcattccttcatcatcgtctccaatcattacccaaagatccgtctttttctttacttcatgtcgaagcaaacgtacaaagtgtgtttctgctttcgccggaggtttcgttacactgcatcggaggcaccgcgtgaga

SEQ ID NO: 141045 - DNA, 214 bp, Arabidopsis thaliana
cggacgcgtgggcggacgcgtgggcggacgcgtgggttcaggtttcttttctaacaagcaaaaactccaacctttactttatttttgttttgttttgtaaccctctcagatcttaattctcaaagaagtatgaagagagaaagatctgatttcgaagaatccctcaagaatattgacattgctaaatgtctgatgatactagcacaaacctcca

SEQ ID NO: 141046 - DNA, 218 bp, Arabidopsis thaliana
gatttggatttcgatttggatttcgatttcctcatctcatcgatttgcttctcaatctctccaattcgattctcctctggaaatttcaatcctttttatattttccttggtgatttctaagataattaagatcgagaaaaggagaattttgagagagaaagcatccatccatcgatggccgctatgagcgacaaggaagctatggtggatcctttttt

SEQ ID NO: 141047 - DNA, 218 bp, Arabidopsis thaliana
aaattctccgacgcattacattttcttccgatcaatacagagagatcagtttctgagagagaagaagatgtctataaaggaagaaaacgttccaacgagtgttgactcaggagctgccgatacaacggtgaaatctctggagaagaagccggcagcgaaaggtggtaaatctaagaagacgacgacggctaaagcaacgaagaagcctgtgaaagctg

SEQ ID NO: 141048 - DNA, 226 bp, Arabidopsis thaliana
caacaacaacaacaaaacttaagggaaagataatcgtttgtctgtgcagagagagagagagagaaaatgaggttgttcgatccatggccagtgttcttcaagagagaatggaaacgttgctggccattcctcaccggtttcgccgtcaccggcgttctcatcaccaagctaaccgccggactcactgaggaagatgctaagaactccaagttcgtccagcaacaca

SEQ ID NO: 141049 - DNA, 230 bp, Arabidopsis thaliana
cggacgcgtgggattttgaaaccctaatttctcttcttttccccaaaaaaaaatgtctgaagttgagtaccggtgctttgtcggcggccttgcctgggccaccaatgatgaagatcttcaaaggacgttctcacagttcggcgacgttatcgattctaagatcattaacgaccgcgagagtggaagatcaaggggattcggattcgtcaccttcaaggacgagaaagcca

SEQ ID NO: 141050 - DNA, 216 bp, Arabidopsis thaliana
acctccagaagtcgacgacaacaatggcaccgaagaagggagttaaagtggcttcaaagaagaagccggagaaagttaccaacccattgtttgagagacgcccaaagcaattcggtattggtggcgctttgcctcctaagaaggatctttctcgttacatcaaatggcctaagtcaatccgtcttcaaaggcagaagcgtatccttaagcagaggt

SEQ ID NO: 141051 - DNA, 219 bp, Arabidopsis thaliana
gttccatttattaagctttcttcacgctttttaagataattaacagtcacgggttctaaaagctaaagggttttgcttcaaattcaagtgtctcccttcactttctctctctctattgctgctctgtttctgctgtcaattccctaagaaagtcctgatttttagggtgatcgagagaagttgaagaatcatgtttattgaatttccttttttgatcca

SEQ ID NO: 141052 - DNA, 217 bp, Arabidopsis thaliana
tgccaacgaacgttctttcttcttaatcacagctcagcctgacgcaaccgctcaggctgatctcttccaatttacagccatttcccagctcagatctctgatccggtgagatctctctcaaggaaaaggagttagagcatcatcaagatgaaggcactcattcttgttggaggcttcggcactcgcttgagaccattgactctcagtttcccaaagc

SEQ ID NO: 141053 - DNA, 217 bp, Arabidopsis thaliana
ctcattgcttcatcattaccaaatcatcaacttaatcgtttctctcaaatttagggttttctcttttctcgaaagtcttgcggttttctgaatcatctctatctggtttgagggtttcgtttgatatctggagaaaggggtttctggaaacaaggagttcataattcgcgatcttgatctatcgatcttcatttatatataaaagcgtgaatgagat

SEQ ID NO: 141054 - DNA, 180 bp, Arabidopsis thaliana
tgttttgtatctctctctctctctcactctttgtctctctcctaacctttattgtactagcataaccattaccatacatactcttctctatcacgccacatccgcagattcatcatatcttcttcttgttcatagcatcgctatcactagtgggctctcttcaaaggtgtatttcggggg

SEQ ID NO: 141055 - DNA, 219 bp, Arabidopsis thaliana
aaagagagtgcgatttggttggcggttttgaaccaagaggaatctttgattcagcagcctagcagtgacaatggaaactccaatgtgactgagacacatcgtaggggtaataacgctgacaggaggaaagctgtggtcaacagtgacagtgactatgatgttgatgggacagaggaagcttcaggttcagtttcatctaaagacagtagaagaaatcag

SEQ ID NO: 141056 - DNA, 211 bp, Arabidopsis thaliana
ctccagcaccggacctagtcaaaaagtctttcttctcaaatggatcaaaagcctcttggattgctcacgatccacgtcaagagagggattaatctcgccattcgcgaccatcgtagcagcgatccttacatcgttctcaacgtcgccgatcagacattgaagacacgtgtggtgaaaaaaaattgtaacccagtatggaatgaagaaatga

SEQ ID NO: 141057 - DNA, 219 bp, Arabidopsis thaliana
agaaaacataaatcctctgaggaaaaattccgatgagatgacagaaggtggagaatattctccggcgatgatgtcagcagagccattcttgaccatgaagaagatgaagaagagcaaccacaacaagaacaatcagagaaggtttagcgacgagcagatcaagtcactggagatgatgtttgagtctgagacaaggcttgagccaaggaagaaggttca

SEQ ID NO: 141058 - DNA, 166 bp, Arabidopsis thaliana
ggaacatttccttatgattgtttctgcactgagaaacgagctgaaccaggcctttgttattttaaggagcattgccttaggaagggacttgaagaaatttctcatggtggtttttgggctgtggataatcctcggttgtgggaaactggggttcaacttttcttga

SEQ ID NO: 141059 - DNA, 210 bp, Arabidopsis thaliana
aaaaccgctctcgagagacgaatcgctctcagcttcttctagaaccttctccttctccttcgacgcatcgtcgccttcaagatcacactacctcgcacaacaatggagttctggggtgttgaagttaagaatggcaaaccacttcacctagatcctgggctagacaggctcgtgcacatctctcaggttgctttgggagagagtaagaac

SEQ ID NO: 141060 - DNA, 211 bp, Arabidopsis thaliana
gctaaacgaaaaacttaaaacccaaatcttatcactactctaaaagaatcttcatcatggcctcagtaacctcagccaccgttgcaatcccatctttcaccggccttaaagcctcaaccatcaaatcatccgccaccgtcagaatccaaactgctgctgttgcatcaccgaagcttacagtgaagtcatctctaaagaacttcggagtcgc

SEQ ID NO: 141061 - DNA, 144 bp, Arabidopsis thaliana
caaaaatctgaaaaatgtcacaagcagagaggagatagattaccgaggaagatgatgaagtggtcgatcgttaagagaatccccgtctatggaggttccttcatttctatgaaacatatgatgttagttccaagctgatttgag

SEQ ID NO: 141062 - DNA, 208 bp, Arabidopsis thaliana
aaaatcactaaacctatcttcttaaccaaaagatcaatagattacaaaaatgcagggagctctgtttatcaaaccaactattcttcttcctcttccttcttcagtttcttctccaaaactcacttttcttcttcctcacgcaaccaaagcttcaagactctcatctctcagatcaaacaactcatcatcatcatcatccttaacgtct

SEQ ID NO: 141063 - DNA, 209 bp, Arabidopsis thaliana
gaattcttgtacctttaccggatccagaagcaagaagaggaatgttcgagatgcttataccgtcacaaccaggtgatgagccattgcctcatgatgtgttggttgagaaatctgagggctactctggttcagacattcgaatactttgtaaggaagctgcgatgcaaccactgagacgcacattggctattttggaagacagagaagat

SEQ ID NO: 141064 - DNA, 134 bp, Arabidopsis thaliana
cttttgccttctctaaccagtgtttcgtgattttgggtgatcctagaaatgggagatggggctgagattgtaaccaggttatatggggatgagaagaagcttgcagaggatggtagaatttagtgagttggtgg

SEQ ID NO: 141065 - DNA, 208 bp, Arabidopsis thaliana
tcttattccattttttcaaaccacttgcaaaattcgaatcagatcttctcttcaatcgaaaaaaaagaaaggatttgctctagattgttgaatcgaagatgtcgacaagggaagagaatgtttacatggcgaaattagccgaacaagctgaacgttacgaagaaatggttgaattcatggagaaagttgcgaaaactgttgatgttga

SEQ ID NO: 141066 - DNA, 211 bp, Arabidopsis thaliana
cttctccggaagcttttgttcaatcttctggctgaagaaacgaggactcatgcctggattaacattctcaaacgaattgatctcacgtgacgaaggtttacactgtgatttcgcttgtctactctacacgctactcaaaacaaagcttagcgaagaacgcgtgaaatcaatcgtctgcgacgcggtcgaaatcgagagagagtttgtgtgc

SEQ ID NO: 141067 - DNA, 172 bp, Arabidopsis thaliana
  unsure (1)..(172): unsure at all n locations
gcctgagttctcttccggaaaagataggaaaggtaaagacacttgagaaaatcgacacgagggaatgcagcttatcgagcataccaaactctgtggttttattgacttctctacgccatgtaatatgcgaatagagaggctttnatggatgtttgggaaaagggggtccaga

SEQ ID NO: 141068 - DNA, 209 bp, Arabidopsis thaliana
ctctttctctcactaaagaaaaaactagcgatcgaagagaatcatcatcaagaagctactatcagagaaatcaaagccctacaacacaagaatcaacatgggagctgaagaagaaaccaataagacatatcctcattggctaaaacctctgctacgagaaaagttctttgtacaatgcaaattacacgcagattcacataagagtgaat

SEQ ID NO: 141069 - DNA, 155 bp, Arabidopsis thaliana
aatggaacacagaaaggtaagagggaacggcatagacattcacgtagcaatccaaggtccctccgatggtcctatagtcctcctcctccatggtttccctgagctttggtactcatggcgccaccagatccactggactcgccgctcgctggcta

SEQ ID NO: 141070 - DNA, 207 bp, Arabidopsis thaliana
cacacatatagttacaaacacacatacacaaaacacagatatataaaaatgtcttgttataataaagcactattgatcggcaacaaagtcgtcgttatacttgtattcctcttatgtttggttcactcgtcagagtcacttcgaccactgtttgcatgtgatccagcaaacgggttaacccggacgctccggttctgtcgggccaat

SEQ ID NO: 141071 - DNA, 140 bp, Arabidopsis thaliana
  unsure (1)..(140): unsure at all n locations
gaatgatgtttggtatgtagcttttggatgagctacaaagtgatcagtggcctgttaagccaggtcatcggtcccaacgatgtacaggcgtggcattgagtgtagctgcaggattgcttggnagcttgctntgcctggaa

SEQ ID NO: 141072 - DNA, 207 bp, Arabidopsis thaliana
cccacgcgtccgcggacgcgtgggcttgctataggtattgtggttgttgtgtggggatttgcagctatctgtttcttcatagcattacctacacactcttggctatggctcatttcaatcttcaattcgattcaggtcttcatgacatgcgtcaagtacatcccacaggcaaagatgaacttcactaggaagagcacagtcgggtgg

SEQ ID NO: 141073 - DNA, 211 bp, Arabidopsis thaliana
gtaaagcttgaaactttggactaaaagaatggcgtctttgggtgtgtcggaaatgcttggtactccccttaacttcagggcagtttcaagatcgtctgctccgttggcatcaagcccatccacgttcaagactgttgctctcttctctaagaaaaagccagctcctgctaagtccaaggctgtctctgagactagcgatgagctcgccaag

SEQ ID NO: 141074 - DNA, 208 bp, Arabidopsis thaliana
gttgatgcagagtttcaaatctaaggaatatgtgagagagacctttgcttggatgcattactactggttcctcacaaatgaaggtattgactttctcaggacttaccttaatctcccatctgagattgttcctgctactttgaagaagcaacagaagcctcttggtcgaccttttggaggtggtggtgaccgtccccgtggccctcct

SEQ ID NO: 141075 - DNA, 176 bp, Arabidopsis thaliana
  unsure (1)..(176): unsure at all n locations
cggacgcgtgggcggacgcgtggggccgttgacactagcgatgataatagaacaccagttcaagaaaagaaaggcttgccagatcaatgcagtagtggtgcattgagccctgctgttgacactagcgatngacaggccaccagtttctgaaaagaaaggcataccagcatcaacac

SEQ ID NO: 141076 - DNA, 303 bp, Arabidopsis thaliana
gaactagaaggcgctgagctagaagagcaacttcttcagcctgttccaatccatgtgcctcaaggaaacaagcctgctcgtgctccagctcagaagcaacctactgctgaggaagatgaactcgctgccttacaagctgagatggctctctaagctgaagctagccttggaagatttcgattaagtggggagatttgtgtgtgcattatctaaaaacagaaagaaaagattttatgtatataaggatccgagtctaattgatcggaagattttttttttctttttcaatataattaacttatt

SEQ ID NO: 141077 - DNA, 434 bp, Arabidopsis thaliana
catatctcttcaccaccagcttctcaaagctttagcctcgagagcaaaattctctcaagctttagccatgtctgcctctgcttcttccctctctgctttcaatcctaaatcccttcctctctgcgtctccagacccgcttccgtctccgtcttacctccttccctctccttcaaacttcactccgaccacctcgtctctatcttcgcttcctccgccctcaaatgctcatcccccgccgagtacccgtcgcgtttcgttagaaacgttgctgtatcttcggattttgaggtggaggaagatgatatgttcgctgacggtgacgattcagcgcctgtggagcgtaactccttctctcctgaccttaagctctttgttggtaacctttcttttaacgttgatagcgctcagcttgctcagctctttgagagcgctg

SEQ ID NO: 141078 - DNA, 417 bp, Arabidopsis thaliana
gcgtccgaacccctatgcaccacagtctgatgcatccctcttatggagaccctcataggttcccgatacacggaagaggtcctcatccctacttctcgggacaatatgttggtaataataacaacggtcatgatctctttgacgcatacccgcagcaaaacgggcattttcatcactcatcttgctcttgttaccactgttatgataataaatactggcgaggttcagcaccggtggtccctgatgcaccctataatgctggtttttatcctcatgagagcgttatgggttttgctccaccgcataatcctagaacttatggttctcgtggtctacagcctcatggaagatggcctagtaacttcagtgatgctcaaatggatgctctttctcggattcgtcctcctaaagttgtat

SEQ ID NO: 141079 - DNA, 418 bp, Arabidopsis thaliana
ccacgcgtacgcaaaaccaaaaaaaagaaaacacaaaaacaaagattataatggcttcctcaaccatggctttgtcctcccctgccttcgccggaaaggctgtgaagcctgccgcatcagatgtcctcggaagcggccgtgtgaccatgaggaagactgtcgccaagccaaagggtccatcaggcagcccatggtacggatctgaccgagtcaagtacttgggtccattctccggcgagcccccgagctaccttaccggtgagttccccggtgactacggatgggacaccgctggtctatccgccgacccagagaccttcgccaggaaccgtgagctagaagttatccacagcagatgggccatgctcggagccctaagctgcgttttcactgagctattggctaggaacggagtgaa

SEQ ID NO: 141080 - DNA, 51 bp, Arabidopsis thaliana
gatttgtaattctaaagagtgttgaatcgaatggaccgtgattgttgttgt

SEQ ID NO: 141081 - DNA, 121 bp, Arabidopsis thaliana
gaagaaaaagctgttcctgtgctttagcagaccatttggtaattgtcctggacgctgatcatcactttccgacaactctgttgctctttctcacacgtttgagtctgaatcttcgattgtc

SEQ ID NO: 141082 - DNA, 379 bp, Arabidopsis thaliana
caaatacattatcaattatataaataacataaactgaactcctaagcagggttctttttataaatttattatttatttattgtggaaaaagaacaataataatatggggatgtctaaaagtatcaaggttatcctatctcttgctcttgtagtgttcttggcacttgcatgaaccaaggttgaggcctccgtaagatacataacttatcctgctatcgatcgtggagatcatgctgtacattgtgacaaagcccaccctaacacctgcaagaagaaagaagcacatccttacaggacaggatgcggagtgctcgaaggttgccatcgtgaaacacgtcaaaagcccacctaacagcattagatatacatttggttgaca

SEQ ID NO: 141083 - DNA, 113 bp, Arabidopsis thaliana
gcgtccgcacacgacgtccgacactcttcacctatccacttctcagctcatcgtcagcccctcgctctaatggccaacgaagacctcactgagtcacagcaacatgaacaccc

SEQ ID NO: 141084 - DNA, 316 bp, Arabidopsis thaliana
  unsure (1)..(316): unsure at all n locations
cacacgcgtccggagagagggagacgagaagaacanaaaaaaaaaggaagaaaactttgcgtggatgaaaaaatggagatcggagaagaaaattctcgatgaccattgaccttcagaagagttgggaagtgaggactgatgtgttctggtggagaaggaaaacaatggagctgtggaaaagcgggtgtagtgagtttgcagaaagttggatctttggttcgagatttgagcgagccttgtctttcacagtcacggatacaggttgttataactatcggcaaaatgcttaagccagagaagtggcaagcgtcttttg

SEQ ID NO: 141085 - DNA, 400 bp, Arabidopsis thaliana
  unsure (1)..(400): unsure at all n locations
cagacacgtgggtcactgttcatgccggtgaaagattangccgtggtatagtgacggatgctatcactactcctgtagtcaacacatctgcctacttcttcaagaaaactgctgagcttattgacttcaaggagaaaaggagtgtgagtttcgagtatggtcgttatggtaaccctacgactgtggtacttgaagataagataagtgcacttgaaggggctgaatcaactttggttatggcatctgggatgtgtgcaagcactgttatgcttttggcattggttcctgctggtggacacattgtcactactactgattgctacaggaagactaagatcttcatggagaattttcttcccaagttggggatcactgtcactgtgattgatcctgctgatat

SEQ ID NO: 141086 - DNA, 393 bp, Arabidopsis thaliana
gatgctagctagacaagatcctttttgtaccatatcaggatttatcatatatcatttctgttatgaaggaagtttctcatgaagtcgccttgatttatcgtctttgatgattatttctttgcaggcttttcctgatgctgcaacgatttccagtagagtctaaagggcggcgcaagaagctacaagaggttggctacgtgacaaccatatgctttacatgtttcctcatcagatgtatcatgatgtgctttgatgcgtttgacgatgcagcagatcttgatgtcttagatcatccaatcctaaacttcatatattacttgttggtggagatattgccatcgtctctggtcctctttatcctaagaaagcttccgccaaaacgcggtatcacac

SEQ ID NO: 141087 - DNA, 164 bp, Arabidopsis thaliana
ccaacgcatcggcaagtttctcggattcaggtcccggtccaattccatctacctggaaaggcgagtgcgagatcggacctgattttcctgcctcatcttgcaatcggaagcttaacggagctcgagcgttttacaggggatatttaacgcaacggaatggaaca

SEQ ID NO: 141088 - DNA, 117 bp, Arabidopsis thaliana
gaaagaaaccgagacatgtcacgtacgaagacgataacagttcacgcgtcactacaatcaaatccgaagccgaagctccttcagaacatcaagttccgttcagtaatcaactaaaga

SEQ ID NO: 141089 - DNA, 388 bp, Arabidopsis thaliana
gttctctctttcttacatatttcttttggatttcgttgtcttttttttctctcttttcttctcctctctctcgctcgatttcaatttgggcgagaaaggagcggtcttttgtctttcctgggtttatcagctagatccctcttgcctaaagtttgtaactttcttagggttttcttctgatttcctctctctcggggttaattctgctcaaaaatggtttgattcagaggcaaatctggttttgtttagacaataaagttcgggactttttgacatactcacagctggtttttagctttggttcttatagagagtaatagtagtgaagggtttgtgccaatagttagaaatgatcaaacagatatttgggaaattacctagaaagcct

SEQ ID NO: 141090 - DNA, 413 bp, Arabidopsis thaliana
gaaaaagatatggttggaatcctgccgccagagttttgtcaagatgatttctgaaaaacagcttagagagatggaggaactgaaggcaaagacccaaacaactcatgctcaaccggatgatctaattgacttcttccatctaaagagtcggaagggaatgagtcaacttgagttggaagaccaggtacaagatgacctaaagcgtgcaactggagaattcaccaaggacgagaacgatgctaacaaacttaaccgcattcttcaactcacaggattcagtgacccagtctatgctgaagcatatgtaacggtacaccattatgatattgctcttgaagttacagtaatcaaccgaaccaaggaaacccttcagaacttgtgcttggagttagcaaccatgggtgatctcaaac

SEQ ID NO: 141091 - DNA, 341 bp, Arabidopsis thaliana
cgcgtccgcacacgcatccgaaaaaagattcgtcgacgtcgccagccattggcgacttgttcttcttcgtcttcaaaccttgtcctcttcaattatcttccagatctctctctctctctctctttcatcaagtcttccttctcattcgtctccttcttcgtcttcgtctacccttgcagaagagatacgaaactccatttatttattagcctctctctctctctctctctcgtctcgttatttctttatttgattcttcgtattgacgtattggcttgcgtcacctcaatctctttctcttcaattccaatttcctggggatagatagaggcatttttagc

SEQ ID NO: 141092 - DNA, 417 bp, Arabidopsis thaliana
  unsure (1)..(417): unsure at all n locations
catttccaattctctctaatgtttcactaaagcgcatacataaccctaaccctaactctctcgtactgcacaaaaaaaaaaaaaaaattgaagaagagcgatacgatcgtaaccagggagcttgatttctcccctgatttttctaatggattctcaacagagcgatctctttgacaccgcatcgcagccggacacggtggccgacgagtatacctttttggaattcaatactcaaggcgattcagagttcgattaccaggattttggatcgccgacggcatggccgacaccgtctgattctatttccatcgctgacgttgccgatcgtggtgaaggaggagctgccgcggatcatcattctgaggcttcgtcaccttcgtcnctctctgccggtgccgggaatggtgcgaaagtggg

SEQ ID NO: 141093 - DNA, 305 bp, Arabidopsis thaliana
gaactaaactaccacgttccctcgcacaagcactgatccattactcgacctcagttatcacaccacaacacacgctcaaagagatagcggtatgcaatagagtaatccgcacgaagtcaccctgcaatttcttggagtttggtctacgccatgacagcctcatgtggagctctctcaactatggaggtcggactgtgtttcttgaagaagatgaatcatggatgaaacagatcacgagacggtttccgatgctggaatcgtaccatgtaacatatgacattacagtcaatcaatccgataatctc

SEQ ID NO: 141094 - DNA, 415 bp, Arabidopsis thaliana
cacacgcgtccgcggacgcgtgggggctgatgtggaaccagaggttgcagcagcaggagttccaaagaagagaacgttcaagaaattcgccttcaaaggagtcgatctcgatgctcttctcgacatgtctaccgatgatcttgtcaagctcttctcttcccgtattcgcagaaggttctctagaggattgacgagaaagcctatggctttgattaagaaactccgcaaggcgaaaagagaggcaccagctggtgagaagccagaaccagtgagaacccacttgaggaacatgatcattgtgcctgaaatgattggaagcatcattggtgtgtacaatggaaagactttcaaccaagtggagatcaagcctgagatgattggacattaccttgcagagttctccatctcgtacaag

SEQ ID NO: 141095 - DNA, 190 bp, Arabidopsis thaliana
cagacgcgtgggcggacgcgtgggtggttgtgtactggtttaggcctctacacttcaggacaagagttcgactcgtatttggtaccaagtcgtgccatctctttctctctctctctttcgccttcacaatccaatatccatgtcgatgttgttgtattgaacttaaagagaggtaataaaaattaccttt

SEQ ID NO: 141096 - DNA, 377 bp, Arabidopsis thaliana
cacacgcgtccgcccacgcgtccgctctcagttgcaaggatgggcaaataggctataccgggatgaagttgtggcagaatggaagaaagtgaaagggaaaatgtcgcttcacgttcattgtcacataagcggtggccatttccttttagatctctttgcaaagtttcgatatttcatcttttgcaaagaactacctgtggtgttgaaggcttttgtgcatggagatgggaacttgttgaacaactatcctgagctacaagaagctcttgtttgggtctatttccattctaatgtcaatgagttcaacaaagtcgagtgttggggtccgctttgggaagctgtttcgcctgatggtcacaagactgagactcttcccg

SEQ ID NO: 141097 - DNA, 409 bp, Arabidopsis thaliana
catgatttcatcctaggatggcatttggctccaacaacttatggagattatccacaatcgatgaaggatcgtgtcggtcatagattgccaaaattcacagaagctgagaagaagttgctaaagggttctacagattacgtaggaatgaattactatacttcagtgtttgcaaaagaaattagccctgatcctaagagtccgagttggacgactgattctcttgttgattgggatagcaagagtgtggatggatacaaaattggtagcaagccgtttaatggtaaactggatgtgtattcaaaaggtttgagataccttttgaagtatattaaggataactatggcgacccagaagttatcattgccgagaatggatacggagaagaccttggagagaagcacaatgacg

SEQ ID NO: 141098 - DNA, 402 bp, Arabidopsis thaliana
tgatctttttattttcctcttccttggccaaagaaaatcttatcgtagctgtgaaaaccctagtttctaatcatctcaattctctcattaacctatcaatttcgatagggtttgatcaagtatccgatttcatgatcggttgctgtatggagactaattgctggagtttaggttcgtgtgttttgaactgagcttttggttcttgtttgtgtctggtgttgaagacatggatttggaagctaattgtaaggaaaaactttcatattttcggataaaagagctcaaggatgtgctcactcagctgggactttcgaaacagggaaagaagcaggaacttgtcgaccggatcttgacccttctttctgatgaacaagctgccaggttgttgtctaaaaagaatac

SEQ ID NO: 141099 - DNA, 416 bp, Arabidopsis thaliana
  unsure (1)..(416): unsure at all n locations
aattcttccccattctctctctaaaaccatttcttttttctcagctacaaaaatcgaaactttccgacgagtttttaacattaggacttcattcggcaagaagcattaccgtagtatgtcggatttgatttaagatgacatgagatatggctgcattgaatctatcaaagaggtcaatttgtgaaacatgcggacatcaaggatggaagaattcacttgtaacttgctctaaatgccgcatagcctgtgaacactgttattgcatgcgggagagttcatttgagacctcaatacattttgtctgtgctgattgttcgatgagacctgttcaaaacaaatttacttcagattctatcaaaggagtcnctagaagtattaggaataaagtgcgggtggaatcttcaaatccagttcct

SEQ ID NO: 141100 - DNA, 363 bp, Arabidopsis thaliana
cacacgcgtccgcccacgcgtccgcccacgcgtccgcggacgcgtgggtttgacattttaagtaagaacagctagctttgccatctccctaaaggcaataaatctcggatccactttcacgatattttgatattttttctatttataatctttctgggttttgagtcttttgaaggctgaattgctctgaaatctcaattgtataatcatctcctgagtcgtcgttatcgtgatcatctagaagaaagcatgactacactagatttgaccagagccgagcttgctcttattgttctctatttgaacaaagctgaggctagagataagatatgcagagctatccaatatggttccaaatttttg

SEQ ID NO: 141101 - DNA, 317 bp, Arabidopsis thaliana
catgtgttgaggcttagaggaggtattattgagccttccttgatgatgcttgctcgtaagtacaatcaggataagatgatttgccgcaagtgctatgctcgtcttcacccaagagctgtcaactgcaggaagaagaagtgtggtcacagcaaccagttgaggcctaagaagaagatcaagtagagagactcttatcaagaatcccatctcttgcttgcttttttttgttgtcttccctttgatagggtttgtttttcttgtttcagtgactttctatgttaaaagataatgtcagtaaaaggatttggttttctatt

SEQ ID NO: 141102 - DNA, 349 bp, Arabidopsis thaliana
cagacgacgtgggaaaaaagaaaacacaaaaacaaagattataatggcttcctcaaccatggctttgtcctcccctgccttcgccggaaaggctgtgaagcctgccgcatcagatgtcctcggaagcggccgtgtgaccatgaggaagactgtcgccaagccaaagggtccatcaagcagcccatggtacggatctgaccgagtcaagtacttgggtccattctccggcgagcccccgagctaccttaccggtgagttccccggtgactactgatgggacaccgctggtctatccgccgacccagagaccttcgccaggaaccgtgagctagaagttatccacagcaga

SEQ ID NO: 141103 - DNA, 385 bp, Arabidopsis thaliana
catctctttcttctatagcttctagtttctcccacttctcacttcctttttcccgaatcttgataatgtaaattcacaacaaatctgtttaaaaacaaccaatcaaaacccaacattgcttctcaacaaaaaagcaaagcaaaagattttgcgagagaaaaaaaagaaaatggatttgttcaagatccttcttcttgtgttcttcgtgaacataagtttctgcttcgctgcagatccatattctttctataacttcgaagtctcttacattactgcttctcctcttggtgtccctcaacaggtcattgctataaatggaaagtttcctggtcctacaatcaatgttacaaccaatgaaaatctggttgttaatgtcagaaacaag

SEQ ID NO: 141104 - DNA, 387 bp, Arabidopsis thaliana
aaaaaacttggctagtttttctccacaaggttttttctgcaaacatgtctgaacttgcattgtcatctcaagaagagtctccaagtagtaataagattggtttatcttctcttcttctctctgactttcatctcttttgctcatttatcctcactcaccctttctatttttcttacttgctcttcttttcaccttacatcttcaagattctctcttttctttcaccactctttgtcaccaccacactcttgcttcttgccttattgagtactttacatgttcaagacacttgtctcgactctgaatcactagaaacacaaccaagcttccttttctccttttgtagtaagcttggaagtgtcttggaacacaagtttgatgtcaaca

SEQ ID NO: 141105 - DNA, 284 bp, Arabidopsis thaliana
gacatttacatgatgatgaacttagttccagaagtggcaccatcagtgttgtaagcagtgtaagcacagaagcaaatggagctacgctgagtagagagataagaaacaatgatccaatgttgtctcattgtagaaactcttatgctccaagccaaggtagtcgggacgagtacgacacagggacccatagtatgagcagtctcagcagtccaagtcatgttcatgagaccgtcacacttagtcctctccctcagcatcatacagctggccaccgcttcactgca

SEQ ID NO: 141106 - DNA, 370 bp, Arabidopsis thaliana
cacacgcgtccggttttgttttcctttaaccatctcccaaaatactcttccctttaacgtgggtccttcagtctttttgaatgaccccgccattgtcaatcaactttcaaacggatcgttattctttttggttttaggctatttagattattgaattgattttgaatgataatcatgatgaattgtattccgtgtttcacttcacaaaagagcagaaacgctccatgcacgacgaacgagactaacgatgataacgttgaccacgacgaattcagaccacctgttgttgcgacgacgaaacggactgaagaaagagaacctgcagagcaacaaccaccggtgaaaacattcaatttccgggagttagcga

SEQ ID NO: 141107 - DNA, 359 bp, Arabidopsis thaliana
gacaccacgaagagttttggctccaaaaccgctccaaatgtcctgcgcctacctcgcctgggtccttgatcatgtttctgcagctgtgaataggcagagagggtagaagaaccgtggcgggatctttaccgctggatttggtcaatgacatccaatacttcatgaaatgactgaaggtgactccatctgctacaacatgtgtagctgagttgcctatacagattccagctccagggaagatggtgacttgcatagccattattggtcgcatctgaattccttccggagagacgtgaggaggaggtaacttgggcaagacgccatgcaacacactgatatctttaggggaatcagacttc

SEQ ID NO: 141108 - DNA, 192 bp, Arabidopsis thaliana
cacacgcgtccgatttttcaggccaatttttttcagtgtcttcactgttttatattgacaagtgtgaaaatataataaagtttccttggtaatcagaaatccgttagactaatcaaaaagacctcgtgtcgaatatcatcataaattaataaaataatattctgctggagctggtcattttttttttatttt

SEQ ID NO: 141109 - DNA, 408 bp, Arabidopsis thaliana
cactctaactcactctttgcttctgcaactcacagtcaatggcggctgaaatggcgttagtgaaacccatctccaagttctcttccccaaagctctcaaacccgagcaaattcctctccggccgacgtttctccaccgtgatcagaatgtcagcctcttcctcaccgcctcctccaaccaccgccacctcgaagtccaagaagggaacgaagaaagagattcaagagtcgcttcttactccgaggttctacacgacggacttcgaggaaatggaacagcttttcaacacggagatcaacaagaaccttaacgaagcagagttcgaggctctgcttcaagagttcaagaccgattacaaccagacacatttcgtgaggaacaaggagtttaaagaagctgcagacaaat

SEQ ID NO: 141110 - DNA, 378 bp, Arabidopsis thaliana
cacacgcatccgctaaaacatcaccagcgttaacacaagatccttccgttcccgaagttccttacatgacggcgagagttttccgatctcctttcacttacactttccctgtagcatcaggtcgtaaattcgtgcgtctctacttctacccaaactcgtacgacggtctcaacgctaccaactcgttattctccgtctcctttggtccttacactcttctcaagaatttcagtgcttctcagacggcggaggcgttgacttacgctttcatcatcaaggagtttgttgtcaacgttgaaggtggaacgttgaacatgacgtttacaccggaatcagctccgtctaatgcgtatgcctttgttaatgggattgaggtta

SEQ ID NO: 141111 - DNA, 223 bp, Arabidopsis thaliana
gtggtaggaaagtgcagctctgtggagtggcacaatatgggaatctgattggggtcactgttggttacaccatcactgcttctattagtttggtagcggtagggaaatcgaactgcttccacgataaagggcacactgcggattgtactatatcgaattatccgtatatggcggtttttggcattattcaggttattcttagccagatcccaaatttccacaa

SEQ ID NO: 141112 - DNA, 190 bp, Arabidopsis thaliana
aaagtttctagggtttacgaaatttgggtctctctccctctctctacttaacgctctctgtatcttcttctccgtcaacgatacgaacccagagacgtcggcggttaaaacaatcgtcggatctctctggattcgttagacgagaagtttccggtatctaatttctgtgcgttagagagaaattagggtt

SEQ ID NO: 141113 - DNA, 210 bp, Arabidopsis thaliana
tgtaaaataaatagatagtcataactagtgtattacaaaaaaaaaataaagtaaataaaagtaatcactagctagtgactaaactaaatcccaattatgggtcgtgtacattttggtgtatcagcattctttgttttttgtttgttaggtttatcagctaatgcaaagatcttcaatattaattctcctccaggttctgatatcactaac

SEQ ID NO: 141114 - DNA, 191 bp, Arabidopsis thaliana
cgacgggatctagtagatccggaacgatggggaaaagaggaagggcttgtgtagtggtacttggagatcttggtcgaagtcctcggatgcaatatcacgctctttctcttgctcgtcaggcatcatttcaagtggacattgttgcatatggaggttctataccccatgaagctgttctaaatcacccatca

SEQ ID NO: 141115 - DNA, 157 bp, Arabidopsis thaliana
attatctttgcgatttttacccaaagcttccaaagcttagttttttttttttttcaacttctctcatgcgtctgctactttattacacgaactttgttttgggcttcaactaacgatcaaggttcgttgaaaactatgagtatagttgagtttttta

SEQ ID NO: 141116 - DNA, 193 bp, Arabidopsis thaliana
agcccacgcgtccggtaaaaccctaaacatagtcacttcatcgtctcctccactgtatcattcaatctctgtcttccttctttttagcgacctcgtctccaaagctcacaaattttctacctttccgagagaaagatgcaagcttgttgtggtggtaattcgatggcttctcttcagcaacctggacgggttc

SEQ ID NO: 141117 - DNA, 213 bp, Arabidopsis thaliana
cttttagatagccatcatgtaaagaaaaaaccctagccgcctaaagaggcaacgacttctctgatccattgttgaagatcgatgaagcagaatccaaagacgaaaatggaggaaatgaagatctcattttactcgcacatggacgagaagaacgaatccgattcagttgttagatctagaccaaaggcgaggagataaagcgaaggttagatc

SEQ ID NO: 141118 - DNA, 211 bp, Arabidopsis thaliana
gaagaaatggaggtagcagcagcgactgcgacgagcttcacaacgcttcgagctcgtacgtcagcgattatcccgtcttctacacgtaatctgagatctaaaccgagattttcttcatcttcatctctcagagcttctctttcgaatggctttctttcgccgtataccggaggaagcatctctagtgacttatgcggcgctaagcttcgtg

SEQ ID NO: 141119 - DNA, 216 bp, Arabidopsis thaliana
caataacgctctcagagagaccatttgatgaagcttctcgcttctggaatttgaaaaggatttgataagacgagttcatagaagattaccgcaagttcatcaactttttgaacttgttatggagataatctcactgaacgttgtgccccagtgctctgtggttacttggagtagtaaattagcaacgaaaagattggtccccaatcggtcaagttt

SEQ ID NO: 141120 - DNA, 105 bp, Arabidopsis thaliana
aaaaagattcagaatactgattgtgactcttttgtttaagctctgaaaaaaaagagtcacaatcagtattctgaatctttttgtgactcttttttttcagagctt

SEQ ID NO: 141121 - DNA, 191 bp, Arabidopsis thaliana
cccacgcgtccggaaaaaccctaatcagcttctcgtctccataaattcagaaccaagaaacatctctgagagactaaacgaagatgtatcttcagtgctatatcaacgagaagggtgagaaggtttacacaactaagaaggaatcaccgctagggctagccactgaatctgcccatccagcccggttctcc

SEQ ID NO: 141122 - DNA, 196 bp, Arabidopsis thaliana
acggttaaaccagagtaaagcttgaaactttggactaaaagaatggcgtctttgggtgtgtcggaaatgcttggtactccccttaacttcagggcagtttcaagatcgtctgctccgttggcatcaagcccatccacgttcaagactgttgctctcttctctaagaaaaagccagctcctgctaagtccaaggctg

SEQ ID NO: 141123 - DNA, 188 bp, Arabidopsis thaliana
gttaggctgagtatatggacatgaagacccttttagaccgtacaaacgacgccatcaacacaatcatacgacttgatgagaccaccgaaacaggggaatttcttcagccttgtattgaagctgcattgcatttggggtgcacaccaaggagagcttcaaggagccaacggaacattaacccgagatgt

SEQ ID NO: 141124 - DNA, 217 bp, Arabidopsis thaliana
gaacaaagaagaaattttgaaaatagtgaaaatggtaaccgtaagccaaagtcacacgacgacgtttctcttcttcaccacatttctcttgatattcggatcaatctcagccgtccgtttgcttccacgaccaaacactacaacaaccaacgatctagatttcatccgaacaagctgcaacgctactctatatccagacgtctgcttcacgtcactc

SEQ ID NO: 141125 - DNA, 217 bp, Arabidopsis thaliana
ggagaatttagtccaaacagctgagaataacttggctacagagagaaagaaaattgaggtagtctctcaacagattaacgatctgcaatctcaggtggaacggcaagaaacagaaattcaggataagatagaagcactgagcgttgtttcggcacgcgagttagagaaagtaaaaggttatgagacgaagatatccagcttgagagaagagttggaa

SEQ ID NO: 141126 - DNA, 214 bp, Arabidopsis thaliana
attggagatgatgagcattgttggactgagactggtgtttcgaacattgagggtgggtgctatgctaagtgtgttgatctttcgagggagaaggagcctgatatctggaacgctatcaagtttggaacagttttggaaaatgttgtgtttgatgagcacaccagagaagtggattactctgataaatctgttacagagaacacacgtgctgcct

SEQ ID NO: 141127 - DNA, 196 bp, Arabidopsis thaliana
agcaaagacaaagaaaacgaaaatgttggcaatatttcagaaagcttttgctcacccaccggaagaactcaacagtccggcttctcatttctccggcaaaactcctaaacttcccggcgaaactctctccgacttcctctctcatcaccaaaacaatgctttctctatgaacttcggcgactccgccgtcttagct

SEQ ID NO: 141128 - DNA, 190 bp, Arabidopsis thaliana
cccacgcgtccgcagacattagcgttgagaaaaaaaaaaaagtaagaacgagagagagaaagccatgtctgcgaaaacaatcctatcatcagtagttttggtggttctcgtcgccgcatcagcagcggctaatatcggattcgatgagtcaaacccgatccgaatggtctccgatggtctccgggaggta

SEQ ID NO: 141129 - DNA, 216 bp, Arabidopsis thaliana
accaacttcagcgacaagataacaaaacgctttcacacgatcggataaaatggcggagaagagctttaagtacatcatcctcggcggcggcgtctctgccggatacgcagctaaggagtttgccaatcaaggggttcaaccaggagaattggctgttatctcgaaagaggcggtggctccatatgaacgccctgcacttagcaaggggtatttgta

SEQ ID NO: 141130 - DNA, 218 bp, Arabidopsis thaliana
cggacgcgtgggtccggatttcgattcccgaggctcgaaaaaaccctaaatctcttctccgttcactcatccaaccgaagatgcgtgagattcttcacatccagggtggtcaatgcggtaaccagatcggcgccaagttctgggaagtggtttgcgccgagcacggcatcgatccaaccggaaggtacaccggagactcagatctgcaacttgagcgc

SEQ ID NO: 141131 - DNA, 216 bp, Arabidopsis thaliana
aatttttggaacgaaatagattggccatcgagagaggagcttcattgacaaagagtcctatagccggaagtgaagaaatttccggtgcgtataatgctaaaggccgtccagatcttgggttggtcatcagggttaaccatctcacagagattgaccaagactcgcaagtcctctaccgtctctttcatctcgtcatctctcaatctctcctctgtc

SEQ ID NO: 141132 - DNA, 214 bp, Arabidopsis thaliana
agcacattgaggtctgacttttttgttgcggcacaaaactgttgggttaagaaaggaggtgctttcactggtgaagtgagtgcggagatgcttgtgaacttggatattccatgggttatccttggtcactctgaaaggagggcaatccttaatgaatcaagcgagttcgtcggagacaaggttgcctatgcacttgctcaaggtttgaaagtga

SEQ ID NO: 141133 - DNA, 211 bp, Arabidopsis thaliana
cccacgcgtccggcggaatcgagttgtggaagttgttgcggtgatggtggtggtgaagcggtaacggcggttggtggtggttgtaaacggtgcggtgagagagaagcgagtgtgttggtgttaccatgtcgtcatttgtgtttgtgtacggtttgtggtggttcggctttgttacggacttgtccggtttgcgatatggtcatgaacgcta

SEQ ID NO: 141134 - DNA, 213 bp, Arabidopsis thaliana
atttgttggaggtcaatggattgtgggaattattgacgagcttagaaaggcgtatgcagaagagtcttctgatagcggaccaatattgatagatacaaagactcgactccgtgatacacttccagctgagccacagaggaggaatggaaggcttcagctaatgctttacaagcttctatgggacactattgtgaaagaagggtttccaacggg

SEQ ID NO: 141135 - DNA, 212 bp, Arabidopsis thaliana
atcaccgttcatcgtattcgaagatgctgatattgataaagctgtagagcttgcacactttgccctcttcttcaaccaggggcaatgttgctgcgcggggtctcggacatttgttcatgagaaagtgtatgatgagtttgttgagaaatcaaaggcacgcgcattgaaacgtgttgttggtgatcctttcaggaaaggcattgaacagggtc

SEQ ID NO: 141136 - DNA, 191 bp, Arabidopsis thaliana
agcccacgcgtccgctagaaacatctttcatgcgttatcttctccaaaagctctgattctgattctgaatcatcctgaaaaaaacctagaaaaattctatcccacaaaatcttcaaagatccatggccgtaattatccctcgttcagatccaccgtcacgaatccatccggaaccaccacaaaccctagaa

SEQ ID NO: 141137 - DNA, 192 bp, Arabidopsis thaliana
agcggacgcgtgggtttggagatgcacttttacgagtcttgcccttacctgaagttcgctcatttcacggcgaaccaagcgattctagaagctgttacgacggcgcgtagagttcacgtcattgatttagggcttaatcaagggatgcaatggcctgctttaatgcaagctttagctctccgacccggtgga

SEQ ID NO: 141138 - DNA, 193 bp, Arabidopsis thaliana
agcccacgcgtccggctaactacccaacctgtgaagctacccccattctctctcaacgttttcgttttgaaatggcgaggaagaagatcagagagtatgactcaaagaggttggtgaaggaacatttcaaaaggctttctggcaaagagcttcctatcagatccgttcagattaatgaaacaactgatctaaa

SEQ ID NO: 141139 - DNA, 193 bp, Arabidopsis thaliana
gtttgtcttagcgatatcttctccttcaacgactctcatcaaaccattaaaacgaaatgggccaaaccggtcaccggttcgaaaaatcctttgcctgagccagaggaagcagagcaaaaccagtaccggcaaatcttggatcgtcccagtaagtctctctctttttggttcaggcttcgtcttgggtcctctc

SEQ ID NO: 141140 - DNA, 216 bp, Arabidopsis thaliana
aaaaaaactcgatcggctgatacttaatcacccacttgattttgtatttttgtacctttttttgttgtaatttttccatacacccaatttcccgtggaagaaaaggagtcagctttttcgtttgctttaaagcttgaatctttacatagttccagttactttctatagagcttcataatccctagttgcccaaaaggattctgggttttgtgagac

SEQ ID NO: 141141 - DNA, 154 bp, Arabidopsis thaliana
cccacgcgtccgcctcgttggaacgaaactcgatcttcgagatgacaagcaattcttcatagaccatcctggtgcagtgcctattactacaaaccagggagaggaactaaagaaactgataggatcaacaactatacaatgttgcaggtgttcg

SEQ ID NO: 141142 - DNA, 214 bp, Arabidopsis thaliana
ctcctacctcctttgcctacaagctttcacgcgggagctcaacatcagccatggcggaacagactgagaaagcttttcttaagcagcctaaggtcttccttagctcgaagaaatctggaaagggaaagagacctggaaaaggtggaaaccgtttctggaagaacattggtttgggcttcaagactcctcgtgaagccattgatggagcttacga

SEQ ID NO: 141143 - DNA, 194 bp, Arabidopsis thaliana
agcccacgcgtccgcggacgcgtgggaacaagaagaacaacaacactaagcaaaaaagaaaagctcaagccgagagagacaatggcatcaacattcacgagctcaagcagtgttcttaccccaacaacattccttggccagactaaagcctcaagctttaacccccttcgtgatgttgtctctctcggatctcc

SEQ ID NO: 141144 - DNA, 217 bp, Arabidopsis thaliana
ttcttcaattcagtcttcttcttcttcaccaacccaatttcttttcttcaactctctcttctccccaaacccgacttctgatccgcatcgatttccatggcagccaacaccatttctctttccaacgtcgccgcctccaagaatctcaactcctttcaaagccgtgcctttattgctccaccaactatttttttccctgtggcttctgcaaagtcta

SEQ ID NO: 141145 - DNA, 212 bp, Arabidopsis thaliana
cttagcaatggcattacgtctagctttaagtctatgtgtttatctgctgtttacacaaggtgcacagggaaacactgatgattttgattgtgtggaaatatacaaacaaccagctttccaacatccattgttgaaagatcacaagatccaggaaacattcagcctagatggaaaaattgaaagaagcaacaaatataatacaaaagagcatt

SEQ ID NO: 141146 - DNA, 214 bp, Arabidopsis thaliana
cttcttctcttggcctctcacttgaatctcccacaaagcgatcaatcacaaattccttcttctctctctctcttttcgtccctaagaatcaattatgaaaggagctaaatcaaagactgaaaccaggagctccaagctctctgtgaccaagaagccggctaaaggagcagggcgtggcaaagctgctgctaaggaccccaacaaaccaaagagg

SEQ ID NO: 141147 - DNA, 189 bp, Arabidopsis thaliana
agctctctgctctcaagataattttgttctctcaatttcattcttaaaccctagttcttcgattttttccgatctacgacaatggcggacgctgaaacctttgctttccaagctgagatcaaccagttgctttccctcatcatcaataccttttactctaacaaggagatcttcctccgtgaactcatc

SEQ ID NO: 141148 - DNA, 219 bp, Arabidopsis thaliana
ataagcgtttactgtgagtctctcaaagaaaccaaaggcagagaaaagagataacacacacaaaaaaaaatggcatcaacctcactcctcaaggcttctccggtgttggacaaatccgaatgggtcaagggacaaagcgttctcttccgtcagccttcttccgcttctgtcgtcctccgcaaccgtgccacctccctcaccgtccgtgccgcttcctcc

SEQ ID NO: 141149 - DNA, 218 bp, Arabidopsis thaliana
caacaagtggattccttgtgttgaattcgagttggagcacggatttgtgtaccgtgagcacggtaactcacccggatactatgatggacggtactggacaatgtggaagcttcccttgttcggttgcaccgactccgctcaagtgttgaaggaagtggaagagtgcaagaaggagtaccccaatgccttcattaggatcatcggattcgacaacaccc

SEQ ID NO: 141150 - DNA, 213 bp, Arabidopsis thaliana
caaccaaacactcatttctccacatcttgagagaaaaaaacagagcaagtatattagagatctcatggcgatggcggtctccggagctgtcctcagtgggcttggttcttcgttcctcaccggaggcaagagaggtgccaccgcattggcaagcggcgtaggcactggagctcagagagttggcaggaaaactcttattgtcgctgctgcggc

SEQ ID NO: 141151 - DNA, 212 bp, Arabidopsis thaliana
cccacgcgtccgcccacgcgtccgggaactcgttgagggattgagaaaaaaataatcagaagagaaagatccatggctgataattgtatcagacttcttcactcagcctctgttttcttctgtttagggcttctaatttcatccttcaacttgttgcagggtattgcagctgaaaatctttccaagcagaaactgacctcatggattcttca

SEQ ID NO: 141152 - DNA, 215 bp, Arabidopsis thaliana
cggacgcgtgggtgagaccttcttcccttccgtttccggcggagctgtttcttccgtcggttatggagtctctgaaactggccaagacaaatatgctttcgaacacaagagaagtggagctaaacagagaaattcgttgaagagaaacattgatgctcaattccacaacttgtctgaaaagaagaggaggagcaagatcaacgagaaaatgaaag

SEQ ID NO: 141153 - DNA, 182 bp, Arabidopsis thaliana
ccttaagcaaaaaagattttatctcactctcaatagtgttagtattgtcacagagaaagcttcagatctagaagaagaagcagagttcataaagagaaacccattttaaaccctagaaatcaagtgtcaatctcggaaaccttctgattccgcaacaatggcagttacagatactgaaagtc

SEQ ID NO: 141154 - DNA, 217 bp, Arabidopsis thaliana
cccacgcgtccggcaaaacaagaagaacaacaacactaagcaaaaaagaaaagctcaagccgagagagacaatggcatcaacattcacgagctcaagcagtgttcttaccccaacaacattccttggccagactaaagcctcaagctttaacccccttcgtgatgttgtctctctcggatctcccaagtacactatgggaaatgatctttggtatgg

SEQ ID NO: 141155 - DNA, 194 bp, Arabidopsis thaliana
cccacgcgtccgaagaacacataactgggcggttgcactgaaaactcttattgttattcaccgtgccttgagagaagtggaccagacatttcatgaagaagttattaattatagcagaagcagaagtcatatgctgaatatgtctcattttaaagatgattctggtccaaatgcttgggcttattctgcttggg

SEQ ID NO: 141156 - DNA, 194 bp, Arabidopsis thaliana
gccatggcagcctctctccaatccaccgctacattcctccagtcggcgaagatcgccaccgctccttctcgcggaagttctcacctccgatcgactcaagccgtcggcaaatcttttgggctcgaaacttcctcggctcgcctcacttgctccttccagtctgactttaaggacttcaccggtaaatgctccga

SEQ ID NO: 141157 - DNA, 218 bp, Arabidopsis thaliana
aaaacattctaaagaaaaatgaagatgataatccaaattttcttcatcatctccctcatttcaaccatctcttttgcctctgttcaagacttttgtgtagctgacccaaagggtcctcaaagcccatcaggttactcttgcaagaaccctgaccaagtcaccgaaaatgactttgcatttaccggcctcggcacagctggaaacacttccaacatcat

SEQ ID NO: 141158 - DNA, 206 bp, Arabidopsis thaliana
ccttgctgaccatttggccgatccagttaacaacaacgcatgggccttcgccaccaactttgttcccggaaagtgagccaagttttatctgtattttgcttcagtctttgcttcgtgagtgtgagaggagaaagagagcttgtttagatgtaaaatttgcaagactttgtatttttttcattaatcaaataactcgtttttctctc

SEQ ID NO: 141159 - DNA, 209 bp, Arabidopsis thaliana
cactaatactctatagtttgtttttgttcttcttataatctttatattttcagcaaacgaaagggaagtgtgtcagaaatctcagagggtgagaatcccaatgaggatcttacccgaacctcgaggttcggttccgtgtcttctccttcttgtgtcggttctcttatcagcgactctctcactcgctcgtgtcgtcgaagttgtcggtt

SEQ ID NO: 141160 - DNA, 217 bp, Arabidopsis thaliana
caaaaacaaaagaagaagagaataaacaaaagaagaaaaaaaactaataaaacaaaatcaataaaaagagaataaaaaatggtgggttctcacaaagcaagcggagtgcttcttgtgctactagtggttatggccaccacaatagcaaacgggacaccggttgtcgataaagcaaaaaatgcagctacagcagttgaagatacagcaaaaaatgcag

SEQ ID NO: 141161 - DNA, 204 bp, Arabidopsis thaliana
cgccttctctcgcagccaacgatcccatccaaaaccaaaactcgctctccggtgatcgtctttcctttacctcgccgaccttctccgtcttctctataactcatttctcttcttttctcttttctagttatattgagattgtggctgcaagagaaacggcaaaatgctgctactgaagcaaatctcaccaccggttccatctca

SEQ ID NO: 141162 - DNA, 197 bp, Arabidopsis thaliana
tatcattctggtttgagttctaatcgtttgaaacctcttgaaaagtgtgattggcgtggtaatcttagttaacatttcctttccttcttctctcctttttaccctttcttctctcgccctcgtttacttcttgagattttcttagctcgatttgatctttggtgctttaacttctggcggtgtttgatttgcagcac

SEQ ID NO: 141163 - DNA, 199 bp, Arabidopsis thaliana
  unsure (1)..(199): unsure at all n locations
ctctttcgcttctaaaaaaaaacctaacaacctctcttctctcttcctcgttcaacaacaatggagttctggggagttgcggtgacaccaaaaaacgctactaaggtgactcctgaagaagacagccttgtccacatttctcaggcttcacttgactgcacagtgaaatctggagaatctgtggttttgnagtgtgact

SEQ ID NO: 141164 - DNA, 200 bp, Arabidopsis thaliana
  unsure (1)..(200): unsure at all n locations
agaagaaacagagagcattatcaattattaacaattacacaagacagcgagattgtaaaagagtaagagagagagaatggcaggagaggcagaggctttggccacgacggcaccgttagctccggtcaccagtcagcgaaaagtacggaacgatttggaggaaacattaccaaaaccatacatggcanagagcattagca

SEQ ID NO: 141165 - DNA, 186 bp, Arabidopsis thaliana
cggacgcgtgggttcgttctgttcctttcgttagactccgccgtgaatgtctccgaactaaagacaacggctctgttgctttggattgggtcgccggcgaagataggcactttcctcctgattcaccaatcctcattttgttgccaggtttaacaggaggaagtcaagattcgtatgttagacata

SEQ ID NO: 141166 - DNA, 202 bp, Arabidopsis thaliana
gtgatattcacggaagagctagaggcaaaagacctgaaatttctagtagcagggtggcgagtagagatggcttggaggggtgggttagtacgcgtaaccgaaatttaaatatggaacatgaaatgaatcatagggatgagagtaacacacgcggaatttgtagttctgttaccagacttgatgtgcgtgaaaccaggtgtag

SEQ ID NO: 141167 - DNA, 200 bp, Arabidopsis thaliana
agccaatggcttcttcaggtttcagcggcgatgaaactgcgcctttcttcggattcctcggcgccgccgctgcgctcgttttctcctgtatgggagcagcgtacgggacggcgaagagtggagttggagttgcgtcgatgggagtgatgagacctgaacttgttatgaaatcgattgttcctgttgtcataggctggtgt

SEQ ID NO: 141168 - DNA, 201 bp, Arabidopsis thaliana
  unsure (1)..(201): unsure at all n locations
ctcacagaaaaaagtaaaaaaaaacctagatcgctcttcacatctcttcgaacgattctctctttcaagatgcaaattttcgtgaaaacactcactggtaagaccatcactctcgaggttgagagctctgacaccatcgacaatgttaaggcaaagatccaggacaaggaaggcattcctcctgaccagcnaaagattgat

SEQ ID NO: 141169 - DNA, 199 bp, Arabidopsis thaliana
  unsure (1)..(199): unsure at all n locations
cgtagttgttcctctggttatcctcatcaacgggacccttgaaaccgtgtagccatcttgcttaatgattagagtcttaaagctgtgctctttcttcatcgatttgagcaagtgatcttggaaggctcttgagttctgaattccttgtaagcaatcatggcagggaaaagagaaaactttgtgagggtnggatgatttg

SEQ ID NO: 141170 - DNA, 185 bp, Arabidopsis thaliana
agatcacaccatgaacctttcctctaacgaccaaccaagccaaggccgtatcaaggccaaggattggtcgactgatttgtgtgaatgttggatggacataaactcatgctgcttgacttgttggtgcccttgtgttgcctttggacgcatcgcggaggttgtagacagaggttccacatcgtgtg

SEQ ID NO: 141171 - DNA, 203 bp, Arabidopsis thaliana
cccacgcgtccgcaactatacatttctccaaaatctccgagttctacaattgtgtgatcaatcaatcttctccgatttcaagcttctcgatcaaaagaatcatcatgggaggaggaagagctatggcgacggcggcgaaggttgctggaatcggagttggtaaaggaggattcaagggatttggatttcctccgagcgactga

SEQ ID NO: 141172 - DNA, 202 bp, Arabidopsis thaliana
ttgagataaaaatcagaaaagtaaagagacgaaaatggcggatcaacaagcaggaacaatcgtcggaggagttcgcgatattgatgcaaatgctaatgatcttcaagtcgagagtctcgctcgtttcgctgtcgatgagcataacaagaacgagaacttgactctggagtacaagaggctccttggtgcgaaaacacaggtt

SEQ ID NO: 141173 - DNA, 189 bp, Arabidopsis thaliana
attcccatcacctcacaaaccattaaccgacagccaactagcgagtaaaatcaactatcaagcaatgggatcgatgaccatgaccgctaccttcttcccggccgtcgccaaggttccctcagccaccggaggacgaaggctctccgtactcagagcctccacgagcgacaacacacccagcttagaagt

SEQ ID NO: 141174 - DNA, 205 bp, Arabidopsis thaliana
acgcttatacgatcagtctcccacattcacacttccaccaaacacctctcgtccacatctttctcctttggtggcaaacacaacgacagatagagagaaacgatggcgtcgaactcgcttatgagctgtggcatagccgccgtgtacccttcgcttctctcttcttccaagtctaaattcgtatccgccggagttccactcccat

SEQ ID NO: 141175 - DNA, 201 bp, Arabidopsis thaliana
cggacgcgtgggttcgatctatagagacgaaacaaaaagagagatcgtacgcaaaagtttccgatatggctcgctcgtttggagctaacagtaccgttgtgttggcgatcatcttcttcggatgtttatttgcgttgtcctctgcaatagaagaggctacgaagttaggatcagtgatagggatagatcttggtactactt

SEQ ID NO: 141176 - DNA, 196 bp, Arabidopsis thaliana
cggacgcgtgggcagaaaaagagctcgaaacaaaaatggagggaaccttctcgccgctttgcttacgttcttcttcgaacctctgttacttctccagtaatgtttcaccagattctcaccgttctataggatttacattggttgattcgctccggccaacgaacttggtttccctgcgaacgggaaataaacgttc

SEQ ID NO: 141177 - DNA, 187 bp, Arabidopsis thaliana
tcaaactctctctttctcctttcaccaaacaatacaagagatctgatctcattcacctaaacacaacttcttgaaaaccaatggatcaaatcgaagcaatgttgtgcggcggaggagagaagacaaaagtggcggttactacgaagactttggcagatccattgaattggggtttagcagcggatca

SEQ ID NO: 141178 - DNA, 205 bp, Arabidopsis thaliana
acgcccacgcgtccgcccacgcgtccgaatttttctacggtcagagattcaaaagagttctttctctctatcttattctccgatcatcatgatgcagcagccaccacccggaggtatccttccacatcacgctcctcctccttctgcgcaacaacagtacggttaccaacaaccttacgggattgctggagctgctccaccacca

SEQ ID NO: 141179 - DNA, 127 bp, Arabidopsis thaliana
caaaaagaataatggcagcaagtgcatctccaatggagagccagctaaggaccagcttgtccaccgcttctcattctcagcgtcgcgccgtccccaagggcatctccggtgcacctttcagtgtttc

SEQ ID NO: 141180 - DNA, 201 bp, Arabidopsis thaliana
cccacgcgtccgcatgtatacacacatatagttacaaacacacatacacaaaacacagatatataaaaatgtcttgttataataaagcactattgatcggcaacaaagtcgtcgttatacttgtattcctcttatgtttggttcactcgtcagagtcacttcgaccactgtttgcatgtgatccagcaaacggggttaacc

SEQ ID NO: 141181 - DNA, 201 bp, Arabidopsis thaliana
  unsure (1)..(201): unsure at all n locations
ctctctctctctctctctctgacagttctttctgtctctctctctgctcgatgcgaagaatcgagcatttgtgtcgctctctggaacgtgtgtcttcatcgggaatataaccataatctccacgagctgcttgaatgcgtacccttcgttccctaatgttggcggcggctctagcagtggctttggccngtgactggtttt

SEQ ID NO: 141182 - DNA, 191 bp, Arabidopsis thaliana
gtttcaatggcttcagctacttccgtcatagcctggggttctggagaagatgggcaactaggacttggaaccgatgaagaaaaggaattggcttccgtcgtcgacgctcttgagcctttcaacgttcgctccgtcgtcggtggtagccgcaattccctcgccatttgcgatgatggcaagctgtttacatg

SEQ ID NO: 141183 - DNA, 185 bp, Arabidopsis thaliana
cggacgcgtgggtgcggtcgtcacatttgagagtattgcaatcctcacacccaggggtcggtacaatgtggaacttcacctttctttcttacgattgcaaggacaagctaatgactttaaaatccagtacagtagcgttgtccgtttgttcttgcttccaaagtcaaaccaaccacacacgtttg

SEQ ID NO: 141184 - DNA, 189 bp, Arabidopsis thaliana
cggacgcgtgggcggacgcgtgggcaaatctcaggcggctcaacactatcctcttctacattttccaacgatggcctcaaacgcactctcgtctttcaccgccgctaatcccgctctgtctcctaagccactactccctcacggctctgcttctccgtcggtttctctcggcttctccaggaaagttgg

SEQ ID NO: 141185 - DNA, 197 bp, Arabidopsis thaliana; identical to SEQ ID NO: 129562

SEQ ID NO: 141186 - DNA, 196 bp, Arabidopsis thaliana
cccacgcgtccgctttcatcagccgttttgaatctccggcgacttgacagagaagaacaaggaagaagactaagagagaaagtaagagataatccaggagattcattctccgttttgaatcttcctcaatctcatcttcttccgctctttctttccaagctcataaaaaatggctgaggctgatgatattcaacca

SEQ ID NO: 141187 - DNA, 187 bp, Arabidopsis thaliana
ctttcttctccatatacaaaaaaaacagagaactcacaatgtgcgattcagattttctctctcgttgctcttcctacgaagcagacgttgattccgacagcgagatctcgacctccagtttcagttcttgttcgtacagtgaatctgaggaagaagagatcaacaatggttttggtgttgttcagtc

SEQ ID NO: 141188 - DNA, 191 bp, Arabidopsis thaliana
aaaaaaaaagagcttaggcggagaagaagaggagaccaaaacaccaaacaaacaacaatggctgtctcaactatctactcaacacaagctctcaattcaactcatttcttaacctcttcttcctcctccaaacaagtcttcctctaccgtcgtcaaccacaaaccaaccgtagattcaacacactcatcac

SEQ ID NO: 141189 - DNA, 199 bp, Arabidopsis thaliana
gctaaggcttctctcaggctccgtgctacatgcgagaaactgaaaaaggttctaagcgctaatcctctggcaccgttgaatatcgagtgtttgatggatgagaaagatgttaggggtgtcatcaagagggaagagtttgaagagatcagcatcccgattttggagcgtgtaaagaggcctctagagaaagctctctctg

SEQ ID NO: 141190 - DNA, 199 bp, Arabidopsis thaliana
gaaaacgaaactcaactaattttgttatcacccaaaaagaagttcaaacacaatggctttcgctttgaggttcttcacatgccttgttttaacggtgtgcatagttgcatcagtcgatgctgcaatctcatgtggcacagtggcaggtagcttggctccatgtgcaacctatctatcaaaaggtgggttggtgccacct

SEQ ID NO: 141191 - DNA, 197 bp, Arabidopsis thaliana
cccacgcgtccggaaactcactcctgacctctcgcatggcgtctctagactctctagtcatctttcttttttctactctttttgtcactatcgtgagctcggaaacgccgtgcccgaatttcaagtcgatcatcagtttcggcgattcgattgcggacacgggaaacttggttggtctctctgatcgtaaccagctt

SEQ ID NO: 141192 - DNA, 200 bp, Arabidopsis thaliana
cacaaccaaaaaaaagaaaacacaaaaacaaagattataatggcttcctcaaccatggctttgtcctcccctgccttcgccggaaaggctgtgaagcctgccgcatcagatgtcctcggaagcggccgtgtgaccatgaggaagactgtcgccaagccaaagggtccatcaggcagcccatggtacggatctgaccgagc

SEQ ID NO: 141193 - DNA, 191 bp, Arabidopsis thaliana
cttacctatctcaaccctcttgggaagaaggcaggtttacttccagaagaagaaaatgaagacgctgatcaggggaaagatccaatgcgtagatctttgtctactgcagatgggaacagaagaggagaggtcgcaatggggagaatgagtagggactctgcggctgaagcatcaggtggtgcaggcaataa

SEQ ID NO: 141194 - DNA, 203 bp, Arabidopsis thaliana
gaaaaaaggaaacgacgaggaaaaacaaaaacaaaataaaaacaagcctcgttcttcccttttctctcttcaaatcttttcttttacatattttcttttcttttttttgtctttaatacaaatttactaactaatcagaataaaaatgggttcgagtaagtttaaacgagccataggagccgtaaaggaccaacaccagcgtc

SEQ ID NO: 141195 - DNA, 205 bp, Arabidopsis thaliana
acgctaaaaccctcgaacacatcgcctttatctctttctctagatctactcgctatggctactatcaccgttgttaaggctagacagatcttcgacagtcgtggtaatcccaccgttgaggttgatatccacacgtcaaatggtattaaggttacagcagctgttccaagtggagcttccactggtatctatgagggctcttgag

SEQ ID NO: 141196 - DNA, 207 bp, Arabidopsis thaliana
acgcggacgcgtggggccgcgcaagaagacgattctctctcttgagttgaagaaatgaagcacaacaatgttatccccaatggtcacttcaaaaagcactggcagaattatgtcaagacatggttcaaccagcctgccaggaaaaccagaagaagaattgcgaggcaaaagaaggctgtgaagatcttccctcgtccaaacttctgg

SEQ ID NO: 141197 - DNA, 198 bp, Arabidopsis thaliana
gtcacaaccaaaaaaaagaaaacacaaaaacaaagattataatggcttcctcaaccatggctttgtcctcccctgccttcgccggaaaggctgtgaagcctgccgcatcagatgtcctcggaagcggccgtgtgaccatgaggaagactgtcgccaagccaaagggtccatcaggcagcccatggtacgggatctgac

SEQ ID NO: 141198 - DNA, 199 bp, Arabidopsis thaliana
cccacgcgtccgcccaacttccggaggagaacggtggcttctcaaaccagttggcgatggagacacaagacacattggttacaaagtggcaatgcctgctccttttgagatctcctctggccaagttaccatcggacggctaccggaaaaggctgacgtcgtgattcctgttgccaccgtgtcaggagtccatgcgaca

SEQ ID NO: 141199 - DNA, 197 bp, Arabidopsis thaliana
cgctgacagtgcttgctcacacactaatcgcaattgttgctgcattgccgactctgattcgttcgatttcagcattttgttcttccgaagcgatgcctcgtcgatccggagattgcatgagatgtctggtgattttcgcggttgtatcagctttagttgtgtgtggacctgctctttattggaaattcaacaagggt

SEQ ID NO: 141200 - DNA, 90 bp, Arabidopsis thaliana
ggcaatgacgcagctaatgaggtactaaccgaggcgcgtctattgctggttgaaaactatttccaaaccccctcctgggcctaagcttgt

SEQ ID NO: 141201 - DNA, 197 bp, Arabidopsis thaliana
ttttcgcttcaattcaataaaaggcgaaaaatctctcactgcactttatctcgagagctcagatctccgatctagagcctttcgcttctcctcttctgttcatataacaactgaataatgtcgatctccgcccaaaatccggatatttccggcgatagacaatccggccaagatgttcgtactcagaacgtgatggc

SEQ ID NO: 141202 - DNA, 199 bp, Arabidopsis thaliana
ctgatccttctctcatcctcagaaagaatggctcaaaccatgctgcttacttcaggcgtcaccgccggccattttttgaggaacaagagccctttggctcagcccaaagttcaccatctcttcctctctggaaactctccggttgcactaccatctaggagacaatcattcgttcctctcgctctcttcaaacccaaaa

SEQ ID NO: 141203 - DNA, 206 bp, Arabidopsis thaliana
agcccacgcgtccgcttgcaatcacatttgttgcatctgcttcagattcagaggttcttaaccaggtacaagagaggtttgaggttgatataaaggaacttccggagcagattgatacttcaacctacatgccttcttaaacaagtagcacgtccctcaggaaagaagctcttcagatttcaaccttgtaggtgttcgaagggtga

SEQ ID NO: 141204 - DNA, 198 bp, Arabidopsis thaliana
cccacgcgtccgtatattccttatctgtgtgaatggaagaaggattcatctatctgagtcatgctaatgtgcttctgggttacgattctttcagctgccaatcgtcgtctctctcatcttcctcctatcgcgtgttccagaggtattgatcaggaagatgaagtacagagaaggagagcagagaacttctaccacaca

SEQ ID NO: 141205 - DNA, 196 bp, Arabidopsis thaliana
gcaagggagcgtgtataaactgtggtgcaatgactcacagttctaaagcatgtatggatagacctcgtaagattggagctaaatacacaaacatgaacattgctgctgatgagaaaatcgagagttttgaacttgactatgatgggaagagggacagatggaacggttatgatacttcaacctaccgtcatgtggt

SEQ ID NO: 141206 - DNA, 199 bp, Arabidopsis thaliana
cttctctctgtgtacaatattcggaaagtgaggaagatacactgaagcaaaagagcaagtcatggcggcgacatcttcctctgcttttctccttaatccgttgacttctcgccaccgtcctttcaaatactcgccagagctctcttctctctccttatcctctcgaaaggctgctgctttcgatgtttcctcagctgct

SEQ ID NO: 141207 - DNA, 203 bp, Arabidopsis thaliana
aacccacgcgtccgaagattataatggcttcctcaaccatggctttgtcctcccctgccttcgccggaaaggctgtgaagcctgccgcatcagatgtcctcggaagcggccgtgtgaccatgaggaagactgtcgccaagccaaagggtccatcaggcagcccatggtacggatctgaccgagtcaagtacttgggtccattc

SEQ ID NO: 141208 - DNA, 200 bp, Arabidopsis thaliana
aaaaaagagagaagaaagtccactaaagaaaagagaatagatatagatcaatggcgtttgaagctcttaccggaatcaatggtgatctaatcaccagatcatggtcagcctcgaagcaagcttacctaaccgagcgctatcacaaggaagaagcaggagcagtcgtaatcttcgctttccaaccatctttctcagagaaa

SEQ ID NO: 141209 - DNA, 198 bp, Arabidopsis thaliana
atcgatctctctagaaacaaatttcccaacttccttcttagagctctcttgtcagtttaagctatcattatgtcaaacgaaccggaatcctccgactcgaaaactaagaaggatttcagtactgcgattctagagaggaagaagtctccaaaccgacttgttgtcgatgaagctattaacgatgacaactctgttgtc

SEQ ID NO: 141210 - DNA, 195 bp, Arabidopsis thaliana
gataaaccgatcgagaactgctcgatctgctgtgaagaccgtcagtctgagatgatgctatcattgaaatgcactcacaaattctgttcgcactgcatgaaaacgtacgttgaagggaaagtaaagacttcagaggttcccatcaggtgtcctcaagtgcaatgcaagcattatctctcagcagcggaatgcaaa

SEQ ID NO: 141211 - DNA, 199 bp, Arabidopsis thaliana
caacaatttattccgtgttccataaccccatgaacacattattcgagagaaatggaatcagccaatcactctctttcctccatatataaaatctagccaatattcacaaataataactacttccttcgttcttttccttaccaaaagatccacctcgaacctctctcctccgtcttcctccgcagccgccgtcactatc

SEQ ID NO: 141212 - DNA, 204 bp, Arabidopsis thaliana
agcccacgcgtccggaaagacattgggagagttaatcccaatttccaggttcttcttttctcggcaacttttaacgaaactgtcaaagattttgttgcgcggacagtcaaagatcccaaccaattgtttgtcaaaagagaggatctggctttggactcggtgaagcagtataaagttgtttgcccgaaggagcaaaacaagatc

SEQ ID NO: 141213 - DNA, 201 bp, Arabidopsis thaliana
cttttgtttaattctcttcttaatctcctccttcatctctacttctcttgccgtcgaacctccgcctgaaacaatctaccaaaactttctccaatgtttcacaaaccaaacaaaagctcctcctaactcattagccgacgtcgttttaccaaaaaccgctgccgctttcacccccgtcttacgcgcttacatccgtaacgc

SEQ ID NO: 141214 - DNA, 199 bp, Arabidopsis thaliana
gcaaagcctctcgttgctagaggaatcaaacaatggtgtttgtgaagtccaccaagtcgaatgcttacttcaagaggtaccaagtgaagttcaggagaagaagagatggaaagactgactacagggcaaggatccgtcttatcaaccaagacaagaacaagtacaatactcctaagtatcgttttgttgtccggtttac

SEQ ID NO: 141215 - DNA, 198 bp, Arabidopsis thaliana
aaaaaaaagaaaacacaaaaacaaagattataatggcttcctcaaccatggctttgtcctcccctgccttcgccggaaaggctgtgaagcctgccgcatcagatgtcctcggaagcggccgtgtgaccatgaggaagactgtcgccaagccaaagggtccatcaggcagcccatggtacggatctgaccgagtcaagt

SEQ ID NO: 141216 - DNA, 196 bp, Arabidopsis thaliana
cggacgcgtgggccaaattctcttctctctatctctctcgcgtacgccgcaccgtagcgaccaattgaatccacgaggaaatctcagtaaatactatggcgaccaacgaacccgagcacgagcacagagacgaggaagaggccggagctaacgaggatgaggacaccggagctcaggtcgctccgatcgttaggct

SEQ ID NO: 141217 - DNA, 199 bp, Arabidopsis thaliana
agaaatcgaatcttatcgccgcgttaatatgccaccggccggagaactccgacatcaatctccatcaaaggagaaactatcttccgttacccaatccgatgaagcagaagcagcgtcagcagcgatatctgcggcagctgcagatgcggaagctgccggattatggacacagatcaaggcggaagctcgccgtgatgct

SEQ ID NO: 141218 - DNA, 196 bp, Arabidopsis thaliana
ccgcgatgaaagagatcatcatcgatgttcctttggctagtcggatcatcttccgtggtttcatttggcccgttgctgcctacagagagtttctcaatggtgatctcattgctaaggatgtttaaaaagggaacttgttttctgcttttgtgttactctctctaatctctttgttttccattgtacttattgaaaa

SEQ ID NO: 141219 - DNA, 201 bp, Arabidopsis thaliana
gccccaccaaatgcttcaatcctcttccactacacaaaaaaacaacttaatccctttatacccttttagccaaaaccctcgctaaaagccaatccctcaatataaaataacaagtagaattgatctgcctatatataagattttgagacgaaataagatctaaaccacaagaaagaaagtaaacataaaagtatgggaagg

SEQ ID NO: 141220 - DNA, 203 bp, Arabidopsis thaliana
agaaaataagcagcctcaaaggaccatgttaaggtgcagggtgagatattagagggtcttgttgctcgtatcgtgagcagtcagagctcaagagatatggaaaatgtcttgagagatcatcctccaccaccctgtgatggagctaatcttgatctgggactcagtctaagagagatatgtgctgcccatagatctaacgagaa

SEQ ID NO: 141221 - DNA, 192 bp, Arabidopsis thaliana
cggacgcgtgggagattatatagtgagcgattgttagaagccattaattacttgagtcggaaggtttatttgtttgttatttgtctctcggactggttgattgggttaaacttgtcaatgagtaaccctttgaatctgtcgttttgtttggtcggtcgaattatatagaaatgtattattggttataaaatg

SEQ ID NO: 141222 - DNA, 197 bp, Arabidopsis thaliana
cttcactctctctaatcaaaaagcttttaacctcagccgttaaatctttctccgatcatgccgaccagaaacatcgccattggtggagtccaagaagaggtctatcaccccaacgcacttagggcggcgctcgctgagtttatctcgactttgatcttcgtcttcgccggctcaggctccggaattgctttcaacat

SEQ ID NO: 141223 - DNA, 199 bp, Arabidopsis thaliana
gcaaaatcctcgtcgaagctcgctgctgcaaccatgtccgacgaggagcatcactttgagtccagtgacgccggagcgtccaaaacctaccctcaacaagctggaaccatccgtaagaatggttacatcgtcatcaaaaatcgtccctgcaaggttgttgaggtttcaacctcgaagactggcaagcatggtcatgcta

SEQ ID NO: 141224 - DNA, 202 bp, Arabidopsis thaliana
aagaggattaagtagcttctctcaacaaagcttcgaaattgatccgtaattagtgttcaatttcgtgttttttcctacattggattctcacttttagattttgtggggagggaaagataaaaggttggatttttatttttccggtgaggaaaaaatgacgacgagaggaagcagatcggagaaagtcaagagaattttccag

SEQ ID NO: 141225 - DNA, 198 bp, Arabidopsis thaliana
cgctgcgtctctctcccgcaaccttcgattttcgtttattcgcatccatcggagagagaaaacaatcaataagcgaccatgttggtgtaccaagatcttctcaccggtgatgagcttctgtctgactctttcccttacaaggagattgagaatggaatcctctgggaagtagaaggaaagtgggttactgtgggagct

SEQ ID NO: 141226 - DNA, 193 bp, Arabidopsis thaliana
aaatttcaaaaacttttgaatgttttcatttggaatctgaggttgtctgctcgagaattttggtgggtttgtgctgaaatctggaataggattagggttttttcgtgaatttgaaaatggcggagcagaagagtaccaatatgtggaactgggaggtgactgggttcgaatcgaagaagtcgccttctagtga

SEQ ID NO: 141227 - DNA, 193 bp, Arabidopsis thaliana
atcttcttcatcgatttctctcttccaaatctcccaaaagatgtcgaaccctagagttttcttcgacatgagtctcagcggtactcccatcggacggatcgagatggagcttttcgctgatacaaccccaaacacggcggagaatttccgtgctctctgtaccggcgagaaaggaatgggaaagctaggtaag

SEQ ID NO: 141228 - DNA, 197 bp, Arabidopsis thaliana
cggacgcgtgggttgagaggtcaaccaaccttgactggtacaagggaccaactcttcttgaggctcttgaccagatcaacgagcccaagaggccatcagacaagccccttcgtcttccacttcaggatgtctacaagattggtggtattggaacggtgccagtgggacgtgttgagactggtatgatcaagcctggt

SEQ ID NO: 141229 - DNA, 202 bp, Arabidopsis thaliana
atccagagttccgacaatggcttcagcatcagcgacagctactcttctcaaacccaatcttccgccgcataaaccgaccatcatcgcctcctccgtatctccgcctcttcctcctccacgtcgcaaccacctcctccgccgcgatttcctctccctggcggcaacatccacgcttctaacacaatcgattcagtttctagct

SEQ ID NO: 141230 - DNA, 199 bp, Arabidopsis thaliana
cttccttctggttaactgaaaatggagtgtagttcagtgagtgtactaggaatattactggtatttcctctccttcataaccttgtcaccatctccgggcagaatcttccggcggtgggtttgttcactttcggagattccaacttcgacgctggaaataaaaagttcctcacaagtgctccacttcctcaaaactttt

SEQ ID NO: 141231 - DNA, 199 bp, Arabidopsis thaliana
cccacgcgtccggagatttcctcttcatctcaagagaaatggctgaatccaaggtagtggttccagagtctgtgctaaagaagatcaagaggcaagaggaatgggcattggccaagaaagatgaagctgtagctgctaagaagaagagtgttgaggcccgcaagcttatcttcaagagagctgagcagtatgccaaaga

SEQ ID NO: 141232 - DNA, 200 bp, Arabidopsis thaliana
cggacgcgtgggttaaggttctattgaaccagaaagagataagtggagaagcaatagacttcatacttgaccattaccctcctcagactccgttaaattctctcttacaagagcaaaatccgggaagtcttccttttgtccctgaacatctccggcgtgaatccggcgactttgtccttgttaatcactctaccgacgtc

SEQ ID NO: 141233 - DNA, 200 bp, Arabidopsis thaliana
gtccgatatatcgttaccagagaaagagagctcagagatttagttagcttaatttttcttttcgttttgaaattaaggaagtgattgttatcaccggaggagagagagaaaatgttgggaattttcagtggagctatagtatcgccgccggaagagttagtggctgccggaagcagaactccgtcgccgaaaacaaccgg

SEQ ID NO: 141234 - DNA, 196 bp, Arabidopsis thaliana
cggacgcgtggggcctgagcaggaggaagaagacgaagaagaagaggagcagctactaccatggttctcaagacggagctttgtcgtttcagtggacagaagatttacccaggaagaggaattaggtttatccgatctgattctcaggttttcttgtttcttaactcaaaatgtaagaggtacttccataacaagt

SEQ ID NO: 141235 - DNA, 195 bp, Arabidopsis thaliana
gagatattctctgtcttgcttcttctttacccttttcttgtttccaatcaaatcctctaaagtttcgttctttgttctaagttttctgaaggagtgatatttgtttgtggtgtggttagagaaatgaatcggagacagcaagtgaaacgtagagtaggtaaatatgaagttggaagaacaattggagaaggaacg

SEQ ID NO: 141236 - DNA, 209 bp, Arabidopsis thaliana
ggcgttgaaaaagaaagcaaatgcagaaaaagtcctggcggatctggagaatagagagagtcctcaactttctgatattgacaaggagggtattactaatgatgaaaagtacatgctccggaaaattggcttgaaaatgaagcctttccttttactaggtagaagaggcgtctttgatggaacaatagagaacatgcatcttcactgga

SEQ ID NO: 141237 - DNA, 201 bp, Arabidopsis thaliana
caatggcagcgagtgcatctccaatggcgagccagctaaggagcagcttctcctccgcttctctttctcagcgtctcgccgtcccgaagggcatctccggtgctcctttcggtgtttctccgaccaaaagagtctcttccttcactgtccgagctgttaaatccgacaagacaacattccaagtagttcaaccaatcaacg

SEQ ID NO: 141238 - DNA, 199 bp, Arabidopsis thaliana
gaaaaaggctgtgtttcaagactcaacacagatgctcaaaactttaacaagaagcttaacgctgctgcttcaaagcttcagaagcaatattccgatcttaagattgttgtcttcgacatctactctccactttatgatcttgttcagaacccttccaaatccggattcacggaagcaaccaaaggatgttgtggaacag

SEQ ID NO: 141239 - DNA, 198 bp, Arabidopsis thaliana
cggacgcgtgggccaaattctcttctctctatctctctcgcgtacgccgcaccgtagcgaccaattgaatccacgaggaaatctcagtaaatactatggcgaccaacgaacccgagcacgagcacagagacgaggaagaggccggagctaacgaggatgaggacaccggagctcaggtcgctccgatcgttaggcttg

SEQ ID NO: 141240 - DNA, 197 bp, Arabidopsis thaliana
cgaaaccctaatccccaatttctctttcaagttttcgatcacgatctctggaaaattaagagagaaattcaaaaacttcgggagttcaaagtctcattcagacattccagaaggtattctagtcgactgagtaaacaatcatgagaatcagaaaaggaagtagagttgaggtatttagcaacaaagaggcgccttat

SEQ ID NO: 141241 - DNA, 201 bp, Arabidopsis thaliana
cctacacggaattttagggagcgggaaaaactggggcacttttgctcgtagattggctcatgaattcccaacgtggcagtttctattggtagacctgcgttgccatggggattcaacatctctcaagaagagaggtccacactcggttgctactactgcttctgatgttctaaaacttgttggtcagttgaggttaacacc

SEQ ID NO: 141242 - DNA, 199 bp, Arabidopsis thaliana
aaaaaatgtcttcgataatccatggagctggagctgctacgacgacgttatcgacgtttaattccgtcgattccaagaaactcttcgttgctccttctcgcacaaatctttcagtgaggagccagagatatatagtggctggatctgatgcgagtaagaagagctttggttctggacttagagttcgtcactctcagaa

SEQ ID NO: 141243 - DNA, 197 bp, Arabidopsis thaliana
gttcctactcttcaaaatattgtctcaacagtgaacttagactgcaagcttgatcttaaagccatagctttgcaagctaggaatgctgaatataaccccaagcgtttcgctgctgtaatcatgaggatcagagagccaaagaccacagcgttaatttttgcttctgggaaaatggtgtgtaccggagctaaaagtga

SEQ ID NO: 141244 - DNA, 200 bp, Arabidopsis thaliana
aattcaagttcttctctccctcctctttgcgagaagatctcatacaaaaactattttctaagagttgtggatctcacgattctaggctttctcttttctcttctcttgtaccgaattctacttatgaaccaaaacaactccgtttgggttgtggctttcctctgtgaatcctttttctctttcatatggcttcttattac

SEQ ID NO: 141245 - DNA, 199 bp, Arabidopsis thaliana
atcgtctaaagattatttaaaaaaacgatgtctcaactgaaaattggatcttcacaatgcttatggacaagtatttgcattgtgttatttgtattgtcgatggctcgtggagctgtctctagaaattatggagacgctctcacaaagagtcttttgtatttcgaagctcaacgttctggaaaattgccttcgaaccaaa

SEQ ID NO: 141246 - DNA, 198 bp, Arabidopsis thaliana
cattggattaatcaaagacaaagaaaacgaaaatgttggcaatatttcagaaagcttttgctcacccaccggaagaactcaacagtccggcttctcatttctccggcaaaactcctaaacttcccggcgaaactctctccgacttcctctctcatcaccaaaacaatgctttctctatgaacttcggcgactccgccg

SEQ ID NO: 141247 - DNA, 196 bp, Arabidopsis thaliana
aaaatatatttctctctcactttccttggttttctcggcggcttcttcttctcctatttctccctcaaatcgttttctccagttttcttgggataaatcttcctcctttctgcagacgccatgtcggacaaaggtcgtcccttgccaaaatttggtgaatgggatgtgaatgatccagcatcagcagaaggtttta

SEQ ID NO: 141248 - DNA, 195 bp, Arabidopsis thaliana
acaagttagtcaccaaaaaaaaaaaaaaacacaaaaagtttcaatggccgcctccacaatggctctctcctcccctgccttcgccggaaaggctgtgaacctttcccccgcggcatctgaagtcctcggaagcggccgtgtgacaatgaggaagactgttgccaagccaaagggtccatcaggcagcccatggta

SEQ ID NO: 141249 - DNA, 224 bp, Arabidopsis thaliana
cccacgcgtccgcccacgcgtccggtcgttgaagtgaacgctttggccaaggctttggctggtcagaaggacgaggctcttttctctgccaatgctgcggctttggcttcaaggagatcttccccaagagtcaccaacgagggtgtccagaaggctgctgctgctttgaagggatctgaccaccgtcgtgcaaccaatgttagtgctaggctagatgctcagca

SEQ ID NO: 141250 - DNA, 203 bp, Arabidopsis thaliana
accttcttccttcacagtgaatcaatggcgtcttcttctctatcaactctttgcagctcaacttcttcttctctacatcccaactccaaactctcacattctctttcagctaaattatcctccaaagcaaatgtttccgtccaatttctgggaaagaaacagtctccgcttctctcctcaactccgagatttctcactgttat

SEQ ID NO: 141251 - DNA, 203 bp, Arabidopsis thaliana
acccacgcgtccgcgccgcttccttcttaacaccatcgcctgaattcgctctcctctagctcgcgattgcgaaaacatggctctacctaaccagcaaaccgtagattatcccagcttcaagcttgtcattgttggtgatggaggcacagggaagactacttttgttaagagacatcttactggggagtttgagaagaagtatg

SEQ ID NO: 141252 - DNA, 203 bp, Arabidopsis thaliana
tgctcctctcggtctcggtggtgaagacaatggggtcagacgaggaagatttcgtgtttcatggaacgccaatagagcgcgaagaagaaatcgcaagccggaagaagaaagcagtcgctggggcttctggcaatcttagaactctccctgcttggaagcaagaggtgactgatgaagaaggccgtagaaggttccatggagca

SEQ ID NO: 141253 - DNA, 160 bp, Arabidopsis thaliana
ggagttctcttccgcaccggagctcttcttaacggtttcgcaactgccgtttggatgctcatctctggtcctttgttactcggtttcggtatccgcttcaccaatcagtctgtgccgttgtaactctcggagatggcatcgtatttctacaaaggagcat

SEQ ID NO: 141254 - DNA, 218 bp, Arabidopsis thaliana
caaagttgagattttgatcgtcttcttcctctggaaatttcaatcgaaactatatcttcagagatgcagaatctgtgaaattgtagaaacgaatttcacatttttttttgaagaaatgacgacgcagatatttcagttgccgttaaagtactgtgcttcgagtttttcttccaccggccaacggaattacggtgcttcttcttcgccgtctccgattg

SEQ ID NO: 141255 - DNA, 228 bp, Arabidopsis thaliana
agcccacgcgtccgcccacgcgtccgcggacgcgtgggttttgggattctcaaaaaactcaaaataaactttcctcatttttttttttctttcttttgttttgttttctttataaaggagaaagaaagagaaagagagtttccgaaagctgaattgagttgggtgaagcaaattctcaggatgggaagaggaaagatagaaataaagaggatagagaactcaacaaaa

SEQ ID NO: 141256 - DNA, 222 bp, Arabidopsis thaliana
gaaggatacgcaagtgtcaggactaaagagtgtagttgacaatgcgaagcagcgccataatgtgaagcaagtttatgcatggcatgctttagctggatactggggtggagtaaaacccgctgcttctggaatggaacactatgatagtgcattagcatacccagttcagtctccaggtgtcttagggaaccaaccagatatagtaatggacagccttgctgt

SEQ ID NO: 141257 - DNA, 222 bp, Arabidopsis thaliana
gaaaagaagagaagaaagatgggagcaaagggttgtgttaacgttctcctcaagcttctagtgtttcaaggtcttttcgtttcacgtcctcaagaagactttgatttcttctacttcgttcttcagtggcctggagcctattgcgatacatcgcgtgcttgttgctatccaacatccggtaaacccgctgcagattttggtatccacggtctatggcctaac

SEQ ID NO: 141258 - DNA, 219 bp, Arabidopsis thaliana
cagaagctccttcattctccaccatgagctcgttttacctttcttcttctccaattttcaaacttcagtggcacgcaaaccataaacctaaacccaatcgtgcaatagtttcttttccaccttctcgtcttcatgccaactgctattcgtggagattatcttgtaaccttgctcaacatggtattgagttggaggaaactgtggaggaagatgaaatcc

SEQ ID NO: 141259 - DNA, 221 bp, Arabidopsis thaliana
gttcaatcaaccccagtgaaagaacctaccctgaagagatgatacaaacggggatttctaccattgatgtcatgaactccattgctcgtggacagaagattcctcttttctctgctgctggtctacctcataatgagattgctgctcaaatttgtcgtcaggctggacttgtgaagcggttggaaaagactgagaacttaattcaggaggatcatggagag

SEQ ID NO: 141260 - DNA, 218 bp, Arabidopsis thaliana
attctttatacgtataataacatcccttgtgatcaaacaagtaaaccattcaaaagatgaaaggaagaattttgattttgagtttgctcataatgagtctggtcatggcacaagttcaagtagaagcaaagatctgctgcccttccaaccaagctagaaatggctatagtgtatgccgtataaggttttccaagggaaggtgtatgcaagtgagtgga

SEQ ID NO: 141261 - DNA, 206 bp, Arabidopsis thaliana
acccacgcgtccgcccacgcgtccgctttgagattctccgattgcatctcaaaaaatctcagctatggctacctcctccgcttggaagctcgatgaccaccccaagctccccaagggtaagaccatcgccgtaatcgtcttagatggttggggtgaatctgcccctgatcagtacaactgtatccacaacgctccaactccagcca

SEQ ID NO: 141262 - DNA, 210 bp, Arabidopsis thaliana
cccacgcgtccgcggacgcgtgggcggacgcgtgggcggacacgtgggtgatgaatcgtctgcttgcaggttagctacaaatgaggtcgaattctttgacccgaaagatttctcgagaggaataacatcccggatcatagttcctgggattgctgcatttgagctttctaaaacgccaacttcgcatgttgctgtgtttgttccagaatc

SEQ ID NO: 141263 - DNA, 203 bp, Arabidopsis thaliana
attcaagttttccatatactaatggggaggtttcataaatttcctctcctaggtttagttctgttcctcggtctgaccggctcacttatcgccgccaatgagtatgcctgttctagtaccgatatacactttactcgtgccaatttccctaaaggtttcatttttggtaccgcaactgctgcttttcaggttgaaggagctgt

SEQ ID NO: 141264 - DNA, 205 bp, Arabidopsis thaliana
aaggaaaatgaagggtgagtttttcacattgatggcaataatgtctctcctcttagccttctcgttagtccatggaggaggagagtctggaacaccttctaatgcagccgctaccccgactagcccaaccgaaggatccagtggttcaagtggttcagctcatggacctaattggggatatagttggggatggggttcagccccg

SEQ ID NO: 141265 - DNA, 174 bp, Arabidopsis thaliana
ctttcataagaggtgaagaaggctaactaaaccatgagcagtaagaaaacttgtgtttcagtcaaacatcttccgtctgtttctgatctaaaaaacaaaaaaaaagctagaaaagctttgttagggttttaactttattaactctcgtgtttaatataattttacagatttaat

SEQ ID NO: 141266 - DNA, 221 bp, Arabidopsis thaliana
aaaaaaatggcaacagaaggaaaaaaccccatcaacatgaactctatgtcttcaagtcttgcaagaaccggtcaatgggttttttctcaagatattccgaccgatgttgttgttgaagtcggagaagccaatttctctcttcataagttcatgttagtggctaagagtaactacataaggaagctaataatggaatccaaagatagcgacgtgacaagaac

SEQ ID NO: 141267 - DNA, 218 bp, Arabidopsis thaliana
cgaatctatgcagaaatcaggaggttctgtctgcgtctgtaaggcttcttccggttgggcgacaaaccacaggattcggagctgcgaagaaagtcttatatagattcgagggacatagattgtcatcatcagtagaaaagggagagaaacagagaatgagatgtagagttagctcaaactctactgaaactgaagacgattctgctacaaaaaccaag

SEQ ID NO: 141268 - DNA, 216 bp, Arabidopsis thaliana
ggccgccacttcaaccgccgctgctgcttcttcaatcatgggtacccgggtggtttccgacattagctccaattcaagccggttcacagcccggttcggattcggaaccaagaaagcatctcccaaaaaggctaagacggttatctcagaccggcctctatggttcccaggcgcaaaatcacccgaatatctcgacggttcacttgtcggggacta

SEQ ID NO: 141269 - DNA, 201 bp, Arabidopsis thaliana
cacaaagtttgcttgccttctgggcttcacgattctcacgacatctgtttatcttctccgatttccacgtccatggatctcagtcaatgttccttaatctctcttttcgattagtccaatctccactaatctctgacctcagatcgcttccgacgccgctgaactgtgtccgtcttgatctgtgtttaggagaaagcttct

SEQ ID NO: 141270 - DNA, 205 bp, Arabidopsis thaliana
cgaagaaacaaaaaaaaatggcgacggtacaattgtccacccaatttagctgccaaaccagagtttcaatctcaccgaactctaaatctatctccaagcctccgtttctggtaccggtgacctcaattattcaccgcccgatgatctccaccggaggaatcgctgtttccccccgtagagttttcaaagtccgagccacagatac

SEQ ID NO: 141271 - DNA, 220 bp, Arabidopsis thaliana
cccacgcgtccgcccacgcgtccgcccacgcgtccgaaaaaaagctattgtttgaaagaagaagaagttaactatggcaaaggatgtggaagccgttcccggagaaggatttcagacaagagactatcaagatccgccaccagctccgtttattgatggagcggagctaaagaagtggtctttctacagagcagttatcgcagagttcgtagccactctc

SEQ ID NO: 141272 - DNA, 201 bp, Arabidopsis thaliana
aaaataaatagatagtcataactagtgtattacaaaaaaaaaataaagtaaataaaagtaatcactagctagtgactaaactaaatcccaattatgggtcgtgtacattttggtgtatcagcattctttgttttttgtttgttaggtttatcagctaatgcaaagatcttcaatattaattctcctccaggttctgatatc

SEQ ID NO: 141273 - DNA, 226 bp, Arabidopsis thaliana
agggtggtgattggcctctactgagagtgatgaaaggaatatttgaaggaggacttgagagtgcaaacagaggggctgttgatgaagaagaagaagatgttgaaggcgactggggtgagggacttgacaaattcgatgttgatggaatggagaacacagacatcgaagccatattggatggtgcagaagcaggtgaagaagaagacgacgaggaaggtggatgggg

SEQ ID NO: 141274 - DNA, 201 bp, Arabidopsis thaliana
tttcgctatttttatttttaattgatactttttttttactatcattcccagatcaaggtttgtttctcgatcgaattcatgcttctctgatctgagatcagttagatacgactgcgttttcctcctcgaatttgatcatcggacattctctttttgtttcctgggtttatagtgccgcacgtcaatggcgtgaaccgcggt

SEQ ID NO: 141275 - DNA, 224 bp, Arabidopsis thaliana
acgcggacgcgtgggttcactttttcttctttccttttttctctctctcaacgaccaccaccatgcccggagttgccttctcctgtgttcctgcctccgatctgggaatcttcatctccgaatccaccaccttctcacgctccatctccgcctccctctcatcttcctccagttcaccctcctcctttcgctgttgcaccccattgaacctcaaatcgctgcgt

SEQ ID NO: 141276 - DNA, 222 bp, Arabidopsis thaliana
acgcccacgcgtccgcccacgcgtccgtccgaattagaccaaagtccagacaatggaactcaattgtgttcaatttcttcgaaacaagacgattcttgtcaccggagctaccggtttccttgcgaaggtttttgtggagaaaattctgagagtgcaaccaaatgtgaagaagctgtaccttttggtgagagcatctgacaatgaagctgccactaaacgctt

SEQ ID NO: 141277 - DNA, 215 bp, Arabidopsis thaliana
ctgaaactcctaagagtagccgaggcatacagttttctttctccattggagatcatattatcatagagggaaacaaaaggacgcctccaaggtttgtcggacgcatagctgttataatgacacaatgcttaaatggatggtacgttgtgaagacagtggacaattcagagtctatcaagttacaacattgctcacttgccaagatttcagacaat

SEQ ID NO: 141278 - DNA, 203 bp, Arabidopsis thaliana
gttttcttcttctcttcttctttgggtgttccttccaccaacggcagaaatcgatttggcttaaatctccccctcctttcgatctctctgatcgccgccgggaacattcaatttcccgggagttcaacaaaaaaaaaactctccgtttttatttttccccctttttcaccggtggaagtttccggagatggtgtcacccgaaa

SEQ ID NO: 141279 - DNA, 208 bp, Arabidopsis thaliana
agaaaataaaataaaaagaaaaaaaaacaaaaaaaaaaaacaaaaaaagaaaaagaaaaaagaatctataaatatactgttcaattttttttattttttttttattaatatcccaacggtcgtggggaagaaaatattctgattttgtaatgtcacgtttggtgtatgtaatatttttgcttgtagtggtagaaggtagcaggaacac

SEQ ID NO: 141280 - DNA, 202 bp, Arabidopsis thaliana
acccacgcgtccggttccatgaattgaaccatctcttcgtaacgctcggcttgctcggcgagcttcgccatgtagacatattgatctctgcttaaggtcgtcgccattagagaagaaggaagagagcaggaagaacgaagaacacgtgtcgcttgttaaggattacagatctaaagttgagactgagctttcttcgatctgt

SEQ ID NO: 141281 - DNA, 205 bp, Arabidopsis thaliana
acggacgcgtgggctctcccgcaaccttcgattttcgtttattcgcatccatcggagagagaaaacaatcaataagcgaccatgttggtgtaccaagatcttctcaccggtgatgagcttctgtctgactctttcccttacaaggagattgagaatggaatcctctgggaagtagaaggaaagtgggttactgtgggagctgtat

SEQ ID NO: 141282 - DNA, 222 bp, Arabidopsis thaliana
aaacatcaaaatccaacaaaccaaactagaaaaatgtcagtagttttactctcttctacttctgcaacaatcaccaaatcccaatccaaaaagattccctttttatctcccaccacaaaattcccattaaaggtctcaatttctccatcaagatcgaaacttttccacaaccctttacgcgtggcggcgccgccgtctgtacccacttcggattcgacggag

SEQ ID NO: 141283 - DNA, 224 bp, Arabidopsis thaliana
cttctctctaatacgagaagaaaaaggcgaaaacctcgccaatccgattacgcgaaaaatcaaaggtttttggatatggcgtcgaagcggatcttgaaggaattgaaggatctccagaaggatccacctacatcatgtagcgcaggtcctgttgctgaagacatgtttcactggcaggcaacgataatgggtccttcagagagtccttatgctggaggtgtttt

SEQ ID NO: 141284 - DNA, 219 bp, Arabidopsis thaliana
aaaatttgttcctctgcgcaaacccaagaaactacctggtgaaacaatatttgaggaatacgagttggaatatggaaatgaccgcctagagatgcacataggagccgtcgaggctggcgatcgagctttggtcgttgatgatcttatcgcgactggtggtactctctgcgctgccattaacttgctcgagagggttggagcagaagttgtggaatgtgc

SEQ ID NO: 141285 - DNA, 214 bp, Arabidopsis thaliana
cccacgcgtccgaaagaaaagggtatcaagattgcgaagaaagattgggagaagctgcatctgcacattgcttctcataacaacttccctactgctgctggcttagcatcttctgctgctggttttgcttgcttagtttttgctcttgccaagttgatgaatgtaaatgaagatccaagccaactttctgctatagcaaggcaaggttcaggaa

SEQ ID NO: 141286 - DNA, 215 bp, Arabidopsis thaliana
cagattttcaagatttacttgaagaagatcaaacttgatcatgagccatcatattactctcaaaggcttgctgctctcactcccgggtttgcaggagctgacattgcgaatgtctgtaacgaagcagctcttattgctgctagacacgaaggagcaacggttactatggcacactttgaatctgcgattgatcgtgttattggtggtcttgagaa

SEQ ID NO: 141287 - DNA, 223 bp, Arabidopsis thaliana
attttagttttatattaccaaaagaaaaaaaccttatcccttctctctctctttcttctttcctctattgtctgccatggcgatttctactattctctgagtctgtgatcttaaagatttgatgagacagaaacccagaaactgaaaaacaaaaacccaactcgtgatatttcgttccgaccaaatctgtctgatttgtgatctgaacaaagtacggtaatgg

SEQ ID NO: 141288 - DNA, 204 bp, Arabidopsis thaliana
acggacgcgtggggtgatcttagaagaggtgttgagattgtaattgctacacctggtcgtttgattgatatgttggaatgtcaacacactaatttgaagagagtgacttaccttgtactggatgaggctgacagaatgttagacatgggatttgaaccccaaattagaaagattgtatctcagatccgacctgatagacaaaca

SEQ ID NO: 141289 - DNA, 206 bp, Arabidopsis thaliana
cggacgcgtgggcggaacaatcgcaccaatcgccataggtttcatcgttggagctaacatcctcgccggtggagctttcagcggagcttccatgaacccagccgttgctttcggaccagccgtcgtaagctggacgtggaccaaccactgggtttactgggctggtcctcttattggtggtggactcgccggaattatctacgact

SEQ ID NO: 141290 - DNA, 220 bp, Arabidopsis thaliana
gttgaagaagaaagagataagctttcacatcaatttttgaaggcgcgaaatggggaatacttcatcgatgctgactcagtacgacatcgaagaagttcagagtcattgtcatgatctatttgagcagcaggagattttatctctgtatcaacggttttgccagttagatcgaaacgcaaaaggatttatatctgctgatgagtttctctctgtgcctgag

SEQ ID NO: 141291 - DNA, 216 bp, Arabidopsis thaliana
caaaaagtgagtatctctctctgctctcatgtcgattctggtttatgtagcaaaatcagtagattgggacccatgacatgattgtcttgccaacagttgggatgaatgggttagtgcggatagattgttgaaacataccgaggagaatcttgtcaaacagaaagctctagacaaaaagcaaggagttgaaaaaggtaccaagtctggccgttccgc

SEQ ID NO: 141292 - DNA, 217 bp, Arabidopsis thaliana
cccacgcgtccgaaaaaattatattcaagagaaaaaggaaaaaatgaatttcatctccgatcaggtaaagaaactctcaagctcaacaccagaggagccagaccacaacaagccagtcgaaggaaccgaaacagctacaagaccagctaccaacgccgagctcatggcaagtgccaaggttgtagctgaagctgctcaagccgcagctcgtaacgaa

SEQ ID NO: 141293 - DNA, 220 bp, Arabidopsis thaliana
ggtctctctgcagcacccatggggtctcctcttccatagctctcacttatggctttcgccatagaagaagatccaccttccgtattttcgccacctctgacggattagaacccaaggacgacccgccggaatctcctctcccttcctcatcctctgctctcggtaaagacttgaaaaaggttgttaacaagactgctgcaacctttgcccctagagcttc

SEQ ID NO: 141294 - DNA, 219 bp, Arabidopsis thaliana
ctctgcagcttctcctcttctcagaaattagggttccgtctcaaattacgagcagatctcgtactctctgatgtctgaagatccggagtaccgttgcttcattggtgggcttgcttggacaacgtctgatcgtggtctcagagatgcctttgagaagtatggtcacctcgttgaggccaaggtggttcttgacaagttttctggtcgctcccgtggttt

SEQ ID NO: 141295 - DNA, 216 bp, Arabidopsis thaliana
ctgtaatcccttagatcttcttttcaaatttcaatggcgtccggtgatgttgagtatcggtgcttcgttggaggtctagcatgggccactgatgacagagctcttgagactgccttcgctcaatacggcgacgttattgattccaaggtctgttacacgccgagatcggactccgagtgatatcgatgatctcatcctcgacggatctgttccgat

SEQ ID NO: 141296 - DNA, 214 bp, Arabidopsis thaliana
tttgaaatttacctaaatctctccgtaatcatcgatcaaaacgatgctcgagtgtcaatcaatgatggagaaattatcaccgttcgtagacgtcgcctctctggaaatcgagtctctgcgaagaatcaaacgcccgaaacgcttctctgaagaagaatcagaagaaaccgagaatacgacgaattcatcaaacgcggtattcggattccctaac

SEQ ID NO: 141297 - DNA, 203 bp, Arabidopsis thaliana
gaaacgtggagtgtattcctccaaataagttaaagtttgacttccttggtaaagactctattcagtatgtaaacacagttgaggttgagcctctggtgtataaggcaattgggcagttccaagcaggaaaatcgaaaaccgatgatctctttgatgagctagatacttcaaaactcaatactcatcttaaggagcttatggct

SEQ ID NO: 141298 - DNA, 202 bp, Arabidopsis thaliana
gttttgtggatcttgctggttctgagagagttaaaaagtcgggctcagctggttgtcaactcaaagaagctcaaagtatcaacaaatcactttctgcattaggtgatgttattggtgctttatcttctggcaaccagcatattccttataggaatcacaagctaacgatgttgatgagcgattcattgggcggcaatgccaa

SEQ ID NO: 141299 - DNA, 223 bp, Arabidopsis thaliana
agcggacgcgtgggcaaacaaacaatgggagacgaagcaaagatcttcactctttcagaagtttcagagcataatcaagctcatgactgttggattgtcatcaatggaaaggtgtacaatgtgaccaagtttcttgaagaccatccaggtggggacgatgttctcttgtcttcaacaggtaaggatgcaacggatgattttgaggacgtgggtcacagcgaga

SEQ ID NO: 141300 - DNA, 217 bp, Arabidopsis thaliana
caacagcaacatcaaactctaataaacccaagttggtgtatactataatggtgatggctggtgcttcttctttggatgagatcagacaggctcagagagctgatggacctgcaggcatcttggctattggcactgctaaccctgagaaccatgtgcttcaggcggagtatcctgactactacttccgcatcaccaacagtgaacacatgaccgacct

SEQ ID NO: 141301 - DNA, 214 bp, Arabidopsis thaliana
aaaaatggctatctcaaagcttattcctactcttgtgctctttgttttgttctcttttgatgttagtgttgctcatccaggtctaggatttggatggggaagtaatagtcccattggaggatctttttactcaaatctttacccacaattttaccagttctcttgtccacaagctgatgagattgttatgacggtgctcgaaaaagccatagct

SEQ ID NO: 141302 - DNA, 203 bp, Arabidopsis thaliana
gcttacacaccagctggtgatcctattccaaccaacaagaggcacaacgctgctaagatcttcagccaccccgacgttgccaaggaggagccttggtatgggattgagcaagaatacactttgatgcaaaaggatgtgaactggccaattggttggcctgttggtggctaccctggccctcagggaccttactactgtggtgt

SEQ ID NO: 141303 - DNA, 219 bp, Arabidopsis thaliana
cttcattttggcaaaatgggtttcgggtgtaagcattacaagaggagatgccaaatcagagctccatgttgcaacgaagtcttcgattgtcgccattgtcacaacgagagcactagcacattgcgcaatatctacgaccgtcacgatcttgttcgtcaagacgttaaacaagtgatttgttctgtttgcgatacagagcagccggcagctcaagtttgt

SEQ ID NO: 141304 - DNA, 219 bp, Arabidopsis thaliana
gttgatattcgcaagcttatgtcaacaacgttcctcgttgcgatttgtcaagctgtggatttgagacatttggaggagaatttgagacagactgtgaagaacactgtctctcaagtggcgaacaaagttcttactactggaatcaatggtgagcttcatccttctcgcttctgcgaaaaggatttactcaaagttgtagaccgtgaacaagtctacaca

SEQ ID NO: 141305 - DNA, 218 bp, Arabidopsis thaliana
ctccttattaagaaagaccaacacagacacggaagaagtagcttggttcttctctttgtgaaggtgaatgcgggagatggggactggagattctgcttcgagactgattctctggttctgcttagggtttttgattctaggtgttggatttgtgcaatgtggagttacttatgaccggaaagcacttctcattaatggacagagacgaatcctcttca

SEQ ID NO: 141306 - DNA, 215 bp, Arabidopsis thaliana
aagatttttaactttaaacgagagtttcgtttatttactcaaaaatttacttctgaaatctctatttgaatttcggggaaaaaaatcctaagtaagggaatgcagagagatggtcggagtatcgccggtgaagactaagctgtgtgatcggtttaaccgatccgtcggcggcaggaattgccaccggaaacacgtcgaggacgggtgatccagtt

SEQ ID NO: 141307 - DNA, 202 bp, Arabidopsis thaliana
ggagttttctactggatcgctcagcttctcggctccaccgccgcttgtttcctccttaaatacgtcaccggtggattggcggttccaacccacagcgttgcggctggactaggatcgatagaaggagtagtgatggagatcatcatcaccttcgctttggtctacactgtctacgccaccgccgctgatcccaagaagggtt

SEQ ID NO: 141308 - DNA, 200 bp, Arabidopsis thaliana
cccacgcgtccgctgtgtttgaagatgcaactcctgtgatgttaagagactttttctgggatgatgagtttagaccaacttgggatacaatgctttctaattccactactgttgaagagtgtcccagtactggaaccatgattgttagatggatacgcaagttcccgttcttctgcagtgatagagagtatgtaatcggt

SEQ ID NO: 141309 - DNA, 223 bp, Arabidopsis thaliana
aacttcgtgatctctcaaattctctcccttttaaagtcctaaatcaaaaccctaaacccataaatccaatccctccattcgaattcttcattctctctctctctctctctcacaattactgatcggttctgaaatttgtagctatgcaggcaacggctttatcatctgggttcaatcctctaacgaaacgtaaagatcacagatttcccaggtcatgctctca

SEQ ID NO: 141310 - DNA, 222 bp, Arabidopsis thaliana
gaaaatgggtttcaagaggtacgttgagatcgggagagtagcacttgtgaactacggagaagatcatggaaagctcgtcgttatcgtcgacgttgttgaccagaacagagctttggtggatgcccctgatatggagaggatccagatgaacttcaagaggttgtctcttaccgatattgtcattgacatcaaccgtgtgccaaagaagaaggctttgatcga

SEQ ID NO: 141311 - DNA, 215 bp, Arabidopsis thaliana
ctcactcaatcggtgactcgctatagtctgtgaagaaaggccaatttcgccataaagttcacacctttgatctcctttgtttctgggtttctcctaaatcatccaaattggtatcgaatttgcccttctccgattcaatttcttcacgatctcaaaacccagaagaaagaatcatgctttcgttatcatgctcttcttcttcttcttcgttgctt

SEQ ID NO: 141312 - DNA, 217 bp, Arabidopsis thaliana
aacacatcgaaccatggagaaatcaacaagaaccctattcataaccatcgtgataacctccatgttgctagggtttggaaactctgatcttgctcaggacagagaggagtgtacgaaccagctcatagaactatccacgtgtattccgtacgttggaggagacgccaaggctccaacaaaagattgttgttcagggtttggccaagttataagaaag

SEQ ID NO: 141313 - DNA, 217 bp, Arabidopsis thaliana
cggacgcgtgggttactgggttctttcagatatataaatggatcaaatcgttaacgtggatgagtttcaagagctggccaaacaggccctccctaagatgtactatgatttctacaatggaggagcagaggatcaacacactctcaatgaaaatgtccaagctttccgtagaatcatgtttaggcctagggttcttgttgatgtgagcaacatagat

SEQ ID NO: 141314 - DNA, 202 bp, Arabidopsis thaliana
cggagagtgagagaagagagaaacatttcgagacaaatggccgccgccgctgctcgtcctctcgtcaccatccaaaccttggatggtgacatgtccaccgatcaatcctccaccgtcgtacttcccgacgtcatgacggcgccagttcgaccagacatcgttaacttcgttcacgcccaaatctccaacaacagccgtcagc

SEQ ID NO: 141315 - DNA, 223 bp, Arabidopsis thaliana
agcccacgcgtccggcgacacgattacagatttctcaccttcacccagatttcggtggaagcttccagaacgcgaacccctctcgcgatccaggttgctatcgaacacgtgggacgccccagtactgaagaacacaaagcctaacaatgagtgtagttggttttgattttggaaacgagaattgccttgttgctgttgcaaggcaaagaggtatcgacgtcgt

SEQ ID NO: 141316 - DNA, 224 bp, Arabidopsis thaliana
aggctcgagactgtagagtgaagtttgatttatttagagagataagttaaaaaaaaaatggtcggtatggatttgttcaaatgtgtaatgatgataatggtgttggttgtctcttgtggtgaagctgtttctggagctaagttcgatgagctttatcggtcaagctgggctatggatcattgtgtcaacgaaggcgaagtcacaaaactcaagcttgacaatta

SEQ ID NO: 141317 - DNA, 216 bp, Arabidopsis thaliana
gttgggaaaggcctgaagatatggacactctccgtactgtttacaaaatcgatagagctcatcctggttctgacgtcgctggtgaaaccgcagccgctttagccgccgcttcaatcgtttttagaaaacgcgatcctgcttattccagacttctacttgaccgtgccactagggtattcgcgtttgctaacagatatcgcggcgcgtatagtaaca

SEQ ID NO: 141318 - DNA, 215 bp, Arabidopsis thaliana
aatatggtgggagcgactgtagttagtaactggactcccctaagtgtggcttcgccgccggacataaactcggcaagtctcaatccacactgttctccagccagggttaattttacaacagcgttggccgcatttcggcctcagttccgtcttttctctcgcaattccgcgtcgcgccgccgtcttcgcgcttccagctccgccgaatcgggaat

SEQ ID NO: 141319 - DNA, 200 bp, Arabidopsis thaliana
aagaaaaccagagatggcgatgacgacagcatctacggtatttgttctaccggccaatgtcacctcggtcgccggcgcttcgtcgtccaggagctccgtgtctttcttgccgatgagaaacgccggttctaggctcgtagtcagggcagccgaagatcctgctccggcttcctcttcttcaaaagattctccggcagctg

SEQ ID NO: 141320 - DNA, 197 bp, Arabidopsis thaliana
accaatttgtgctcgaacagcatgggcctatgggaaggctggtggccgaatctcccatgctttatcggtttatagttgtcagattcgccaaccaaatctggttaagataatctttgacttcttgaaaaatggattccaagaaatcagtaattcactggatttatcttttgaagatgaaactgttgctgatgagaaga

SEQ ID NO: 141321 - DNA, 182 bp, Arabidopsis thaliana
ctctggccaaggattgctagtgctgctaacgccattgtctgaagatcatttatcacttttgctggttatgtatctgtcttcaacgaaacgcgaaatagttggtgttttgagtgttttaagtagagacgacaatcttttgtgagcttcagacatatttccagtttctaagagattttgcttag

SEQ ID NO: 141322 - DNA, 216 bp, Arabidopsis thaliana
aaccagagtaaagcttgaaactttggactaaaagaatggcgtctttgggtgtgtcggaaatgcttggtactccccttaacttcagggcagtttcaagatcgtctgctccgttggcatcaagcccatccacgttcaagactgttgctctcttctctaagaaaaagccagctcctgctaagtccaaggctgtctctgagactagcgatgagctcgcca

SEQ ID NO: 141323 - DNA, 219 bp, Arabidopsis thaliana
cccacgcgtccgtccctctctacttccttcaacagaaatggaaacgttcctatttacctctgaatccgtcaatgaaggacacccagacaagctttgtgaccagatttctgatgcgatccttgatgcttgcttagagcaagatcctgaaagcaaagtggcgtgtgagacatgcaccaagaccaacatggtgatggtgtttggtgagatcactaccgctgc

SEQ ID NO: 141324 - DNA, 216 bp, Arabidopsis thaliana
cggacgcgtgggagttaagtgaggaagagaaaaaaagacagagaacaaagctctgtttctgagacacaagaagacagtgaattctaaaaatgtttcaagaatttggaattaagttggtgggtacacttgttttctattttgttgttactactacgtatatttttttctgataaagaacataatttttcttggattttattaaataatagattcgaa

SEQ ID NO: 141325 - DNA, 203 bp, Arabidopsis thaliana
cccacgcgtccggcttagaagccgtcggcacaagaagaagaagaagaagaatgtctcacaggaagtttgagcacccaagacatggttctcttggtttccttccaaggaagagagctaaccgtcacagaggaaaggtgaaggcgttccctaaggatgaccaaaccaagccttgcaagttcacagctttcatgggttacaaagct

SEQ ID NO: 141326 - DNA, 222 bp, Arabidopsis thaliana
cacaaaccatggcttcttcttcttcttcttctttattatttcctttctttcttattcttttttcatgtttaatctcggtttcatcgtcaagaagatcattaatcgaccgtactcttccgaaaaaccttccgagatccggttttcgattgagtcttcgacatgtggattccggtaaaaacctcaccaagatccaaaagattcagagagggattaaccgtggat

SEQ ID NO: 141327 - DNA, 219 bp, Arabidopsis thaliana
cccacgcgtccgggaatttgcagaatcggaggacgtgaaaatttctttcactgttacaagtgtggctgttgttattcaatcctcctcaagaacggtcacccttgtgtcgaaggagcaatgcatcacgactgccccatttgctttgagtttctgtttgaatcacggaacgatgtgacggttttaccatgtggacacacaattcatcagaagtgcttggag

SEQ ID NO: 141328 - DNA, 216 bp, Arabidopsis thaliana
ctctaaatgatcttgcagagatggcatgtatgaagaaggcactaccattcattttaatggtattgttgcaaatagggtatgcaggaatggatattcttacaaaggatgtcctaaacaaaggcatgagcatttacgttctttccgtctaccgtcacggagttgccaccgttgttatggctccgttcgccttctacttcgacaatccagtgattgctc

SEQ ID NO: 141329 - DNA, 220 bp, Arabidopsis thaliana
cggacgcgtgggcggacgcgtgggcggacgcgtgggaacgactcgaacaacaacaacaacagcaacaatagcaacaacaacaacacaaacacaaacacaaacaacaacaacagtagtttcgttttcctcgattcccacgcgccgcagccaaacgcgagccagcagttcgtcggaataccactctcaggtcacgaagctgcttccattacagccgccgaca

SEQ ID NO: 141330 - DNA, 202 bp, Arabidopsis thaliana
aaaacccaaatcttatcactactctaaaagaatcttcatcatggcctcagtaacctcagccaccgttgcaatcccatctttcaccggccttaaagcctcaaccatcaaatcatccgccaccgtcagaatccaaactgctgctgttgcatcaccgaagcttacagtgaagtcatctctaaagaacttcggagtcgcggccgta

SEQ ID NO: 141331 - DNA, 201 bp, Arabidopsis thaliana
ttctgctgttataacacatggatttgtattggatgagaagggtatgaaaatgagcaagtctctaggtaacgtagtggacccacgtttggtcattgaaggagggaaaaattcaaaggacgcacctgcttacggagctgatgttatgcgtctttgggtttctagtgtagattacacaggggatgtactaataggtccccagat

SEQ ID NO: 141332 - DNA, 225 bp, Arabidopsis thaliana
agcaccttcaagcactcaagttcgtgcaacaagctgtggggctcagaggatatgcgcaacgcgatccactcatcgagtataagctcgaaggatacaatctatttctggaaatgatggctcaaatacgaagaaatgtgatatactccatatatcagtttcaaccagtgcgggtaaagaaggacgaagagaagaagtctcagaacgggaaaccgagcaaacaagtag

SEQ ID NO: 141333 - DNA, 213 bp, Arabidopsis thaliana
caaaaaacaaaaacagagccaggaataatgtcagtcttcctctgtttcctctgcctcttaccccttatcttaatcttcttgaaaaatctcaaaccatcgaaatggaagcttcctccaggcccaaagaagcttccgatcatcgggaacttacaccaacgccgggaattacatcccaggaacagtcggaatctttccgaaaagtacggaccaatc

SEQ ID NO: 141334 - DNA, 217 bp, Arabidopsis thaliana
cccacgcgtccgcccacgcgtccgatcagttggagtcgaagcacagcttactcatttggcttcaatcactcagattattgaccccaaacttcaccatcacttagagaaattgggtggtggtgactatctctttgctattcgaatgataatggttcagttccgaagagaattctccttttgtgactccttgtacctttgggagatgatgtgggcatta

SEQ ID NO: 141335 - DNA, 201 bp, Arabidopsis thaliana
cgaaacagtgagagagacagagagaagatatagagatgggtgtggagaagcaagtcatcagacccggcaacggtcccaaacccgctccgggccaaaccgtcaccgtccattgcaccggattcgggaaagatggtgatctatcccagaagttctggagtacaaaggacgagggacaaaaacctttctcgttccaaatcggta

SEQ ID NO: 141336 - DNA, 161 bp, Arabidopsis thaliana
aaatccattcttcgtcaagtgacgggttctcgggtcggatcttcgaagtctagctaaggatagcggctactgtcaatactcatgcctcggtctcgattttccgatcttgtacttcaaaaccaagattcctcaccggttcttccggtaggtttaaccgcgac

SEQ ID NO: 141337 - DNA, 215 bp, Arabidopsis thaliana
ctcggttcgcaaaagtctatttaatttcatagcaatctcacttttctcttcccccaccctcaaagatctctcaaagaatggcttccgcggctgttgcatcgatggttcttgaccctaaagcatcaccggccttgatggatctatccaccgcagacgaagaagatctctatggccgcctcaaatcgcttgaacgacaactagagttcaccgatatc

SEQ ID NO: 141338 - DNA, 205 bp, Arabidopsis thaliana
cccacgcgtccgtcaatgaaaacctaaagcattgcttttgccttcatggtatcagagctcatggaacatagatccatggaactctactctgttccttctctcaatatttcaaattgtgtcaccgtcactcttactgccaagaactatattctctggaaatctcagttcgaatcttttcttgatggtcaagggcttctgggttttg

SEQ ID NO: 141339 - DNA, 241 bp, Arabidopsis thaliana
ccaaaacccaaaccatttttgtttcgcaaaatcattctaccatggctacctcatcctcggtggtcagcagtgtacctcagcagcaccaagtgttcctcaatttccgtggggacgaacttcgtaataatttcgtcagccatctggataaggccttaagagggaaacagatcaatgtcttcatagatgaggctgtggaaaaaggtgaaaatctagataaccttttcaaggagatcgaaaaatc

SEQ ID NO: 141340 - DNA, 288 bp, Arabidopsis thaliana
agcggaagcgtgggcggacgcgtgggcggacgcgtgggcgcgagcggccgcccttttttttttcttttttttttttagtccaaaaatgtaaacataaaactgtccataaaacaaaggattaattttacatttgaatcccaaagatgagttataataatattagatatatataagattttaatccccagacctcagcttgttgatttggttcaaagctggctgcaagatattgtacagaacccaaagtagtgccggtgtcacaacaatcaacaacaactgtcctctgct

SEQ ID NO: 141341 - DNA, 205 bp, Arabidopsis thaliana
atttctgtgtctgcttttgattcacagagaaggagcaggaaagatgttggatatcaatctatttcgtgaagagaaaggtaacaatccggagattatccgagaatcgcaacgccggagatttgccagcgttgaaatcgtcgatgagatcattaagctggacaaggaatggcgtcagcgtcaatttgaagttgatagcttcagaaag

SEQ ID NO: 141342 - DNA, 202 bp, Arabidopsis thaliana
caatgacactgttcttgctcttgtccactctcctcctcacgacttctttagctaaagatctctgtcataaagatgacaaaactaccctcctcaagatcaagaaatccctaaacaacccttaccacctcgcctcatgggatcccaaaaccgactgttgctcttggtactgcctcgagtgcggcgacgctactgtcaaccaccg

SEQ ID NO: 141343 - DNA, 204 bp, Arabidopsis thaliana
cccacgcgtccgcggacgcgtgggcggacgcgtgggctttcttctctcactctccggcgactgttacgagtttttaacacttccgtcgtcttctcagttgttgttgttgtttatgacaagatcttgttctatccattaaaaccaaagaaatggaggaaggtcataaagaaccattggtgctaagagttgaaggatcacattgtt

SEQ ID NO: 141344 - DNA, 204 bp, Arabidopsis thaliana
gatctctccagtccctttcgcaaaccctagcagtcgaaagatcgaaatcgaaaacccctaaaacgatgaaggtgattgctgcatttctcctcgcgaaactcggtggaaacgagaatccaacctcaaatgatctgaagaagatcttggaatctgttggtgctgaaatcgatgaaacgaagatagatctgttgttttctctcatca

SEQ ID NO: 141345 - DNA, 160 bp, Arabidopsis thaliana
acgcccacgcgtccgtgaacactagaatgttgttatattatgcttgtgacatagcgtgtgtaagagtgtagcctaagagatatagtactcattgcatgatcttttgctatatgttcatgtaatcttttgttgcataaataatgaaaagttacattttttt

SEQ ID NO: 141346 - DNA, 205 bp, Arabidopsis thaliana
aaaaaaacctaacaacctctcttctctcttcctcgttcaacaacaatggagttctggggagttgcggtgacaccaaaaaacgctactaaggtgactcctgaagaagacagccttgtccacatttctcaggcttcacttgactgcacagtgaaatctggagaatctgtggttttgagtgtgactgttggtggggctaaacttgtta

SEQ ID NO: 141347 - DNA, 204 bp, Arabidopsis thaliana
cgcattgtctctctccagacgaaaaatgggtgctttcaggtttcaccagtaccaggttgtgggaagagctctcccgacagagaaggatgtgcagcctaagatttacaggatgaagctctgggctacgaacgaggttcgtgccaagtccaagttctggtatttcttgaggaagctcaagaaggtgaagaagagtaatggacagat

SEQ ID NO: 141348 - DNA, 202 bp, Arabidopsis thaliana
cccacgcgtccgatggataccgagtttctccgaaccctagatcgtcagattcttttgggtgtcttcgttgctttcgtcgccgttggtgctggtgctgcttattttcttacatcctccaagaaacgcagagtgtgtttggatccagagaatttcaaggagttcaagcttgttaagagacatcagcttagtcacaatgtggcca

SEQ ID NO: 141349 - DNA, 202 bp, Arabidopsis thaliana
ggtttatctgggaagaactcaaacgaggcaatgtttgtgatcgaagcttatcgaacacttcgtgatcgtggtccttacccagcagatcaagttcttagaggtcttgagggaagcttcgctttcgttgtctacgatactcaaacttcctctgttttctcagctctgagttctgatggaggagagagtctttactggggaattt

SEQ ID NO: 141350 - DNA, 292 bp, Arabidopsis thaliana
acgcccacgcgtccgaaaaacctatctctctctctctctctcgccgccttcctctcaccctcttcgcatagcttcactttcgccgatggctctacctaaccagcaaaccgtggattaccctagcttcaagctcgttatcgttggcgatggaggcacagggaagaccacatttgtaaagagacatcttactggagagtttgagaagaagtatgaacccactattggtgttgaggttcatcctcttgatttcttcactaactgtggcaagatccgtttctactgttgggatact

SEQ ID NO: 141351 - DNA, 206 bp, Arabidopsis thaliana
cccacgcgtccgagttagtcaccaaaaaaaaaaaaaaaaaacacaaaaagtttcaatggccgcctccacaatggctctctcctcccctgccttcgccggaaaggctgtgaacctttcccccgcggcatctgaagtcctcggaagcggccgtgtgacaatgaggaagactgttgccaagccaaagggtccatcaggcagcccatggc

SEQ ID NO: 141352 - DNA, 205 bp, Arabidopsis thaliana
attctcttcatagatgaagtgcatacacttattgggtctggcacagttggaagagggaacaaagggtctgggcttgacattgctaacctcttgaaaccatcacttggaaggggtgaacttcagtgcattgcatccacaacccttgacgaatttaggagtcagtttgagaaggacaaagcccttgcaaggagatttcagccagtgt

SEQ ID NO: 141353 - DNA, 204 bp, Arabidopsis thaliana
cccacgcgtccggctgctcagaaaaacattatcatagaattacaagatgtgttccagagattcatgtttgatacttcttcaattttgatgactggttacgatccaatgtcactatccatcgaaatgctggaagttgagttcggtgaagctgcggatattggcgaagaagcaatctattatagacatttcaaaccggtgatcttg

SEQ ID NO: 141354 - DNA, 202 bp, Arabidopsis thaliana
aacgtttacacgctttgattgaaggaacacacgaaggttggacctacgctatattctggcaaccgtcgtatgatttctccggcgcctccgtgctcggatggggagatggttattacaaaggtgaagaagataaagcaaacccgagacggagatcgagttcgccgccgttttctactccggcggatcaggagtacaggaaaaa

SEQ ID NO: 141355 - DNA, 133 bp, Arabidopsis thaliana
acccaagcgtccggtatccctgtgttttagcttgttcttatatatttctgggaaaaatggaaataaattcgttttatgtgtttatgtatttgcaaaataatggagaaaatggaagaaaatgtagtagaacttc

SEQ ID NO: 141356 - DNA, 343 bp, Arabidopsis thaliana
acggacgcgtgggtgtttctgtacgtctctctgggtaagaaagaaaaagtgaaggacgaaacgggaaaccctctgcatatcaagtctttgaatcacatctctcttcactgtcgatccgtcgaggaatccattagcttttaccaaaacgttttagggttcctccctattcgcagacctgactcttttgatttcgatggcgcgtggttgtttggacatggaattgggattcatcttcttcaatctcctgaacctgagaaattactcaagaaaacagagattaatcccaaggataatcacatttctttccagtgcgatagcatggaagcagtggataagaagctca

SEQ ID NO: 141357 - DNA, 146 bp, Arabidopsis thaliana
agtcatgaccagcctcaagttccactgaggtgatcatcatctcatgtgtttttatgtctcttgtatcgtacaatatttccatctttcgctaccattggcttcttcgtattgtaacaccctgtgtaaacatattcgtgttttgtaag

SEQ ID NO: 141358 - DNA, 332 bp, Arabidopsis thaliana
acccacgcgtccggccacatcaaccaacccaaacatcgaaagagagacacttttctctctctctttctctatctccttccaatctctctagggttttcgttacaacggcgaaaagatgttcggtagaggaccctcgaagaagagcgacaacactaagttctacgagatcttaggtgttcctaagagcgcttcaccagaagatctcaagaaagcttacaaaaaagccgctatcaagaatcatcctgataagggtggagatcccgagaaggtgaataatttcttagatccgcttagattctctcgaattcgattgtttgattgtgttttttttt

SEQ ID NO: 141359 - DNA, 375 bp, Arabidopsis thaliana
agagactctatatgtttggaagggaaagcaggatcagtatctgagatatcacgattaactggaacaagcgtacaaattctagctagggaagaaattccccgatgtgcttctatcaatgatgttgttatacagattactggcgagatcagagctgctcgggaagcacttgttgaattaacattactattgaggagtcatatgttcaaggagctctctcaaaaggagacaccaccagcttccacatccacaactggccctctcgaaggtgttgcaggagtaatggaggtagcttcatcaaataacacaattcaatctcgtgaaggtcctactagttcgaatctgaacttgcagcaagttagcacaatcttgccacag

SEQ ID NO: 141360 - DNA, 377 bp, Arabidopsis thaliana
agacgaagacggcgatgaattcgttaaccgttgaacaagtattgaaagagaagaagaccaatgacccagattccgtcaaggaacttaatctcggccataaagctctcaccgacgtgtcttgtttgagcaagttcaaaaacttggaaaagcttgatcttcgtttcaacaatctaacagatcttcagggactcaagtcttgtgtgaacttgaaatggctttcagttgtggaaaacaaattgcaaagcttaaatggaattgaagcactcactaagcttacggtgcttaatgctggaaagaataagctcaaatccatgaatgagatctcttctcttgtcaatttacgggccttgatcttgaatgacaatgaaatctcctcc

SEQ ID NO: 141361 - DNA, 380 bp, Arabidopsis thaliana
accactctttgcaaatccttgaagaaatccaaaatccatagcaatggcgacttcgatagctcgattgtctcggagaggagtcacttctaacctgatccgtcgttgcttcgctgcggaagcggcgttggcgaggaagacagagttacctaaaccgcaattcacggtgtcgccgtcgacggatcgtgtgaaatgggactacagaggccaacgacagatcattcctttgggacagtggcttccgaaggtagccgttgatgcttacgtggcacccaacgttgtgctggctggtcaggtcacagtctgggacggctcgtctgtttggaacggtgccgttttgcgcggcgatctcaacaaaatcactgttggattctgctcgaatg

SEQ ID NO: 141362 - DNA, 344 bp, Arabidopsis thaliana
agaaagataataccaatcctgttcattcaattccgtgagcttcgaatcaacaggattggtattatctttcttagtagcagtaggagaagatacggagagaggagccacgggagatgttgattcgaagctcacggaattgaatgaatcaagggctgagttactaaacaggatccagaatctgaaacaggacttgcaaagttggagaggtaaattggacactcaagttaaagtctaccgtgaggagctctctgggctaaagaagactctgaatcttgaagttgagcagcttcgtgaggaattcaaagatctgaaaactaccttgaatcaacagcaagatgatgttt

SEQ ID NO: 141363 - DNA, 378 bp, Arabidopsis thaliana
acccacgcgtccggttttcttcgattaagttttgagctagattctctagatctgtttcaccgatttggttgatttctccgtcaatctgaactcgcggtgtgcatcttgttgtttgcagtgtttttagtttgttttacgaagaatcaactatggcgacgaagagaagcgttggaactttgaaggaagcggatctgaagggaaagagtgtgttcgtgagggttgatctcaacgttcctttggatgataactctaacatcaccgatgacaccaggattcgtgccgctgttcccaccatcaagtacttgatgggtaatggatctagggttgttctctgcagtcacttgggccgcccaaaaggtgttactcctaagtacagct

SEQ ID NO: 141364 - DNA, 324 bp, Arabidopsis thaliana
acaatcgctaagattaggaaacgtgaaacatttgatcctctgtgtatgattttgtaaacttgccttgatgggaagctcagaaattgcttcagagctttgtacctgtcaagggctcaccatcatcgctgaaactctacggacttcctcttccgttgggtctgtggaggattattggctcaagttactggtttcgagaatctgtgttgaagatggttacttcctcaagctcttctctaaattatacgaagatgctgaaaatgagatattttcatcagagcaagcctttcttgtgaggatggtgtctgatattgctaatgagcggat

SEQ ID NO: 141365 - DNA, 386 bp, Arabidopsis thaliana
  unsure (1)..(386): unsure at all n locations
acggacgcgtgggcggacgcgtgggcaaataccanaaacaagtcataagaatcaaatggagttctctatcaatccttcaactctaaagatgattcggacaagtttttgtagattagtagttttggcaattagtagtttttcgatgatggaagctcgggatctagctagcaaaggaaagacaaatattgaatatatggcgttgaattgtcgaaaacataccgcagttttgacagaatttggagcagttggtgatggaaagacctcgaacacaaaagcgttcaaagaagccataaccaagcttgctccaaaggcagccgacggtggagtgcaactcattgttccaccaagaaaatggctaaccggaagtttcaacctcaccagccatt

SEQ ID NO: 141366 - DNA, 357 bp, Arabidopsis thaliana
atcagcggacgcgtgggcggacgcgtgggtggtggttcaagttcagacatggacattgcttctgattcagatgaagagatattcgagaggcaacactctcctcaagattatagaattcatcttggtttgcctcacgtcgcagctcaaaatggacttggacgtaatggtgctaaggtctttggtgctgctgatgatttatctgactcagctactagcactgaagtttcatacgaagcagaagcttgtggtgtgcggaacaatatatcttcacatactgaatttgatagacgaaatgttgaggctggaacttcatgaaggactctgaacgggacaagcacttcaacaagttcattgcct

SEQ ID NO: 141367 - DNA, 411 bp, Arabidopsis thaliana
cggacgcgtgggggaacatgaacatgtattagagagagacgtacaacagtgtgagaccatagaatctgaggctgttgagacaaaagaagacacacaaccaagtctggacctgaaagaggataaagaaacagaggaagcagagacattcaagaccgtcttttcgtctgatgaggtaagatcttctgctgttcaagaagaacaatttggtgaacatacggaaccttgtagctcggagattaaagatgagagccatggaaaagaagaatctgttgaggtcaaatctcaggagactgttcaagacgaaaacactgaggacaagcatgatgtacttaaagttccatctacagaatcagagaagtatcaaagcaactgaaccgagacagttctagtctccaatacaggaagctatga

SEQ ID NO: 141368 - DNA, 417 bp, Arabidopsis thaliana
acgcatcgaaactccgtagcccccaaatcgttctctctcaaatcgcaaaattagggttagggttttcaattccccaaccttgcgaatttctcatttctcgtagccgccgcagcaatcaacgatgacaggcaaagcaaagccaaagaagcacacagcgaaggagctccaagctaaagccgatgcagcgttgaccaatcgcggtggaggaaaggcagggctcgccgatagaaccggtaaggagaaaggtggtcacgcaaagtacgagtgtcctcactgcaagatcactgtaccggatctaaagacgatgcagatccatcatgaatcgaagcatccaaagctgacttatgaagagccgaggaatcttcatgaggctttagctgctcctgctgaatcatctaagcctaagcctggaatcag

SEQ ID NO: 141369 - DNA, 372 bp, Arabidopsis thaliana
acccacgcgtccgggacgattttctgagtcattacaactatacaagaaggccttgcaagtatttcccggttgtcctgcagctgtgagactgggaattggtctttgtcgttataagttggggcaactagataaagcacggcaagcgtttgatcgcgttttgcagctagatcctgataatgttgaggctcttgtggcacttgggattatggatttgcaagcaaatgattctataggaatgaggaaaggaatggacagaatgcagcaggcattcgagatttatccctattgcgcatcagccttaaattatttggccaatcacttttttttcaccggccagcactttcttgttgagcagctgactgaaacagcatt

SEQ ID NO: 141370 - DNA, 376 bp, Arabidopsis thaliana
atcacggacgcgtgggcggacgcgtgggcggacgcgtgggtgacgcaggtgaagaatctacagaagataaacgctagggaatcagatttaggaatatctgatgaagcttcatggcacgctaagtacaaaaactctgcatatgtctacgtcggaggcataccgttcgatctcaccgaaggtgatcttctcgccgtcttctctcaatatggtgaaattgttgatgtcaatcttattcgagacaagggaacgggtaaatctaaaggttttgcttttcttgcttatgaagatcagagaagtaccattcttgctgttgataatctgaatggagctcttgtgttgggacggaccattaaggtggaccattgtggggcataca

SEQ ID NO: 141371 - DNA, 357 bp, Arabidopsis thaliana
acccacgcgatccacccacgcgtccgcggacgcgtgggcggacgcgtgggcggacgcgtggggatagtataagcttctttggggttctcagaacagcggtatcagaatcgcatataggagtaatgggaggtaccggaaagtatgtgaatgcgaggggattcgcgattctgaagacgtttacaggatctagcgggacgcagcagaatcagccgcatcagttcactgatgggcttgagactgttgttgagtgtaccgtttatctttcttactagttttagttttcttcttttgttggggtttgggaatgtttggtgtgtaggttatgtgtgtcatttgtaatctaaatatgaaatttgt

SEQ ID NO: 141372 - DNA, 404 bp, Arabidopsis thaliana
acccacgcatcagctgagaaccaagaaaacaaaataataataaaaaaccctaattccccgctccacttctctctctcacgctctctctgtgattttagtatggaagcaacggcggaggaatcagttagtactcttgttacgacgatggttgatgagacgtatgagttcttagcgcctcgatggtttgatttcgttaatggagagactgaagatgagtctcgccgagcagaactctggtttcaatcggccttaagctgcgctccttctccttcggttcctagaatcaaagcaaggagatcgttcaaggtagaggccatgtgcaacttcaatgaagctgaagaagagacgctcaaggataaagagccgttagaaccagtagttccaattgtttctttacaatcgca

SEQ ID NO: 141373 - DNA, 414 bp, Arabidopsis thaliana
agtcacccacgcgtccgcccacgcgtccgcctactccggtcgacgattatcccaatctcgccgggattctcctctgcaccataaaatagaagatgagagaaatccttcacattcaaggtggtcaatgtgggaaccagattggttccaagttctgggaagttgtatgtgatgagcatggtattgatcccactggtcgttacgttggaaactctgatctgcagttggagcgtgtcaatgtttactataacgaggcatcctgcggaagatatgttccccgtgcaattctcatggatcttgagcctggtactatggacagtgtcagaactggaccttatggtcaaatcttcaggcctgacaactttgttttcgggcaatctggtgctggaaacaactgggctaaagggcattacactg

SEQ ID NO: 141374 - DNA, 355 bp, Arabidopsis thaliana
gaactaccttttcgtaacctcccctcctcgtgacttccacatacaaaacatgcaaatctagttcttttcctccaatcacaggaatcatgaacttagtggacataattgagtgaaaccgcctgagagtatcccagaagacagaagaatccttgacgacaacttcatgtaaagccaatggttctggatactctttaatcttcgccggcgaagtcgccatcatttctaccgtcgcttgagacggtgtcgattcgttgtccgatgacatcgctatagagagacttttagtagagacagatatcttttttttgttggggaagtcacgaagaggggaggttacgaaaaggtagtcgtagag

SEQ ID NO: 141375 - DNA, 324 bp, Arabidopsis thaliana
tgactgaacttcaacctgttactgatgcccatgtcccagtcatgaaatttaagttccaaggaatatcaattgatcttctgtatgctagcatatcgcttctagttatcccacaggatctggatatctccaactcttctgtgctgtgtgacgtggatgaacaaactgtccgcagtcttaatggttgtagggttgctgatcagattcttaaacttgttccaaattccgagcacttccggacaacattaagatgcctgaagtactgggctaagaagcgtggggtctattcaaatgttactggatttcttggtggtgtaaactgggcac

SEQ ID NO: 141376 - DNA, 368 bp, Arabidopsis thaliana
tatgatggtcatggaggagttaaagcggctgagtttgcagctaagaacttagataagaacattgtagaagaagtagttggtaagagagacgagtctgagatagctgaagcggtgaaacatggttacttggcaacagacgcgtcgtttcttaaggaggaagacgttaagggtggttcatgctgtgtcacggctctggttaacgaagggaaccttgttgtgtctaacgccggtgactgtcgtgctgttatgagtgtaggaggtgtagctaaggctttatcttctgatcaccgcccgtctagagacgatgaacggaaaagaattgaaaccacgggaggatatgttgatacgtttcacggtgtttggagaat

SEQ ID NO: 141377 - DNA, 173 bp, Arabidopsis thaliana
tggtttagtcaccggaaagaaagaccaaacgtctcaaagctaattgtctctggagacgccggtaccaggcacagagttctaatggagaagagggaaaatggtctcgaaggaaagcaatcgggtcgggtcattaacggacccactaacccgatggtcacacctctgcgcaacga

SEQ ID NO: 141378 - DNA, 203 bp, Arabidopsis thaliana
agatgaaatacagtttcgtcttcttcctccggaggcgactcgtactctaacaccatcaaacaatgaatctgctaactgatcgtcaatttcaccatcagtctcttcgccagcgtcatcctcgcatccatctccgtgatcgccgtcgatgaatcctccggtgacagcgtttcggtggcaagatcttggatcgtgtgatataaggg

SEQ ID NO: 141379 - DNA, 319 bp, Arabidopsis thaliana
aagctaaacaaataatcagaggaacgaaggagacagcttctgcgaaatcagcatgagagccaaggttagtaatgggttttgattgtttaatggattttttagtgatgagaaattgaagtagtgtgtaggatctttatggtttgtgtgtttgtgtgttgcagtggaagaagaagcgtatgaggagattgaagaggaagagacgaaagatgagacagcgatctaagtagattcgggagtttgttttgtctttcttctttttagaaccaactcttatgtgagttttgttggttttgcaattttcaatttgaatgttttgttg

SEQ ID NO: 141380 - DNA, 328 bp, Arabidopsis thaliana
tttgggaaaaagtttcagcatttggttcttgtcaattcttatcaatgctatcttaactcttctttgtgcatttctgtttgagttctgtggctaagctgatttaggaagttggtgatcaaattacatctagtgtttgtttccgccagctgaagtgaatcaaaatgtttagttttggccgagcaagatgccaatggaggcaaaacagatctatgtctcttggaggactggattatgcagaccccaagaagaaaaacaattacttgggaaagattcttttgacagcttctcttacagccttgtgcattttcatgctcaagcaatctccaac

SEQ ID NO: 141381 - DNA, 325 bp, Arabidopsis thaliana
tttactttgtgctgcactactcaacctcaatggccgcctcaacaatggctctctcctcccctgccttcgccggtaaggccgtcaagctttcccccgcggcatctgaagtccttggaagcggccgtgtgacaatgaggaagactgttgccaagccaaagggcccatcaggcagcccatggtacggatctgaccgtgtcaagtacttgggtccattctctggcgaatcaccgagctaccttaccggagagttccccggagactacggatgggacaccgccggactttcagctgaccccgagacattcgcaaggaaccgtgaactaaa

SEQ ID NO: 141382 - DNA, 340 bp, Arabidopsis thaliana
aaattgaaggaactcaactctatttacactcaaactagccgagatcttgctgaagcgaagttagagatcaaacagcagaaggaagaactcataagaactcagagtgaattggactcgaagaactctgcgattgaggagttaaacacaagaataacaactttagtggctgagaaagagagttatatccagaagcttgatagtatttcaaaagattatagtgctttgaaattgacttctgagacgcaagcagctgcagatgcagagctcatcagcaggaaagagcaggagattcagcagctaaatgaaaatctggatcgtgcgctagatgatgttaataaaa

SEQ ID NO: 141383 - DNA, 404 bp, Arabidopsis thaliana
agaaaagaatgaagccaatggaacagtgtatgccgataagaaatctggtgaagaggatgagagggaggggtttttcaaaaaattctttaaggaaaaatctgatgacaagaaagacattgtcaaggttgatgacgggaatgaaagtgagggtgatgaatctccagaattttctcttttcaaaagattattccgtatacatcccgaagatgcaaaacctacttcagaaaatgaaaatagcagcaatggcttagttgaaagcagtcctgggacagaaaactttttccgcaagttgttcagagatcgtgaccaatctgttgaagattctgaactgtttggattaaagaaaccccaagaagaaacggccaggctcacctaaacagcgggatgatactccatctggtaag

SEQ ID NO: 141384 - DNA, 260 bp, Arabidopsis thaliana
actcgccgcggattattagtttcccgtttaacatgattcttgcttttgatagtccaagaatataaagcataccaaggtttcagactatcaccattcccctgatgttaactctgttttaggttcagtataggggatccgaaaaactcggttcatgatgtaacaatcttatctccttgtaactgtagctgatgtacttaggctgtaaaaacaatcacttttcagacgttttaagtgatcttgtgggaagtttttttccagac

SEQ ID NO: 141385 - DNA, 313 bp, Arabidopsis thaliana
acccacgcgtccgaaaaaaaactcactccctagaaaagtttgacaatggcgaaggcagataagaaaccagcggagaagaaaccggcagagaaaactccggcagccgaaccagcagcagcggcagagaagaaaccaaaagccggaaagaaactcccgaaggaaccagccggcgccggagacaagaagaagaagagatcatagaagaacgttgagacatacaagatctacatcttcaaggtgttgaagcaagttcatccagatatcggaatctccagcaaagccatgggaatcatgaacagtttcatcaatgata

SEQ ID NO: 141386 - DNA, 318 bp, Arabidopsis thaliana
cgcgtgggcggacgcgtggggagccacaaaccatagaatctctaaatcttttgaggatgaggaatacagagttcattgttgcattgaataaggtggataagctatatggatggaaaacatgcaagaatgctcctatcgtgaaggcaatgaagcagcaacataaagatgttataaatgaatttaacttgaggctgaaaaatattataaacgagttccaggagcaaggacttaacactgagctttattacaagaataaagacatgggagacactttcagtattgttcctactagtgctattagtggagaaggggtcccag

SEQ ID NO: 141387 - DNA, 353 bp, Arabidopsis thaliana
tactcagagaagatggattagtgaatcgagaggttgatatcgttaaatgcggggattttgcaatctagggttcttaagcattgtaatcgatgaaggctcaaaagggaagctcgaagaagaaaggtacgaattctgggttagtcgctgtagcagtggataacaataaaggaagccaacatgctctcaaatgggctgctgatcatcttgtctctaaaggacaaaccattatcctcctccatgttatccttaggtcatcctctgattcaggtgagattactgcagagaaacataagcaagctgaaaatctttttgtgacatttcattgctactgcagtcgaaaagagatacaatgc

SEQ ID NO: 141388 - DNA, 355 bp, Arabidopsis thaliana
agggagtgttacgtctggtacaagagagcggtatgactgctgattgcaaactttacacaactttaatatcaagttgtgctaaaagtggaaaagttgatgcaatgttcgaggtgttccaccagatgtcaaattctggagtggaagccaatcttcacacatttggtgcacttattgatggctgtgctagagctggacaagtagctaaggcatttggtgcgtatggaattttaaggtctaagaatgttaagccagaccgggttgtattcaatgccctcatctctgcatgtggtcaatcaggagctgtcgaccgtgcttttgatgtgttagctgaaatgaaggctgagacgcaccctat

SEQ ID NO: 141389 - DNA, 350 bp, Arabidopsis thaliana
agtcgactctctctttttttcgagattcagctgtaaaaccctaactagcgccatagccaaggaagctttcctcagatcgtctctccgaaattttccggttaatcgtcagttaaggggaaaattaggctatggcgatgttaggtgcacagcaagttccagcagcagcttgtactccagatatggttgggaatgcttttgtgccccagtattatcacatattgcatcaatcacctgagcatgttcacagattttaccaagagattagcaagttaggtcgtcctgaagagaatggtttaatgagcatcacttctaccttgcaagctattgacaagaagataatggcgcttggt

SEQ ID NO: 141390 - DNA, 352 bp, Arabidopsis thaliana
acttctccttctctcgacggattaagcttttacacagaagaggagagatatggatcagatactgaacaaagttggctcttactggttagggcaaaaggcaaacaaagagttcaattccgtcggtgacgatttcaattcattgtctagcagtattgaaggaggtaccaagtggttagtcaacaaactcaaaggaaaaatgcagaagccattacctgaattgttgaaggaatttggtctaccagttgggatcttcccacaggatgctacaaactatgaattcaacgaagagacgggtaaattgactgtattcatccctgagacatgtgaagttgggtacagagattcatcggtt

SEQ ID NO: 141391 - DNA, 353 bp, Arabidopsis thaliana
aattgcttcatcattaccaaatcatcaacttaatcgtttctctcaaatttagggttttctcttttctcgaaagtcttgcggttttctgaatcatctctatctggtttgagggtttcgtttgatatctggagaaaggggtttctggaaacaaggagttcataattcgcgatcttgatctatcgatcttcatttatatataaaagcgtgaatgagattatgatggagtcgaaaggtggtaaaaagaagtccagcagtagtagttccttattttacgaagctcccctcggttacagcattgaagacgttcgtccaaacggtggaatcaagaaattcaaatcttctgtctactcaaa

SEQ ID NO: 141392 - DNA, 354 bp, Arabidopsis thaliana
acccacgcgtccgctgagtgaaaaaagcttatcgcggcgattagttcccggcgaagaagaagaagagagataagaaaatggcgactaatggatctgctagctcagcgcagctctctcagaaggaagctgatgtcaggatgatgtgtgccgctgaggttcatcttggaaccaagaattgcaattaccagatggagcgttacgtcttcaagagacgcaacgatggtatttacatcttcaaccttggcaaaacatgggaaaagctccagatggctgctagagttattgttgccattgagaacccacaggacatcatcgtccagtcagctaggccctatggacagagagctgtgttga

SEQ ID NO: 141393 - DNA, 358 bp, Arabidopsis thaliana
aatcacagcaaaaaaaactcactccctagaaaagtttgaaaatggcgaaggcagataagaaaccagcggagaagaaaccggcagagaaaactccggcagccgaaccagcagcagcggcagagaagaaaccaaaagccggaaagaaactcccgaaggaaccagccggcgccggagacaagaagaagaagagatcaaagaagaacgttgagacatacaagatctacatcttcaaggtgttgaagcaagttcatccagatatcggaatctccagcaaagccatgggaatcatgaacagtttcatcaatgatatctttgagaaacttgctggtgagtcttcgaagcttgcgaggtacaacaa

SEQ ID NO: 141394 - DNA, 354 bp, Arabidopsis thaliana
acttcatcttcctcgtcttcgtcgtcttctgtgtacagacatacctccattttatagagagcgagaaacagagagatcagaagaagaagaggaggacaaaattatagaaggaaacgtttcaatgcgtgcatagaaatcgattctcatatactctgagagattcatatagaagtttctgttagttcgtagctctaagttcttcgttcgttgagagcttggaaaattgtcgcggagtctgtttttgttctcctagatctttgggtggaaacaaacaagctcgcgaagacgagaactctcgccgtatttgggatctggttccgtttagaagattttccaggtttcgactggttctag

SEQ ID NO: 141395 - DNA, 354 bp, Arabidopsis thaliana
atcaacggacgcgtgggcggacgcgtgggcaaatttctcaaaaatctccagtgactctgagagttatcaagagctccggtgctacattctccggcgacgaatcgacgatttccgtcgttaccataaatttgtgagctttatgaccagtttcttagactactctaaggacttatgcattcacatacttaaactgtcgtttgagataaatcaccgtgatccatcttacatgacgtggtggatccacaacgcggttatgcgtttggatcttgtatgtgattggagttatttggttgctatgaagatggacccaagcgtttacacacctgtgagactctggtatccttgaaactaagg

SEQ ID NO: 141396 - DNA, 349 bp, Arabidopsis thaliana
acccacgcgtccgcggacgcgtgggcttgaggatcttctcacattaatgggtcaaaccttttgctcttccttttgattaatttagtgtttgacaatctcctcctccttctccttcttcttcaaagttttgtcgcagtatctattgttcttacagagagaaaggtaggcttttgtgtccatcactcattttcgctcgtttggttaagcttcatctgccatgtggttcactgttttgatacttttgggctcttatacctaatgttgatgtaacacaacgatacataatctaatttgttttcgagtggaaaatagttgaacccagttgagtatttagccaatacgattagag

SEQ ID NO: 141397 - DNA, 350 bp, Arabidopsis thaliana
actattgcaggttctttctatcttccaaccaatatacttctcatagctttcttcaactactactacactttcttgcaacttgacccggacgacgtgagtgaacaattaaaacgccaaggtgcatcaatccctctagtccgacctggtaaaagcactgctctcttcatcaaaaccgtccttggccggatatcggttcttggttctgcatttctggctgttctagctgctggtcctgctgtagtcgaacagatcactcacttgacagcattcagaggatttgcaggcacttctgttctgatccttgtcgggtgtgcgacagatactgcaagaaaggttcaagcagagataat

SEQ ID NO: 141398 - DNA, 277 bp, Arabidopsis thaliana
aaacgaacacctgcaacattgtatagttgttgaatccggcttgtttcggtctttactcttctttttgctggtgaatctaatgagtgaactgaggccaagaggaggattctgggtaagagaaggggatgtgttcttttcttggtgtgttgttgttgttgttgtacttttgctatgtagactaatctcttaatactatgttgtctttgtttttgctgttggggtccattttgtattttctttaacagaaatcttaattaattttttagtgacttttttt

SEQ ID NO: 141399 - DNA, 352 bp, Arabidopsis thaliana
ctcatttggcgtcaaatgcttgcaaagagcgaaagcgaaacagaaagtatggcaaagaaattgttggagttgttagatgggaaggaaggagcaggactaacggagataatcgaaacaacaatgagtgaagaagatggagagaagaagaagatgatgagaggattattggggaagagtttgggagaaggtaacacagtgtatgagagagttacaagttgtatatacaaagcggctcgaggagctttattggctgggaatggagaaaatgggaagagaatggttgaaacagagatgaagaaagtaggaggaggtggaggattgaaagaaagggttttagagacagctcgagccc

SEQ ID NO: 141400 - DNA, 341 bp, Arabidopsis thaliana
agtgaggatgaggctatgatcgatcggtgattgtttttttctggatttttgtcacgcgttttctctaggatacgtcttcaagcgaattctgatccgatcttcgtcctcgcgtctgagttttctcttctcactgattaattgattttctaggttttggtttataaactgcatcaagtggtctttctaattcatgttatttgctcctcgttttattgttgatttagattgtggaggatgctatgattgatcggtgatggctttgattgatccttgtcacgcggtttcttaggatcttttgtcccttctattccaaatttttaattcctatgccgtttttttct

SEQ ID NO: 141401 - DNA, 346 bp, Arabidopsis thaliana
acggacgcgtgggcggacgcgtgggaaaaataatggctgcttcagtgatgctatcttcggtgacattgaaaccagctggtttcacggtggagaagacggcggctagaggattaccgtcgctcacaagagctcgtccctccttcaaaattgtcgccagtggcgtcaagaagatcaagaccgacaagcccttcggaattaacggcagcatggacttgagggacggcgtcgacgcctccggcagaaagggcaagggatacggtgtttacaagtacgtcgacaagtatggagctaacgtcgatggatacagtcctatttacaacgagaacgagtggtcagcgagtggtga

SEQ ID NO: 141402 - DNA, 344 bp, Arabidopsis thaliana
acgcgtccacttcagatgatactccagaagacatttcccctttctgacaactgcatcactgcaatgatggagttgtcagaaaggtgacatggcttctggtgaaaccactccaacatccgcatgaaacgacgttggaataccgttctgaactatgtacgcatgtaacctgtctatcagcaactgctgttgaggacattgagaaggtgctagaaatgatgccgtctattacagtcgacatcacatgtgaaacagaaggggaagaggggatccaagagggagacattgtgacccttcaagcttgggtcaccctgaaacgacccaatgggcttgtaggcgctcttcct

SEQ ID NO: 141403 - DNA, 354 bp, Arabidopsis thaliana
agtctctcaaagaaaccaaaggcagagaaaagagataacacacacaaaaaaaaatggcatcaacctcactcctcaaggcttctccggtgttggacaaatccgaatgggtcaagggacaaagcgttctcttccgtcagccttcttccgcttctgtcgtcctccgcaaccgtgccacctccctcaccgtccgtgccgcttcctcctacgccgatgagcttgttaagacagcgaaaactattgcgtctcccggacgtggaatcttggcgatggacgagtcaaacgcgacttgcgggaaacgtttggattcgatagggctagagaacactgaggcaaatcgtcaagctttccggactt

SEQ ID NO: 141404 - DNA, 306 bp, Arabidopsis thaliana
aaacagctccctggttttagattactgaattggcacttcttttttacagcaatgctctttgtatatggtcgaatacttagtcaacggctagtcaacactgtgactccagacaaagtcctatatcgactggtcacaagcctcatcaaataccacatggcaatctgttactccttgtatatttctggctttgtttggtttattctcacgctgaaaaagaagatgtacaaatatcagtttagccaatatgcatggacacatatgatattaattgtggtgtttactcagtcctcattcactgtcgccaac

SEQ ID NO: 141405 - DNA, 352 bp, Arabidopsis thaliana
agtgtgattaataatggcgctttctctcagccagactcgaccaccaagccttagccatagccatacccttagcgtcatcgttcctaagagaacgttcgtttcgatccgatgcggtccacgagacaaccgcggaccacttctcaaaggccgaatcctaagcaccgaagcaatccaatcaatccaatctctcaaacgagctcatcgaaccggtgtctccctctcccttaccctccgtcctctccgccgtctcataaaatccgatctcatctccgtcctccgtgagcttctccgtcaagactattgcacactcgctgtccatgtactctccactctccgtacagagtatcctcct

SEQ ID NO: 141406 - DNA, 255 bp, Arabidopsis thaliana
aagaagaaagaggagaagaatcagaagggaaagcgaaggtacaagagttgaacgaacagagaatcgtcttcgacccataaatatttttcgatataggagagcttggattggggccgtatgtgtatatatttatacggtttagggttcaaataagaaaaaaataccaaaaagacgttaattactttatccaatttatatgtttttttaacaatgtagctttcagtctatagattttatttcaatccattaataggt

SEQ ID NO: 141407 - DNA, 381 bp, Arabidopsis thaliana
acccacgcgtccgcccacgcgtccgcccacgcgtccgcccacgcgtccgcacacagcaggacctaaagagtggcttaaagatcagaagaagaagtcttcaagattcttacttgctcccattgatgcaactcgtcaagctcttcaatctgcttatctttcgttaactagtgaatctgattatacagagaaagatttggagaatctgcagaatctgtttaagtcttctgcaagagattgtgttcctaaagaaagaagctctcttgttgattttcaatctaaatccggagttgaggtttctagaatcttaaattgatcttaaagttttgggttttagttatgaatgacattaaagttttgatttttatgatgatgatgatgatg

SEQ ID NO: 141408 - DNA, 379 bp, Arabidopsis thaliana
cccacgcgtccgctgcaagttccaaagagcaaagctatgacgctgatccctcaagaccaagaaaacgagacaccgcagctcaagcgcaagttaagaagcagagaaagcttcaagaggatctaaccgatgaaatggtggtacttgcgagacaacttacggagagaagtcaaatgataagccaatctgtgcaaaatacagaaaagatacttgattctaccgaggaagccattgagcaaagcttagcaagcacaggacacgcaaccgtaagagccacaaagatttattcagaaagctcaaagacgagttgcttccagtggctcttgatcctcgccatgacatgtgtgttcatcatggttgtcatgttgattcgagtcacata

SEQ ID NO: 141409 - DNA, 356 bp, Arabidopsis thaliana
acccacgcgtccggtaatcttaacacaagcttgatcgtcctcatctgccaccaaaccacagacataacttcttcggtgacttccatggctccgcctgtctctgatgattccctacagcctcgagatgtttgtgttgtgggagtggcgcgaacgcctataggggacttccttggctccctctcgtctttgactgctacaagacttgggtccatatccatccaagccgcacttaagagagcagatgttgatccggtccttgtggaagaggtcttctttggcaatgtcataactgccaatcttgggcaagcactagcaagacaggctgcacttggtgctgggattccctaatctgtgat

SEQ ID NO: 141410 - DNA, 370 bp, Arabidopsis thaliana
acattaacattacattagcttcctcatttttattcttattattattattcatcagaccaacaacaaaaaggagataaagagaagaggattcatcatcatcaatcaatccttcattttatggatctactcatatcttgattcttccttctatctctcccttttcttccatctctttttctctgggtttccccggattgagttttttaatctctgattgacagatttgaagagcgtgacaaaggaagaatcttttattaaaacaaattcttctgttttaatcttgggatggcctcggtgggcatagagcctagtgccgcggttagagaatctactggaaacgttactgatgctgatagattacccgaggaga

SEQ ID NO: 141411 - DNA, 377 bp, Arabidopsis thaliana
agagaatttcaaaggagcattagagctgatgaggcgtgctacagctgtaccgacagtagaagtcagacggagagttgctgctgatggcaatgaaccagtccagatgaggctgcatagatccttgaggctttggtccttttatgttgatctggaagaaagtctggggacgtgagaatcgacaagagctgtctatgagaaaatattggatttgagaatagctacacctcaaattataatgaattatgcttttcttcttgaggaaaataagtactttgaagatgcgttcacggtgtatgaaagaggtgtcaagatattcaagtatcctcatgtgaaagacatttgggtaacctatcttacaaagtttgtcaagagatacg

SEQ ID NO: 141412 - DNA, 355 bp, Arabidopsis thaliana
cttcaagccacgggagagctcgaaaacgctcgtgctgctatccgttggggtacggattatttcctcaaatgtgcttctcgcaagaaccgcctctatgttcacgttggtgatccaaacgcggaccaccagtgctgggcgagacctgagaacatgaagacaccaaggacggtgttggagataagcgataaagttccaggaaccgagatcgcggcggaagccgctgctgcattcgccgcttcctccatcgttttccgccatgtcgaccacaaatatgcacgccggcttctcaacaaagccaaattgcttttcaagctagccaaaagccacaagggtacatacgatggagaatgcccct

SEQ ID NO: 141413 - DNA, 371 bp, Arabidopsis thaliana
cattgtttcagtcttgttacggaaggagttgatttttccagagaagcttattttatgactcggtcttacttgaagatgatgtggagaaggattgatctcctaaggtctgttctcgagatgggatacaattttgttttcacggatgctgatgtgatgtggttcaggaacccgtttccacggttttacatgtatgcagatttccagattgcttgcgatcattacctcggaagatcaaacgacctacataatagaccaaacggagggtttaactttgtgcggtccaacaatcgaactatacttttctacaaatactggtatgcttcaagactcatattcccgggatatcatgatcaggatgtgcttaactttct

SEQ ID NO: 141414 - DNA, 415 bp, Arabidopsis thaliana
  unsure (1)..(415): unsure at all n locations
aagaagacagtccatctcaagaccaaatagtccattaccaagaatcttcatctgaatcatctccagcagagtcaactgttgagcaaacactggacccaagtaatgactttcttgaaaagaggctaatgagaaagacaaatgcgaggaagctacctcgaggaatgccacctaagtacctgtgggatcaacctaatctattatctgaagaaatggtgagatgtatgaagaatatcttcatgtctcttgctgatccaacagcaacttcaaaagcttcctcaaacgaaagccacctctcaccagtatcacctcgcgggcatctatcaagctcagcatcctggtggccttcaacagaacggtcaatgatctcctcatgggtgcaaagcccacanatagatatccanaataacgccaatgt

SEQ ID NO: 141415 - DNA, 354 bp, Arabidopsis thaliana
agacgggatattcaacgcaatccttaggggacatgttgatttctcaagtgatccatggccatccatctcgcctcaggcaaaggatcttgttaagaagatgctcaactctgatccaaagcagagactaactgctgctcaagttctcaaccatccatggatcaaggatgatggagaggcaccagatgttcctcttgataatgcggtgatgtccaggctcaaacaattcaaagcaatgaacaatttcaagaaagttgcattacgggtgatagcatgctgcttatcagaggaagagatcatggggttgaaggagatgtttaaaggtatggatactgatagtagtggaacaattacact

SEQ ID NO: 141416 - DNA, 344 bp, Arabidopsis thaliana
ataaaaagaaaaatggcgtttgcgatatcaaagcgaaacgcaaccttgtttcttgtaacgctactactaatctccgttccattgtcttcctccacgctacaacaagatttcgtgaagtgccttgtcgacaactccgacgtctccttccccataacggcgtcgtttctctcaccggaccaaaacgctactttgtttaaagaggagcttgaatcaacggcacagaatctccgttacttgacgccgtcaaacccgaagcccgtgttcatattcgagcctttgtacgagacgcatgtccaagcagcggtcgtgtgtgccaagaagcttcagcttcacctccggctacg

SEQ ID NO: 141417 - DNA, 364 bp, Arabidopsis thaliana
acggacgcgtgggcggacgcgtgggcggacgcatgggcggacgcgtgggcttgcagctatgggtaaagagaagtttcacattaacattgtggtcattggtcatgttgattctggaaaatcgaccacaactggtcacttgatctataagcttggtggtattgacaagcgtgtcatcgataggttcgagaatgatgctgctgagatgaacaataggtccctcaagtacgcatgggtgttggacaaacttaatgccgagcgtgagcgtggtattaccatcgatattgctctatggaagttcgagaccaccaagtactactgcacagtcattgatgccccaggacatcgtgatttcatcaagaacatg

SEQ ID NO: 141418 - DNA, 305 bp, Arabidopsis thaliana
acgtcagctcaatgaatgccataagacattccacaacgggtttaacacaaatatgcacaactcaggtttggatgagctatttgttatcacaaagacaaagatgaaggttgctgttatgtggcaagatggtagctgcaatctgggagttgattcccaacagctgcttcctgttggtgctgttaatgctcatgatttttggccctaaaagtttgttgtggaaaaggaaacctgcaacagcatggcatggggaattgtgaaggctgtcaatgctaaggaacaaactgtgaaggtacaatggacaatac

SEQ ID NO: 141419 - DNA, 414 bp, Arabidopsis thaliana
aaaaacaaaacaaaacaaaagtcagctcaggcgaagaacagatggctcgtaccaagcaaaccgctcgtaagtccaccggaggtaaagctccaaggaagcaacttgctactaaggctgctcgtaaatctgcaccaactactggtggagtcaagaaaccacatcgttaccgtcctggaactgttgctctccgtgaaatccgtaagtaccagaagagtactgagttgcttatcaggaaactgccatttcagaggctagtccgtgagattgctcaagatttcaagactgatttgcgtttccagagccatgctgtcttagctctccaggaagctgcagaagcatatcttgttggtctctttgaagacactaacctttgtgccattcatgccaagcgtgtgaccataatgcccaaagaca

SEQ ID NO: 141420 - DNA, 274 bp, Arabidopsis thaliana
tttgcagttcatgggaggtcaagccgctggatacgcggctgcagactctgtccaggcacttcctcttgtaagcacattttggggtatagttttgttcggagagtatcgaaaatcgtcgaagcgaacttatgcccttttagttagcatgttggccatgtttgtggcggccgtagctattcttatggcctcttccggtcaccggaaatgatgatcttatcatagttgtattatacatgtaagattataagtgaatgaagaatatatgttctgtttc

SEQ ID NO: 141421 - DNA, 409 bp, Arabidopsis thaliana
accacgcgtccggatttcgaaaccctagtcgatttcgagatccaactaactctgctccttatctcagcttgttgaatttgcgaagtatgggagacgctagagacaacgaagcctacgaggaggagctcttggactatgaagaagaagacgagaaggtcccagattctggaaacaaagttaacggcgaagctgtgaaaaaagggtacgtgggaatacacagttctggattcagagacttccttttgaaaccggagcttctcagagctattgttgactcaggatttgaacatccatctgaagtgcaacacgaatgtatccctcaagctatcttgggtatggatgttatctgccaagcaaagtctggtatggggaagactgctgtgtttgtcctgtctactctacaacagat

SEQ ID NO: 141422 - DNA, 355 bp, Arabidopsis thaliana
  unsure (1)..(355): unsure at all n locations
agcgagctttttgatcggagactttttctctcatcgtcgttgtttgaattctccggctgagagatgcttgcttgacgacgaatctccaccgatcttttaccttttcgcacaacaagtaagagaaggatgtcgactccagcgaggaagagattgatgagggatttcaagaggttgcagcaagacccacctgcaggaattagtggtgctccacaagacaacaatatcatgttgtggaatgctgttatattcgggcctgatgataccccttgggatggaggtactttcaaattgtcactgcagttttcggaagattatccanataaaccaccaacagtgcggtttgtttcacggatgt

SEQ ID NO: 141423 - DNA, 318 bp, Arabidopsis thaliana
aacacacgtccgcaaatacctttaattttatttgattccataccctaatttttgtatattccatgtcaatgaacgtttcaggagaaatgggtcaaaagttttgggagaatcaagaagatcgagcgatggttgaatccaccataggctctgaagcttgcgactttttcatctcaacagcttcagcttccaacactgccttgtccaagcttgtctcaccaccaagtgattccaatctccaacaagggttacgtcacgttgttgaaggatctgattgggattatgctcttttctggctagcgtccaacgttaatagctctg

SEQ ID NO: 141424 - DNA, 307 bp, Arabidopsis thaliana
aagacataaagagagtaacaacgagtgcccaagaccaacaacacgtagctaatgtcgttgtagcagcctctgcaagtgtggtcactacgacgcaaaaaagggaagcaggtttggccaaggttcaggcagataagaagaaggtagacgctagaaagaaaagcttgaagagactatgatgatgctatcactcagtgtcttacgctctttgaacctaaactgttgtttcctttttacttgtaagagatctgttgtttgaggatttttcatttctgggaaataataatgtttgccaatgaagccgaatgtt

SEQ ID NO: 141425 - DNA, 144 bp, Arabidopsis thaliana
tgggagaaaaggtgtgaaaggagcacagccaggtcctgtcttgtcatggtaccaacgagtcaaaaatgcagttggagctgcatgaggccgtgagtacatgcattaaaaagctaatcctcatatcattcaccgtgacattaaatc

SEQ ID NO: 141426 - DNA, 195 bp, Arabidopsis thaliana
tgagtcgtattacaaacggaatgctttcgtcgggaagtagagccgacggtgctacggcggcggctgcatcgatggaatgagtgacgacggaggcgatgaaactgatggggtcggcgtcaccaacttgaaaatcagctgtggctaacaatttattgatttttgttctcggttcaccgcatcttgttaccggattgt

SEQ ID NO: 141427 - DNA, 168 bp, Arabidopsis thaliana
acgtcgtattacatcaaccttaatcagccggacttggtcttgtttgttggtgaagctcttgttggaaacgatgcagtagaccagctctcgaagttcaatgaggaactttcggatctctcgacttctgggaagcgaggactgatcgatggaatcttacgtacaaggttt

SEQ ID NO: 141428 - DNA, 379 bp, Arabidopsis thaliana
acttcataaacgcccttcgtcttcttccctgcaaatctattttctagatctttctttcttccgcgaaacgacaatgagagagtgcatttcgatccacattggtcaggctggtattcaagtcggaaatgcttgctgggagctttactgtcttgaacatggcattcagcctgatggccagatgcctggtgacaagactgttggtggaggtgatgatgctttcaacaccttcttcagtgaaaccggtgcaggtaagcacgtcccacgtgctgtctttgttgatcttgagccaactgtgatcgacgaggtcaggactggtacttaccgtcagcttttccaccctgaacaactcatcagtggtaaagaagacgctgctaacaat

SEQ ID NO: 141429 - DNA, 361 bp, Arabidopsis thaliana
  unsure (1)..(361): unsure at all n locations
attctcgacaaagaaccagggaacaagaaccgtcgtggtcgaaaacgaagaccttggcggcaggtcatgtacggatctacggggtatgtattcttacattcgatcgccatttattctactggatttattttcctgttgcctgattggtattaatcgatttgtgttggaaaatcttgaggaatttagagggttggtgtatangaagaggatctggaatcgattattgtcattttgctacttgttgttatttgttccattaggtatataatcgatatgagtgtcattggtcgttgtttaggttcggtatttgtttgtgtggtgtataattaagaatgggtcttacttactatacaacatatat

SEQ ID NO: 141430 - DNA, 438 bp, Arabidopsis thaliana
accacgcgtccgcccacgcgtccggaagacacacattcaaatggcgacggtacaattgtccacccaatttagctgccaaaccagagtttcaatctcaccgaactctaaatctatctccaaacctccgtttctggtaccggtgacctcaattattcaccgcccgatgatctccagcggaggaatcgctgtttccccccgtagagttttcaaagtccgagccacagatactggagagatatgatcagctctattggcggcggaggaagcaattgaagacgtggaagatacggagcggctaaagagatcgctcgtggattcgttgtacggaacacatcgaggtttaagcgcatcgagcgaaaccagagctgaaatcggagatctaatcacacagctcgagtctaagaaccctactccagctccgacggaagctcttttcct

SEQ ID NO: 141431 - DNA, 238 bp, Arabidopsis thaliana
  unsure (1)..(238): unsure at all n locations
acggacgcgtgggatcgttgcttactacatcttggctacttccagcaatggatacgacccaagcttctttggatgattcgtttcaatgtcaatctctcgtatatgtatatgtatatgtttgacttgtgttgcaagctatctaatctgttctctatctctgtttcttcttctgttgttgttgttgttgtctaagacttgtccctctttttgcaaatgttttatttctccatttacaana

SEQ ID NO: 141432 - DNA, 167 bp, Arabidopsis thaliana
tcgtttgggaaagtcctcacatcttagatgaactccaatcgcttcgagtaactctaattcctcgggagtttccgatagcatcatcgggaaattgcttttccgttgaatactcaccatggatggtgcctgatatgacgcgttgcattgcctatacatcggcaaggttg

SEQ ID NO: 141433 - DNA, 259 bp, Arabidopsis thaliana
agtagctgtaaacccgtccgcagtgggtgggtgcagttgtaaaagctccttcatggtgaaactctgaatcattgactcaactttcttctttacatggactagaaaccaaatttgatcatttgtttattacatgtatgatgtcagaagttttgctatgtatcaaaaatgcataactagggaaatatacataaactctgtatgcttctagctcatcaaatgatttgtccatcctatttttaaacaataatggaaagattta

SEQ ID NO: 141434 - DNA, 333 bp, Arabidopsis thaliana
aacgacggcgtggtgttcctccttcctgctctgaaaaatggcgaagagaacgaagaaggttggaatcgtcggcaaatacggaacacgttatggtgcgagtatcaggaagcagattaagaagatggaggtcagccagcacagcaagtacttctgtgagttctgtggcaagtacggagtgaagcgaaaggctgttggtatctggggttgcaaggattgtggcaaggtcaaggcaggtggtgcttacacaatgaacaccgccagtgcggtcactgttagaagcacgatcagaaggttgagggagcagatcgagggttaaaagtctgctggcttttt

SEQ ID NO: 141435 - DNA, 314 bp, Arabidopsis thaliana
acggagatatctccccgccggtgacttcaatcccagttgttgaagggaatgaagaattgaggaagccacagaatctgattccgccgttttcaaaggtggtgtctcattttggcattagcggaatctccgtcgcattggccactggcgtgactcatcctctcgatgtagtgaaagtgagattgcagatgcagcatgtcggccaaagaggtccgttaattggaatgactggaatctttcttcaactgatgaagaatgaagggcgtaggtctttatacttggggttgactcctgctctcactagatcagtgctttac

SEQ ID NO: 141436 - DNA, 119 bp, Arabidopsis thaliana
aaaacaatgtaagaaaagttgaaaaaaaatatctgatgtgatatgtctgtctagtctattgagaacattatttcgttgtcgtttggttctgattcgtttatcttgagtatcttgatctt

SEQ ID NO: 141437 - DNA, 342 bp, Arabidopsis thaliana
cccacgcgtccgcccacgcgtccgcccacgcgtccggaaaagctcaagccgagagagacaatggcatcaacattcacgagctcaagcagtgttcttaccccaacaacattccttggccagactaaagcctcaagctttaacccccttcgtgatgttgtctctctcggatctcccaagtacactatgggaaatgatctttggtatggacctgacagagtgaagtacttaggacccttttccgttcaaactccgtcttacctcaccggagaattccctggcgattatggttgggacaccgccggtttatccgcagaccctgaagcctttgccaaaaacagagct

SEQ ID NO: 141438 - DNA, 324 bp, Arabidopsis thaliana
acccacgcgtccgctccccaagtagagaaatataaaaacttagacaaatattgccacaaccggtgaaaatggagatcccggttcgagaggagagaagatcctcctcatcctctgccggaccattacaacaaaccatctccttagcagctgacgacgccatcgatagcggtccatcctctccgcttgtcgtcaaagtctctgtcttcgaaacagagcatgagacgaccaagcttatccacgcgccgtcaactctgctcggtgaaaccaccggagacgctgattttcctcccattcaaagctttagagatgctaaacttgtttgtg

SEQ ID NO: 141439 - DNA, 142 bp, Arabidopsis thaliana
agggctcttggagttgtctccgttcgaatttttgcatttcatcatcctttacgtgtgtctcagaacttcatctctctctcgagagaagttgcgtcaacatttcaaatcatttacgcacagtttcagtttttagtcactttcg

SEQ ID NO: 141440 - DNA, 373 bp, Arabidopsis thaliana
acaaaagcacgctacagaagaagaggaagaagaagaagaagcagagacaacaagaagaagaagaaacagtctcatctcgccggagaagaagaaagatgtcgtggcaatcatacgtcgatgaccatctcatgtgcgaggtcgaaggcaaccacctcacacacgccgccatcttcggccaagacggcagtgtctgggctcagagctcagctttccctcaggtttttcttccttcttcttcgcgtttcttccgatcctctgtctcaaataagttcatcgatctgattcaatcgtctgatttaggtttattccttgtgatccgatctgaggaaacttggatctggttttgatttgctagcttctgacttgttctctc

SEQ ID NO: 141441 - DNA, 374 bp, Arabidopsis thaliana
cccacgcgtccgtttctcctgaactctgtagaaagatccgaattgaatatttcggacccgaaacctgacccgctttgatgggctggattccgtgtccgtgctggggaaccaacgacgatgaaaacgccggcgaggtggcggatcgtgatccggtgcttctagtatctggaattggaggctctattctgcattctaagaagaagaattcaaagtctgaaattcgggtttgggtccgaatatttctagctaaccttgcctttaagcagagcctctggtctctctataatcccaaaactggttatacagagccgttggatgataatattgaagtattggtccctgatgatgaccatggactctatgcaattgacatt

SEQ ID NO: 141442 - DNA, 412 bp, Arabidopsis thaliana
  unsure (1)..(412): unsure at all n locations
gtgatgtcgttacttaaggttcagtgcgtttacaaagaccctgtgacgaaagagacggttaatttgaataattccggcgaagtaaagattctcaggccaatagtgatgacagaaagaagacctgtagtgtcagttgaagttgacagacagaggatcagattacgtgcggcagaagcaatctctgaagctagggttttagccgagcgcggtgatttgactgaagctgtgtcggttctcgagacttgccgtgggttactgaccgagtccgtgtcgggtcgagccggagatcaattgtgtgtcacactgtgtgcagagctgaaggagatgcaagagagaatggcgagccgtcaagtatatgaggcttcgggtanggcttacgtgctcgccggtctgagctcgcactcctggcagc

SEQ ID NO: 141443 - DNA, 370 bp, Arabidopsis thaliana
aggacgcgtggggttgtgttcttctccgtctgtgaagccgcagagattgacttatccttcggtgttcaaagcttatggtagacttggccaagctcgtgatgggaggcaattacatgggatggttattaaagagggacttgaagacgactcgtttatacggaatacgatgttgcatatgtacgtgacttgtgggtgtttgattgaagcttggagaatctttctggggatgataggttttgatgttgttgcttggaattcaatgattatgggttttgcgaaatgtggattgattgatcaggcgcagaacctgtttgatgaaatgccgcagagaaatggagtttcttggaattcgatgattagtgggtttgtg

SEQ ID NO: 141444 - DNA, 353 bp, Arabidopsis thaliana
gacaccgaccacactgtccaggactttcccggtcacagcttttatagtcccagaagaacctgccaaggaggaacctgccaaagaggaacctgccaaggagaagagcagcgaagccaccgaggccaaggaggctgttgcaatcaaggaggctgtcgcagtcaaagaggcggcctaatcagctcagcttcagcagataaaagagacccgaatttttaagtgtacttcaagaatttgaacaaatcatggagagttagtgtttctcactgctctaactatcatgtattatctacctaccacttgttgctgcttgttttacctgtaataagatatcaatatcatcctgttccactaag

SEQ ID NO: 141445 - DNA, 412 bp, Arabidopsis thaliana
aaacgttactcttctctctcattctctttcgcttctcgatagcttctcaaatcatggttcagcaaatatgggagacgttgaaggaaacaatcacagcttacactggactttctccagctgcgtttttcaccgtacttgctctcgctttcgccgtttaccaagtcgtctccggtttcttcgtttctcctgaagttcaccgacctcgttctttggaggttcagcctcaatcggagcctcttccaccgccggttcagctcggagaaatcactgaggaggagcttaagctttatgatggctccgattctaaaaagccccttcttatggcgatcaagggccagatctatgatgtttctcagagcaggatgttttatggaccaagtgggccatatgctctgtttgcagggaaagatgc

SEQ ID NO: 141446 - DNA, 139 bp, Arabidopsis thaliana
tttggatctgctttagtaagttttgttaatgctacttatatccaaaagtaatttcgttttagggtaatataaaaaaaaaagtgttaaagaatatcacttagttataattttgttttgtttatatgtaactttagttctc

SEQ ID NO: 141447 - DNA, 379 bp, Arabidopsis thaliana
agttttcccttaaaaaaaccaaggacaaaggcataatgccgtattcacaatcttgactcttcgttatctggatctagggtttctctcgatttttagaatgccacagaacctaataaacttttcccagatacacaaacaaactcatcatcaaccaaggaagaagaaagaaactagggtttttttttctggattcatcatcggtattttacagatctatattcaaagggaacaaaatcttaaggaacaaacactaaattttcattctttctctgatttacccatttatcaaaaatcttccttttgttttcctgattcttgctagagaaaaaaactcggatccaattcataaactagtgtggactggtgatcaatctatcaa

SEQ ID NO: 141448 - DNA, 211 bp, Arabidopsis thaliana
cgccactcacggtggtatccttttcaagtacttctaaactcaatccgagggaagaagatgacgatgatgaagaagaagaagatgatgatggcgatcgattctaaactttcttttttaccattcttattttcgtttaccgtaggtggttaaaaaaccttttttgttgatgaggctcatttaaagaaccaaccaaatgatgtttctttctctc

SEQ ID NO: 141449 - DNA, 357 bp, Arabidopsis thaliana
cggacgcgtggggtcttccccattttgacaagaactcacttaagattttgaagtcatggaaatggggaacgggacaggacccgggatgtcgggggcttttagtggaggcggcaacgagattttgggaatgggaggtggcggcggcataatgggaggcggtgatatttcacatatgagtcctgaagtaaaatggatatttgagatggcttggtatggtgaaactgtaagatatgatgggttaatttgtgaggagcatccccctaagctctcttcagatggtatttgggagaaacttattattaaatcggcaggtctatatttttggcaatatcgtcttccgaagctcgagattgtcat

SEQ ID NO: 141450 - DNA, 376 bp, Arabidopsis thaliana
  unsure (1)..(376): unsure at all n locations
tggacttctttcctctcatcttctccagcagaaacaaaaaaagctgaaagatgtggttttttggatcgaaaggagcatctggattctcgtctcgttcaactgcagaggaagtcacacatggtgttgatgggactggtctcactgccatagtcacaggttttcttctatcaacactttcatgccattttgcgacatggggttgtctaaagttgtagactttttttcttataatttccagaacttttgtcctctctgattctgtcttcgaattgatttcatatctagtaaaaagacttgacttttattgtttagacaattggaatttaaggtttttatcatcanggtctgtctttgattcggtcaactctaataaata

SEQ ID NO: 141451 - DNA, 317 bp, Arabidopsis thaliana
ctaccaggacggagtgactgttatgtcgaagcaggagtatattgcgatggtgaagaagataacagatcttgaggagaaatgtaagtccatggaagctcaggctgcgttttatatggagagggagaagactctaaacgctgcacttcgtcgtattgaccagctcgagcttcagttgtctgaaaccaacaaggcactagacgagacaatgacgaggcaacatgagataatggctttcatcgagaagaaaaataagaagaagcggaagttcttattattctagaagactgcatcagaggctaagaagcctggaaaataaa

SEQ ID NO: 141452 - DNA, 389 bp, Arabidopsis thaliana
gggaatatgatttacgggcaaacctcttgcaaggaggatgaaaggtttgattctgaagtaggacaaggaagcttatttgtagaggttgataccattcctattccaggacctccaggatcatttttaccaagtcctagagatatgggttttgatgaaaatcttgggaactcgtcggttattacaagccaggttcaatccttccatgggttagcttgacagaaactcatctgaatcacctgtttccgctgtttcaaactttgcagctggtagattgaattttcctgctgagttatcttctttccgagaaaatttctccccggatattgccatgtcctactcaacaaccccgatgagcttttgtgttccatctcatcatgggacaatcactg

SEQ ID NO: 141453 - DNA, 381 bp, Arabidopsis thaliana
aagccacgcacttgttctctttatcacagtgccctctcgctctctgcaacaacactcttaatatatatatatatatattcatcaatccctatctctcatcgaattctcttccgatcgtctttttttcttcccgcggtttcttgcgtttccggtcagtttgcggcaccgtgttttgttatttggttgaatgatcaaacgatttggttttttatcctgattcgattgcattctgattgagctgctatgtttgagaaatcgtgtgtggaattgtgttgatttgttctgggaatttaattagtttctggaattttgccgattgttttggtgttttcatgaaaagtttgctactggaatttgggattatctcaaagcttattcaat

SEQ ID NO: 141454 - DNA, 403 bp, Arabidopsis thaliana
ctcaccccaaaattacaaaaaaaaaaaaaaaaaaagattttccatttccctcttctcgatccaccaccaccaccaacctcaaaagctttcatctttaccggtcatggacggtggttcaggtcaaccggcggctgatacagagatgacagaagctcctggaggttttcccgcggcggctccatcgcctcagatgcctgggattgagaatattccggcgactcttagccatggtggtaggtttattcagtataacatatttggaaacatcttcgaggtcaccgctaagtataagcctccgatcatgcctattggcaagggtgcttatggcatcgtttgttcggctatgaattctgaaactaacgagagcgttgcgattaagaaaattgctaacgcttttgacaat

SEQ ID NO: 141455 - DNA, 386 bp, Arabidopsis thaliana
aagatttcacaacctccacacacttccaaacacaattaaagagaggaaaaagaatcaataaccctataaataaaaaatcagacaaacagaagtttcctcttcttcttccttaagctagtaccttttgttcttgaaattagggttaatttcttttttccaaataccatcaattctccagaccataaaaactcaaaaagatcagatctttcctctgaaaaagagatacccaacttatgtttttgtgtgtctgtatatagataaacattacatacccatatttgtgtatagacataaaaagtggaaattaaggtaacaaaaagaaatgggaagaggaagagtagagctgaagaggatagagaacaaaatcaacagacaagtaacgtttg

SEQ ID NO: 141456 - DNA, 412 bp, Arabidopsis thaliana
  unsure (1)..(412): unsure at all n locations
aggaagatacactgaagcaaaagagcaagtcatggcggcgacatcttcctctgcttttctccttaatccgttgacttctcgccaccgtcctttcaaatactcgccagagctctcttctctctccttatcctctcgaaaggctgctgctttcgatgtttcctcagctgctttcacgctcaagagacagagccggagtgatgttgtgtgcaaggctgtatctatcaagccagaagctggtgttgaagggctcaatatcgccgataacgccgctcagcttattgggaaaactccgatggtgtacttgaacaatgtantcaagggctgtgttgcaagtgttgctgctaagcttgagatcatggaaccatgttgccagtgtcaaggtaggattgggtacagtatgattactgatgct

SEQ ID NO: 141457 - DNA, 413 bp, Arabidopsis thaliana
acttcacctgttcttctccatcttcgattttacctattattgatacgagaagtgggaatttgcgatgcacatttcagtctcaggtttcttgtgggattcagagagatgataatggacgccgtgtttggcggaggagaacattgacgaagaaggacgatatgttgcgttacaaaatgcaaagagttccatttgtggaagaacaagtaaggaagataagagaagttgggaaggtaatgacaatggacatagagcagcttcttttgagggaagacaatcggtttgaatttgtcaatagcgtagcagctgaagcaacagagtacgtggacaagaacagagacgaatatggaggttccaaaaaagccatctttcatgttctaagcaaccgtgtgaacgatctcggctttgatcgccct

SEQ ID NO: 141458 - DNA, 395 bp, Arabidopsis thaliana
agcccacgcgtccgcacatttctctccctcttccgattctcctgttgttccattcatcaaaaagctatggatttcaatagaaaagctcatccagattgcgtatatgcggataatcctttccatgaatgtgcttcagcttgtttagagaaaattgctcaaggccatgtcaagaagaacactaagaagcaaagttcaaggcttcttagcttctcagggagtttcggtaggaaaaagaaggagtcgaattcacaaccgcctacaccgctatccgcaaggccttatcaaaacggcagaggcggttttgcaaatggtaattccccaaaggttcatcattctgtagctccacctgcttccgtgaagaagaagattgtttctgaaacgaaaaattctttcac

SEQ ID NO: 141459 - DNA, 409 bp, Arabidopsis thaliana
agcccacgcgtccgaagaaaatcaaagcagcagttatggccgacgtagcaacaaagcaccccatggaagatgaggtgaagaagacggaggcgtctagtttggtggggaagctagagacagacgtggagatcaaggcttcggctgataagtttcaccacatgttcgctgggaaaccacaccatgtctccaaagcaagtccaggcaacattcagggatgtgatctgcacgaaggcgactggggcacagtcggctctatcgtcttctggaattacgtacatgatggggaggcaaaggtggcgaaggagaggatcgaggcggtggagccagataagaacttgatcacgtttagggttatagaaggtgatctgatgaaagagtacaagagcttcttgctcaccatccaggtgac

SEQ ID NO: 141460 - DNA, 402 bp, Arabidopsis thaliana
agcactttcccctttctctctctaaacatggcgatgctttctactgcttccgtttcggggagcgtcgaccttcctcgaggaaccatgaaggttgactcgtctgcgtctccggaggtcgtatccgatctcccaccatcttccccaaagggctcacctgatcgccatgacccttccacttcttctccgagccccagtcgtggtggtgacaatcagtctgaagtcatatccaagagtgaagagtatcggcaattgtttcggcttccagctgacgaaatccttgttcaagattttaactgtgcttgtcaggagagtattcttatgcagggtcatatgtacctcttcatccattatatctgcttttactccaacatctttggttatgagaccaagaaaattatccca

SEQ ID NO: 141461 - DNA, 370 bp, Arabidopsis thaliana
gtccacggacgcatgggcgggtaaaccggtttttgaattcagaggagcgaattacgctagtttgaagttgcatccgggtttatcggcgtttgctgatgatcctgatggagcgagtgtgtcattgacggagctggttgagtttgcgaaagggagagttccgaaaggaatgtggattgagactgaagttaggttaatggcgacggcgggaatgagattgcttgaattacctgttcaggaaaagattctgggagttgcaagaagagttcttaaatcttctgggttcttgtttcgagatgaatgggcttctgttatctctggatctgacgagggtgtatatgcttgggttgttgcaaactttgctctcggttca

SEQ ID NO: 141462 - DNA, 391 bp, Arabidopsis thaliana
acgtcatcttccctgttttgctgtttagtctgcaagagaaatttcagattccggcggagaaagctataacgattcttcaatggatcccacttcttcttcttcctctgctcttagatggaaaattcttcgccaagcgcttctccgtagatctgattctcaatctcaaactgagaccaaacggatttcaaggaaagcaactcaaggattcaacttgattccttgtcaagtggtggactcttctcctcaatcggataagtctcgtgaagcatccgtttgctacacacttcccatcactggctctcccaaactctatctaacacaaagagtggataattgtagtgatctcaatgacttcgagatatctaatcgatacaacattgataatactgga

SEQ ID NO: 141463 - DNA, 405 bp, Arabidopsis thaliana
cttgatttctaaaaaggagaagaagagaagagaacgcgattaccttgattcaccctcctccttcaggtttgggaggctcgaatactcaggaaatgaaaggggcaagtggtgctgttaagaagaaaccccaggtgttgaacgaagctggtgaggcggagacggcggtggaaacagtcggagaaagccggaaaattagtggagacggtgggtttggcagtgacgacggcggagggggaggtggaggtggaagtggagagtcgattcttcgcgagattggtgatgataggcctacggaggatggagatgaagaagaagaagaggacgaggatgaagatgatggaggtgatgaggaagatgaagaaggagaaggagaaggtgggcaagaggaaaggccaaagcttgatg

SEQ ID NO: 141464 - DNA, 407 bp, Arabidopsis thaliana
agcccacgcgtccgcccacgcgtccggaagaaagcaaataaaatctagagaagcttgtttctagggtttcgactctcgacggccggtacgatttttcaactgcttgttctaaggaatcatgaagcctgtcttttgcggaaactttgagtatgatgctcgtgagagtgatcttgagcggcttttcagaaagtacggcaaggttgagagggttgatatgaaagctgggtttgcttttgtctatatggaagatgaaagggatgctgaagatgcaattcgagcgcttgatcgctttgaatatggtcgcacaggacgcagactccgcgttgagtggacaaagaatgaccgtggaggtgctggaagatcaggtggttcgaggagatcatcttctggcttgagaccttccaaga

SEQ ID NO: 141465 - DNA, 406 bp, Arabidopsis thaliana
agaaagtgtttgatgaaatgcctgagagaagtcttgtttcgtggaattcgatgatcgatgctctggttcggtttggggagtatgattctgcgttacaactgtttagagagatgcagagatcgtttgaaccagatggttatacgatgcagagtgttttgagtgcgtgtgctggtcttggatctttgtcactaggtacttgggcacatgcgtttctgctgcgaaaatgtgatgtcgatgttgctatggatgttttggttaagaactcgttgatcgaaatgtattgcaaatgcgggtcgttgagaatggctgagcaagtgtttcaggggatgcaaaaacgtgacttagcttcatggaatgcaatgattctagggtttgctacacatggaagagctgaggaagccatgaa

SEQ ID NO: 141466 - DNA, 251 bp, Arabidopsis thaliana
ggcgtccaggttttttagtgccacatcaacggctgtgagtggttagtcactaaagaaaagtcacaggctgttatatagtattggcttcgctatttattttcgtctaccacgagaaaaacaagtcgtaattcttctatcttgatatcttcaccgcctgccgatctctctcaatctccgatcaaccatgagcaaaggtccaggactcttcaccgatatcggcaagaaagccaaagatctgttgacgagagact

SEQ ID NO: 141467 - DNA, 130 bp, Arabidopsis thaliana
cgttatttggccctaaattctctctgttctcatttagcttggggcaaacttgtatacaaatgaatacaatgttaaactgaacccagaaggttgttttgtcatgtcattgaactgatttgggtgaatcatg

SEQ ID NO: 141468 - DNA, 415 bp, Arabidopsis thaliana
acggacgcgtgggctgtaagcggatttcatcagcattcagcagccagacgaaacttttaacgatctaccatcgaaccaggtctctcatatcttccgatcatcttctccgattacgattctttccttctcgtttttagattagctcagaaatttttctaaccttttcttctctgtcgatctaacacctgacctcgatttttcgttaccgataccaccattttcgaggtcagagctaccgttttcgtatctgtgttatcatatccggattaggttttgattttatgattacatttgttataatcagtgatttgttgtttattcgcgatcctcggattttcgctggatgatcttttgtgcttcctctatacgttttctaaacctagatttggatcgatttggtatatgagaagctgtg

SEQ ID NO: 141469 - DNA, 430 bp, Arabidopsis thaliana
aactttctttatccaactttcttcaccaaatcgattcttcttcaaccatgtcttccttcacctccaaattcgccgatgagctgattgctaacgctgcttacatcggaacacctggaaaaggtatccttgcggcagatgaatcaactggtactattgggaaacgtctcgctagcatcaacgttgagaacgttgaatccaacagacgtgctcttcgtgagcttctcttcactactcctggagctcttccttgcctcagtggtgttatcctctttgaagaaactctttaccagaagagctctgatggtacgccttttgttgatatgttgaagagtgcaggagttttgcctggtattaaggttgataagggtaccgttgagcttgctggaaccaatggtgagactactactcaaggtcttgatggtcttggtga

SEQ ID NO: 141470 - DNA, 265 bp, Arabidopsis thaliana
aggttatgttgtgagtttatgaagttgtggtctagtgttgtattttgtttttcttaaggataatgcatctgtgtgctttgcttatctaaaatctaaataaagtgggtttctgcattgtgactttgcacaaaaaaaaaaaaaaaaaaaaaaaaaaaaaaaaaaaaaaaaaaaaaaaaaaaaaaaaaaaaaaatcaaaaaaaaaaaaaaaaaaaacaaaaaaaaaaaaaaaaaaaataaaaagggggggccccccaaaaggttaaaa

SEQ ID NO: 141471 - DNA, 221 bp, Arabidopsis thaliana
agcggacgcgtgggcaagtggaagaagaagcgtatgaggaggcttaagaggaagagacgaaagatgagacagcgttctaagtaaatttgcctttgaagacaatgcgactctgtttcttgcttctctccctttctctcttgcaaacattgttcttactataagcttccttttatgtttcagacttgtttaagattttaatcaaaaagaaagtttcagacttt

SEQ ID NO: 141472 - DNA, 433 bp, Arabidopsis thaliana
acccacgcgtccgcaaagctcagtgtttaataattgtatagcttttttggtgaacgaagagtcagatcggcgagcctgagatgggttggggttcggtgttgctattactggcggtggctcttctttgtcagagggcaagttcaatcggagctaactggggcacacaggcgtcgcacccacttccaccggacatagttgtgcggatgctaagagagaatggtattcagaaagtaaagctctttgacgccgaatacgacactctcagagctttgggcaaatccggaatcgaagtcatggttggtattcccaatgagatgcttgcgactctcgcctctagcctgaaagctgctgagaaatgggttgctaaaaatgtctctactcacatctccaccgacaacgtcaacatcagatatgtggctgttgggaatgaacc

SEQ ID NO: 141473 - DNA, 425 bp, Arabidopsis thaliana
aggaagagtctctctcgtcgccgtttgttattcctctgtgagcaaatcgacgaaatgggtcactctaatgtatggaactctcatccgaagaagtacggtcctggatctcgtttatgccgtgtgtgcgggaactcgcacggtctgatccggaagtatggtttgaactgctgcagacagtgtttccgtagcaacgctaaggagattggattcattaagtaccgttaatcaagcaccaacttcatgattgatgcttaatgatataaacatgaaggcgtcgatgggtatggcttttaagcttttgtagtttttgaaatttttacttttgagaaccattgttattttgggagttaattaagttgttgaacctcattaagcatgtcttattttggattaatgatgttttggctattctcgtatttttgttt

SEQ ID NO: 141474 - DNA, 430 bp, Arabidopsis thaliana; identical to SEQ ID NO: 125142

SEQ ID NO: 141475 - DNA, 408 bp, Arabidopsis thaliana
atgatttcaaatctccccaagcacaacaatggcgaaatcaatgagatgcaagagggtgaagagattgagagcaataagaagagaaatagtggagaaggaatcattcactctaacgagagaagacgccaaatccgccgctattgaagccgcactcgctgctccgaagttaccagttcgtcaagccccagtttctccgtttatggaagttgcgacgccttcctctgagtctgcatctgcctccactacaatcgccaacgatagtgatgaggaaatggatgatgagaagaaaaacaagtcgctaaaacctattgggaagaagttgaagaagaagtttaagctggggatgaagaatcgtcgtagtaagggtgtccttcgaggcaaacgaaactaaaactggtcttggctttc

SEQ ID NO: 141476 - DNA, 415 bp, Arabidopsis thaliana
  unsure (1)..(415): unsure at all n locations
aaggagaccttctctgagtacccaccacttggacgtttcgctgtgagggacatgangcagactgttgcagtcggtgttatcaagagtgttgacaagaaggacccaactggagccaaggttaccaaggctgcagtcaagaagggtgccaagtgaactctgaacatcaaaactctttccgctgatgaaatgaaggactattttagtttctttactttagtagtttggtatttggttggttgtttgtgttaccgcttcgtttattctccgtcggagctcaattctcggaattgggttcttgatcggaggtggcggaggtacttggcactcgagcttcctgtttatttcttttgttttgtgttatgattttgaacctttttggatattcggttatatgatatttgtgtcattcctgcgg

SEQ ID NO: 141477 - DNA, 430 bp, Arabidopsis thaliana
  unsure (1)..(430): unsure at all n locations
agtcacaaaatttggagaaatcgaacagacgatcgagatcgaggaaaatggcgtcgtggaattcgattccgctggagatctcgtacgaaatcgttggatggatcgcgtttgcttcgtggtcaattagcttttacccacagctgattttgaatttccgtaggagaagtgttgttggattgaacttcgacttcgtgatgttgaatttgacaaagcactcgtcgtatatgatctacaatgtctgcctctactttagtcctgttattcaaaagcagtactttgacacttatggcgataaagagatgatacctgtggctgcaaatgatgttgcattctcgattcatgcagttgtaatgacagctgttacactgttccagatctttatctatgaacgtggacctcanaaagtatccagacttgctataggtattgt

SEQ ID NO: 141478 - DNA, 432 bp, Arabidopsis thaliana
agtgaaaggagatttagaatagctagagatgagcttatgaatttgaaagatgcattggggattggtgatgagagagatgatgtgattgtcatcgcagctaaattctttgaaatggcagttgagcagaatttcacgaaaggccgcagaactgaactagtacaggcttcctgcctctacttgacgtgcagggaattgaacattgcgttgcttcttattgatttctcaagctaccttcgagttagcgtttatgagttaggttctgtatacttacaactctgtgaaatgctgtaccttgtggaaaatcggaattatgaaaagcttgttgatccttcaattttcatggatcgattctcaaacagcttattgaaaggaaaaaataataaagatgttgtggcaacagctagagacattatagctagtatgaagagagat

SEQ ID NO: 141479 - DNA, 356 bp, Arabidopsis thaliana
gtcgcaatggagactggagtattgtccaaggccttccgattgatgaagtatcaaggaagaagatggatttgactgcagaggagctcaaggaagagaaggacttggcgtactcatgcctctcttaaacccttctggagcaaaattttcatctataaggtgtgagatcagttaaagcctttcagggctttgtccgaataagaagtgtgtttgaaagatctccaaacactgttttataacctctttggtctctttgatgagtattgtccctggtctgtttctaaaccaggatatcgtttttttcaatgtgtctgatttggtttacccatgaaaagaagaaaattggcagttgcatggtt

SEQ ID NO: 141480 - DNA, 425 bp, Arabidopsis thaliana
aaaccaccgttctccgtcacggtggcgctttattctctcatcggagcgcctcaccggtggcagacggtgtcgttgttcctctcctaaaacctccatcaatcaccatctctttacacagagctctaaccaaaatcttcgagagatggggcagagtatgagctgtggaagtcgaccggagcacggaatattcgcctctgtacagtgcggcgatatcatcactatccgtcgtgtgatggcgacggagcctagtctgttgaatcaaactactccttatgatcgtcactctgttcttcatgtcgctgctgctaatggtcagatcgagattttgtcattgcttttggaacgatttacgaatccagatttgttgaatcgtcacaagcagactccgttaatgttggctgcgatgtatggaagaatctcttgtg

SEQ ID NO: 141481 - DNA, 430 bp, Arabidopsis thaliana
aacggaaaatggatgccggagctgaaattgatgtggttcggccggtggaggcagattcggcggcggaaattagtccggaacaagaccacgaaggaagatcggagccttcgtcgttgaaccaaggggagattttaaaaacacttgctacggtggagaaggattcgcaggcaatcgcggagagcttttcgtctctctttgtttccctccgatcaactctttctgaggctactggtagctcggttgatcacatggcttgctttggagaggcagcgggacggcttcaggaaaatgctctagatgcagccaccaaagggaaccggtacatcaactcttgcctcagattaaacgaggaaattaaaggcgttgagaatttggcggctcggttaaagcacctgaggaaaaacgtggatgttcttgacacggctgtaaa

SEQ ID NO: 141482 - DNA, 432 bp, Arabidopsis thaliana
agagcgtttcaagacgtttggccgtttttgaaactgtcgtttgcgtctgcggttatgctttgtctagagatttggtacttcatgacgatcattgtcttaactggacatcttgaagaccctgtcatagccgttggatctctctcaatctgtatgaacattaatggatgggaaggaatgttgttcataggaatcaatgcagctataagtgttagggtgtcgaatgagctaggatcgggacatccacgagctgcgaaatactccgtgatcgtaacggtgatagagtctctcgtcattggagtagtgtgtgcaattgtaattctgataacacgagatgactttgctgtgatttttacggagagtgaagagatgagaaaggcggtagctgatcttgcgtacctgctcggtataacgatgattctcaacagtttacaa

SEQ ID NO: 141483 - DNA, 436 bp, Arabidopsis thaliana
  unsure (1)..(436): unsure at all n locations
acccacgcgtccgcccacgcgtccgctctgtctacttttgaaatccttcaaaaatgtcgggactcagattggatggcaaaatcgcaataataacaggcggagctagcgggattggagccgaagcggttaggctgttcacggaccacggagctaaggtggtcatcgttgactttcaagaagaacttggtcaaaacgttgccgtttctgtcgggaaagacaaagcaagtttttaccgttgcgatgttacaaacgaaaaggaggtagaaaacgccgttaagttcaccgtcgaaaagtacgggaagcttgacgttctctttagtaacgccggcgttatggaacagccgggaagctttctcgacttgaatctggaacagtttgaccgaaccatggcggtcaacgttcgtggtgcggctgcgtttatcanacacgctgcacg

SEQ ID NO: 141484 - DNA, 437 bp, Arabidopsis thaliana
agcacacgcgtccgctctttctctatacaagagcgcaagctcgaaggcgctcttgttctttcttcattttctccttaacaatcaccctcatagtaactttaaaactctctgtttctagtaattcacacacaaaatggctattaaactagcaattctatttaccacatttgttctttttagcctcgccgacgctagaatccccggtatttactccggcggcgcatggcaaaacgcacacgccactttttacggtggcagcgacgcctccggcacaatgggaggagcttgtggttacggtaacctatacagccaagggttacggaacaacacggctgctttgagtacggcgctgtttaacaatggtatgagttgtggagcctgctttgagctaaaatgcgccaacgaccctcaatggtgtcactcaggtagtccttcga

SEQ ID NO: 141485 - DNA, 439 bp, Arabidopsis thaliana
agcggacgcgtgggcggacgcgtgggcgctgccattaaagcgggattttatgacattggtatcggggctggtttggagtccatgactaccaatccaatggcatgggaagggtcagtcaacccagcggtgaagaagtttgcacaagcgcagaattgtcttcttcctatgggtgttacgtcagaaaatgtagcacaacgctttggtgtctcaaggcaggagcaagatcaagctgctgttgactcgcacagaaaggcagctgctgctactgctgctggtaaattcaaggatgagatcattcctgttaagaccaagcttgttgacccgaagactggtgattagaaacccattacagtttctgttgatgatggtatccgaccaaccacaactcttgcttctcttgggaagctgaagccagtgtttaagaaggatggcaccacta

SEQ ID NO: 141486 - DNA, 438 bp, Arabidopsis thaliana
agctggtttcggcgatctaagtcacctcacttctctttcgatttatagaaacaacttctccggtgaatttccggttaacatcggccggttctcgccgctcgacacggttgatatatctgaaaacgagtttactggtccatttccaagattcttatgccaaaacaagaaactacaattcttgctcgccttgcagaacgagttttccggcgagattccgagatcttacggcgagtgcaaatctctattgagactaaggattaacaacaaccgtctaagtggtcaagttgttgaaggattctggtctctaccgcttgctaagatgattgatctcagcgataacgaactcaccggagaggtttctcctcagattggactttcaacagaactgagtcagctcattttacagaacaacagattttccggcaagattcctcgtga

SEQ ID NO: 141487 - DNA, 304 bp, Arabidopsis thaliana
aaaatatatatattgaatcttcattcattaaaaaaacaatttttatttttccctattcatcttcggttcctcaccgtccgatgctttgactctgaccaatcagtcaatttgagcttcacaatcaacggtcatgggtcattgttacagccggaacatctccgccgtcgaggacgacgagatccccaccggtaacggcgatgtttcgaatcaaccatctcaaaatcaccggcatgcttcgattcctcagtctccggttgcttctggtactcctgaagtcaactcatataacattagccctttccaa

SEQ ID NO: 141488 - DNA, 433 bp, Arabidopsis thaliana
agagaaagataagatttggttttgcattcctcttctctctcgccgctctcaatatgcttcgatttctattctcctcttcctcttgattttgtcttcttctctttgctgcggagagattaagaaacccaagggttttaagcaagagacgcggcgaggaagctatccagaactctctgaaacatccattcctttttctcatggacgtagtgttgccggaaactgccgtggtaaccggtggttcggttatcggagattatggatttaatgtggatccttttctcgttgaggcgttgcacaactctcgccatcgtctcacgattttgcggatggaacttgatgttcaaaggttgttgcagaaccctgaacagcagcagtttgagttccagcattttcctacttcgtatcttcgtcttgcagcccatcgtgttgctaa

SEQ ID NO: 141489 - DNA, 437 bp, Arabidopsis thaliana
agctacattctaggtttcttcttcatttctcctttctctggccaaagttccgactttttgcttctcccagaggctaatcatggacgctgtggcggcgaatttgtttcaatctccttccttactgcgtcaaacttccgaaaggttgatattttcgacgcccaactgtcctggcttcatgcgaattagctccggacctcaatttcgtctcagacaaaactcttctcttaaattctcgagaccatttcaaagcggaacaacttgtgttaaatctcggagaagctttgtggttaaagcttcagcttctggtgatgcttcaacagaatcaatcgcgccgcttcagttgaagtctcctgtgggacagtttctgtcacagatattagtgagccatcctcatcttgttccagcagctgttgaacagcagcttgaacagctccaaa

SEQ ID NO: 141490 - DNA, 439 bp, Arabidopsis thaliana
agacgaactcatttcagcttcttgcagccggcggaacggaggaacaaaaagcagagaagctaatcaatcatgggaaaggttcacggatctttggctcgtgccggtaaggttagaggacaaactccaaaggttgcgaagcaagataagaaaaagaagcccagaggtcgtgctcacaagcgtctgcagcacaaccgtcgttttgtcaccgcagttgttggtttcggaaagaagagaggacccaactcttctgagaaatagaagaagttagagagaaagatgttgtcgtgaaacttctcaaggtcatttgtaactttttgttttctttggcaccgaactattatgttttgattctatgctatgaaatactgttttttcacttatgattttggtcaattaaacataagatatgatttttgccaatacattacaacaagaccaa

SEQ ID NO: 141491 - DNA, 439 bp, Arabidopsis thaliana
agtaatcttcaggcttcttttctaaaattccgactggttaccgagggctagaaaatccggtcaccgtcgccggagacaacctcggtttctaaacgaaaccatcgtgaaggacggaaaaaaggagcttgaagacaaaacaatgacgagcgttttcgacgaacataaaccctccgatgactctcacgagtccaagatcgtcatcaatggagaagaagaggtgttggaggaggagaatgataatccgattgaagaagtccggttaacggtaccgataaccgacgatccaacactaccggtgctaacgtttcgaacatggactcttggacttttctcttgcatattgcttgccttcgtgaaccagttctttggtttccggtcgaaccagctttgggtatcttcagttgcggcacagatcgtgacccttccgctagggaaactc

SEQ ID NO: 141492 - DNA, 437 bp, Arabidopsis thaliana
agatcagaatttgtatatcaaaatcgagcgaacgaagatctccggattgctgcactctgctacatgcctttcgaatccgtttactgcatcgccggagaagtaggaatctgtttacttacctttggaatccatcctcatccctctccgtctagtgtgatgcagcagttaggcactagtgcagtgacatctaagtttaaacagacttttttcttcaaaatgcgacattttcttctgatgtctgcagtacggttgtatacctctttctctccccccattcaccctcttcgatcgtgttgtttcttgcatcgccttggcagtaatctcgggggtttctttcttaaagtttgtgcaaaatggtggactggctttcactattaccctggaataaaatcttcactgctgcatgtggctgctttttaagcgatagcaactacatt

SEQ ID NO: 141493 - DNA, 431 bp, Arabidopsis thaliana
  unsure (1)..(431): unsure at all n locations
cggagagagagcgagagagacgatggaggaagaggagcacgaggtttacggtggtgaaattccagacgtcggagagatggatggagatatggaggctctcaaccccgatttggatatggctgctgctgatgatgatgcggttaaggagttggatgaaatgaagaaacgattgaaagagatggaggacgaagctgctgctctgcgtgagatgcaggctaaggtcgagaaggaaatgggagctcaagatcctgctagtattgcagcgaatcaagcaggcaaggangaggttgatgctcgatcagtttttgttggcaatgttgattacgcttgcacacctgaagaagttcagcagcatttccaaacatgcggcactgtccatcgggtgaccattctgacagacaaattcgggcagccaaagggatttgcatatg

SEQ ID NO: 141494 - DNA, 438 bp, Arabidopsis thaliana
  unsure (1)..(438): unsure at all n locations
agcccacgcgtccggtgtctgtgtactgcgtagggtttagtgagtccatttgcaaagatgactcgtgagttctaatctatcgacctctctcgttttctcgcagttgcagagtctcaggattatataataggacaaagagagagagacaacatgcactctcttaagactacttgcgttgggcaaatatttgctctagctaagcctcacgattctgtaggcaagaggactcgtaatcggattcctaaagaagagagaaagacactggttgaatcttttataaagaagcatcagaaactaaacaatgggagttttccttcactttagctcacacacanagaggttggtggatctttctacactataagggagattgttagagagattatccaagaaaatagagtccttggtcctggtgacttgctacttgagggaaatggc

SEQ ID NO: 141495 - DNA, 208 bp, Arabidopsis thaliana
aggtaattttagttttcttttataaaatgcccttaaataaactaaaaaagaaaacgacaaaaaaaaacagggcgttgagtttgttttcattatgtttgatttctctgtcattttctttaatgtgtctagcgagtctgcctttgtcccaatggtttagtatctgcatgtatccacggatctctatttgtcgacgaatgttatttacaat

SEQ ID NO: 141496 - DNA, 327 bp, Arabidopsis thaliana
gcgatcaaattcaatccgaaggtttcggctctggtgcgttttctgacgttgttgttaaagctatgggatccagttaccatctccaccgcttgattctatctcgcagctcctacttcaggactatgctgcaaggtccatggaaagaagctagctctcctgttgtgaacttacttgtggatgataaaaatgttaatggagacgcaatttctgttgctttagcttatctgtatgggtaccatcctaagctggatgatgataatgcctttcgtgttttagctgctgcttcttttcttgaccttcacgatttgtgtgcgatatgcactgatt

SEQ ID NO: 141497 - DNA, 442 bp, Arabidopsis thaliana
agctgttacgcgccaccgcgaatgtcgttggaattccgaaattgagacgaccaatcggagcgatccaccgtcaattcagcactgcatcgtcttcctcgttctcggttaaaccaatcggaggaatcggagagggagcgaatctgatctccggtcgtcagcttcgtccaattcttcttctcgattcgtcggcgatcaacggaggagagaaaagagaaattctcaaaccggttaaagccgccgctgctgaaggtggagataccgctggggatgctaaagttggattcctcgccaagtatccatggctagtcactggattcttcttcttcatgtggtacttcctgaatgtgattttcaacatccttaacaagaagatctataattacttcccttatccctattttgtatcggtgatacacttgttcgtgggagttgtttactgctt

SEQ ID NO: 141498 - DNA, 437 bp, Arabidopsis thaliana
agtttccttcttcatttatgaaacgcaaaaaacattattcccctctgtggtctctctctcacgagcatcgtttcttcatcgatctcatagttaccggcgttgttttgaggccactaccgtcgtctctctccgtaatcgtctccaacatcatcatcttctcaatttcgaagcattttattctctaataggactcaggaatgaatctttctccgttcaagagagatatcgatgagctgatagacgagtttgtggaggatgatttgacaacctttgctgatatgaagagtgtctggctatctagaaagttttctcatatatatgaagctagtcctaacagcaacctagcctttttcatgcagtcactatatgttcataccattggtcacatggttagtattgattctttttcacggagacttggaggtctttactgtctc

SEQ ID NO: 141499 - DNA, 444 bp, Arabidopsis thaliana
agaaatgaatgcggtccgaggaatttgcgaggcgacttccgacaaagcctcatgtgtcaaaactctcgagccggtcaagagcgatgacccaaacaagctgatcaaggctttcatgctcgctaccagagatgctataacccaatcatcaaacttcacgggtaaaaccgaaggaaacttgggttcgggcatctcgccaaacaacaaagccgttcttgattactgcaagaaagttttcatgtacgcgcttgaggatctcagcaccattgttgaggaaatgggtgaagatcttaaccagatcgggagcaaaatcgaccagcttaaacaatggttaaccggtgtttacaattaccaaactgattgtcttgacgatatcgaagaagatgatttaagaaagactattggagagggcattgcaagctccaagattctcactagcaacgctat

SEQ ID NO: 141500 - DNA, 438 bp, Arabidopsis thaliana
agaaaaccctaagcaagcttctctcactcagcaatggcacccattgatccacactctttcaccgattcctctcatcctctcaccacgcatgtcgctctctccctctacctcgatttcaacacctccataatccatggctccgctctcctcactctctcctccgccttctccggcgaactctctcttgatactcgctgcatttccattgctatggtcctcgatcctctcactctcgagcctatcccttactccgtctccaccacaccggatcgaattcggggcaccgaagttgtcgtagtcctctccggtcaatcttcactgctaattgtctactccacttcgccttctgcttccgctctccagtggctttcgccgcttcaaactttctccaaattgcatccttatgtctacacgcagtgtcaagcgattcacgccaga

SEQ ID NO: 141501 - DNA, 339 bp, Arabidopsis thaliana
agttttagcagacattgaagaagatgggagtattcacattcgtatgcaagaatggaggcggcgcgtggagcgcgaagcaacacgaaggagaacttgaatcttcagcttcttctacctacgagctccagcgtaagctcgttcaggtatctctctccgctgattcctccggtggcgttcagtcttcgttttctcttgtctcccctacctccgccgtattccaggtaattgttggtggtggtggtggtggaggattctctgctggaggagctgcctcaagtggaggtggtgcgggtgaagctgcagctgcccctaaggaagatgagaagaagaaagaagaat

SEQ ID NO: 141502 - DNA, 404 bp, Arabidopsis thaliana
gaaactaccaccagagatctttgataaagatctcgacgccatcttcttgaacaacaatagatttgagtcgaccatccccgagacaattggtaaatcaacagcttccgttgtaaccttcgcacacaataaatttagcggttgcatcccaaaaaccattggccagatgaagaacctcaacgagattgtgtttattgggaacaacctaagtggttgcttaccgaacgaaatcggttcgttgaacaatgtgactgtgtttgatgctagcagcaatgggttcgtcggaagtttgccatcgaccttgtcgggcttagccaacgtggaataaatggatttctcgtacaataagttcaccggatttgtcacagacaatatctgcaagttgcccaaattgtcaaacttcacat

SEQ ID NO: 141503 - DNA, 332 bp, Arabidopsis thaliana
agctcgagactgtagagtgaagtttgatttatttagagagataagttaaaaaaaaaatggtcggtatggatttgttcaaatgtgtaatgatgataatggtgttggttgtctcttgtggtgaagctgtttctggagctaagttcgatgagctttatcggtcaagctgggctatggatcattgtgtcaacgaaggcgaagtcacaaaactcaagcttgacaattactctggagctgggtttgaatcaagaagcaaatacttgtttggtaaagtctctatccagattaagcttgttgagggtgattcagcaggaacagtcactgctttctacatg

SEQ ID NO: 141504 - DNA, 367 bp, Arabidopsis thaliana
aaggattacacagaccctagcctcttccccaaatcccaattctccattgctttagaagaatcacacaatggatctagagattgttggtcgtcacgctctctttttcgacgatgattcgatggcaacgtttgtcaactctccgacggcgctcgttgactggaacagcctctttattgaccgctacgatgttcgtcatctcctctcttctcctcctcctccacgtatcaaacgccgtcgtccgaattcaaacgatgctgacttggaatcggagctcgatcacgagcgttatctagatttaccgtcggaatctccatctccgtcggatgatgatgaacacgatatgaatgaggattcagcaaatacaaat

SEQ ID NO: 141505 - DNA, 337 bp, Arabidopsis thaliana
acaaaaaagtttcaatggccgcctcaacaatggctctctcctcccctgctttcgccggaaaggctgtgaacctttcccctgcggcatcagaagtccttggaagcggccgtgtgacaatgaggaagactgttgccaagccaaagggtccatcaggcagcccatggtacggatccgaccgagtcaagtacttgggtccattctctggcgagtcacccagctaccttaccggagagttccctggagactacggatgggacacagctggtctatccgctgaccccgagacattcgcaaggaaccgtgagctagaagttatccacagcaggtgggccatgct

SEQ ID NO: 141506 - DNA, 391 bp, Arabidopsis thaliana
tcctcctcagtgttccgtctagccaacgaccttgtaacctcaccggatgaattggcgagaggagacgtctgcaaatccatccaatgttacatgagtgaaactggagcatcagaggataaggcgcgttcgcatgttcgacagatgatcaatgacttgtgggatgaaatgaattatgagaaaatggcacatagctcttcgatactccatcatgattttatggaaacagtgataaatttggcacgcatgtctcaatgcatgtatcaatatggcgatggccatggctctcccgaaaaagccaaaatcgttgatcgtgtcatgtccttactcttcaatccgattcctttagattgaacttcatattgattacattaaatatcatatggttttttga

SEQ ID NO: 141507 - DNA, 426 bp, Arabidopsis thaliana
aaaaaaactaacctttgtctaaaacccagaatctggtaaaccttcacactcaaaaatgttttactcgcattgtctagtatcgagaaaaggacctttaggagctatttgggtcgctgcctatttcttcaaaaagcttaagaaatctcaagtcaaagctactcatattccttcttccgttgatcaaatcttgcaaaaagagttagatgcgttgacatacagagttttggcgtatcttcttcttggtgttgtaaggatatattccaagaaggttgactttttgttcgatgattgcaataaagcgttgatcggtgtaaaggagtttgtggctaaggaaaggaacagagaaaagacaggtgtatcattgcctgcatctatcgagtgtttttccattgctttacctgagagatttgaactagatgcttttga

SEQ ID NO: 141508 - DNA, 383 bp, Arabidopsis thaliana
aacttctttctgcaaattttattttcccgagaaaatcatcactgagaaaaatgctcgctgtgtttgagaagacggtggcgaatagccctgaagctttacagagtccacactcgtctgagtctgctttcgcgttgaaagatggatctctcgctactcatttcgcttccgtgaatcccaactccgtcacgcttaacttcggatcttctggatttgttgcttactctcttgataatcctgatcctcgtgttcctaggtcaatttcaagtcctcttctctttgattatatgcttgatctagtcaaatctttgttgtttctttgatttctaagtagtagattttgaatctccgatgttttcggtttcgattttgtttatttctggaat

SEQ ID NO: 141509 - DNA, 322 bp, Arabidopsis thaliana
actgaactccgcttctaagatccttcgacggatagaaagatatttcagatctgatcggagagaatcattctcagaatttctccattctaatttctctttctcgacagagtgaagagagacaacaaggaaggaagaggaaaaatggaggaattcttagataagttgccgcagatggatctgatgcgttcggagaagatgacgcttgttcagcttatcatccctgttgaatccgctcatcgttccatcacttatctcggcgagctcggacacgtgcagtttcgcgacttaaatgctgataagagtccctttcaacggacatttg

SEQ ID NO: 141510 - DNA, 338 bp, Arabidopsis thaliana
acggacacgtccgcccacgcgtccggagaaaattagcgaggaggtagctcacccggaaactctcctccagttctgtgtcgaggtctccaaagagatcgacgaacatctcttggccgaggaagaggaggtgaagacaccagagacgcctagtttggtgggaaagctagagacagacgtggagatcaaagcttccgctgagaagttccatcacatgttcgccgggaaaccacaccatgtctctaaagcatctccaggaaacattcaaggttgtgatcttcacgaaggcgactggggtcaagtcggctctatcgtcttctggaactacgttcatgatagag

SEQ ID NO: 141511 - DNA, 372 bp, Arabidopsis thaliana
atgacgcgtgggttcttcacacgaaaacctctcgcagtcgctaaaagccttgaaccatctcatgatcactagcttccaagtaagtgtgtagttgaatcatttcgatcaaggtttagagagtgagaaagcatggcatcaacctttaccgcaacgtcgtcaatggggtcatctttggctccgccttcgaatcgattgtcatcgtttgtttcgatctcatcaagctcttttggaaggactcagagtagtgctcagaggaaagcaaggtttcctaaaatatatgcggttaagcaattgcatttcaatgacgacgggactgcgattaagaagcttcaagctggtgtgaataaacttgcggatttagttggggttact

SEQ ID NO: 141512 - DNA, 256 bp, Arabidopsis thaliana
gcgtccacggacacgtgggcggacgcgtgggctctcctccctaaaacgcgtttccgtgacaccgccgttatcctcatgctcatccatcagtttataacgttcgggtttgcgtgtacaccattgtacttcgtatgggaaaaagcgatcggaatgcaccacacaaagagcttatgtctaagagcgctggtgaggctaccggtggtggttccgatatggtttttggcaatcatctttccctttttcgggccaataaact

SEQ ID NO: 141513 - DNA, 224 bp, Arabidopsis thaliana; identical to SEQ ID NO: 129919

SEQ ID NO: 141514 - DNA, 297 bp, Arabidopsis thaliana
cccacgcgtccagtgaattttcccgtgaattttcgcggtgcttttcaaagctaaagctcctgggaagatcatacttgcaggggaacacgctgttgttcatggatccaccgctgtagctgccgccattgatctctacacttacgttactctccgctttcctcttccatcagctgagaacaatgataggcttacacttcagctcaaggacatttccttggagttttcatggtccttagccagaatcaaagaagcgattccttatgattcaagcactctctgccgttctacgccggcttc

SEQ ID NO: 141515 - DNA, 199 bp, Arabidopsis thaliana
tctaatcaaaaagcttttaacctcagccgttaaatctttctccgatcatgccgaccagaaacatcgccattggtggagtccaagaagaggtctatcaccccaacgcacttagggcggcgctcgctgagtttatctcgactttgatcttcgtcttcgccggctcaggctccggaattgctttcaacaagatcactgacaa

SEQ ID NO: 141516 - DNA, 311 bp, Arabidopsis thaliana
gggaatggagggagtgcttgggacgatggtgcttttgatggtgttagaaaagtgcttgttgggcgaaatggtaagtttgtgagttatgtcaggtttgagtatgcgaaaggagaaagaatggtaccacatgctcatgggaagagacaagaagctccacaagagtttgtagtggattatcctaatgaacatattacatcggtcgagggaacaatcgatggttacctttcgtcgctgaagtttacgacatcaaaaggaagaacctcccctgtttttgggaatgtggtcggtagtaaatttgtgttcgaagaaac

SEQ ID NO: 141517 - DNA, 347 bp, Arabidopsis thaliana
cccacgcgtccgcccacgcgtccgcccacgcgtccggtcagcaacagtctcagcaaccaagcagtggtggtagctcagccccaccaacagataccacagggtacaattactaccagcatgcttctggttatggccaagctggtcagggataccagcaagatgggtatggagcttacaatgcctcgcagcaatcgggatatggtcaagctgctgggtatgatcaacagggtggttacggcagcaccactaatccaagtcaagaggaagatgcatctcaagccgctccaccatcgtcagctcagtctggacaggctgggtatggtacaactggtcaacagccgcctgct

SEQ ID NO: 141518 - DNA, 214 bp, Arabidopsis thaliana
ggaaggagaacaagaacatttggatacagaagaattgacacaaacaactaccccatgacacaatacacattcttgttgtatcttcttcttttttcacacgagattattcttctatgtaaccatggcgaataattattgtaaagtctatacgcacgcagctatatcaaaagatataagcagtatctatatctacaagttaccgttaggtttaatt

SEQ ID NO: 141519 - DNA, 315 bp, Arabidopsis thaliana
agattctgacaaaggcatagctggaatggacgggaagtttcttgacggttgggtcatattcgcagagtatgcaagaccgagagagcaatcacagtcatatcaacctcagaacaacatgtctcgtcctccatactatggtaaccgctagagaaacagttttcttcggttcttatgaatcttttatattcatatttatgcttcattctatcctcttctatgatcgaactgtgttgtgcttcgtctcgtgttattacctttagaagattaaaaacttcaaattatattttgaaggaataatcagaaactgtcatttac

SEQ ID NO: 141520 - DNA, 394 bp, Arabidopsis thaliana
cgcgtccacccacgcgtccggaagaatgtctcacaggaagtttgagcacccaagacatggttctcttggtttccttccaaggaagagagctaaccgtcacagaggaaaggtgaaggcgttccctaaggatgaccaaaccaagccttgcaagttcacagctttcatgggttacaaagctggtatgactcacattgtcagagaagtggagaaacctggatccaagcttcacaagaaggagacatgtgaggctgttaccatcattgagacacctgctatggtggttgttggagttgttgcctatgtgaagactcctagaggtttgaggtctttgaacactgtctgggcacagcatttgagtgaggaggtcaggagaaggttctacaagaactgggct

SEQ ID NO: 141521 - DNA, 372 bp, Arabidopsis thaliana
aacgacggtcctccttctcccggagaaaacgtttcaagccctatcgaaaacacatactcttcccccggcggaattcaacgtcgccggcgaggaagatcctctactcccacgcaattcgcaactcctccaccaccgccttcacgtctcgcatcatccaattccactcctccaacatctcgtccttccgccgccagatctaaaggaagaaatggacacggaggtggcggtggtggcggtggtggcggagaccaaggacgccaatgtccactgacgagccactgccttcttccgatgacggtgaagaagacggaggcgacgatactactccgactttcgtttggggaactaacatcagtgtgcaagatgttaaat

SEQ ID NO: 141522 - DNA, 262 bp, Arabidopsis thaliana
agggaaggtattcctccggaccagcagcgtctcatcttcgctggaaagcagcttgaggatggacgtactttggccgactacaacatccagaaggagtctactcttcacttggtcctgcgtcttcgtggtggtttctaaatctcgtctctgttatgcttaagaagttcaatgtttcgtttcatgtaaaactttggtggtttgtgttttggggccttgtataatccctgatgaataagtgttctactatgtttccgttcctgtt

SEQ ID NO: 141523 - DNA, 470 bp, Arabidopsis thaliana
ataaaaatggctcgagtctcttctcttctttctttctccttatcacttttgatccttttccatggctacgcggctcaacagggtcagcagggtcagcagtttccgaacgagtgccagctcgaccagctcaatgcgctcgagccttcacacgtactgaagagcgaggctggtcgcatcgaggtgtgggaccaccacgctcctcagctccgttgctcaagtgtctcctttgcacgttacatcatcgagtctaagggtctctacttgccctctttctttaacaccgcgaagctctccttcgtggctaaaggacgaggtcttatgggaaaagtgatccctggatgcgccgaaacattccaagactcatcagagttccaaccacgcttcgaaggtcaaggtcaaagccagaggttccgtgacatgcaccagaaagtggagcacattaggagcggtgataccattgccacaacacc

SEQ ID NO: 141524 - DNA, 477 bp, Arabidopsis thaliana
gaggtccctggatgtgccgagaccttcatggactcgcagccgatgcaaggacaacaacaaggccaaccatggcaaggacgacagggacaacaaggccaaccatgggaaggacagggacaacagggacaacaaggaagacaaggccaaccatgggaaggacagggacaacagggacaacaaggacgacagggacaacaaggccaaccatgggaaggacagggacagcagggacaacaagggttccgtgacatgcaccagaaggtggaacatgtgagacgcggagacgtctttgccaacactccaggctctgcccactggatctacaactcaggagaacagccacttgtcatcatcgctcttctcgacatcgccaactaccaaaaccaactcgaccgcaaccctagagtgttccatttggccggaaacaaccagcagggaggctttggcggttcacagcaacaacaagaacagaaaaac

SEQ ID NO: 141525 - DNA, 319 bp, Arabidopsis thaliana
agaaaacatacacaaatagcaaaacatggctaacaagctcttcctcgtctgcgcaactctcgccctctgcttgctcctcaccaacgcttccatctaccgcaccgttgtcgaattcgaagaagatgacgccagcaaccccgtaggtccaagacagagatgccagaaggagtttcagcaatcacaacacctaagagcttgccagagatggatgagcaagcaaatgaggcaaggacgtggtggtggtccttccctcgacgatgagttcgatttcgagggccccccagcaggggttaccagctactccagcagtgctgcaacg

SEQ ID NO: 141526 - DNA, 496 bp, Arabidopsis thaliana
gagacacccacgtagcccacagggcaacggccttgaggagactatctgcagcatgaggtcccacgagaacattgacgaccctgctcgtgctgacgtgtacaagcccagcctaggtcgcgtgaccagcgtcaacagctataccttgcccatcttggagtatgtcaggctcagtgccactcgtggcgttctccagggtaatgcgatggtgcttcctaaatacaacatgaacgctaacgagatcttgtactgcactggaggacaaggaaggatccaagtggtcaacgacaacggacagaacgtgttggaccaacaggtgcagaagggacagctcgtggtcatcccacaagggttcgcatacgttgtccagtcccacggaaacaagttcgagtggatctctttcaaaactaatgaaaacgcaatgatcagcactttggcgggtagaacctcgctcttgagggcattgccattagaggtcatatcaaatgggtttcagatc

SEQ ID NO: 141527 - DNA, 475 bp, Arabidopsis thaliana
ttaactatttctttattttccgatcgcctggaagggacaaaagaaacatcttgttctttcttcaacaatttctgatccctagtggacctctcagtaggattcgaacccagatgaagttctgaccatctgtcagagaaaaaagaacgaatggctcttgtaggattcccaagaaattcttcgctttcttccggaagcagatgattattcattcgcttctcacgttccgtgaatagccggggcattgaggaatagccagaaaggtatttagggaatcggtctgattctatctctcttccttccgtttgaataaaggaaggatccaaaagaatcgatctttcttttagttagtgaatctctctttgattgatcaatgtgtgatagtgatattccgaatcctcattactaatggaatcgaaaggatctatgaatagatcagaagatccgttcaattggctagaatccgttacttgaacga

SEQ ID NO: 141528 - DNA, 480 bp, Arabidopsis thaliana
  unsure (1)..(480): unsure at all n locations
cacaaagtagaagaagaagaagaagaagatggatgatttggcattatgtgaagcaaacaatgttgctctaacccccatgacgttcttgaagagagcttcagagtgttatccaaatcgaacttcaataatctacggaaaaactcgtttcacttggcctcagacctatgaccgttgttgtcgtctagccgcttctctaatctctcttaacatctccaagaacgatgtggtatcagttatggctccaaacacacccgccttgtatgaaatgcactttgccgttcccatggctggagctgtacttaaccctatcaacactcgtctagacgcaacatccattgccgcaatcctccgccacgccaagcccaagatcttattcctagaccgcagttttgaggccttggctagagaaagcctccatttattatcatctgaagactcaaacctaaacttgccggtcatatntatccacgagaaccattt

SEQ ID NO: 141529 - DNA, 470 bp, Arabidopsis thaliana
ggccacctctaagacagccctacgagagcgaggagtggagacacccacgtagcccacagggcaacggccttgaggagactatctgcagcatgaggtcccacgagaacattgacgaccctgctcgtgctgacgtgtacaagcccagcctaggtcgcgtgaccagcgtcaacagctataccttgcccatcttggagtatgtcaggctcagtgccactcgtggcgttctccagggtaatgcgatggtgcttcctaaatacaacatgaacgcttacgagatcttgtactgcactggaggacaaggaaggatccaagtggtcaacgacaacggacagaacgtgttggaccaacaggtgcagaagggacagctcgtggtcatcccacaagggttcggaatacgttgtccagtcccacggaaacaagttcgagtggattcttttcaaaactaatgaaaacgcaatgatcagcacttt

SEQ ID NO: 141530 - DNA, 497 bp, Arabidopsis thaliana
  unsure (1)..(497): unsure at all n locations
cgcagntttttgtctagctcaccataatcaataccatatttctcctagatatgccaaatgtttttagtccccaacgaagaaacgtcatagcaatcatttcttcatcccatctatgctaatctaatcagacttccaattcttaaattaatctctgctttcaattcttcaatttctagaagattcaatcgcttctcttcttctctttagtcaccaatgannatttcaattcttcttaccaatctcanctttcaatagacagttttcttctcttcttcttcctccggtgacccctatggtttcacgagaggctagtttctcttgaagagatgttcaagattcttagagctccttattagccattttcgtctttgtcgcaatacatgccttgcgtcagaagaaataccaaggtcttcccgtgtggccagttcttgggatgcttccttctctagcttttggcctcagaggaaacatatacgagtggctatccgatgttctct

SEQ ID NO: 141531 - DNA, 469 bp, Arabidopsis thaliana
agaaaatggttaagctcagcaatctcctcgttgcaaccttcggggttctcctcgtccttaacggctgccttgcgaggcagtcacttggggttcctcctcagctacagaacgagtgtaacctcgacaacctagatgttctccaagccaccgaaactatcaagagtgaagccggtcagatcgagtactgggaccacaaccaccctcagctccgatgtgttggtgtttccgttgctcgttatgtaattgaacaaggcggtctttacttgcccaccttcttcacttccccaaaaatttcctacgtcgttcaaggaacgggtatcagcggaagagtggtccctggatgtgccgagaccttcatggactcgcagccgatgcaaggacaacaacaaggccaaccatggcaaggacgacagggacaacaaggccaaccatgggtaggacagggtcaacagggtcaacaaggaagaca

SEQ ID NO: 141532 - DNA, 496 bp, Arabidopsis thaliana
gcgtccgaaaagttccattctttttcacaaagccattgagctgttttctccatttggatcaaaatggttgctgagaacaataaaaacaaggacgtaacactctctgcatcaatggacaacaacaacaacaacatcaaaggaactaacattcatcttgaggttcatcaaaaggaaccagctttggtcaaacctgaatccgagacacgaaagggcctttacttcttgtcgaatcttgaccagaacatcgccgtgattgttcgtacaatctactgtttcaaatccgaggagagagggaacgaggaagcagtccaagtgatcaagaaagctctgagtcaagttcttgttcattactatcctctcgctggacgcctcaccatcagtcctgaaggtaaactcacagttgactgtaccgaagaaggagttgtgtttgtggaagcagaagcaaactgtaaaatggatgagaatggtgacattaccaaacccgatcctgaaactc

SEQ ID NO: 141533 - DNA, 501 bp, Arabidopsis thaliana
tggactcgcagccgatgcaaggacaacaacaaggccaaccatggcaaggacgacagggacaacaaggccaaccatgggaaggacagggacaacagggacaacaaggaagacaaggccaaccatgggaaggacagggacaacagggacaacaaggacgacagggacaacaaggccaaccatgggaaggacagggacagcagggacaacaagggttccgtgacatgcaccagaaggtggaacatgtgagacgcggagacgtctttgccaacactccaggctctgcccactggatctacaactcaagagaacagccacttgtcatcatcgctcttctcgacatcgccaactaccaaaaccaactcgaccgcaaccctagagtgttccatttggccggaaacaaccagcagggaggctttggcggttcacagcaacaacaagaacagaaaaacttgtggagcgggttcgacgcacaggtcatagctcaagcattgaaaattgacg

SEQ ID NO: 141534 - DNA, 537 bp, Arabidopsis thaliana
  unsure (1)..(537): unsure at all n locations
cacaaacgagtaagaatacaaatacaaatagcaaaaaaaatggctaacaagctcttcctcgtctgcgcaactttcgccctctgcttcctcctcaccaacgcttccatctaccgcactgttgtcgagttcgacgaagatgacgccagcaaccccatgggcccaagacagaaatgtcagaaggagtttcagcaatcacagcacctaagagcttgccagaaattgatgcgcatgcaaatgaggcaaggccgtggtggtggtccctccctcgacgatgagttcgatttggaagacgacatcgagaacccacaaggcccccagcagggacaccagatcctccagcagtgctgcagcgagcttcgccaggaagagccagtttgtgtttgccccaccttgagacaagctgccagggccgttagcctccagggacaacacggaccattccaatccaggaaaatttacaagacagctaagtacttgcctaacatttgcaagatccagcaagttggtgaatgccccttncagaccaccatccctttt

SEQ ID NO: 141535 - DNA, 524 bp, Arabidopsis thaliana
aagaaaacatacacaaatagcaaaacatggctaacaagctcttcctcgtctgcgcaactctcgccctctgcttcctcctcaccaacgcttccatctaccgcaccgttgtcgaattcgaagaagatgacgccagcaaccccgtaggtccaagacagagatgccagaaggagtttcagcaatcacaacacctaagagcttgccagagatggatgagcaagcaaatgaggcaaggacgtggtggtggtccttccctcgacgatgagttcgatttcgagggcccccagcagggataccagctactccagcagtgctgcaacgagcttcgccaggaagagccagtttgcgtttgccccaccttgaaacaagctgccagggcagttagcctccaaggacagcacggaccattccaatccaggaaaatttaccagtcagctaagtacttgcctaacatttgcaagatccagcaagttggtgaatgtcccttccagaccaccattcctttcttcccttcctactactagagt

SEQ ID NO: 141536 - DNA, 480 bp, Arabidopsis thaliana
  unsure (1)..(480): unsure at all n locations
aacaagaaaacatacacaaatagcaaaacatggctaacaagctcttcctcgtctgcgcaactctcgccctctgcttcctcctcaccaacgcttccatctaccgcaccgttgtcgaattcgaagaagatgacgccagcaaccccgtaggtccaagacagagatgccagaaggagtttcagcaatcacaacacctaagagcttgccagagatggatgagcaagcaaatgaggcaaggacgtggtggtggtccttccctcgacgatgagttcgatttcgagggcccccagcagggataccagctactccagcagtgctgcaacgagcttcgccaggaagagccagtttgcgtttgccccaccttgaaacaagctgccagggcagttagcctccagggacagcacggaccattccaatccaggaaaatttaccagtcagctaagtactngcctaacatttgcaagatccagcaagttggtgaat

SEQ ID NO: 141537 - DNA, 435 bp, Arabidopsis thaliana
acaatttctcattagcttacaatggcggatacacaccgtgtcgaccgtactgatagacactttcaatttcagtcgccctatgaaggcggccgaggtcaaggtcagtatgaaggtgaccgtggttacggtggtggcggttacaagagcatgatgcctgaaagtggcccatctagtacccaagtattgtccctgttgattggagtccctgtcgtcggttcgctacttgccttggctggattacttctagctggttcggtgatcggcttaatggttgctttaccactatttcttctcttcagcccggttatagtcccagcggctctaactatcgggcttgcaatgacaggctttttagactcggagatgttcggtctaaccgggcttagctcaatctcatgggtcatgaactatcttcgtgggacaaggaagactgtg

SEQ ID NO: 141538 - DNA, 476 bp, Arabidopsis thaliana
caaaaagaaaatggttaagctcagcaatctcctcgttgcaaccttcggtgttctcctcgtccttaacggctgccttgcgaggcagtcacttggggttcctcctcagctacagaacgagtgtaacctcgacaacctagatgttctccaagccaccgaaactatcaagagtgaagccggtcagatcgagtactgggaccacaaccaccctcagctccgatgtgttggtgtttccgttgctcgttatgtaattgaacaaggcggtctttacttgcccaccttcttcacttccccaaaaattttcctacgtcgttcaaggaacgggtatcagcggaagagtggtccctggatgtgccgagaccttcatggactcgcagccgatgcaaggacaacaacaaggccaaccatggctaggacgacagggtcaacaaggccaaccatgggaaggtcagtgtcatcagggacatcaaggtagacaa

SEQ ID NO: 141539 - DNA, 299 bp, Arabidopsis thaliana
caaaaagaaaatggttaagctcagcaatctcctcgttgcaaccttcggtgttctcctcgtccttaacggctgcgcttgcgaggcagtcacttggggttcctcctcagctacagaacgagtgtaacctcgacaacctagatgttctccaagccaccgaaactatcaagagtgaagccggtcagatcgagtactgggaccacaaccaccctcagctccgatgtgtaggtgtttccgttgctcgttatgtaattgaacaaggcggtctttacttgcccaccttcttcactctcccaaaaatt

SEQ ID NO: 141540 - DNA, 522 bp, Arabidopsis thaliana
cgaccacgcgtccgaacaaaaagaaaatggttaagctcagcaatctcctcgttgcatctcttctgggttctcctcgtccttaacggctgccttgcgaggcagtcacttggggttcctcctcagctacagaacgagtgtaacctcgacaacctagatgttctccaagccaccgaaactatcaagagtgaagccggtcagatcgagtactgggaccacaaccaccctcagctccgatgtgttggtgtttccgttgctcgttatgtaattgaacaaggcggtctttacttgcccaccttcttcacttccccaaaaatttcctacgtcgttcaaggaacgggtatcagcggaagagtggtccctggatgtgccgagaccttcatggactcgcagccgatgcaaggacatcaacaaggccaaccatgggcaaggacgacagggacatcaaggccaaccatgggaaggacagggacatcagggtcatcaaggaagacatggccaaccatgggaaggacagggtcaaca

SEQ ID NO: 141541 - DNA, 476 bp, Arabidopsis thaliana
ccagaaagtggagcacattaggagcggtgataccattgccacaacacccggtgtagcacagtggttgtacaacgacggacaggaaccacttgtcatcgtcagcgtcttcgatctagccagtcaccagaaccagcttgaccgcaacccaaggccattttacttagccggaaacaacccacaaggtcaagtatggctacaaggccgagagcaacagccacagaagaacattttcaatggatttggacccgaggttattgctcaagctttgaagatcgatcttcagacagcgcagcaacttcagaaccaagatgacatccgtggaaacattgtccgagtccaaggcccgttcggtgtcattaggccgtctttgaggggccagagacctcaggaggaggaagaagaagaagaaggacgacatggacgacacggtaatggcttagaggagaccatctgcagcgccaggtgcaccgattacc

SEQ ID NO: 141542 - DNA, 497 bp, Arabidopsis thaliana
  unsure (1)..(497): unsure at all n locations
gggacagcagggacaacaagggttccgtgacatgcaccagatggtggaacatgtgagacgcggagacgtctttgccaacactccaggctctgcccactggatctacaactcaagagaacagccacttgtcatcatcgctcttctcgacatcgccaactaccaaaaccaactcgaccgcaaccctagagtgttccatttggccggaaacaaccagcagggaggctttggcggttcacagcaacaacaagaacagaaaaacttgtggagcgggttcgacgcacaggtcatagctcaagcattgaaaattgacgttcagttggctcagcagcttcagaaccaacaagacagcagaggaaacatcgttcgtgttaagggacctttccaggtcgtgaggccacctctaagacagncctacgagagcgaggagtggagacacccacgtagcccacagggcaacggccttgaggagactatctgcagcatgaggtcccacgaga

SEQ ID NO: 141543 - DNA, 443 bp, Arabidopsis thaliana
aaaacatacacacatagcaaaaaatggcaaacaagttgttcctcgtctgcgcagctctcgctctctgcttcctcctcaccaacgcttccatctaccgcaccgtcgttgagttcgaagaagatgacgccactaaccccataggcccaaaaatgaggaaatgccgcaaggagtttcagaaagaacaacacctaagagcttgccagcaattgatgctccagcaagcaaggcaaggccgtagcgatgagtttgatttcgaagacgacatggagaacccacagggacaacagcaggaacaacagctattccagcagtgctgcaacgagcttcgccaggaagagccagattgtgtttgccccaccttggaacaagctgccaaggccgttagactccagggacagcaccaaccaatgcaagtcaggaaaatttaccagacagccaagcac

SEQ ID NO: 141544 - DNA, 477 bp, Arabidopsis thaliana
  unsure (1)..(477): unsure at all n locations
caaggccaaccatgggaaggacagggacaacagggacaacaaggaagacaaggccaaccatgggaaggacagggacaacagggacaacaaggacgacagggacaacaaggccaaccatgggaaggacagggacagcagggacaacaagggttccgtgacatgcaccagaaggtggaacatgtgagacgcggagacgtctttgccaacactccaggctctgcccactggatctacaactcaggagaacagccacttgtcatcatcgctcttctcgacatcgccaactaccaaaaccaactcgaccgcaaccctagagtgttccatttggccggaaacaaccagcagggaggctttggcggttcacagcaacaacaagaacagaaaaacctggtggagcgggttcgacgcacaggtcataagctaagcatngaaaaatgacgttcagttggctcagcagcttcagaaccaacaagacag

SEQ ID NO: 141545 - DNA, 463 bp, Arabidopsis thaliana
  unsure (1)..(463): unsure at all n locations
agaaaacatacacaaatagcaaaacatggctaacaagctcttcctcgtctgcgcaactctcgccctctgcttcctcctcaccaacgcttccatctaccgcaccgttgtcgaattcgaagaagatgacgccagcaaccccgtaggtccaagacagagatgccagaaggagtttcagcaatcacaacacctaagagcttgccagagatggatgagcaagcaaatgaggcaaggacgtggtggtggtccttccctcgaccgatgagttcgatttcgagggcccccagcagggataccagctactccagcagtgctgcaacgagcttcgccaggaagagccagtttgcgtttgccccaccttgaaacaagctgccagggcagttagcctccagggacagcacggaccattccaatccaggaaaatntaccagtcagctaagtacttgcctaacatttgcaagatcca

SEQ ID NO: 141546 - DNA, 518 bp, Arabidopsis thaliana
aaaatggttaagctcagcaatctcctcgttgcaaccttcggggttctcctcgtccttaacggctgccttgcgaggcagtcacttggggttcctcctcagctacagaacgagtgtaacctcgacaacctagatgttctccaagccaccgaaactatcaagagtgaagccggtcagatcgagtactgggaccacaaccaccctcagctccgatgtgttggtgtttccgttgctcgttatgtaattgaacaaggcggtctttacttgcccaccttcttcacttccccaaaaatttcctacgtcgttcaaggaacgggtatcagcggaagagtggtccctggatgtgccgagaccttcatggactcgcagccgatgcaaggacaacaacaaggccaaccatggcaaggacgacagggacaacaaggccaaccatgggaaggacagggacatcagggacaacaaggaagacatggccaaccatgggaaggacagggacaacagggacaacaaggacgacaggg

SEQ ID NO: 141547 - DNA, 478 bp, Arabidopsis thaliana
aacaatttctcattagcttacaatggcggatacacaccgtgtcgaccgtactgatagacactttcaatttcagtcgccctatgaaggcggccgaggtcaaggtcagtatgaaggtgaccgtggttacggtggtggcggttacaagagcatgatgcctgaaagtggcccatctagtacccaagtattgtccctgttgattggagtccctgtcgtcggttcgctacttgccttggctggattacttctagctggttcggtgatcggcttaatggttgctttaccactatttctcctcttcagcccggttatagtcccagcggctctaactatcgggcttgcaatgacaggctttttagcctcggggatgttcggtctaaccgggcttagctcaatctcatgggtcatgaactatcttcgtgggacaaggaggactgtgcctgagcaattggagttgcttagaggagaatggctgatgcgt

SEQ ID NO: 141548 - DNA, 524 bp, Arabidopsis thaliana
aaacaaaaagaaaatggttaagctcagcaatctcctcgttgcaaccttcggggttctcctcgtccttaacggctgccttgcgaggcagtcacttggggttcctcctcagctacagaacgagtgtaacctcgacaacctagatgttctccaagccaccgaaactatcaagagtgaagccggtcagatcgagtactgggaccacaaccaccctcagctccgatgtgttggtgtttccgttgctcgttatgtaattgaacaaggcggtctttacttgcccaccttcttcacttccccaaaaatttcctacgtcgttcaaggaacgggtatcagcggaagagtggtccctggatgtgccgagaccttcatggactcgcagccgatgcaaggacaacaacaaggccaaccatggcaaggacgacagggacatcaaggccaaccatgggaaggacagggacaacagggacaacaaggaagacatggccaaccatgggaaggacagggacaacagggacatcaaggacgac

SEQ ID NO: 141549 - DNA, 522 bp, Arabidopsis thaliana
  unsure (1)..(522): unsure at all n locations
tacacacatagcaaaaaatggcaaacaagttgttcctcgtctgcgcagctctcgctctctgcttcctcctcaccaacgcttccatctaccgcaccgtcgttgagttcgaagaagatgacgccactaaccccataggcccaaaaatgaggaaatgccgcaaggagtttcagaaagaacaacacctaagagcttgccagcaattgatgctccagcaagcaaggcaaggccgtagcgatgagtttgatttcgaagacgacatggagaacccacagggacaacagcaggaacaacagctattccagcagtgctgcaacgagcttcgccaggaagagccagattgtgtttgccccaccttgaaacaagctgccaaggccgttagactccagggacagcaccaaccaatgcaagtcaggaaaatntaccagacagccaagcacttgcccaacgtttgcgacatccccgaaagttgatgtttgtcccttcaacatcccttcattcccttctttctactaaatctcaaac

SEQ ID NO: 141550 - DNA, 434 bp, Arabidopsis thaliana
aacaaacaaaaagaaaatggttaagctcagcaatctcctcgttgcaaccttcggggttctcctcgtccttaacggctgccttgcgaggcagtcacttggggttcctcctcagctacagaacgagtgtaacctcgacaacctagatgttctccaagccaccgaaactatcaagagtgaagccggtcagatcgagtactgggaccacaaccaccctcagctccgatgtgttggtgtttccgttgctcgttatgtaattgaacaaggcggtctttacttgcccaccttcttcactttcccaaaaatttcctacgtcgttcaaagaacgggtatcagcggaagagtggtccctggatgtgccgagaccttcatggactcgcaagccgttgccagggcatcatcaaggcccaccatggcaaggtcgacagggacaacaa

SEQ ID NO: 141551 - DNA, 532 bp, Arabidopsis thaliana
cccacgcgtccggttctttcttcttaatcacagctcagcctgacgcaaccgctcaggctgatctcttccaatttacagccatttccagctcagatctctgatccggtgagatctctctcaaggaaaaggagttagagcatcatcaagatgaaggcactcattcttgttggaggcttcggcactcgcttgagaccattgactctcagtttcccaaagccccttgttgattttgctaataaacccatgatccttcatcagatagaggctcttaaggcagttggagttgatgaagtggttttggccatcaattatcagccaagaggtgatgctgaacttcttgaaggactttgagaccaagctggaaatcaaaatcacttgctcacaagagaccgagccactaggtaccgctggtcctctggctctagcgagagacaaattgcttgatggatctggagagcccttctttgttcttaacagtgatgtgattagtgagtaccctcctaaagaaatgctatgagttcacatatctcac

SEQ ID NO: 141552 - DNA, 530 bp, Arabidopsis thaliana
caaaaagaaaatggttaagctcagcaatctcctcgttgcaaccttcggggttctcctcgtccttaacggctgccttgcgaggcagtcacttggggttcctcctcagctacagaacgagtgtaacctcgacaacctagatgttctccaagccaccgaaactatcaagagtgaagccggtcagatcgagtactgggaccacaaccaccctcagctccgatgtgttggtgtttccgttgctcgttatgtaattgaacaaggcggtctttacttgcccaccttcttcacttccccaaaaatttcctacgtcgttcaaggaacgggtatcagcggaagagtggtccctggatgtgccgagaccttcatggactcgcagccgatgcaaggacaacaacaaggccaaccatggcaaggacgacagggacaacaaggccaaccatgggaaggacagggacaacagggacaacaaggaagacatggccaaccatgggaaggacagggacaacagggacaacaaggacgacagggacaac

SEQ ID NO: 141553 - DNA, 506 bp, Arabidopsis thaliana
aacaaaaagaaaatggttaagctcagcaatctcctcgttgcaaccttcggggttctcctcgtccttaacggctgccttgcgaggcagtcacttggggttcctcctcagctacagaacgagtgtaacctcgacaacctagatgttctccaagccaccgaaactatcaagagtgaagccggtcagatcgagtactgggaccacaaccaccctcagctccgatgtgttggtgtttccgttgctcgttatgtaattgaacaaggcggtctttacttgcccaccttcttcacttccccaaaaatttcctacgtcgttcaaggaacgggtatcagcggaagagtggtccctggatgtgccgagaccttcatggactcgcagccgatgcaaggacaacaacaaggccaaccatggcatggacgacagggacaacaaggccaaccatgggaaggacagggacaacagggacaacaaggaagacaaggccaaccatgggaaggacagggacaaca

SEQ ID NO: 141554 - DNA, 510 bp, Arabidopsis thaliana
cagcaatctcctcgttgcaaccttcggggttctcctcgtccttaacggctgccttgcgaggcagtcacttggggttcctcctcagctacagaacgagtgtaacctcgacaacctagatgttctccaagccaccgaaactatcaagagtgaagccggtcagatcgagtactgggaccacaaccaccctcagctccgatgtgttggtgtttccgttgctcgttatgtaattgaacaaggcggtctttacttgcccaccttcttcacttccccaaaaatttcctacgtcgttcaaggaacgggtatcagcggaagagtggtccctggatgtgccgagaccttcatggactcgcagccgatgcaaggacaacaacaaggccaaccatggcaaggacgacagggacaacaaggccaaccatgggaaggacagggacaacagggacaacaaggaagacaaggccaaccatgggaaggacagggacaacagggacaacaaggacgacagggacaaca

SEQ ID NO: 141555 - DNA, 514 bp, Arabidopsis thaliana
  unsure (1)..(514): unsure at all n locations
cagggcaacggccttgaggagactatctgcagcatgaggtcccacgagaacattgacgaccctgctcgtgctgacgtgtacaagcccagcctaggtcgcgtgaccagcgtcaacagctataccttgcccatcttggagtatgtcaggctcagtgccactcgtggcgttctccagggtaatgcgatggtgcttcctaaatacaacatgaacgctaacgagatcttgtactgcactggaggacaaggaaggatccaagtggtcaacgacaacggacagaacgtgttggaccaacaggtgcagaagggacagctcgtggtcatcccacaagggttcgcatacgttgtccagtcccacggaaacaagttcgagtggatctctntcaaaactaatgaaaacgcaatgatcagcactttggcgggtagaacctcgctctagagggcatngccattagaggtcatatcaaatggtttccagatctcctccgaggaagctaggaagatcaaagtcaacacac

SEQ ID NO: 141556 - DNA, 476 bp, Arabidopsis thaliana
aaaacatacacaagtaattaactaacaacaaatggcgaacaagctcttcctcgtctgcgcagctctcgccctgtgtttcatcctcaccaacgcttccgtctatcgcacggttgtcgagttcgacgaagatgacgccagtaaccccataggcccaatacagaaatgtcagaaggagtttcagcaagaacagcacctaagagcttgccagagatggatgcgcaagcaaatgtggcaaggacgtggtggtggtccttccctcgacgatgagttcgatatggaagacgacatcgagaacccgcagagacgacagctactccagaagtgctgcagcgagcttcgccaagaagagccagtttgcgtttgccccaccttgagacaagctgccaaggccgttagattccagggacagcaacaccaaccagagcaagtcaggaaaatttaccaggcagctaagtacttgcctaacatttgcaaaa

SEQ ID NO: 141557 - DNA, 521 bp, Arabidopsis thaliana
gcagggaggctttggcggttcacagcaacaacaagaacagaaaaacttgtggagcgggttcgacgcacaggtcatagctcaagcattgaaaattgacgttcagttggctcagcagcttcagaaccaacaagacagcagaggaaacatcgttcgtgttaagggacctttccaggtcgtgaggccacctctaagacagccctacgagagcgaggagtggagacacccacgtagcccacagggcaacggccttgaggagactatctgcagcatgaggtccccacgagaacattgacgaccctgctcgtgctgacgtgtacaagcccagcctaggtcgcgtgaccagcgtcaacagctataccttgcccatcttggagtatgtcaggctcagtgccactcgtggcgttctccagggtaatgcgatggtgcttcctaaatacaacatgaacgctaacgagatcttgtactgcactggaggacaaggaaggatccaagtggtcaacgacaacggacagaacgtgttg

SEQ ID NO: 141558 - DNA, 474 bp, Arabidopsis thaliana
caaaaagaaaatggttaagctcagcaatctcctcgttgcaaccttcggggttctcctcgtccttaacggctgccttgcgaggcagtcacttggggttcctcctcagctacagaacgagtgtaacctcgacaacctagatgttctccaagccaccgaaactatcaagagtgaagccggtcagatcgagtactgggaccacaaccaccctcagctccgatgtgttggtgtttccgttgctcgttatgtaattgaacaaggcggtctttacttgcccaccttcttcacttccccaaaaatttcctacgtcgttcaaggaacgggtatcagcggaagagtggtccctggatgtgccgagaccttcatggactcgcagccgatgcaaggacaacaacaaggccaaccatggcaaggacgacagggacaacaaggccaaccatgggaaggacagggacatcagggacaacaaggaagaca

SEQ ID NO: 141559 - DNA, 284 bp, Arabidopsis thaliana
gttataaccaatgggttccaaatctcacctgaagaagcaaggagggtcaagttcaacacgctcgagaccactttgactcacagcagtggcccagctagctacggaaggccaagggtggctgcagcttaagagcttaaaaccgcggctcaacaatgaacctctagtactgtaaaaggaagttaaatagtacgaagtaataataataatgtacgaacatgtgacaagttttgttgaggtttacctgtaaaatgccactccttttctgaataaatcttttttcgatc

SEQ ID NO: 141560 - DNA, 497 bp, Arabidopsis thaliana
aaaatgggtcgagtctcatctattatctctttctctttgacactcttgatcctcttcaatggctacactgcccaacagtggcccaacgagtgccagctcgatcaactcaatgcgctcgaaccatcccaaatcatcaagagcgagggtggtcgcatcgaggtctgggaccaccatgcaccccagctccgttgctccggctttgcctttgagcgtttcgtcattgagcctcaaggtcttttcttgcccactttcttgaacgccggcaaactcacgtttgttgttcacggaaggggtctaatgggaagagttattccgggatgcgccgagacgttcatggagtcaccggtatttggagaaggtcaaggtcagggtcagagtcaagggttccgtgacatgcaccagaaagtagagcacctacggtgcggtgacaccattgcaacaccatctggtgtagctcaatggttctacaacaatggaaatgagcctctcattcttgt

SEQ ID NO: 141561 - DNA, 240 bp, Arabidopsis thaliana
atcaagttcaacacacttgagaccactttgacccgcgctgccggtaggcaacaacaacagttgatcgaggagattgtcgaggcttaaatcaaaacgtttttctttttcttaataaagtatggtcagtttgtaatcacgtccctttacctttaacgtacgtgtaaaatatgtgtctgcggcacctcacttgtaataacactttcttctcataaataaaagggaagtttcgagttacatact

SEQ ID NO: 141562 - DNA, 472 bp, Arabidopsis thaliana
  unsure (1)..(472): unsure at all n locations
cggacgcgtgggttgtgcaccatgcgatgcactgaaaacctcgatgacccgtcggatgctgacgtgtacaagccatgactcggatacattagcacacttaacagctacaatcttcctatcctcagacttctccgccttagcgctcttcgtggctccatccgtaaaaacgctatggtgctaccgcaatggaacgtaaacgcaaacgcggcactctacgtgacaaacggaaaggctcatatacaaatggtgaacgacaacggagaaagagtgttcgaccaagagatctccagcggacagttactagtcgtgccaacaagcttntcggtcatgaaacatgccataggcgaacagttcgagtggatcgaattcaagaccaaacgaaaacgcacaggtcaacacacctcgggggccgtacctcagtcatgagaggtttgccgcttgaggtataaccaatgggtacagatctcttccg

SEQ ID NO: 141563 - DNA, 507 bp, Arabidopsis thaliana
  unsure (1)..(507): unsure at all n locations
aatggctcgagtctcttctcttctttctttctccttaacacttttgatccttttccatggctacgcggctcaacagggtcagcagggtcagcagtttccgaacgagtgccagctcgaccagctcaatgcgctcgagccttcacacgtactgaagagcgaggctggtcgcatcgaggtgtgggaccaccacgctcctcagctccgttgctcaagtgtctcctttgcaccttacatcatcgagtctaagggtctctacttgccctctttctttaacaccgcgaagctctccttcgtggctaaaggacgaggtcttatggggaaaagtgatccctggatgcgccgaaacattccaagactcatcagagttccaaccacgcttcgaaggtcaaggtcaaagccagaggttccgtgacatgcaccagaaagtggagcacatttggagcggtgataccatngccacaacacccggtgtagcccagtggttttacaacgacggacagcaaccac

SEQ ID NO: 141564 - DNA, 418 bp, Arabidopsis thaliana
cgaggtcttatgggaaaagtgatccctggatgcgcctaaacattccaagactcatcagagttccaaccacgcttcgaaggtcaaggtcaaagccagaggttccgtgacatgcaccagaaagtggagcacattaggagcggtgataccattgccacaacacccggtgtagcccagtggttctacaacgactgacagcaaccacttgtcatcgtcagcatcttcgatctagccagtcaccagaaccagcttgaccgcaacccaaggccattttacttaaccggaaacaacccacatggtcaagtatggctacaaggacgagagcaacagccacagaagaacatcttcaatggatttggacccgaggttattgctcaagctttgaagattgatcttcaaacagcgcagcaacttcagaacc

SEQ ID NO: 141565 - DNA, 525 bp, Arabidopsis thaliana
gaaccaacaagacagcagaggaaacatcgttcgtgttaagggacctttccaggtcgtgaggccacctctaagacagccctacgagagcgaggagtggagacacccacgtagcccacagggcaacggccttgaggagactatctgcagcatgaggtcccacgagaacattgacgaccctgctcgtgctgacgtgtacaagcccagcctaggtcgcgtgaccagcgtcaacagctataccttgcccatcttggagtatgtcaggctcagtgccactcgtggcgttctccagggtaatgcgatggtgcttcctaaatacaacatgaacgcttacgagatcttgtactgcactggaggacaaggaaggatccaagtggtcaacgacaacggacagaacgtgttggaccaacaggtgcagaagggacagctcgtggtcatcccacaagggttcgcatacgttgtccagtcccacggaaacaagttcgagtggatctctttcaaaacttatgaaaacgcaatgatcagcac

SEQ ID NO: 141566 - DNA, 502 bp, Arabidopsis thaliana
  unsure (1)..(502): unsure at all n locations
caataaagaggaagaaaaatgggtcgagtctcatctattatctctttctctttgacactcttgatcctctggaatggctacactgcccaacagtggcccaacgagtgccagctcgatcaactcaatgcgctcgaaccatcccaaatcatcaagagcgagggtggtcgcatcgaggtctgggaccaccatgcaccccagctccgttgctccggctttgcctttgagcgtttcgtcattgagcctcagggtcttttcttgcccactttcttgaacgccggcaaactcacgtttgttgttcacggaaggggtctaatgggaagagttattccgggatgcgccgagacgttcatggagtcaccggtatntggagaaggtcaaggtcagggtcagagtcaagaggtccgtgacatgcaccagaaagtagagcacctacggtgcggtgcaccatngcaacaccatctgggtagctcaatggtctacaacaatggaatgagctctcatc

SEQ ID NO: 141567 - DNA, 474 bp, Arabidopsis thaliana
caaaaagaaaatggttaagctcagcaatctcctcgttgcaaccttcggggttctcctcgtccttaacggctgccttgcgaggcagtcacttggggttcctcctcagctacagaacgagtgtaacctcgacaacctagatgttctccaagccaccgaaactatcaagagtgaagccggtcagatcgagtactgggaccacaaccaccctcagctccgatgtgttggtgtttccgttgctcgttatgtaattgaacaaggcggtctttacttgcccaccttcttcacttccccaaaaatttcctacgtcgttcaaggaacgggtatcagcggaagagtggtccctggatgtgccgagaccttcatggactcgcagccgatgcaaggacaacaaccagggccacccttggcaaggacgacagggacaacaaggccaaccatgggtaggacagggacaacagggtcaacaaggaagac

SEQ ID NO: 141568 - DNA, 528 bp, Arabidopsis thaliana
aacaaacaaaaagaaaatggttaagctcagcaatctcctcgttgcaaccttcggggttctcctcgtccttaacggctgccttgcgaggcagtcacttggggttcctcctcagctacagaacgagtgtaacctcgacaacctagatgttctccaagccaccgaaactatcaagagtgaagccggtcagatcgagtactgggaccacaaccaccctcagctccgatgtgttggtgtttccgttgctcgttatgtaattgaacaaggcggtctttacttgcccaccttcttcacttccccaaaaatttcctacgtcgttcaaggaacgggtatcagcggaagagtggtccctggatgtgccgagaccttcatggactcgcagccgatgcaaggacaacaacaaggccaaccatggcaaggacgacagggacaacaaggccaaccatgggaaggacagggacaacagggacaacaaggaagacaaggccaaccatgggaaggacagggacaacagggacaacaaggacgaca

SEQ ID NO: 141569 - DNA, 409 bp, Arabidopsis thaliana
gcaatctcctcgttgcaaccttcggggttctcctcgtccttaacggctgccttgcgaggcagtcacttggggttcctcctcagctacagaacgagtgtaacctcgacaacctagatgttctccaagccaccgaaactatcaagagtgaagccggtcagatcgagtactgggaccacaaccaccctcagctccgatgtgttggtgtttccgttgctcgttatgtaattgaacaaggcggtctttacttgcccaccttcttcacttccccaaaaatttcctacgtcgttcaaggaacgggtatcagcggaagagtggtccctggatgtgccgagaccttcatggactcgcagccgatgcaaggacaacaacaaggccaaccatggcaaggacgacagggaccacaagggcc

SEQ ID NO: 141570 - DNA, 535 bp, Arabidopsis thaliana
cgctcttctcgacatcgccaactaccaaaaccaactcgaccgcaaccctagagtgttccatttggccggaaacaaccagcagggaggctttggcggttcacagcaacaacaagaacagaaaaacttgtggagcgggttcgacgcacaggtcatagctcaagcattgaaaattgacgttcagttggctcagcagcttcagaaccaacaagacagcagaggaaacatcgttcgtgttaagggacctttccaggtcgtgaggccacctctaagacagccctacgagagcgaggagtggagacacccacgtagcccacagggcaacggccttgaggagactatctgcagcatgaggtcccacgagaacattgacgaccctgctcgtgctgacgtgtacaagcccagcctaggtcgcgtgaccagcgtcaacagctataccttgcccatcttggagtatgtcaggctcagtgccactcgtggcgttctccagggtaatgcgatggtgcttcctaaatacaacatgaacgcttacgagatc

SEQ ID NO: 141571 - DNA, 525 bp, Arabidopsis thaliana
aaacatacacacatagcaaaaaatggcaaacaagttgttcctcgtctgcgcagctctcgctctctgcttcctcctcaccaacgcttccatctaccgcaccgtcgttgagttcgaagaagatgacgccactaaccccataggcccaaaaatgaggaaatgccgcaaggagtttcagaaagaacaacacctaagagcttgccagcaattgatgctccagcaagcaaggcaaggccgtagcgatgagtttgatttcgaagacgacatggagaacccacagggacaacagcaggaacaacagctattccagcagtgctgcaacgagcttcgccaggaagagccagattgtgtttgccccaccttgaaacaagctgccaaggccgttagactccagggacagcaccaaccaatgcaagtcaggaaaatttaccagacagccaagcacttgcccaacgtttgcgacatcccgcaaagtgatgttagcccttcaacatcccttcattcccttctttctactaaatctcaaac

SEQ ID NO: 141572 - DNA, 505 bp, Arabidopsis thaliana
tttaggaggtcctatggatttcggaagatcgaaatcgaagtttcaggaagtgcctgaaaccggtgtgacatttggagatgttgctggagctgatcaagctaagcttgagttacaagaagttgctgatttcttgaagaatcctgataagtatactgcgttaggtgctaagattcctaaaggttgtttgttggttgtgtcaccgattacggggaagacgcttttgtcttgagctttggctggagtatcttgagtactctacttttatatactagatttcacattttgaagagcttctttttttttcttattgcttctatcttcttattttgtattttatggttgtttttatctctattttatatctatgtttattggttcgtttgattttatgtttactatttatactatgcttttttatttaattttatttactttatttacttattttttttatatccagccattcttgtgtttttggcttttcaatttattttagtttatttat

SEQ ID NO: 141573 - DNA, 521 bp, Arabidopsis thaliana
cacaaagcaaaacacttacttagaaagtccagaaacatccattaacacatatggctaaagacgtggaaggacctgatggatttcagacgagagattacgaagatcctccgccaacaccgtttttcgacgcagaggagcttaccaagtggtctttatacagagcagtcatcgccgagttcgtagccactctcctcttcttgtacgtcaccgttttaactgtcattggttacaagattcagtccgacacaaaagccggtggagttgactgcggcggcgtcggaatccttggcatcgcgtgggcttttggtggcatgatcttcatccttgtctactgcaccgccggtatctcaggtggtcacataaaccctgcggtgacgtttggtttgttcttagcccggaaggtatcgctgatttagggcggtgctttacatggtgactcagtgtttgggtgctatttgtgagagtggagttgagaagagcatttaaagctctcactatgttaattacgggggaggagccaa

SEQ ID NO: 141574 - DNA, 489 bp, Arabidopsis thaliana
agcaagataaccgtggcaacatcgtcaaggtcaacggacctttcggcgtcattaggccacccttgagacgcggcgaaggcggccaacaaccacatgaaatagctaatggtttagaggagactttgtgcaccatgcgatgcactgaaaacctcgatgacccgtcggatgctgacgtgtacaagccatcactcggatacattagcacacttaacagctacaatcttcctatcctcagacttctccgccttagcgctcttcgtggctccatccgtaaaaacgctatggtgctaccgcaatggaacgtaaacgcaaacgcggcactctacgtgacaaacggaaaggctcatatacaaatggtgaacgacaacggagaaagagtgttcgaccaagagatctccagcggacagttactagtcgtgccacaaggcttttcggtcatgaaacatgccataggcgaacagttcgagtggatcgaattcaagacaaacg

SEQ ID NO: 141575 - DNA, 517 bp, Arabidopsis thaliana
aagaaaatggttaagctcagcaatctcctcgttgcaaccttcggggttctcctcgtccttaacggctgccttgcgaggcagtcacttggggttcctcctcagctacagaacgagtgtaacctcgacaacctagatgttctccaagccaccgaaactatcaagagtgaagccggtcagatcgagtactgggaccacaaccaccctcagctccgatgtgttggtgtttccgttgctcgttatgtaattgaacaaggcggtctttacttgcccaccttcttcacttccccaaaaatttcctacgtcgttcaaggaacgggtatcagcggaagagtggtccctggatgtgccgagaccttcatggactcgcagccgatgcaaggacaacaacaaggccaaccatggcaaggacgacagggacaacaaggccaaccatgggaaggacagggacaacagggacaacaaggaagacatggccaaccatgggaaggacagggacaacagggacaacaaggacgac

SEQ ID NO: 141576 - DNA, 401 bp, Arabidopsis thaliana
  unsure (1)..(401): unsure at all n locations
caaaaagaaaatggttaagctcagcaatctcctcgttgcaaccttcggggttctcctcgtccttaacggctgccttgcgaggcagtcacttggggttcctcctcagctacagaacgagtgtaacctcgacaacctagatgttctccaagccaccgaaactatcaagagtgaagccggtcagatcgagtactgggaccacaaccaccctcagctccgatgtgttggtgtttccgttgctcgttatgtaattgaacaaggcggtctttacttgcccaccttcttcacttccccaaaaatttcctacttcgntcaaggtacgggtatcagcggaagagtggtccctggatgtgcctagaccttcatggtctcgcagtcgatgcaaggacatctacaaggccatc

SEQ ID NO: 141577 - DNA, 298 bp, Arabidopsis thaliana
agtggccctacgagtgccagctcgatcaactcaatgcgctcgaaccatcccaaatcatcaagagcgagggtggtcgcatcgaggtctgggaccaccatgcaccccagctccgttgctccggctttgcctttgagcgtttcgtcattgagcctcagggtcttttctagcccactttcttgaacgccggcaaactcacgtttgttgttcacggaaggggtctaatgggaagagttattccgggatgcgccgagacgttcatggagtcaccggtatttggagaaggtcaaggtcagggcca

SEQ ID NO: 141578 - DNA, 457 bp, Arabidopsis thaliana
attattttcactgagcgcataacatttttgagacaagagactctctctctctctcttctctctttctctccccctctctccggcgatggttgttgctatggaccaacgcaccaatgtgaacggagatcccggcgccggagaccggaagaaagaagaaaggtttgatccgagtgcacaaccaccgttcaagatcggagatataagggcggcgattcctaagcactgttgggttaagagtcctttgagatcaatgagttacgtcgtcagagacattatcgccgtcgcggctttggccatcgctgccgtgtatgttgatagctggttcctttggcctctttattgggccgcccaaggaaccacttttctgggccatctttgttctcggccacgactgtggacaatggagtttctcagacattcctctactgaataagtgtggtgggcacattcttcattc

SEQ ID NO: 141579 - DNA, 475 bp, Arabidopsis thaliana
atcaaatcaaagcatccatttttgattcagacttcagagagacagagaaggaagaagaagaagaagaagaagaagaaaaaactatggagaatgagagggaaaagcaggtttacttggctaagctctccgagcaaaccgaaagatacgatgaaatggtggaggcgatgaagaaagttgctcagcttgatgtggagctaactgtggaagagaggaatcttgtatctgtagggtacaagaatgtgattggtgcaaggagagcatcatggagaatactatcttccattgagcagaaggaagagtccaagggaaatgatggaaaatgtcaagaggcctaagaattatcgtaagagagttgaagatgagcttgctaaagtttagaatgacatcttagctagcattgataagcatctcattccatcgtctaacgctggggagtcaactagctttttctacaaaatgaaaggagattactatc

SEQ ID NO: 141580 - DNA, 525 bp, Arabidopsis thaliana
cggacgcgtgggcgaggcagtcacttggggttcctcctcagctacagaacgagtgtaacctcgacaacctagatgttctccaagccaccgaaactatcaagagtgaagccggtcagatcgagtactgggaccacaaccaccctcagctccgatgtgttggtgtttccgttgctcgttatgtaattgaacaaggcggtctttacttgcccaccttcttcacttccccaaaaatttcctacgtcgttcaaggaacgggtatcagcggaagagtggtccctggatgtgccgagaccttcatggactcgcagccgatgcaaggacaacaacaaggccaaccatggcaaggacgtcagggacaacaaggccaaccatgggaaggacagggacaacagggacatcaaggtagacatggccaaccatgggaaggacagggacaacaggtgcaacaaggacgacagggacaacaaggccaaccatgggaaggacagggacagcagggacaacaagggttccgtgacatgcacc

SEQ ID NO: 141581 - DNA, 504 bp, Arabidopsis thaliana; identical to SEQ ID NO: 129950

SEQ ID NO: 141582 - DNA, 493 bp, Arabidopsis thaliana
ggacgacagggacaacaaggccaaccatgggaaggacagggacaacagggacaacaaggaagacaaggccaaccatgggaaggacagggacaacagggacaacaaggacgacagggacaacaaggccaaccatgggaaggacagggacagcagggacaacaagggttccgtgacatgcaccagaaggtggaacatgtgagacgcggagacgtctttgccaacactccaggctctgcccactggatctacaactcaagagaacagccacttgtcatcatcgctcttctcgacatcgccaactaccaaaaccaactcgaccgcaaccctagagtgttccatttggccggaaacaaccagcagggaggctttggcggttcacagcaacaacaagaacagaaaaacttgtggagcgggttcgacgcacaggtcatagctcaagcattgaaaattgacgttcagttggcttaagcagcttcagaaccaacaagacagc

SEQ ID NO: 141583 - DNA, 566 bp, Arabidopsis thaliana
  unsure (1)..(566): unsure at all n locations
cccggaanttcccggtgtcgaccccatcgcagtccgagataatatatagataataacaataatgggcttcgatgtctnncttctcttctttttctttcttcttaaaccacttttagattccttttccataggctatcgcgagctcaacatgggtcaagcatgggtcaagcatgtttccagatacgaagtagccatgctcagaccatagctcatatgtcgcttcgtagccagtcatcatcgtactagaatgagcagagagctggtcgcattcgagagtgtagggatccaccacagctcctcagcttccgttagctcagagtagtctcctttgcacagttacattcatcgaagtctaagagagtctctatcttagccctctnnttctttaacaaccagcgatagctcttctttcgtaggctatagaggacgaagagtcttatgaggataaagtggatccctaggatgccgccgaaaccattccaagactcatcagagttccaaccacgccttcgaaggtcaaggtcaaagccagaggttccggacatgcaccagaaagtgggcacatt

SEQ ID NO: 141584 - DNA, 483 bp, Arabidopsis thaliana
ggttatagctcaagctttgaagatagatcttcagacagcgcagcaacttcagaaccaagatgacaaccgtggaaacattgtccgagtccaaggcccgttcggtgtcattaggccgcctttgaggggccagagacctcaggaggaggaagaagaagaagaaggacgacacggacgacacggtaatggcttagaggagaccatctgcagcgccaggtgcaccgataacctcgatgatccgtctcgtgctgacgtgtacaagccacagctcggttacatcagcactctcaacagttacgatctccccatccttcgcttcatccgtctctcagccctccgtggatctatccgtcaaaacgccaaggtgcttccacagtggaacgcaaacgcgaacgccattctttacgtgacagacggggaagcccaaatccagatcgttaacgacaatggtaacaaagtgtttgacggacaagtctctcaaggaca

SEQ ID NO: 141585 - DNA, 521 bp, Arabidopsis thaliana
  unsure (1)..(521): unsure at all n locations
agaaaacatacacaaatagcaaaacatggctaacaagctcttcctcgtctgcgcaactctcgccctctgcttcctcctcaccaacgcttccatctaccgcaccgttgtcgaattcgaagaagatgacgccagcaaccccgtaggtccaagacagagatgccagaaggagtttcagcaatcacaacacctaagagcttgccagagatggatgagcaagcaaatgaggcaaggacgtggtagtggtccttccctcgacgatgagttcgatttcgagggcccccagcagggataccagctactccagcagtgctgcaacgagcttcgccaggaagagccagtttgcgtttgccccaccttgaaacaagctgccagggcagttagcctccagggacagcacggaccattccaatccaggaaaatttaccagtcagctaagtacttgcctaacatttgcaagatcccagaaagtggggaatgtcccttncagaccaccattcctttctttcctccttactactaga

SEQ ID NO: 141586 - DNA, 524 bp, Arabidopsis thaliana
aagaaaatgagtaagctcatgaatctcctagaagcaaccttgtgagtgctagttgcacttaacggatgcctgagaaagcagtcactaggggttcctactaagctacatgaacgtgggtaacctaaacaacctaaaggccagacatgcaaccgaaacgatcaagagggtagccgcgcagaccgagtactgggtcctcatccacccttagctccgatgagccgatgggcccgtcgctcggtatgtaattgaacaaggcggtcttttcttgcgcaccttcttcacttagagaaaaatctcctacgtcattcacggaacggctatgagcggaagagacatacgcggatgtgcctagacctttatggactcacagacgacgcaaggacgacaacacggccaaccatggctaggacgacaggtgctacaaggccaaccatgggtaggacagggacatcagggacatcaaggaagacaagggctaccatgtgaaggacagggacaacatggacaacaaggtcgtcagggac

SEQ ID NO: 141587 - DNA, 478 bp, Arabidopsis thaliana
aaacaaaaagaaaatggttaagctcagcaatctcctcgttgcaaccttcggggttctcctcgtccttaacggctgccttgcgaggcagtcacttggggttcctcctcagctacagaacgagtgtaacctcgacaacctagatgttctccaagccaccgaaactatcaagagtgaagccggtcagatcgagtactgggaccacaaccaccctcagctccgatgtgttggtgtttccgttgctcgttatgtaattgaacaaggcggtctttacttgcccaccttcttcacttccccaaaaatttcctacgtcgttcaaggaacgggtatcagcggaagagtggtccctggatgtgcccgagaccttcatggactcgcagccgatgcaaggacaacaacaaggccaaccatggcaaggacgacagggacaacaaggccaaccatgggaaggacagggacaacagggacaacaaggtagaca

SEQ ID NO: 141588 - DNA, 491 bp, Arabidopsis thaliana
gaaaatggttaagctcagcaatctcctcgttgcaaccttcggggttctcctcgtccttaacggctgccttgcgaggcagtcacttggggttcctcctcagctacagaacgagtgtaacctcgacaacctagatgttctccaagccaccgaaactatcaagagtgaagccggtcagatcgagtactgggaccacaaccaccctcagctccgatgtgttggtgtttccgttgctcgttatgtaattgaacaaggcggtctttacttgcccaccttcttcacttccccaaaaatttcctacgtcgttcaaggaacgggtatcagcggaagagtggtccctggatgtgccgagaccttcatggactcgcagccgatgcaaggacaacaacaaggccaaccatggcaaggacgacagggacaacaaggccaaccatgggaaggacagggacatcagggacaacaaggaagacaaggccatccatgggaaggacagg

SEQ ID NO: 141589 - DNA, 446 bp, Arabidopsis thaliana
cgatctagccagtcaccagaaccagcttgaccgcaacccaaggccattttacttagccggaaacaacccagaaggtcaagtatggctacaaggccgagagcaacagccacagaagaacattttcaatggatttggacccgaggttattgctcaagctttgaagatcgatcttcagacagcgcagcaacttcagaaccaagatgacaaccgtggaaacattgtccgagtccaaggcccgttcggtgtcattaggccgcctttgaggggccagagacctcaggaggaggaagaagaagaagaaggacgacatggacgacacggtaatggcttagaggagaccatctgcagcgccaggtgcaccgataacctcgatgacccgtctcgtgctgacgtgtacaagccacagctcggttacatcagcactctcaacagttacgatctcccca

SEQ ID NO: 141590 - DNA, 460 bp, Arabidopsis thaliana
agaaaacatacacaaatagcaaaacatggctaacaagctcttcctcgtctgcgcaactctcgccctctgcttcctcctcaccaacgcttccatctaccgcaccgttgtcgaattcgaagaagatgacgccagcaaccccgtaggtccaagacagagatgccagaaggagtttcagcaatcacaacacctaagagcttgccagagatggatgagcaagcaaatgaggcaaggacgtggtggtggtccttccctcgacgatgagttcgatttcgagggcccccagcagggataccagctactccagcagtgctgcaacgagcttcgccaggaagagccagtttgcgtttgccccacctttgaaacaagctgccagggcagttagcctccagggacagcacggaccattccaatccaggaaaatttaccagtcagctaagtacttgcctaacatttgcaagat

SEQ ID NO: 141591 - DNA, 493 bp, Arabidopsis thaliana
  unsure (1)..(493): unsure at all n locations
aaggacgacagggacaacaaggccaaccatgggaaggacagggacaacagggacaacaaggaagacaaggccaaccatgggaaggacagggacaacagggacaacaaggacgacagggacaacaaggccaaccatgggaaggacagggacagcagggacaacaagggttccgtgacatgcaccagaaggtggaacatgtgagacgcggagacgtctttgccaacactccaggctctgcccactggatctacaactcaagagaacagccacttgtcatcatcgctcttctcgacatcgccaactaccaaaaccaactcgaccgcaaccctagagtgttccatttggccggaaacaaccagcagggaggctttggcggttcacagcaacaacaagaacagaaaaacttgtggagcgagttcgacgcacaagtcattagttaaagcattgaaaattgacgttcagntggctcagcagcttcagaaccaacaagaca

SEQ ID NO: 141592 - DNA, 493 bp, Arabidopsis thaliana
tggttctacaacgacggacaggaaccacttgtcatcgtcagcgtcttcgatctagccagtcaccagaaccagcttgaccgcaacccaaggccattttacttagccggaaacaacccacaaggtcaagtatggctacaaggccgagagcaacagccacagaagaacattttcaatggatttggacccgaggttattgctcaagctttgaagatcgatcttcagacagcgcagcaacttcagaaccaagatgacaaccgtggaaacattgtccgagtccaaggcccgttcggtgtcattaggccgcctttgaggggccagagacctcaggaggaggaagaagaagaagaaggacgacatggacgacacggtaatggcttagaggagaccatctgcagcgccaggtgcaccgataacctcgatgacccgtctcgtgctgacgtgtacaagccacagctcggttacatcagcactctcaacagttacgatctcccca

SEQ ID NO: 141593 - DNA, 522 bp, Arabidopsis thaliana
tatttggatgcctcattttacttaggacatcaacctgcaatgccgcaagaataagtcaaagctcctccacagcgaacactataaaatcaaaactacagtagaactgtgtttcaaagtcccctttttcgtagaggcagcagtttgtgcacaataaaccagtaaacaatgatgatgaaactaaacaagaaatttcactaataatatgtcaagaaaatacctcctgttgatattctacagggccttgcgaactgttaggattcaacatttttatagccacctgagtatgacgcagtaaaccaacgtagatgcttccatatccaccttccccaatcttcagggtcgaatcaaagtgattagttgcttcctcaatctcggagaatgagaaatccgcgagagtactgaggcaactgtaggggttgaggttctgcgtgactccttaactcctcagcttctctgagtgctctagcacgttctgtctgcaactcctctcgttcatccctcaacttttgcaacaacttcaca

SEQ ID NO: 141594 - DNA, 509 bp, Arabidopsis thaliana
aagttagaaaaacaaaagtagaagaaattatctccaaaacacacaagtccagagagaaacaaaaagagattacacacaacaacaacaaaaatgagaccattgagcgtacaatcgaagtttgaagatgtggcaacgtcaacctccgttaatcaccacggagtgacgccgcaatcaccgtggcactcgccggttccttacctcttcggcggtttagcggcgatgctaggactaatcgcctttgctcttctcatcctcgcttgctcttactggcgcctgtcttcctccggcgaagaagatggtcaaaacgtagatgaagagaaagagagccggtctggagataaggcggcgaacggagcttacgaggagaagtttcttgtcataatggccggagaagatttgccgaggtatctggcgacaccggcgatgaataagtgtacgtgtggggtcacgagggtaaaatggggatttctcaagaagaagtgttgccaaagaggaagagaagatgagag

SEQ ID NO: 141595 - DNA, 535 bp, Arabidopsis thaliana
atttggccggaaacaaccagcagggaggctttggcggttcacagcaacaacaagaacagaaaaacttgtggagcgggttcgacgcacaggtcatagctcaagcattgaaaattgacgttcagctggctcagcagcttcagaaccaacaagacagcagaggaaacatcgttcgtgttaagggacctttccaggtcgtgaggccacctctaagacagccctacgagagcgaggagtggtgacacccacgtagcccacagggcaacggccttgaggagactatctgcagcatgaggtcccacgagaacattgacgaccctgctcgtgctgacgtgtacaagcccagcctaggtcgcgtgaccagcgtcaaccagctataccttgcccatcttggagtatgtcaggctcagtgccactcgtggcgttctccagggtaatggcgatggtgcttcctaaatacaacatgaacgctaacgagatcttgtactgcactggaggacaaggaaggatcccagtggtcaacgacaactgacagaac

SEQ ID NO: 141596 - DNA, 516 bp, Arabidopsis thaliana
  unsure (1)..(516): unsure at all n locations
aaactatcaagagtgaagccggtcagatcgagtactgggaccacaaccaccctcagctccgatgtgttggtgtttccgttgctcgttatgtaattgaacaaggcggtctttacttgcccaccttcttcacttccccaaaaatttcctacgtcgttcaaggaacgggtatcagcggaagagtggtccctggatgtgccgagaccttcatggactcgcagccgatgcaaggacaacaacaaggccaaccatggcaaggacgacagggacaacaaggccaaccatgggaaggacagggacaacagggacaacaaggaagacaaggccaaccatgggaaggacagggtcaacagggacaacatggacgacagggacaacatggccaaccatgggtaggacagggacagcatggacaacaagggttccgtgacatgcaccagaaggtggaacatgtgagacgcggagacgtctttgccaacactccangctctgcccactagatctacaactcaagagaac

SEQ ID NO: 141597 - DNA, 517 bp, Arabidopsis thaliana
aagaaaatggttaagctcagcaatctcctcgttgcaaccttcggggttctcctcgtccttaacggctgccttgcgaggcagtcacttggggttcctcctcagctacagaacgagtgtaacctcgacaacctagatgttctccaagccaccgaaactatcaagagtgaagccggtcagatcgagtactgggaccacaaccaccctcagctccgatgtgttggtgtttccgttgctcgttatgtaattgaacaaggcggtctttacttgcccaccttcttcacttccccaaaaatttcctacgtcgttcaagggaccggtatcagcggaagagtggtccctggatgtgccgagaccttcatggactcgcagccgatgcaaggacaacaacaaggccaaccatggcaaggacgacagggacaacaaggccaaccatgggaaggacagggacaacagggacaacaaggaagacaaggccaaccatgggaaggacagggacaacagggacaacaaggacgac

SEQ ID NO: 141598 - DNA, 522 bp, Arabidopsis thaliana
aagaaaacatacacaaatagcaaaacatggctaacaagctcttcctcgtctgcgcaactctcgccctctgcttcctcctcaccaacgcttccatctaccgcaccgttgtcgaattcgaagaagatgacgccagcaaccccgtaggtccaagacagagatgccagaaggagtttcagcaatcacaacacctaagagcttgccagagatggatgagcaagcaaatgaggcaaggacgtggtggtggtccttccctcgacgatgagttcgatttcgagggcccccagcagggataccagctactccagcagtgctgcaacgagcttcgccaggaagagccagtttgcgtttgccccaccttgaaacaagctgccagggcagttagcctccagggacagcacggaccattccaatccaggaaaatttaccagtcagctaagtacttgcctaacatttgcaagatccagcaaagtggtgaatgtcccttccagaccaccatccctttcttcccttcttactactaga

SEQ ID NO: 141599 - DNA, 493 bp, Arabidopsis thaliana
agaggaagaaaaatgggtcgagtctcatctattatctctttctctttgacactcttgatcctcttgaatggctacactgcccaacagtggcccaacgagtgccagctcgatcaactcaatgcgctcgaaccatcccaaatcatcaagagcgagggtggtcgcatcgaggtctgggaccaccatgcaccccagctccgttgctccggctttgcctttgagcgtttcgtcattgagcctcagggtcttttcttgcccactttcttgaacgccggcaaactcacgtttgttgttcacggaaggggtctaatgggaagagttattccgggatgcgccgagacgttcatggagtcaccggtatttggagaaggtcaaggtcagggtcagagtcaagggttccgtgacatgcaccagaaagtagagcacctacagggcggtgacaccattgcaacaccaatctggtggagctcaatggttctacaacaatggaaatgag

SEQ ID NO: 141600 - DNA, 386 bp, Arabidopsis thaliana
agccccacgcgtcccacaaacaacaagaaaatctgtgcctcacctgtgttctctttccccatcggcctcttctcgggcgaggttcttccttgaaggcagcactcaggtccctacttactacagaacttgtgttacctcaccaacctagatgtcctccaagccaccgtatctatcatgagtgcatccggactgatcgcgtactgctaccacatccaccctcagcttcgatgggttacatcattcttctctccatttctaattctacaaggcgttctttacttaccctctatattcactttctcatatatttcctacttcttacatcgttcttgtttcaacgtaagatttattcctgtatgtgccttctacctttattgactcgcatt

SEQ ID NO: 141601 - DNA, 535 bp, Arabidopsis thaliana
aagaaataacaaaatggctcgagtctcttctcttctttctttcttcttaacacttttgatccttttccatggctacgcggctcaacagggtcagcagggtcagcagtttccgaacgagtgccagctcgaccagctcaatgcgctcgagccgtcacacgtactgaagagcgaggctggtcgcatcgaggtgtgggaccaccacgctcctcagctccgttgctcaggtgtctcctttgcacgttacatcatcgagtctaagggtctctacttgccctctttctttaacaccgcgaagctctctttcgtggctaagggacgaggtcttatgggaaaagtgatccctggatgcgccgaaacattccaagactcatcagagttccaaccacgcttcgaaggtcaaggtcaaagccagaggttccgtgacatgcaccagaaagtggagcacattaggagcggtgataccattgccacaacacccggtgtagcacagtggttctacaacgacggacaagaaccacttgtcatcgtcagcgtt

SEQ ID NO: 141602 - DNA, 515 bp, Arabidopsis thaliana
ccacggcttccggacagggacagcttgggcaacaagggttccgagacatgcaccagaaggtggaacatgtgagacgcggagacgtctttgccaacactccaggctctgcccactggatctacaactcaggagaacagccacttgtcatcatcgctcttctcgacatcgccaactaccaaaaccaactcgaccgcaaccctagagtgttccatttggccggaaacaaccagcagggaggctttggcggttcacagcaacaacaagaacagaaaaacttgtggagcgggttcgacgcacaggtcatagctcaagcattgaaaattgacgttcagttggctcagcagcttcagaaccaacaagacagcagaggaaacatcgttcgtgttaagggacctttccaggtcgtgaggccacctctaagacagccctacgagagcgaggagtggagacacccacgtagcccacagggcaacgggcctgaagagactatctgcagcatgaggtcccacgagaac

SEQ ID NO: 141603 - DNA, 453 bp, Arabidopsis thaliana
ccagctccgttgctccggctttgcctttgagcgtttcgtcattgagcctcagggtcttttcttgcccactttcttgaacgccggcaaactcacgtttgttgttcacggaaggggtctaatgggaagagttattccgggatgcgccgagacgttcatggagtcaccggtatttggagaaggtcaaggtcagggtcagagtcaagggttccgtgacatgcaccagaaagtagagcacctacggtgcggtgacaccattgcaacaccatctggtgtagctcaatggttctacaacaatggaaatgagcctctcattcttgttgcagccgcggatctcgccagcaaccagaaccagcttgaccgcaaccttagaccatttttgatagccggaaacaacccacatgggcaggaatgtgttacaaggccgaaagcacagaagcaaaacaacatcttcaa

SEQ ID NO: 141604 - DNA, 488 bp, Arabidopsis thaliana
gtaattttttttatttctgtttatgtttaaaaaaatttttcgaaaaatctcttcgtttttaaaatgatgacgtatcaaaaaatccagtaagactttaccatactcatcttacttagtattagatagattgaattttggttgaatttaattagatttctttttttatttttaaacaaggccgtacacatagcataaaatggcaaacaagttgttcctcgtctgcgcagctctcgctctctgcttcctcctcaccaacgcttccatctaccgcaccgtcgttgagttcgaagaagatgacgccactaaccccataggcccaaaaatgaggaaatgccgcaaggagtttcagaaagaacaacacctaagagctcgccagcaattgatgcttcaacaaggcaaggcaaggccgttgcgatgagtttgatttcgaagacgacatggagaacccacatggtcaacatcaggaacaacagctatttcagcagtgc

SEQ ID NO: 141605 - DNA, 315 bp, Arabidopsis thaliana
  unsure (1)..(315): unsure at all n locations
gattccggtcgccacgcgtcgggactcaggacacaagaaacaaggcaacatggaaggcaggacatcaggacatcagggacgacagggacatcatgggcaaccatgggaaggacagggacagcagggacatcaagggttccgtgacatgcaccagaaggtggaacatgtgagacgcggagacgtctttgccaacactccatgctctgcccactggatctacaactcaagagaacagccactngtcatcatcgctcttctcgacatcgccaactaccaaaaccaaactcgaccgcaacccctagagtgtttccattt

SEQ ID NO: 141606 - DNA, 207 bp, Arabidopsis thaliana
caaaaagaaaatggttaagctcagcaatctcctcgttgcaaccttcggggttctcctcgtccttaacggctgccttgcgaggcagtcacttggggttcctcctcagctacagaacgagtgtaacctcgacaacctagatgttctccaagccaccgaaactatcaagagtgaagccggtcagatcgagtactgggaccacaaccaccc

SEQ ID NO: 141607 - DNA, 539 bp, Arabidopsis thaliana
  unsure (1)..(539): unsure at all n locations
aattctttaaaaaaaaaaattttgatataaacagaaaaaacatttaatggaggctgcaaaagtttacacacaagatggcaccgtcgacctccaaggccgtcccgtcctcgcctccaagaccggtcgttggagagcttgctctttcctcctcggtatatgttttcgcaaacctcagataactattttcatctatagataacttgaaaaatataaaaacataaatctttatgtagtcttttgtgtctttatgtgtgtgtgtgcgagaagggtatgaagcgtttgagaggatggcgttttatggaatagcgtcgaacttagtgaattatttgactaaaagacttcacgaagatacgatctcttcggttagatatgtgaataattgggccggtgcggtttggatcactcccatagccggagcgtacatcgctgactcatacataggtcgcttctggacttttactgcctnctctctgatctacgtcctagtattaattctacagtctcttttatttcttatggttaaaatacgaattaaactc

SEQ ID NO: 141608 - DNA, 472 bp, Arabidopsis thaliana
aaagaaaatggttaagctcagcaatctcctcgttgcaaccttcggagttctcctcgtccttaacggctgccttgcgaggcagtcacttggggttcctcctcagctacagaacgagtgtaacctcgacaacctagatgttctccaagccaccgaaactatcaagagtgaagccggtcagatcgagtactgggaccacaaccaccctcagctccgatgtgttggtgtttccgttgctcgttatgtaattgaacaaggcggtctttacttgcccaccttcttcacttccccaaaaatttcctacgtcgttcaaggaacgggtatcagcggaagagtggtccctggatgtgccgagaccttcatggactcgcagccgatgcaaggaccaccaccagggccacccttggcaaggacgacagggacaacatggccaaccatgggaaggacagggacaacagggacaacaaggaagaca

SEQ ID NO: 141609 - DNA, 450 bp, Arabidopsis thaliana
aacaaaaagaaaatggttaagctcagcaatctcctcgttgcaaccttcggggttctcctcgtccttaacggctgccttgcgaggcagtcacttggggttcctcctcagctacagaacgagtgtaacctcgacaacctagatgttctccaagccaccgaaactatcaagagtgaagccggtcagatcgagtactgggaccacaaccaccctcagctccgatgtgttggtgtttccgttgctcgttatgtaattgaacaaggcggtctttacttgcccaccttcttcacttccccaaaaatttcctacgtcgttcaaggaacgggtatcagcggaagagtggtccctggatgtgccgagaccttcatggactcgcaacccgttgcaaggacaacaacaaggccaaccatggcaaggacgacagggacaacaaggccaaccatgggaaggaca

SEQ ID NO: 141610 - DNA, 465 bp, Arabidopsis thaliana
aacaaacaaaaagaaaatggttaagctcagcaatctcctcgttgcaaccttcggggttctcctcgtccttaacggctgccttgcgaggcagtcacttggggttcctcctcagctacagaacgagtgtaacctcgacaacctagatgttctccaagccaccgaaactatcaagagtgaagccggtcagatcgagtactgggaccacaaccaccctcagctccgatgtgttggtgtttccgttgctcgttatgtaattgaacaaggcggtctttacttgcccaccttcttcacttccccaaaaaatttcctacgtcgttcaaggaacgggtatcagcggaagagtggtccctggatgtgccgagaccttcatggactcgcagccgatgcaaggacaacaacaaggccaaccatggcaaggacgacagggacaacaaggccaaccatgggaaggacagggacaacagg

SEQ ID NO: 141611 - DNA, 337 bp, Arabidopsis thaliana
ctttagctcaaccttcattactaatctccttttaaggtttctttcgtgaatcagatcggaaaaatggaatcttttttgttcacatctgaatccgtcaacgagggacatcccgacaagctttgtgatcagatctccgaccctatcctcgatgcttgccttgaacaagaccctgagagcaaagtgcttgtgagacttgtccaagacaacatgtcatggttttggagaatcaccacaagcaacgtgttacagcaatgtcgaaacatcggagatgatcgattgtgcgtgctaatctgcatgcagtctgtacatacacaagctgctgacaggtatgcattac

SEQ ID NO: 141612 - DNA, 370 bp, Arabidopsis thaliana
atcacaaacgagtaagaatacaaatacaaatagcaaaaaaaatggcaaacaagctcttcctcgtctgcgcaactttcgccctctgcttcctcctcaccaacgcttccatctaccgcactgttgtcgagttcgacgaagatgacgccagcaaccccatgggcccaagacagaaatgtcagaaggagtttcagcaatcacagcacctaagagcttgccagaaattgatgcgcatgcaaatgaggcaaggccgtggtggtggtccctccctcgacgatgagttcgatttggaagacgacatcgagaacccacaaggcccccagcagggacaccagatcctccagcagtgctgcagcgagcttcgccaggaaga

SEQ ID NO: 141613 - DNA, 425 bp, Arabidopsis thaliana
aaacaagaaaacatacacaaatagcaaaacatggctaacaagctcttcctcgtctgcgcaactctcgccctgtgcttcctcctcaccaacgcttccatctaccgcaccgttgtcgaattcgaagaagatgacgccagcaaccccgtaggtccaagacagagatgccagaaggagtttcagcaatcacaacacctaagagcttgccagagatggatgagcaagcaaatgaggcaaggacgtggtggtggtccttccctcgacgatgagttcgatttcgagggcccccagcagggataccagctactccagcagtgctgcaacgagcttcgccaggaagagccagtttgcgtttgccccaccttgaaacaagctgccagggcagttagcctccagggacagcacggaccattccaatccaggaaaat

SEQ ID NO: 141614 - DNA, 370 bp, Arabidopsis thaliana
ataaaaatggctcgagtctcttctcttctttctttctccttaacacttttgatccttttccatggctacgcggctcaacagggtcagcagggtcagcagtttccgaacgagtgccagctcgaccagctcaatgcgctcgagccttcacacgtactgaagagcgaggctggtcgcatcgaggtgtgggaccaccacgctcctcagctccgttgctcaggtgtctcctttgcacgttacatcatcgagtctaagggtctctacttgccctctttctttaacaccgcgaagctctccttcgtggctaaaggacgaggtcttatgggaaaagtgatccctggatgcgccgaaacattccaagactcatcagagt

SEQ ID NO: 141615 - DNA, 504 bp, Arabidopsis thaliana
acgtgtgaaatcatgattgttaacggctgacttgcgaggcagtcacttggggttcctcctcagctacagaacgagtgtaacctcgacaacctatatgttctccaagccaccgaaactatcaagagtgaagccggtcagatcgagtactgggaccacaaccaccctcagctacgatgtgtaggtgtttccgttgctcgttatgtaattgaacaaggcggactttacttgcccaccttcttgacttgcccaaaaatatcctacgtcgatcaaggaacgggtatcagcggaagagtggaccctggatgtgccgagaccttcatggactcgcagtcgatgcaaggacaacaacaaggccaaccatggcaaggacgacagggacaacaaggccaaccatgggaaggacagggacatcagggacaacatggaagacaaggccaaccatgggaaggacagggacaacagggacaacaaggacgacagggacaacaaggccaaccatgggaa

SEQ ID NO: 141616 - DNA, 349 bp, Arabidopsis thaliana
  unsure (1)..(349): unsure at all n locations
agaaataacaaaatggctcgagtctcttctcttctttctttcttcttaacacttttgatccttttccatggctacgcggctcaacagggtcagcagggtcagcagtttccgaacgagtgccagctcgaccagctcaatgcgctcgagccgtcacacgtactgaagagcgaggctggtcgcatcgaggtgtgggaccaccacgctcctcagctccgttgctcaggtgtctcctttgcacgttacatcatcgagtctaagggtctctacttgccctctntctttaacaccgcgaagctctctttcgtggctaaagggacgaggtcttatgggaaaagtgatccctggatgc

SEQ ID NO: 141617 - DNA, 367 bp, Arabidopsis thaliana
aaaaagaaaatggttaagctcagcaatctcctcgttgcaaccttcggtgttctcctcgtccttaacggctgccttgcgaggcagtcacttggggttcctcctcagctacagaacgagtgtaacctcgacaacctagatgttctccaagccaccgaaactatcaagagtgaagccggtcagatcgagtactgggaccacaaccaccctcagctccgatgtgttggtgtttccgttgctcgttatgtaattgaacaaggcggtctttactttgccaccttcttcactttcccaaaaatttcctacgtcgttcaaggaacgggtatcaacggaagagtggtccctgatgtgccggaccttattgactgca

SEQ ID NO: 141618 - DNA, 373 bp, Arabidopsis thaliana
gtaattaactaacaacaaatggcgaacaagctcttcctcgtctgcgcagctctcgccctgtgttgcatcctgaccaacgcttccgtctatcgcacggttgtcgagttcgacgaagatgacgccagtaaccccataggcccaatacagaaatgtcagaaggagtttcagcaagaacagcacctaagagcttgccagagatggatgcgcaagcaaatgtggcaaggacgtggtggtggtccttccctcgacgatgagttcgatatggaagacgacatcgagaacccgcagagacgacagctactccagaagtgctgcagcgagcttcgccaagaagagccagtttgcgtttgccccaccttgagacaagctggca

SEQ ID NO: 141619 - DNA, 453 bp, Arabidopsis thaliana
gttaagctcagcaatctcctcgttgcaaccttcggggttctcctcgtccttaacggctgccttgcgaggcagtcacttggggttcctcctcagctacagaacgagtgtaacctcgacaacctagatgttctccaagccaccgaaactatcaagagtgaagccggtcagatcgagtactgggaccacaaccaccctcagctccgatgtgttggtgtttccgttgctcgttatgtaattgaacaaggcggtctttacttgcccaccttcttcacttccccaaaaatttcctacgtcgttcaaggaacgggtatcagcggaagagtggtccctggatgtgccgagaccttcatggactcgcagccgatgcaaggacaacaacaaggccaaccatggcaaggacgacagggacaacaaggccaaccatgggaaggacagggacaacagggacaacaa

SEQ ID NO: 141620 - DNA, 355 bp, Arabidopsis thaliana
cgttcaaggaacgggtatcagcggaagagtggtccctggatgtgccgagaccttcatggactcgcagccgatgcaaggacaacaacaaggccaaccatggcaaggacgacagggacaacaaggccaaccatgggaaggacagggacaacagggacaacaaggaagacaaggccaaccatgggaaggacagggacaacagggacaacaaggacgacagggacaacaaggccaaccatgggaaggacagggacagcagggacaacaagggttccgtgacatgcaccaaaaggtggaacatgtgagacgcggagacgtctttgccaacactccaggctctgcccactggatctacaac

SEQ ID NO: 141621 - DNA, 369 bp, Arabidopsis thaliana
aacaaaaagaaaatggttaagctcagcaatctcctcgttgcaaccttcggggttctcctcgtccttaacggctgccttgcgaggcagtcacttggggttcctcctcagctacagaacgagtgtaacctcgacaacctagatgttctccaagccaccgaaactatcaagagtgaagccggtcagatcgagtactgggaccacaaccaccctcagctccgatgtgttggtgtttccgttgctcgttatgtaattgaacaaggcggtctttacttgcccaccttcttcacttccccaaaaatttcctacgtcgttcaaggaacgggtatcagcggaagagtggtccctggatgtgccgagaccttcatggac

SEQ ID NO: 141622 - DNA, 424 bp, Arabidopsis thaliana
gtttcgcgtctcttctcttctctctcagaaaatgctcatcagaaattgtctcctttttgtttccttgatgtgttttctcttctaatctccggtgaaacaaagaacaaaggattcataagacacaaagcagagaaggagagagagatacgaggcttttcttcatctttatggcttctatgaccgagaaggaagctatggtggatccttttctggtcgaggctcttcaaaatcctcgtcatcgtctcaccattttgcgaatggagcttgatatacagaagttctttcaaaaccctgagcagcttcagttcgaattcccgccttttccaacatcgtacctgcgtcttgctgcacatcgagttgctcagcattatggactagtaaccatggctttggacaatggtactggtgcaggagatggatccga

SEQ ID NO: 141623 - DNA, 278 bp, Arabidopsis thaliana
cacgcgcccggaaaacatacacaaatagcaaaacatggctaacaagctcttcctcgtctgcgcaactctcgccctctgcttgctccggaccaacgcttccatctaccgcaccgttgtcgaattcgaagaagatgacgccagcaaccccgtaggtccaagacagagatgccagaaggagtttcagcaatcacaacacctaagagcttgccagagatggatgagcaagcaaatgaggcaaggacgtggtggtggttcttccctcgacgacgagttgtttc

SEQ ID NO: 141624 - DNA, 399 bp, Arabidopsis thaliana
aagaaataacaaaatggctcgagtctcttctcttctttctttcttcttaacacttttgatccttttccatggctacgcggctcaacagggtcagcagggtcagcagtttccgaacgagtgccagctcgaccagctcaatgcgctcgagccgtcacacgtactgaagagcgaggctggtcgcatcgaggtgtgggaccaccacgctcctcagctccgttgctcaggtgtctcctttgcacgttacatcatcgagtctaagggtctctacttgccctctttctttaacaccgcgaagctctctttcgtggctaaaggacgaggtcttatgggaaaagtgatccctggatgcgccgaaacattccaagactcatcagagttccaaccacgcttcgaaggtca

SEQ ID NO: 141625 - DNA, 367 bp, Arabidopsis thaliana
aaaacatacacacatagcaaaaaatggcaaacaagttgttcctcgtctgcgcagctctcgctctctgcttgctccggaccaacgcttccatctaccgcaccgtcgttgagttcgaagaagatgacgccactaaccccataggcccaaaaatgaggaaatgccgcaaggagtttcagaaagaacaacacctaagagcttgcagcaattgatgctccagcaagcaaggcaaggccgtagcgatgagtttgatttcgaagacgacatggagaacccacagggacaacagcaggaacaacacttatttcagcagtgctgcaacgagctttgcccggaagagccagattgtggttgccccaaccttgaacaa

SEQ ID NO: 141626 - DNA, 168 bp, Arabidopsis thaliana
  unsure (1)..(168): unsure at all n locations
ccgantctaaaatcgtaaagttctaaagcggtttttcatcaatttttaagttttcgagaaaaaagcaatggcgtgagacaaacaaaaggcggagagagccgaggttgctgcnaggctagcggctgaggacttgcatgacattaacaaatcctgtggtgctgatgtcac

SEQ ID NO: 141627 - DNA, 426 bp, Arabidopsis thaliana
caaaaagaaaatggttaagctcagcaatctcctcgttgcaaccttcggggttctcctcgtccttaacggctgccttgcgaggcagtcacttggggttcctcctcagctacagaacgagtgtaacctcgacaacctagatgttctccaagccaccgaaactatcaagagtgaagccggtcagatcgagtactgggaccacaaccaccctcagctccgatgtgttggtgtttccgttgctcgttatgtaattgaacaaggcggtctttacttgcccaccttcttcacttccccaaaaattttctacgtcgttcaaggaacgggtatcagcggaagagtggtccctggatgtgccgagaccttcatggactcgcagccgatgcaaggacaacaacaaggccaaccatggcaaggacgacagggacaaca

SEQ ID NO: 141628 - DNA, 476 bp, Arabidopsis thaliana
aacaatttctcattagcttacaatggcggatacacaccgtgtcgaccgtactgatagacactttcaatttcagtcgccctatgaaggcggccgaggtcaaggtcagtatgaaggtgaccgtggttacggtggtggcggttacaagagcatgatgcctgaaagtggcccatctagtacccaagtattgtccctgttgattggagtccctgtcgtcggttcgctacttgccttggctggattacttctagctggttcggtgatcggcttaatggttgctttaccactatttctcctcttcagcccggttatagtcccagcggctctaactatcgggcttgcaatgacaggctttttaagcctcgggatgttcggtctaaccgggcttagctcaatctcatgggtcatgaactatcttcgtgggacaaggaggactgtgcctgagcaattggagtatgctaagaggagaatggttgatg

SEQ ID NO: 141629 - DNA, 418 bp, Arabidopsis thaliana
ggaacctggatcagatctagtcaggggtcagatcggagagccggcaatataatggcagccgcgagacgattacggacgctccaatctcagccggagaacaaggtctgcgtcgattgctcccagaagaatccacacatgggcatcgatttcatatggaatcttcatgtgcttggaatgctccgctacgcaccgtggtttaggtgctcacatctcattcgtcaggaccgtcaccatggattcatggtccgagatccacatcaagaaaatggacgctcgaggcaaccagcgtctcaacaattttatcgctcagtacgggatctcggaagagactgatatcatctacaagtacaattccaacgccgtgtctgtgtattgagatccgatccaagctttagctgacggaagacaatggagagat

SEQ ID NO: 141630 - DNA, 308 bp, Arabidopsis thaliana
caaaaagaaaatggttaagctcagcaatctcctcgttgcaaccttcggggttctcctcgtccttaacggctgccttgcgaggcagtcacttggggttcctcctcagctacagaacgagtgtaacctcgacaacctagatgttctccaagccaccgaaactatcaagagtgaagccggtcagatcgagtactgggaccacaaccaccctcagctccgatgtgttggtgtttccgttgctcgttatgtaattgaacaaggcggtctttacttgcccacctttttcactttcccaaaaattttctacctcg

SEQ ID NO: 141631 - DNA, 362 bp, Arabidopsis thaliana
aaaatggttaagctcagcaatctcctcgttgcaaccttcggggttctcctcgtccttaacggctgccttgcgaggcagtcacttggggttcctcctcagctacagaacgagtgtaacctcgacaacctagatgttctccaagccaccgaaactatcaagagtgaagccggtcagatcgagtactgggaccacaaccaccctcagctccgatgtgttggtgtttccgttgctcgttatgtaattgaacaaggcggtctttacttgcccaccttcttcacttccccaaaaatttcctacgtcgttcaaggaacgggtatcagcggaagagtggtccctggatgtgccgagaccttcatggactc

SEQ ID NO: 141632 - DNA, 426 bp, Arabidopsis thaliana
atcttcttcttcttctttgagttttttttttttatcattcttgacgtcatgataaagatactcaacccccactcacaccattctcaaaccacaactcttaaaacagctgagatcttgtctaaatacagacccattgcaccaaagcccgggacgcctcgagtgaacgacgatgatccttcttcctctatgtctcacaaaatcagccaatctccttaccttcgtaacctctggcctcagcttcaagcgcgacctacaagaacccgcaagcgaggccgaggcgggatgggtccctcttctcttgctatgaagagaccaaagtcgtcatgcggttcttctagtacttctactatttctacacaacgtgttcttggacctattaaaacactgtcgtttcaggctttcactcatcataggttacctaaccta

SEQ ID NO: 141633 - DNA, 526 bp, Arabidopsis thaliana
  unsure (1)..(526): unsure at all n locations
cgatctctctctctctctctctctcgatcggataatatttgagctttgtggttggaggatctgagttagtcatgttcatgatcgattggttctatggcgttctcgcttcgttagggttatggcagaaagaggctaagatcttgtttctgggactcgataatgctggtaaaaccactctgcttcacatgttgaaagacgagagattggtacagcatcagcctacgcagcatccaacttctgaagaactcagcattgggaaaatcaagtttaaggcttttgatttgggtggtcaccagattgctcgcagggtctggaaggattactatgctaaggtggacgctgtggtctacctagttgatgcttacgacaaagagagatttgcagaatcaaaaaaggaacttgatgcacttntctcagacgaatccctagccagcgttccattcctcattctaggaaacaagatagacataccgtatgctgcatcagaggacgagctccgttaccatctcggcctcttcaacttcac

SEQ ID NO: 141634 - DNA, 404 bp, Arabidopsis thaliana
cgatcgtctttttttcttcccgcggtttcttgcgtttccgggaattattgcttaatggttgagaagcaagaagaaatgaatgagtttggtgctgtcaatggtgggaaagtggggacgtcttcttcagtgtcaccaccgcaagataaaggaaggaagaacaagagaaagttagctgatccttctccacaaaatgctgcttctttgactgagttccctcgatatgagttacattcgttcaaatctcaaagccctttgtgtgaaaaagactctcaacggcagctgaaagccgaagagtctgattctgtgggatgggatgatccgtttgcttgtcaccttgaaggactattatcgtcaaatttgctcacgctctttcgtagtgcaatgaatcagattatggattgtgg

SEQ ID NO: 141635 - DNA, 391 bp, Arabidopsis thaliana
caaaaagaaaatggttaagctcagcaatctcctcgttgcaaccttcggggttctcctcgtccttaacggctgccttgcgaggcagtcacttggggttcctcctcagctacagaacgagtgtaacctcgacaacctagatgttctccaagccaccgaaactatcaagagtgaagccggtcagatcgagtactgggaccacaaccaccctcagctccgatgtgttggtgtttccgttgctcgttatgtaattgaacaaggcggactttacttgcccaccttcttcacttccccaaaaattttctacgtcgatcaaggaacgggtatcagcggaagagtggtccctggatgtgcccagaccttcatggactcgtagccgatgcaaggacaacaa

SEQ ID NO: 141636 - DNA, 392 bp, Arabidopsis thaliana
caaccaccctcagctccgatgtgttggtgtttccgttgctcgttatgtaattgaacaaggcggtctttacttgcgcaccttcttcacttccccaaaaatttcctacgtcgttcaaggaacgggtatcagcggaagagtggtccctggatgtgccgagaccttcatggactcgcagccgatgcaaggacaacaacatggccaaccatggcaaggacgacagggacaacaaggtcaaccatgggaaggacagggacaacagggacaacaaggaagacatggccaatcatgtgaaggacagggtcaacagggacaacatggacgacagggtcatcaaggtcaaccatgggaaggacagggacagcatggacaacatgggtttcgtgacatgcacc

SEQ ID NO: 141637 - DNA, 480 bp, Arabidopsis thaliana
aatgggtcgagtctcatctattatctctttctctttgacactcttgatcctcttcaatggctacactgcccaacagtggcccaacgagtgccagctcgatcaactcaatgcgctcgaaccatcccaaatcatcaagagcgagggtggtcgcatcgaggtctgggaccaccatgcaccccagctccgttgctccggctttgcctttgagcgtttcgtcattgagcctcagggtcttttcttgcccactttcttgaacgccggcaaactcacgtttgttgttcacggaaggggtctaatgggaagagttattccgggatgcgccgagacgttcatggagtcaccggtatttggagaaggtcaaggtcagggtcagagtcaagggttccgtgacatgcaccagaaagtagagcacctacggtgcggtgacaccattgcaacaccatctggtgtagctcaatggttctacaacaatggaaatga

SEQ ID NO: 141638 - DNA, 443 bp, Arabidopsis thaliana
aaatggttaagctcagcaatctcctcgttgcaaccttcggggttctcctcgtccttaacggctgccttgcgaggcagtcacttggggttcctcctcagctacagaacgagtgtaacctcgacaacctagatgttctccaagccaccgaaactatcaagagtgaagccggtcagatcgagtactgggaccacaaccaccctcagctccgatgtgttggtgtttccgttgctcgttatgtaattgaacaaggcggtctttacttgcccacctttttcacttccccaaaaatttcctacgtcgttcaaggaacgggtatcagccgaagagtggtccctggatgtgccgagaccttcatggactcgcagccgatgcaaggacaacaacaaggccaaccatggcatggacgacagggacaacatggccaaccatgggaaggacaggga

SEQ ID NO: 141639 - DNA, 448 bp, Arabidopsis thaliana
atgtgagacgcggagacgtctttgccaacactccaggctctgcccactggatctacaactcaggagaacagccacttgtcatcatcgctcttctcgacatcgccaactaccaaaaccaactcgaccgcaaccctagagtgttccatttggccggaaacaaccagcagggaggctttggcggttcacagcaacaacaagaacagaaaaacttgtggagcgggttcgacgcacaggtcatagctcaagcattgaaaattgacgttcagttggctcagcagcttcagaaccaacaagacagcagaggaaacatcgttcgtgttaagggacctttccaggtcgtgaggccacctctaagacagccctacgagagcgaggagtggagacacccacgtagcccacagggcaacggccttgaggagactatctgcagcatgaggtcccacgagaa

SEQ ID NO: 141640 - DNA, 450 bp, Arabidopsis thaliana
  unsure (1)..(450): unsure at all n locations
agaaaaatgggtcgagtctcatctattatctctttctctttgacactcttgatcctcttcaatggctacactgcccaacagtggcccaacgagtgccagctcgatcaactcaatgcgctcgaaccatcccaaatcatcaagagcgagggtggtcgcatcgaggtctgggaccaccatgcaccccagctccgttgctccggctttgcctttgagcgtttcgtcattgagcctcagggtcttttcttgcccactttcttgaacgccggcaaactcacgtttgttgttcacggaaggngtctaatgggaagaggtattccgggatgcgccgagacgttcatggagtcaccggtatttggagaaggtcaaggtcaggttcagagtcaagggttccgtgacatgcaccagaaagtagagcacctacggtgcggtgacaccattgcaacaccatct

SEQ ID NO: 141641 - DNA, 470 bp, Arabidopsis thaliana
aagaaaatggttaagctcagcaatctcctcgttgcaaccttcgttgttctcctcgtccttaacggctgccttgcgaggcagtcacttggggttcctcctcacctacagaacgagtgtaacctcgacaacctagatgttctccaagccaccgaaactatcaagagtgaagccggtcagatcgagtactgggaccacaaccaccctcagctccgatgtgttggtgtttccgttgctcgttatgtaattgaacaaggcggtctttacttgcccaccttcttcacttccccaaaaatttcctacgtcgttcaaggaacgggtatcaacggaagagtggtccctggatgtgccgagaccttcatggactcgcagccgatgcaaggacaacaacaaggccaaccatggcaaggacgacagggacaacaaggccaaccatgggaaggacagggacaacagggacaacaaggaagaca

SEQ ID NO: 141642 - DNA, 503 bp, Arabidopsis thaliana
  unsure (1)..(503): unsure at all n locations
agaaagtggagcacattaggagcggtgataccattgccacaacacccggtgtagcccagtggttctacaacgacggacagcaaccacttgtcatcgtcagcatcttcgatctagccagtcaccagaaccagcttgaccgcaacccaaggccattttacttagccggaaacaacccacaaggtcaagtatggctacaaggacgagagcaacagccacagaagaacatcttcaatggatttggacccgaggttattgctcaagctttgaagattgatcttcagacagcgcagcaacttcagaaccaagatgacaaccgtggaaacattgtccgagtccaaggcccgttcggtgtcattaggccgcctttgaggggccagagacctcangaggaggaagaagaagaagaaggacgacacggacgacacggtaatggcttagaggagaccatctgcagcgccaggtgcaccgataacctcgatgatccgtctcgtgctgacgtgtac

SEQ ID NO: 141643 - DNA, 331 bp, Arabidopsis thaliana
  unsure (1)..(331): unsure at all n locations
aggccaaccatgggaaggacagggacaacagggacaacaaggacgacagggacaacaaggccaaccatgggaaggacagggacagcagggacaacaagggttccgtgacatgcaccagaaggtggaacatgtgagacgcggagacgtctttgtcaacactccaggctctgcccactggatctacaactcaggagaacagccacttgtcatcatcgctcttctcgacatcgccaactaccaaaaccaactcgaccgcaaccctagagtgttccatntggccggaaacaaccagcagggaggctttggcggttcacagcagcaacaagaacag

SEQ ID NO: 141644 - DNA, 286 bp, Arabidopsis thaliana
aactctaagatgccgttgatctaaccatcatcaacggcgtcagaaacgtttaaacttcaagacctttccaagtaaatgccacagtgagtctcgagcccaaggcggagccggtgatgccgtcgttttcaatgtctttagctccaccgtcttcgacaggaccaccattgaagagagcttcgactaaagaccgtcacacgaaggttgaaggaagagggagaaggatacggatgcctgccacgtgtgcggcttggatttctcaattaactcgagagttaggtcacaaatc

SEQ ID NO: 141645 - DNA, 554 bp, Arabidopsis thaliana
caaaaagaaaatggttaagctcagcaatctcctcgttgcaaccttcggggttctcctcgtccttaacggctgccttgcgaggcagtcacttggggttcctcctcagctacagaacgagtgtaacctcgacaacctagatgttctccaagccaccgaaactatcaagagtgaagccggtcagatcgagtactgggaccacaaccaccctcagctccgatgtgttggtgtttccgttgctcgttatgtaattgaacaaggcggtctttacttgcccaccttcttcacttccccaaaaatttcctacgtcgttcaaggaacgggtatcagcggaagagtggtccctggatgtgccgagaccttcatggactcgcagccgatgcaaggacaacaacaaggccaaccatggcaaggacgacagggacaacaaggccaaccatgggaaggacagggacaacagggacaacaaggaagacaaggccaaccatgggaaggacagggacaacagggacaacaaggacgacagggacaacaatgccaaccatgggaaggatagg

SEQ ID NO: 141646 - DNA, 337 bp, Arabidopsis thaliana
gatttacacttttttttgtccttttttattaataaatcactgacccgaaaataaaaatagaagcagaacttcatgtcgtggtttctaatagcggtggcgacaatcgccgccgtcgtatcctacaagctaatccaacggctaagatacaagttcccaccaggcccaagccccaagccaatcgtcggtaacctctacgacataaaaccggtccggttcagatgttactacgagtgggctcaatcttatggaccaatcatatcggtctggatcggttcaattctaaacggggtcgtttctagcgccgtgctagcaaaagaagttctgaaagaacacgacc

SEQ ID NO: 141647 - DNA, 432 bp, Arabidopsis thaliana
agaaaacatacacaaatagcaaaacatggctaacaagctcttcctcgtctgcgcaactctcgccctctgcttcctcctcaccaacgcttccatctaccgcaccgttgtcgaattcgaagaagatgacgccagcaaccccgtaggtccaagacagagatgccagaaggagtttcagcaatcacaacacctaagagcttgccagagatggatgagcaagcaaatgaggcaaggacgtggtggtggtccttccctcgacgatgagttcgatttcgagggcccccagcagggataccagctactccagcagtgctgcaacgagcttcgccaggaagagccagtttgcgtttgccccaccttgaaacaagctgccagggcagttagcctccagggacagcacggaccattccaatccaggaaaatttaccagtcagc

SEQ ID NO: 141648 - DNA, 525 bp, Arabidopsis thaliana
  unsure (1)..(525): unsure at all n locations
caaaaagaaaatggttaagctcagcaatctcctcgttgcaaccttcggggttctcctcgtccttaacggctgccttgcgaggcagtcacttggggttcctcctcagctacagaacgagtgtaacctcgacaacctagatgttctccaagccaccgaaactatcaagagtgaagccggtcagatcgagtactgngaccacaaccaccctcagctccgatgtgttggtgtttccgttgctcgttatgtaattgaacaaggcggtctttacttgcccaccttcttcacttccccaaaaatttcctacgtcgttcaaggaacgggtatcaacggaagagtggtccctggatgtgccgagaccttcatggactcgcagccgatgcaaggacaacaacaaggccaaccatggcaaggacgacagggacaacaaggccaaccatgggaaggacagggacaacagggacaacaaggaagacaaggccaaccattgggaggacagggacaacagggacaacaaggacgacaggg

SEQ ID NO: 141649 - DNA, 325 bp, Arabidopsis thaliana
cttcggggttctcctcgtccttaacggctgccttgcgaggcattcacttggggttcctcctcagctacagaacgagtgtaacctcgacaacctagatgttctccaagccaccgaaactatcaagagtgaagccggtcagatcgagtactgggaccacaaccaccctcagctccgatgtgtcggtgtttccgatgctcggtatgtaatcgaacaaggcggcctttacttgcccaccttcttcacttccccaaaaatggcctacgtcagttcaaggaacgggtatcagcggaagagcggtacctggatgtgccgtgaccttcatgga

SEQ ID NO: 141650 - DNA, 495 bp, Arabidopsis thaliana
gtaaaaacgctatggtgctaccgcaatggaacgtaaacgcaaacgcggcactctacgtgacaaacggaaaggctcatatacaaatggtgaacgacaacggagaaagagtgttcgaccaagagatctccagcggacagttactagtcgtgccacaaggcttttcggtcatgaaacatgccataggcgaacagttcgagtggatcgaattcaagacaaacgaaaacgcacaggtcaacacactcgcgggccgtacctcagtcatgagaggtttgccgcttgaggttataaccaatgggtaccagatctctcccgaagaagctaaacgagtaaagtttagcacgattgagaccacactgacccatagcagtccaatgagctacggaaggcctagggcttgaggcttgatgagcgcgtggtggaatagcgtttgaatctaaaagttcggttggtacgactggtaatatgaaataataatgtacaaagaagttctacgct

SEQ ID NO: 141651 - DNA, 519 bp, Arabidopsis thaliana
ctgcttccttcttcaccttttttttttttttttaaattttggtttccctttttttttattaaataagatgtattcctccatcgttacctaatccccttcttcgtcttcttcagcttcactgagtcttacgaacatagcaaaatccaaatcaaattcctgaagaaacctctttcgctctcgtcttcgttttcagatcaacaagaaatggcaacagcaacatcagcttctctgttttcaactgtttcttcatcttactccaaagctagctccataccacattcaagactccaatctgtgaaattcaactcagtccctagcttcaccggtctcaaatcaacctctctcatctccggatctgattcctcttccttagccaagactctacgcggttccgtaacgaaagcacaaacatctgacaagaagccttacggattcaaaatcaacgcttcatacaaagtagctgttcttggtgctgctggtggtataggtcagcctttatcacttctcatcaagatgtct

SEQ ID NO: 141652 - DNA, 426 bp, Arabidopsis thaliana
cgactacgccacacacacaatctaatcccaaaaatcaaaagatgaatgccacaaagtttgttgtgcttctcgtgattggcgttttgtgtgccattgtcaccgcaaggcatgtcaaagatttgtccacggagaccaaattaggggcctctcttccaaaaactactaccaaaggcattggagctcagctttctgcaactggcacaacttacagcaccagcagtgtcgttagctatgctaatggttttaacaatcccaaaggtccaggggccaatgcattcgaaagtgccaacacatttaccagcggacaagtcactgccaagggtcgcaaggcaagagtttcttctacaagtgcttctgccgcttgaggcgatgctgcagctgcagtgactcgcaaagcttgtgctgcacgtgcaaagggtaaggtag

SEQ ID NO: 141653 - DNA, 516 bp, Arabidopsis thaliana
aagacttcaagaaataacaaaatgatacttctcatcagatctcgagctttcatttaaacaaagactcttcttgagcaaaccaaagaacatatattacctttacgacgcgggtcaccttttagacatttcacatggagtttgaaaacaatggtgttcttttcatttggctgatcgttttctatgacacaaagataaacaacaacaaaattaagcgtgacacaaagagtttatatgcttaatgagatggatcacattccacagaatatttcttaccagataaatattcaaagagtctcggatctgcggcaattggaataagacccaacctgtgagcaagaacttcgtcttgaataaccgatgtgttgtttgctacatacactttttcaatagccattgaaggaagctgtaatcaaagaaacactattaaccaaagattctaataatcagagattcatcagaggtagtgagacagtgggcagacctcagctaagaggattcttcggaaagcattagcga

SEQ ID NO: 141654 - DNA, 467 bp, Arabidopsis thaliana
gcgtccgctctgtctgtttattcgacgatctctttcgcaccgctcaatcatcctcccgattccgcaagtttcggttttgaatcggttcttctcctctgccactatcgtcttcttctcggatctctatatcgttttagattctttcaccgtcgattgtattctctcccacgctcatgcaattttctttccctaaagaaccggcatctagtgtctgtgtgtgatggagtccagttgagtagtagtgggtggtgggctgcccttggcgaataggaggtactctagctttgccaaacccaaaatccaacaagggacttttggacctgtatctcggatcaatgatgtctctgccctccaataaagctcccttgacaccaatccaaaccccatgttccctcttgttactcgccgcatgagccagactaaccctgtttgcggtgtcttcaagttgggggaagaagatgactctt

SEQ ID NO: 141655 - DNA, 363 bp, Arabidopsis thaliana
aaagaggaagaaaaatgggtcgagtctcatctattatctctttctctttgacactctagatcctcttcaatggctacactgcccaacagtggcccaacgagtgccagctcgatcaactcaatgcgctcgaaccatcccaaatcatcaagagcgagggtggtcgcatcgaggtctgggaccaccatgcaccccagctccgttgctccggctttgcctctgagcgttttgtcattgagcctcagggtcttttcttgcccactttcttgtacgccggcaaactcacgtatgttgttcacggcaggggtctaatgtgcagagttattcctgtatgcgcggagacgtttttaatttaccttcctttag

SEQ ID NO: 141656 - DNA, 505 bp, Arabidopsis thaliana
  unsure (1)..(505): unsure at all n locations
aacaaacaaacatttagaaacacaacttaacaatgtaaaaaacaaaaaaaaaaggaaaattcttatttcttttcatagattaacctgaagcaatgcttttagatttggtaaaagaactgccattgacaagctcctcatgcttctttcgcaatgcagattgtctctttcaaaacaatcaaaacacagtaccaattggaatcatcaagattggaattttgcagagctcaatgaaacagaacataatgaatttgctttaccaagaaacgtatgcgatttcgatcttcctcactgagaacaaactgcattttcaattgaacatttccatagccattgaatgaaagtttctcttncaagaaaccactctctattatcattcttggctctatctctacctccaaaaaccctcaaattcagaaaatctaataaaaccactaatttgatctctagagttgaaaaagaacacacctttctgtaataattggtttccattaacatctaacagagt

SEQ ID NO: 141657 - DNA, 377 bp, Arabidopsis thaliana
gagcagcttcttcacacgctcaagctcaccgatcgattcttccaatgctcttctaattcatctgcaaaactctcagatcactcatgggtttgatttcaaaccctacccgtttgattctcgtcgccaccatcttcttcctcgtttcttcaatctccggtcaggattctgtcgttgagaacaatgagagacaagaatctgaaggatctggtaaagagcttggtcgtcgtggaatggttggtactgaacgaattggagttgatactggtgtagacaatattggtgctcttggtttgaatctagaccttgatgctactgctcctagtgtatttgatgcttttgtttcgagtttctcgatgattcctgccaccgagattggg

SEQ ID NO: 141658 - DNA, 537 bp, Arabidopsis thaliana
acacaaacaaaaagaaaatggttaagctcagcaatctcctcgttgcaaccttcggggttctcctcgtccttaacggctgccttgcgaggcagtcacttggggttcctcctcagctacagaacgagtgtaacctcgacaacctagatgttctccaagccaccgaaactatcaagagtgaagccggtcagatcgagtactgggaccacaaccaccctcagctccgatgtgttggtgtttccgttgctcgttatgtaattgaacaaggcggtctttacttgcccaccttcttcacttccccaaaaatttcctacgtcgttcaaggaacgggtatcagcggaagagtggtccctggatgtgccgagaccttcatggactcgcagccgatgcaaggacaacaacaaggccaaccatggcaaggacgacagggacaacaaggccaaccattggaaggacagggacaacagggacaacaagggagacatggccaaccatgggaaggacagggacaacatggacaacagggacgacagggacaac

SEQ ID NO: 141659 - DNA, 472 bp, Arabidopsis thaliana
agaaaacgttggaggaaggattgatatttgttggacttttggatcgaaaaattgaaaggtaaaagaggtagagaagctctggattccgtctcttcccgtcgtcggcgacggtggttttgcccgttggctctgaggttatatcaggcttcaatttaagtggattgtcatcttctgagatatggaacaagtttttgtctggccaagctgctaccactatcggcttttctcattccaagaagcgctcgattggcggtttcttgtacgttctgatttccttgtgggctctttcgttaactgcacttagtggtcaaaccctcttctatgatctttaggggaaggtgtgaggcataattctgagacagggctgaagtctgcaaattcttccttcgcatagtcctagagaaacctctttgttcctctctttcatatcttggtcttatgggtgctggttgaagaaagatacatcaatttc

SEQ ID NO: 141660 - DNA, 313 bp, Arabidopsis thaliana
attctaaaatcgtaaagttctaaagcggtttttcatcaattttcaagcaatcgagaaaaaagcaatggcgtcagacaaacaaaaggcggagagagccgaggttgcggcgaggctagcggctgaggacttgcatgacattaacaaatccggtggtgctgatgtcacaatgtataaggtgacggagagaacaactgaacatccaccggagcaagataggcccggtgtgataggatcagtgttcagggctgtccaaggaacgtatgagcatgcgagagacgctgtagttggaaaaacccacgaagcggctgagtct

SEQ ID NO: 141661 - DNA, 422 bp, Arabidopsis thaliana
aggccaaccatgggaaggacagggacaacagggacaacaaggaagacaaggccaaccatgggaaggacagggacaacagggacaacaaggacgacagggacaacaaggccaaccatgggaaggacagggacagcagggacaacaagggttccgtgacatgcaccagaaggtggaacatgtgagacgcggagacgtctttgccaacactccaggctctgcccactggatctacaactcaggagaacagccacttgtcatcatcgctcttctcgacatcgccaactaccaaaaccaactcgaccgcaaccctagagtgttccatttggccggaaacaaccagcaggggaggcttttggcggttcacaggcaccaacaggaacagaaaaaacttggtggagcgggtttcgacggcacaaggtcat

SEQ ID NO: 141662 - DNA, 544 bp, Arabidopsis thaliana
  unsure (1)..(544): unsure at all n locations
cgaaacaaaaaaaagttcattttcctcccttgcttgcatatgtatagataattcaaatatagatagatgcagatctatagagagtcttccatctttttgcatttcccgaaaattccctgttgttagatcagattctaatcaattttgtagaaatttgtaatggaagaaaaatttttctttattaatgactattaactattataagatattaagacaaaaagaataataaatctaacaaggggattatgatacatctagttgtagttgattttgaaagatgaataagtccatttatttagtttggctttttttgtacctatttttttattctatttctatttctattcggnnctattctatatattnctatcaggttggatatcaatattagatatattattacttaaagatacttagtataattatatattagatataatagaaataatttaaattcaagatattcttagatttttttagaattcaaaatttttcattatcaggtacaaatattaaaatgtggttcccattttttgacaacctt

SEQ ID NO: 141663 - DNA, 429 bp, Arabidopsis thaliana
aagaaataacaaaatggctcgagtctcttctcttctttctttcttcttaacacttttgatccttttccatggctacgcggctcaacagggtcagcagggtcagcagtttccgaacgagtgccagctcgaccagctcaatgcgctcgagccgtcacacgtactgaagagcgaggctggtcgcatcgaggtgtgggaccaccacgctcctcagctccgttgctcaggtgtctcctttgcacgttacatcatcgagtctaagggtctctacttgccctctttctttaacaccgcgaagctctctttcgtggctaagggacgaggtcttatgggaaaagtgatccctggatgcgccgaaacattccaagactcatcagagttccaaccacgccttcgaggtcaaggtcaaagccagagggtccgtgacatgca

SEQ ID NO: 141664 - DNA, 389 bp, Arabidopsis thaliana
gctttggcggttcacagcaacaacaagaacagaaaaacttgtgtagcgggttcgacgcacaggtcatagctcaagcattgaaaattgacgttcagttggctcagcagcttcagaaccaacaagacagcagaggaaacatcgttcgtgttaagggacctttccaggtcgtgaggccacctctaagacagccctacgagagcgaggagtggagacacccacgtagcccacagggcaacggccttgaggagactatctgcagcatgaggtcccacgagaacattgacgaccctgctcgtgctgacgtgtacaagcccagcctaggtcgcgtgaccagcgtcaacagctataccttgcccatcttggagtatgtcaagctcagtgccactcgt

SEQ ID NO: 141665 - DNA, 301 bp, Arabidopsis thaliana
gaccacgcgtccggataggaagattgtagctgctaagtgtgctaatgtatccgtaaaaacgctatggtgctaccgcaatggaacgtaaacgcaaacgcggcactctacgtgacaaacggaaaggctcatatacaaatggtgaacgacaacggagaaagagtgttcgaccaagagatctccagcggacagttactagtcgggccacaaggcttttcggtcatgaaacatgccataggcgaacagttcgagtggatcgaatgtaagacaaacgaaaacgcacaggtgaacacactcgcgggcc

SEQ ID NO: 141666 - DNA, 537 bp, Arabidopsis thaliana
  unsure (1)..(537): unsure at all n locations
gaccacgcgtccgaaaatggttaagctcagcaatctcctcgttgcaaccttcggggttctcctcgtccttaacggctgccttgcgaggcagtcacttggggttcctcctcagctacagaacgagtgtaacctcgacaacctagatgttctccaagccaccgaaactatcaagagtgaagccggtcagatcgagtactgggaccacaaccaccctcagctccgatgtgttggtgtttccgttgctcgttatgtaattgaacaaggcggtctttacttgcccaccttcttcacttccccaaaaatttcctacgtcgttcaaggaacgggtatcagcggaagagtggtccctggatgtgccgagaccttcatggactcgcagccgatgcaaggacaacaacaaggccaaccatggcaaggacgacagggacaacaaggccaaccatgggaaggacagggacaacagggacaacaaggaagacaaggccaaccatgggaaggacagggacaacagggacaacaaggacgacaggnacaaca

SEQ ID NO: 141667 - DNA, 459 bp, Arabidopsis thaliana
aacagaagcaaaacaacatcttcaatggcttcgcacctgagatcttggctcaagccttcaagatcaatgtcgagacggctcagcagctccagaaccagcaagataaccgtggcaacatcgtcaaggtcaacggacctttcggcgtcattaggccacccttgagacgcggcgaaggcggccaacaaccacatgaaatagctaatggtttagaggagactttgtgcaccatgcgatgcactgaaaacctcgatgacccgtcggatgctgacgtgtacaagccatcactcggatacattagcacacttaacagctacaatcttcctatcctcagacttctccgccttagcgctcttcgtggctccatccgtaaaaaccccttggtgctaccgcaatggaacgtaaacgcaaacgcggcactctacgtgacaaacggaaaggctcatacaaatggtgaacgac

SEQ ID NO: 141668 - DNA, 77 bp, Arabidopsis thaliana
acaacaacaaggccaaccatggcaaggacgacagggacaacaaggccaaccatgggaaggacagggacaacagggac

SEQ ID NO: 141669 - DNA, 404 bp, Arabidopsis thaliana
acgcgtccgacgggtatcagcggaagagtggtccctggatgtgccgagaccttcatggactcgcagccgatgcaaggacaacaacaaggccaaccatggcaaggacgacagggacaacaaggccaaccatgggaaggacagggacaacagggacaacaaggaagacaaggccaaccatgggaaggacagggacaacagggacaacaaggacgacagggacaacaaggccaaccatgggaaggacagggacagcaaggacaacaagggttccgtgacatgcaccaaaaggtggaacatgtgagacgcggagacgtttttgccaacactccaggctcttgccactggatctacaactcatgagaacagacaattgtcatcatcgctcttctcgacattgccaacta

SEQ ID NO: 141670 - DNA, 434 bp, Arabidopsis thaliana
cttatgggaaaagtgatccctggatgcgccgaaacattccaagactcatcagagttccaaccacgcttcgaaggtcaaggtcaaagccagaggttccgtgacatgcaccagaaagtggagcacattaggagcggtgataccattgccacaacacccggtgtagcacagtggttctacaacgacggacaggaaccacttgtcatcgtcagcgtcttcgatctagccagtcaccagaaccagcttgaccgcaacccaaggccattttacttagccggaaacaacccacaaggtcaagtatggctacaaggccgagagcaacagccacagaagaacattttcaatggatttggacccgtggttattgctcaagctttgaagatcgatcttcagacagcgcagcaacttcagaaccaagatgacaaccgtggaaacat

SEQ ID NO: 141671 - DNA, 372 bp, Arabidopsis thaliana
gagaggtgttaagcttttcatcatcctggcgtcgagctatttttccgcaggacctgccctacagtatcgtgaccgcagtagagtttaaccaccaagttcgggatggatcggtgttgttcctgtacgcctaggacaccagaatatcgaaccatgaacgaagaaaggcatgcgagaaaagcatattggctagtgatcgtgaggctccaatttttgactggagtggacaccaaaggcctctgcccccccatactttggatagaagggcagaatattaggtgttttcatgtcgacaaagatgtgaacaatggttgtttcttgccggcaaagtggtgaactatgaaaatagatcgcgagtgcctgttcgaattgatc

SEQ ID NO: 141672 - DNA, 383 bp, Arabidopsis thaliana
gcatttctaatctctactttgtcaattcctatactttcactctcttcaattatataatctctggtccatagaaaagatcggtctcttgtcaccgttgattttatttggtcaaaatcattctctcctcgctgaataatcgttgatttcacttcttcttctggtcttaaaaaattcaagatctatacgagaaaacacaaaacaagtaaaactatttcaaccgtttttcctgtcggtaaagtttggattcttcttggtaaaatttggtcttattgtcaaccaaaagaagaagatggtcgttcagaatgttcaagatttggatgttcttccgaaacatagctccgattcattcgatgatgatggtcgtcccaagcgaaccggggacg

SEQ ID NO: 141673 - DNA, 520 bp, Arabidopsis thaliana
cgggtaagctcagcaatctcctcgttgcaaccttcggggttctcctcgtccttaacggctgccttgcgaggcaggcacttggggttcctcctcagctacagaacgagtgtaacctcgacaacctagatgttctccaagccaccgaaactatcaagagtgaagccggtcagatcgagtactgggaccacaaccaccctcagctccgatgtgttggtgtttccgttgctcgttatgtaattgaacaaggcggtctttacttgcccaccttcttcacttccccaaaaatttcctacgtcgttcaaggaacgggtatcagcggaagagtggtccctggatgtgccgagaccttcatggacttgcagccgatgcaaggacaacaacaaggccaaccatggcaaggacgacagggacaacaaggccaaccatgggaaggacagggacaacagggacaacaaggaagacaaggccaaccatgggaaggacagggtcaacatggacaacaaggacgacagggacaaca

SEQ ID NO: 141674 - DNA, 527 bp, Arabidopsis thaliana
caacaaacaaaaagaaaatggttaagctcagcaatctcctcgttgcaaccttcggggttctcctcgtccttaacggctgccttgcgaggcagtcacttggggttcctcctcagctacagaacgagtgtaacctcgacaacctagatgttctccaagccaccgaaactatcaagagtgaagccggtcagatcgagtactgggaccacaaccaccctcagctccgatgtgttggtgtttccgttgctcgttatgtaattgaacaaggcggtctttacttgcccaccttcttcacttccccaaaaatttcctacgtcgttcaaggaacgggtatcagcggaagagtggtccctggatgtgccgtgaccttcatggactcgcagccgatgcaaggacaacaacaaggccaaccatggcaaggacgacagggacaacaaggccaaccatgggaaggacagggacatcagggacaacaaggaagacaaggccaaccatggtatggacagggacaacagggacaacaaggacga

SEQ ID NO: 141675 - DNA, 518 bp, Arabidopsis thaliana
aagaaaatggttaagctcagcaatctcctcgttgcaaccttcggggttctcctcgtccttaacggctgccttgcgaggcagtcacttggggttcctcctcagctacagaacgagtgtaacctcgacaacctagatgttctccaagccaccgaaactatcaagagtgaagccggtcagatcgagtactgggaccacaaccaccctcagctccgatgtgttggtgtttccgttgctcgttatgtaattgaacaaggcggtctttacttgcccaccttcttcacttccccaaaaatttcctacgtcgttcaaggaacgggtatcagcggaagagtggtccctggatgtgccgagaccttcatggactcgcagccgatgcaaggacaacaacaaggccaaccatggcaaggacgacagggacaacaaggccaaccatgggaaggacagggacaacagggacaacaaggaagacaaggccaaccatgggaaggacagggacaacagggacaacaaggacgaca

SEQ ID NO: 141676 - DNA, 298 bp, Arabidopsis thaliana
  unsure (1)..(298): unsure at all n locations
gttaagctcagcaatctcctcgttgcaaccttcggggttctcctcgtccttaacggctgccttgcgaggcagtcacttggggttcctcctcagctacagaacgagtgtaacctcgacaacctagatgttctccaagccaccgaaactatcaagagtgaagccggtcagatcgagtactgggaccacaaccaccctcagctccgatgtgttggtgtttccgttgctcgttatgtaattgaacaaggcggtctttacttgcccacctttttcacttncccaaaaatttcctacgtcgttc

SEQ ID NO: 141677 - DNA, 440 bp, Arabidopsis thaliana
aacatacacacatagcaaaaaatggcaaacaagttgttcctcgtctgcgcagctctcgctctctgcttcctcctcaccaacgcttccatctaccgcaccgtcgttgagttcgaagaagatgacgccactaaccccataggcccaaaaatgaggaaatgccgcaaggagtttcagaaagaacaacacctaagagcttgccagcaattgatgctccagcaagcaaggcaaggccgtagcgatgagtttgatttcgaagacgacatggagaacccacagggacaacagcaggaacaacagctattccagcagtgctgcaacgagcttcgccaggaagagccagattgtgtttgccccaccttgaaacaagctgccaaggccgttagacttcagggacagcaccaaccaatgcaagtcaggaaaatttaccagacagccaagca

SEQ ID NO: 141678 - DNA, 406 bp, Arabidopsis thaliana
  unsure (1)..(406): unsure at all n locations
gcggtctttacttgcccaccttcttcacttccccaaaaatttcctacgtcgttcaaggaacgggtatcagcggaagagtggtccctggatgtgccgagaccttcatggactcgcagccgatgcaaggacaacaacaaggccaaccatggcaaggacgacagggacaacaaggccaaccatgggaaggacagggacaacagggacaacaaggaagacaaggccaaccatgggaaggacagggacaacagggacaacaaggacgacagggacaacaaggccaaccatgggaaggacagggacagcagggacaacaagggttccgtgacatgcaccagaaggtggaacatgtgagacgcggagacgtctttgccaacactncaggctctgcccactggatctacaactc

SEQ ID NO: 141679 - DNA, 431 bp, Arabidopsis thaliana
  unsure (1)..(431): unsure at all n locations
aacaaacaaaaagaaaatggttaagctcagcaatctcctcgttgcaaccttcggggttctcctcgtccttaacggctgccttgcgaggcagtcacttggngttcctcctcagctacagaacgagtgtaacctcgacaacctagatgttctccaagccaccgaaactatcaagagtgaagccggtcagatcgagtactgtgaccacaaccaccctcagctccgatgtgttggtgtttccgttgctcgttatgtaattgaacaaggcggtctttacttgcccaccttcttcactttcccaaaaatttcctacgtcgttcaaggaacgggtatcagccgaggagtggtcccctgatgtgcccagaccttcatggactcgcagccgatgcaaggacaacaacaaggccaaccatggcaaggacgacagggacaac

SEQ ID NO: 141680 - DNA, 201 bp, Arabidopsis thaliana
ccagctccattttgcaagaccttcacccagagatcaataagagagcatagaaggttagcaaaactatgtcacgtttttaaatcaccacttggtgtgctgtggaaatacaaaagaaaacgaaacttacattctcaaacaagcgagtttctttgggggaattagtttcagagacttctgcatagttgctaaatgggctttctt

SEQ ID NO: 141681 - DNA, 400 bp, Arabidopsis thaliana
aagaaaaatgggtcgagtctcatctattatctctttctctttgacactcttgatcctcttcaatggctacactgcccaacagtggcccaacgagtgccagctcgatcaactcaatgcgctcgaaccatcccaaatcatcaagagcgagggtggtcgcatcgaggtctgggaccaccatgcaccccagctccgttgctccggctttgcctttgagcgtttcgtcattgagcctcagggtcttttcttgcccactttcttgaacgccggcaaactcacgtttgttgttcacggaaggggtctaatgggaagagttattccgggatgcgccgagacgttcatggagtcaccggtatttggagaaggtcaaggtcagggtcagagtcaaggggtccgtgacatg

SEQ ID NO: 141682 - DNA, 310 bp, Arabidopsis thaliana
aacaaaaagaaaagtttaagctcagcaatcttctcgtgcatctttttgcggactcctcaccacgaggggtgttctttttaggcacacacatattgttccttctcacctacagaaggtgttttacctctacaacctttatgttctacaagccaccgatcctattatgagaaaaacctgttctttcgtgttctgggtccacatctacctttgagcgctttgtgtttgagcctcacggtgcttgtcttgccaacttacaatgctgtcattacttgcctaccttcttcatttccccaaaaattttctacgtcgt

SEQ ID NO: 141683 - DNA, 416 bp, Arabidopsis thaliana
  unsure (1)..(416): unsure at all n locations
aaagaaaatggttaagctcagcaatctcctcgttgcaaccttcggggttctcctcgtccttaacggctgccttgcgaggcagtcacttggggttcctcctcagctacagaacgagtgtaacctcgacaacctagatgttctccaagccaccgaaactatcaagagtgaagccggtcagatcgagtactgggaccacaaccaccctcagctccgatgtgttggtgtttccggtgctcgttatgtaattgaacaaggcggtctttacttgcccaccttcttcactttcncaaaaattttctacgtcgttcaaggaacgggtatcaacggaagagtggtccctggatgtgccgagaccttcatggactcgcagccgatgcaaggacaacaacaaggnccaccatggcaaagacgacagg

SEQ ID NO: 141684 - DNA, 475 bp, Arabidopsis thaliana
ctcttagcctttactctatagttttatatcatatcaatcgacatggcgaatgtggaccgtgatcggcgtgtgcatgtagaccgtactgacaaacgtgttcatcagccaaactacgaagatgatgtcggttttggtggctatggcggttatggtgctggttctgattataagagtcgcggcccctccactaaccaaatcttggcacttatagcaggagttcccattggtggcacactgctaaccctagctggactcactctagccggttcggtgatcggcttgctagtctccatacccctcttcctcctcttcagtccggtgatagtcccggcggctctcactattgggcttgctgtgacgggaatcttggcttctggtttgtttgggttgacgggtctgagctcggtctcgtgggtcctcaactacctccgtgggacgagtgatacagtgccagagcaattggactacgctaaac

SEQ ID NO: 141685 - DNA, 464 bp, Arabidopsis thaliana
cccaatttcagcaatcctacttcaatgggtttaccaaagaagtcctctctaccagtttcaacgtgccggaagaattgctagggagattggttacgagatcaaaagaaattggtcaagggattatccgaagaatttctgcagaccaaatcaaggaacttgctgagcacgctacatctccttcaaacaaacacaaagccaaaaatgaaaaggaggaagacatagacctaagaacgttgtggactcctttcaatctctttgcaatagatccaatctactccaacgactttggtcatttccacgaggcacatcctaagaattataatcaactgcaagaccatcacatagccgccgcttgggctaacatgacacagggatccttgttccctcctgaatttaactctaataccacatttgttacgtttgtggagaatggttgtgcccgcttcgagatggcttctccttat

SEQ ID NO: 141686 - DNA, 266 bp, Arabidopsis thaliana
ggtttccagatctctcccgaggaagctaggaagatcaagttcaacacacttgagaccactttgacccgcgctgccggtaggcaacaacaacagttgatcgaggagattgtcgaggcttaaatcaaaacgtttttctttttcttaataaagtatggtcagtttgtaatcacgtccctttacctttaacgtacgtgtaaaatatgtgtctgcggcacctcacttgtaataacactttcttctcataaataaaagggaagtttcgagtt

SEQ ID NO: 141687 - DNA, 485 bp, Arabidopsis thaliana
agaaaaatgggtcgagtctcatctattatctctttctctttgacactcttgatcctcttcaatggctacactgcccaacagtggcccaacgagtgccagctcgatcaactcaatgcgctcgaaccatcccaaatcatcaagagcgagggtggtcgcatcgaggtctgggaccaccatgcaccccagctccgttgctccggctttgcctttgagcgtttcgtcattgagcctcagggtcttttcttgcccactttcttgaacgccggcaaactcacgtttgttgttcacggaaggggtctaatgggaagagttattccgggatgcgccgagacgttcatggagtcaccggtatttggagaaggtcaaggtcagggtcagagtcaagggttccgtgacatgcaccaaaaagtagagcacctacggtgcggtgacaccattgcaacaccatctggtgtagctcaattggtctacaacaatggaaatga

SEQ ID NO: 141688 - DNA, 349 bp, Arabidopsis thaliana
cacactgacacttgaaaaaactcaaaaccgtctcatcatggcggcgtcacagacattctcactcctcgccttcactttctccctcctcgcctttgcttccaccgtgagtagccacaacatcactcaaatcctcgctgattctccagattactcttccttcaacagctacctttctcagacgaagctcgccgacgagatcaacagccgcacgacgattacagttctcgtccttaacaatggcgcaatgtctgctctcgccggaaaacatccactctccgttattaaaagcgctttaagcctcctcgtcctcctcgattactacgatccacaaaaactccacaagatcttc

SEQ ID NO: 141689 - DNA, 405 bp, Arabidopsis thaliana
ctctctctctctttctttgtgaaaatctagaaggagagaaagctacaaaaatctcaacatcgaggtaagagttttggctacagagcaaccatgctaacttgcgccttctcccaaaatcttatccactaatctcggtaaggaaagtgatgttggcaaaatggtgaagaaaggaagttggttttctgctatcaaaagggtttttactccacattccaaagagaagctagccaatgaaccagagagaaagagtggcaaagaaaagaagaagaaaggttttgggaagctaaggcatggcgagaccaattcatttcttcccatcttcagagagcctagtagtatcgaaaagatcttgggcgaggctgagagagatcacaatcttgtcttcaggcctcctactcctgatcg

SEQ ID NO: 141690 - DNA, 313 bp, Arabidopsis thaliana
agaaatataagaaatcacaaaatggctcgcgcctcttctattgtgtcttccttactaacactgttgatccgttgccatggctacgcggatcaacagggtcagcaggttcagcagattccgcacgagtgccagctcgaccagctcaatgcgctcgagccggcacacgtactgaagagcgcggctggtcgcatcgaggtgtgggaccaccacgctactgaggtgccgtgctaaggtgtatcctatgcacgttacatcatcgagactaagggtctggacttgccctctatctttaacaccgcgatgctctctttcg

SEQ ID NO: 141691 - DNA, 391 bp, Arabidopsis thaliana
caaaaagaaaatggttaagctcagcaatctcctcgttgcaaccttcggggttctcctcgtccttaacggctgccttgcgaggcagtcacttggggttcctcctcagctacagaacgagtgtaacctcgacaacctagatgttctccaagccaccgaaactatcaagagtgaagccggtcagatcgagtactgggaccacaaccaccctcagctccgatgtgttggtgtttccgttgctcgttatgtaattgaacaaggcggtctttacttgcccaccttcttcacttgcccaaaaatttcctacgtcgttcaaggaacgggtatcagcggaagagtggtccctggatgtgccgagaccttcatggactcgcaagcgatgcaaggacaacaa

SEQ ID NO: 141692 - DNA, 332 bp, Arabidopsis thaliana
cagaagcaaaacaacatcttcaatggcttcgcacctgagatcttggctcaagccttcaagatcaatgtcgagacggctcagcagctccagaaccagcaagataaccgtggcaacatcgtcaaggtcaacggacctttcggcgtcattaggccacccttgagacgcggcgaaggcggccaacaaccacatgaaatagctaatggtttagaggagactttgtgcaccatgcgatgcactgaaaacctcgatgacccgtcggatgctgacgtgtacaagccatcactcggatacattagcacacttaacagctacaatcttcctatcctcagact

SEQ ID NO: 141693 - DNA, 454 bp, Arabidopsis thaliana
  unsure (1)..(454): unsure at all n locations
aaagaaaatggttaagctcagcaatctcctcgttgcaaccttcggggttctcctcgtccttaacggctgccttgcgaggcagtcacttggggttcctcctcagctacagaacgagtgtaacctcgacaacctagatgttctccaagccaccgaaactatcaagagtgaagccggtcagatcgagtactgggaccacaaccaccctcagctccgatgtgttggtgtttccgttgctcgttatgtaattgaacaaggcggtctttacttgcccaccttcttcacttccccaaaaatttcctacgtcgttcaaggaacgggtatcagcggaagagtggtccctggatgtgccgagaccttcatggactcgcagccgatgcaaggaccaacacaaggccaaccatggcanggacgacagggacaacaaggccaaccatgggaaggcagggacaacagg

SEQ ID NO: 141694 - DNA, 463 bp, Arabidopsis thaliana
aatggttaagctcagcaatctcctcgttgcaaccttcggggttctcctcgtccttaacggctgccttgcgaggcagtcacttggggttcctcctcagctacagaacgagtgtaacctcgacaacctagatgttctccaagccaccgaaactatcaagagtgaagccggtcagatcgagtactgggaccacaaccaccctcagctccgatgtgttggtgtttccgttgctcgttatgtaattgaacaaggcggtctttacttgcccaccttcttcactttcccaaaaatttcctacgtcgttcaaggaacgggtatcagcggaagagtggtccctggatgtgccgagaccttcatggactcgcagccgatgcaaggacaacaacaaggccaaccatggcaaggacgacagggacaacaaggccaaccatgggaaggcagggacaacagggacaacaaggaagac

SEQ ID NO: 141695 - DNA, 382 bp, Arabidopsis thaliana
aaagagatgtgtcaggctgtctccgaagacatgagatttatgaatccaaaggaagtccagggacccctccaactataacaaaatcctcgttttggaatgtcttaagacattaattcattatatttttagcatattgtaatttagtatcattgatattaaatttttgtggtcagagatccacgtacgatattgcatgtaatttgtaatcgttttcgcattcatacaagtaaatgtgtacacatggtgtaaaaacgatacaatattaaagttggagtttatataattcatgaaggtgacacatacaatatttccaattgaaatgtattttttatctcaacatagtcgaaataaagtaaaagttgtcattagtatatttggcaat

SEQ ID NO: 141696 - DNA, 424 bp, Arabidopsis thaliana
attttcactgagcgcataacatttttgagacaagagactctctctctctctcttctctctttctctccccctctctccggcgatggttgttgctatggaccaacgcaccaatgtgaacggagatcccggcgccggagaccggaagaaagaagaaaggtttgatccgagtgcacaaccaccgttcaagatcggagatataagggcggcgattcctaagcactgttgggttaagagtcctttgagatcaatgagttacgtcgtcagagacattatcgccgtcgcggctttggccatcgctgccgtgtatgttgatagctggttcctttggcctctttattgggcccgccaaggaacacttttctgggccatctttgttctcggccacgactgtggacatgggagtttctcagacattcctctactg

SEQ ID NO: 141697 - DNA, 479 bp, Arabidopsis thaliana
aatgggtcgagtctcatctattatctctttctctttgacactcttgatcctcttcaatggctacactgcccaacagtggcccaacgagtgccagctcgatcaactcaatgcgctcgaaccatcccaaatcatcaagagcgagggtggtcgcatcgaggtctgggaccaccatgcaccccagctccgttgctccggctttgcctttgagcgtttcgtcattgagcctcagggtcttttcttgcccactttcttgaacgccggcaaactcacgtttgttgttcacggaaggggtctaatgggaagagttattccgggatgcgccgagacgttcatggagtcaccggtatttggagaaggtcaaggtcagggtcagagtcaaggggtccgtgacatgcaccagaaagtagagcacctacggggcggtgacaccattgcaacaccaatctgtgtagctcaatggtctacaacaatggaaatga

SEQ ID NO: 141698 - DNA, 488 bp, Arabidopsis thaliana
ggctgccttgcgaggcagtcacttggggttcctcctcagctacagaacgagtgtaacctcgacaacctagatgttctccaagccaccgaaactatcaagagtgaagccggtcagatcgagtactgggaccacaaccaccctcagctccgatgtgttggtgtttccgttgctcgttatgtaattgaacaaggcggtctttacttgcccaccttcttcacttccccaaaaatttcctacgtcgttcaaggaacgggtatcagcggaagagtggtccctggatgtgccgagaccttcatggactcgcagccgatgcaaggacaacaacaaggccaaccatggcaaggacgacagggacaacaaggccaaccatgggaaggacagggacaacagggacaacaaggaagacatggccaaccatgggaaggacagggacaacagggacaacaaggacgacaagtacaacaaggccaaccatgggaaggacaggg

SEQ ID NO: 141699 - DNA, 521 bp, Arabidopsis thaliana
gctaagtgctcatccaccaccttcctcctcctccttcttccctcaccttttgagtttctttcttcacgttgcttttcattaattagggtttcgcattttcaatcaccatcatcccaccacgttttcgttaatgaactgagagcatttcctagggatctcaatggcaatggagaaagatctcagtccaaattctccacggattagaaagctaagggatactagttaccctactacaccaacgtctcgaatgaatactaataaccagagagataaccattatcctaacattcctaattcaccaagggattacaattatactcctagctctccaacagctcgcattcgacaccgcaggcgatcaagcgagaatttagctgaggtgaacagaagcaatgtaagcagagtaagcaatttgttacttggtgataagaacaagtacagatcaatgtggataaggacatgctcatctctctggatgctcgggtggagtgtgttataatctacatgggtcatctctacat

SEQ ID NO: 141700 - DNA, 459 bp, Arabidopsis thaliana
agaaaacatacacaaatagcaaaacatggctaacaagctcttcctcgtctgcgcaactctcgccctctgcttcctcctcaccaacgcttccatctaccgcaccgttgtcgaattcgaagaagatgacgccagcaaccccgtaggtccaagacagagatgccagaaggagtttcagcaatcacaacacctaagagcttgccagagatggatgagcaagcaaatgaggcaaggacgtggtggtggtccttccctcgacgatgagttcgatttcgagggcccccagcagggataccagctactccagcagtgctgcaacgagcttcgccaggaagagccagtttgcgtttgccccaccttgaaacaagctgccagggcagttagcctccagggacagcacggaccactccaatccaggaaaatttaccagtcagctaagtacttgcctaacatttgcaagat

SEQ ID NO: 141701 - DNA, 425 bp, Arabidopsis thaliana
aggagatccgttttcgtcttcaccgtacacattactctgtttctttcccaagctcgagcacctcttcaaaatttgcttgatcatcgccgtttgcgttagcttgtttgcttttttcatcgccattctcttcaaaaaggatttgtcttgtgtgtggtttgagttctcacaatgaagggtgagtgtgaattagagtgagggagaggtttcatagacttatggttgggggtatttattgaggactagagcgagtggaaaatctttttatttattttaaaatgaatatacggattacagaattatgaaaaatgtacatatacgagtttatacaccaccacaacatgtgtatagagagagagagggggatggtaatatcgaggcgttgaggagattatgatggtgttgatgccttgaatatgaatttgcgt

SEQ ID NO: 141702 - DNA, 418 bp, Arabidopsis thaliana
gaaaaacttgtggagcgggttcgacgcacaggtcatagctcaagcattgaaaattgacgttcagttggctcagcagcttcagaaccaacaagacagcagaggaaacatcgttcgtgttaagggacctttccaggtcgtgaggccacctctaagacagccctacgagagcgaggagtggagacacccacgtagcccacagggcaacggccttgaggagactatctgcagcatgaggtcccacgagaacattgacgaccctgctcgtgctgacgtgtacaagcccagcctaggtcgcgtgaccagcgtcaacagctataccttgcccatcttggagtatgtcaagctcagtgccactcgtggcgttctccagggtaatgcgatggtgcttcctaaatacaacatgaacgctaacgagatc

SEQ ID NO: 141703 - DNA, 319 bp, Arabidopsis thaliana
  unsure (1)..(319): unsure at all n locations
caaccatggcaaggacgacagggacaacaaggccaaccatgggaaggacagggacaacagggacaacaaggaagacaaggccaaccatgggaaggacagggacaacagggacaacaaggacgacagggacaacaaggccaaccatgggaaggacagggacagcagggacaacaagggttccgtgacatgcaccagaaggtggaacatgtgagacgcggagacgtctntgccaacactccaggctctgcccactggatctacaactcangagaacagccactngtcatcatcgctcttctcgacatcgccaactacccaa

SEQ ID NO: 141704 - DNA, 497 bp, Arabidopsis thaliana
cgtccgctcaaaaacaatgacaagctccgataaatctctgtcgcacgactttttcgtctacggcagtttccaagaacgatccgtcgtcaatctgatcctcgaatgttctccggtcatggttcccgctcaactccacggctatcacgtatatagactcaaaggtcgcttacatgcatgtatctctccttctgagaatggactaatcaacggcaagatactaactggattaacagattctcagttagagaatttagatatgattgaaggaagtgaatatgtgaggaagactgctgaagttgttttgactgatactttggagaagaagcaagttgagacctatgtatgggcaaacaaggatgatcctaatttgtatggagaatgggattttgaggaatggagacggcttcacatggataaatttatcgaggcgtcgacgaaatccatcgagtggaagaagaatccgcatgggagaagtttggggagagtttgagaagttg

SEQ ID NO: 141705 - DNA, 521 bp, Arabidopsis thaliana
  unsure (1)..(521): unsure at all n locations
aagaaaacatacacaaatagcaaaacatggctaacaagctcttcctcgtctgcgcaactctcgccctctgcttcctcctcaccaacgcttccatctaccgcaccgttgtcgaattcgaagaagatgacgccagcaaccccgtaggtccaagacagagatgccagaaggagtttcagcaatcacaacacctaagagcttgccagagatggatgagcaagcaaatgaggcaaggacgtggtggtggtccttccctcgacgatgagttcgatttcgagggcccccagcagggataccagctactccagcagtgctgcaacgagcttcgccaggaagagccagtttgcgtttgccccaccttgaaacaagctgccagggcagttagcctccagggacagcacggaccattccaatccaggaaaatttaccagtcagctaagtacttgcctaacatttgcaagatccagcaaggtggtgaatgtgccttncagaccaccatccctttctttcctcttactactaga

SEQ ID NO: 141706 - DNA, 456 bp, Arabidopsis thaliana
caaaatggctcgagtctcttctcttctttctttcttcttaacacttttgatccttttccatggctacgcggctcaacagggtcagcagggtcagcagtttccgaacgagtgccagctcgaccagctcaatgcgctcgagccgtcacacgtactgaagagcgaggctggtcgcatcgaggtgtgggaccaccacgctcctcagctccgttgctcaggtgtctcctttgcacgttacatcatcgagtctaagggtctctacttgccctctttctttaacaccgcgaagctctctttcgtggctaaaggacgaggtcttatgggaaaagtgatccctggatgcgccgaaacattccaagactcatcagagttccaaccacgcttcgaaggtcaaggtcaaagccagaggttccgtgacatgcaccagaaagtggagcacattaaggagcggtgatacca

SEQ ID NO: 141707 - DNA, 324 bp, Arabidopsis thaliana
aaaacatacacacatagcaaaaaatggcaaacaagttgttcctcgtctgcgcagctctcgctctctgcttcctcctcaccaacgcttccatctaccgcaccgtcgttgagttcgaagaagatgacgccactaaccccataggcccaaaaatgaggaaatgccgcaaggagtttcagaaagaacaacacctaagagcttgccagcaattgatgctccagcaagcaaggcaaggccgtagcgatgagtttgatttcgaagacgacatggagaacccacagggacaacagcaggaacaacagctattccagcagtgctgcaacgagc

SEQ ID NO: 141708 - DNA, 470 bp, Arabidopsis thaliana
gttagtgcatcccagtcaatgtcttccacagctctgctgccactttcatcaaaaactttgctaagcctcaaggcagtggctcttctagaatgcaaatttccaacatttgcattcttaggttttgtaagatcattccctcggctgtggccttgaattttttcaaaacgcttggaacgactatcacgtcgcttcttttcctcggcagaaccagcaagtgccattgcactggaatagtaaggtgtcaaatccttgtcactatcactagatgcctcatcatcaatggcagtagctgcaccaccagaaaaacgctgtcgcttgacaggccgctggaaacttttttttgcagaattttgcccagaataagtgggcttgaagccagtggcagcatccaccttttgaaaactctcagagctcttgcaaaattccgattatcagaacgactgcaaaaaccgagttctaacagctaaaac

SEQ ID NO: 141709 - DNA, 66 bp, Arabidopsis thaliana
gtcaatatcataatggtttatctggaatagctggataaggtttcctatacgggacatggaaagggt

SEQ ID NO: 141710 - DNA, 334 bp, Arabidopsis thaliana
cagttacacagtgatatcttgaaggctgagttattcgcagactatgtctttatatgggcaaaccaggttcaaaacaaggcttatggcattacaccttggaggggggtaccgttcttgaggccttagcttaatgatattatcacaaaggggtttaaggccgacaaatggattaccgatcttgacctacttaccggtctttgccagtttgcggacaatgaaaaactccaatctgaatgggcttctgcaaagacaggcaataagaaacgtttggctcaatatatagagcgcgtgactggtgtgagtatcgatccaacaagcttatttgacatacaag

SEQ ID NO: 141711 - DNA, 235 bp, Arabidopsis thaliana
ctgaaacggtttctgatgcaatggagcatacagcgatcggagtggttgaatcggtggaaggagccatagaaggagcagagaaatgggtgggtgatttgcaacggacggtgaaggaatcgaaggataccgcaatgcgttctgctcgttccctccgtgaaaattctacctctcagttccgctctatacaggatttcattccacatgctctgactcagtataagacctatgagaatgc

SEQ ID NO: 141712 - DNA, 424 bp, Arabidopsis thaliana
cccacgcgtccgcacggacgacacggtaatggcttagaggagaccatctgcagcgccaggtgcaccgataacctcgatgatccgtctcgtgctgacgtgtacaagccacagctcggttacatcagcactctcaacagttacgatctccccatccttcgcttcatccgtctctcagccctccgtggatctatccgtcaaaacgcaatggtgcttccacagtggaacgcaaacgcgaacgccattctttacgtgacagacggggaagcccaaatccagatcgtaaacgacaatggttacagagtgtttgacggacaagtctctcaaggacagctcatagccgtaccacaaggtttctcggtggtgaaacgcgcaacaagcaaccgattccagtgggttgagttcaaaacaaacgcaaacgcgcaaa

SEQ ID NO: 141713 - DNA, 384 bp, Arabidopsis thaliana
cccacgcgttcgcacggacgacacggttatggcttagaggagaccatctgcagcgccaggtgcaccgataacctcgatgatccgtctcgtgctgacgtgtacaagccacagctcggttacatcagcactctcaacagttacgatctccccatccttcgcttcatccgtctctcagccctccgtggatctatccgtcaaaacgcaatggtgcttccacagtggaacgcaaacgcgaacgccattctttacgtgacagacggggaagcccaaatccagatcgtaaacgacaatggtaacagagtgtttgacggacaagtctctcaaggacagctcatagccgtaccacaaggtttctcggtggtgaaacgcgcaacaaggcaaccg

SEQ ID NO: 141714 - DNA, 408 bp, Arabidopsis thaliana
tagacccacgcgtacggtctctctctcagtctctctctaaacgcataatcttacaataaaatggtgaaactcgcgacggcgcgtgagattagaacgtacggccctcggcttgggaggagcagagccgagtacatcaacgcaggtctatacttgtttgcaaccgtggtgctcatcggcggtttcacagcgacaggattctcatgggaaccaagatccggcctcgtccttattctcttagctctcgttcttataaccgccgtgaatgttcatgatcttgtggctcatctagctggaatcgattaccggttaaggttaatggagtatgatttgcaactggggctagtggaatttgcagtccctctggttcagatagcgggttcggtagtgtttttcttgggaatctttttc

SEQ ID NO: 141715 - DNA, 417 bp, Arabidopsis thaliana
aaaatgggtcgagtctcatctattatctctttctctttgacactcttgatcctcttgaatggctacactgcccaacagtggcccaacgagtgccagctcgatcaactcaatgcgctcgaaccatcccaaatcatcaagagcgagggtggtcgcatcgaggtctgggaccaccatgcaccccagctccgttgctccggctttgcctttgagcgtttcgtcattgagcctcagggtcttttcttgcccactttcttgaacgccggcaaactcacgtttgttgttcacggaaggggtctaatgggaagagttattccgggatgcgccgagacgttcatggagtcaccggtatttggagaaggtcaaggtcagggtcagagtcaagggttccgtgacatgcaccagaaagtagagcaccta

SEQ ID NO: 141716 - DNA, 247 bp, Arabidopsis thaliana
cctgccaatagtcatattcctggcttaaaggtttaagccttccttgtttaggtttgaccgatttaaacctgggaacctgcaattggttaattaattcagttttagttggttggatggtaactcctactcggataaccgtagtaattttagagctaatacgtgcaacaaaccccgacttatggaagggacgcatttattagataaaaggtcgacgcgggctctgcccgttgctctgatgattcatgat

SEQ ID NO: 141717 - DNA, 428 bp, Arabidopsis thaliana
aaagaagtctcagaaaccaattcatgggatttcaatggtgaattctctcctccttcgtctcttaatccttctccgatcaccaatcaccggcctccaccttctcctcatctttcttcactctcttttataactctctgttccttcagaattttccccaatcttcttcttcaaattgaagcagatctagtgatctctttaatggcttcagtgttcttgtatcatgtggtgggagatttaactgtaggaaagccagagatggttgaattctacgaaacagagacggtggaatctgcaattagagcaatcggagaatcgacggagtgtgggattccggtttggaggaagagaacgacaccttcgcttcctgggtttgttgagaatagtgagatgagacaacaaagattcgttgggattttgaattctttaga

SEQ ID NO: 141718 - DNA, 313 bp, Arabidopsis thaliana
gctttggctcggattcgtccgtcttctttcttcttagccgagtacttcggtagattagttggaacgattgatgattttgagttaattgaacgttcggcgtatgagtggtgatcggatagctagtgttcgtaggctccatgctcgcgcatcgaactacctaccacctatccttctcagttaattcacgggcgatgttacgctcgatgatgagttccggggcctgtgtttcgtccctaatttgaaggaattgttgagtttggtttacacctttgcccgcggcttctccttcgtggggaagtcgtgggcacaaaca

SEQ ID NO: 141719 - DNA, 213 bp, Arabidopsis thaliana
gtcaaggacgacagggacaacaaggccaaccatgggaaggacagggacaacagggacaacagggaagacaaggccaaccatgggaaggacagggacaacagggacaacaaggacgacagggacaacaaggccaaccatgggaaggacagggacagcatggacaacaagggttccgtgacatgcaccagaaggtggaacatgtgagacgcggag

SEQ ID NO: 141720 - DNA, 345 bp, Arabidopsis thaliana
  unsure (1)..(345): unsure at all n locations
tccaggtcgaccacgcctccggaaaacccctagtttaaaaggcatttccagacaccgaaaatggcggaaggactcgtttggaagggcaccatgcgtgcacacactgacatggtgacggcaatcgccaccccaatcgataacgcagacatcatcgtctcagcttcccgcgacaaatccatcattttgtggaaactcaccaaggacgacaaagcctacggggtagctcagaggcgtctcactggtcactctcacttcgntgaggatgttgttctctcctccgatgggacaattcgcgctttccggcaagctgggacggcgagctccgtctttgggatcttgctgctg

SEQ ID NO: 141721 - DNA, 356 bp, Arabidopsis thaliana
  unsure (1)..(356): unsure at all n locations
aaataacaaaatggctcgagtntnttntcttctttctttcttcttaacacttttgatccttttccatggctacgcggctcaacagggtcagcagggtcagcagtttccgaacgagtgccagctcgaccagctcaatgcgctcgagccgtcacacgtactgaagagcgaggctggtcgcatcgaggtgtgggaccaccacgctcctcagctccgttgctcaggtgtctcctttgcacgttacatcatcgagtctaagggtctctacttgccctctttctttaacaccgcgaagctctctttcgtggctaagggacgaggtcttatgggaaaagtgatccctggatgcgccgaaacat

SEQ ID NO: 141722 - DNA, 387 bp, Arabidopsis thaliana
aaataacaaaaagggctcgagtctcttcttttctttctttcttcttaacacttttgatccttttccatggctacgcggctcaacagggtcagcagggtcagcagtttccgaacgagtgccagctcgaccagctcaatgcgctcgagccgtcacacgtactgaagagcgaggctggtcggatcgaggtgtgggaccaccacgctcctgagattcgttgctcaggtgtctcctttgcacgttacatcatcgagtctaagggtctctacttgccctctttctttaacaccgcgaagctctctttcgtggctaagggacgaggtcttatgggaaaagtgatccctggatgcgccgaaacattccaagactcatcagagttccaaccacgct

SEQ ID NO: 141723 - DNA, 425 bp, Arabidopsis thaliana
  unsure (1)..(425): unsure at all n locations
cacttctcaagatctctctctgtctttgtcatcaccactctatcgtctactagagggaagagatcatcattctacagtttcaagaagataccatttccaagacttgaaactgtggaagaagcaaaaatggggactttgagtaaggtgctatgtctcatgctgctttgctgtatcgtggctgctgctgagggtactttgaagtacaaggacccaaagcagcctttgggtgcaagaatcagagatttgatgaaccgtatgactctacaagagaagattggtcagatggttcagatcgaacgcagcgtcgctacacctgaagtcatgaagaaatacttcattgggagtgttttgagtggtggnagagtgtgccctcggaaaaagctactcctgaaactggggtgaacatggtcaatgagattcaaaag

SEQ ID NO: 141724 - DNA, 236 bp, Arabidopsis thaliana
caagaacaaaaaatggcggatacagctagaggaacccatcacgatatcatcggcagagaccagtacccgatgatgggccgagaccgagaccagtaccagatgtccggacgaggatctgactactccaagtctaggcagattgctaaagctgcaactgctgtcacagctggtggttccctccttgttctctccagccttacccttgttggaactgtcatagctttgactgttgcaac

SEQ ID NO: 141725 - DNA, 407 bp, Arabidopsis thaliana
ttcagaaccaacaagacagcagaggaaacatcgttcgtgttaagggacctttccaggtcgtgaggccacctctaagacagccctactagagcgaggagtggagacacccacgtagcccacagggcaacggccttgaggagactatctgcagcatgaggtcccacgagaacattgacgaccctgctcgtgctgacgtgtacaagcccagcctaggtcgcgtgaccagcgtcaacagctataccttgcccatcttggagtatgtcaggctcagtgccactcgtggcgttctccagggtaatgcgatggtgcttcctaaatacaacatgaacgctaacgagatcttgtactgcactggaggacaaggaaggatccaagtggtcaacgacaacggacagaacgtgttggac

SEQ ID NO: 141726 - DNA, 422 bp, Arabidopsis thaliana
ccttaacttactcgagattcatcttccagctgaaattgtgaaacttcgtttctgggtttttatcagaaaacactctgtgacttattgtgtggtgatcgaggaaagaaaaaagatggttggtggtggaaacaggagagatgagggatcgatgccgattcagaacaccaacttgtttgctgctttggatacttcgaggaagaagaagaagtctgataaggctggtaagagcaaagcttcctctaagagagaagattcacagaaggagcctgagccacaggttttctgggcacctacgcctctcaaagcaaaggcttgggctgatatcgatagcgatgatgaagatgatgattattacgctaccactgctccacctcagtccctgtggagcacttctgaaagcctccattcagatgcttaagacg

SEQ ID NO: 141727 - DNA, 431 bp, Arabidopsis thaliana
atactttctctttaaccacgtaaccatttcctattcccattattcttataaaaatcgttccacatttctgtatgtccgttaatgattctatgcaatctaaaaaaaactatactattttatattgtgagttgttgttttattcaattaccaataatgtactatttagttgtttttaaaaaatggctaaatatgttaggcacaaaattaaagataccttctactatcatatttgccaaacacatatttcctttccttatcctctttaaaccattactcaaacacaccttattttgttcttatatattttgaatatccaaatttagtttttttcaaatatctctattgattattaccatatatgatttgttgaaatttatgtacatttaatgcctttgattttttaaatgcactctacatttctatataaaaca

SEQ ID NO: 141728 - DNA, 431 bp, Arabidopsis thaliana
cacatagcaaaaaatggcaaacaagttgttcctcgtctgcgcagctctcgctctctgcttcctcctcaccaacgcttccatctaccgcaccgtcgttgagttcgaagaagatgacgccactaaccccataggcccaaaaatgaggaaatgccgcaaggagtttcagaaagaacaacacctaagagcttgccagcaattgatgctccagcaagcaaggcaaggccgtagcgatgagtttgatttcgaagacgacatggagaacccacagggacaacagcaggaacaacagctattccagcagtgctgcaacgagcttcgccaggaagagccagattgtgtttgccccaccttgaaacaagctgccaaggccgttagactccagggacagcaccaaccaatgcaagtcaggaaaatttaccagacagccaagc

SEQ ID NO: 141729 - DNA, 287 bp, Arabidopsis thaliana
gttcactgtcatttttgataccggaagctctaacctttgggtgccatcaggaaaatggtttttctcgctggcttgttactttcatgctaagtacaagtcctcgcgatcaagcacatataagaagagtggaaaacgtgccgcaatccattacggctcaggatcaatctctggcttctttagttatgatgctgtcacggttggcgatttggttgtcaaagatcacgagtctattgagacaaccagtgagcctggtgtaacattcccgggggctacatttgatacaacac

SEQ ID NO: 141730 - DNA, 428 bp, Arabidopsis thaliana
gtcaatgagttgataaagaaacagaagttgtcagcagttagaaagatcttgcagtgacatgactatacgaaaccatggatcgcagatgttagggctaaggttggaagtcgtctaatagagttactcgtaagaacagcttatatacagtctccagctgatcagcaagataatgatctgcctgatgtccgacctgcatttgtgcataccttcaaggtagcgaaaggaagcatgaattctgggagaaaatatggtgtaatcgagtgtgaccctttggtccgcaaaggcttggaaaaaagtgggagatatgcagtgatgccatacatgccaatgctggttcctcctctcaaatggtcgggatatgacaaaggtgcttacttgttcttgacgtcttatataatgaaaactcatggagccaagcaacaaagaga

SEQ ID NO: 141731 - DNA, 409 bp, Arabidopsis thaliana
cgtgttttttatatatattttgaaaatcttttacgccttaaaaggatctacgataattaaaaaaaaaatggcaacggaatgcattgcaacggtccctcaaatattcagtgaaaacaaaaccaaagaggattcttcgatcttcgatgcaaagctccttaatcagcactcacaccacatacctcaacagttcgtatggcccgaccacgagaaaccttctacggatgttcaacctctccaagtcccactcatagacctagccggtttcctctccggcgactcgtgcttggcatcggaggctactagactcgtctcaaaggctgcaacgaaacatggcttcttcctaatcactaaccatggtgtcgatgagagcctcttgtctcgtgcctatctgcatatggactctttcttt

SEQ ID NO: 141732 - DNA, 391 bp, Arabidopsis thaliana
gaacgtgttggaccaacaggtgcagaagggacagctcgtggtcatcccacaagggttcgcatacgttgtccagtcccacggaaacaagttcgagtggatctctttcaaaactaatgaaaacgcaatgatcagcactttggcgggtagaaccttgctcttgagggcattgccattggaggtcatatcaaatggtttccagatctctcccgaggaagctaggaagatcaagttcaacacacttgagaccaacttgacccgcgcttgcggtaggcaacaacaacagttgatcgaggagattgtcgaggcttaaatcaaaacgtttttctttttcttaataaagtatggtcaagttgtaatcacgtccctttacctttaacgtacgttgtaaata

SEQ ID NO: 141733 - DNA, 430 bp, Arabidopsis thaliana
aacaaaaagaaaatggttaagctcagcaatctcctcgttgcaaccttcggggttctgctcgtccttaacggctgccttgcgaggcagtcacttggggttcctcctcagctacagaacgagtgtaacctcgacaacctagatgttctccaagccaccgaaactatcaagagtgaagccggtcagatcgagtactgggaccacaaccaccctcagctccgatgtgttggtgtttccgttgctcgttatgtaattgaacaaggcggtctttacttgcccaccttcttcacttccccaaaaatttcctacgtcgttcaaggaacgggtatcagcggaagagtggtccctggatgtgccgagaccttcatggactcgcagccgatgcaaggacaacaacatggccaaccatggcaaggacgacagggacaacaag

SEQ ID NO: 141734 - DNA, 428 bp, Arabidopsis thaliana
ctttcctcactctctggtctccctatatcagcgctttttagctgatcctctctccggcatttctctctctctctttttttaagccatggagaaatttgcgcctgtcgctgctctgttactgcttcttctctgttttccggtagctttctccggtcatgattatggtcaagctctttccaagagtcttctcttcttcgaagctcagagatctggtgttcttcctcgtaaccagagagtcacttggcgctctcactccggtctcaccgatggcaaatcaagcggcgtgaatctggtcggaggttactacgacgccggagacaatgtgaaatttggattaccgatggcttttacggtgacgatgatggcgtggagtgtgattgagtacgggaatcaattacaagccaacggcgagcttggaaactccattg

SEQ ID NO: 141735 - DNA, 433 bp, Arabidopsis thaliana
  unsure (1)..(433): unsure at all n locations
accacattattttcactgagcgcataacatttttgagacaagagactctctctctctctctgctctctttctctccccctctctccggcgatggttgttgctatggaccaacgcaccaatgtgaacggagatcccggcgccggagaccggaagaaagaagaaaggtttgatccgagtgcacaaccaccgttcaagatcggagatataagggcggcgattcctaagcactgttgggttaagagtcctttgagatcaatgagttacgtcgtcagagacattatcgccgtcgcggctttggccatcgctgccgtgtatgttgatagctggttcccttggcctctttatttgggccgnccaaggaacacttttctgggccatctttgttctcggccacgactggggacatgggagtttctcagacattcctctactg

SEQ ID NO: 141736 - DNA, 368 bp, Arabidopsis thaliana
ccaaaaccaactcgaccgcaaccctagtgtgttccatttggccggaaacaaccagcagggaggctttggcggttcacagcaacaacaagaacagaaaaacttgtggagcgggttcgacgcacaggtcatagctcaagcattgaaaattgacgttcagttggctcagcagcttcagaaccaacaagacagcagaggaaacatcgttcgtgttaagggacctttccaggtcgtgaggccacctctaagacagccctacgagagcgaggagtggagacacccacgtagcccacagggcaacggccttgaggagactatctgcagcatgaggtcccacgagaacattgacgaccctgctcgtgctgacgtgt

SEQ ID NO: 141737 - DNA, 230 bp, Arabidopsis thaliana
acaagaacagaaaaacttgtggagcgggttcgacgcacaagtcatagctcaagcattgaaaattgacgttcagttggctcagcagcttcagaaccaacaagacagcagaggaaacatcgttcgtgttaaaggacctttccaggtcgtgaggccacctctaagacagccctacgagagcgaggagtggagacacccacgtagcccacagggcaacgggcttgaggagacta

SEQ ID NO: 141738 - DNA, 427 bp, Arabidopsis thaliana
atctttgtgcttcctgcaaatagctctttgttgttgatctttctcctccatgaacaaacatgggtaagacacgtggtatgggagctgggcgtaagttgaagagactccgaattaaccagaggtgggctgacaagcagtacaagaagtctcacttgggaaatgagtggaagaagccttttgctggttcttctcacgctaaaggaattgtccttgagaaaatcggtattgaggctaagcagcctaactctgctatccgtaagtgtgctagagttcagcttatcaagaatggaaagaagattgctgcctttgtccccaatgatggttgtttgaactacatcgaggaaaacgatgaggtcttgattgctggatttggtcgtaagggtcacgctgtgggagatattcccggagttaggttcaaggtcgtgaa

SEQ ID NO: 141739 - DNA, 429 bp, Arabidopsis thaliana
gaaaatggttaagctcagcaatctcctcgttgcaaccttcggggttctcctcgtccttaacggctgccttgcgaggcagtcacttggggttcctcctcagctacagaacgagtgtaacctcgacaacctagatgttctccaagccaccgaaactatcaagagtgaagccggtcagatcgagtactgggaccacaaccaccctcagctccgatgtgttggtgtttccgttgctcgttatgtaattgaacaaggcggtctttacttgcccaccttcttcacttccccaaaaatttcctacgtcgttcaaggaacgggtatcagcggaagagtggtccctggatgtgccgagaccttcatggactcgcagccgatgcaaggacaacaacaaggccaaccatggcaaggacgacagggacaacatggccaacc

SEQ ID NO: 141740 - DNA, 421 bp, Arabidopsis thaliana
ttcgaaaaagaaaagaaacggaatgatcgagacgaccaaaggcggttcaggatcgtatccgatcaaaaccatcgtcgttttggttcaagaaaatcgttcttttgaccacaccctaggctggtttaaagaactaaaccgggaaatcgacggcgtcacgaaatctgatcccaaatccaacacggtttcgtcctccgacacaaactctcttcgtgtagtcttcggggatcagtctcagtacgttaacccggatccaggtcactccattcaggatatctacgaacaagtgtttggtaagccatgggattcaggtaaaccggatccaaacccgggtcatcctaacatgtccggttttgctcaaaacgccgagagaaacaagaaagggatgtcctccgcggttatgaacggatttaaaccgaatgct

SEQ ID NO: 141741 - DNA, 431 bp, Arabidopsis thaliana
ctaaaaaaaaatctttctggtgagtaacgaaaaaaatgtgtccggtggagaacaaatggttaaaggtgggtcaaaaaggagctggtcctggggctagaagctcacatgccatgaccgtcgttgggaacaaagtttactgttttggtggtgagcttaagccaacgatccatattgataacgatctttacgttttcgatcttgagactcaagaatggtcgatagctcctgcgaccggagaggctcctttcccctgttttggtgtctcgatggtaacgatcggttcaacgatctatgtctacggtggccgtgacgataaacggagatacaacggtcttcattcgtatgatactgagaccaatgagtggaaattgttggctcctgttgaggaagggcttcctggtcgtagctatcattcaatggctggtgatgat

SEQ ID NO: 141742 - DNA, 431 bp, Arabidopsis thaliana
gccggaaacaacccacaagggcaggaatggctacaaggccgtaagcaacagaagcaaaacaacatcttcaatggcttcgcacctgagatcttggctcaagccttcaagatcaatgtcgagacggctcagcagctccagaaccagcaagataaccgtggcaacatcgtcaaggtcaacggacctttcggcgtcattaggccacccttgagacgcggcgaaggcggccaacaaccacatgaaatagctaatggtttagaggagactttgtgcaccatgcgatgcactgaaaacctcgatgacccgtcggatgctgacgtgtacaagccatcactcggatacattagcacacttaacagctacaatcttcctatcctcagacttctccgccttagcgctcttcgtggctccatccgtaaaaacgccttggtgct

SEQ ID NO: 141743 - DNA, 427 bp, Arabidopsis thaliana
aagaggaagaaaaatgggtcgagtctcatctattatctctttctctttgacactcttgatcctcttcaatggctacactgcccaacagtggcccaacgagtgccagctcgatcaactcaatgcgctcgaaccatcccaaatcatcaagagcgagggtggtcgcatcgaggtctgggaccaccatgcaccccagctccgttgctccggctttgcctttgagcgtttcgtcattgagcctcagggtcttttcttgcccactttcttgaacgccggcaaactcacgtttgttgttcacggaaggggtctaatgggaagagttattccgggatgcgccgagacgttcatggagtcaccggtatttggagaaggtcaaggtcagggtcagagtcaagggttccgtgacatgcaccagaaagtagagcaccta

SEQ ID NO: 141744 - DNA, 383 bp, Arabidopsis thaliana
  unsure (1)..(383): unsure at all n locations
cgatggtgcaccgagaatgggaccaacgttgggagctatgatgatatcgggacaaaaggcgggacaacttgctcttaaggctttggggctaccgaatgctattgatggaactctcgtcggaaacctaagcccggagctggtcttagccgcagcagattcagctgaaaccgtagatgcttaaaatcaaaaggttttaacttttaagaaaatgtcccttcatccttcggatgttgaaggagtgcaataaaaggagtttaggtgttttatatgtcttgaacttttctggtgtctttggttctctcttctcaatgaaatgtttcttctgtgtaaaatatcttatccgctcattcgtaatgcgtatgttctcgttcttctccttcnna

SEQ ID NO: 141745 - DNA, 416 bp, Arabidopsis thaliana
taggaactactatcaaagtaattcttatgattcaataattttattatattatttcatatttcaattaaagtttttggtttttttggctggattaatcttagcgattacttaattagaattacgtcctaagtcattggatgattgtatcattaactatttctttattttggtgtgaggaacttatcatgaatccactggtttctgctgcttcggttattgctgctgggttggctgttgggcttgcttctattggacctggagtcggtcaaggtacagctgcgggtcaagctgtcgaaggtatcgcgagacaacctgaggcagaaggaaaaatacgaggtactttattgcttagtttggcttttatggaagctttaacaatttatggcctggttgtagcattagcgcttttatttgcg

SEQ ID NO: 141746 - DNA, 426 bp, Arabidopsis thaliana
ggaacaacaacaattgatgctatgacatacaacaacagcaagaaatttgtgtgagagtagagagtcttgcttcagttgaatcaaagattggtcctttttttttttcgttttctctttcctgctttttttgtttgtagtttctgatctctcaggaaggctttttataaatttgccctcaatttctccgtccctactactctttttgatcaatttctacgggaaaaagcacgaatctttaaacccgggcatgtccttgtaatcgagtatgttgtgtaagtgatgaatttgtggtgagatctggtgagaagtttcctcttttttctcagattgcggtaaaaaaaagagtttttaataaggaagagattgagattagattttatcgcttttgtttgtgtgatatgggtaacgtgaacgcgagagaagaag

SEQ ID NO: 141747 - DNA, 397 bp, Arabidopsis thaliana
  unsure (1)..(397): unsure at all n locations
ggaacaaacaaacatttgttgctttgccatacaacatcagcaggaaatttgtgtgagagtagagagtcttgcttcagttgaatcaaagattggtcctttttttttttcgttttctctttcctgctttttttgtttgtagtttctgatctctcaggaaggctttttataaatttgccctcaatttctccgtccctactactctttttgatcaatttctacgggaaaaagcacgaatctttaaacccgggcatgtccttgtaatcgagtatgttgtgtaagtgatgaatttgtggtgagatctggtgggaagtttccttttttttctcagattgcnggtaaaaaaaagagttttaaataggaaggggttgagaataggatttaatcggttttggttggg

SEQ ID NO: 141748 - DNA, 429 bp, Arabidopsis thaliana
tttttcttcttcttgtttctgtgttaccgatctggctctgtcttcttcttcttcttcttcttcgtttacgtctctgtgaaatgctcaagctgattagggtttatcaactttttctcaactttcttgttatctccttcgttatcctctctgtcttctcagcttagcagctattgtgcatttgaagctgtactcggaagaaaagcccatagaagagtcaaatataacaaaaaatggctgcggagcttgtaagttctgcaacaagtgagaagcttgcagatgtggactgggccaaaaacattgagatctgtgaattagctgctcgagatgaaaggcaagcaaaagatgttatcaaggctatcaaaaaacgcttgtgaagcaagaacccaaatactcaattatatgctgtccagttgctagagatgttgatga

SEQ ID NO: 141749 - DNA, 431 bp, Arabidopsis thaliana
aaaacatacacaaatagcaaaacatggctaacaagctcttcctcgtctgcgcaactctcgccctctgcttcctcctcaccaacgcttccatctaccgcaccgttgtcgaattcgaagaagatgacgccagcaaccccgtaggtccaagacagagatgccagaaggagtttcagcaatcacaacacctaagagcttgccagagatggatgagcaagcaaatgaggcaaggacgtggtggtggtccttccctcgacgatgagttcgatttcgagggcccccagcagggataccagctactccagcagtgctgcaacgagcttcgccaggaagagccagtttgcgtttgccccaccttgaaacaagctgccagggcagttagccttcagggacagcacggaccattccaatccaggaaaatttaccagtcagct

SEQ ID NO: 141750 - DNA, 420 bp, Arabidopsis thaliana
agaaaatggttaagctcagcaatctcctcgttgcaaccttcggggttctcctcgtcgttaacggctgccttgcgaggcagtcacttggggttcctcctcagctacagaacgagtgtaacctcgacaacctagatgttctccaagccaccgaaactatcaagagtgaagccggtcagatcgagtactgggaccacaaccaccctcagctccgatgtgttggtgtttccgttgctcgttatgtaattgaacaaggcggtctttacttgcccaccttcttcacttccccaaaaatttcctacgtcgttcaaggaacgggtatcagcggaagagtggtccctggatgtgccgagaccttcatggactcgcagccgatgcaaggacaacaaccaggccaaccatggcaaggacgacagggacaac

SEQ ID NO: 141751 - DNA, 413 bp, Arabidopsis thaliana
  unsure (1)..(413): unsure at all n locations
cgaaatagggggtttccaggtccatccccaagttcttattacttctggggttgtaattgctatcttattaggttccgcagttctagcgattcgcaatccacaaacaattccaactgacggccaaaatttctttgaatttgtccttgaattcattcgagacgtgagtaaaacccagattggagaagaatatggtccatgggttccctttattggaaccctnggtttatttatttttggttctaactggtcaggagcccttttaccgtggaaaattatccagttacctcaaggggagttagcagcaccaacgaatgatataaatacgacggttgctttagctttactcacatcagtagcctatttttatgcggggcttagccaaaaagggattagggttttcagtaaatacattc

SEQ ID NO: 141752 - DNA, 418 bp, Arabidopsis thaliana
accacaaaaagtaagaagataaaaatggctcgagtctcttctcttctttctttctgcgtaacacttttgatccttttccatggctacgcggctcaacagggtcagcagggtcagcagtttccgaacgagtgccagctcgaccagctcaatgcgctcgagccttcacacgtactgaagagcgaggctggtcgcatcgaggtgtgggaccaccacgctcctcagctccgttgctcaggtgtctcctttgcacgttacatcatcgagtctaagggtctctacttgccctctttctttaacaccgcgaagctctccttcgtggctaaaggacgaggtcttatgggaaaagtgatccctggatgcgccgaaacattccaagactcatcagagttccaaccacgcttcgaaggtcaaggtcaaa

SEQ ID NO: 141753 - DNA, 429 bp, Arabidopsis thaliana
cttgcttaatccgactctgatttcatgttcctctaatgggttatctcaaataccttcaaagtttcttactttggctaaaaggaatgattttttcgattggatggttggaatcagaaggagaatccatgagaatccagagttaggttatgaggaagtagagacatctaagcttgttagagcagagttggagaagatgggtgtttcttataagtacccagttgctgttactggtgttgttgggtatgttggaactggtcatgctccttttgttgctttaagggctgatatggatgcacttgctatgcaggaaatggtggaatgggaacacaagagtaaggttccagggaagatgcacgcttgtggacatgacgctcacactacgatgcttctcggtgctgcaaaattgctcaaagaacatgaagaagagct

SEQ ID NO: 141754 - DNA, 430 bp, Arabidopsis thaliana
cgaaaagagagagagatgagactcgtcgtctcaagctgtctactagttgcagctccgtttctctcctctctgttacgagtctcactcgccactgttgtcctcaattccatctccgcctcttttgccgatctcccagccaaatttgacggctccgtgaccaaaaacggaatctgtggagctctatacgtcgcagatcctctcgacggttgctcaccgcttctccacgccgtcgcatccaactggacgcaacacagaactactaagttcgctttgataatcagaggcgaatgttcttttgaggataagctgctcaatgcccagaactcaggttttcaagctgtgattgtctatgacaacattgacaacgaagatctcatcgtcatgaaggtgaaccctcaggacattacagttgatgcaagtcttcgttcaa

SEQ ID NO: 141755 - DNA, 426 bp, Arabidopsis thaliana
atttcttaaatttctctccctaaatattccgagttcttgatttttgataacttcaggtcaaaatgggagtatactcgagagcggttgcgttttcggtctttgtgtcgtttctgctgtttttcactgcttattctaagagaaatgatggaacattcagagttggcctgaaaaaactgaagttggatcctaacaaccgactcgcaacacgctttggttccaagcaagaagaggccttgagatcttctttgcgttcgtacaacaacaatcttggtggtgattctggagatgctgatattgtcccgctcaagaattacttggatgctcagtactatggtgagattgctattggtactccaccgcagaagttcactgtcatttttgataccggaagctctaacccttgggtgccatcaagaaaatgttttt

SEQ ID NO: 141756 - DNA, 432 bp, Arabidopsis thaliana
ggagcgggttcgacgcacaggtcatagctcaagcattgaaaattgacgttcagttggctcagcagcttcagaaccaacaagacagcagaggaaacatcgttcgtgttaagggacctttccaggtcgtgaggccacctctaagacagccctacgagagcgaggagtggagacacccacgtagcccacagggcaacggccttgaggagactatctgcagcatgaggtcccacgagaacattgacgaccctgctcgtgctgacgtgtacaagcccagcctaggtcgcgtgaccagcgtcaacagctataccttgcccatcttggagtatgtcaggctcagtgccactcgtggcgttctccagggtaatgcgatggtgcttcctaaatacaacatgaacgctaacgagatcttgtactgcactggaggacaaggaa

SEQ ID NO: 141757 - DNA, 213 bp, Arabidopsis thaliana
  unsure (1)..(213): unsure at all n locations
gttgatcgaggagattgtcgaggcttaaatcaaaacgtttttctttttcttaataaagtatggtcagtttgtaatcacgtccctttacctttaacgtacgtgtaaaatatgtgtctgcggcacctcacttgtaataacactttcttctcataaataaaagggaagtttcgagttaaaaaaaaaaataaaaaaaaaaaaaaaaaannnnaaggg

SEQ ID NO: 141758 - DNA, 427 bp, Arabidopsis thaliana
  unsure (1)..(427): unsure at all n locations
aaaaagaaaatggttaagctcagcaatctcctcgttgcaaccttcggggttctcctcgtccttaacggctgccttgcgaggcagtcacttggggttcctcctcagctacagaacgagtgtaacctcgacaacctagatgttctccaagccaccgaaactatcaagagtgaagccggtcagatcgagtactgggaccacaaccaccctcagctccgatgtgttggtgtttccgttgctcgttatgtaattgaacaaggcggtctttacttgcccaccttcttcacttccccaaaaatttcctacgtcgttcaaggaacgggtatcagcggaagaagggtccctggatgtgccgagaccttcatggactcgcagncgatgcaaggacaacaacaaggccaaccatggcaaggacgacagggacaacaag

SEQ ID NO: 141759 - DNA, 440 bp, Arabidopsis thaliana
gcgtccgcattttttacaccgccgaaaacggcggctatggctgagaattaaatccaaaggaaaggagtgattagacgaagcaaaatattttagttctttcttagtctttctttgttgcaggctacgaagattttaggacgataaaaattttctgaaggaatagaatataatctatttttacctttttaaaattctctgataaagaaaaaaagacaaataaatatggggtttaggttttgccttttttaatttgtgtgtttctttaggaattttaaactttcttcctcggtgctcaaagacgtttcatggaaatttacgaactttgatgtagaagacgtttcatggaccgcttattgtgctaaatcaaccggttcgacaggtttatctgtattttattgggttttctttgggattattgtcacaaatacttatacaagctc

SEQ ID NO: 141760 - DNA, 374 bp, Arabidopsis thaliana
  unsure (1)..(374): unsure at all n locations
cgacggacagcaaccacttgtcatcgtcagcatcttcgatctagccagtcaccagaaccagcttgaccgcaacccaaggccattttacttagccggaaacaacccacaaggtcaagtatggctacaaggacgagagcaacagccacagaagaacatcttcaatggatttggacccgaggttattgctcaagctttgaagattgatcttcagacagcgcagcaacttcagaaccaagatgacaaccgtggaaacattgtccgagtccaaggcccgttcggtgtcattaggccgcctttgaggggccagagacctcangaggaggaagaagaagaagaaggacgacacggacgacacggtaatggcttagaggaga

SEQ ID NO: 141761 - DNA, 401 bp, Arabidopsis thaliana
tcgcgacggacagaaccaactggtaatggtaagattcttcaatctagccagtcaccaaacccagcttgaccgcaacccaaggccattttacttatgccggaaacaacccacaaggtcaagtatggctacaaggacgagagcaacagccacagaagaacatcttcaatggatttggacccgaggttattgctcaagctttgaagattgatcttcagacagcgcagcaacttcagaaccaagatgacaaccgtggaaacattgtccgagtccaaagcccgttcggtgtcattaggccgcctttgaggggccagagacctcacgaggaggaagaagaagaagaaggacgacacggacgacacggtaatggcttagaggagaccatctgcagcgccaggtgcacc

SEQ ID NO: 141762 - DNA, 429 bp, Arabidopsis thaliana
gagaaatcaaatggaagtagaaatgcatggtgatgtctccaaatgggaaggctacgctgactggagaaacaaagccgccttgagaggccgtcacggcggaatgctcgccgcctccttcgtcttggcggtggagatattggagaatctagcgtttttagcgaacgcaagcaacttggtgttgtatctcaagaacttcatgcacatgtctctagccagatcgtcgagtgaagtgaccactttcatggccacagccttccttctcgctctcctcggtggcttccttgctgacgccttcttctccacattcgtcattttcctcatctccgcctccatcgagtttctgggacttatcctgctcacaatccaagcccggcgtccgtccttaatgccgccgccatgcaagagctctgccgcattgcgatgcgaggt

SEQ ID NO: 141763 - DNA, 420 bp, Arabidopsis thaliana
  unsure (1)..(420): unsure at all n locations
gaagcaatagctatgaaaagctaaaccctttccttcttcttcttcttcttcttcttgttcttcttcgattgtttagattacttgggtttgacccaagtttgcttctttctatgattcatcaatctagatcttgctatctgggtccagaaacgattcacgcgcttcattcatgatataaagttactaccttttttttattttaccttctgggtcatggttttgtctgcttttcgtcttttgcttttgtctggatgattcataatctctcgagatctattatgttcacaagagttgttcttatgcgtggtgagatgatcttaggagtgtttcactatctttcttcaattcgggtttttagtttctgagatctgnttttgaagaatctgatctgagtttgaggaagtttgactaaatagatcg

SEQ ID NO: 141764 - DNA, 431 bp, Arabidopsis thaliana
aacaaaaagaaaatggttaagctcagcaatctcctcgttgcaaccttcggggttctgctcgtgcttaacggctgccttgcgaggcagtcacttggggttcctcctcagctacagaacgagtgtaacctcgacaacctagatgttctccaagccaccgaaactatcaagagtgaagccggtcagatcgagtactgggaccacaaccaccctcagctccgatgtgttggtgtttcccggtgctcgttatgtaattgaacaaggcggtctttacttgcccaccttcttcaacttcccaaaaatttcctacgtcgttcaaggaacgggtatcagcggaagagtggtccctggatgtgccgagaccttcatggactcgcagccgatgcaaggacaacaacaaggccaaccatggcaaggacgacagggacaacaag

SEQ ID NO: 141765 - DNA, 388 bp, Arabidopsis thaliana
aaaccttgaaacctttaaaaaatcgaatctatggctaagctcattctcgttttcgcaactcttgccctcttcatcctcctagccaacgcatccatctaccgcacagtggtggagttcgaggaagatgatgacgtgagcaacccacaacaaggtaagtgccagagggagtttatgaagcatcagcaactaagaggttgcaagcaatggatccgcaagagagctcaacaaggaagaatcggatacgaagctgatgactttgagctcactcttgatgtcgatcttgaggacgatgagaacccaatggggccttaacaacagtcatctcttaaaatgtgttgtaatgaattaaggcaagtggacaagatgtgtgtgtgtcctacactgaaaa

SEQ ID NO: 141766 - DNA, 261 bp, Arabidopsis thaliana
cacgcgtccgcaaacagaaaatggctaaacttttcaatctcctggttacaacattcgggggggtggtggtccttaacgggtgagtcgcctagcaatcactcaatctccggctttcaatgccgttctgatccaaatcttcgcaggttagctgttctccaagccaccggagctatcaagagtgtatccggcctgatcgagtactgggaccacagccacccttagctacgatgtgttggcgtggacgatgctcgttctgtaatt

SEQ ID NO: 141767 - DNA, 435 bp, Arabidopsis thaliana
taaaaatggctcgagtctcttctcttctttctttctccttaacacttttgatccttttccatggctacgcggctcaacagggtcagcagggtcagcagtttccgaacgagtgccagctcgaccagctcaatgcgctcgagccttcacacgtactgaagagcgaggctggtcgcatcgaggtgtgggaccaccacgctcctcagctccgttgctcaggtgtctcctttgcacgttacatcatcgagtctaagggtctctacttgccctctttctttaacaccgcgaagctctccttcgtggctaaaggacgaggtcttatgggaaaagtgatccctggatgcgccgaaacattccaagactcatcagagttccaaccacgcttcgaaggtcaaggtcaaagccagaggttccgtgacatgcaccaaaaagtggagc

SEQ ID NO: 141768 - DNA, 204 bp, Arabidopsis thaliana
  unsure (1)..(204): unsure at all n locations
tcgaacaaaacaaaaagaaaatggttaagctcagcattctcctcgttgcaaccttcggggttctcctcgtccttaacggctgccttgcgaggcagtcacttggggttcctcctcagctacagaacgagtgttacctcgacaacctatatgttctccaaagccaaccgaaactatcnaagagtgaaagcccggtcaggaatcgag

SEQ ID NO: 141769 - DNA, 337 bp, Arabidopsis thaliana
  unsure (1)..(337): unsure at all n locations
caaaaggggggggaggagaccgggggattcattgagaaacgaaccaccattggccgtctcatcattccagtgccctaccatcttctcctcctcctcaatctccggctttcaatgccgttctgatccagatctcgtcggttctcccgtcggtggatcatctcgccgtcgtgtccatgcctncgccgggatttcttcctcattcaccggngacgctggattatcctccaggatcttaagatttcctcctaatttcgtccgtcagctgagcattaaagcccgtagaaactgtagcaacatcggtgttgcacagatcgtggcggctaagtggtccaacaac

SEQ ID NO: 141770 - DNA, 356 bp, Arabidopsis thaliana
ggcccaggcgtccgcaaaaggggggggaggagaccgagagattcattgagaaccgaaccaccattggccgtctaatcattccagtgccctaccatcttctcctcctcctcaatctccggctttcaatgccgttctgatccagatctcgtcggttctcccgtcggtggatcatctcgccgtcgtgtccatgcctccgccgggatttcttcctcattcaccggggacgctggattatcctccaggatcttaagatttcctcctaatttcgtccgtcagctgagcattaaagcccgtagaaactgtagcaacatcggtgttgcacagatcgtggcggctaagtggtccaacaacccatc

SEQ ID NO: 141771 - DNA, 436 bp, Arabidopsis thaliana
gaaacccaaaccctcattccaaaaaatggggtctcgctctcaaaacctctcctttatcgtcctcctcctccttggcttcgttgccgtctcctatgcttgcgactgtacccctcctaaaccatcaccagcacctcacaaaccaccaaaacatccagtcaaaccgcctaaacctcctgccgtcaaaccacctaaaccaccggcagtaaaaccacctactccaaaacctcccaccgtgaaaccccatcctaaaccaccaaccgtcaaaccccatcctaaaccaccaaccgtcaaaccccaccctaagccacccaccgtcaaaccaccccaccctaaaccacccaccaaaactcacccccacccaaaacctcccatcgtaaagccaccaaccaagccttctccgtccacccctaaacctcccaccaaaccttccccgtcc

SEQ ID NO: 141772 - DNA, 418 bp, Arabidopsis thaliana
gggacgaggtcttatgggaaaagtgatccctggatgcgccgaaacattccaagactcatcagagttccaaccacgcttcgaaggtcaaggtcaaagccagaggttccgtgacatgcaccagaaagtggagcacattaggagcggtgataccattgccacaacacccggtgtagcacagtggttctacaacgacggacaggaaccacttgtcatcgtcagcgtcttcgatctagccagtcaccagaaccagcttgaccgcaacccaaggccattttacttagccggaaacaacccacaaggtcaagtatggctacaaggccgagagcaacagccacagaagaacattttcaatggatttggacccgaggttattgctcaagctttgaagatcgatcttcagacagcgcagcaacttcag

SEQ ID NO: 141773 - DNA, 393 bp, Arabidopsis thaliana
caaggccaaccatgggaaggacagggacaacagggacaacaaggacgacagggacaacaaggccaaccatgggaaggacagggacagcagggacaacaagggttccgtgacatgcaccagaaggtggaacatgtgagacgcggagacgtctttgccaacactccaagctctgcccactggatctacaactcaagagaacagccacttgtcatcatcgctcttctcgacatcgccaactaccaaaaccaactcgaccgcaaccctagagtgttccatttggccggaaacaaccagcaaggaggctttggcggttcacagcaacaacaagaacagaaaaacttgtggagcgggttcgacgcacaagtcatagctcaagcattgaaaattgacgtt

SEQ ID NO: 141774 - DNA, 430 bp, Arabidopsis thaliana
ggacctttccaggtcgtgaggccacctctaagacagccctacgagagcgaggagtggagacacccacgtagcccacagggcaacggccttgaggagactatctgcagcatgaggtcccacgagaacattgacgaccctgctcgtgctgacgtgtacaagcccagcctaggtcgcgtgaccagcgtcaacagctataccttgcccatcttggagtatgtcaggctcagtgccactcgtggcgttctccaaggtaatgcgatggtgcttcctaaatacaacatgaacgctaacgagatcttgtactgcactggaggacaaggaaggatccaagtggtcaacgacaacggacagaacgtgttggaccaacaggtgcagaaaggacagctcgtggtcatcccacaagggttcgcatacgttgtccagtcccacg

SEQ ID NO: 141775 - DNA, 434 bp, Arabidopsis thaliana
  unsure (1)..(434): unsure at all n locations
atttgcaaaaaacttctctctgaatctcagtgagttcttataaaatgagagggatggtgagttttgccgtttgggctctctttgctgctttactctcacagcagctctttgcttctgttgcttccgtaaggtttgaggatgccaaaacatactacttatctcctccctctggctcacatggaactcctccatcacacacgcctccttcttctaactgtggaagtccaccttacgacccttctccttcaactccttctcacccttcacctccatcacatactccaactccttccactccatcacacactccaactccacacactccatcacacacgccaactccacacacccctncttgtaactgtggaagtccaccttcccacccttncacgccttcacacccttccactccttcgcacccaacgccatcacac

SEQ ID NO: 141776 - DNA, 436 bp, Arabidopsis thaliana
taccgaaccgcagggccgacctacacctaccggtgggttcgacgcacaggtaatagctcaagctttgaaaattgacgttcagttggctcagcagcttcagaaccaacaagacagcagaggaaacatcgttcgtgttaagggacctttccaggtcgtgaggccacctctaagacagccctacgagagcgaggagtggagacacccacgtagcccacagggcaacggccttgaggagactatctgcagcatgaggtcccacgagaacattgacgaccctgctcgtgctgacgtgtacaagcccagcctaggtcgcgtgaccagcgtcaacagctataccttgcccatcttggagtatgtcaggctcagtgccactcgtggcgttctccaaggtaatgcgatggtgctttctaaatacaacatgaacgctaacgagatc

SEQ ID NO: 141777 - DNA, 410 bp, Arabidopsis thaliana
taatcttttaagctctctccatcgtcgtcgaatctgtgactctcgtgatcatcgcctgaaaaaaatttgagataatggccagaaagttcttcgtcggaggcaactggaaatgtaacggaactgctgaggaggtgaagaagattgtgaacactcttaatgaagctcaggttccttcacaggatgttgtagaggttgtggttagccctccatatgtttttcttcccctggttaagagcacattgaggtctgacttttttgttgcggcacaaaactgttgggttaagaaaggaggtgctttcactggtgaagtgagtgcggagatgcttgtgaacttggatattccatgggttatccttggtcactctgaaaggagggcaatccttaatgaatcaagcgagttcgtcggagac

SEQ ID NO: 141778 - DNA, 435 bp, Arabidopsis thaliana
tgagcctcagggtcttttcttgcccactttcttgaacgccggcaaactcacgtttgttgttcacggaaggggtctaatgggaagagttattccgggatgcgccgagacgttcatggagtcaccggtatttggagaaggtcaaggtcagggtcagagtcaagggttccgtgacatgcaccagaaagtagagcacctacggtgcggtgacaccattgcaacaccatctggtgtagctcaatggttctacaacaatggaaatgagcctctcattcttgttgcagccgcggatctcgccagcaaccagaaccagcttgaccgcaaccttagaccatttttgatagccggaaacaacccacaagggcaggaatggctacaaggccgaaagcaacagaagcaaaacaacatcttcaatggcttcgcacctgagatcttggc

SEQ ID NO: 141779 - DNA, 370 bp, Arabidopsis thaliana
cactaaaccaatgaaaatgcaagcagttcttgttatcttggttttctccggtttactttcggttaagacagcgttagcagcacgacatgtgatcggcgggagccaaggctgggaacaatccgttgattttgattcttggtcttctgatcaatctttcaaagtcggcgaccaaatcgtttttaagtattcagaactacacagcgttgtggagctaggaagtgaaacagcatacaagagttgtgacctgggaacatcagttaattccttaagctctggaaacgacgtcgttaagctttctaaaaccggtactcgttacttcgcttgtggaaccgttgggcattgcgaacaaggcatgaagattaaagtcaac

SEQ ID NO: 141780 - DNA, 416 bp, Arabidopsis thaliana
aaaacatacacaaatagcaaaacatggctaacaagctcttcctcgtctgcgcaactctcgccctctgcttcctcctcaccaacgcttccatctaccgcaccgttgtcgaattcgaagaagatgacgccagcaaccccgtaggtccaagacagagatgccagaaggagtttcagcaatcacaacacctaagagcttgccagagatggatgagcaagcaaatgaggcaaggacgtggtggtggtccttccctcgacgatgagttcgatttcgagggcccccagcagggataccagctactccagcagtgctgcaacgagcttcgccaggaagagccagtttgcgtttgccccaccttgaaacaagctgccagggcagttagcctccagggacagcacggaccattccaatccaggaaa

SEQ ID NO: 141781 - DNA, 428 bp, Arabidopsis thaliana
aacctagatgttctccaagccaccgaaactatcaagagtgaagccggtcagatcgagtactgggaccacaaccaccctcagctccgatgtgttggtgtttccgttgctcgttatgtaattgaacaaggcggtctttacttgcccaccttcttcacttccccaaaaatttcctacgtcgttcaaggaacgggtatcagcggaagagtggtccctggatgtgccgagaccttcatggactcgcagccgatgcaaggacaacaacaaggccaaccatggcaaggacgacagggacaacaaggccaaccatgggaaggacagggacaacagggacaacaaggaagacaaggccaaccatgggaaggacagggacaacagggacaacaaggacgacagggacaacaaggccaaccatgggaaggacagggaca

SEQ ID NO: 141782 - DNA, 429 bp, Arabidopsis thaliana
  unsure (1)..(429): unsure at all n locations
gttcgacgcacaggtcatagctcaagcattgaaaattgacgttcagttggctcagcagcttcagaaccaacaagacagcagaggaaacatcgttcgtgttaagggacctttccaggtcgtgaggccacctctaagacagccctacgagagcgaggagtggagacacccacgtagcccacagggcaacggccttgaggagactatctgcagcatgaggtcccacgagaacattgacgaccctgctcgtgctgacgtgtacaagcccagcctaggtcgcgtgaccagcgtcaacagctataccttgcccatcttggagtatgtcaagctcagtgccactcgtggcgttctccagggtaatgcgatggtgcttcctaaatacaacatgaacgctaacgagatcttgtactgcactggaggacanggaaggat

SEQ ID NO: 141783 - DNA, 451 bp, Arabidopsis thaliana
  unsure (1)..(451): unsure at all n locations
atggactcgcagccgatgcaaggacaacaacaaggccaaccatggcaaggacgacagggacaacaaggccaaccatgggaaggacagggacaacagggacaacaaggaagacaaggccaaccatgggaaggacagggacaacagggacaacaaggacgacagggacaacaaggccaaccatgggaaggacagggacagcagggacaacaagggttccgtgacatgcaccagaaggtggaacatgtgagacgcggagacgtctttgccaacactccaggctctgcccactggatctacaactcaagagaacagccacttgtcatcatcgctcttctcgacatcgccaactaccaaaaccaactcgaccgcaaccctagagtgttccatttggccggaaacaaccagcanggaggcttttgcggttcacagcaacaacaagaacagaaaaact

SEQ ID NO: 141784 - DNA, 414 bp, Arabidopsis thaliana
  unsure (1)..(414): unsure at all n locations
catttgcaaaaaacttctctctgaatctcagtgagttctcataaaatgagagggatggtgagttttgccgtttgggctctctttgctgctttactctcacagcagctctttgcttctgttgcttccgtaaggtttgaggatgccaaaacatactacttatctcctccctctggctcacatggaactcctccatcacacacgcctccttcttctaactgtggaagtccaccttacgacccttctccttcaactccttctcacccttcacctccatcacatactccaactccttccactccatcacacactccaactccacacactccatcacacacgccaactgcacacacccctncttgtaactgtggaagtccaccttcccaccctttcacgccttcacaccctttcactcct

SEQ ID NO: 141785 - DNA, 420 bp, Arabidopsis thaliana
gacgttcagttggctcagcagcttcagaaccaacaagacagcagaggaaacatcgttcgtgttaagggacctttccaggtcgtgaggccacctctaagacagccctacgagagcgaggagtggagacacccacgtagcccacagggcaacggccttgaggagactatctgcagcatgaggtcccacgagaacattgacgaccctgctcgtgctgacgtgtacaagcccagcctaggtcgcgtgaccagcgtcaacagctataccttgcccatcttggagtatgtcaggctcagtgccactcgtggcgttctccaaggtaatgcgatggtgcttcctaaatacaacatgaacgctaacgagatcttgtactgcactggaggacaaggaaggatccaagtgtcaacgacaacggacagaacg

SEQ ID NO: 141786 - DNA, 419 bp, Arabidopsis thaliana
gagtaatctccggcaccgaggaacaaatatggcttctttcacaaccaacagtctcgctctgcgcgcttcaattctcgcaaaccctagactacctcctccgatcatccgtccccgtctctctcttccccgtaaactctctttcaatctctccctccataacgctagaaccatcgtttcctccgccgttacctcctcgtctccggtactctcctctaaacccccttctcaattccccttctccgactcaactagatcgatcaccaccctcgtgcttctagccggcgtcgtaatcaaatctctaattcagaagctctctgtcgcaattgtgaacctatctccacagattcaagcatctttccgaacagcaagtccgttgttcttcgcgtcgctccgtgatcgacccgccgttatctgaacac

SEQ ID NO: 141787 - DNA, 443 bp, Arabidopsis thaliana
caaaaagaaaatggttaagctcagcaatctcctcgttgcaaccttcggggttctcctcgtccttaacggctgccttgcgaggcagtcacttggggttcctcctcagctacagaacgagtgtaacctcgacaacctagatgttctccaagccaccgaaactatcaagagtgaagccggtcagatcgagtactgggaccacaaccaccctcagctccgatgtgttggtgtttccgttgctcgttatgtaattgaacaaggcggtctttacttgcccaccttcttcacttccccaaaaatttcctacgtcgttcaaggaacgggtatcagcggaagagtggtccctggatgtgccgagaccttcatggactcgcagccgatgcaaggacaacaacaaggccaaccatggcaaggacgacagggacaacaaggccaaccatgggaag

SEQ ID NO: 141788 - DNA, 439 bp, Arabidopsis thaliana
agaaaacatacacaaatagcaaaacatggctaacaagctcttcctcgtctgcgcaactctcgccctctgcttcctcctcaccaacgcttccatctaccgcaccgttgtcgaattcgaagaagatgacgccagcaaccccgtaggtccaagacagagatgccagaaggagtttcagcaatcacaacacctaagagcttgccagagatggatgagcaagcaaatgaggcaaggacgtggtggtggtccttccctcgacgatgagttcgatttcgagggcccccagcagggataccagctactccagcagtgctgcaacgagcttcgccaggaagagccagtttgcgtttgccccaccttgaaacaagctgccagggcagttagcctccagggacagcacggaccattccaatccaggaaaatttaccagtcagctaagtac

SEQ ID NO: 141789 - DNA, 385 bp, Arabidopsis thaliana
cggacgcgtgggcggacgcgtgggcggacgcgtgggcaaacagcaggtctttaccagaactctcgccttttatcgtctcatattacagagtaattacatgcagccaatctgacgcttcctttactttaccatatgcaggcctcttaatcaatcttccccaagtgaacaagatagagctggaccatcagaactccagtcattttcggaatcacttaagtctcgattaaacgctgtctccacgaggtatcctgcctatatctggcagctttggcttgtataataattttatcaattctaagtgattccccatgcacaatgtagatacaaagaatcgatatcaaagaatacaaggaactggaaagatagacttttttctcgcaacacg

SEQ ID NO: 141790 - DNA, 429 bp, Arabidopsis thaliana
caaaaagaaaatggttaagctcagcaatctcctcgttgcaaccttcggggttctcctcgtccttaacggctgccttgcgaggcagtcacttggggttcctcctcagctacagaacgagtgtaacctcgacaacctagatgttctccaagccaccgaaactatcaagagtgaagccggtcagatcgagtactgggaccacaaccaccctcagctccgatgtgttggtgtttccgttgctcgttatgtaattgaacaaggcggtctttacttgcccaccttcttcacttccccaaaaatttcctacgtcgttcaaggaacgggtatcagcggaagagtggtccctggatgtgccgagaccttcatggactcgcagccgatgcaaggacaacaacaaggccaaccatggcaaggacgacagggacaacaagg

SEQ ID NO: 141791 - DNA, 432 bp, Arabidopsis thaliana
ggaaaaaagaaagaaacagagaagtgagaaaaagcccttaaaactcaaacactaaaaaatttcagtgtcgattcaaaaagttttgttatttgatctgtttctgtgtaaaaaaaatggtgaaagatctggttgggtatagattttatccaacgggagaggaattgataaaccattatctaaagaacaaaattttgggtaagacttggctcgtcgacgaagccattagcgagatcaacatctgtagttacgaccctatttacttgccttctttatcgaagataaaatcggatgatcctgtgtggtacttcttctgtccaaaggagtatacttctgcgaagaagaaagtaacgaagaggactacaagttcagggtattggaaagctactggtgttgataggaaaatcaaagataagagaggtaatcgcggcgaga

SEQ ID NO: 141792 - DNA, 440 bp, Arabidopsis thaliana
gtcagatcgagtactgggaccacaaccacccttatctccgatgtgttggtgtttccggtgctcgttatgtaattgaacaaggcggtctttacttgcccaccttcttcacttccccaaaaatttcctacgtcgttcaaggaacgggtatcagcggaagagtggtccctggatgtgccgagaccttcatggactcgcagccgatgcaaggacaacaacaaggccaaccatggcaaggacgacagggacaacaaggccaaccatgggaaggacagggacaacagggacaacaaggaagacaagggcaaccatgggaaggacagggacaacagggacaacaaggacgacagggacaacaaggccaaccatggggaggacagggacagcaaggacaacaagggtttcgtgacatgcaccagaaggtggaacatgtgagacgcgga

SEQ ID NO: 141793 - DNA, 423 bp, Arabidopsis thaliana
aaaaaggaaaatggttaagctaaccattttcttcgttgcacccttcggggttctcctggtccttaacggctgccttgcaaggcagtcacttggggttcctcctcagctacagaacgagtgtaacctcgacaacctagatgttctccaagccaccgaaactatcaagagtgaagccggtcagatcgagtactgggaccacaaccaccctcagctccgatgtgttggtgtttccgttgctcgttatgtaattgaacaaggcggtctttacttgcccaccttcttcacttccccaaaaatttcctacgtcgttcaaggaacgggtatcagcggaagagtggtccctggatgtgccgagaccttcatggactcgcagccgatgcaaggacaacaacaaggccaaccatggcaaggacgacagggaca

SEQ ID NO: 141794 - DNA, 430 bp, Arabidopsis thaliana
ataaagaggaagaaaaatgggtcgagtctcatctattatctctttctctttgacactcttgatcctcttcaatggctacactgcccaacagtggcccaacgagtgccagctcgatcaactcaatgcgctcgaaccatcccaaatcatcaagagcgagggtggtcgcatcgaggtctgggaccaccatgcaccccagctccgttgctccggctttgcctttgagcgtttcgtcattgagcctcaaggtcttttcttgcccactttcttgaacgccggcaaactcacgtttgttgttcacggaaggggtctaatgggaagagttattccgggatgcgccgagacgttcatggagtcaccggtatttggagaaggtcaaggtcagggtcagagtcaagggttccgtgacatgcaccagaaagtagagcaccta

SEQ ID NO: 141795 - DNA, 437 bp, Arabidopsis thaliana
ctctaagacagccctacgagagcgaggagtggagacacccacgtagcccacagggcaacggccttgaggagactatctgcagcatgaggtcccacgagaacattgacgaccctgctcgtgctgacgtgtacaagcccagcctaggtcgcgtgaccagcgtcaacagctataccttgcccatcttggagtatgtcaggctcagtgccactcgtggcgttctccagggtaatgcgatggtgcttcctaaatacaacatgaacgctaacgagatcttgtactgcactggaggacaaggaaggatccaagtggtcaacgacaacggacagaacgtgttggaccaacaggtgcagaaaggacagctcgtggtcatcccacaagggttcgcatacgttgtccagtcccacggaaacaagttcgagtggatctctttcaaaact

SEQ ID NO: 141796 - DNA, 423 bp, Arabidopsis thaliana
  unsure (1)..(423): unsure at all n locations
cggacgcgtggggccttgaggagactatctgcagcatgaggtcccacgagaacattgacgaccctgctcgtgctgacgtgtacaagcccagcctaggtcgcgtgaccagcgtcaacagctataccttgcccatcttggagtatgtcaggctcagtgccactcgtggcgttctccagggtaatgcgatggtgcttcctaaatacaacatgaacgctaacgagatcttgtactgcactggaggacaaggaaggatccaagtggtcaacgacaacggacagaacgtgttggaccaacaggtgcagaaaggacagctcgtggtcatnccacaagggttcgcatacgttgtccagtcccacggaaacaagttcgagtggatctctttcaaaactaatgaaaacgcaatgatcagcactttggcgggta

SEQ ID NO: 141797 - DNA, 434 bp, Arabidopsis thaliana
aaaatggttaagctcagcaatctcctcgttgcaaccttcggggttctcctcgtccttaacggctgccttgcgaggcagtcacttggggttcctcctcagctacagaacgagtgtaacctcgacaacctagatgttctccaagccaccgaaactatcaagagtgaagccggtcagatcgagtactgggaccacaaccaccctcagctccgatgtgttggtgtttccgatgctcgttatgtaattgaacaaggcggactttacttgcccaccttcttcacttccccaaaaatttcctacgtcgttcaaggaacgggtatcagcggaagagtggtccctggatgtgccgagaccttcatggactcgcagacgatgcaaggacaacaacaaggccaaccatggcaaggacgacagggacaacaaggccaaccatggga

SEQ ID NO: 141798 - DNA, 429 bp, Arabidopsis thaliana
caaaaagaaaatggttaagctcagcaatctcctcgttgcaaccttcggggttctcgtggtccttaacggctgccttgcgaggcagtcacttggggttcctcctcagctacagaacgagtgtaacctcgacaacctagatgttctccaagccaccgaaactatcaagagtgaagccggtcagatcgagtactgggaccacaaccaccctcagctccgatgtgttggtgtttccgttgctcgttatgtaattgaacaaggcggtctttacttgcccaccttcttcacttccccaaaaatttcctacgtcgttcaaggaacgggtatcagcggaagagtggtccctggatgtgccgagaccttcatggactcgcagccgatgcaaggacaacaacaaggccaaccatggcaaggacgacagggacaacaagg

SEQ ID NO: 141799 - DNA, 432 bp, Arabidopsis thaliana
ctcctccatttctctatctttctctctcgctgcttctcgaatcttctgtatcatcttcttcttcttcaagtgaaaaatggccgatggtgaggatattcagccacttgtctgtgacaatggaactggaatggtgaaggctggttttgctggtgatgatgccccgagagcagtgttcccaagtattgttggtcgtcctaggcacactggtgtcatggttggtatgggtcagaaagatgcttacgttggtgatgaagctcagtccaagagaggtatcctcactctgaagtatccaatcgaacatggtattgtaagtaactgggatgacatggaaaagatctggcatcacactttctacaatgagcttcgtgttgcccctgaggagcacccagttcttctcacagaggcacctcttaaccctaaagccaacaggga

SEQ ID NO: 141800 - DNA, 417 bp, Arabidopsis thaliana
  unsure (1)..(417): unsure at all n locations
cggacgcgtggggcggtgataccattgtcacaacacccggtgtagcccagtggttctacaacgacggacagcaaccacttgtcatcgtcagcatcttcgatctagccagtcaccagaaccagcttgaccgcaacccaaggccattttacttagccggaaacaacccacaaggtcaagtatggctacaaggacgagagcaacagccacagaagaacatcttcaatggatttggacccgaggttattgctcaagctttgaagattgatcttcagacagcgcagcaacttcagaaccaagatgacaaccgtggaaacattgtccgagtccaaggcccgttcggtgtcattaggccgnctttgaggggccagagacctcatgaggaggaagaagaagatgaaggacgacacggacgacacg

SEQ ID NO: 141801 - DNA, 442 bp, Arabidopsis thaliana
ccagcaggaaggctttggcggttcacagtaccaccaggaccagaaaaacttgtggggcgggttcgacgcacaggtcatagctcaagcattgaaaattgacgttcagttggctcagcagcttcagaaccaacaagacagcagaggaaacatcgttcgtgttaagggacctttccaggtcgtgaggccacctctaagacagccctacgagagcgaggagtggagacacccacgtagcccacagggcaacggccttgaggagactatctgcagcatgaggtcccacgagaacattgacgaccctgctcgtgctgacgtgtacaagcccagcctaggtcgcgtgaccagcgtcaacagctataccttgcccatcttggagtatgtcaggctcagtgccactcgtggcgttctccagggtaatgcgatggtgcttcctaaatacaac

SEQ ID NO: 141802 - DNA, 435 bp, Arabidopsis thaliana
cacacttaatgcaaaacacaacaaaacataatcagaccacacaaaacgagaaaccatgttttgttaaaaatggagctagaatcttctcctcctctacctcctcatgtgatgctcgtatcttttccagggcaaggccacgttaatccacttcttcgtcttggtaagctcttaccttcaaagggtttgctcataaccttcgtcaccactgactcatggggcaaaaagatgcgaatctccaacaaaatccaagaccgtgtcctcaaaccggttggtaaaggctatctccggtatgatttcttcgacgacgggcttcctgaagacgacgaagctagcagaaccaacttaaccatgctccgaccacatctagagctggtcggcaaaagagagatcaagaaccttgtgaaacgttacaaggaagtaacgaaacaacccgtg

SEQ ID NO: 141803 - DNA, 309 bp, Arabidopsis thaliana
gccgttagcctccagggacaacacggaccattccaatccaggaaaatttacaagacagctgagtacttgcctaacatttgcaagatccagcaagttggtgaatgccccttccagaccaccatccctttcttccctccttactaatagattccaaacaaaaaccctcgagcgtatgagagtgtggttgttgatacatgttaacaccacacctcatcgtgtcttttatgaaaatgtaagttttggatgtttgaggctaaatgtatttagcacaagtccttaataaataagagttttgtttatgtttcaaaa

SEQ ID NO: 141804 - DNA, 357 bp, Arabidopsis thaliana
gaaaatggttaagctcagcaatctcctcgttgcaaccttcggggttctcctcgtccgtaacggctgccttgcgaggcagtcacttggggttcctcctcagctacagaacgagtgtaacctcgacaacctagatgttctccaagccaccgaaactatcaagagtgaagccggtcagatcgagtactgggaccacaaccaccctcagctccgatgtgttggtgtttccgttgctcgttatgtaattgaacaaggcggtctttacttgcccaccttcttcacttccccaaaaatttcctacgtcgttcaaggaacgggtatcaacggaagagtggtccctggatgtgccgagacccttat

SEQ ID NO: 141805 - DNA, 427 bp, Arabidopsis thaliana
aaaaagaaaatggttaagctcagcaatctcctcgttgcaaccttcggggttctcctcgtccttaacggctgccttgcgaggcagtcacttggggttcctcctcagctacagaacgagtgtaacctcgacaacctagatgttctccaagccaccgaaactatcaagagtgaagccggtcagatcgagtactgggaccacaaccaccctcagctccgatgtgttggtgtttccgttgctcgttatgtaattgaacaaggcggtctttacttgcccaccttcttcacttccccaaaaatttcctacgtcgttcaaggaacgggtatcagcggaagagtggtccctggatgtgccgagaccttcatggactcgcagccgatgcaaggacaacaacaaggccaaccatggcaaggacgacagggacaacaag

SEQ ID NO: 141806 - DNA, 421 bp, Arabidopsis thaliana
aagaaaatggttaagctcagcaatctcctcgttgcaaccttcggggttctcctcgtgcttaacggctgccttgcgaggcagtcacttggggttcctcctcagctacagaacgagtgtaacctcgacaacctagatgttctccaagccaccgaaactatcaagagtgaagccggtcagatcgagtactgggaccacaaccaccctcagctccgatgtgttggtgtttccgttgctcgttatgtaattgaacaaggcggtctttacttgcccaccttcttcacttccccaaaaatttcctacgtcgttcaaggaacgggtatcagcggaagagtggtccctggatgtgccgagaccttcatggactcgcagccgatgcaaggacaacaacaaggccaaccatggcaaggacgacagggacaac

SEQ ID NO: 141807 - DNA, 433 bp, Arabidopsis thaliana
aaaaatggctcgagtctcttctcttctttctttctccttaacacttttgatccttttccatggctacgcggctcaacagggtcagcagggtcagcagtttccgaacgagtgccagctcgaccagctcaatgcgctcgagccttcacacgtactgaagagcgaggctggtcgcatcgaggtgtgggaccaccacgctcctcagctccgttgctcaggtgtctcctttgcacgttacatcatcgagtctaagggtctctacttgccctctttctttaacaccgcgaagctctccttcgtggctaaaggacgaggtcttatgggaaaagtgatccctggatgcgccgaaacattccaagactcatcagagttccaaccacgcttcgaaagtcaaggtcaaagccagaggttccgtgacatgcaccaggaagtggag

SEQ ID NO: 141808 - DNA, 431 bp, Arabidopsis thaliana
ctcgaccgcaaccctagagtgttccatttggccggaaacaaccagcagggaggctttggcggttcacagcaacaacaagaacagaaaaacttgtggagcgggttcgacgcacaggtcatagctcaagcattgaaaattgacgttcagttggctcagcagcttcagaaccaacaagacagcagaggaaacatcgttcgtgttaagggacctttccaggtcgtgaggccacctctaagacagccctacgagagcgaggagtggagacacccacgtagcccacagggcaacggccttgaggagactatctgcagcatgaggtcccacgagaacattgacgaccctgctcgtgctgacgtgtacaagcccagcctaggtcgcgtgaccagcgtcaacagctataccttgcccatcttggagtatgtcaggctcag

SEQ ID NO: 141809 - DNA, 139 bp, Arabidopsis thaliana
  unsure (1)..(139): unsure at all n locations
gataaaaatggttcgagtctcttttcttctttcttactccttaacacttttgatccgtttctatggctacgcggctcaacagggacagcagggncagcagtttccgaactatgtccattttgaccagatcaattctctt

SEQ ID NO: 141810 - DNA, 438 bp, Arabidopsis thaliana
  unsure (1)..(438): unsure at all n locations
agaaaacatacacaaatagcaaaacatggctaacaagctcttcctcgtctgcgcaactctcgccctctgcttcctcctcaccaacgcttccatctaccggaccgttgtcgaattcgaagaagatgacgccagcaaccccgtaggtccaagacagagatgccagaaggagtttcagcaatcacaacacctaagagcttgccagagatggatgagcaagcaaatgaggcaaggacgtggtggtggtccttccctcgacgatgagttcgatttcgagggcccccagcagggataccagctactccagcagtgctgcaacgagcttcgccaggaagagccagtttgcgtttgccccaccttgaaacaagctgccagggcagttagcctnncaggacagcacggaccattccaatccaggaaaatttaccagtcagctaagta

SEQ ID NO: 141811 - DNA, 418 bp, Arabidopsis thaliana
gcaaaaaatggcaaacaagttgttcctcgtctgcgcagctctcgctctctgcttcctgctgaccaacgcttccatctaccgcaccgtcgttgagttcgaagaagatgacgccactaaccccataggcccaaaaatgaggaaatgccgcaaggagtttcagaaagaacaacacctaagagcttgccagcaattgatgctccagcaagcaaggcaaggccgtagcgatgagtttgatttcgaagacgacatggagaacccacagggacaacagcaggaacaacagctattccagcagtgctgcaacgagcttcgccaggaagagccagattgtgtttgccccaccttgaaacaagctgccaaggccgttagactccatggacagcaccaaccaatgcaagtcaggaaaatttaccagaca

SEQ ID NO: 141812 - DNA, 437 bp, Arabidopsis thaliana
  unsure (1)..(437): unsure at all n locations
aagaaaaatgggtcgagtctcatctattatctctttctctttgacactcttgatcctcttgaatggctacactgcccaacagtggcccaacgagtgccagctcgatcaactcaatgcgctcgaaccatcccaaatcatcaagagcgagggtggtcgcatcgaggtctgggaccaccatgcaccccagctccgttgctccggctttgcctttgagcgtttcgtcattgagcctcanggtcttttcttgcccactttcttgaacgccggcaaactcacgtttgttgttcacggaaggggtctaatgggaagagttattccgggatgcgccgagacgttcatggagtcaccggtatttggagaaagtcaaggtcagggtcagagtcaagggttccgtgacatgcaccagaaagtagagcacctacggtgcggtgacacca

SEQ ID NO: 141813 - DNA, 354 bp, Arabidopsis thaliana
gaaaatggttaagctcagcaatctcctcgttgcaaccttcggggttctcctcgtcgttaacggctgccttgcgaggcagtcacttggggttcctcctcagctacagaacgagtgtaacctcgacaacctagatgttctccaagccaccgaaactatcaagagtgaagccggtcagatcgagtactgggaccacaaccaccctcagctccgatgtgttggtgtttccgttgctcgttatgtaattgaacaaggcggtctttacttgcccaccttcttcacttccccaaaaatttgctacgtcgttcaaggaacgggtatcaacggaagagtggtccctggatgtgccgagacctt

SEQ ID NO: 141814 - DNA, 429 bp, Arabidopsis thaliana
  unsure (1)..(429): unsure at all n locations
ctgagttgttttccaaaacgattgagcaaagtatgcaaaacagggtcatcagcatatttaaatgcttttgtcaagtcaatatgagagtaacataaagggtccatggcacacttattgaacattgtgcagcatgtagaagcttgcattagggactttgtatcaaccatcgaaaatacctgattatgatgcatgaatccattagacatgtggctaggaacaatataattaagagaaatccatattgattggttaccttaacggtgagttcagaagggaggaaccaggagatggaattgtggagtgtggctcgtttctgagagcaacgtttggtggattggagaaaaagcgagagtcgctcgagagtacgatcgacgagtttgtattgaacggagacatcacangaggagagaagattatcaagtactcgat

SEQ ID NO: 141815 - DNA, 389 bp, Arabidopsis thaliana
gtaaaaacaatttctcattagcttacaatggcggatacacaccgtgtcgaccgtactgatagacactttcaatttcagtcgccctatgaaggcggccgaggtcaaggtcagtatgaaggtgaccgtggttacggtggtggcggttacaagagcatgatgcctgaaagtggcccatctagtacccaagtattgtccctgttgattggagtccctgtcgtcggttcgctacttgccttggctggattacttctagctggttcggtgatcggcttaatggttgctttaccactatttctcctcttcagcccggttatagtcccagcggctctaactatcgggcttgcaatgacaggctttttagcctcggggatgttcggtctaaccgggct

SEQ ID NO: 141816 - DNA, 418 bp, Arabidopsis thaliana
gtcactgatttcttctaatcctccggtggagtgagagatgatatctccgacgttggttcctctcctctgcgctttatttctatgtcttccagtggctgttatcttcacagtccagcgagaactcacctgcgttatctcgccggagtttggtttccgctctctttccgtcttctctctttactctcgaaatgtccccgactcttcttcttcttctccggcggttcggattcgacagccgattcccaaagaagacgaccctcttcttcgactatcttctcgggttaacccgaatctacctcccggttcgacccggaaaatagcttttatgtacttaacgacgtcgcctcttccgttcgcgcctctttgggagatgttcttcgacggaatctccaagaatctttacaatgtctacgttcac

SEQ ID NO: 141817 - DNA, 433 bp, Arabidopsis thaliana
ctatagttttatatcatatcaatcgacatggcgaatgtggaccgtgatcggcgtgtgcatgtagaccgtactgacaaacgtgttcatcagccaaactacgaagatgatgtcggttttggtggctatggcggttatggtgctggttctgattataagagtcgcggcccctccactaaccaaatcttggcacttatagcaggagttcccattggtggcacactgctaaccctagctggactcactctagccggttcggtgatcggcttgctagtctccatacccctcttcctcctcttcagtccggtgatagtcccggcggctctcactattgggcttgctgtgacgggaatcttggcttctggtttgtttgggttgacgggtctgagctcggtctcgtgggtcctcaactacctccgtgggacgagtgatacaa

SEQ ID NO: 141818 - DNA, 410 bp, Arabidopsis thaliana
gctcagcaatctcctcgttgcaaccttcggggttctcctcgtccttaacggctgccttgcgaggcagtcacttggggttcctcctcagctacagaacgagtgtaacctcgacaacctagatgttctccaagccaccgaaactatcaagagtgaagccggtcagatcgagtactgggaccacaaccaccctcagctccgatgtgttggtgtttccgttgctcgttatgtaattgaacaaggcggtctttacttgcccaccttcttcacttccccaaaaatttcctacgtcgttcaaggaacgggtatcagcggaagagtggtccctggatgtgccgagaccttcatggactcgcagccgatgcaaggacaacaacaaggccaaccatggcaaggacgacagggacaacaag

SEQ ID NO: 141819 - DNA, 390 bp, Arabidopsis thaliana
  unsure (1)..(390): unsure at all n locations
cggacgcgtgggataagaaataacaaaatggctcgagtctcttctcttctttctttcttctgaacacttttgatccttttccatggctacgcggctcaacagggtcagcagggtcagcagtttccgaacgagtgccagctcgaccagctcaatgcgctcgagccgtcacacgtactgaagagcgaggctggtcgcatcgaggtgtgggaccaccacgctcctcagctccgntgctcaagtgtcttctttgcacgttacatcatcgagtctaagggtctctacttgccctctttctttaacaccgcgaagctctctttcgtggctaagggacgaggtcttatgggaaaagtgatccctggatgcgccgaaacattccaagactcatcagag

SEQ ID NO: 141820 - DNA, 395 bp, Arabidopsis thaliana
gtccggaccaccagggccaaccatgggagggacagggccagcagggacaacaagggttccgggacatgcaccaaaaggtggaacatgtgagacgcggaaacgtctttgccaacactccaggctctgcccactggatctacaactcaggagaacagccacttgtcatcatcgctcttctcgacatcgccaactaccaaaaccaactcgaccgcaaccctagagtgttccatttggccggaaacaaccagcagggaggctttggcggttcacagcaacaacaagaacagaaaaacttgtggagcgggttcgacgcacaggtcatagctcaagcattgaaaattgacgttcagttggctcagcagcttcagaaccaacaagacagcagaggaaacatc

SEQ ID NO: 141821 - DNA, 437 bp, Arabidopsis thaliana
cttaattctctttttttttcatttcatgcctattggcgttccaaaagtaccttttcgaagtcctggagaaggagatacatcttgggttgacatatacaaccgactttatcgagaaagattattttttttaggccaagaggttgataccgaaatctcgaatcaacttattagtcttatgatatatctcagtatagaaaaggataccaaagatctttatttgtttataaactctcctggtggatgggtaatatctggaatggctatttatgatactatgcaatttgtgcgacccgatgtacagacaatatgcatgggattggccgcttcaatagcatcctttatcctagtcggaggagcaattaccaaacgtatagcattccctcacgctagggtaatgatccatcaacccgctagttcgttttatgaggcacaaacgg

SEQ ID NO: 141822 - DNA, 440 bp, Arabidopsis thaliana
  unsure (1)..(440): unsure at all n locations
aacctttttaacttccccaaaaatttcctacgtcgttcaaggaacgggtataagcggaggagtggtccctggatgtgccgagaccttcatggactcgcagccgatgcaaggacaacaacaaggccaaccatggcaaggacgacagggacaacaaggccaaccatgggaaggacagggacaacagggacaacaaggaagacaaggccaaccatgggaaggacagggacaacagggacaacaaggacgacagggacaacaaggccaaccatgggaaggacagggacagcagggacaacaagggttccgtgacatgcaccagaaggtggaacatgtgagacgcggagacgtctttgccaacactccaggctctgcccactggatctacaactcangagaacagccacttgtcatcatcgctcttctcgacatcgccaactacc

SEQ ID NO: 141823 - DNA, 341 bp, Arabidopsis thaliana
ggaagaaaaatgggtcgagtctcatctattatctctttctctttgacactcttgatgctcttcaatggctacactgcccaacagtggcccaacgagtgccagctcgatcaactcaatgcgctcgaaccatcccaaatcatcaagagcgagggtggtcgcatcgaggtctgggaccaccatgcaccccagctccgttgctccggctttgcctttgagcgtttcgtcattgagcctcaaggtcttttcttgcccactttcttgaacgccggcaaactcacgtttgttgttcacggaaggggtctaatgggaagagttattccgggatgcgccgagacgttcat

SEQ ID NO: 141824 - DNA, 434 bp, Arabidopsis thaliana
cacttcttcaactctttgagttatttatttccagaagcttcatagtttctggaaaatgctaatccactagcggaataaaagacagatctttaatccactatagaaaccgcgttttctgaaaatgcggttgcgttttccgatgaaatctgccgttttagcgtttgctatctttctggtgtttattccactggtttccgtcggaataccgatgattccgggaagacttaccggcgcattccgcacaccgccggaaatggcttggatctggggtcgttcgtggaagctccggagtacagaaacggcaaggagtgcgtgtctcaatcgttaaacagagagaacttcgtgtcgtcttgcgacgcttcgttagttcatgtagctatgacgcttgactcagagtacttacgtggctcaatcgcagccgttcattccatgct

SEQ ID NO: 141825 - DNA, 279 bp, Arabidopsis thaliana
acacacttatacaacaaaataaattttttttttccacaaacaacatacactctgggagtgtctaatttcactagcggggggaaacacagatctctaatccactatagaaaccgcgttttctgaaaatgctgttgctttttccgatcaaatcttcctttttagctttagctatctttctggtgttaattccactgatttccttcataatactgatgatttctttaagacttaccttcgtatccttcaccttctgaaatattctttatcttacctctttct

SEQ ID NO: 141826 - DNA, 395 bp, Arabidopsis thaliana
gaaaaagaacaaggaagatcccggaaaatggcaacggcgattgtccgttcagctctttcccgagcagcgactcgcgcagctccgaagacatccgtcgctcctaagcgaaacttttcctcttccgccggccatgacgatgcttatgaagctgcgaagtgggagaagataacttatctgggtattgctagttgcactgctctagctgtctatgttttatccaagggccatcatcacggcgaagaccctcctgtaagcttctcttacaactcctccattggtttagtattataacttctgatttggaatctcacctagtgtgagacaatgttaatatcaccagtgaaaacggatagaagtatgcagatgatgagaatgttacgaaagctacatttttt

SEQ ID NO: 141827 - DNA, 435 bp, Arabidopsis thaliana
atcacaaacgagtaagaatacaaatacaaatagcaaaaaaaatggcaaacaagctcttcctcgtctgcgcaactttcgccctctgcttcctcctcaccaacgcttccatctaccgcactgttgtcgagttcgacgaagatgacgccagcaaccccatgggcccaagacagaaatgtcagaaggagtttcagcaatcacagcacctaagagcttgccagaaattgatgcgcatgcaaatgaggcaaggccgtggtggtggtccctccctcgacgatgagttcgatttggaagacgacatcgagaacccacaaggcccccagcagggacaccagatcctccagcagtgctgcaacgagcttcgccaggaagagccagtttgtgtttgccccaccttgagacaagctgccagggccgttagcctccaaggacaacacg

SEQ ID NO: 141828 - DNA, 430 bp, Arabidopsis thaliana
ccttttcagatttcgcttcttcaattcatgaaatcctcgtgattctactttaatgcttctcttttttacttttccaagtctctgaatattcaaagtatatatcttttgttttcaaacttttgcagaattgtcttcaagcttccaaatttcagttaaaggtctcaactttgcagaattttcctctaaaggttcagactttggggtaaaggtgtcaactttggcgatgggtcttgacggaaacaatggtggaggggtttggttaaacggtggtggaggagaaagggaagagaacgaggaaggttcatggggaaggaatcaagaagatggttcttcccagtttaagcctatgcttgaaggtgattggtttagtagtaaccaaccacatccacaagatcttcagatgttacagaatcagccagatttcagatac

SEQ ID NO: 141829 - DNA, 358 bp, Arabidopsis thaliana
cgaaataataaagagcgagggtggtcgaatcgaggtctgggaccaccatgcacccaagctccgttgctccggctttgcctttgagcgtttcgtcattgagcctcagggtcttttcttgcccactttcttgaacgccggcaaactcacgtttgttgttcacggaaggggtctaatgggaagagttattccgggatgcgccgagacgttcatggagtcaccggtatttggagaaggtcaaggtcagggtcagagtcaagggttccgtgacatgcaccagaaagtagagcacctacggtgcggtgacaccattgcaacaccatctggtgtagctcaatggttctacaacaatggaaatgag

SEQ ID NO: 141830 - DNA, 429 bp, Arabidopsis thaliana
  unsure (1)..(429): unsure at all n locations
tttaactaaacacaggaaatttcaggtttttttcagctttttcctaccctctagtggtgaaacttttgcacacaaaggtggaaaggttatcatttgcaaaagtggagcacnnaagtggatagtgtttgcttcaagtatttagtaccagaaacctagtanntggcgtgataccagttcaacggactcgatnngtctcaactgatnnggtgacacagatcnatagagatctgggngtctgatagaagggcatantgcanttgctgctgccttctgattccagtgatncgatcaaaagggataagttggatcnaaaagaacccttcgtagggcttgcttcaaaatcgtgaagggcagcaagaaaaaagcagattgagggaagagtgcgtatgttcagcaagctggagaatagtcgattaaagctgactcaac

SEQ ID NO: 141831 - DNA, 441 bp, Arabidopsis thaliana
cgcaaaagtacaaggacatgttgaaaactagaactgctcttcctatatctgaagttaagaatggcatactccagcatctgaaagaaaaagatgtcttggtggtatgcggagaaacaggctctggaaagactacacaggttcctcaatttatattggatgatatgattgattcggggcatggtggatactgtaatatcatatgcacacaacctcctcggatagcggctatctctgttgctcaaagagttgctgatgagcgttgtgaatcctctccaggcttagatgactcattggttgggtatcaagttcgtcttgaaagtgcaaggagtgacaagactaggctgctgttttgtactactggcattctactgaaggaaactcgctggggatagaaccttgaacgatgttacacatattatagttgatgaagtgcatgagcgg

SEQ ID NO: 141832 - DNA, 271 bp, Arabidopsis thaliana
aacaaaaagaaaatggttaagctcagcaatctcctcgttgcaaccttcggggttctgctcggccttaacggctggcttgcgaggcagtcacttggggttcctgctcagctacagaacgagtgtaacctcgacaacctagatgttctccaagccaccgaaactatcaagagtgaagccggtcagatcgagtactgggaccacaaccaccctcagctccgatgtgttggtgtttccgttgctcgttatgtaattgaacaaggttgtttttaat

SEQ ID NO: 141833 - DNA, 413 bp, Arabidopsis thaliana
  unsure (1)..(413): unsure at all n locations
gcaaggacaacaacaaggccaaccatggcaaggacgacagggacaacaaggccaaccatgggaaggacagggacaacagggacaacaaggaagacaaggccaaccatgggaaggacagggacaacagggacaacaaggacgacagggacaacaaggccaaccatgggaaggacagggacagcagggacaacaagggttccgtgacatgcaccagaaggtggaacatgtgagacgcggagacgtctttgccaacactccaagctctgcccactggatctacaactcaggagaacagccacttgtcatcatcgctcttctcgacatcgccaactaccaaaaccaactcgaccgcaaccctagagtgttccatttggccggaaacaaccagcanggaggctttggcggttcacagc

SEQ ID NO: 141834 - DNA, 402 bp, Arabidopsis thaliana
aaacgcgaacgctattctttacgtgacagacggggaagcccaaatccagatcgtaaacgacaatggtaacagagtgtttgacggacaagtctctcaaggacagctcatagccgtaccacaaggtttctcggtggtgaaacgcgcaacaagcaaccgattccagtgggttgagttcaaaacaaacgctaacgcgcaaatcaacactctggcgggacgaacctcagtcttgagaggtttaccacttgaagtcataaccaatgggttccaaatctcacccgaagaagcaaggagggtcaagttcaacacgctcgagaccactttgactcacagcagtggcccaactagctacggaaggccaagagtggctgcagcttaagagcttaaaaccgcggcttaacaatg

SEQ ID NO: 141835 - DNA, 423 bp, Arabidopsis thaliana
agcttgaccgcaacccaaggccattttacttagccggaaacaacccacaaggtcaagtatggctacaaggccgagagcaacagccacagaagaacattttcaatggatttggacccgaggttattgctcaagctttgaagatcgatcttcagacagcgcagcaacttcagaaccaagatgacaaccgtggaaacattgtccgagtccaaggcccgttcggtgtcattaggccgcctttgaggggccagagacctcatgaggaggaagaagaagaagaaggacgacatggacgacacggtaatggcttagaggagaccatctgcagcgccaggtgcaccgataacctcgatgacccgtctcgtgctgacgtgtacaagccacagctcggttacatcaacactctcaacagttacgatctcccca

SEQ ID NO: 141836 - DNA, 416 bp, Arabidopsis thaliana
  unsure (1)..(416): unsure at all n locations
gtcgcaacagaaaagaaacgagagagatatggtggtaggcggcggaggagaaggagatcagaagagaagcagcggagaaatgatggcgatggcgagtttattcaacgatcagcagaatccaattcaacagtttcaggttaaattcaaagaagtagaaactaatttcaagacatggttgtcgaaacagtcgattccggtggaagccgccgtcgtatccaccatgagcggtgtacaaggagctttcattggtggtctcatgggaacactctctcctgaaatgcctcaagccggcgttgaccctcaagccatagcttcgatgaaacaagctcaggctcttgtgggtggtccttgggtccaagctcggaattttgctgcaattactggtgtgaatgctggaatngcttctgttatgaagc

SEQ ID NO: 141837 - DNA, 374 bp, Arabidopsis thaliana
accaaaaccaactcgaccgcaaccctagagtgttccatttggccggaaacaaccagcagggaggctttggcggttcacagcaacaacaagaacagaaaaacttgtggagcgggttcgacgcacaggtcatagctcaagcattgaaaattgacgttcagttggctcagcagcttcagaaccaacaagacagcagaggaaacatcgttcgtgttaagggacctttccaggtcgtgaggccacctctaagacagccctacgagagcgaggagtggagacacccacgtagcccacagggcaacggccttgaggagactatctgcagcatgaggtcccacgagaacattgacgaccctgctcgtgctgacgtgtacaag

SEQ ID NO: 141838 - DNA, 425 bp, Arabidopsis thaliana
cacaaacacacacaaatctctgaagtaaaatgacgttcccttctctttctgtctcatttctcttctttgccttcatattcgttacgcatgcattcgacctcagcatcatccagggaacatgtccgtacacggtggttgtcatgacaagctgtctttctccggagtcgacaagagatcagatcagcattgtttttggcgatgccgacggtaacaaggtgtatgcaccgaaactagggggtttggtaagaggaccagggggtttggggaagtgttcaacgaacacattccaagtcagaggtcaatgtttgaatgaccctatctgctctctctatatcaaccggaatggacccgacggttgggtcccggagtccattgagatctactcagaaggttcaaagtccgttaaattcgatttcaacaagagc

SEQ ID NO: 141839 - DNA, 438 bp, Arabidopsis thaliana
gtcgggagggcaacttttaaaacagccttacaagagcgaggagtggaaacacccacgtagccaacagggcaacggccttgaggagactatctgcagcatgaggtcccacgagaacattgacgaccctgctcgtgctgacgtgtacaagcccagcctaggtcgcgtgaccagcgtcaacagctataccttgcccatcttggagtatgtcaggcttcagtgccactcgtggcgttctccagggtaatgcgatggtgcttcctaaatacaatatgaacgctaacgagatcttgtactgcactggaggacaaggaaggatccaagtggtcaacgacaacggacagaacgtgttggaccaacaggtgcagaagggacagctcgtggtcatcccacaagggttcgcatacgttgtccagtcccacggaaacaagttcgagtgga

SEQ ID NO: 141840 - DNA, 386 bp, Arabidopsis thaliana
  unsure (1)..(386): unsure at all n locations
tccgaaccggagctgcgactaggcgtaccgccctngttccactcgtttttcaacgtctgttgttaattccaacggattagcttcaagcgtctgcaagccctgatcatttctgttcccaaactctccttcgtcaatagttaaagcagctcttcttctaagggagaaagcagttccagcatacaagattactaaaccccatgaagaaatctcgtagcaccaaaacaaaggcacagaacagctgcttcctaatgtgaggaggcttgagccgagaaatatagcaaggagaccatagatgatagcaaacacaacattcaaaattgacagacaacggaccccacctgtgaatttattggacattgtaaagaagatcaataaccctattttga

SEQ ID NO: 141841 - DNA, 402 bp, Arabidopsis thaliana
caccatctcaatcatgacttcttcgtttctctcctccactgctttcttcctgctcgtttgtctaggattctgccacgtgtcctcttcctcctccgaccaaggaacttacatcgttcacatggctaaatctcagatgccgtcgtctttcgacctccactctaactggtacgattcatctctcagatctatctccgactcagccgaattgctctacacttacgagaacgcgattcatggattctcaacacggctaactcaagaagaagccgactcgctcatgactcaacctggtgttatctccgttttaccggagcaccgttacgagctacacaccactcgtactcctctcttcctcggtctcgacgaacacaccgcagatctgttccctgaaaccggctctta

SEQ ID NO: 141842 - DNA, 427 bp, Arabidopsis thaliana
caaaaatgtgatattgatcagaaataaccttttcgataagatcgagaacatcttggttatccacaaattcaatgtagctccaatctattgcttcttttgtgtattcctcctgttccatcttgaaaacgtgctgaaaacagcaatagaaacttgtaaaccccaaaagcctaatctgtgaaactcaggggaaatggtttacactacaatcaagaaattacctgattgaaatgttgctgcaacttctcatttgtgaaattaatacagaactgttcaaaactgcaagagatcgctattagcagtggaaacacaaaaatctaacggaagtttagttctgaaccttggcgcagtagacattccttacctatttgttttaaagctctcaaatccgtatatatccaggactccaatgagtgatctagaagtcgca

SEQ ID NO: 141843 - DNA, 474 bp, Arabidopsis thaliana
caaaaagaaaatggttaagctcagcaatctcctcgttgcaaccttcggggttctcctcgtccttaacggctgccttgcgaggcagtcacttggggttcctcctcagctacagaacgagtgtaacctcgacaacctagatgttctccaagccaccgaaactatcaagagtgaagccggtcagatcgagtactgggaccacaaccaccctcagctccgatgtgttggtgtttccgttgctcgttatgtaattgaacaaggcggtctttacttgcccaccttcttcactttcccaaaaatttcctacgtcgttcaaggaacgggtatcagcggaagagtggtccctggatgtgccgagaccttcatggactcgcagccgatgcaaggacaacaacaaggccaaccatggcaaggacgacagggacaacaaggccaaccatgggaaggacagggacaacagggacaacaaggaagaca

SEQ ID NO: 141844 - DNA, 490 bp, Arabidopsis thaliana
gttttatatcatatcaatcgacatggcgaatgtggaccgtgatcggcgtgtgcatgtagaccgtactgacaaacgtgttcatcagccaaactacgaagatgatgtcggttttggtggctatggcggttatggtgctggttctgattataagagtcgcggcccctccactaaccaaatcttggcacttatagcaggagttcccattggtggcacactgctaaccctagctggactcactctagccggttcggtgatcggcttgctagtctccatacccctcttcctcctcttcagtccggtgatagtcccggcggctctcactattgggcttgctgtgacgggaatcttggcttctggtttgtttgggttgacgggtctgagctcggtctcgtgggtcctcaactacctccgtgggacgagtgatacagtgccagagcaattggactacgctaaacggcgtatggctgatgcggtaagctatgctggtatg

SEQ ID NO: 141845 - DNA, 432 bp, Arabidopsis thaliana
ggacttatatcatgactgcatggttctttttcggtgctgagacgactgcgaacgtgttcatcagccaaactacgaatatcatgtcggttttggtggctatggcggttatggtgctggttctgattataagagtcgtggcccctccactaaccaaatcttggcacttatagcaggagttcccattggtggcacactgctaaccctagctggactcactctagccggatcggagatcggcttgctagtctccataccccttttcctcctcttcagtccggcgatagtcccggcggctctcactattgggcttgctgtgacgggaatcttggcttctggtttgtttgggttgactggtctgagctcggttctcggggttcttaactacctccgggggacgagtgattcaatgccagaacaaattgtctaccctta

SEQ ID NO: 141846 - DNA, 478 bp, Arabidopsis thaliana
aagaaaatggttaagctcagcaatctcctcgttgcaaccttcggggttctcctcgtccttaacggctgccttgcgaggcagtcacttggggttcctcctcagctacagaacgagtgtaacctcgacaacctagatgttctccaagccaccgaaactatcaagagtgaagccggtcagatcgagtactgggaccacaaccaccctcagctccgatgtgttggtgtttccgttgctcgttatgtaattgaacaaggcggtctttacttgcccaccttcttcacttccccaaaaatttcctacgtcgttcaaggaacgggtatcagcggaagagtggtccctggatgtgccgagaccttcatggactcgcagccgatgcaaggacaacaacaaggccaaccatggcaagggacgacagggacaacaaggccaaccatgggaaggacagggacaacagggacaacatggaagaccaggccac

SEQ ID NO: 141847 - DNA, 458 bp, Arabidopsis thaliana
gctcatctattatctctttctctttgacactcttgatcctcttcaatggctacactgcccaacagtggcccaacgagtgccagctcgatcaactcaatgcgctcgaaccatcccaaatcatcaagagcgagggtggtcgcatcgaggtctgggaccaccatgcaccccagctccgttgctccggctttgcctttgagcgtttcgtcattgagcctcagggtcttttcttgcccactttcttgaacgccggcaaactcacgtttgttgttcacggaaggggtctaatgggaagagttattccgggatgcgccgagacgttcatggagtcaccggtatttggagaaggtcaaggtcagggtcagagtcaagggttccgtgacatgcaccagaaagtagagcacctacggggcggtgacaccattgcaacaccatctggtgtagctcaatggttctacaac

SEQ ID NO: 141848 - DNA, 479 bp, Arabidopsis thaliana
cgaccacgcgtccgaaccatggcaaggacgacagggacaacaaggccaaccatggtaaggacagggacaacagggacaacaaggaagacaaggccaaccatgggaaggacagggacaacagggacaacaaggacgacagggacaacaaggccaaccatgggaaggacagggacagcagggacaacaagggttccgtgacatgcaccagaaggtggaacatgtgagacgcggagacgtctttgccaacactccaggctctggccactggatctacaactcaggagaacagccacttgtcatcatcgctcttctcgacatcgccaactaccaaaaccaactcgaccgcaaccctagagtgttccatttggccggaaacaaccagcagggaggctttggcggttcacagcaacaacaagaacagaaaaacttgtggagcgggttcgacgcacaggtcatagctcaagcattgaaaattgacg

SEQ ID NO: 141849 - DNA, 411 bp, Arabidopsis thaliana
acactgcacgaagaagaccctctcaaaagcactaggattgatcaaatcggaaacttaacagaatttagctaccaattactgtctccggcgagatctcaatttgatccttcacggtggcgtcgacgtccgggcaacaacaagctctctcgagaagaaagccattatcatcatcatcatcatcttcatcatctcctcctccgtcttcctcacctgttcgagctcctgcggcgaagaaaccgagtccggaatacccattttggcagcagaactggtttattggtctgctattcgtgatggctttaggattcttctgtctcgctatcttcctttacctaagtctcgatcctgattacggttacacgtctgccttccgcgctgcttctggtaaagaaggtgtcgagattacttatg

SEQ ID NO: 141850 - DNA, 464 bp, Arabidopsis thaliana
acaaaaagaaaatggttaagctcagcaatctcctcgttgcaaccttcggggttctcctcgtccttaacggctgccttgcgaggcagtcacttggggttcctcctcagctacagaacgagtgtaacctcgacaacctagatgttctccaagccaccgaaactatcaagagtgaagccggtcagatcgagtactgggaccacaaccaccctcagctccgatgtgttggtgtttccgttgctcgttatgtaattgaacaaggcggtctttacttgcccaccttcttcacttccccaaaaatttcctacgtcgttcaaggaacgggtatcagcggaagagtggtccctggatgtgccgagaccttcatggactcgcagccgatgcaaggacaacaacaaggccaaccatggcaaggacgacagggacatacaggccaaccatgggaaggcagggacacagggacaaca

SEQ ID NO: 141851 - DNA, 479 bp, Arabidopsis thaliana
ctcttctcttctttctttctccttaacacttttgatccttttccatggctacgcggctcaacagggtcagcagggtcagcagtttccgaacgagtgccagctcgaccagctcaatgcgctcgagccttcacacgtactgaagagcgaggctggtcgcatcgaggtgtgggaccaccacgctcctcagctccgttgctcaggtgtctcctttgcacgttacatcatcgagtctaagggtctctacttgccctctttctttaacaccgcgaagctctccttcgtggctaaaggacgaggtcttatgggaaaagtgatccctggatgcgccgaaacattccaagactcatcagagttccaaccacgcttcgaaggtcaaggtcaaagccagaggttccgtgacatgcaccagaaagtggagcacattaggagcggtgataccattgccacaacaaccggtgtagcccagtgttctacaacga

SEQ ID NO: 141852 - DNA, 360 bp, Arabidopsis thaliana
  unsure (1)..(360): unsure at all n locations
ggaagaaaaatgggtcgagtctcatctattatctctttctctttgacactcttgatcctcttcaatggctgcactgcccaacagtggcccaacgagtgccagctcgatcaactcaatgcgctcgaaccatcccaaatcatcaagagcgagggtggtcgcatcgaggtctgggaccaccatgcaccccagctccgttgctccggctntgcctttgagcgtttcgtcattgagcctcagggtcttttcttgcccactttcttgaacgccggcaaactcacgtttgttgttcacggaaggggtctaatgggaagagttatttcgggatgcgccgagacgttcatggagtcacccgtatttgga

SEQ ID NO: 141853 - DNA, 403 bp, Arabidopsis thaliana
cgcttcgaaggtcaaggtcaaagccagaggttccgtgacatgcaccagaaagtggagcacattaggagcggtgataccattgccacaacacccggtgtagcccagtggttctacaacgacggacagcaaccacttgtcatcgtcagcatcttcgatctagccagtcaccagaaccagcttgaccgcaacccaaggccattttacttagccggaaacaacccacaaggtcaagtatggctacaaggacgagagcaacagccacagaagaacatcttcaatggatttggacccgaggttattgctcaagctttgaagattgatcttcagacagcgcagcaacttcagaaccaagatgacaaccgtggaaacattgtccgagtccaaggccccgtcggtgtcatta

SEQ ID NO: 141854 - DNA, 475 bp, Arabidopsis thaliana
  unsure (1)..(475): unsure at all n locations
cgatccttttgttctctaaccaccggtttcctctttaaccggtctctggataatcatcataatcattaggatcatcaagataaggaatctttttgagtatatctctacaccaaatcgaatctatggatcaaaaagttagacagtttgaggtttgcactcaagacggtagcgttgatcgtcacggcaatccagctatccgagctaataccggcaaatggctcactgctattctcattctagtgaatcaaggactagctacgcttgcgttcttcggtgtaggagcgaatttggttctgtttctgactcgagtgatgggacaagacaatgcagaagcggctaataatgttagtaaatggacaggaactgtctatatcttctctttgcttggtgctttcctcagtgactcttattggggacgntacaagacttgtgctatctttcaagcaagtttcgttgcaagtgtgatgatgttatc

SEQ ID NO: 141855 - DNA, 285 bp, Arabidopsis thaliana
attggaggtcatatcaaatggtttccagatctctcccgaggaagctaggaagatcaagttcaacacacttgagaccactttgacccgcgctgccggtaggcaacaacaacagttgatcgaggagattgtcgaggcttaaatcaaaacgtttttctttttcttaataaagtatggtcagtttgtaatcacgtccctttacctttaacgtacgtgtaaaatatgtgtctgcggcacctcacttgtaataacactttcttctcataaataaaagggaagtttcgagtt

SEQ ID NO: 141856 - DNA, 502 bp, Arabidopsis thaliana
ggaatttttctttttccttctttcgacaaaaataaatgaacgaccaatcagagcctgccacgtaatatgagactgagtatcagaagtctcaatagactgatacggctcagcccagttttttgtggttggtccattaaaaaattgtaaacgggctactgatactctaaaaatatgagctatgtacatggtctaagttgagtctgccacaaaaaacctagtacagttgggctacaaggcccaatataaatgtaagccctttaacaaagagggaaccgcctgctttgactgttgagaacaacttgctggattcttttttcttcccggaaaattgagaaaccaagaaaatcaaacaagtactgcaataagaaagtgttgaatctgattttggaaatattatttgactccattattcccttcataaatatatacagtcaagcatatttatttgaacaagaaaataaagtcatactaataagcctagagataaagtagatcataaaat

SEQ ID NO: 141857 - DNA, 447 bp, Arabidopsis thaliana
aaaaaaaaaagcctagaggaatagaatcggtctctttctctataatctctctctctctctgacttgtttgtgttctctcaaatcctctgataagaatcaatggccaaggaattagcagagaaagctaaagaagcttttctagatgatgacttcgatgttgctgttgacttatactccaaagccattgacttggatcccaattgcgccgccttcttcgccgatcgtgctcaggccaacatcaaaatcgataacttcactgaagctgttgcagatgcgaacaaagccattgagttggagccaacgttggcaaaagcctatctcagaaagggcactgcttgtatgaagctagaagaatatagtactgctaaagcagccctggaaaagggagcttctgttgcaccgaatgaaccaaagtttaagaagatgatagatgaatgcgatcttcgt

SEQ ID NO: 141858 - DNA, 487 bp, Arabidopsis thaliana
gtaccgttctcttctccgtagattgacttgctctaatgatggaggtcatattatggaacgacaaacgcgagagagagatgtatgagaattttgcagagctttttgcaatcatcaaagccacagagaagctagagaaagcttatataagagacctaatcaatccttcagagtacgaatctgaatgccagaaactcattgtccacttcaaaactttatccgctacactcaaagacacggtgccaaacattgaaagatttgcagacacatacaaaatggactgtccagctgctctataccgcctggtgacatcaggtcttcctgccacagtggaacaccgagctaccgttgcggcatctacgtcgaactctgcatccattgttgctgaatgtgtacagaatttcatcacttcaatggattctttgaaactaaacatggtggctggcgatcaagttatcctctcttgactgatctatctgcttctctcaac

SEQ ID NO: 141859 - DNA, 441 bp, Arabidopsis thaliana
  unsure (1)..(441): unsure at all n locations
cgcttcctctgagaaatcaaatcanctcacacctctcaaaaaaaaatttaaacttttctcaggagtttaatggaagaagcggctggagaccacttccacttgttcttcnttctccatncttcctctgntttcttcttctacctactacttcctctcctattcaatcggaggctccaaggcctaaacgagccaaaagggctaagaaatcttctccttctggtgataaatctcataacccgacaagccctgcttctacccgacgcagctctatctacagaggagtcactagacatagatggactgggagattcgaggctcatctttgggacaaaagctcttggaattcgattcagaacaagaaaggcaaacaagtttatctgggagcatatgacagtgaagaagccgcagcacatacgtacgatctggctgctctcaagtact

SEQ ID NO: 141860 - DNA, 422 bp, Arabidopsis thaliana
gttcagttggctcagcagcttcagacccaacaggacagcagatgaaacatcgttcgtgttaagggacctttccaggtcgtgaggccacctctaagacagccctacgagagcgaggagtggagacacccacgtagcccacagggcaacggccttgaggagactatctgcagcatgaggtcccacgagaacattgacgaccctgctcgtgctgacgtgtacaagcccagcctaagtcgcgtgaccagcgtcaacagctataccttgcccatcttggagtatgtcaggctcagtgccactcgtggcgttctccagggtaatgcgatggtgcttcctaaatacaacatgaacgctaacgagatcttgtactgcactggaggacaaggaaggatccaagtggtcaacgacaacggacagaacgtgtt

SEQ ID NO: 141861 - DNA, 538 bp, Arabidopsis thaliana
aacaaacaaaaagaaaatggttaagctcagcaatctcctcgttgcaaccttcggggttctcctcgtccttaacggctgccttgcgaggcagtcacttggggttcctcctcagctacagaacgagtgtaacctcgacaacctagatgttctccaagccaccgaaactatcaagagtgaagccggtcagatcgagtactgggaccacaaccaccctcagctccgatgtgttggtgtttccgttgctcgttatgtaattgaacaaggcggtctttacttgcccaccttcttcacttccccaaaaatttcctacgtcgttcaaggaacgggtatcagcggaagagtggtccctggatgtgccgagaccttcatggactcgcagccgatgcaaggacaacaacaaggccaaccatggcaaggacgacagggacaacaaggccaaccatgggaaggacagggacaacagggacaacaaggaagacaaggccaaccatgggaaggacagggacaacagggacaacaaggacgacagggacaacaa

SEQ ID NO: 141862 - DNA, 494 bp, Arabidopsis thaliana; identical to SEQ ID NO: 119648

SEQ ID NO: 141863 - DNA, 441 bp, Arabidopsis thaliana
  unsure (1)..(441): unsure at all n locations
cggaatncccgggcaaggtcaagtatggctaccaaggccgagaggcaacagccacagaagaacatttttcaatgggtatttggaccccgaggttattggctcaagcctttgaaggatcgatctttcaggacagcggcagcaacttcagaaaaccaagatgaccaactcgtggaaacaattnngtccgagtccaaggcntccgttcggtgtcattaggggccgcctttggaggggcnncagagacctcagngagggannngaagaagaagaagaagggacgnnacatggaccgacnnacggtaatggctttanngaggagaccatcttgcagcgctcaggtgggcaccgataacctcgatgnacccgtctcgtggctgacgtgtacaagctcacagctcggttacatcagcactctcaacagttacgatctccccatccttc

SEQ ID NO: 141864 - DNA, 391 bp, Arabidopsis thaliana
accatgcaccccagctccgttgctccggctttgcctttgagcgtttcgtcattgagcctcagggtcttttcttgcccactttcttgaacgccggcaaactcacgtttgttgttcacggaaggggtctaatgggaagagttattccgggatgcgccgagacgttcatggagtcaccggtatttggagaaggtcaaggtcagggtcagagtcaagggttccgtgacatgcaccagaaagtagagcacctacggtgcggtgacaccattgcaacaccatctggtgtagctcaatggttctacaacaatggaaatgagcctctcattcttgttgcagccgcggatctcgccagcaaccaaaaccagcttgacccgaaccttagaccatttttgat

SEQ ID NO: 141865 - DNA, 425 bp, Arabidopsis thaliana
caaaaagaaaatggttaagctcagcaatctcctcgttgcaaccttcggggttctcctcgtccttaacggctgccttgcgaggcagtcacttggggttcctcctcagctacagaacgagtgtaacctcgacaacctagatgttctccaagccaccgaaactatcaagagtgaagccggtcagatcgagtactgggaccacaaccaccctcagctccgatgtgttggtgtttccgttgctcgttatgtaattgaacaaggcggtctttacttgcccaccttcttcacttccccaaaaatttcctacgtcgttcaaggaacgggtatcagcggaagagtggtccctggatgtgccgagaccttcatggactcgcagccgatgcaaggacaacaacaaggcccaccatggcaaggacgacagggacaac

SEQ ID NO: 141866 - DNA, 521 bp, Arabidopsis thaliana
cacatagcaaaaaatggcaaacaagttgttcctcgtctgcgcagctctcgctctctgcttcctcctcaccaacgcttccatctaccgcaccgtcgttgagttcgaagaagatgacgccactaaccccataggcccaaaaatgaggaaatgccgcaaggagtttcagaaagaacaacacctaagagcttgccagcaattgatgctccagcaagcaaggcaaggccgtagcgatgagtttgatttcgaagacgacatggagaacccacagggacaacagcaggaacaacagctattccagcagtgctgcaacgagcttcgccaggaagagccagattgtgtttgccccaccttgaaacaagctgccaaggccgttagactccagggacagcaccaaccaatgcaagtcaggaaaatttaccagacagccaagcacttgcccaacgtttgcgacatcccgcaagttgatgttggtcccttcaacatcccttcattcccttctttctactaaatctcaaacaaac

SEQ ID NO: 141867 - DNA, 473 bp, Arabidopsis thaliana
atcacatggcgaatgtggaccgtgatcggcgtgtgcttgtttaccgtactgacaaacgtgttcagcagcgaaactacgaagatgatgtcggttttggtggctatggcggttatggtgctggttctgattataagagtcgcggcccctccactaaccaaatcttggcacttatagcaggagttcccattggtggcacactgctaaccctagctggactcactctagccggttcggtgatcggcttgctagtctccatacccctcttcctcctcttcagtccggtgatagtcccggcggctctcactattgggcttgctgtgacgggaatcttggcttctggtttgtttgggttgacgggtctgagctcggtctcgtgggtcctcaactacctacgtgggacgagtgatacagtgccagagcaattggactacgctaaacggcgtatggctgatgcggtaagctatgctggtatg

SEQ ID NO: 141868 - DNA, 400 bp, Arabidopsis thaliana
atcgctcttctcgacatcgccaactaccaaaaccaactcgaccgcaaccctagagtgttccatttggccggaaacaaccagcagggaggctttggcggttcacagcaacaacaagaacagaaaaacttgtggagcgggttcgacgcacaggtcatagctcaagcattgaaaattgacgttcagttggctcagcagcttcagaaccaacaagacagcagaggaaacatcgttcgtgttaagggacctttccaggtcgtgaggccacctctaagacagccctacgagagcgaggagtggagacacccacgtagcccacagggcaacggccttgaggagactatctgcagcatgaggtcccacgagaacattgacgaccctgctcgtgctgacgtgtacaagc

SEQ ID NO: 141869 - DNA, 446 bp, Arabidopsis thaliana
agccgtcacacgtactgaagagcgaggctggtcgcatcgaggtgtgggaccaccacgctcctcagctccgttgctcaggtgtctcctttgcacgttacatcatcgagtctaagggtctctacttgccctctttctttaacaccgcgaagctctctttcgtggctaagggacgaggtcttatgggaaaagtgatccctggatgcgccgaaacattccaagactcatcagagttccaaccacgcttcgaaggtcaaggtcaaagccagaggttccgtgacatgcaccagaaagtggagcacattaggagcggtgataccattgccacaacacccggtgtagcacagtggttctacaacgacggacaggaaccacttgtcatcgtcagcgtcttcgatctagccagtcaccagaaccagcttgaccgcaacccaaagccattttactta

SEQ ID NO: 141870 - DNA, 549 bp, Arabidopsis thaliana
  unsure (1)..(549): unsure at all n locations
cgaattccgggcgaccacgcgtccgancaaaaagaaaatggttaagctcagcaatctcctcgttgcaaccttcggggttctcctcgtccttaacggctgccttgcgaggcagtcacttggggttcctcctcagctacagaacgagtgtaacctcgacaacctagatgttctccaagccaccgaaactatcaagagtgaagccggtcagatcgagtactgggaccacaaccaccctcagctccgatgtgttggtgtttccgttgctcgttatgtaattgaacaaggcggtctttacttgcccaccttcttcacttccccaaaaatttcctacgtcgttcaaggaacgggtatcagcggaagagtggtccctggatgtgccgagaccttcatggactcgcagccgatgcaaggacaacaacaaggccaaccatggcaaggacgacagggacaacaaggccaaccatgggaaggacagggacaacagggacaacaaggaagacagggccaccatgggaaggacagggacaacagggacaccaggacgacagg

SEQ ID NO: 141871 - DNA, 503 bp, Arabidopsis thaliana
aaggccaaccatgggacggacagggacaacagggacaacatggaagacaaggccaaccatgggaaggacagggacaacagggacaacaaggacgacagggacaacaaggccaaccatgggaaggacagggacagcagggacaacaagggttccgtgacatgcaccagaaggtggaacatgtgagacgcggagacgtctttgccaacactccaggctctgcccactggatctacaactcaggagaacagccacttgtcatcatcgctcttctcgacatcgccaactaccaaaaccaactcgaccgcaaccctagagtgttccatttggccggaaacaaccagcagggaggctttggcggttcacagcaacaacaagaacagaaaaacttgtggaggcggttcgacgcacaggtcatagctcaagcattgaaaattgacgttcagttggctcagcagcttcagaaccaacaagacagcagaggaaacatcggtcgtgtaagggac

SEQ ID NO: 141872 - DNA, 426 bp, Arabidopsis thaliana
cacacatagcaaaaaatggcaaacaagttgttcctcgtctgcgcagctctcgctctctgcttcctgctcaccaacgcttccatctaccgcaccgtcgttgagttcgaagaagatgacgccactaaccccataggcccaaaaatgaggaaatgccgcaaggagtttcagaaagaacaacacctaagagcttgccagcaattgatgctccagcaagcaaggcaaggccgtagcgatgagtttgatttcgaagacgacatggagaacccacagggacaacagcaggaacaacagctattccagcagtgctgcaacgagcttcgccaggaagagccagattgtgtttgccccaccttgaaacaagctgccaaggccgttagactccagggacagcaccaaccaatgcaagtcaggaaaatttaccagaca

SEQ ID NO: 141873 - DNA, 477 bp, Arabidopsis thaliana
gtggagcacattaggagcggtgataccattgccacaacacccggtgtagcccagtggttctacaacgacggacagcaaccacttgtcatcgtcagcatcttcgatctagccagtcaccagaaccagcttgaccgcaacccaaggccattttacttagccggaaacaacccacaaggtcaagtatggctacaaggacgagagcaacagccacagaagaacatcttcaatggatttggacccgaggttattgctcaagctttgaagattgatcttcagacagcgcagcaacttcagaaccaagatgacaaccgtggaaacattgtccgagtccaaggcccgttcggtgtcattaggccgcctttgaggggccagagacctcaggaggaggaagaagaagaagaaggacgacacggacgacacggtaatggcttagaggagaccatctgcagcgccaggtgcaccgataacctcgatgat

SEQ ID NO: 141874 - DNA, 409 bp, Arabidopsis thaliana
tccatttggccggaaacaaccagcagggaggctttggcggttcacagcaacaacaagaacagaaaaacttgtggagcgggttcgacgcacaggtcatagctcaagcattgaaaattgacgttcagttggctcagcagcttcagaaccaacaagacagcagaggaaacatcgttcgtgttaagggacctttccaggtcgtgaggccacctctaagacagccctacgagagcgaggagtggagacacccacgtagcccacagggcaacggccttgaggagactatctgcagcatgaggtcccacgagaacattgacgaccctgctcgtgctgacgtgtacaagcccagcctaggtcgcgtgaccagcgtcaacagctataccttgcccatcttggagtatgcaggctcagt

SEQ ID NO: 141875 - DNA, 524 bp, Arabidopsis thaliana
aacaaaaagaaaatggttaagctcagcaatctcctcgttgcaaccttcggggttctcctcgtccttaacggctgccttgcgaggcagtcacttggggttcctcctcagctacagaacgagtgtaacctcgacaacctagatgttctccaagccaccgaaactatcaagagtgaagccggtcagatcgagtactgggaccacaaccaccctcagctccgatgtgttggtgtttccgttgctcgttatgtaattgaacaaggcggtctttacttgcccaccttcttcacttccccaaaaatttcctacgtcgttcaaggaacgggtatcagcggaagagtggtccctggatgtgccgagaccttcatggactcgcagccgatgcaaggacaacaacaaggccaaccatggcaaggacgacagggacaacaaggccaaccatgggaaggacagggacaacagggacaacaaggaagacaaggccaaccatgggaaggacagggacaacagggacaacaaggacgaca

SEQ ID NO: 141876 - DNA, 501 bp, Arabidopsis thaliana
atttctcacattttcgtagccgcaagactcctttcagattcttacttgcagctatgggtaaagagaagtttcacattaacattgtggtcattggtcatgttgattctggaaaatcgaccacaactggtcacttgatctataagcttggtggtattgacaagcgtgtcatcgagaggttcgagaaggaggctgctgagatgaacaagaggtccttcaagtacgcatgggtgttggacaaacttaaggccgagcgtgagcgtggtattaccatcgatattgctctatggaagttcgagaccaccaagtactactgcacagtcattgatgccccaggacatcgtgatttcatcaagaacatgattactggtacctcccaggctgattgtgctgttcttatcattgactccaccactggaggttttgaggctggtatctctaaggatggtcagacccgtgagcacgctcttcttgctttcacccctggtgtcaagcagatgattt

SEQ ID NO: 141877 - DNA, 362 bp, Arabidopsis thaliana
ctgcttttcatcgttggatctgcgttttgcaaagggagatacagaaaggaatagctttgaattgacaaggtttctctctaatccaaccgaatctcaagcttccatggctctcaatctccgtcagaaacagactgaatgtgtaatccggatgttgaatctgaaccaacctttgaatccaagtggaactgcgaacgaagaagtttacaagatcttgatttacgataggttttgtcagaacattctatctccattgacccatgtcaaggatctgcgtaagcatggagttacactcttctttctcatagacaaagatcgacaacctgttcatgatgttcccgctgtctactttgttcaaccaactg

SEQ ID NO: 141878 - DNA, 530 bp, Arabidopsis thaliana
  unsure (1)..(530): unsure at all n locations
gtgaaaacgagataacgaccaaaaaatagtatagaattatagctcaaacgagacaattccaaggaatattatttatatatgtgatataatacggtttggtgtgaattttctgcaccaaattatccgctttacattaccactagatattgatccgtggtataccgcgggtaaatatgttcattgaaaaagttatatatatttttgtaagaataatatattcttgatacataatttttatctatgtaaagcttgggtaattcatgttttattttctgatattagtgtatattagtttaatattataattcagtattttttttgtggtaaggattttttagagttaataaagatttaaacttgtattatttagagattgacccgcggtacaccgcaggttgatatttttgttagaaagttaaagatttttattttatttatattatttatatataaaacatagtcaaaaggtacatcatatgcctatattnttattaaaaacaaaaattcatctatagataccatgctatttg

SEQ ID NO: 141879 - DNA, 424 bp, Arabidopsis thaliana
gggacaacaaggccaaccatgggaaggacagggacaacagggtcaacaaggaagacaaggccaaccatgggaaggacagggacaacagggacaacaaggacgacagggacaacaaggccaaccatgggaaggacagggacagcagggacaacaagggttccgtgacatgcaccagaaggtggaacatgtgagacgcggagacgtctttgccaacactccaggctctgcccactggatctacaactcaggagaacagccacttgtcatcatcgctcttctcgacatcgccaactaccaaaaccaactcgaccgcaaccctagagtgttccatttggccggaaacaaccagcagggaggctttggcggttcacagcaacaacaagaacagaaaaacttgtggagcgggttcgacgcacaggtcata

SEQ ID NO: 141880 - DNA, 467 bp, Arabidopsis thaliana
agaaaaatgggtcgagtctcatctattatctctttctctttgacactcttgatcctcttcaatggctacactgcccaacagtggcccaacgagtgccagctcgatcaactcaatgcgctcgaaccatcccaaatcatcaagagcgagggtggtcgcatcgaggtctgggaccaccatgcaccccagctccgttgctccggctttgcctttgagcgtttcgtcattgagcctcagggtcttttcttgcccactttcttgaacgccggcaaactcacgtttgttgttcacggaaggggtctaatgggaagagttattccgggatgcgccgagacgttcatggagtcaccggtatttggagaaggtcaaggtcagggtcagagtcaaggggtccgtgacatgcaccagaaagtagagcacctacggggcggtgacaccattgcaacaccatctggtgtagctcaatggtc

SEQ ID NO: 141881 - DNA, 529 bp, Arabidopsis thaliana
ggaagacaaggccaaccatgggaaggacagggacaacagggacaacatggacgacagggacaacaaggccaaccatgggaaggacagggacagcagggacaacaagggttccgtgacatgcaccagaaggtggaacatgtgagacgcggagacgtctttgccaacactccaggctctgcccactggatctacaactcaggagaacagccacttgtcatcatcgctcttctcgacatcgccaactaccaaaaccaactcgaccgcaaccctagagtgttccatttggccggaaacaaccagcagggaggctttggcggttcacagcaacaacaagaacagaaaaacttgtggagcgggttcgacgcacaagtcatagctcaagcattgaaaattgacgttcagttggctcagcagcttcagaaccaacaagacagcagaggaaacatcgttcgtgttaagggacctttccaggtcgtgaggccacctctaagacagccctacgagagcgaggagtggagacacccacgta

SEQ ID NO: 141882 - DNA, 491 bp, Arabidopsis thaliana
caataaagaggaagaaaaatgggtcgagtctcatctattatctctttctctttgacactcttgatcctcttcaatggctacactgcccaacagtggcccaacgagtgccagctcgatcaactcaatgcgctcgaaccatcccaaatcatcaagagcgagggtggtcgcatcgaggtctgggaccaccatgcaccccagctccgttgctccggctttgcctttgagcgtttcgtcattgagcctcagggtcttttcttgcccactttcttgaacgccggcaaactcacgtttgttgttcacggaaggggtctaatgggaagagttattccgggatgcgccgagacgttcatggagtcaccggtatttggagaaggtcaaggtcagggtcagagtcaagggttccgtgacatgcaccagaaagtagagcacctacggggcggtgacaccattgcaacaccatctggtgtagctcaatggttctacaacaatgg

SEQ ID NO: 141883 - DNA, 521 bp, Arabidopsis thaliana
  unsure (1)..(521): unsure at all n locations
agaaaacatacacaaatagcaaaacatggctaacaagctcttcctcgtctgcgcaactctcgccctctgcttcctcctcaccaacgcttccatctaccgcaccgttgtcgaattcgaagaagatgacgccagcaaccccgtaggtccaagacagagatgccagaaggagtttcagcaatcacaacacctaagagcttgccagagatggatgagcaagcaaatgaggcaaggacgtggtggtggtccttccctcgacgatgagttcgatttcgagggcccccagcagggataccagctactccagcagtgctgcaacgagcttcgccaggaagagccagtttgcgtttgccccaccttgaaacaagctgccaggacagttagcctccagggacagcacggaccattccaatccaggaaaatttaccagtcagctaagtacttgcctaacatttgcaagatccagcaaggtggtgaatgtcccttncagaccaccatccctttcttccctncttactactaga

SEQ ID NO: 141884 - DNA, 500 bp, Arabidopsis thaliana
attgcttcatcattaccaaatcatcaacttaatcgtttctctcaaatttagggttttctcttttctcgaaagtcttgcggttttctgaatcatctctatctggtttgagggtttcgtttgatatctggagaaaggggtttctggaaacaaggagttcataattcgcgatcttgatctatcgatcttcatttatatataaaagcgtgaatgagattatgatggagtcgaaaggtggtaaaaagaagtccagcagtagtagttccttattttacgaagctcccctcggttacagcattgaagacgttcgtccaaacggtggaatcaagaaattcaaatcttctgtctactcaaactgctccaagaggccatcctgagtaccaacgtgcaccgatcttcataatatagttatagctttctttactttccagcttataattttcttctttcaaaagctccttttctgctggttcccggatccaatcgttctcttcttctactac

SEQ ID NO: 141885 - DNA, 463 bp, Arabidopsis thaliana
gttgagagggttgcccaaaggcagtatatagagcatacccagtaaaacttacaagtaacccagatataaagatggcgactagggttgctgtttccattattatagaattgaaagaccacaccggatctatgctaagatcatttatttacaacggaatggtatacaaagtcaacagatcgtaatgaatacaaaataagatttatggctacacaaactgttgaagatagttctagatctggtccaagaagcactactgtagggaagttattgaaaccattgaattccgaaatatggaaagtagctcccggatggggaacgaccccttttgatggggttgcaatggctctatttgcggtattcctatctattattttggagatttataattcttctgttctactggatggaatatccagtgaattagactgggaagaattcctgaagtctagcttttagctcgata

SEQ ID NO: 141886 - DNA, 528 bp, Arabidopsis thaliana
aaaaagaaaatggttaagctcagcaatctcctcgttgcaaccttcggggttctcctcgtccttaacggctgccttgcgaggcagtcacttggggttcctcctcagctacagaacgagtgtaacctcgacaacctagatgttctccaagccaccgaaactatcaagagtgaagccggtcagatcgagtactgggaccacaaccaccctcagctccgatgtgttggtgtttccgttgctcgttatgtaattgaacaaggcggtctttacttgcccaccttcttcacttccccaaaaatttcctacgtcgttcaaggaacgggtatcagcggaagagtggtccctggatgtgccgagaccttcatggactcgcagccgatgcaaggacaacaacaaggccaaccatggcaaggacgacagggacaacaaggccaaccatgggaaggacagggacaacagggacaacaaggaagtacaggccaaccatgggaaggacagggacaacagggacaacaaggacgacagggacaa

SEQ ID NO: 141887 - DNA, 520 bp, Arabidopsis thaliana
cgctttctctctctctctctcgtgtgtgtgtgtgtgatcgagtggtgaaacgacagagaggggcgtcggggtgttgatttcttctgggtgaagatgtcaggtctcgaagatatcaagaacgagaccgttgatctggaaaaaattccgattgaggaagttttccagcagctaaaatgtacaagggaaggattgacaacgcaggaaggggaagacaggattgtgatatttggccccaacaagctcgaagagaagaaggaaagcaaaattctgaagtttctggggttcatgtggaatccgctttcatgggttatggaagctgcagctctcatggccattgctttggctaatggtgataatcgacctccggattggcaagattttgtgggtattatctgtctgcttgttatcaactccacaatcagtttcattgaagaaaacaacgccggaaatgctgcagctgctctcatggctggtcttgctcctaaaaccaaggttcttagggatggaaaatggagtgaac

SEQ ID NO: 141888 - DNA, 167 bp, Arabidopsis thaliana
tcgaccacgcgtccggagagaatgattatttataagatggtcataaaaatagataatgtagatgtatttaaagaaaaaaaaaatgtaatgttcataatctaaaattaaaatatagaactaagctgttacaataatattttttaaactcatactacaacaacaacaac

SEQ ID NO: 141889 - DNA, 138 bp, Arabidopsis thaliana
tttttcttaataaagtatggtcagtttgtaatcacgtccctttacctttaacgtacgtgtaaaatatgtgtctgcggcacctcacttgtaataacactttcttctcataaataaaagggaagtttcgagttacatact

SEQ ID NO: 141890 - DNA, 499 bp, Arabidopsis thaliana
  unsure (1)..(499): unsure at all n locations
ctcgaagcgagtgagatatggcaacaaagaccgatgattttgtaccatttccagttaaagatcagcttcccggagtcgaattttgtgtctcgagctctccaaattggccggaaggaatagttcttgggtttcaacattacattgtaatgcttggaactactgtaatcataccttccatactcgtccctctaatgggtggtggcgacgtggagaaagcggaagtcataaacacagtattgttcgtgtcaggaataaacacgttgttgcagagtttgttcggaagtcgacttcctgtggtcatgggagcttcttatgcttacctcatccctgctctttacatcactttctcttatcgattcacttactatctccatcctcatctcagatttgaagagactatgagagctattcaaggagctcttatcatngcttcaataagtcatatgataatgggttcttcggtttgtggagaatcttggtcaggttctttctctctttc

SEQ ID NO: 141891 - DNA, 423 bp, Arabidopsis thaliana
atacacacatagcaaaaaatggcaaacaagttgttcctcgtctgcgcagctctcgctctctgcttcctcctgaccaacgcttccatctaccgcaccgtcgttgagttcgaagaagatgacgccactaaccccataggcccaaaaatgaggaaatgccgcaaggagtttcagaaagaacaacacctaagagcttgccagcaattgatgctccagcaagcaaggcaaggccgtagcgatgagtttgatttcgaagacgacatggagaacccacagggacaacagcaggaacaacagctattccagcagtgctgcaacgagcttcgccaggaagaagccagatgtgtttgccccaccttgaaacaagctgccaaggccgttagactccaaggacagcaccaaccaatgcaagtcaggaaaatttac

SEQ ID NO: 141892 - DNA, 459 bp, Arabidopsis thaliana
gtaaaaggcggcgacgagcgagcacaccatcttgcaatttgtgtctccgtcatcaacggcgtccgctacaacctctgtactcacggcgaggatccaccctctcgttatctttaacgtctgtgattgcttcgtgagacgtcctgactcagctgaaagagtcatcggaactctcctcggatctatcttacctgacggaaccgtcgatatccgcaattcatacgccgtccctcacaatgaatcttctgatcaggttgctgtggatattgattaccaccacaatatgttagcttcacaccttaaggtgaattcaaaggaaattattgtcggctggtattcaactggtgctggggttaatggcggtagttcgctgattcatgatttctatgctagagaagtacccaacccaattcacctaactgtggatactgggtttactaatggtgagggtactatcaaagc

SEQ ID NO: 141893 - DNA, 391 bp, Arabidopsis thaliana
cccacgcgtccgaaataagcttcccaaggccccgtgtgatgagggggtatgtaaagtatgtggcgttgacgaagatgatgacagtgttctcttgtgtgatacatgcgatgctgagtatcacacatattgtttaaatccacctcttattagaattcctgatggaaattggtattgtccatcttgtgtcattgccaagcgcatggctcaagaggctttggaatcttacaaactagttaggcggcggaaaggtagaaagtatcagggggaactcacccgagcttctatggaactgactgctcacctggcagatgtgatggaagaaaaggactactgggagtttagtgctgaggagagaatcttgctgcttaagcttctatgcgatgaactgctt

SEQ ID NO: 141894 - DNA, 423 bp, Arabidopsis thaliana
  unsure (1)..(423): unsure at all n locations
aaatcttaaacccacctcgagatcatagtcttcatcaattagtcataaaaaagcacaatgctttcttcaatcaaaccatcttcgtcttccttctccaccgctatctccggcagcgtaaggcggtcaattcctacgacgctcaatttttctcctttacccatcatcaaaaactgccataaccaaagctttcactctaatgttgtctcccatcaaaagcctctacacatttcatctgcttcgaatttcaaacgtgaggtcaaagtcgaagcttacgaggcagatcgatcccgtccactggacatcaacatcgagcttcccgatgaacaatccgcgcagaaactgaaaatcggaatctacttcgcaacttggtgggcacttaacgttgtcttcaacatctacaacanagaaagcctcaatgctttt

SEQ ID NO: 141895 - DNA, 528 bp, Arabidopsis thaliana
tagagacaaagagagagagagatggggtcaaagacggagatgatggagagagacgcaatggctacggtggctccctatgcgccggtcacttaccatcgccgtgctcgtgttgacttggatgatagacttcctaaaccttatatgccaagagcattgcaagcaccagacagagaacacccgtacggaactccaggccataagaattacggacttagtgttcttcaacagcatgtctccttcttcgatatcgatgataatggcatcatttacccttgggagacctactctggactgcgaatgcttggtttcaatatcattgggtcgcttataatagccgctgttatcaacctgacccttagctatgccactcttccggggtggttaccttcacctttcttccctatatacatacacaacatacacaagtcaaagcatggaagtgattcaaaaacatatgacaatgaaggaaggtttatgccggtgaatcttgagttgatatttaacaaatatgcgaaaaccttgccagac

SEQ ID NO: 141896 - DNA, 397 bp, Arabidopsis thaliana
ccaaaagcatacaatacaatgtctactcttgttttattcctccaacttttttccatcctaccattagcacttgggttgaaccacccaaattgtgacctgaccaagactcaagaccaaggctctaccctaagaatcttccacatagacagcccttgctcccccttcaaatcatcatccccactctcatgggaagcgcgtgtgctccagacgctggctcaagaccaggcccgtctccagtacctgagcagcctcgtcgccgggagatctgtagtccccattgcctcagggcgtcaaatgttgcaaagcactacatacattgtcaaggctttgatcggtactccggctcagccgctgctcctagccatggacacgagcagtgacgtggcttggattcctt

SEQ ID NO: 141897 - DNA, 484 bp, Arabidopsis thaliana
ggaatggctacaaggccgaaagcaacagaagcaaaacaacatcttcaatggcttcgcacctgagatcttggctcaagccttcaagatcaatgtcgagacggctcagcagctccagaaccagcaagataaccgtggcaacatcgtcaaggtcaacggacctttcggcgtcattaggccacccttgagacgcggcgaaggcggccaacaaccacatgaaatagctaatggtttagaggagactttgtgcaccatgcgatgcactgaaaacctcgatgacccgtcggatgctgacgtgtacaagccatcactcggatacattagcacacttaacagctacaatcttcctatcctcagacttctccgccttagcgctcttcgtggctccatccgtaaaaacgccttggtgctaccgcaatggaacgtaaacgcaaacgcggcactctacgtgacaaacggaaaggctcatatacaaatggtgaacgac

SEQ ID NO: 141898 - DNA, 466 bp, Arabidopsis thaliana
cataagtaaaagataagacatctacattcttctaatttgataattggctcaatatgaaatgcttaatgtatgtcaattttgggccgaaccaccataacattaacactgcttttcttttccaattctcttttggtaagaagtgggttaaattcatctacaaaatgataacgtataacatactctcctcacactgttttgataccaaaaaacatgaaaaaaacatgaaaaaaacatgaaaatgctagcaatggcagagatgcagagtgtttaggtagctcaacatattcattgcggtacccttagataatgatatattactaaaagcaaaatgtttatcttattatatcaagtacagatttaaaagttagtacctcatgagatcatgacacatgacaagtctaacgataagatgtttgtctgtgtcattaaagatttaactttatttgtactaggtgatcacccgcgc

SEQ ID NO: 141899 - DNA, 407 bp, Arabidopsis thaliana
catatttctcacattttcgtagccgcaagactcctttcagattcttacttgcagctatgggtaaagagaagtttcacattaacattgtggtcattggtcatgttgattctggaaaatcgaccacaactggtcacttgatctataagcttggtggtattgacaagcgtgtcatcgagaggttcgagaaggaggctgctgagatgaacaagaggtccttcaagtacgcatgggtgttggacaaacttaaggccgagcgtgagcgtggtattaccatcgatattgctctatggaagttcgagaccaccaagtactactgcacagtcattgatgccccaggacatcgtgatttcatcaagaacatgattactggtacctcccaggctgattgtgctgttcttatcattgac

SEQ ID NO: 141900 - DNA, 269 bp, Arabidopsis thaliana
aacgaattttcatcaagcctgaaagttaaggaatacaataattacaaaccatcttgtaatcaaaattgtctactttaaatcaaacaaagtgaacaaaagagagaaactttaccaggcgaaatagtccataatctctgccaattgaaccgatgcagcaaaatcttggagtcctcagtaaccattgccagtaaatccttctccgggttccactcagctatcttaatctaatgaaattgaacatatataaacatctaaatccttaaaagcat

SEQ ID NO: 141901 - DNA, 495 bp, Arabidopsis thaliana
aacgagtgccagctcgatcaactcaatgcgctcgaaccatcttaaatcatcaagagcgagggtggtcgcatcgaggtctgggaccaccatgcaccccagctccgttgctccggctttgcctttgagcgtttcgtcattgagcctcagggtcttttcttgcccactttcttgaacgccggcaaactcacgtttgttgttcacggaaggggtctaatgggaagagttattccgggatgcgccgagacgttcatggagtcaccggtatttggagaaggtcaaggtcagggtcagagtcaagggttccgtgacatgcaccagaaagtagagcacctacggtgcggtgacaccattgcaacaccatctggtgtagctcaatggttctacaacaatggaaatgagcctctcattcttgttgcagccgcggatctcgccagcaaccagaaccagcttgaccgcaaccctagaccatttttgatagccggaaacaacccacaa

SEQ ID NO: 141902 - DNA, 423 bp, Arabidopsis thaliana
gtgttccatttggccggaaacaaccagcagggaggctttggctgttcacagcaccaacaagaacagaaaaacttgtggagcgggttcgacgcacaggtcatagctcaagcattgaaaattgacgttcagttggctcagcagcttcagaaccaacaagacagcagaggaaacatcgttcgtgttaagggacctttccaggtcgtgaggccacctctaagacagccctacgagagcgaggagtggagacacccacgtagcccacagggcaacggccttgaggagactatctgcagcatgaggtcccacgagaacattgacgaccctgctcgtgctgacgtgtacaagcccagcctaggtcgcgtgaccagcgtcaacagctataccttgcccatcttggagtatgtcaggctcagtgccactcgt

SEQ ID NO: 141903 - DNA, 365 bp, Arabidopsis thaliana
gctgtatacagttaagtgacacaacaccttgtcttcaagagctttatctcatggctcacactgtcggactcagtgagcggagatgcactgagcctaacaggacctcgtacactgagaaggagatcgatcaacttgattggaacggacacatactccaagctggagtgacagagaaggacttattcaaagacggtcactaacagtttgagaatccaatcttgagcaacgtcgatgctcacttatgaggactactagctaacgtctctctcgaggaagattgcactgcgaaacctgctcaatcgactgatttgaagctttcgtacctaggagcaaagagaatcgctgtgatcgggctaggacagtct

SEQ ID NO: 141904 - DNA, 482 bp, Arabidopsis thaliana
cgcccccgcgtccgcctaatgttaacacttgacatacatcagaacttcttctaaatggcaagcacattactttgtgttgaccttcaaatggatcgtatcctagaaagatatttatattattccagctcaatctgggtatgggtaaagttatcaactgtctcttgctagggttccaaactatcggcattcttgatgtcttaaagcagatcaagccctggacagattccgtagaggaataaatactacatccttctggtaattccatatgataacgataaagaggctgagaagaagagtaagaccttttagaattctgaagtgaatgaagatgttgcggaattgaggacacaaaccacctggtcatttttttttgaagcaaaccaaaagactcggccgtggggaccgagtttcgaacaagttgatgaaatatggattcggggggattgataaccaaagctttgacacacaacgaaacctctcaa

SEQ ID NO: 141905 - DNA, 521 bp, Arabidopsis thaliana
aagaaaacatacacaaatagcaaaacatggctaacatgctcttcctcgtctgcgcaactctcgccctctgcttcctcctcaccaacgcttccatctaccgcaccgttgtcgaattcgaagaagatgacgccagcaaccccgtaggtccaagacagagatgccagaaggagtttcagcaatcacaacacctaagagcttgccagagatggatgagcaagcaaatgaggcaaggacgtggtggtggtccttccctcgacgatgagttcgatttcgagggcccccagcagggataccagctactccagcagtgctgcaacgagcttcgccaggaagagccagtttgcgtttgccccaccttgaaacaagctgccagggcagttagcctccagggacagcacggaccattccaatccaggaaaatttaccagtcagctaagtacttgcctaaacattgcaagatccagcaagttggtgaatgtcccttccagaccaccatccctttcttcctccttactactaga

SEQ ID NO: 141906 - DNA, 419 bp, Arabidopsis thaliana
aaaacgttgtgcagattgattctgggtttatcagttccttaccaccataattcttggcaggcttctcttggtctaagtgaatttggagttatgcttctgtcagcacttttaacttcagtgggaatcaatcttggcctctgttttctcttcttcactttgtattcaatattgagaaagcagcctagtaatgtcactgtatacggtccacgtcttgttaaaaaagatggcaagtctcagcagtcaaatgagttcaacctcgagaggcttttgcctactgctggttgggtcaaaagagcattggaacctaccaatgatgaaatcctctccaatcttggcttagatgctttggtcttcattcgtgtctttgtcttcagcataagagtgtttagctttgcatctgtggttgggatcttcatact

SEQ ID NO: 141907 - DNA, 398 bp, Arabidopsis thaliana
gagccttgtttcatcgtctcttgtcgaggcgataatatttagatctgctcaccatttctccgccatcgccgacggaagaagaaagatgggagacaacaaccctaaccgatcagaagcagaacgtcttctcggaatcgcggagaagcttctcgagtcacgagatctaaacggttcaaaagagtttgcaatcttagctcaagagacagagccactcctcgaaggcaccgatcaaatcctcgccgtcgtcgatgtcttactctcatcagcaccagagaatcgtatcaaaaaccaaccaaactggtacaaaatccttcagatcgaagatctaactgaatcatcaacagacaacgatctaatcaagaaacaataccgtcgtcttgctcttcttctccaccctg

SEQ ID NO: 141908 - DNA, 500 bp, Arabidopsis thaliana
gtttcgtctccggtggcttttcatagccttggtgaagctgttgctacagtttcaaaagcttctcaatctactagtgctgctattgtgcttgcttcaagtgtttctgatgaatctaagcttagttctgtatcagctttagcttcaggcatagtacttggtttatttgaagatggtaggtataagtctgaatcaaagaaaccatctttgaaagctgttgatattattggatttggaactggggctgaggtagaaaagaagctgaagtatgctgaagatgtttcttacggtgtaattttcgggagagagctcattaattctcctgccaatgtgcttactcctgctgtactagctgaggaagcagcaaaggtggcttctacgtacagtgatgtcttcactgcaaacatcttgaacgaagagcaatgcaaagagttgaagatgggttcttacctaagctgtgctgctgcgtcggctaatcctcctcacttcatccaccttgtcta

SEQ ID NO: 141909 - DNA, 569 bp, Arabidopsis thaliana
  unsure (1)..(569): unsure at all n locations
cacgcccgtccgaaccaaacannaaaagaaaatgggttannagctcagcaatctctcttcgttgcaaccctnntcggggttcttcctcgtgccttagacggctnngccttgcgaggcnagtcnnacttggggttccnntcctcagctaccagannacgagtgtaacctcgacaaccctagatgttctccaagnccaccgaaactatcaagagtgaagccggtcagatcgagtactgggaccacaaccaccctcagctccgatgtgttggtgtttccgttgctcgttatgtaattgaacaaggcggtctttacttgcccaccttcttcacttccccaaaaatttcctacgtcgttcaaggaacgggtatcagcggaagagtggtccctggatgtgccgagaccttcatggactcgcagccgatgcaaggacaacaacaaggccaaccatggcaaggacgacagggacaacaaggccaaccatgggaaggacagggacaacagggacaacaaggaagacaaggccaaccatgggaaggacagggaccacagggacaaccaggacgacaggg

SEQ ID NO: 141910 - DNA, 482 bp, Arabidopsis thaliana
cccaaatatgcataagcttttggtttctcttctctccgtcgtttcactctcatttctcctcttcttccatggcgccgaggcacgccagcgagaggcgccgtttccaaacgcctgccatttcagccaaatcaacagcctcgcgcccgctcaggcgacgaagttcgaagccggtcagatggaagtatgggaccacatgagccctgagctccgatgcgccggtgtaacggtggctcgcatcacccttcagcccaattccattttcttgcccgctttctttagcccacctgcccttgcttacgttgtccaaggagaaggagttatggggacgattgcttctggttgtcctgagacttttgcagaagttgaaggatcatcatgaagaggaggaggaggagacccgggtcgacgttttgaggacatgcaccacaagttggagaattttcggcgaggggatgtgtttgcttcgcttgccggagttttac

SEQ ID NO: 141911 - DNA, 533 bp, Arabidopsis thaliana
caaattccaaacaataccaagaaacctctacttgaaaagagattattatcgccgcgtgtgtgcctaagagcgatggcgtctgagaaacaaaaacaacatgcacaacctggcaaagaacatgtcatggaatcaagcccacaattctctagctcagattaccaaccttccaacaagcttcgtggtaaggtggcgttgataactggtggagactctgggattggtcgagccgtgggatactgttttgcatccgaaggagctactgtggctttcacttacgtgaagggtcaagaagaaaaagatgcacaagagaccctacaaatgttgaaggaggtcaaaacctcggactccaaggaacctatcgccattccaacggatttaggatttgacgaaaactgcaaaagggtcgttgatgaggtcgttaatgcttttggccgcatcgattgtttgatcaataacgcaacagagcagtacgagagcagcacaatcgaagagattgatgagcctaggctttgagcgagtcttccgtacaaaca

SEQ ID NO: 141912 - DNA, 526 bp, Arabidopsis thaliana
gctaaaccctccaacgattttccatgattcgaagatacagagtcttatcgatgaagaaaaagccctaaaaaccaaagctttgatctctccgaaatcggagtttctttctttgtttggtaaatttggttttcgaaatgtataagaaccagctacaagagttggctcagaggagctgctttaatcttccttcgtatacttgtattagggaaggtcctgaccacgcgccgcgattcaaggctactgttaactttaacggcgagatctttgagagtcctcagtattgttctactcttcgtcaagctgaacactctgctgctgaagttgctctcaatgctctctctaatcgtggtccttctcactctcttgccgccaggatcttggatgagacgggtgtgtataagaatcttttgcaagagatagctcaaagagtgggagctcctttaccgcgatatactactttcaggtcaggtcttggtcaccaacctgtgtttactggtactgtagaattggcttggaatacgttcac

SEQ ID NO: 141913 - DNA, 497 bp, Arabidopsis thaliana
atcgaaaacattaagtagctagttaagagagagagagagatgtttatgaacattaagtttccagttatagacttgtctaagctcaatggtgaagagagagaccaaaccatggctttgatcgacgatgcttgtcaaaactggggcttcttcgagctggtgaaccatggactaccatatgatctaatggacaacattgagaggatgacaaaggaacactacaagaaacatatggaacaaaagttcaaagaaatgcttcgttccaaaggtttagataccctcgagaccgaagttgaagatgtcgattgggaaagcactttctacctccgtcatctccctcaatctaacctatacgacatccctgatatgtcaaatgaataccgattggcaatgaaggattttgggaagaggcttgagattctagctgaagagctattggacttgtgtgtgagaatctagggttggagaaagggtacttgagaaggtgttcatgggacaac

SEQ ID NO: 141914 - DNA, 523 bp, Arabidopsis thaliana
accacgcgtccggaaccacttgtcatcgtcagcatcttcgatctagccagtctctagatccagcttgaccgcaacccaagggcatttgacttagccggaaacaacccacaaggtcaagtatggctacaaggacgagagcaacagccacagaagaacatcttcaatggatttggacccgaggttattgctcaagctttgaagattgatcttcagacagcgcagcaacttcagaaccaagatgacaaccgtggaaacattgtccgagtccaaggcccgttcggtgtcattaggccgcctttgaggggccagagacctcaggaggaggaagaagaagaagaaggacgacacggacgacacggtaatggcttagaggagaccatctgcagcgccaggtgcaccgataacctcgatgatccgtctcgtgctgacgtgtacaagccacagctcggttacatcagcactctcaacagttacgatctccccatccttcgctttatccgtctctcagccctccgtggatcta

SEQ ID NO: 141915 - DNA, 486 bp, Arabidopsis thaliana
gaagaaaaatgggtcgagtctcatctattatctctttctctttgacactcttgatcctcttcaatggctactgcccaacagtggcccaacgagtgccagctcgatcaactcaatgcgctcgaaccatcccaaatcatcaagagcgagggtggtcgcatcgaggtctgggaccaccatgcaccccagctccgttgctccggctttgcctttgagcgtttcgtcattgagcctcagggtcttttcttgcccactttcttgaacgccggcaaactcacgtttgttgttcacggaaggggtctaatgggaagagttattccgggatgcgccgagacgttcatggagtcaccggtatttggagaaggtcaaggtcagggtcagagtcaagggttccgtgacatgcaccagaaagtagagcacctacggtgcggtgacaccattgcaacaccatctggtgtagctcaatgggtctacaacaatggaaatgag

SEQ ID NO: 141916 - DNA, 358 bp, Arabidopsis thaliana
aatggccaagaagatgagttctctcatcatcatcttcaacattctccttgtcctcacaactcaaacccacgcgcacaacgtcacgcgcctcctagcaaaccacccatcattctcttccttcagccatttcctaacacaaacacacctcgccgacgaaatcaaccggagaagaaccataaccgtttgcgccgtcgataacgccgccatgtcagcattaacctcaaaaggctacacaatctcaactctcaaaaacattctctccctccacgtccttttagattacttcggaaccaaaaaactccaccagatccgtgacggctctgctctcgccgctactctgtttcaagccaccggagct

SEQ ID NO: 141917 - DNA, 423 bp, Arabidopsis thaliana
gccaaccatgggaaggacagggacaacagggacaacaaggacgacagggacaacaaggccaaccatgggaaggacagggacagcagggacaacaagggttccgtgacatgcaccagaaggtggaacatgtgagacgcggagacgtctttgccaacactccaggctctgcccactggatctacaactcaggagaacagccacttgtcatcatcgctcttctcgacatcgccaactaccaaaaccaactcgaccgcaaccctagagtgttccatttggccggaaacaaccagcagggaggctttggcggttcacagcaacaacaagaacagaaaaacttgtggagcgggttcgacgcacaggtcatagctcaagcattgaaaattgacgttcagttggctcagcagcttcagaaccaacaagaca

SEQ ID NO: 141918 - DNA, 542 bp, Arabidopsis thaliana
  unsure (1)..(542): unsure at all n locations
accacgcgtccgncaaacaaaaagaaaatggttaagctcagcaatcttctcgttgcaaccttcggggttctcctcggccttaacggctgccttgcgaggcagtcacttggggttcctcctcagctacagaacgagtgtaacctcgacaacctagatgttctccaagccaccgaaactatcaagagtgaagccggtcagatcgagtactgggaccacaaccaccctcagctccgatgtgttggtgtttccgttgctcgttatgtaattgaacaaggcggtctttacttgcccaccttcttcacttccccaaaaatttcctacgtcgttcaaggaacgggtatcagcggaagagtggtccctggatgtgccgagaccttcatggactcgcagccgatgcaaggacaacaacaaggccaaccatggcaaggacgacagggacaacaaggccaaccatgggaaggacagggacaacagggacaacaaggaagacaaggcccaccatgggaaggacagggacaacagggacaacaaggacgacaggg

SEQ ID NO: 141919 - DNA, 356 bp, Arabidopsis thaliana
atttgatagagtcctgcttatacacaaaagaccattttttttcacaaggcatttagatgtttatatccgggatcaccatctatataagggagactaaaagttcgtgaaccggacaccgatatatacatatcagcataaaggagaggctgcgatgatagaaaattcatgttaacctcatcattccaaaaaactgccataccaacgataagccctttctgattcacaacataatggtgggcatatccaagagcattacatagactttgcacatatactagaccgttcttagcttctatgaggaacaatacatcacgtttagaaaactgcctgatgactcttaaatatggaattgtcag

SEQ ID NO: 141920 - DNA, 346 bp, Arabidopsis thaliana
  unsure (1)..(346): unsure at all n locations
cgcgtccgcaaggacnagagcaacagccacagaagaacatcttcaatgactttttttttctaggccattggtcaagcttggcaggggacgccttatatgttgggaaaactataccttccttaaccacataactgtctattcatatcaaccttacgtccattatcttataatagaaactccatgctacactcattcctccaagaggaggaagacgaagaagaaagacgacacggactacacggtaatggcttagatgattccatctgcagcgccaggtgcacctcatattatttgactattcttagttttttatgagggatcaatatcacacgctcggttacatcag

SEQ ID NO: 141921 - DNA, 452 bp, Arabidopsis thaliana
gagcaacagccacagaagaacattttcaatggatttggacccgaggttattgctcaagctttgaagatcgatcttgagacagcgcagcaacttcagaaccaagatgacaaccgtggaaacattgtccgagtccaaggcccgttcggtgtcattaggccgactttgaggggccagagacctcaggaggaggaagaagaagaagaaggacgacatggacgacacggtaatggcttagaggagaccatctgcagcgccaggtgcaccgataacctcgatgacccgtctcgtgctgacgtgtacaagccacagctcggttacatcagcactctcaacagttacgatctgcccatacttcgcttcattcgtctatgagacctacgtggatctatacgtcaaaacgccaaggtgcttccacagtggaacgcaaacgcgaacgctattctttacgtgac

SEQ ID NO: 141922 - DNA, 501 bp, Arabidopsis thaliana
aaacaagttgttcctcgtctgcgcagctctcgctctctgctttctcctcaccaacgcttccatctaccgcaccgtcgttgagttcgaagaagatgacgccactaaccccataggcccaaaaatgaggaaatgccgcaaggagtttcagaaagaacaacacctaagagcttgccagcaattgatgctccagcaagcaaggcaaggccgtagcgatgagtttgatttcgaagacgacatggagaacccacagggacaacagcaggaacaacagctattccagcagtgctgcaacgagcttcgccaggaagagccagattgtgtttgccccaccttgaaacaagctgccaaggccgttagactccagggacagcaccaaccaatgcaagtcaggaaaatttaccagacagccaagcacttgcccaacgtttgcgacatcccgcaagttgatgttggtccttcaacatcccttcattcccttctttctactaaatctcaaacaaa

SEQ ID NO: 141923 - DNA, 506 bp, Arabidopsis thaliana
acgcgtccgaaggacgagagcaacagccacagaagaacatcttcaatggatttggacccgaggttattgctcaagctttgaagattgatcttcagacagcgcagcaacttcagaaccaagatgacaaccgtggaaacattgtccgagtccaaggcccgttcggtgtcattaggccgcctttgaggggccagagacctcaggaggaggaagaagaagaagaaggacgacacggacgacacggtaatggcttagaggagaccatctgcagcgccaggtgcaccgataacctcgatgatccgtctcgtgctgacgtgtacaagccacagctcggttacatcagcactctcaacagttacgatctccccatccttcgcttcatccgtctctcagccctccgtggatctatccgtcaaaacgccatggtgcttccacagtggaacgcaaacgcgaacgccattctttacgtgacagacggggaagcccaaattcagatcgtaaacgacaat

SEQ ID NO: 141924 - DNA, 612 bp, Arabidopsis thaliana
  unsure (1)..(612): unsure at all n locations
cgtnnccgaagannngaagaaaaanntgggtcgagggtctcatcntnnattattttcntttcttctttttgacccactctnnntgatcnnctctgtgcaatgggcgtaccccactgcnccannnacagtggnncccaaccgaggtngtnccagcntcngnnatcaactnnncaatgcngcntnncgaaccccatccnnncaaatcantnncaagagnncgagggnntggtcgcnnatcgaggggtctnngggaccannccatgcnnaccccagcnnntccgttgctttccggcttttttgcctttnnngagcgtttnncgtcattgggagcccctcagggnntcttttctttggcccactnnnttcttgaacccgccnnngcaaactcaaacgtttgtttgttcaaacggaaggggtctttaatgggaaagaggttattccgggatgccgccgagacgttcatggagtcaccggtatttggagaaggtcaaggtcagggtcagagtcaagggttccgtgacatgcaccagaaagtagagcacctacggtgcggtgacaccattgcaacaccatctggtgagctcaatggttctacaacaatggaaatgagcc

SEQ ID NO: 141925 - DNA, 461 bp, Arabidopsis thaliana
aaggaaaactcgtaatgggataccgtaaagcgacgaactctacagcgacacagatgttcaagggaagcagtgaacccaatctgaacatgttttccaacagcttgaatccgggatgtggtgacatcaattggtctaaactagagaagtctgaggacatggcaaaggataacttatttcttcagtcgtccttaacttcagctaggaaacgggttcggaacattgggactaagagcaagcgtctgctcattgatagcgtagatgttctggaactgaaaataacttgggaggaggcacaggagctgttgcggcctccccaatccaccaaacccagcatctttacgctggaaaatcaagattttgaagaatatgacgaaccaccagttttcgggaagaggaccctttttgtctcacgtcaaacaggggaacaagagcaatgggtgcagtgtgatgcttgtgggaaa

SEQ ID NO: 141926 - DNA, 414 bp, Arabidopsis thaliana
gttaagctcagcaatctcctcgttgcaaccttcggggttctcctcgtccttaacggctgccttgcgaggcagtcacttggggttcctcctcagctacagaacgagtgtaacctcgacaacctagatgttctccaagccaccgaaactatcaagagtgaagccggtcagatcgagtactgggaccacaaccaccctcagctccgatgtgttggtgtttccgttgctcgttatgtaattgaacaaggcggtctttacttgcccaccttcttcacttccccaaaaatttcctacgtcgttcaaggaacgggtatcagcggaagagtggtccctggatgtgccgagaccttcatggactcgcagccgatgcaaggacaacaacaaggccaaccatggcaaggacgacagggacaacaa

SEQ ID NO: 141927 - DNA, 514 bp, Arabidopsis thaliana
cacacatagcaaaaaatggcaaacaagttgttcctcgtctgcgcagttctcgctctctgcttcctcctcacgcaacgcttccatctaccgcaccgtcgttgagttcgaagaagatgacgccactaaccccataggcccaaaaatgaggaaatgccgcaaggagtttcagaaagaacaacacctaagagcttgccagcaattgatgctccagcaagcaaggcaaggccgtagcgatgagtttgatttcgaagacgacatggagaacccacagggacaacagcaggaacaacagctattccagcagtgctgcaacgagcttcgccaggaagagccagattgtgtttgccccaccttgaaacaagctgccaaggccgttagactccagggacagcaccaaccaatgcaagtcaggaaaatttaccagacagacaagcacttgcgcaacgtttgcgacatcccgcaaggtgatgtttgtcctttcaacatcccttcattcccttctttctactaaatc

SEQ ID NO: 141928 - DNA, 379 bp, Arabidopsis thaliana
aaagaggtaatcaaattctcttaactttcttgttatgaaaacccatttggttcatcatacatcaacaaatgacgatcaagaacaattagtgagtgattcagcttgtactgaaactgtgttatgtcaacagtctaccgacatatgaatcatcacatgagttccagacaaagaaaaaacggcaacagatgcgtcataatgaggaagcagccaaaaaacagaaactgcagcatccacagcagcaacattctcgtttacctccacagcaacacggtgttggccagtctcatgccgctccactttggcctgctggaccaaaccaccctatgaacaacaacgcaccaccaccccaaatacctgctggtggccattactatggagg

SEQ ID NO: 141929 - DNA, 444 bp, Arabidopsis thaliana
aaaacagaaaagtgggtctccaagaaaattaccctaaattcacaaagattcatacttttctccacctccagtggattccagagagatccaccaccaacaacagcaacaacaacaacaacaacagcagcagcagcaacaacagcaacatctacaacaacagcaacaaccaccgccagggatgttaatgagtcaccacaattcctacaatcgaaaccctaacgccgccgccgctgttttaatgggtcacaacacctccacatctcaagctatgcatcaaagattaccttttggtggttctatgtcaccgcatcagcctcaacaacatcagtatcatcatcctcagcctcagcaacagatagatcagaagactcttgaatctcttggatttgatggatcgccttcttctgttgcccgcactcaacaacattcgatgagatttgggat

SEQ ID NO: 141930 - DNA, 533 bp, Arabidopsis thaliana
  unsure (1)..(533): unsure at all n locations
acaaagacatatggagtaagactcagacaatcgtcctcgttagcaactcttctggggtatctccctcgtcacttaaccggctgccgtgtgcgaggcacgtcactttggggttccttcctcagnctaccagaacnngagtgtaacctcgacnaacctagatnngttctccaagccaccgaaactatcaagagtgaagccggtcagatcgagtactgggaccacaaccaccctcagctccgatgtgttggtgtttccgttgctcgttatgtaattgaacaaggcggtctttacttgcccaccttcttcacttccccaaaaatttcctacgtcgttcaaggaacgggtatcagcggaagagtggtccctggatgtgccgagaccttcatggactcgcagccgatgcaaggacaacaacaaggccaaccatggcaaggacgacagggacaacatggccaaccatgggaaggacagggacaacagggacaacaaggaagacaaggccaaccatgggaaggacagggacaacaaggaca

SEQ ID NO: 141931 - DNA, 358 bp, Arabidopsis thaliana
  unsure (1)..(358): unsure at all n locations
gttctccaaaagccanctcgaaactattcaagaagnntgaagctncggtcagaatcgagtacctgggaaccanccaaccaccctcagnctccgatgntgttggtgtttcccgttggctcgttatgtaaattgaaccaaaggcggtctttacttttgcccaccttcttcactttcctccaaaaatttcctacgtncgttcaagggaacgggtatcaagcggaagagtnggtccctggatgtgccgagaccttcatggactcgcagccgatgcaaggacaacaacaaggccaaccatggcaaggacgacagggacaacaaggccaaccatgggaaggacagggacaacaaggacaacaag

SEQ ID NO: 141932 - DNA, 512 bp, Arabidopsis thaliana
caaaaagaaaatggttaagctcagcaatctcctcgttgcaaccttcggggttctcctcgtccttaacggctgccttgcgaggcagtcacttggggttcctcctcagctacagaacgagtgtaacctcgacaacctagatgttctccaagccaccgaaactatcaagagtgaagccggtcagatcgagtactgggaccacaaccaccctcagctccgatgtgttggtgtttccgttgctcgttatgtaattgaacaaggcggtctttacttgcccaccttcttcacttccccaaaaatttcctacgtcgttcaaggaacgggtatcagcggaagagtggtccctggatgtgccgagaccttcatggactcgcagccgatgcaaggacaacaacaaggccaaccatggcaaggacgacagggacaacaaggccaaccatgggaaggacagggacaacagggacaacaaggaagacaaggccatccatgggaaggacaaggacaacagggacaac

SEQ ID NO: 141933 - DNA, 528 bp, Arabidopsis thaliana
ctcgctctctgcttcctcctcaccaacgcttccatctaccgcaccgtcgttgagttcgaagaagatgacgccactaaccccataggcccaaaaatgaggaaatgccgcaaggagtttcagaaagaacaacacctaagagcttgccagcaattgatgctccagcaagcaaggcaaggccgtagcgatgagtttgatttcgaagacgacatggagaacccacagggacaacagcaggaacaacagctattccagcagtgctgcaacgagcttcgccaggaagagccagattgtgtttgccccaccttgaaacaagctgccaaggccgttagactccagggacagcaccaaccaatgcaagtcaggaaaatttaccagacagccaagcacttgcccaacgtttgcgacatcccgcaagttgatgtttgtcccttcaacatcccttcattcccttctttctactaaatctcaaacaaaccctcaaagcgtatgaaagtgtggttgtgatatatacatgttgacacttgacac

SEQ ID NO: 141934 - DNA, 299 bp, Arabidopsis thaliana
  unsure (1)..(299): unsure at all n locations
cgaancggaaggcccggctagaccgacgcgtccgatgacattggaggtcatatcaaatggtttccagatctctcccgaggaagctaggaagatcaagttcaacacacttgagaccactttgacccgcgctgccggtaggcaacaacaacagttgatcgaggagattgtcgaggcttaaatcaaaacgtttttctttttcttaataaagtatggtcagtttgtaatcacgtccctttacctttaacgtacgtgtaaaatatgtgtctgcggcacctcacttgtaataacactttcttctc

SEQ ID NO: 141935 - DNA, 497 bp, Arabidopsis thaliana
cgcgtccgagaagaaaaatgggtcgagtctcatctattatctctttctctttgacactcttgatcctcttcaatggctgcactgcccaacagtggcccaacgagtgccagctcgatcaactcaatgcgctcgaaccatcccaaatcatcaagagcgagggtggtcgcatcgaggtctgggaccaccatgcaccccagctccgttgctccggctttgcctttgagcgtttcgtcattgagcctcagggtcttttcttgcccactttcttgaacgccggcaaactcacgtttgttgttcacggaaggggtctaatgggaagagttattccgggatgcgccgagacgttcatggagtcaccggtatttggagaaggtcaaggtcagggtcagagtcaagggttccgtgacatgcaccagaaagtagagcacctacggtgcggtgacaccattgcaacaccatctggtgtagctcaatggttctacaacaatggaaatgag

SEQ ID NO: 141936 - DNA, 529 bp, Arabidopsis thaliana
gcgcgctcttctcgacatcgccaactaccaaaaccaactcgaccgcaaccctagagtgttccatttggccggaaacaaccagcagggaggctttggcggttcacagcaacaacaagaacagaaaaacttgtggagcgggttcgacgcacaggtcatagctcaagcattgaaaattgacgttcagttggctcagcagcttcagaaccaacaagacagcagaggaaacatcgttcgtgttaagggacctttccaggtcgtgaggccacctctaagacagccctacgagagcgaggagtggagacacccacgtagcccacagggcaacggccttgaggagactatctgcagcatgaggtcccacgagaacattgacgaccctgctcgtgctgacgtgtacaagcccagcctaggtcgcgtgaccagcgtcaacagctataccttgcccatcttggagtatgtcaggctcagtgccactcgtggcgttctccagggtaatgcgatggtgctttctaaatacaacatgaacgct

SEQ ID NO: 141937 - DNA, 370 bp, Arabidopsis thaliana
caaaatcttaaacactcactctcaattctctctaccgcgatcaagatgcagatcttcgctaagactctcaccggaaagacaatcaccctctaggtggaaagctcctacaccatcgacaacatttacgccacgagccaggataaggcgggcattacttcggatcagcagacgcttatattcgccggcaagcagctagaggatggccgtacgtcggctgattacaatatccagaaggaatccaccctccacttggtcctcaggctccgtggcggtatgcagattattgttaaaaccctaacaggaaagacgattactcttgaggtggagagttctgacaccatcgacaacgtcaaggccaagatccaagaca

SEQ ID NO: 141938 - DNA, 417 bp, Arabidopsis thaliana
gtgctcttagcctttactctatagttttatatcatatcaatcgacatggcgaatgtggaccgtgatcggcgtgtgcatgtagaccgtactgacaaacgtgttcatcagccaaactacgaagatgatgtcggttttggtggctatggcggttatggtgctggttctgattataagagtcgcggcccctccactaaccaaatcttggcacttatagcaggagttcccattggtggcacactgctaaccctagctggactcactctagccggttcggtgatcggcttgctagtctccatacccctcttcctcctcttcagtccggtgatagtcccggcggctctcactattgggcttgctgtgacgggaatcttggcttctggtttgtttgggttgacgggtctgagctcggtctcgtgg

SEQ ID NO: 141939 - DNA, 453 bp, Arabidopsis thaliana
ctccttatgaaactgctgcataccatctaagtagccaaatcttaccttaaattagtttctccaatgcaggagctgcatatagaaaaaattcaatctgtcattagtaataatacgattcctaaatcagaaaacgaagatacgagctacttcaacaacacagaacattatcatcatcaacataagagctaaaatacagatcctggatccctaaaaaccaaattaagataacaaaccctatctatctatatggataagttgagaaatgttgttaaactgatttcaacctctaaattcttcaattaaacttagatcctgaacattcaacgagtaagactatagaattcaacaagcgaatcatgaacaataacgaacacgatccagaatctgtacttcctaagcaatttctcaattcgaataacgaaaacgaatcaaatcaagagttgagagaaaaac

SEQ ID NO: 141940 - DNA, 523 bp, Arabidopsis thaliana
  unsure (1)..(523): unsure at all n locations
gtgctcttagcctttactctatagttttatatcatatcaatcgacatggcgaatgtggaccgtgatcggcgtgtgcatgtagaccgtactgacaaacgtgttcatcanccaaactacgaagatgatgtcggttttggtggctatggcggttatggtgctggttctgattataagagtcgcggcccctccactaaccaaatcttggcacttatagcaggagttcccattggtggcacactgctaaccctagctggactcactctagccggttcggtgatcggcttgctagtctccatacccctcttcctcctcttcagtccggtgatagtcccggcggctctcactattgggcttgctgtgacgggaatcttggcttctggtttgtttgggttgacgggtctgagctcggtctcgtgggtcctcaactacctccgtgggacgagtgatacagtgccagagcaattggactacgctaaacggcgtatggctgatgcggtaagctatgctggtatgaaaggaaaag

SEQ ID NO: 141941 - DNA, 245 bp, Arabidopsis thaliana
caatgtcattcatgggaaggacagggtcatcagggacaacagaggtctacagggacaacaaggacaactatggaaaggacaggtacagcaagtacaacaagggttccgtgacatgcaccagagagtggaacatgtgagacgcatacacgtgtatgacaacacttcacagtttgatcactggatctacaacgtaagagaacaggcgctcgtcatgataactcttatcgacattgataactatcaaa

SEQ ID NO: 141942 - DNA, 427 bp, Arabidopsis thaliana
tcctaacaaagcaatatcattcccaattgataaaagttaaagccatggctgcatctttctctgtcccctctatgagaatggaagaagaagggagattcgaagcgcaggttgcggaagtgcagacttggtggagctcagagaggttcaagctaacaaggcgcccttacactgaccgtgacgtggtggctctacgtggccatctcaagcaaggctatgcttcgaacgagatggctaagaagctgtggagaacgctcaaaagccatcaagccaacggtacggcctgtcgcaccttcggagcgttggaccctgttcaggtgaccatgatggctaaacatttggacaccatctatgtctctggttggcagtgctcgtccactcacacattcactaatgagccctggcctgatcttgctgattatccgtacga

SEQ ID NO: 141943 - DNA, 513 bp, Arabidopsis thaliana; identical to SEQ ID NO: 129976

SEQ ID NO: 141944 - DNA, 372 bp, Arabidopsis thaliana
accagagggcggaagcaagagtcaactcttggctacgtattctaactaatatttcccctgtatttccatggctccagggaacgccactcagaggggcctttaacaaaaccctgccattttagccaaaaaaactaactggagcccgctcacgcgaagaagttcgccacccctagatcgaagtgtatgaccacatgctcccgtgagcctccttgcgccagtgtgacccgagctatgattaacctttagaccaaatacattttgttgtccgctctctttagaccacctggccttggttacgttgtgcaaggagaaggagttatggggacgaatggttctgcgtgtgcttagacttatgcaaaaaatgtaggaaca

SEQ ID NO: 141945 - DNA, 393 bp, Arabidopsis thaliana
taaagaggaagaaaaatgggtcgagtctcatctattatctctttctctttggcacttttggacccttttcaatggctacactgcccaacagtggcccaacgagtgccagctcgatcaactcaatgcgctcgaaccatcccaaatcatcaagagcgagggtggtcgcatcgaggtctgggaccaccatgcaccccagctccgttgctccggctttgcctttgagcgtttcgtcattgagcctcagggtcttttcttgcccactttcttgaacgccggcaaactcacgtttgttgttcacggaaggggtctaatgggaagagttattccgggatgcgccgagacgttcatggagtcaccggtatttggagaaggtcaaggtcagggtcagagtca

SEQ ID NO: 141946 - DNA, 476 bp, Arabidopsis thaliana
aacaaaaagaaaatggttaagctcagcaatctcctcgttgcaaccttcggggttctcctcgtccttaacggctgccttgcgaggcagtcacttggggttcctcctcagctacagaacgagtgtaacctcgacaacctagatgttctccaagccaccgaaactatcaagagtgaagccggtcagatcgagtactgggaccacaaccaccctcagctccgatgtgttggtgtttccgttgctcgttatgtaattgaacaaggcggtctttacttgcccaccttcttcacttccccaaaaatttcctacgtcgttcaaggaacgggtatcagcggaagagtggtccctggatgtgccgagaccttcatggactcgcagccgatgcaaggacaacaacaaggccaaccatggcaaggacgacagggacaacaaggccaaccatgggaaggacagggacaacagggacaacaaggaagaca

SEQ ID NO: 141947 - DNA, 517 bp, Arabidopsis thaliana
cacatagcaaaaaatggcaaacaagttgttcctcgtctgcgcagctctcgctctctgcttcctcctgaccgacgcttccatctaccgcaccgtcgttgagttcgaagaagatgacgccactaaccccataggcccaaaaatgaggaaatgccgcaaggagtttcagaaagaacaacacctaagagcttgccagcaattgatgctccagcaagcaaggcaaggccgtagcgatgagtttgatttcgaagacgacatggagaacccacagggacaacagcaggaacaacagctattccagcagtgctgcaacgagcttcgccaggaagagccagattgtgtttgccccaccttgaaacaagctgccaaggccgttagactccagggacagcaccaaccaatgcaagtcaggaaaatttaccagacagccaagcacttgcccaacggttgcgacatcccgcaagttgatgtttgtcccttcaacatcccttcattcccttctttctactaaatctcaaac

SEQ ID NO: 141948 - DNA, 444 bp, Arabidopsis thaliana
aagaggaagaaaaatgggtcgagtctcatctattatctctttctctttgacactcttgatcctcttcaatggctacactgcccaacagtggcccaacgagtgccagctcgatcaactcaatgcgctcgaaccatcccaaatcatcaagagcgagggtggtcgcatcgaggtctgggaccaccatgcaccccagctccgttgctccggctttgcctttgagcgtttcgtcattgagcctcagggtcttttcttgcccactttcttgaacgccggcaaactcacgtttgttgttcacggaaggggtctaatgggaagagttattccgggatgcgccgagacgttcatggagtcaccggtatttggagaaggtcaaggtcagggtcagagtcaaggggtccgtgacatgcaccagaaagtagagcacctacggggcggtgcaccatt

SEQ ID NO: 141949 - DNA, 509 bp, Arabidopsis thaliana
cctcgacaacctagatgttctccaagccaccgaaactatcaagagtgaagccggtcagatcgagtactgggaccacaaccaccctcagctccgatgtgttggtgtttccgttgctcgttatgtaattgaacaaggcggtctttacttgcccaccttcttcacttccccaaaaatttcctacgtcgttcaaggaacgggtatcagcggaagagtggtccctggatgtgccgagaccttcatggactcgcagccgatgcaaggacaacaacaaggccaaccatggcaaggacgacagggacaacaaggccaaccatgggaaggacagggacaacagggacaacaaggaagacaaggccaaccatgggaaggacagggacaacagggacaacaaggacgactgggacaacaaggccaaccatggtgaggacagggacagcagggacaacaagggttccgcgacatgcaccaaatggtggaacatgtgagacgcggatacgtttttgcaacac

SEQ ID NO: 141950 - DNA, 63 bp, Arabidopsis thaliana
aataaatgttgctgggaaaaaaagtgaaagaataaatgctttgggtatataccttatattaaa

SEQ ID NO: 141951 - DNA, 464 bp, Arabidopsis thaliana
  unsure (1)..(464): unsure at all n locations
cgagannaaaatgggtcgaggtctcaatctatnntatctctttctcttntgacannctcttgatnncctcttcaaatggcttacagcgtgcggcaacagtggctccaaccgaggtgccagctcgattcaactcannatgcgctcgaacccatcccaaatcnatcaagagcgagggnntggtcgcatcgaggtctgggaccaccatgcaccccagctccgttgctccggctttgcctttgagcgtttcgtcattgagcctcagggtcttttcttgcccactttcttgaacgccggcaaactcacgtttgttgttcacggaaggggtctaatgggaagagttattccgggatgcgccgagacgttcatggagtcaccggtatttggagaaggtcaaggtcagggtcagagtcaagggttccgtgacatgcaccagaaagtagagcacctacggtgcggtgacacca

SEQ ID NO: 141952 - DNA, 396 bp, Arabidopsis thaliana
gtgtcgctaatagggtctctgtttcttcaaattaagttctttaaattcactacgaagatttttgttatggcgagtagaaagctggttcgagatttactgatcacaaagcagcctcttctccagcaattggtgcaccaacggagagtgggcgcaagactaggtcttcttcagggaaatgggtttgcgagtcatcgacggtttagtgttttcagtgagttctcgaagaagattagaggagaagctgatagcaatcctgaatttcaaaagacagtgaaggagttcaaggaaagagcagaggagttgcaaggtgttaaagaggacttgaaagttagaacgaaacaaactactgagaagttgtataaacaaggtcaaggcgtctggacggaggctgaatct

SEQ ID NO: 141953 - DNA, 395 bp, Arabidopsis thaliana
cgcgtccgaaagaaaatggttaagctcagcaatctcctcgttgctaccttcggggttctactcgtacttaacgggtggcttgcgaggcagtcacttggggttccttcttaactacagaacgagtgttacctcgacaacctatatgttctacaagccaccgaaactatcaagagtgaaaccgatcatgatcgagtactgggaccacaaccaccctgagctacgatgtgttggtgttaacattgctcgatatgctattgaacaaggcggattttacttgcccacctttttcactatgcccaaaaatttcctacttcttcaaggaacgggtacatgcgggtgagtggtacccggactatccaagacctttatagactatgagaacgcgcatggacaac

SEQ ID NO: 141954 - DNA, 494 bp, Arabidopsis thaliana
cagcaacaacaagaacagaaaaacttgtggagcgggttcgacgcacaggtcatagctcaagcattgaaaattgacgttcagttggctcagcagcttcagaaccaacaagacagcagaggaaacatcgttcgtgttaagggacctttccaggtcgtgaggccacctctaagacagccctacgagagcgaggagtggagacacccacgtagcccacagggcaacggccttgaggagactatctgcagcatgaggtcccacgagaacattgacgaccctgctcgtgctgacgtgtacaagcccagcctaggtcgcgtgaccagcgtcaacagctataccttgcccatcttggagtatgtcaggctcagtgccactcgtggcgttctccagggtaatgcgatggtgcttcctaaatacaacatgaacgctaacgagatcttgtactgcactggaggacaaggaaggatccaagtggtcaacgacaacggacaagacgt

SEQ ID NO: 141955 - DNA, 426 bp, Arabidopsis thaliana
ctttctctctcttttgtttctcgctaccatggctaagtcttgctatttcagaccagctcttcttgggctgttagttctattgggtcatgccgagtcacgcccaacaggtacagccaaagattcattatgccgacagaggaagctaacccggctgaccaagaccaagatggagtcggcacaagatgggcggatctcgtacatggatcttctggatatggaaactacagacaccagactgacttgtgtcacacatatcacatgctcagaaacggccgttctaaggctgacaacatcatccttatgatgtatgatgatatcagaaaccacacacttaattctcgtactgttgcttatatcaaccatactgacagtgacgatgtttacgccggagatcctaaggactattactgaatgcacattaccgct

SEQ ID NO: 141956 - DNA, 523 bp, Arabidopsis thaliana
caaaaagaaaatggttaagctcagcaatctcctcgttgcaaccttcggggttctcctcgtccttaacggctgccttgcgaggcagtcacttggggttcctcctcagctacagaacgagtgtaacctcgacaacctagatgttctccaagccaccgaaactatcaagagtgaagccggtcagatcgagtactgggaccacaaccaccctcagctccgatgtgttggtgtttccgttgctcgttatgtaattgaacaaggcggtctttacttgcccaccttcttcacttccccaaaaatttcctacgtcgttcaaggaacgggtatcagcggaagagtggtccctggatgtgccgagaccttcatggactcgcagccgatgcaaggacaacaacaaggccaaccatggcaaggacgacagggacaacaaggccaaccatgggaaggacagggacaacagggacaacaaggaaagacaggccaaccatggtgaggacagggacaacagggacaactaggacgacag

SEQ ID NO: 141957 - DNA, 459 bp, Arabidopsis thaliana
aaagaaaatggttaagctcagcaatctcctcgttgcaaccttcggggttctcctcgtccttaacggctgccttgcgaggcagtcacttggggttcctcctcagctacagaacgagtgtaacctcgacaacctagatgttctccaagccaccgaaactatcaagagtgaagccggtcagatcgagtactgggaccacaaccaccctcagctccgatgtgttggtgtttccgttgctcgttatgtaattgaacaaggcggtctttacttgcccaccttcttcacttccccaaaaatttcctacgtcgttcaaggaacgggtatcagcggaagagtggtccctggatgtgccgagaccttcatggactcgcagccgatgcaaggacaacaacaaggccaaccatggcaaggacgacagggaccaacaggccaaccatgggaaggacagggacaacagggaca

SEQ ID NO: 141958 - DNA, 495 bp, Arabidopsis thaliana
atcagtgtggctgttgcatccgctacacagattaacgagaaagaccactggtatagacttggagtggaggctcttcgccaaggtaattctggaattgttgagtttgcataccagcagacaaagaactttgagaggttatcttttctttatctcattactggaaatttggacaagctttcaaagttgatgaagattgcagaagtgaagaacaacgtaatgggacagtttcacaatgctctctacctaggagatgttaaagagcgtgttaagatactggagaatgctggtcatttgcctctagcttatatcacagcttcggttcatggtttaaatgacattgctgagcgactggcaactgagttaggagacaacgtgccctcattgcctgaaggaaaaactccatcgcttctaatgccaccgacacccatcatgtggtggtgggattggcctcttcttagagtgatgaaaggaatatttgaaggaggacttgagagt

SEQ ID NO: 141959 - DNA, 495 bp, Arabidopsis thaliana
gatttccgaagatcatcaaatccaaaaccctagaaaccgaacaaaagctagcagaagctaggactattcaatggcgtcgaaaagaattaacaaagagcttagggacttgcaaagagatcctcctgtgtcctgcagtgcaggtcctacgggagatgatatgttccaatggcaagcaactatcatgggtccagcagatagcccgtttgccggaggtgtgtttcttgttaccattcacttcccaccagattaccctttcaagccaccaaaggttgccttccggaccaaggtttatcacccaaacatcaacagtaatggaagtatctgtcttgacattctgaaagagcagtggagccctgcacttaccgtatccaaggttcttctgtcgatatgctcattgctgacggatccaaaccctgacgatcctttggttcctgaaatagcgcacatctacaagacagaccgagtcaagtacgagtccacagctcaatcctggac

SEQ ID NO: 141960 - DNA, 521 bp, Arabidopsis thaliana
tacacacatagcaaaaaatggcaaacaagttgttcctcgtctgcgcagctctcgctctctgcttcctcctcaccaacgcttccatctaccgcaccgtcgttgagttcgaagaagatgacgccactaaccccataggcccaaaaatgaggaaatgccgcaaggagtttcagaaagaacaacacctaagagcttgccagcaattgatgctccagcaagcaaggcaaggccgtagcgatgagtttgatttcgaagacgacatggagaacccacagggacaacagcaggaacaacagctattccagcagtgctgcaacgagcttcgccaggaagagccagattgtgtttgccccaccttgaaacaagctgccaaggccgttagactccagggacagcaccaaccaatgcaagtcaggaaaatttaccagacagccaagcacttgcccaacgtttgcgacatccccgaagttgatgtttgtcccttcaacatcccttcattcccttctttctactaaatctcaaac

SEQ ID NO: 141961 - DNA, 522 bp, Arabidopsis thaliana
  unsure (1)..(522): unsure at all n locations
agaaaaaggggtcaggtctaatcaataatctcttcctcttggacactctggatcctcttcaatggctacactgcccaacagtggcccaacgagtgccagctcgatcaactcaatgcgctcgaaccatcccaaatcatcaagagcgagggtggtcgcatcgaggtctgggaccaccatgcaccccagctccgttgctccggctttgcctttgagcgtttcgtcattgagcctcagggtcttttcttgcccactttcttgaacgccggcaaactcacgtttgttgttcacggaaggggtctaatgggaagagttattccgggatgcgccgagacgttcatggagtcaccggtatttggagaaggtcaaggtcagggtcagagtcaagggttccgtgacatgcaccaaacagtagagcacctacggtgcggtgacaccatngcaacaccatctggtgtagctcaatggttctacaacaatggaaatgagcctctcattctttgtgcagccgcggatctcgccagc

SEQ ID NO: 141962 - DNA, 523 bp, Arabidopsis thaliana
aagaaaatggttaagctcagcaatctcctcgttgcaaccttcggggttctcctcgtccttaacggctgccttgcgaggcagtcacttggggttcctcctcagctacagaacgagtgtaacctcgacaacctagatgttctccaagccaccgaaactatcaagagtgaagccggtcagatcgagtactgggaccacaaccaccctcagctccgatgtgttggtgtttccgttgctcgttatgtaattgaacaaggcggtctttacttgcccaccttcttcacttccccaaaaatttcctacgtcgttcaaggaacgggtatcagcggaagagtggtccctggatgtgccgagaccttcatggactcgcagccgatgcaaggacaacaacaaggccaaccatggcaaggacgacagggacaacaaggccaaccatgggaaggacagggacaacagggacaacatggaagacatggccaaccatgggatggacagggacaacagggacaacatggacgacagggac

SEQ ID NO: 141963 - DNA, 486 bp, Arabidopsis thaliana
  unsure (1)..(486): unsure at all n locations
agaaaaatgggtcgagtctcatctattatctctttctctttgacactcttgatcctcttcaatggctacactgcccaacagtggcccaacgagtgccagctcgatcaactcaatgcgctcgaaccatcccaaatcatcaagagcgagggtggtcgcatcgaggtctgggaccaccatgcaccccagctccgttgctccggctttgcctttgagcgtttcgtcattgagcctcagggtcttttcttgcccactttcttgaacgccggcaaactcacgtttgttgttcacggaaggggtctaatgggaagagttattccgggatgcgccgagacgttcatggagtcaccggtatttggagaaggtcaaggtcagggtcagagtcaagggttccgtgacatgcaccagaaagtagagcacctacggggcggtgacaccatngcaacaccatctggtgtagctcaatggttctacaacaatggaaatgag

SEQ ID NO: 141964 - DNA, 526 bp, Arabidopsis thaliana
aagaaatataaggaaataccaaaatggctcgggtctctcctcttctttctttcttcttaacacttttgatccttttccatggctacgcggctcaacagggtcagcagggtcagcagtttccgaacgagtgccagctcgaccagctcaatgcgctcgagccgtcacacgtactgaagagcgaggctggtcgcatcgaggtgtgggaccaccacgctcctcagctccgttgctcaggtgtctcctttgcacgttacatcatcgagtctaagggtctctacttgccctctttctttaacaccgcgaagctctctttcgtggctaagggacgaggtcttatgggaaaagtgatccctggatgcgccgaaacattccaagactcatcagagttccaaccacgcttcgaaggtcaaggtcaaagccagaggttccgtgacatgcaccagaaagtggagcacattaggagcggtgataccattgccacaacacccggtgtagcacagtggttctacaacgacggacaggaacc

SEQ ID NO: 141965 - DNA, 527 bp, Arabidopsis thaliana
aaacatacacacatagcaaaaaatggcaaacaagttgttcctcgtctgcgcagctctcgctctctgcttcctcctcaccaacgcttccatctaccgcaccgtcgttgagttcgaagaagatgacgccactaaccccataggcccaaaaatgaggaaatgccgcaaggagtttcagaaagaacaacacctaagagcttgccagcaattgatgctccagcaagcaaggcaaggccgtagcgatgagtttgatttcgaagacgacatggagaacccacagggacaacagcaggaacaacagctattccagcagtgctgcaacgagcttcgccaggaagagccagattgtgtttgccccaccttgaaacaagctgccaaggccgttagactccagggacagcaccaaccaatgcaagtcaggaaaatttaccagacagccaagcacttgcccaacgtttgcgacatcccgcaagttgatgtttgtcccttcaacatcccttcattcccttctttctactaaatctcaaaca

SEQ ID NO: 141966 - DNA, 522 bp, Arabidopsis thaliana
gcgggttcgacgcacaggtcatagctcaagcattgaaaattgacgttcagttggctcagcagcttcagaaccaacaagacagcagaggaaacatcgttcgtgttaagggacctttccaggtcgtgaggccacctctaagacagccctacgagagcgaggagtggagacacccacgtagcccacagggcaacggccttgaggagactatctgcagcatgaggtcccacgagaacattgacgaccctgctcgtgctgacgtgtacaagcccagcctaggtcgcgtgaccagcgtcaacagctataccttgcccatcttggagtatgtcaggctcagtgccactcgtggcgttctccagggtaatgcgatggtgcttcctaaatacaacatgaacgctaacgagatcttgtactgcactggaggacaaggaaggatccaagtggtcaacgacaacggacagaacgtgttggaccaacaggtgcagaagggacagctcgtggtcatcccacaagggttcgcatacg

SEQ ID NO: 141967 - DNA, 450 bp, Arabidopsis thaliana
aagaggaagaaaaatgggtcgagtctcatctattatctctttctctttgacactcttgatcctcttcaatggctacactgcccaacagtggcccaacgagtgccagctcgatcaactcaatgcgctcgaaccatcccaaatcatcaagagcgagggtggtcgcatcgaggtctgggaccaccatgcaccccagctccgttgctccggctttgcctttgagcgtttcgtcattgagcctcagggtcttttcttgcccactttcttgaacgccggcaaactcacgtttgttgttcacggaaggggtctaatgggaagagttattccgggatgcgccgagacgttcatggagtcaccggtatttggagaaggtcaaggtcagggtcagagtcaagggttccgtgacatgcaccagaaagtagagcacctacggggcggtgacaccattgcaac

SEQ ID NO: 141968 - DNA, 424 bp, Arabidopsis thaliana
ttcttcttctttgagtcatgtcttttatcattcttgacgtcatgataaagatactcaacccccactcacaccattctcaaaccacaactgttaaaacagctgagatcttgtctaaatacagacccattgcaccaaagcccgggacgcctcgagtgaacgacgatgatccttgttcctctatgtctcacaaaatcagccaatctccttaccttcgtaacctctggcctcagcttcaagcgcgacctacaagaacccgcacgcgaggccgaggcgggatgggtccctcttctcttgctatgaagagaccaaagtcgtcatgcggatcttctagtacttctactatttctacacaacgtgttcttggacctattaaaacactgtcggttcaggctttcactcatcatacgttacctaacctacctca

SEQ ID NO: 141969 - DNA, 447 bp, Arabidopsis thaliana
aagaaataacaaaatggctcgagtctcttctcttctttctttcttcttaacacttttgatccttttccatggctacgcggctcaacagggtcagcagggtcagcagtttccgaacgagtgccagctcgaccagctcaatgcgctcgagccgtcacacgtactgaagagcgaggctggtcgcattgaggtgtgggaccaccacgctcctcagcttcgttgctcaggtgtctcctttgcacgttacatcattgagtctaagggtctttacttgccctctttctttaacaccgcgaagctctctttcgtggctaaaggaccaggtcttatgggaaaagtgatccctggatgcgcctaaacatttcaagacttatcagagtttccaccacgctttgaaggttaagggcaaagtcagaggtttcgtgacatgcaccagaaagtggagcacat

SEQ ID NO: 141970 - DNA, 233 bp, Arabidopsis thaliana
cgaacaagtgctgaagcaagcttcgccaggaagagccagtttgtgtttgcccaaccttgagacaggctgccggggccgttagcctccagggccaacacggcccattcaaatccaggaaattttacaggacagttaagtccttgcttaacattggcaggatcaaccaggttggtgaatgccctttccagaccacaatcctttttttccttccttactaatagattccaaacaaa

SEQ ID NO: 141971 - DNA, 386 bp, Arabidopsis thaliana
caatttcatcatcgtctacatcgaatgctggattgcagagacatctgaaaagtctaccaatcccctgtaaatgtcaaatcaagaatctaagtttctgtttttacattattattcatagaaatgacttgaaaagtgagaatctattgtacctgagtaagcagaggagttctgtatgaaagtggttgtgaagaatcgtcatcgctgctactgtcatcatcgtcgctgtcttcatcttcttttcttgatgttgtaccgttcttcgattgcttttcttgctgcacaagccaacaacaatcttgaatcagcacaagaaacataaacagatcagataatgtgattatggtaaatgttattgaaaacctgaaaaatcttcccaagaatcttga

SEQ ID NO: 141972 - DNA, 423 bp, Arabidopsis thaliana
aaagaaaatggttaagctcagcaatctcctcgttgcaaccttcggggttctgctcgtccttaacggctgcctggcgaggcagtcacttggggttcctcctcagctacagaacgagtgtaacctcgacaacctagatgttctccaagccaccgaaactatcaagagtgaagccggtcagatcgagtactgggaccacaaccaccctcagctccgatgtgttggtgtttccgatgctcgttatgtaattgaacaaggcggtctttacttgcccaccttcttcacttccccaaaaatttcctacgtcgttcaaggaacgggtatcagcggaagagtggtccctggatgtgccgagaccttcatggactcgcagccgatgcagggacaacaacaaggccaaccatggcaaggacgacagggacaaca

SEQ ID NO: 141973 - DNA, 512 bp, Arabidopsis thaliana
aaagaaaatggttaagctcagcaatctcctcgttgcaaccttcggggttctcctcgtccttaacggctgccttgcgaggcagtcacttggggttcctcctcagctacagaacgagtgtaacctcgacaacctagatgttctccaagccaccgaaactatcaagagtgaagccggtcagatcgagtactgggaccacaaccaccctcagctccgatgtgttggtgtttccgttgctcgttatgtaattgaacaaggcggtctttacttgcccaccttcttcacttccccaaaaatttcctacgtcggtcaaggaacgggtatcagcggaagagtggtccctggatgtgccgagaccttcatggactcgcagccgatgcaaggacaacaacaaggccaaccatggcaaggacgacagggacaacaaggccaaccatgggaaggacagggacaacagggacaacaaggaagacaaggccaaccatgggaaggacagggacaacatggacaacaag

SEQ ID NO: 141974 - DNA, 187 bp, Arabidopsis thaliana
cggaaggaagatggatagcatcagaccgttcccctaagaacctttctggctattcctcaatgtcaccgctattcacgcgacgcgagaagcgagtgaatcatcatatgttcacggcggaaagcgcctaatcactcgagaatcctacaagagccactcaaccatcaatatctgacacatggtcagaact

SEQ ID NO: 141975 - DNA, 514 bp, Arabidopsis thaliana
ggaggaggaagaagaagaagaaggacgacacggacgacacggtaatggcttagaggagaccatctgcagcgccaggtgcaccgataacctcgatgatccgtctcgtgctgacgtgtacaagccacagctcggttacatcagcactctcaacagttacgatctccccatccttcgcttcatccgtctctcagccctccgtggatctatccgtcaaaacgcaatggtgcttccacagtggaacgcaaacgcgaacgccattctttacgtgacagacggggaagcccaaatccagatcgtaaacgacaatggtaacagagtgtttgacggacaagtctctcaaggacagctcatagccgtaccacaaggtttctcggtggtgaaacgcgcaacaagcaaccgattccagtgggttgagttcaaaacaaacgcaaacgcgcaaatcaacactcttgcgggacgaacctcagtctagagaggtttaccacttgaagttataaccaatgggttccaaatc

SEQ ID NO: 141976 - DNA, 522 bp, Arabidopsis thaliana
catagctcaagcattgaaaattgacgttcagttggctcagcagcttcagtaccaacaagacagcagaggagacatcgttcgtgttaagggacctttccaggtcgtgaggccacctctaagacagccctacgagagcgaggagtggagacacccacgtagcccacagggcaacggccttgaggagactatctgcagcatgaggtcccacgagaacattgacgaccctgctcgtgctgacgtgtacaagcccagcctaggtcgcgtgaccagcgtcaacagctataccttgcccatcttggagtatgtcaggctcagtgccactcgtggcgttctccagggtaatgcgatggtgcttcctaaatacaacatgaacgctaacgagatcttgtactgcactggaggacaaggaaggatccaagtggtcaacgacaacggacagaacgtgttggaccaacaggtgcagaaaggacagctcgtggtcatcccacaagggttcgcatacgttgtccagtcccacggaaa

SEQ ID NO: 141977 - DNA, 501 bp, Arabidopsis thaliana
aagagggcaacaacaatggccaggacaaggacaagaagaagaagaagatatgagtgaaaacgtacacaaagttgtgtcacgagtgtgtaaaggcgaagtttttatcgttccggcaggtcatccattcactatactctcgcaagatcaagactttatcgcggtagggtttggtatttatgcgaccaacagcaaaagaacgttccttgcaggggaagagaatttgctgagcaacctcaacccggcggcaactagggtaacctttggtgttggaagtaaagtcgcggagaaactgttcacgagccaaaactattcctactttgcacctacgagtcgtagccaacaacaaattccagagaaacacaagccatcgtttcaatcaatcttagactttgctggtttttgaaaatgcttttttacagtcctaagaaaggaaagaagttagagtttaatataatctttgtgaagatatgcaataaaatatggtaacgctctgcatgtaac

SEQ ID NO: 141978 - DNA, 466 bp, Arabidopsis thaliana
ataagaaataacaaaatggctcgagtctcttctcttctttctttcttcttaacacttttgatccttttccatggctacgcggctcaacagggtcagcagggtcagcagtttccgaacgagtgccagctcgaccagctcaatgcgctcgagccgtcacacgtactgaagagcgaggctggtcgcatcgaggtgtgggaccaccacgctcctcagctccgttgctcaggtgtctcctttgcacgttacatcatcgagtctaagggtctctacttgccctctttctttaacaccgcgaagctctctttcgtggctaaaggacgaggtcttatgggaaaagtgatccctggatgcgccgaaacattccaagactcatcagagttccaaccacgcttcgaaagtcaaggtcaaagccagaggttccgtgacatgcaccagaaagtggagcacattaggagcggtgatacca

SEQ ID NO: 141979 - DNA, 410 bp, Arabidopsis thaliana
taaagaggaagaaaaatgggtcgagtctcatctattatctctttctctttgacactcttgatcctcttcaatggctacactgcccaacagtggcccaacgagtgccagctcgatcaactcaatgcgctcgaaccatcccaaatcatcaagagcgagggtggtcgcatcgaggtctgggaccaccatgcaccccagctccgttgctccggctttgcctttgagcgtttcgtcattgagcctcagggtcttttcttgcccactttcttgaacgccggcaaactcacgtttgttgttcacggaaggggtctaatgggaagagttattccgggatgcgccgagacgttcatggagtcaccggtatttggagaaggtcaaggtcagggtcagagtcaagggttccgtgacatgca

SEQ ID NO: 141980 - DNA, 515 bp, Arabidopsis thaliana
aacatacacaaatagcaaaacatggctaacaagctcttcctcgtctgcgcaactctcgccctctgcttccggctcaccaacgcttccatctaccgcaccgttgtcgaattcgaagaagatgacgccagcaaccccgtaggtccaagacagagatgccagaaggagtttcagcaatcacaacacctaagagcttgccagagatggatgagcaagcaaatgaggcaaggacgtggtggtggtccttccctcgacgatgagttcgatttcgagggcccccagcagggataccagctactccagcagtgctgcaacgagcttcgccaggaagagccagtttgcgtttgccccaccttgaaacaagctgccagggcagttagcctccagggacagcacggaccattccaatccaggaaaatttaccagtcagctaagtacttgcctaacatttgcaagatccagcaagttggtgaatgtcccttccagaccaccatccctttcttccctccttactacta

SEQ ID NO: 141981 - DNA, 387 bp, Arabidopsis thaliana
gtcagatcgagtactgggaccacaaccaccctcagctccgatgtgttggtgtttccgttgctcgttatgtaattgaacaaggcggtctttacttgcccaccttcttcacttccccaaaaatttcctacgtcgttcaaggaacgggtatcagcggaagagtggtccctggatgtgccgagaccttcatggactcgcagccgatgcaaggacaacaacaaggccaaccatggcaaggacgacagggacaacaaggccaaccatgggaaggacagggacaacagggacaacaaggaagacaaggccaaccatgggaaggacagggacaacagggacaacaaggacgacagggacaacaaggccaaccatgggaaggacagggacagcagg

SEQ ID NO: 141982 - DNA, 451 bp, Arabidopsis thaliana
  unsure (1)..(451): unsure at all n locations
tgctcgtgctgacgtgtacaagcccagcctaggtcgcgtgaccagcgtcaacagctataccttgcccatcttggagtatgtcaggctcagtgccactcgtggcgttctccagggtaatgcgatggtgcttcctaaatacaacatgaacgctaacgagatcttgtactgcactggaggacaaggaaggatccaagtggtcaacgacaacggacagaacgtgttggaccaacaggtgcagaagggacagctcgtggtcatcccacaagggttcgcatacgtngtccagtcccacggaaacaagttcgagtggatctctttcaaaactaatgaaaacgcaatgatcagcactttggcgggtagaacctcgctcttgagggcattgccattggaggtcatatcaaatggtttccagatctctcccgaggaagctaggaagacaagttcaacacac

SEQ ID NO: 141983 - DNA, 466 bp, Arabidopsis thaliana
aaaaaaataaaaatagtagacatatagctcctatcctcctcctcttcttttgtcatttttatattagcctctgctgagaatgaaattcagattttattcaatctgaaagttgtgtgtgttttagatacaattgaaaaaaacttgaatctggacttatgtgatactaaaaaacttcctcatcattttgttctgcaaccatttttacaagttggaactaataactgaaaacttgattcaaagaatcaaactaagtgagttgaatattttctaaacatgttaaataagaccaagaaactttaactcattgatcagactggaaccagtaaggcttgcgtgaggttcacaagaaggcttatgtgaggttgacgctggattatgatacgtttaatggtgcaatcaagactggaatcatctttaaaagttcatgtttcagccttttgtcatataaattaactagcaagagaca

SEQ ID NO: 141984 - DNA, 502 bp, Arabidopsis thaliana
cgaccacgcgtccgtagccgccttattcgtcttcttcgttctctagttttttcctcagtctctgttcttagatcccttgtagtttccagatcttccgataaaaatgtcgggtaaaggagaaggaccagctatcggtatcgatcttggtaccacttactcttgcgtcggagtatggcaacacgaccgtgttgagatcattgctaatgatcaaggaaacagaaccacgccatcttacgttgctttcaccgactccgagaggttgatcggtgacgcagctaagaatcaagtcgccatgaaccccgttaacaccgttttcgacgctaagaggttgatcggtcgtcgtttctctgacagctctgttcagagtgacatgaaattgtggccattcaagattcaagccggacctgccgataagccaatgatctacgtcgaatacaagggtgaagagaaagagttcgcagctgaggagatttctttcatggttcttattaagatgcgtgag

SEQ ID NO: 141985 - DNA, 518 bp, Arabidopsis thaliana
ggttaagctcagcaatctcctcgttgcaaccttcggggttctcctcgtccttaacggctgccttgcgaggcagtcacttggggttcctcctcagctacagaacgagtgtaacctcgacaacctagatgttctccaagccaccgaaactatcaagagtgaagccggtcagatcgagtactgggaccacaaccaccctcagctccgatgtgttggtgtttccgttgctcgttatgtaattgaacaaggcggtctttacttgcccaccttcttcacttccccaaaaatttcctacgtcgttcaaggaacgggtatcagcggaagagtggtccctggatgtgccgagaccttcatggactcgcagccgatgcaaggacaacaacaaggccaaccatggcaaggacgacagggacaacaaggccaaccatgggaaggacagggacaacagggacaacaatgaagaccaggccaaccatgggatggacagggacaacaaggacaacaaggacgacagggacaac

SEQ ID NO: 141986 - DNA, 441 bp, Arabidopsis thaliana
acgagagcgaggagtggagacacccacgtagcccacagggcaacggccttgaggagactatctgcagcatgaggtcccacgagaacattgacgaccctgctcgtgctgacgtgtacaagcccagcctaggtcgcgtgaccagcgtcaacagctataccttgcccatcttggagtatgtcaggctcagtgccactcgtggcgttctccagggtaatgcgatggtgcttcctaaatacaacatgaacgctaacgagatcttgtactgcactggaggacaaggaaggatccaagtggtcaacgacaacggacagaacgtgttggaccaacaggtgcagaagggacagctcgtggtcatcccacaagggttcgcatacgttgtccagtcccacggaaacaagttcgagtggatctctttcaaaactaatgaaaacgcaatgatca

SEQ ID NO: 141987 - DNA, 331 bp, Arabidopsis thaliana
aaaacatacacaaatagcaaaacatggctaacaagctcttcctcgtctgcgcaactctcgccctctgcttgctcctcaccaacgcttccatctaccgcaccgttgtcgaattcgaagaagatgacgccagcaaccccgtaggtccaagacagagatgccagaaggagtttcagcaatcacaacacctaagagcttgccagagatggatgagcaagcaaatgaggcaaggacgtggtggtggtccttccctcgacgatgagttcgatttcgagggcccccagcagggataccagctactccagcagtgctgcaacgagcttcgccaggaaga

SEQ ID NO: 141988 - DNA, 435 bp, Arabidopsis thaliana
cacatagcaaaaaatggcaaacaagttgttcctcgtctgcgcagctctcgctctctgcttcctcctcaccaacgcttccatctaccgcaccgtcgttgagttcgaagaagatgacgccactaaccccataggcccaaaaatgaggaaatgccgcaaggagtttcagaaagaacaacacctaagagcttgccagcaattgatgctccagcaagcaaggcaaggccgtagcgatgagtttgatttcgaagacgacatggagaacccacagggacaacagcaggaacaacagctattccagcagtgctgcaacgagcttcgccaggaagagccagattgtgtttgccccaccttgaaacaagctgccaaggccgttagactccagggacagcaccaaccaatgcaagtcaggaaaatttaccagacagccaagcactt

SEQ ID NO: 141989 - DNA, 499 bp, Arabidopsis thaliana
gtgtgctcttagcctttactctatagttttatatcatatcaatcgacatggcgaatgtggaccgtgatcggcgtgtgcatgtagaccgtactgacaaacgtgttcatcagccaaactacgaagatgatgtcggttttggtggctatggcggttatggtgctggttctgattataagagtcgcggcccctccactaaccaaatcttggcacttatagcaggagttcccattggtggcacactgctaaccctagctggactcactctagccggttcggtgatcggcttgctagtctccatacccctcttcctcctcttcagtccggtgatagtcccggcggctctcactattgggcttgctgtgacgggaatcttggcttctggtttgtttgggttgacgggtctgagctcggtctcgtgggtcctcaactacctccgtgggacgagtgatacagtgccagagcaattggactacgctaaacggcgtatggctgatgcggt

SEQ ID NO: 141990 - DNA, 397 bp, Arabidopsis thaliana
agaaagctttagggtttcaaaaaaaaaaaactgagaccctttagaaatctcctaacaggaatttttttctcaatcgctatagaaaatgggagtcatgatcaatcaccatttcctcgcttttatcttcggcatcttaggaaacgtgatatccttccttgtattcctcgctccagtgccaactttttatagaatatacaagagaaaatcgacggagagtttccagtcgctaccgtaccaagtgtcgctatttagctgcatgctatggctctactacgcattgattaagaaagacgcttttctcctaattaccatcaactcctttggctgcgtcgtggagactctctacatagccatgttcttcgcttaccccaccaaggagaaaaggatatcggctatg

SEQ ID NO: 141991 - DNA, 356 bp, Arabidopsis thaliana
ctctgctcttcctctctctgttgttctctgttccaaaggctttgagaaaaaatggagttcgagaaccggtacggacttgcaacgtcgcagaagtacgactgtctcttgttcgatttggacgatactctttatcctcttagctccggaatcgcaagagaatgtgggaacaacatcaaagattacatgaccgagaaactcggtataccgaaggacaaaatcgtcgaattgtctgatcttctatacaagaactatggaacaacaatggctggtcttagggcgatcggatatgaatttgactacaatgagtaccacagcttcgtccacggtcgtttaccctatgacaacataaaacccga

SEQ ID NO: 141992 - DNA, 438 bp, Arabidopsis thaliana
ccactaaccccataggcccaaaaatgaggaaatgccgcacggagtttcagaaagaacaacacctaagagcttgccagcaattgatgctccagcaagcaaggcaaggccgtagcgatgagtttgatttcgaagacgacatggagaacccacagggacaacagcaggaacaacagctattccagcagtgctgcaacgagcttcgccaggaagagccagattgtgtttgccccaccttgaaacaagctgccaaggccgttagactccagggacagcaccaaccaatgcaagtcaggaaaatttaccagacagccaagcacttgcccaacgtttgcgacatcccgcacgtcgatgtttgtcccttcaacattccttcattcccttctttctactaaatctcaaacaaacccttaaagcgtatgagagtgtggttgttgatat

SEQ ID NO: 141993 - DNA, 480 bp, Arabidopsis thaliana
gcgggttcgacgcacaggtcatagctcaagcattgaaaattgacgttcagttggctcagcagcttcagaaccaacaagacagcagaggaaacatcgttcgtgttaagggacctttccaggtcgtgaggccacctctaagacagccctacgagagcgaggagtggagacacccacgtagcccacagggcaacggccttgaggagactatctgcagcatgaggtcccacgagaacattgacgaccctgctcgtgctgacgtgtacaagcccagcctaggtcgcgtgaccagcgtcaacagctataccttgcccatcttggagtatgtcaggctcagtgccactcgtggcgttctccagggtaatgcgatggtgcttcctaaatacaacatgaacgctaacgagatcttgtactgcactggaggacaaggaaggatccaagtggtcaacgacaacggacagaacgtgttggaccaacaggtgc

SEQ ID NO: 141994 - DNA, 533 bp, Arabidopsis thaliana
  unsure (1)..(533): unsure at all n locations
gacccacgccgtccgcaaaaaggaaaatggttaagcctcagcaattctcctcgttgcaactcttcggggttctncctcgtccttaacggcttgccttgcgaggcagtcacttggggttcctcctcagctacagaacgagtgtaacctcgacaacctagatgttctccaagccaccgaaactatcaagagtgaagccggtcagatcgagtactgggaccacaaccaccctcagctccgatgtgttggtgtttccgttgctcgttatgtaattgaacaaggcggtctttacttgcccaccttcttcacttccccaaaaatttcctacgtcgttcaaggaacgggtatcagcggaagagtggtccctggatgtgccgagaccttcatggactcgcagccgatgcaaggacaacaacaaggccaaccatggcaaggacgacagggacaacaaggccaaccatgggaaggacagggacaacagggacaacaaggaagaccaggccaaccatgggaaggacagggacaacagggacaac

SEQ ID NO: 141995 - DNA, 436 bp, Arabidopsis thaliana
agaaaaatgggtcgagtctcatctattatctctttctctttgacactcttgatcctcttcaatggctacactgcccaacagtggcccaacgagtgccagctcgatcaactcaatgcgctcgaaccatcccaaatcatcaagagcgagggtggtcgcatcgaggtctgggaccaccatgcaccccagctccgttgctccggctttgcctttgagcgtttcgtcattgagcctcagggtcttttcttgcccactttcttgaacgccggcaaactcacgtttgttgttcacggaaggggtctaatgggaagagttattccgggatgcgccgagacgttcatggagtcaccggtatttggagaaggtcaaggtcagggtcagagtcaagggttccgtgacatgcaccagaaagtagagcacctacggtgcggtgacacca

SEQ ID NO: 141996 - DNA, 464 bp, Arabidopsis thaliana
caataagcaataaatctcacctcccttttttttttttttttgtctcgctacttttgattatcatttaaaaccaaaaaacctaccatgaatgagaatcacattcaaagtgatcacatgaacaacaccattcatgtaacaaacaaaaaactcccaaacttcctcttatccgtacgtctcaaatatgttaaacttggttaccattacctaatctcgaatgccgtctacattctcatactccccgtcggcctcctcgccgcaacctcctcctcctttagtctctccgatctcacactcttatacaaccaccttctcaaattccactttctctcgtccactctcttcgccgctcttcttatctttctaaccaccctctacttcacaactcgtcctcgcagaatctttctcctcgatttcgcttgttacaaacccgactcttttctaatatgcacacgagaaacgttcat

SEQ ID NO: 141997 - DNA, 329 bp, Arabidopsis thaliana
  unsure (1)..(329): unsure at all n locations
aaagaagtccagcagtagtagttctttattttacgaagctcccttcggttacagcattgaagacgttcgtccaaacggtggaatcaagaaattcaaatcttctgtctactcaaactgctccaagaggccatcctgagtaccagcgtgcaccgatcttcataatatagttatagctttctttactttccagtttataattttcttctttcaaagctccttttctgctggttcccgatccaatcgttctctcctcctactacaagtnctgtcgctcacacaacaaggcgagatggccttatctgcaatcggtttcgaaggttacgagaaac

SEQ ID NO: 141998 - DNA, 368 bp, Arabidopsis thaliana
cccagagctctattcccatcaagaaacacacttcggaagatggagatcactaacgttaccgagtatgatgcaatcgcaaagcagaagctgcctaagatggtgtacgactactatgcatctggtgcagaagaccaatggactcttcaagagaacagaaacgcttttgcaaggatcctctttcggcctcggattctgattgatgtgagcaagattgacatgacaaccaccgtcttggggttcaagatctcgatgcccatcatggttgctccaactgccatgcaaaagatggctcaccctgatggggaatatgctactgctagagctgcatctgcagctggaactatcatgacactatcttcatgggctac

SEQ ID NO: 141999 - DNA, 369 bp, Arabidopsis thaliana
gcgatgaggggcttcacgttgttttcgatccttgtgttgtctttgtgcgcttcgtctatgagaagcgaagagacggagacgaaggagttcgtgttgaccttggatcacactaacttcaccgataccatcaacaaacacgatttcatcgtcgtcgagttctacgccccatggtgtggacactgcaagcagcttgctcctgagtatgagaaggctgcgtcagctttgagcagtaacgtcccaccagtggttcttgctaagattgatgccagtgaggaaacaaacagagaatttgcaactcaatacgaggttcagggtttcccaacaatcaagaatttcagaaacggatgaaaggcttgttaagaatacaac

SEQ ID NO: 142000 - DNA, 314 bp, Arabidopsis thaliana
  unsure (1)..(314): unsure at all n locations
tcctcgttgcaaccttcggggttctcctcgtccttaacggctgccttgcgaggcagtcacttggggttcctcctcagctacagaacgagtgtaacctcgacaacctagatgttctccaagccaccgaaactatcaagagtgaagccggtcagatcgagtactgggaccacaaccaccctcagctccgatgtgttggtgtttccgttgctcgttatgtaattgaacaaggcggtctttacttgcccaccttcttcacnttcccaaaaatttcctacgtcgttcaaggaacgggtatcagcggaagagtggtccct

SEQ ID NO: 142001 - DNA, 408 bp, Arabidopsis thaliana
  unsure (1)..(408): unsure at all n locations
aacaaggccaaccatggcaaggacaacagggacaacaaggccaaccatgggaaggacagggacaacagggacaacagggaagacaaggccaaccatgggaaggacagggacaacagggacaacaaggacgacagggacaacaaggccaaccatgggaaggacagggacagcagggacaacatgggttccgtgacatgcaccagaaggtggaacatgtgagacgcggagacgtctntgccaacactccaggctctgcccactggatctacaactcaggagaacagccacttgtcatcatcgctcttctcgacatcgccaactaccaaaaccaactcgaccgcaaccctagagtgttccatttggccggaaacaaccagcaaggaggctttggcggttcacagcaacaac

SEQ ID NO: 142002 - DNA, 490 bp, Arabidopsis thaliana
gacccacgcgttcgcccagagctctataagacgactgatatatacttctttgttctccttttctcgtctcttctcataagcaatggcgatgccaacccaaattacaaagaagctctctccaagtcattgctcttcttccaaggtcagcgatctggtcctcttcctagaggccaacaaatttcctggagggctagctctggcctttccgatggctctgctgctcatgtggacttaaccggcgggtactatgacgcaggagacaacgtcaagttcaatttaccaatggcgtttaccaccacaatgctctcatggagcgcactggaatacggtaaacggatgggtcctgagctggaaaatgcacgtgtgaacatccgttgggccacagattatctgctgaaatgtgccagagccacgccggggaagctttatgtcggtgtaggagatcctaatgttgatcacaaatgctgggaacggcctgaggacatggaca

SEQ ID NO: 142003 - DNA, 447 bp, Arabidopsis thaliana
cgcgtacggagcgataatggtgatgaggggcgtaaacgaagcgatcgctatgacgacgacggtgacgccttgggttcaaagaaatcagcactggcggtgtgtgatgccgaccctgcagcggccatagcgaatatccgacatgagtttggggagcacgggggagtaaacatgtccatcgaagcctccgccaccttcaccgtcatggaaccggataccatgaggcggatgttcaccggagaactgggaccggacaacgacttctacgtatacagccgacacttcaaccccaccgtgctcaacctcagccgtcagatggctgctctcgaaggcacccaagctgcctactgtacctctagcggtatgtcggcgatatcgtcagtgatgctgcaactgtgcagcagcggaggacacgtggtcgcggcaagcacgctctacggaggaacacac

SEQ ID NO: 142004 - DNA, 479 bp, Arabidopsis thaliana
aagaaaaatgggtcgagtctcatctattatctctttctctttgacactcttgatcctcttcaatggctacactgcccaacagtggcccaacgagtgccagctcgatcaactcaatgcgctcgaaccatcccaaatcatcaagagcgagggtggtcgcatcgaggtctgggaccaccatgcaccccagctccgttgctccggctttgcctttgagcgtttcgtcattgagcctcagggtcttttcttgcccactttcttgaacgccggcaaactcacgtttgttgttcacggaaggggtctaatgggaagagttattccgggatgcgccgagacgttcatggagtcaccggtatttggagaaggtcaaggtcagggtcagagtcaagggttccgtgacatgcaccagaaagtagagcacctacggtgcggtgacaccattgcaacaccatctggtgtagctcaatggttctacaacaatg

SEQ ID NO: 142005 - DNA, 507 bp, Arabidopsis thaliana
gcaagataaccgtggcaacatcgtcaaggtcaacggacctttcggcgtcattaggccacccttgagacgcggcgaaggcggccaacaaccacatgaaatagctaatggtttagaggagactttgtgcaccatgcgatgcactgaaaacctcgatgacccgtcggatgctgacgtgtacaagccatcactcggatacattagcacacttaacagctacaatcttcctatcctcagacttctccgccttagcgctcttcgtggctccatccgtaaaaacgctatggtgctaccgcaatggaacgtaaacgcaaacgcggcactctacgtgacaaacggaaaggctcatatacaaatggtgaacgacaacggagaaagagtgttcgaccaagagatctccagcggacagttactagtcgtgccacaaggcttttcggtcatgaaacatgccataggcgaacagttcgagtggatcgaattcaagacaaacgaaaacgcacaggttaacac

SEQ ID NO: 142006 - DNA, 426 bp, Arabidopsis thaliana
cacacatagcaaaaaatggcaaacaagttgttcctcgtctgcgcagctctcgctctctgcttcctcctcacgaacgcttccatctaccgcaccgtcgttgagttcgaagaagatgacgccactaaccccataggcccaaaaatgaggaaatgccgcaaggagtttcagaaagaacaacacctaagagcttgccagcaattgatgctccagcaagcaaggcaaggccgtagcgatgagtttgatttcgaagacgacatggagaacccacagggacaacagcaggaacaacagctattccagcagtgctgcaacgagcttcgccaggaagagccagattgtgtttgccccaccttgaaacaagctgccaaggccgttagactccagggacagcaccaaccaatgcaagtcaggaaaatttaccagaca

SEQ ID NO: 142007 - DNA, 433 bp, Arabidopsis thaliana
ggcggctcaagatcagcctcatgaaaaccttatattccctgaggaggttctaccacgtggaaacgctctttaatggaactttagctttagctggtcgtgaccaagaaaccaccggtttcgcttggtgggccgggaatgcccgacttatcaatttatctggtgaacttttgggagctcatgtagcccatgccggattaatcgtattctgggccggagcaatgaacttatttgaagtggcccattttgtacctgaaaagcccatgtatgaacaaggattaattgtacttccccacctagccactttaggatgggggggaggttctggggggagaagttatagacacctttccgcactttgtatctggaggacttcacttaatttcttctgcagctgtgggctttggcggtatctatcatgcacttctgggacccg

SEQ ID NO: 142008 - DNA, 415 bp, Arabidopsis thaliana
ggacaacagggacaacaaggacgacagggacaacatggccaaccatgggaaggacagggacagcagggacaacaagggttccgtgacatgcaccagaaggtggaacatgtgagacgcggagacgtctttgccaacactccaggctctgcccactggatctacaactcaggagaacagccacttgtcatcatcgctcttctcgacatcgccaactaccaaaaccaactcgaccgcaaccctagagtgttccatttggccggaaacaaccagcagggaggctttggcggttcacagcaacaacaagaacagaaaaacttgtggagcgggttcgacgcacaggtcatagctcaagcattgaaaattgacgttcagttggctcagcagcttcagaaccaacaagacagcagaggaaaca

SEQ ID NO: 142009 - DNA, 460 bp, Arabidopsis thaliana
aaaatggttaagctcagcaatctcctcgttgcaaccttcggggttctcctcgtccttaacggctgccttgcgaggcagtcacttggggttcctcctcagctacagaacgagtgtaacctcgacaacctagatgttctccaagccaccgaaactatcaagagtgaagccggtcagatcgagtactgggaccacaaccaccctcagctccgatgtgttggtgtttccgttgctcgttatgtaattgaacaaggcggtctttacttgcccaccttcttcacttccccaaaaatttcctacgtcgttcaaggaacgggtatcagcggaagagtggtccctggatgtgccgagaccttcatggactcgcagccgatgcaaggacaacaacaaggccaaccatggcaaggacgacagggacaacaaggccaaccatgggaaggacagggacaacagggacaacaag

SEQ ID NO: 142010 - DNA, 465 bp, Arabidopsis thaliana
gcgtcaacagctataccttgcccatcttggagtatgtcaggctcagtgccactcgtggcgttctccagggtaatgcgatggtgcttcctaaatacaacatgaacgctaacgagatcttgtactgcactggaggacaaggaaggatccaagtggtcaacgacaacggacagaacgtgttggaccaacaggtgcagaagggacagctcgtggtcatcccacaagggttcgcatacgttgtccagtcccacggaaacaagttcgagtggatctctttcaaaactaatgaaaacgcaatgatcagcactttggcgggtagaacctcgctcttgagggcattgccattggaggtcatatcaaatggtttccagatctctcccgaggaagctaggaagatcaagttcaacacacttgagaccactttgacccgcgctgccggtaggcaacaacaacagttgatcgaggaga

SEQ ID NO: 142011 - DNA, 473 bp, Arabidopsis thaliana
acgacaagaaaatggttaagctcagcaatctcctcgctgcaaccttcggggttctcctcgtccttaacggctgccttgcgaggcagtcacttggggttcctcctcagctacagaacgagtgtaacctcgacaacctagatgttctccaagccaccgaaactatcaagagtgaagccggtcagatcgagtactgggaccacaaccaccctcagctccgatgtgttggtgtttccgttgctcgttatgtaattgaacaaggcggtctttacttgcccaccttcttcacttccccaaaaatttcctacgtcgttcaaggaacgggtatcagcggaagagtggtccctggatgtgccgagaccttcatggactcgcagccgatgcaaggacaacaacaaggccaaccatggcaaggacgacagggacaacatggccaaccatgggaaggacagggacaacagggacaacaaggaaga

SEQ ID NO: 142012 - DNA, 442 bp, Arabidopsis thaliana
catagccgtaccacaaggtttctcggtggtgaaacgcgcatcaagcaaccgattccagtgggttgagttcaaaacaaacgcaaacgcgcaaatcaacactcttgcgggacgaacctcagtcttgagaggtttaccacttgaagttataaccaatgggttccaaatctcacctgaagaagcaaggagggtcaagttcaacacgctcgagaccactttgactcacagcagtggcccagctagctacggaaggccaagggtggctgcagcttaagagcttaaaaccgcggctcaacaatgaacctctagtactgtaaaaggaagttaaatagtacgaagtaataataataatgtacgaacatgtgacaagttttgttgaggtttacctgtaaaatgccactccttttctgaataaaatctttctttccgatcatgttaatacaaa

SEQ ID NO: 142013 - DNA, 460 bp, Arabidopsis thaliana
gagtttctttccacgttcgtcttcgtctttgctggagaaggctcaatcctcgctctagacaagttgtattgggacacggcggctcacacggggacaaacacgcctggagggttagttctggtggcgttagctcatgcattggccttgttcgcggctgtttctgcagccatcaatgtctctggtggccacgtcaaccccgctgtcacttttgctgctctaatcggaggcaggatctcggtcattcgagctatctactattgggttgctcagcttataggtgctatactggctcgcctcttgtcgcactttggcggttagaacctgagtcttgagggcattgacattggaggtcatatcaaatggtttccagatctttcccgaggaagctaggaagatcaagttcaacacacttgagaccactttgacccgcgcttgccgtaggcaacaacaacagttgatc

SEQ ID NO: 142014 - DNA, 469 bp, Arabidopsis thaliana
acccacgcagaacgacaacttctgtctaaatctcagtgagttctcataaaatgagagggatggtgagttttgccgtttgggctctctttgctgctttactctcacagcagctctttgcttctgttgcttccgtaaggtttgaggatgccaaaacatactacttatctcctccctctggctcacatggaactcctccatcacacacgcctccttcttctaactgtggaagtccaccttacgacccttctccttcaactccttctcacccttcacctccatcacatactccaactccttccactccatcacacactccaactccacacactccatcacacacgccaactccacacacccctccttgtaactgtggaagtccacctttccaccctttcacgccttcacacccttccacttcttcgcacccaacgccattacaaccttcttctggtggatattacctattttc

SEQ ID NO: 142015 - DNA, 469 bp, Arabidopsis thaliana
atcacaaacgagtaagaatacaaatacaaatagcataaaaaatggcaaacaagctcttcctcgtctgcgcaactttcgccctctgcttcctcctcaccaacgcttccatctaccgcactgttgtcgagttcgacgaagatgacgccagcaaccccatgggcccaagacagaaatgtcagaaggagtttcagcaatcacagcacctaagagcttgccagaaattgatgcgcatgcaaatgaggcaaggccgtggtggtggtccctccctcgacgatgagttcgatttggaagacgacatcgagaacccacaaggcccccagcagggacaccagatcctccagcagtgctgcagcgagcttcgccaggaagagccagtttgtgtttgccccaccttgagacaagctgccagggccgttagcctccagggacaacacggaccattccaatccaggaaaatttacaagacagc

SEQ ID NO: 142016 - DNA, 474 bp, Arabidopsis thaliana
acttaacgtctctctctattcctctgcttctctctttctccctgtgaaaaaatggactcggtggctctctactgcaccgctggtctcattgccggcgccgtctactggttcatatgcgtcctaggtccagcagaacgaaaaggcaaacgagcctctgatctctccggcggctcaatctccgcagaaaaagtcaaagacaactataaccaatactggtctttcttccgcaaaccaaaagagatcgaatcagccgagaaagtacctgacttcgtcgacacgttctacaatcttgtcactgatatctacgagtggggatggggacaatctttccatttctctcctcatgtccctggaaaatccgacaaagacgccacaagaatccacgaagaaatggccgtcgatctcatcaaagtgaaaccgggacaaaagattcttgacgctggttgcggcgtgggtgggccgatgagtgccatc

SEQ ID NO: 142017 - DNA, 462 bp, Arabidopsis thaliana
cggacgcgtgggtttgacttaaagattttttattcaggaaagagttacatgtgcagagtcaacgatcgcttatacacgacgttcgttgttgtacactagacgtcctaatacaaagctcaaaacaaaacagttcccttaagcgtagaacttctttgtacattattatttcatattacaagtcgtaccaaaccgaactttagattcaaacgctattccaccacgcgctcatcaagcctcaagccctaggccttccgtagctcattggactgctatgggtcagtgtggtctcaatcgtgctaaactttactcgtttagcttcttcgggagagatctggtacccattggttataacctcaagcggcaaacctctcatgactgaggtacggcccgcgagtgtgttgacctgtgcgttttcgtttgtcttgaattcgatccactcgaactgttcgcctatggcatgtt

SEQ ID NO: 142018 - DNA, 463 bp, Arabidopsis thaliana
cggctttggctcggattcgtccgtcttctttcttcttagccgagtacttcggtagattagttggaacgattgatgattttgagttaattgaacgttcggcgtatgagtggtgatcggatagctagtgttcgtaggctccatgctcgcgcatcgaactacctaccacctatccttctcagttaattcacgggcgatgttacgctcgatgatgagttccggggcctgtgtttcgtacctaatttgaaggaattgttgagtttggtttacacctttgcccgcggcttctccttcgtggggaagtcgtgggcacaaacatcggcgcttgttcacctctcgtcatcgcatttgttgccttgctcgcattggtgaacgagttgcgggttgaaatctcggatgcggaaaagttgtcgacggtgactcgaagtgattcagtcccgccaaagctcatccgtccttcgggcaa

SEQ ID NO: 142019 - DNA, 459 bp, Arabidopsis thaliana
acacatagcaaaaaatggcaaacaagttgttcctcgtctgcgcagctctcgctctctgcttcctcctcaccaacgcttccatctaccgcaccgtcgttgagttcgaagaagatgacgccactaaccccataggcccaaaaatgaggaaatgccgcaaggagtttcagaaagaacaacacctaagagcttgccagcaattgatgctccagcaagcaaggcaaggccgtagcgatgagtttgatttcgaagacgacatggagaacccacagggacaacagcaggaacaacagctattccagcagtgctgcaacgagcttcgccaggaagagccagattgtgtttgccccaccttgaaacaagctgccaaggccgttagactccagggacagcaccaaccaatgcaagtcaggaaaatttaccagacagccaagcacttgcccaacgtttgcgacatcccgc

SEQ ID NO: 142020 - DNA, 460 bp, Arabidopsis thaliana
aagggacgaggtcttatgggaaaagtgatccctggatgcgccgaaacattccaagactcatcagagttccaaccacgcttcgaaggtcaaggtcaaagccagaggttccgtgacatgcaccagaaagtggagcacattaggagcggtgataccattgccacaacacccggtgtagcacagtggttctacaacgacggacaggaaccacttgtcatcgtcagcgtcttcgatctagccagtcaccagaaccagcttgaccgcaacccaaggccattttacttagccggaaacaacccacaaggtcaagtatggctacaaggccgagagcaacagccacagaagaacattttcaatggatttggacccgaggttattgctcaagctttgaagatcgatcttcagacagcgcagcaacttcagaaccaagatgacaaccgtggaaacattgtccgagtccaag

SEQ ID NO: 142021 - DNA, 468 bp, Arabidopsis thaliana
ctcttctcttctttctttcttcttaacacttttgatccttttccatggctacgcggctcaacagggtcagcagggtcagcagtttccgaacgagtgccagctcgaccagctcaatgcgctcgagccgtcacacgtactgaagagcgaggctggtcgcatcgaggtgtgggaccaccacgctcctcagctccgttgctcaggtgtctcctttgcacgttacatcatcgagtctaagggtctctacttgccctctttctttaacaccgcgaagctctctttcgtggctaagggacgaggtcttatgggaaaagtgatccctggatgcgccgaaacattccaagactcatcagagttccaaccacgcttcgaaggtcaaggtcaaagccagaggttccgtgacatgcaccagaaagtggagcacattaggagcggtgataccattgccacaacacccggtgtagcacagtg

SEQ ID NO: 142022 - DNA, 467 bp, Arabidopsis thaliana
cattgcttcatcattaccaaatcatcaacttaatcgtttctctcaaatttagggttttctcttttctcgaaagtcttgcggttttctgaatcatctctatctggtttgagggtttcgtttgatatctggagaaaggggtttctggaaacaaggagttcataattcgcgatcttgatctatcgatcttcatttatatataaaagcgtgaatgagattatgatggagtcgaaaggtggtaaaaagaagtccagcagtagtagttccttattttacgaagctcccctcggttacagcattgaagacgttcgtccaaacggtggaatcaagaaattcaaatcttctgtctactcaaactgctccaagaggccatcctgagtaccagcgtgcaccgatcttcataatatagttatagctttctttactttccagtttataattttcttctttcaaagctccttttctgctgg

SEQ ID NO: 142023 - DNA, 459 bp, Arabidopsis thaliana
aatgggtcgagtctcatctattatctctttctctttgacactcttgatcctcttcaatggctacactgcccaacagtggcccaacgagtgccagctcgatcaactcaatgcgctcgaaccatcccaaatcatcaagagcgagggtggtcgcatcgaggtctgggaccaccatgcaccccagctccgttgctccggctttgcctttgagcgtttcgtcattgagcctcagggtcttttcttgcccactttcttgaacgccggcaaactcacgtttgttgttcacggaaggggtctaatgggaagagttattccgggatgcgccgagacgttcatggagtcaccggtatttggagaaagtcaaggtcagggtcagagtcaagggttccgtgacatgcaccaagaaagtagagcacctaccgtgcggtgacaccattgcaacaccatctggtgtagctcaat

SEQ ID NO: 142024 - DNA, 466 bp, Arabidopsis thaliana
ctcatcttctcctgaggatgaggaatgtgttgtggctgtcaagttcttgggacctcaactcagcttttgcagacctgctcaaagtaactccaagtggatcaacatcagaatcgcaaacccttgcttctactcctctcgtgtcatgttttcgaagaaagatgagatgtttcgcatactcggatctggaggccatatcattggatcatgggatctccacacacacaatcaaaaaccgtttcaaagattgcggttcaaaaaccttcccaagctgacaaaaaccaaacaagagctgatggattcgtgctacaaaagcgaacacttggtggagtcaagaaccaccggtgaaacatttttggttaagtggtataggaaggccgtctggagaggtatgtcgaaactgaaaacaaaagctttaatggtattcaagctagacgacaaaggaaacgctgtttacactcaagatatt

SEQ ID NO: 142025 - DNA, 461 bp, Arabidopsis thaliana
caaaaagaaaatggttaagctcagcaatctcctcgttgcaaccttcggggttctcctcgtccttaacggctgccttgcgaggcagtcacttggggttcctcctcagctacagaacgagtgtaacctcgacaacctagatgttctccaagccaccgaaactatcaagagtgaagccggtcagatcgagtactgggaccacaaccaccctcagctccgatgtgttggtgtttccgttgctcgttatgtaattgaacaaggcggtctttacttgcccaccttcttcacttccccaaaaatttcctacgtcgttcaaggaacgggtatcagcggaagagtggtccctggatgtgccgagaccttcatggactcgcagccgatgcaaggacaacaacaaggccaaccatggcaaggacgacagggacaacaaggccaaccatgggaaggacagggacaacagggac

SEQ ID NO: 142026 - DNA, 461 bp, Arabidopsis thaliana
  unsure (1)..(461): unsure at all n locations
catcacaaacgagtaagaatacaaatacaaatagcaaaaaaaatggcaaacaagctcttcctcgtctgcgcaactttcgccctctgcttcctcctcaccaacgcttccatctaccgcactgttgtcgagttcgacgaagatgacgccagcaaccccatgggcccaagacagaaatgtcagaaggagtttcagcaatcacagcacctaagagcttgccagaaattgatgcgcatgcaaatgaggcaaggccgtggtggtggtccctccctcgacgatgagttcgatttggaagacgacatcgagaacccacaaggcccccagcagggacaccagatcctccagcagtgctgcagcgagcttcgccaggaagagccagtttgtgtttgccccaccttgagacaagctgccagggccgttagcctncagggacaacacggaccattccaatccaggaaaattta

SEQ ID NO: 142027 - DNA, 394 bp, Arabidopsis thaliana
gtcaccggtatttggagaaggtcaaggtcagggttagagtcaagggttccgtgacatgcaccagaaagtagagcacctacggtgcggtgacaccattgcaacaccatctggtgtagctcaatggttctacaacaatggaaatgagcctctcattcttgttgcagccgcggatctcgccagcaaccagaaccagcttgaccgcaaccttagaccatttttgatagccggaaacaacccacaagggcaggaatggctacaaggccgaaagcaacagaagcaaaacaacatcttcaatggcttcgcacctgagatcttggctcaagccttcaagatcaatgtcgagacggctcagcagctccagaaccagcaagataaccgtggcaacattttcaag

SEQ ID NO: 142028 - DNA, 468 bp, Arabidopsis thaliana
cttttcgcaaaacacacatcacacaccattttcacaacatcgtacttatcgccttcctctctctctcaatacctctctcaatttctggatccaccatgcaagctcttcaatcttcatctctccgtgcttctcctccaaacccacttcgcttaccatcaaatcgtcaatcacatcagctaattaccaatgcgagacctttgcgaagacaacaacgttccttcatctccgcatcagcatccactgtctccgctcctaaacgcgaaacagatccgaagaaacgagttgtcattactggtatgggtctcgtctctgtgtttggtaacgatgttgatgcttactacgagaaattgttgtctggtgagagtggaatcagtttgattgatcgtttcgatgcttccaagttccctactcgattcggtggtcagatccgtgggtttagctctgaaggttatattgatggcaagaatg

SEQ ID NO: 142029 - DNA, 467 bp, Arabidopsis thaliana
agaaaaatgggtcgagtctcatctattatctctttctctttgacactcttgatcctcttcaatggctacactgcccaacagtggcccaacgagtgccagctcgatcaactcaatgcgctcgaaccatcccaaatcatcaagagcgagggtggtcgcatcgaggtctgggaccaccatgcaccccagctccgttgctccggctttgcctttgagcgtttcgtcattgagcctcagggtcttttcttgcccactttcttgaacgccggcaaactcacgtttgttgttcacggaaggggtctaatgggaagagttattccgggatgcgccgagacgttcatggagtcaccggtatttggagaaggtcaaggtcagggtcagagtcaagggttccgtgacatgcaccagaaagtagagcacctacggtgcggtgacaccattgcaacaccatctggtgtagctcaatggtt

SEQ ID NO: 142030 - DNA, 456 bp, Arabidopsis thaliana
cgtcgggtaaaattttgaacacatttcttcaggaagatttatgccagaatacctgattgttagaacacgttgatctccatggtttcttgtgaacacaaaaattgtattcgaaaattcacaatagacgcttgcgaacaaagtgatgtcgtctcttcgagcaagcaatgcccggttccgagaaatttttaataccaagccggagcgacgcttccgttgcagtgaatgaatcaataaagcaatagaaagtgcaaactaagtcgtgtaccacaacgcgaattgccattttcttgctacttaccggagctttttttttgctatgcttcttgtcttgagatgctggatctgttgagaatacacacaagttgaagaattactatgtttattagctttagaaaacgaacttaaaaactaacgctctctttgtgtctgtaatatatcccttacaaatcttacacg

SEQ ID NO: 142031 - DNA, 468 bp, Arabidopsis thaliana
atctcataaagatcaaataaacactaaacctgaaagcaaaaaaatggcagcacgagcaacattcatattctatgctctcttcctaaccacactccaattccttctaacacaccatgtgtcatccgccgcccgaggattatggaaatacatcgcccccaacgtcggaatctccgcgatgcatatgcaacttctccataacgaccgtgtcgtaatgtacgaccgaaccaacttcggaccatcaaacatctctctacctaacggtaactgccgtgacaacccccaagacgccgtctccaaaatcgactgcacagctcactcgatcgaatacgacgtcgcaacgaacaccatccgacctttaacggtacaatccaacacatggtgctcatccggttcggttcgaccggacggtgttcttgtccaaaccggtggagaccgagacggagaacttaagacaagaaccttttctct

SEQ ID NO: 142032 - DNA, 466 bp, Arabidopsis thaliana
caaacgagtaagaatacaaatacaaatagcaaaaaaaatggcaaacaagctcttcctcgtctgcgcaactttcgccctctgcttcctcctcaccaacgcttccatctaccgcactgttgtcgagttcgacgaagatgacgccagcaaccccatgggcccaagacagaaatgtcagaaggagtttcagcaatcacagcacctaagagcttgccagaaattgatgcgcatgcaaatgaggcaaggccgtggtggtggtccctccctcgacgatgagttcgatttggaagacgacatcgagaacccacaaggcccccagcagggacaccagatcctccagcagtgctgcagcgagcttcgccaggaagagccagtttgtgtttgccccaccttgagacaagctgccagggccgttagcctccagggacaacacggaccattccaatccaggaaaatttacaagacagct

SEQ ID NO: 142033 - DNA, 463 bp, Arabidopsis thaliana
cagggacaacaaggaagacaaggccaaccatgggttggacagggacaacagggacaacaaggacgacagggacaacaaggccaaccatgggaaggacagggacagcagggacaacaagggttccgtgacatgcaccagaaggtggaacatgtgagacgcggagacgtctttgccaacactccaggctctgcccactggatctacaactcaggagaacagccacttgtcatcatcgctcttctcgacatcgccaactaccaaaaccaactcgaccgcaaccctagagtgttccatttggccggaaacaaccagcagggaggctttggcggttcacagcaacaacaagaacagaaaaacttgtggagcgggttcgacgcacaggtcatagctcaagcattgaaaattgacgttcagttggctcagcagcttcagaaccaacaagacagcagaggaaacatcgttc

SEQ ID NO: 142034 - DNA, 458 bp, Arabidopsis thaliana
caaaaagaaaatggttaagctcagcaatctcctcgttgcaaccttcggggttctcctcgtccttaacggctgccttgcgaggcagtcacttggggttcctcctcagctacagaacgagtgtaacctcgacaacctagatgttctccaagccaccgaaactatcaagagtgaagccggtcagatcgagtactgggaccacaaccaccctcagctccgatgtgttggtgtttccgttgctcgttatgtaattgaacaaggcggtctttacttgcccaccttcttcacttccccaaaaatttcctacgtcgttcaaggaacgggtatcagcggaagagtggtccctggatgtgccgagacctttatggactcgcagccgatgcaaggacaacaacaaggccaaccatggcaaggacgacagggacaacaaggccaaccatgggaaggacagggacaacagg

SEQ ID NO: 142035 - DNA, 464 bp, Arabidopsis thaliana
cgttgctcgttatgtaattgaacaaggcggtctttacttgcccaccttcttcacttccccaaaaatttcctacgtcgttcaaggaacgggtatcagcggaagagtggtccctggatgtgccgagaccttcatggactcgcagccgatgcaaggacaacaacaaggccaaccatggcaaggacgacagggacaacaaggccaaccatgggaaggacagggacaacagggacaacaaggaagacaaggccaaccatgggaaggacagggacaacagggacaacaaggacgacagggacaacaaggccaaccatgggaaggacagggacagcagggacaacaagggttccgtgacatgcaccagaaggtggaacatgtgagacgcggagacgtctttgccaacactccaggctctgcccactggatctacaactcaggagaacagccacttgtcatcatcgctcttc

SEQ ID NO: 142036 - DNA, 450 bp, Arabidopsis thaliana
ttcttcttcttcttcaagaatcgatcatgaaaggagctaaatctaaggctgaaaccaggagcacaaagctctctgtgactaagaagcctgctaagggagccaaaggtgctgctaaagatccaaataaacctaagaggccttccagtgccttcttcgttttcatggaagatttccgtgtgacgtacaaggaggagcaccctaagaacaagtctgttgctgctgttggcaaagctggtggtgaaaagtggaaatccttgtctgactctgagaaggctccttatgtggctaaggctgacaagcgcaaggttgagtatgagaagaacatgaaagcctacaacaagaaattggaggaaggccctaaggaagatgaggaatctgacaagtcagtttcagaggttaacgatgaggatgatgctgaggatggcagtgaagaggaggaagacgatgatt

SEQ ID NO: 142037 - DNA, 463 bp, Arabidopsis thaliana
cgcaaccctagagtgttccatttggccggaaacaaccagcagggaggctttggcggttcacagcaacaacaagaacagaaaaacttgtggagcgggttcgacgcacaggtcatagctcaagcattgaaaattgacgttcagttggctcagcagcttcagaaccaacaagacagcagaggaaacatcgttcgtgttaagggacctttccaggtcgtgaggccacctctaagacagccctacgagagcgaggagtggagacacccacgtagcccacagggcaacggccttgaggagactatctgcagcatgaggtcccacgagaacattgacgaccctgctcgtgctgacgtgtacaagcccagcctaggtcgcgtgaccagcgtcaacagctataccttgcccatcttggagtatgtcaggctcagtgccactcgtggcgttctccagggtaatgcgatggtgc

SEQ ID NO: 142038 - DNA, 466 bp, Arabidopsis thaliana; identical to SEQ ID NO: 129979

SEQ ID NO: 142039 - DNA, 464 bp, Arabidopsis thaliana
agaaaaatgggtcgagtctcatctattatctctttctctttgacactcttgatcctcttcaatggctacactgcccaacagtggcccaacgagtgccagctcgatcaactcaatgcgctcgaaccatcccaaatcatcaagagcgagggtggtcgcatcgaggtctgggaccaccatgcaccccagctccgttgctccggctttgcctttgagcgtttcgtcattgagcctcagggtcttttcttgcccactttcttgaacgccggcaaactcacgtttgttgttcacggaaggggtctaatgggaagagttattccgggatgcgccgagacgttcatggagtcaccggtatttggagaaggtcaaggtcagggtcagagtcaagggttccgtgacatgcaccagaaagtagagcacctacggtgcggtgacaccattgcaacaccatctggtgtagctcaatg

SEQ ID NO: 142040 - DNA, 466 bp, Arabidopsis thaliana
aaaatggttaagctcagcaatctcctcgttgcaaccttcggggttctcctcgtccttaacggctgccttgcgaggcagtcacttggggttcctcctcagctacagaacgagtgtaacctcgacaacctagatgttctccaagccaccgaaactatcaagagtgaagccggtcagatcgagtactgggaccacaaccaccctcagctccgatgtgttggtgtttccgttgctcgttatgtaattgaacaaggcggtctttacttgcccaccttcttcacttccccaaaaatttcctacgtcgttcaaggaacgggtatcagcggaagagtggtccctggatgtgccgagaccttcatggactcgcagccgatgcaaggacaacaacaaggccaaccatggcaaggacgacagggacaacaaggccaaccatgggaaggacagggacaacagggacaacaaggaagac

SEQ ID NO: 142041 - DNA, 463 bp, Arabidopsis thaliana
gaaaatggttaagctcagcaatctcctcgttgcaaccttcggggttctcctcgtccttaacggctgccttgcgaggcagtcacttggggttcctcctcagctacagaacgagtgtaacctcgacaacctagatgttctccaagccaccgaaactatcaagagtgaagccggtcagatcgagtactgggaccacaaccaccctcagctccgatgtgttggtgtttccgttgctcgttatgtaattgaacaaggcggtctttacttgcccaccttcttcacttccccaaaaatttcctacgtcgttcaaggaacgggtatcagcggaagagtggtccctggatgtgccgagaccttcatggactcgcagccgatgcaaggacaacaacaaggccaaccatggcaaggacgacagggacaacaaggccaaccatgggaaggacagggacaacagggacaacaaggg

SEQ ID NO: 142042 - DNA, 462 bp, Arabidopsis thaliana
accgcaaccctagagtgttccatttggccggaaacaaccagcagggaggctttggcggttcacagcaacaacaagaacagaaaaacttgtggagcgggttcgacgcacaggtcatagctcaagcattgaaaattgacgttcagttggctcagcagcttcagaaccaacaagacagcagaggaaacatcgttcgtgttaagggacctttccaggtcgtgaggccacctctaagacagccctacgagagcgaggagtggagacacccacgtagcccacagggcaacggccttgaggagactatctgcagcatgaggtcccacgagaacattgacgaccctgctcgtgctgacgtgtacaagcccagcctaggtcgcgtgaccagcgtcaacagctataccttgcccatcttggagtatgtcaggctcagtgccactcgtggcgttctccagggtaatgcgatgg

SEQ ID NO: 142043 - DNA, 461 bp, Arabidopsis thaliana
caacaagacagcagaggaaacatcgttcgtgttaagggacctttccaggtcgtgaggccacctctaagacagccctacgagagcgaggagtggagacacccacgtagcccacagggcaacggccttgaggagactatctgcagcatgaggtcccacgagaacattgacgaccctgctcgtgctgacgtgtacaagcccagcctaggtcgcgtgaccagcgtcaacagctataccttgcccatcttggagtatgtcaggctcagtgccactcgtggcgttctccagggtaatgcgatggtgcttcctaaatacaacatgaacgctaacgagatcttgtactgcactggaggacaaggaaggatccaagtggtcaacgacaacggacagaacgtgttggaccaacaggtgcagaagggacagctcgtggtcatcccacaagggttcgcatacgttgtccagtc

SEQ ID NO: 142044 - DNA, 464 bp, Arabidopsis thaliana
gcggacagttactagtcgtgccacaaggcttttcggtcatgaaacatgccataggcgaacagttcgagtggatcgaattcaagacaaacgaaaacgcacaggtcaacacactcgcgggccgtacctcagtcatgagaggtttgccgcttgaggttataaccaatgggtaccagatctctcccgaagaagctaaacgagtaaagtttagcacgattgagaccacactgacccatagcagtccaatgagctacggaaggcctagggcttgaggcttgatgagcgcgtggtggaatagcgtttgaatctaaagttcggtttggtacgacttgtaatatgaaataataatgtacaaagaagttctacgcttaagggaactgttttgttttgagctttgtattaggacgtctagtgtacaacaacgaacgtcgtgtataagcgatcgttgactctgcacatgtaactct

SEQ ID NO: 142045 - DNA, 464 bp, Arabidopsis thaliana
caaaaagaaaatggttaagctcagcaatctcctcgttgcaaccttcggggttctcctcgtccttaacggctgccttgcgaggcagtcacttggggttcctcctcagctacagaacgagtgtaacctcgacaacctagatgttctccaagccaccgaaactatcaagagtgaagccggtcagatcgagtactgggaccacaaccaccctcagctccgatgtgttggtgtttccgttgctcgttatgtaattgaacaaggcggtctttacttgcccaccttcttcacttccccaaaaatttcctacgtcgttcaaggaacgggtatcagcggaagagtggtccctggatgtgccgagacctttatggactcgcagccgatgcaaggacaacaacaaggccaaccatggcaaggacgacagggacaacaaggccaaccatgggaaggacagggacaacagggacaac

SEQ ID NO: 142046 - DNA, 464 bp, Arabidopsis thaliana
ctgtactgaatctttaagcctctcaacgtgttttttatatattttgaaaatcttttacgccttaaaaggatctacgataattaaaaaaaaaatggcaacggaatgcattgcaacggtccctcaaatattcagtgaaaacaaaaccaaagaggattcttcgatcttcgatgcaaagctccttaatcagcactcacaccacatacctcaacagttcgtatggcccgaccacgagaaaccttctacggatgttcaacctctccaagtcccactcatagacctagccggtttcctctccggcgactcgtgcttggcatcggaggctactagactcgtctcaaaggctgcaacgaaacatggcttcttcctaatcactaaccatggtgtcgatgagagcctcttgtctcgtgcctatctgcatatggactctttctttaaggccccggcttgtgagaagcagaaggctc

SEQ ID NO: 142047 - DNA, 463 bp, Arabidopsis thaliana
caacaacttactacacactaaaacctccaataaatttgcttagagaatctatttttttttacatttctgaaatttgaacttgagacatgacatacatatttaaaaccgttgatcaacaattcgatcaagatatataatttatgaggtattttgcacgaattgcgataattctacgaatattgtagtttgacaacatatatccatttaattaccaaaattccttacgtccactattaaagaagtcttcaactatgtagactcacaaatctatcacaatttctttataaaataagagaaagcacttgattagcacctttcgtgaaaagcatcttccagttgaagtatgttatacccccgaagttatctgatctttgagcctaagcaaccgtagtttcaatgggtcagacaaacaacttaagaaataacgataatgtgttaaacaaaagtctcattagtttaccat

SEQ ID NO: 142048 - DNA, 469 bp, Arabidopsis thaliana
aaacgagtaagaatacaaatacaaatagcaaaaaaaatggcaaacaagctcttcctcgtctgcgcaactttcgccctctgcttcctcctcaccaacgcttccatctaccgcactgttgtcgagttcgacgaagatgacgccagcaaccccatgggcccaagacagaaatgtcagaaggagtttcagcaatcacagcacctaagagcttgccagaaattgatgcgcatgcaaatgaggcaaggccgtggtggtggtccctccctcgacgatgagttcgatttggaagacgacatcgagaacccacaaggcccccagcagggacaccagatcctccagcagtgctgcagcgagcttcgccaggaagagccagtttgtgtttgccccaccttgagacaagctgccagggccgttagcctccagggacaacacggaccattccaatccaggaaaatttacaagacagctaagt

SEQ ID NO: 142049 - DNA, 461 bp, Arabidopsis thaliana
ttcttcttctctgcagtctctcttctctctgttttgccttgctctgttctctcttcctctcatcgtctcctccatcggcatcaactatggccaggtcgctaacaaccttcctccccctaaaaacgtcatccctctcctcaagtctgtgggagctacaaaagtcaagctctatgacgccgatccacaagccctacgtgccttcgccggctccggcttcgagctcaccgtggccctcggtaacgagtacctggctcagatgagcgaccctattaaagcccaaggctgggtgaaggagaacgtccaagcttacctcccaaacaccaagatcgtggccatcgtagtgggaaacgaagtcctcacctcaaaccagtcagccctcacggcagccctcttcccggctatgcaaagcatccacggtgctctggtggattgtggcctaaacaagcagatctttgtgacga

SEQ ID NO: 142050 - DNA, 467 bp, Arabidopsis thaliana
aagaaaaatgggtcgagtctcatctattatctctttctctttgacactcttgatcctcttcaatggctacactgcccaacagtggcccaacgagtgccagctcgatcaactcaatgcgctcgaaccatcccaaatcatcaagagcgagggtggtcgcatcgaggtctgggaccaccatgcaccccagctccgttgctccggctttgcctttgagcgtttcgtcattgagcctcagggtcttttcttgcccactttcttgaacgccggcaaactcacgtttgttgttcacggaaggggtctaatgggaagagttattccgggatgcgccgagacgttcatggagtcaccggtatttggagaaggtcaaggtcagggtcagagtcaagggttccgtgacatgcaccagaaagtagagcacctacggtgcggtgacaccattgcaacaccatctggtgtagctcaatggt

SEQ ID NO: 142051 - DNA, 329 bp, Arabidopsis thaliana
aaaagaaaatggttaagctcagcaatctcctcgttgcaaccttcggggttctcctcgtccttaacggctgccttgcgaggcagtcacttggggttcctcctcagctacagaacgagtgtaacctcgacaacctagatgttctccaagccaccgaaactatcaagagtgaagccgctcagatcgagtactgggaccacaaccactctcagatccgatgtgttggcgtgtccgctgctaaccatgtactggtgcacaaccttttcaagttccactcatagacctagcccgctaacatttcctacactcgtgcttgaactcggatgattcta

SEQ ID NO: 142052 - DNA, 447 bp, Arabidopsis thaliana
aagaaataacaaaatggctcgagtctcttctcttctttctttcttcttaacacttttgatccttttccatggctacgcggctcaacagggtcagcagggtcagcagtttccgaacgagtgccagctcgaccagctcaatgcgctcgagccgtcacacgtactgaagagcgaggctggtcgcatcgaggtgtgggaccaccacgctcctcagctccgttgctcaggtgtctcctttgcacgttacatcatcgagtctaagggtctctacttgccctctttctttaacaccgcgaagctctctttcgtggctaagggacgaggtcttatgggaaaagtgatccctggatgcgccgaaacattccaagactcatcagagttccaaccacgcttcgaaggtcaaggtcaaagccagaggttccgtgacatgcaccagaaagtggagcacat

SEQ ID NO: 142053 - DNA, 386 bp, Arabidopsis thaliana
gttcggtgtgaggtcaatcagggacaataacgatgatactaatgggtgctgtgtatctacaagttagtatcatcagtcaagctctaatctttgtcaccaggtcaaggagttggtcatttgtcgaacgtcctggggcgcttctgatgattgcattcgtcattgcacaactggttgcaactttgatcgcagtgtatgccgactggacatttgcaaaggtgaagggtatcggttggggatgggcaggtgtgatttggatttacagtatcgtaacatacttcccacaggacattttgaagtttgccattctgtatatcttgagtggaaaggtttgtgccagcttgttttgacaacaggaccgctttcacatccaagaaagatttctgtat

SEQ ID NO: 142054 - DNA, 362 bp, Arabidopsis thaliana
ccacttgtcatcgtcagcgtcttcgatctagccagtcaccagaaccagcttgaccgcaacccaaggccattttacttagccggaaacaacccacaaggtcaagtatggctacaaggccgagagcaacagccacagaagaacattttcaatggatttggacccgaggttattgctcaagctttgaagatcgatcttcagacagcgcagcaacttcagaaccaagatgacaaccgtggaaacattgtccgagtccaaggcccgttcggtgtcattaggccgcctttgaggggccagagacctcaggaggaggaagaagaagaagaaggactacatggactacacggtaatggcttagaggagac

SEQ ID NO: 142055 - DNA, 464 bp, Arabidopsis thaliana
ggaagaaaaatgggtcgagtctcatctattatctctttctctttgacactcttgatcctcttcaatggctacactgcccaacagtggcccaacgagtgccagctcgatcaactcaatgcgctcgaaccatcccaaatcatcaagagcgagggtggtcgcatcgaggtctgggaccaccatgcaccccagctccgttgctccggctttgcctttgagcgtttcgtcattgagcctcagggtcttttcttgcccactttcttgaacgccggcaaactcacgtttgttgttcacggaaggggtctaatgggaagagttattccgggatgcgccgagacgttcatggagtcaccggtatttggagaaggtcaaggtcagggtcagagtcaagggttccgtgacatgcaccagaaagtagagcacctacggtgcggtgacaccattgcaacaccatctggtgtagctca

SEQ ID NO: 142056 - DNA, 462 bp, Arabidopsis thaliana
cacattttcgtagccgcaagactcctttcagattcttacttgcagctatgggtaaagagaagtttcacattaacattgtggtcattggtcatgttgattctggaaaatcgaccacaactggtcacttgatctataagcttggtggtattgacaagcgtgtcatcgagaggttcgagaaggaggctgctgagatgaacaagaggtccttcaagtacgcatgggtgttggacaaacttaaggccgagcgtgagcgtggtattaccatcgatattgctctatggaagttcgagaccaccaagtactactgcacagtcattgatgccccaggacatcgtgatttcatcaagaacatgattactggtacctcccaagctgattgtgctgttcttatcattgactccaccactggaggttttgaggctggtatctctaaggatggtcagacccgtgagcacgctcttt

SEQ ID NO: 142057 - DNA, 464 bp, Arabidopsis thaliana
ataaaaatgaacatttgtatattataatacaattacaatgaataatgataagtcgtctcttgaatcgccaaatatatattctttttttttcgatttttcgatagattagaaatcgacaaatccaaaagaaaaagtaagtggacctaacccatcgaatcatgactatatccactattctgatattcaaattcgatagagattaaattgaaacagtagattttttttatttcatatttttgtattaggaaatccgtcgatatctcttattgaatcttcttgtttctatatatttcataggaaatatattgcgttcctgcctagagaaagagagtctttttgcaaagtaataactaaaagggcgtttcaatattttttttgattcgagaacataacaagatcctacattctctttgtattaagaatcaatttgtattaaaaataaacaaaaatcgaatcataatcat

SEQ ID NO: 142058 - DNA, 462 bp, Arabidopsis thaliana
ctcctcgttgcaaccttcggggttctcctcgtccttaacggctgccttgcgaggcagtcacttggggttcctcctcagctacagaacgagtgtaacctcgacaacctagatgttctccaagccaccgaaactatcaagagtgaagccggtcagatcgagtactgggaccacaaccaccctcagctccgatgtgttggtgtttccgttgctcgttatgtaattgaacaaggcggtctttacttgcccaccttcttcacttccccaaaaatttcctacgtcgttcaaggaacgggtatcagcggaagagtggtccctggatgtgccgagaccttcatggactcgcagccgatgcaaggacaacaacaaggccaaccatggcaaggacgacagggacaacaaggccaaccatgggaaggacagggacaacagggacaacaaggaagacaaggccaaccatgggaa

SEQ ID NO: 142059 - DNA, 464 bp, Arabidopsis thaliana
aaccaccctcagctccgatgtgttggtgtttccgttgctcgttatgtaattgaacaaggcggtctttacttgcccaccttcttcacttccccaaaaatttcctacgtcgttcaaggaacgggtatcagcggaagagtggtccctggatgtgccgagaccttcatggactcgcagccgatgcaaggacaacaacaaggccaaccatggcaaggacgacagggacaacaaggccaaccatgggaaggacagggacaacagggacaacaaggaagacaaggccaaccatgggaaggacagggacaacagggacaacaaggacgacagggacaacaaggccaaccatgggaaggacagggacagcagggacaacaagggttccgtgacatgcaccagaaggtggaacatgtgagacgcggagacgtctttgccaacactccaggctctgcccactggatctacaactc

SEQ ID NO: 142060 - DNA, 456 bp, Arabidopsis thaliana
atcgacatggcgaatgtggaccgtgatcggcgtgtgcatgtagaccgtactgacaaacgtgttcatcagccaaactacgaagatgatgtcggttttggtggctatggcggttatggtgctggttctgattataagagtcgcggcccctccactaaccaaatcttggcacttatagcaggagttcccattggtggcacactgctaaccctagctggactcactctagccggttcggtgatcggcttgctagtctccatacccctcttcctcctcttcagtccggtgatagtcccggcggctctcactattgggcttgctgtgacgggaatcttggcttctggtttgtttgggttgacgggtctgagctcggtctcgtgggtcctcaactaccttcgtgggacgagtgatacagtgccagagcaattggactacgctaaacggcgtatggctgatgcg

SEQ ID NO: 142061 - DNA, 314 bp, Arabidopsis thaliana
ctatatatgagaattgagaatcttacaattaaatattttgtactaataaggcttttattttgtttacaactcatgtgtttaactaagtgctaagctaacactagattttttttaaaagaaatttggttttcctccacagtatttttattgttttttgtggacttgaccactaaacttcaaaagactcggaagaaaactaaacaaatattatgcacactttcgcaccactcaatgccttgccttccctacctaaaatgttgacaatgtcgacttattctttatgttttataaaataagaggaagcacttgatttg

SEQ ID NO: 142062 - DNA, 468 bp, Arabidopsis thaliana
gcgatggcgtctgagaaacaaaaacaacatgcacaacctggcaaagaacatgtcatggaatcaagcccacaattctctagctcagattaccaaccttccaacaagcttcgtggtaaggtggcgttgataactggtggagactctgggattggtcgagccgtgggatactgttttgcatccgaaggagctacgtggctttcacttacgtgaagggtcaagaagaaaaagatgcacaagagaccctacaaatgttgaaggaggtcaaaacctcggactccaaggaacctatcgccattccaacggatttaggatttgacgaaaactgcaaaagggtcgttgatgaggtcgttaatgcttttggccgcatcgatgttttgatcaataacgcagcagagcatgacgagagcaccttatttttggagttagaagagccttggcttgagcgagtcctccgatccaacttctttt

SEQ ID NO: 142063 - DNA, 464 bp, Arabidopsis thaliana
gaaaaagccagaagaaccaaactcagaccgagagatagagattgagggagagctctagctctgtagaaaagaaggattcattcatcatatccagaaatggctctaaagtttaaccctttggtggcatctcagccttacaaattcccttcctcgactcgtccgccaacttcttctttcagatctcccaagttcctctgcctcgcttcttcttctccggctctcaactccggccccaaggaggttgagagtttgaagaaaccatttacgccacccagggaagtgcatgttcaagtcttgcactccatgccacctcaaaagatcgagatcttcaaatctatggaaaactgggccgaggagaaccttctgattcacctcaaggatgtggagaagtcttggcaaccccaggatttcttgcctgaccctgcatcagatgggtttgaagatcaggtaagagagttaagagt

SEQ ID NO: 142064 - DNA, 461 bp, Arabidopsis thaliana
ccaaattcgagaatacaaagctccagggatcagagctcaaatatggtccttacaagaatctccagtcgtattcatactctccaattgttgtccactttgaaagcaaggctgcatttgctgtggctgagaagcttgtgcgagagatagaagtgtctcattgggggaatgtgcaggtcacggagaattacaatgttgtccaccgtggggctcaactcaagggcgagttttcaaggttagattttcaagccagacctaatccccgtggagcatctgcctttaggcatttacttgctagattaccccccagagcccattccatatattacagggatgatattggaaatatctccacgtctgagatgaaaagtgattcgaaaaagacagagctactaattgagcctaggtttcctttgtttggtgggtggaaaacttttttcacgataggttatggtttgccactt

SEQ ID NO: 142065 - DNA, 461 bp, Arabidopsis thaliana
acaaatcttaaacgttttactttgtgctgcactactcaacctcaatggccgcctcaacaatggctctctcctcccctgccttcgccggtaaggccgtcaagctttcccccgcggcatctgaagtccttggaagcggccgtgtgacaatgaggaagactgttgccaagccaaagggcccatcaggcagcccatggtacggatctgaccgtgtcaagtacttgggtccattctctggcgaatcaccgagctaccttaccggagagttccccggagactacggatgggacaccgccggactttcagctgaccccgagacattcgcaaggaaccgtgagctagaagttatccacagcaggtgggctatgctcggagccctaggctgcgtcttccctgagcttttggctaggaacggagtcaagttcggagaggcgggttggttcaaggccggttcacagatcttc

SEQ ID NO: 142066 - DNA, 451 bp, Arabidopsis thaliana
agccgatgcaaggacaacaacaaggccaaccatggtaaggacgacagggacaacaaggccaaccatgggaaggacagggacaacagggacaacaaggaagacaaggccaaccatgggaaggacagggacaacagggacaacaaggacgacagggacaacaaggccaaccatgggaaggacagggacagcatggacaacaagggttccgtgacatgcaccagaaggtggaacatgtgagacgcggagacgtctttgccaacactccaagctctgcccactggatctacaactcaagagaacagccacttgtcatcatcgctcttcttgacatcgccaactaccaaaaccaactcgaccgcaaccctagagtgttccatttgggcggaaacaaccagcagggaggctttggcgggtgacagcagcaacaagaacagaaaaacttgtggagcgg

SEQ ID NO: 142067 - DNA, 403 bp, Arabidopsis thaliana
cgaattctccgattccaaaagcagcagaagaaaaaatgtcagccatggaagcactgattctccagctgcatgaaatcggcgccgtgaaattcggcaatttcaagctcaaatctggaatcttttctccggtttacatcgaccttcgtctcatcgtctcttatccatccctcttaacacagatctctcaaactctcatctcttctcttccaccttctgcaaccttcgacgtcgtctgtggtgttccttacactgctctccctatcgccactgttgtctctgtttccaatggtatccctatgcttatgcggcgtaaggagattaaagactatggaacatctaaagctattgaaggaatcttcgaaaaggatcaaacttgtttgataattgaagatcttgtaactag

SEQ ID NO: 142068 - DNA, 421 bp, Arabidopsis thaliana
gctttagcgagcgatgctgcgttcgctctatctgtatcaatcttgaccgagcttgtggatccttcagggattggtttatatccatagatattctgagcaagcatccctactataggaggagcaaaagaagctagaatcgactcgaatgatctgtctaacgcgtagatgctcgttcgcgctctctcaggaacaatctctgcaaatattggactgtataaaaccatttcaagtagatgcttccggaagtaaagaaaagccaaaatattttgaatatgattgaaatataagtattaaacttacccgtttgtagctgcaccgttccatgagatgcataatcccatgatgacaagaaccaggccatggctaaaggccgtgaagggatcatcaggtaatcccgatagcaaaattgcagctaaaggaa

SEQ ID NO: 142069 - DNA, 466 bp, Arabidopsis thaliana
ctcctttatgccttcagactctcttgcaccatgtcactgataaatgcggggatgcttgtgactgcgtctctcgggaggagaaaggtcgttcactcaaatcttgtccagtaaaagtgttagagattaaagagtttcaaggaacaatgaaagagatgcacatgataaaacatttcctggactatcttccgtgtttgaaggagatgaaaatctcctatatgaaaaagaatgatcatactacacagctcagagtcatccctgaagttattgaagagatggtggaacactacaacaagttatctaattgcaatgtccagcttgtagtgagtggttaattttataaaaagttgacagcacattgattcagccatttatgatctcgcttgtggtataatctttcacttccctagcattttgctttgagttctctttacattttagattttgtggacgaatcgttaagagtgaa

SEQ ID NO: 142070 - DNA, 471 bp, Arabidopsis thaliana
aacaaacaaaaagaaaatggttaagctcagcaatctcctcgttgcaaccttcggggttctcctcgtccttaacggctgccttgcgaggcagtcacttggggttcctcctcagctacagaacgagtgtaacctcgacaacctagatgttctccaagccaccgaaactatcaagagtgaagccggtcagatcgagtactgggaccacaaccaccctcagctccgatgtgttggtgtttccgttgctcgttatgtaattgaacaaggcggtctttacttgcccaccttcttcacttccccaaaaatttcctacgtcgttcaaggaacgggtatcagcggaagagtggtccctggatgtgccgagaccttcatggactcgcagccgatgcaaggacaacaacaaggccaaccatggcaaggacgacagggacaacaaggccaaccatgggaaggacagggacaacagggacaaca

SEQ ID NO: 142071 - DNA, 442 bp, Arabidopsis thaliana
atcatcaagagcgagggtggtcgcatcgaggtctgggaccaccatgcaccccaacttccgtggttccggctttgcctttgagcgtttcgtcattgagcctcaaggtcttttcttggccactttcttgaacgccggcaaactaacgttggtggttaccgaaggggtctaatgggaagaggtattccgggatgcgccgagacgttcatggagtcaccggtatttggagaaggtcaaggtcagggtcagagtcaagggttccgtgacatgcaccagaaagtagagcacctacggtgcggtgacaccattgcaacaccatctggtgtagctcaatggttctacaacaatggaaatgagcctctcattcttgttgcagccgcggatcttgccagcaaccagaaccagcttgaccgcaaccttagaccaattttgatagccggaaaca

SEQ ID NO: 142072 - DNA, 394 bp, Arabidopsis thaliana
cttatctctatatacccccttttaatttgtgtgctcttagcctttactctatagttttataggatatcaatcgacatggcgaatgtggaccgtgatcggcgtgtgcatgtagaccgtactgacaaacgtgttcatcagccaaactacgaagatgatgtcggttttggtggttttggcggttttggggctggttctgattataaaagtcgcggcccttccattaaccaaatttgggcactatatagcaggagttccaattgtgggcacactgttaacctagctggactcactctagccggttcggggatcgggttgctagagtccatacccctctttctcctctttagagccgtgatagatccggcgggtctcactatttggcttgttgtgacag

SEQ ID NO: 142073 - DNA, 463 bp, Arabidopsis thaliana
gccatgtgtgggactagcaatggtgtagctgggtgtagcctaagggtctcaaggacaatgttctttagatatggtagctcgctaagatctgcttcttcgataagccggtctaaaccaacccggttatcgatttcgtctctcgctttagatattacgtcaggatggttaagcaaattggaaagtgcccattctagagtgactgctgatgtgttagtccctgctattaccattatctgcattaacataataacatcagacaatttatcttacttataatcaaagttaacaaaagatctaataattaatagaaaaaaataaaggaagaagaaataaaccagtatgatgcctttgatgatttgatcagtgtaatactcaatatcagaattttggaggacaagcaaatgatcgatcattgtagtaccggtttcttgttgcccacgtttatcgtcaatgagaccttgta

SEQ ID NO: 142074 - DNA, 461 bp, Arabidopsis thaliana
gaaagacgacattaaaagaaaaaagaaaaaaaacagacgagataatggagagatctacgctcaaacgaacatcgagttttccagatattgaggctgttcaggggtgttcgactttgaatttgctgccaaaagccggatctagatctacgctcaaacgaacatcgagtattcctgattttgagcctgttaagtctctgcgttcgactttgattctgcagccaaaagccggatctccattgctgatgctgattgcagaagagtatggttgtcgtatttacaacccagaagatggtagggtttacgagccgaagagtgacttttcagggtatcgattcctgggaagctcaagtaagtggtttctggtggtagattctcgaatgaaactctatattatagatgtatttagcgagaagaggatcgatcttccaccactagaatcatttaagggtagccattttaag

SEQ ID NO: 142075 - DNA, 465 bp, Arabidopsis thaliana
aaacaaaaagaaaatggttaagctcagcaatctcctcgttgcaaccttcggggttctcctcgtccttaacggctgccttgcgaggcagtcacttggggttcctcctcagctacagaacgagtgtaacctcgacaacctagatgttctccaagccaccgaaactatcaagagtgaagccggtcagatcgagtactgggaccacaaccaccctcagctccgatgtgttggtgtttccgttgctcgttatgtaattgaacaaggcggtctttacttgcccaccttcttcacttccccaaaaatttcctacgtcgttcaaggaacgggtatcagcggaagagtggtccctggatgtgccgagaccttcatggactcgcagccgatgcaaggacaacaacaaggccaaccatggcaaggacgacagggacaacaaggccaaccatgggaaggacagggacaacagggaca

SEQ ID NO: 142076 - DNA, 305 bp, Arabidopsis thaliana
gaaaatggttaagctcagcaatctcctcgttgcaaccttcggggttctcctcgtccttaacggctgccttgcgaggcagtcacttggggttcctcctcagctacagaacgagtgtaacctcgacaacctagatgttctccaagccaccgaaactatcaagagtgaagccggtcagatcgagtactgggaccacaaccaccctcagctccgatgtgttggtgtttccgttgctcgttatgtaattgaacaaggcggtctttacttgcccaccttcttcactttcccaaaaatttcctacgtcggtc

SEQ ID NO: 142077 - DNA, 280 bp, Arabidopsis thaliana
tcccgccacgacccacgcgtaccaagagtgttcattgaaaatttcaagaaccctagttaataacgataatgggttcgagagttttggcttccttctttgttttcttaatcttcacggtcatcacattgcctcccacgatccaagcttgcactccttgtactcgtcctcatcctccggttccgaaacctccacaacacggcggtggtggaggtggtggtagcaagccgcctccacatcacggtggaaaaggtggtggtaaacccccaccccacggtggaaa

SEQ ID NO: 142078 - DNA, 183 bp, Arabidopsis thaliana
gttttatatcatagtcaatcgtctttgcatatgtagagccattataatgtggatgcatgattaccggacacacctattcttctatgaacaaaacttcttcacaccttcaccaaattctttgacttcaaaaatcttataaaatttatatatctccaaaaccataaaaccaaaacgagttttcac

SEQ ID NO: 142079 - DNA, 462 bp, Arabidopsis thaliana
cggaaagccactggtgatcgaggaagtggaggttgctccaccgcagaaacacgaagttcgtatcaagattctcttcacttctctctgtcacaccgatgtttacttctgggaagctaagggacaaacaccgttgtttccacgtatcttcggccatgaagctggagggattgttgagagtgttggagaaggagtgactgatcttcagccaggagatcatgtgttgccgatctttaccggagaatgtggggagtgtcgtcattgccactcggaggaatcaaacatgtgtgatcttctcaggatcaacaccgagcgaggagggatgattcacgatggtgaatcaagattctccattaatggcaaaccaatttaccatttccttgggacttccacgttcagtgagtacacagtggttcactctggtcaggttgctaagatcaatccggatgctcctcttgacaaggt

SEQ ID NO: 142080 - DNA, 260 bp, Arabidopsis thaliana
cggtccgggattcccggcacgccacgcgtacagatagagctaaaagaagagcgtcttcataaacgcccttcttcttcttcgtcttcttccctgcaaatctagtttctagatcttttctttcttccgcgaaacgaaaatgagagagtgcatttcgatccacattggtcaggccggtatccaggtcggaaatgcttgctgggagctttactgtcttgaacatggcattcagcctgatggccagatgccgagtgacaagactg

SEQ ID NO: 142081 - DNA, 127 bp, Arabidopsis thaliana
acgaagagtttcattgaaaaggcagagaaccctagttagttacgttcttaccaacgctgagcatctaccgcaccgtcgttgagttcgaagaagatgacgccactaaccccataggcccaaacatgag

SEQ ID NO: 142082 - DNA, 311 bp, Arabidopsis thaliana
aacgtgttcatcaggcaaactactaagatgatgtcggttttggtggctatggcggatatggtgctggttctgattataagagtcgcggcccctccactaaccaaatcttggcacttatagcaggagttcccattgtaggcacactgctaaccctagctggactcactctagccggttcggtgatcggcttgctagtctccatacccctcttcctcctcttcagtccggtgatagtcccagccgctctcactattgggcttgcttggacgggaatcttggccttctggttggttgggttgaccggtctgagc

SEQ ID NO: 142083 - DNA, 428 bp, Arabidopsis thaliana
gaccgccgcatcatggtggaggaggaggaggaggttggaaatcaccgccggttgttagggctgcttccgtagtggtgagggcgccgtcaatcataagacctcctccggtcgtctatccaccaccaattgtgaggccaccgccaatcacaagacctcccatcataatccttccaattcaaccaccgtcggttacaactccttcgggactcctccctccgatcacaactccttcgggacttctcccttcagtcacaactcctccgtgacttctccctccagtcacaacttctccaggacttctccttccaattattaacccaccttcggtcacagttccaccaccatcgtccggctatccaccatatggtccacttttcggtggaggaggaggaggctgtttcaaacaatcaacgtgtccgatcaatgca

SEQ ID NO: 142084 - DNA, 464 bp, Arabidopsis thaliana; identical to SEQ ID NO: 129984

SEQ ID NO: 142085 - DNA, 397 bp, Arabidopsis thaliana
ctgaaacaagtatataattccatctcttcaatatctataaaaaaaactctctaagaaaaaaaaaatcaaaaaccaaaaagaacttcacatactcagagaggtagagagtgttacatccagctgcattaacctcacgcttgccaatattttcctgagaatcaaaacagaaaaatcaaagtattattggttaattttccttcggaaaatactcagaggagagaatcagaagttaccggaggtgaagcgtaggattcgaaagcaaaaccagcgagaataacggcgagattgatatcgaacggagaacgttcatctttctcaggtaaacttacttccttcgtttctgattgagcgaagcaacggagcgaattaggtttagctctgagtctgaaagtgattt

SEQ ID NO: 142086 - DNA, 466 bp, Arabidopsis thaliana
aaaaagaaaatggttaagctcagcaatctcctcgttgcaaccttcggggttctcctcgtccttaacggctgccttgcgaggcagtcacttggggttcctcctcagctacagaacgagtgtaacctcgacaacctagatgttctccaagccaccgaaactatcaagagtgaagccggtcagatcgagtactgggaccacaaccaccctcagctccgatgtgttggtgtttccgttgctcgttatgtaattgaacaaggcggtctttacttgcccaccttcttcacttccccaaaaatttcctacgtcgttcaaggaacgggtatcagcggaagagtggtccctggatgtgccgagaccttcatggactcgcagccgatgcaaggacaacaacaaggccaaccatggcaaggacgacagggacaacaaggccaaccatgggaaggacagggacaacagggacaacaag

SEQ ID NO: 142087 - DNA, 456 bp, Arabidopsis thaliana
aacaaaaagaaaatggttaagctcagcaatctcctcgttgcaaccttcggggttctcctcgtccttaacggctgccttgcgaggcagtcacttggggttcctcctcagctacagaacgagtgtaacctcgacaacctagatgttctccaagccaccgaaactatcaagagtgaagccggtcagatcgagtactgggaccacaaccaccctcagctccgatgtgttggtgtttccgttgctcgttatgtaattgaacaaggcggtctttacttgcccaccttcttcacttccccaaaaatttcctacgtcgttcaaggaacgggtatcagcggaagagtggtccctggatgtgccgagaccttcatggactcgcagccgatgcaaggacaacaacaaggccaaccatggcaaggacgacagggacaacaaggccaaccatgggaaggacagggacaa

SEQ ID NO: 142088 - DNA, 460 bp, Arabidopsis thaliana
cactcgccaaaaaccttgaaacctttaaaaaatcgaaactatggctaagctcattctcgttttcgcaactcttgccctcttcatcctcctagccaacgcatccatctaccgcacagtggtggagttcgaggaagatgatgacgtgagcaacccacaacaaggtaagtgccagagggagtttatgaagcatcagcaactaagaggttgcaagcaatggatccgcaagagagctcaacaaggaagaatcggatacgaagctgatgactttgagctcactcttgatgtcgatcttgaggacgatgagaacccaatggggcctcaacaacagtcatctcttaaaatgtgttgtaatgaattaaggcaagtggacaagatgtgtgtgtgtcctacactgaaaaaggcggctcaacaagtcagattccagggaatgcatggacagcaacaggtgcaacatgtgttt

SEQ ID NO: 142089 - DNA, 406 bp, Arabidopsis thaliana
tatttctcacattttcgtagccgcaagactcctttcagattcttacttgcagctatgggtaaagagaagtttcacattaacattgtggtcattggtcatgttgattctggaaaatcgaccacaactggtcacttgatctataagcttggtggtattgacaagcgtgtcatcgagaggttcgagaaggaggctgctgagatgaacaagaggtccttcaagtacgcatgggtgttggacaaacttaaggccgagcgtgagcgtggtattaccatcgatattgctctatggaagttcgagaccaccaagtactactgcacagtcattgatgccccaggacatcgtgatttcatcaagaacatgattactggtaccttccaggctgattgggctgttcttatcattgact

SEQ ID NO: 142090 - DNA, 457 bp, Arabidopsis thaliana
aaaaaagcaactgccgctctttcttctttcttactgtctcagatccgccattgttacttcttcagttcttcttcttcaacaacaacaagaagtaataattagggttgagaaacttcgaattccgaaacaacagagagacgtactagttttagccatcttcttttcttagtttcatcgaacttggtgttacctcaataggtcgacgctcaaatcttgcttattctctggtttttagagcttcttttagattctttcgacatgccagccagcaaaaagatttcggaccggaatcacttagggcaagtgttcgacaagctattgaatcagattggagaatctgaagaattcgagttaccgggagggttgaataaaggaaaacctactccttatatcttcatcaggcgcaatatatacttgacgaagaaagtcaaaaggaggggtgaagatgatggaatct

SEQ ID NO: 142091 - DNA, 376 bp, Arabidopsis thaliana
  unsure (1)..(376): unsure at all n locations
attcgtgccacacaacttgtagtcaccataacaggaaatgtcctcaaggttgaaagatggtatagagctagggatcgatccttgtccttcggngttttcaaggtttattcatcaggattcctcaagaaccaaaacggatttattcttcaaaggtcaatggttcttaccaagtttcactcatacatgatgttgatctcaacaatgttttttatatataaaaaaatcattatatattttaatgatgatctcagtttatatttttggaaaacgatctatttcacccttacaagtttcacatagcataaaatatgattaatagataaattcattgagtttaacagtaatttgccnntaaaaaaataaaaattttaaaatt

SEQ ID NO: 142092 - DNA, 462 bp, Arabidopsis thaliana
gtcggggttttatagcccacgtgtttcgtgtcgtgttatatcggattcgggttagaaaccctacccaaagagtaagtaggcagaaagaattatcacgagtcatgtgtttggtaaaacgtaatgtgttatgtggacttagtcatataatgatttcgtttccttttcttctttgtttctagaataaacacattacaaaagattactacaatttttatttaatccaattattatgtgaatatatcgatagagagacaatatttgcaaaactgttgaaaaagtaaaacaataaccaaaagtttttcaaaatctagacctatatttgcttcaaactaatttttttagcaagggacattggcaaacatttgattctgaacaaacgttttagattacattggaagaccagtttggcttcattctcgcatcaaaggaagaaagacgtatttagttttctttttattttcg

SEQ ID NO: 142093 - DNA, 468 bp, Arabidopsis thaliana
cagaaggtggaacatgtgagacgcggagacgtctttgccaacactccaggctctgcccactggatctacaactcaggagaacagccacttgtcatcatcgctcttctcgacatcgccaactaccaaaaccaactcgaccgcaaccctagagtgttccatttggccggaaacaaccagcagggaggctttggcggttcacagcaacaacaagaacagaaaaacttgtggagcgggttcgacgcacaggtcatagctcaagcattgaaaattgacgttcagttggctcagcagcttcagaaccaacaagacagcagaggaaacatcgttcgtgttaagggacctttccaggtcgtgaggccacctctaagacagccctacgagagcgaggagtggagacacccacgtagcccacagggcaacggccctgaggagactatctgcagcatgaggtcccacgagaacattgac

SEQ ID NO: 142094 - DNA, 444 bp, Arabidopsis thaliana
gaattcagatattttttttaaaattttttgagaggaagaaatggagatttcgcagagagtgaaagctagattagccgttctcaccgcgcatttggcggtgtctgataccgtcggattggaacaggtgttgccggcgatcgcgccatggtgtacatcggctcacattaccgctgcacctcatggatcactcaaaggaaacttgacgatcgtcgatgagcgtacggggaagaaatatcaggtccctgtctcagagcatggtaccgttaaagccgttgatctcaagaagataacgacggggaaggatgataaggggctgaagttgtacgatcctggttacttgaacacggctccggttcgatcttcgatttgttacatcgacggagatgaaggaatcttacgttatcggggatacccaattgaagagttggctgagagcagtacttt

SEQ ID NO: 142095 - DNA, 455 bp, Arabidopsis thaliana
caccacattattttcactgagcgcataacatttttgagacaagagactctctctctctctcttctctctttctctccccctctctccggcgatggttgttgctatggaccaacgcaccaatgtgaacggagatcccggcgccggagaccggaagaaagaagaaaggtttgatccgagtgcacaaccaccgttcaagatcggagatataagggcggcgattcctaagcactgttgggttaagagtcctttgagatcaatgagttacgtcgtcagagacattatcgccgtcgcggctttggccatcgctgccgtgtatgttgatagctggttcctttggcctctttattgggccgcccaaggaacacttttctgggccatctttgttctcggccacgactgtggacaatggagtttctcagacattcctctactgaataggggtggtggtcacattc

SEQ ID NO: 142096 - DNA, 461 bp, Arabidopsis thaliana
aacaaaaagaaaatggttaagctcagcaatctcctcgttgcaaccttcggggttctcctcgtccttaacggctgccttgcgaggcagtcacttggggttcctcctcagctacagaacgagtgtaacctcgacaacctagatgttctccaagccaccgaaactatcaagagtgaagccggtcagatcgagtactgggaccacaaccaccctcagctccgatgtgttggtgtttccgttgctcgttatgtaattgaacaaggcggtctttacttgcccaccttcttcacttccccaaaaatttcctacgtcgttcaaggaacgggtatcagcggaagagtggtccctggatgtgccgagaccttcatggactcgcagccgatgcaaggacaacaacaaggccaaccatggcaaggacgacagggacaacaaggccaaccatgggaaggacagggacaacaggg

SEQ ID NO: 142097 - DNA, 461 bp, Arabidopsis thaliana
cccttttaatttgtgtgctcttagcctttactctatagttttatatcatatcaatcgacatggcgaatgtggaccgtgatcggcgtgtgcatgtagaccgtactgacaaacgtgttcatcagccaaactacgaagatgatgtcggttttggtggctatggcggttatggtgctggttctgattataagagtcgcggcccctccactaaccaaatcttggcacttatagcaggagttcccattggtggcacactgctaaccctagctggactcactctagccggttcggtgatcggcttgctagtctccatacccctcttcctcctcttcagtccggtgatagtcccggcggctctcactattgggcttgctgtgacgggaatcttggcttctggtttgtttgggttgacgggtctgagctcggtctcgtgggtcctcaactacctccgtgggacgagtgat

SEQ ID NO: 142098 - DNA, 466 bp, Arabidopsis thaliana
gtctaaagaaggagagggagagagtggctcactacctacactcaagcagtgagccaaagctggttgagaaagtacaacatgaattgctggttgtgtttgcaagtcaacttctagaaaaagaacactcagggtgccgtgcattgctaagagatgacaaggtggatgatctctccaggatgtataggctttaccataaaattttgcgaggcttggaacctgttgcaaacatctttaagcagcatgtcacagcagagggtaacgctcttgtccaacaggccgaagacacggctactaatcaggttgcaaatactgctagcgtccaggaacaggttcttatcagaaaagtgattgaacttcatgataaatacatggtatatgtcaccgagtgtttccagaaccacaccctcttccataaggctttgaaagaggcatttgagatttttgtaacaaaacggttgctggaagt

SEQ ID NO: 142099 - DNA, 411 bp, Arabidopsis thaliana
caacaaatattaaaccatgtactaggggctgcactactcaacctaaatggccgcctcaacaagggctctgtccttccgtgccttcgtcgggaaggccgtgacgctgtccgccgcggcatatgaagtccttggaagcggccgtgtgacaaggaggaagactgttgccaagccaaagggcccatcaggcagcccatggtacggatctgaccgtcacaagaactaggggacattctctggcgaatcaccgagctaccttaccggagagatccccggagactacggatgggacaccgccggacatttagatgaccccgagacattcgcaaggaaccgtgagctagaagttatacacagcaggtgggctatgctcggagccctaggctgggtcttccctgagcttttggctaggaa

SEQ ID NO: 142100 - DNA, 454 bp, Arabidopsis thaliana
  unsure (1)..(454): unsure at all n locations
ggagatgttgaatccgggtagaagcgatgaatcaagaagctattcgcaggcagagatgtcggttcatgatgggaagctcagaaccagaaatgaggcggaagaagactggttcatacgtaaccaagctggtccagaaacagatccaagtcttgtcaaaacatttgtaggagaccatttccacttaaataagagcagtgagagagatgtcctgaccgatgactctttcatgatccattctcgtgttgagaaccaagtagaagattctcggttaaggacagaaatcatggacttagacgtttacggaaccacccaacaagaaaacagtgccccggagaacactccgcatgaaccagatgacctatacatggttcttggacgggaacangatgttaaacctacattgttaccatggacccctgaaattgactttgagactaacactttggctcaaaga

SEQ ID NO: 142101 - DNA, 456 bp, Arabidopsis thaliana
tacacacatagcaaaaaatggcaaacaagttgttcctcgtctgcgcagctctcgctctctgcttcctcctcaccaacgcttccatctaccgcaccgtcgttgagttcgaagaagatgacgccactaaccccataggcccaaaaatgaggaaatgccgcaaggagtttcagaaagaacaacacctaagagcttgccagcaattgatgctccagcaagcaaggcaaggccgtagcgatgagtttgatttcgaagacgacatggagaacccacagggacaacagcaggaacaacagctattccagcagtgctgcaacgagcttcgccaggaagagccagattgtgtttgccccaccttgaaacaagctgccaaggccgttagactccagggacagcaccaaccaatgcaagtcaggaaaatttaccagacagccaagcacttgcccaacgtttgcgaca

SEQ ID NO: 142102 - DNA, 454 bp, Arabidopsis thaliana
aatgggtgttcatggtgacagcgcaaactccgacgaacattgcggtgattaagtattggggaaagagagatgaagtccggattctccccgttaacgatagcattagcgtaactcttgatcctgatcatctctgcacagtcactactgttgccgttagtcctgcttttgatcgggatcgaatgtggctcaatggcaaggaaatatctctttctggaagtaggtaccaaaattgtttgagggaaatacgaagtcgtgctggtgatgttgaagacatggaaaaggggatcaagataaggaagaaagattgggagaaattgaatctacatattgcttctcataataacttccctactgctgctggcttagcatcttcagctgctggatttgcttgtctagtttttctctcgcaaagttgatgaatgtagatgaagaccaagccatctttctgcaatag

SEQ ID NO: 142103 - DNA, 452 bp, Arabidopsis thaliana
cttgattcatctgcccctgaggaattgccaaaccatctgactcttcacacattccaatatgaagggttagtcaatcaaataatagataggaaatgcgtcggtttgaaaataaatgaattgcttgtcgtagaatattactctcgacagacttaataaacctaacttaagtaaaaaaaaaaattactaaaaacaagagttcggacaactccccttttccattaaaaataaaaaggcacaaggtaagggattttgtcaaagaatatttttcctattcatgtatcatagattggtagggagattgggatcccttgtttgctcttcccagcattttccatatgaaagaaattaggaatagagaatctatttcaaaatcaaaacaaggtagatcttatatcgattcttttttattggatttgatacattgtggtcaatcacgtaagattggtgaattt

SEQ ID NO: 142104 - DNA, 183 bp, Arabidopsis thaliana
aaaataatgagggtttctaacgcagtcgcattcggtcgttgtatgtgtgctttttatgtatgtacgtcctgcgatgtgtgttgtttacttacatgagtgtgtaatgagcatctggctctttttatgttctgagatgtttgtgttatgtaatttcatatctatataaatctactttcttctgct

SEQ ID NO: 142105 - DNA, 463 bp, Arabidopsis thaliana
caaaaagaaaatggttaagctcagcaatctcctcgttgcaaccttcggggttctcctcgtccttaacggctgccttgcgaggcagtcacttggggttcctcctcagctacagaacgagtgtaacctcgacaacctagatgttctccaagccaccgaaactatcaagagtgaagccggtcagatcgagtactgggaccacaaccaccctcagctccgatgtgttggtgtttccgttgctcgttatgtaattgaacaaggcggtctttacttgcccaccttcttcacttccccaaaaatttcctacgtcgttcaaggaacgggtatcagcggaagagtggtccctggatgtgccgagaccttcatggactcgcagccgatgcaaggacaacaacaaggccaaccatggcaaggacgacagggacaacaaggccaaccatgggaaggacagggacaacagggacaa

SEQ ID NO: 142106 - DNA, 463 bp, Arabidopsis thaliana
  unsure (1)..(463): unsure at all n locations
gaagagtgagaacttgttcgagtcccagggtggtcccattatcctttctcagattgagaatgagtatggaagacaagggcagttattgggcgctgaaggtcacaactacatgacatgggcagctaaaatggctatagcaactgagactggtgtcccgtgggtcatgtgcaaagaagacgatgcccctgaccctgtgataaacacatgtaacggtttctactgtgattcatttgctccgaacaagccatacaagcctttgatatggacagaggcatggagcggctggttcactgagttcggtgggccaatgcaccatagaccagttcaggatctggcgtttggtgttgcacgtttcatacaaaaaggaggatcttttgttaactactacatgtatcatggaggaactaactttggaagaacagncggaggtccatttgtcaccaccagctatgattatgatgct

SEQ ID NO: 142107 - DNA, 457 bp, Arabidopsis thaliana
cgcatttagcgttgttttgaagctctctctttcaaattctgttcgtctctcgcgatctctctctctctcagatagctccgaaactttcacgcagagttaagtgaagcaggatgggattgtcattcgccaagctttttagcaggctttttgccaagaaggagatgagaattctgatggttggtcttgatgctgctggtaagaccaccattttgtacaagctcaagctcggagagattgtaaccaccattcccactattgggttcaatgtggagactgtggagtacaagaacatcagtttcacagtgtgggatgtcggcggtcaggataagatccgtcccttgtggaggcattacttccagaacacccaaggtcttatctttgtggtggacagcaatgacagagacccgtgtgttgaggctagagatgaattgcaccgaatggtgaatgaggacgagct

SEQ ID NO: 142108 - DNA, 464 bp, Arabidopsis thaliana
gttccttctcttcttcgatcagacgattcaatcgcttctcactcaaaccacttcgctccttcgcatccatgtcttcttcttcccccgacgctgctcagactcctctaaccaccgctccttatggctcctggaaatctccaatcaccgccgacatcgtttccggagcttcaaagcgtcttggcggcaccgccgtcgattctcatggccgtctcgtcttgctcgagtctcgccctaacgaatccgggagaggagttttggtgctacaaggagaaacatcaattgatattactccaaaagacttcgctgtgagaactttaacacaagaatacggtggtggtgctttccagatttcatcagatgatacacttgtgttctctaattacaaggatcagcgattgtacaagcaagacattactgataaagattcatctccaaagccaattactccagattatggtgcacca

SEQ ID NO: 142109 - DNA, 465 bp, Arabidopsis thaliana
accagcttgaccgcaacccaaggccattttactttttcttaaacaacccacaaggtcaagtatggctacaaggacgagagcaacagccacagaagaacatcttcaatggatttggacccgaggttattgctcaagctttgaagattgatcttcagacagcgcagcaacttcagaaccaagatgacaaccgtggaaacattgtccgagtccaaggcccgttcggtgtcattaggccgcctttgaggggccagagacctcaggaggaggaagaagaagaagaaggacgacacggacgacacggtaatggcttagaggagaccatctgcagcgccaggtgcaccgataacctcgatgatccgtctcgtgctgacgtgtacaagccacagctcggttacatcagcactctcaacagttacgatctccccatccttcgcttcatccgtctctcagccctccgtggatcta

SEQ ID NO: 142110 - DNA, 312 bp, Arabidopsis thaliana
ccgcgaccgcccaaaaaattctctgatcagacggtcgattggatcggagatttaaggtaaagaaaaaatggcgcaacaatcgttgatctacagttttgtagctcgcggcacggtgatcctcgttgagttcactgatttcaaaggtaatttcacctcaatcgctgctcagtgcctccagaagcttccgtcttcgaacaacaagttcacctacaactgcgacggtcataccttcaattaccttgtcgaagatggattcacctattgtgttcgtgcggttgattctgctgggaggcaaattccaatgtccttttt

SEQ ID NO: 142111 - DNA, 443 bp, Arabidopsis thaliana
ttgttcttgacaggaacttaacggtgactagagagcagagtttcagagatcgatttttggtttgtgattcacatatttgcaatgaattctaaaggagagattattggagagcttttgagtcagtgcagccactactgttcccaatttccggcaattctatgtaccaaagcaacatatgcattgacattgtataggattaagtagtaacaagctggacctaaccaatccggtttttccataaagttccggtttgcttggttatcgtgtgtaaacaaaaatagaacacaactttcagatttttcagtaaaaaaataaacagtttagttttctcattctgtttagtagacaataaaaccaagaaaaccaaactgatttatgcacaaatatcagttacaaccgttcatattcaaatgaaaatggaagctttgaacattgcaatgagc

SEQ ID NO: 142112 - DNA, 322 bp, Arabidopsis thaliana
gctcttttcttctctctgaagcgatgtcatcgacgtttcgagctcggcgggagccgtactggtttacgggatcaaagatcaactggaggctgccttgagatccttattctgtttctaggaagatatggaccgggggtccggtctcttcgttttgcggttcttgctattcaagccgctcactctgcagcctggactgaccaacgggcaaagcaaattatagggaggtatttataaggatcttgacgggagctttacaagctcaaagtacggtagcggcgttatcaagtcacggagtcaacgacacagagacgggggagactac

SEQ ID NO: 142113 - DNA, 544 bp, Arabidopsis thaliana
  unsure (1)..(544): unsure at all n locations
ccgtccgnnggcggtctttaactttgcccaaccttctttcacttttccccataaatatttcctacccgtcgttcaagggaacccgggtatttcagcggaaggaagtggnttccctcggatgnnngccgagacnncttcaatggactttcgcanngctcgatgcaaggggacccaacaactataggccaactcaatggcataggactgtacagggaccaacaaggctcaactcaatgggaagggaccagggaccaactagggaccaacataggaagaacataggccaactctatgggaaggggacagggaccaactagggaccaacatagtgtacgacagggaccaacaataggccaactcatgtggaagggaccagggaccacgcagggacaaacaaagggttctcgtgacaatggcaccagaagggtggaacaatgtgagaacgcggagacgtctttgccaacactccaggctctgcccactggatctacaactcaggagaacagccacttgtcatcatcgctcttctcgacatcgccaacta

SEQ ID NO: 142114 - DNA, 460 bp, Arabidopsis thaliana
caaaaagaaaatggttaagctcagcaatctcctcgttgcaaccttcggggttctcctcgtccttaacggctgccttgcgaggcagtcacttggggttcctcctcagctacagaacgagtgtaacctcgacaacctagatgttctccaagccaccgaaactatcaagagtgaagccggtcagatcgagtactgggaccacaaccaccctcagctccgatgtgttggtgtttccgttgctcgttatgtaattgaacaaggcggtctttacttgcccaccttcttcacttccccaaaaatttcctacgtcgttcaaggaacgggtatcagcggaagagtggtccctggatgtgccgagaccttcatggactcgcagccgatgcaaggacaacaacaaggccaaccatggcaaggacgacagggacaacaaggccaaccatgggaaggacagggacaacaggga

SEQ ID NO: 142115 - DNA, 445 bp, Arabidopsis thaliana
atcaatttgtgtttttctcatactttcattgaaatagccgctaaaacagtaaacacagacctccaaatcctgaagccaaacttttactttctcccgctgccgtctccttgcattgtcacctctatctactacttcttcggaaattagcttgttacattccataacaagttcaccattgcaattttcacaatgaaaagaatcgtcttccatagaaattaatctcagggcatccagtgcattatatctataccagaaatgagaatctatacaggtttagtgaaaataatacaactcaccatgtaaagatttaaaaacataaagaatagtggactttactttcttttgcagttaggacagccatactcctgaacagtaattctgtcttctagttcatctttgaactttttcttgagccggtgcagtttataacgaacaatatcatata

SEQ ID NO: 142116 - DNA, 455 bp, Arabidopsis thaliana
ccaaatctcatttcttcttcttcttctttttccacattttctgattagcagatcaaatgatgcttgttcgatctgtatttcgatctcagttgcgaccctctgtctcgggtggtctgcaatctgcttcttgctattcttcattatctgctgcttcagctgaagctgagaggactatcagagaaggtcccagaaacgattggagtagagatgaaatcaagtctgtttatgattctcctcttcttgacctcctcttccatggagctcaggttcatagacatgttcataacttcagggaggtacaacaatgtaccctcctctccataaagactggtggctgtagtgaagactgttcatattgtcctcaatcttcgagatatagcactggagttaaggcacaaagactcatgtccaaagacgctgtcattgatgctgctaagaaggcaaaagaagctggg

SEQ ID NO: 142117 - DNA, 464 bp, Arabidopsis thaliana
ctacaacaaccacaaagcaaaacacttacttagaaagtccagaaacatccattaacacatatggctaaagacgtggaaggacctgatggatttcagacgagagattacgaagatcctccgccaacaccgtttttcgacgcagaagagcttaccaagtggtctttatacagagcagtcatcgccgagttcgtagccactctcctcttcttgtacgtcaccgttttaactgtcattggttacaagattcagtccgacacaaaagccggtggagttgactgcggcggcgtcggaatccttggcatcgcgtgggcttttggtggcatgatcttcatccttgtctactgcaccgccggtatctcaggtggtcacataaaccctgcggtgacgtttggtttgttcttagcccggaaggtatcgctgattaaggcggtgctttacatggtggctcagtgtttgggtgctat

SEQ ID NO: 142118 - DNA, 462 bp, Arabidopsis thaliana
aaaatgggtcgagtctcatctattatctctttctctttgacactcttgatcctcttcaatggctacactgcccaacagtggcccaacgagtgccagctcgatcaactcaatgcgctcgaaccatcccaaatcatcaagagcgagggtggtcgcatcgaggtctgggaccaccatgcaccccagctccgttgctccggctttgcctttgagcgtttcgtcattgagcctcagggtcttttcttgcccactttcttgaacgccggcaaactcacgtttgttgttcacggaaggggtctaatgggaagagttattccgggatgcgccgagacgttcatggagtcaccggtatttggagaaggtcaaggtcagggtcagagtcaagggttccgtgacatgcaccagaaagtagagcacctacggggcggtgacaccattgcaacaccatctggtgtagctcaatgg

SEQ ID NO: 142119 - DNA, 432 bp, Arabidopsis thaliana
  unsure (1)..(432): unsure at all n locations
gttagagaaacgcggcgatctcttcctcctaaccttaaccggagacggcgaacacagattccaccccgacacaatcgccaccattctctcccttctcgaacaagccaaatctcaatccacccgtggatccatcctcatcaccaccgccagcggcaaattcttctccaacggattcgatcttgcatgggctcaaaccgccggatccaaaaccggagctgcaaaccggcttcaccaaatggttgaatcattcaaaccggtggtagcagcgcttctcgatctccctatgccgacgatcgccgccttgaacggtcacgccgtcgncgcggggttgattttggctttaagccatgattacgtgttcatgaggaaagatcgtggggttctgtatatgagtgaagttgacatcgggctttcgatgccggattatttctc

SEQ ID NO: 142120 - DNA, 445 bp, Arabidopsis thaliana
acttggtgtagaaggtattgagttacctatcttttggggagttgttgagaaagaagctgctgggaaatatgaatggtctgggtacttggcagtagctgagattgttaagaaagtgggacttaagcttcatgcttcactttctttccatggatcgaaacaaacagagataggtcttcctgattgggtggcaaagattggtgatgctgaaccagggatctattttacagatagatatggacaacagtacaaagattgtttgtcgtttgctgttgatgatgttcctgttcttgatgggaagactcctatggaggtttacagaggtttctgtgagagcttcaagtctgctttcgcagattacatgggcaacacaatcacgggaatcacattaggtttgggaccagacggtgagctgaaatattcttcttattaacataatgccaagctc

SEQ ID NO: 142121 - DNA, 453 bp, Arabidopsis thaliana
  unsure (1)..(453): unsure at all n locations
ctcaagcagaggctcgtttacttatgttttctcatatgaatctcttatctccagctattggagatcccatttcggtaccgactcaagatatgcttattggactctatgtattaacgagcggcactcgtcgaggtatttgtgcaaacagatataatccatgtaatcgaaaaaactatcaaaatgaaagaatttacgaaacaaactataagtatacgaaagaaccctttttttgcaattcctatgatgcaattggagcttatcgacagaaaaaaatcaatttagatagtcctttgtggcttcggtggcaattagatcaacgcgttattgcttcaagagaagttcctancgaagttcactatgaatcttttggtaactatcatgagatttatgcacactatctaatagtaagaagtgtaaaaaaagaaaatttttgtatatatattcgaaccacag

SEQ ID NO: 142122 - DNA, 454 bp, Arabidopsis thaliana
cagattcttacttgcagctatgggtaaagagaagtttcacattaacattgtggtcattggtcatgttgattctggaaaatcgaccacaactggtcacttgatctataagcttggtggtattgacaagcgtgtcatcgagaggttcgagaaggaggctgctgagatgaacaagaggtccttcaagtacgcatgggtgttggacaaacttaaggccgagcgtgagcgtggtattaccatcgatattgctctatggaagttcgagaccaccaagtactactgcacagtcattgatgccccaggacatcgtgatttcatcaagaacatgattactggtacctcccaggctgattgtgctgttcttatcattgactccaccactggaggttttgaggctggtatctctaaggatggtcagacccgtgagcacgctcttcttgctttcacccctggtgtc

SEQ ID NO: 142123 - DNA, 457 bp, Arabidopsis thaliana
ctaaaagaagagcgtcttcataaacgcccttcttcttcttcgtcttcttccctgcaaatctagtttctagatcttttctttcttccgcgaaacgaaaatgagagagtgcatttcgatccacattggtcaggccggtatccaggtcggaaatgcttgctgggagctttactgtcttgaacatggcattcagcctgatggccagatgccgagtgacaagactgttggcggaggtgacgatgctttcaacaccttcttcagtgagaccggtgcagggaagcacgtcccacgtgctgtctttgttgatcttgagccaactgtgatcgatgaggtcaggactggtacttaccgtcagcttttccaccctgagcaactcatcagcggtaaagaagacgcagctaacaatttcgcccgtgggcattacaccattgggaaagagattgtgatctgtgcttggacc

SEQ ID NO: 142124 - DNA, 459 bp, Arabidopsis thaliana
gcaaaccaaacgattctcgagtcattcgaagggtttgatcggatccacattgtcgatttcgatatcggttatggaggtcaatgggcgtctctgattcaagagctcgccggaaaaagaaacagatcttcatcagctccgtcgctaaagattacagctttcgcttctccttcaactgtctccgacgaattcgagctccgattcactgaagaaaatctcagaagcttcgccggcgaaacaggtgtctccttcgaaatcgagctcttaaacatggagattctcttgaatccaacttattggccactgtctttattccgatcatcggagaaagaagcaatcgctgtgaatctcccaatcagctccatggtctccggttacctcccattgatacttcgtttcctcaagcaaatctcaccaaacgtcgtcgtttgctcagacagaagctgcgaccgtaacaacgac

SEQ ID NO: 142125 - DNA, 425 bp, Arabidopsis thaliana
agaaaacatgcgcgaatagataaacacggttaacatgctctgcctcgtctgctcaacatttggcctctggatccttcttaccaacgcgtgcatcgaccaggaccgagggcgtattcgaagaagatggcgccggccgccctgcaggtccaagacagaggtgccaggcggagctgcagcgatcacagcatctaagcgcttggcagagatggatgagcaagcgaatgatgcaaggacgggcggggggtccaacacttgacgaagagagaccggtgcagggcagcacgtacggataccagctactgcagcagtggtgcaacgagctatcgcaggaagagccagctggcgcttgccgcaccttgaaacaagctgacagggcagttagcctacaaggacagcacggaccattccaatccaggaaaatttac

SEQ ID NO: 142126 - DNA, 460 bp, Arabidopsis thaliana
catcacaaacgagtaagaatccaaatccaaatagcaaaaataatggcaaacaagctcttcctcgtctgcgcaactttcgccctctgcttcctcctcaccaacgcttccatctaccgcactgttgtcgagttcgacgaagatgacgccagcaaccccatgggcccaagacagaaatgtcagaaggagtttcagcaatcacagcacctaagagcttgccagaaattgatgcgcatgcaaatgaggcaaggccgtggtggtggtccctccctcgacgatgagttcgatttggaagacgacatcgagaacccacaaggcccccagcagggacaccagatcctccagcagtgctgcagcgagcttcgccaggaagagccagtttgtgtttgccccaccttgagacaagctgccaggggccgttagcctccagggacaaccacggaccattccaatccaggaaaat

SEQ ID NO: 142127 - DNA, 459 bp, Arabidopsis thaliana
taaacatatatattatatgttaaatatttagtataatatggctctagtattatttttcaatatatattaattctttatagagttcaattttaatatttttactacatcaaaaaaaaaaattgtttttttttaaactcaataaatgtattctatttgtaattaatttagaaagattattgattataggggtgtcagaataggttaagattcatgggtcaactcatcttaacttaattcaattcatgaattctgatgggttgaaatttttgactcaaatgggttgattgatcaaatgagttattgggtcaaatggttttatgaatgaaatgagttgggttgtaatgagtcaatgatttatctatttaaacccatcaatttttgtaaaattgaatcaaaccaagttaaatctctaaaccaatgttaatttgagtttaaccaaaatctataaaccaattgaat

SEQ ID NO: 142128 - DNA, 465 bp, Arabidopsis thaliana
gttctaacaaatggagttcactaccttgtgttcataaaggaatccttcgatcgaaacttcaaatcaaaaaggatgaaggataaaaacctatattgtataaatttaggtaacacaaaacgatctcaaaaatgacgacctgaatctcgatttctatttttttataaacaaaatcaaaatgttgtgaatcaattcgaagtttaagaaataatatttcttgattaaaataaaattattcacttcatagtctgatagatccttgatggaacttaattaatcggacgagaataaagatagagtcccattttacatgtcaatactgacaacaatgaaatttatagtaagatgaaaatccgttgacttttaaaatcgtgagggttcaagtccctctatccccagctctactccccgaaaaggttgacaccttacctttttttcgttattatttatttgaattatttataatct

SEQ ID NO: 142129 - DNA, 456 bp, Arabidopsis thaliana
ccattttcttcaaaacgattcgggtcaaggttattgactttctcattcagtgaagcttgaatcatggcctcgagaattgctaaagatgtgactgaattgattgggaacactccattggtgtatttgaacaatgttgctgaaggatgtgttggtcgtgttgctgctaagcttgagatgatggaaccgtgctctagcgtcaaagacaggattggttttagcatgatttctgatgcagaaaagaagggtcttatcaaaccaggagagagtgtgctgattgagccaacaagtggaaacactggagttgggttagcattcacggcagctgccaaaggctacaagcttattattacaatgccagcttctatgagtactgagagaagaatcattctcttagcttttggaggtgagtggtttaactgacccagctaagggcatgaaaggagctatcgcaaaggc

SEQ ID NO: 142130 - DNA, 433 bp, Arabidopsis thaliana
aaaatgggtcgagtctcatctattatctctttctctttgacactcttgatcctcttcaatggctacactgcccaacagtggcccaacgagtgccagctcgatcaactcaatgcgctcgaaccatcccaaatcatcaagagcgagggtggtcgcatcgaggtctgggaccaccatgcaccccagctccgttgctccggctttgcctttgagcgtttcgtcattgagcctcagggtcttttcttgcccactttcttgaacgccggcaaactcacgtttgttgttcacggaaggggtctaatgggaagagttattccgggatgcgccgagacgttcatggagtcaccggtatttggagaaggtcaaggtcagggtcagagtcaagggttccgtgacatgcaccagaaagtagagcacctacgaggcggtgacacca

SEQ ID NO: 142131 - DNA, 437 bp, Arabidopsis thaliana
tccaaattaaaagcaacttacttaattacatatcgttcgtgtttttttcttcaaaaaatggcgtcaaagcaactgagcagagaagagcttgatgagaaggcgaagcaaggagagaccgtcgtcccaggtggcaccggtggccacagcctcgaagctcaagagcatcttgctgaaggaaggagcaagggagggcagacgaggaaggagcagctaggacatgaaggttatcaggagatcggtcacaaaggtggagaggcgaggaaggagcagttagggcacgagggttatcaggagatgggtcacaaaggtggagaggcgaggaaggagcagctagggcacgagggttttcaggagatgggacacaagcaacttattagtggtaaagaagactcagctaacaatttttgtccgcgggcattacaccattgggaaagaga

SEQ ID NO: 142132 - DNA, 449 bp, Arabidopsis thaliana
acgaacttctacatcatttctcttttctctcatctctcggtgaattcgaggatcctcgagctttttgatcggagactttttatctcatcgtcgttgtttgaattctccggctgagagatgcttgcttgacgacgaacctccaccgatcttttaccttttcgcacaacaagtaagagaaggatgtcgactccagcgaggaagagattgatgagggatttcaagaggttgcagcaagacccacctgcaggaattagtggtgctccacaagacaacaatatcatgttgtggaatgcggttatattcgggcctgatgataccccttgggatggaggtactttcaaattgtcactgcagttttcggaagattatccaaataaaccacccaccggttcggtttgtttcacggatgtttctattcaatcattttatgttgtttgcaggatatcgct

SEQ ID NO: 142133 - DNA, 455 bp, Arabidopsis thaliana
agagtatctctctcacacacatacacaaacttgacagttttttaatttctctgttagtgaactcaaaccttcccatttccatggacaccaaaatcggatcgatcgatgattgcaagccgacgaacggcgacgtctgtagtccaacaaacggcaccgtcgcaacaatccacaactctgttccttcctccgctatcaccatcaactactgcgacgcgactctcggccgtcacttagctcgtcgtctcgtccaagccggcgttacggatgttttctctgttcccggagatttcaacctcactttgcttgatcacctcatggctgagccggacctcaacctaatcggatgttgtaacgagctaaacgccggttacgctgccgacggttacgctagatctcgtggagtcggcgcttgcgttgttaccttcaccgttggtggacttagcgttttaaacgcg

SEQ ID NO: 142134 - DNA, 362 bp, Arabidopsis thaliana
gtgagtcaaagagccataggttcaagggtccatgtgtgagcacacacaactgtgcaaacgtgtgccacaacgaaggcttcggcggaggtaaatgccgtggattccgtcgtcgttgctactgcacaagacactgctgatccatccattctcatgactcaaatcttcgatccatcgtcagtgtgttacttctttcttatctaaatcttccgtacggtaccatgtcgtaccgtacatgagtgttttctcaaataagtcgttggtttgtgtgtttccggttttaatgtaatgttaaatcaattaatggcttttaatatattgtattatggatctcaatctaaaagtttttaataaccggagtctgc

SEQ ID NO: 142135 - DNA, 461 bp, Arabidopsis thaliana
gaagagatgaatattcaattgaaaaaaaaaagaaagaaattctttcgttttttcttcctactgccaaagcatttaattaattcatttcaaaatacttcaattggtacacgcaagaagtaagccaattcagcagctttttgctcaatttctcgtgtagtaaaattctcatcagtacgaattaaaggaatagccccttgacctcgaatttccatataaaggacacgccgggcagaaacaccctctttaacttctattctgatggactgaatatctttcataaagaatcgtaaaaagatgcgacgactttttccaggaaatccccaacgaaaaatacgcactattccttcttttcggtcgaaaagatcataaccactacccacattccacaaaatagtgcaccacaaatagcaactaataaagagacctgcgatcccatagaaagacatcacaatcccttgtgg

SEQ ID NO: 142136 - DNA, 304 bp, Arabidopsis thaliana
tcgggaatctatggaggaaatcaaacacttctgattgttaacgagatccatgagaatgaggctgattacgacaaaacgcaaggtagcgaatcgaaggagaaggagaaagcaaggaaccagacacaatcccactgctaaagaaaaaatgatgatttagtgtctttgctctttatgctttaataaaatcagacttgtgctctgtagttcgtagactctggttagagttttttttttgttaattgcgttttttgacccgtaacctttaccgggtttttgttggttatctctatcacttttgtaacat

SEQ ID NO: 142137 - DNA, 461 bp, Arabidopsis thaliana
tttgaaatttggtaggccgtcgattattagttcttcggttacacgataatgtaaacaaatccatatcatcacattaatgttactattcatattttataattagccaatgaattatcttgtttttcttttgctctaaaataacgaaaatatggaatcaaactgaatgaaatatttctaagtcattttcaaagcttcacaaaatagtgatcactgcagaaaatattaaaaaaatacactcgatcggataaaaataatcgtggaagttagttcgggaaaaaagaaggctcactatcgtatcgcgtggagttgtctagagcacatgggtcagacaattctttcgcaattatatattacgtatttgttatatatgtgtaacccatgtatgtgaatcacacaagtgcataatatataatatagtatttttctcaaacatctatattatctatctacacacgtaagta

SEQ ID NO: 142138 - DNA, 465 bp, Arabidopsis thaliana
aaaaagaaaatggttaagctcagcaatctcctcgttgcaaccttcggggttctcctcgtccttaacggctgccttgcgaggcagtcacttggggttcctcctcagctacagaacgagtgtaacctcgacaacctagatgttctccaagccaccgaaactatcaagagtgaagccggtcagatcgagtactgggaccacaaccaccctcagctccgatgtgttggtgtttccgttgctcgttatgtaattgaacaaggcggtctttacttgcccaccttcttcacttccccaaaaatttcctacgtcgttcaaggaacgggtatcagcggaagagtggtccctggatgtgccgagaccttcatggactcgcagccgatgcaaggacaacaacaaggccaaccatggcaaggacgacagggacaacaaggccaaccatgggaaggacagggacaacagggacaacat

SEQ ID NO: 142139 - DNA, 341 bp, Arabidopsis thaliana
tagcgatttcacctccattttcttcgatcagtgctagaaccagagcctacctagctcgcaccttaaggaggtgatttagtttacaagcaaaatggtgaagatttgctgcattggagctggatatgttggtggtccaaccatggctgtcattgctctaaagtgtccatctgttgaagtagctgttgttgatatctctgtgccaaggatcaatgcctggaacagtgatcagttaccgatctatgagcctggtcttgatgatgtcgttaagcagtgccgtggaaagaatctctttttcagtaccgatgttgagaatacatgtcaaacaggtctacattttttct

SEQ ID NO: 142140 - DNA, 469 bp, Arabidopsis thaliana
gcaaaaaatggcaaacaagttgttcctcgtctgctcagctctcgctctctgcttcctcctcaccaacgcttccatctaccgcaccgtcgttgagttcgaagaagatgacgccactaaccccataggcccaaaaatgaggaaatgccgcaaggagtttcagaaagaacaacacctaagagcttgccagcaattgatgctccagcaagcaaggcaaggccgtagcgatgagtttgatttcgaagacgacatggagaacccacagggacaacagcaggaacaacagctattccagcagtgctgcaacgagcttcgccaggaagagccagattgtgtttgccccaccttgaaacaagctgccaaggccgttagactccagggacagcaccaaccaatgcaagtcaggaaaatttaccagacagccaagcacttgcccaacgtttgcgacatcccgcaaggtgatgtttgtccc

SEQ ID NO: 142141 - DNA, 465 bp, Arabidopsis thaliana
atcaatttgtgtttttctcatactttcattgaaatagccgctaaaacagtaaacacagacctccaaatcctgaagccaaacttttactttctcccgctgccgtctccttgcattgtcacctctatctactacttcttcggaaattagcttgttacattccataacaagttcaccattgcaattttcacaatgaaaagaatcgtcttccatagaaattaatctcagggcatccagtgcattatatctataccagaaatgagaatctatacaggtttagtgaaaataatacaactcaccatgtaaagatttaaaaacataaagaatagtggactttactttcttttgcagttaggacagccatactcctgaacaagtattctgtcttctagttcatctttgaactttttcttgagcccgggcagtttataacgaacaatatcatatatctgtaagagaggagaagtg

SEQ ID NO: 142142 - DNA, 458 bp, Arabidopsis thaliana
  unsure (1)..(458): unsure at all n locations
atggatttgtgtatgagcatggtccattcaatttcgaactaccaaagaaaaacaatagtctcccactcttgcatcttaatccttatagttggtccaaggtctctaacattatataccttgattctcctgttggtgtgggattctcttactcaaacaataagtctgattacataaccggtgatattaaaaccgcggttgactctcacgcgttccttctcaagtggttccaaatgtttcctgagtttcaatcaaatccttttttcatctctggagaatcttacgccggagtttatgtcccaactcttgcttcagaagttgtcatagggaacaaaaatggagtaaagccggctcttaacttcaaggggtatttggttggaaatggagttgcggatccgaagtttgatggaaatgcntttgtcccgtttgcacatgggatgggactaatctctgatgaactc

SEQ ID NO: 142143 - DNA, 452 bp, Arabidopsis thaliana
gagtgacactgttgtttctgagtggaatctcatatgtcaacataaatttcttgtggctgttccttccacactattcttcatcggatctcttttcggttctggtgtgtatggatatcttgctgattcatggtttggtcgaaagaagactttattactctcttgtgtattaactttcgtcacggcctttgcgatctctttttcaccaaacgtttgggtttatgcattcttgcgttttgccaacggtttctttagatcaggaattgggtcttgttgtatcgtactcgcaactgagattgttggcaaaaagtggcgaggccaagtagggcaatacggtttcttcttcttcacgttaggttttctatctctaccactcatggcttacttggagagaaagtcctggagaaatctttaccggatcatatcctttcttcctcttggatacgcggtttgtc

SEQ ID NO: 142144 - DNA, 437 bp, Arabidopsis thaliana
atacacacatagcaaaaaatggcaaacaagttgttcctcgtctgcgcagctctcgctctctgcttcctcctcaccaacgcttccatctaccgcaccgtcgttgagttcgaagaagatgacgccactaaccccataggcccaaaaatgaggaaatgccgcaaggagtttcagaaagaacaacacctaagagcttgccagcaattgatgctccagcaagcaaggcaaggccgtagcgatgagtttgatttcgaagacgacatggagaacccacagggacaacagcaggaacaacagctattccagcagtgctgcaacgagcttcgccaggaagagccagattgtgtttgccccaccttgaaacaagctgccaaggccgttagactccagggacagcaccaaccaatgcaagtcaggaaaatttaccagacagccaagca

SEQ ID NO: 142145 - DNA, 448 bp, Arabidopsis thaliana
aaataattttctctggcctatgttcttgaacctttttgcctagtttgaccaaaatcctattgtgttctgtcattgagatgtagtatctggtcctcttattcgttggacctaaaagtagaaatgatttatctctgtctatatgttttgtcattggaatgttttatgtatttctgatattttgatctctgcttcttgttattgttgctgtttggttcaggttctctaagtatgaaactcttgaaattctagttgtatagtatttaaatgtggatgctgtttctctgcaagatttaaagtctatagcaaccaagtagccaaaactttactataatagaaagctctgtattattctcattgacatgccttgaggtttcaaagtttgatgaaccagtttagctatggtacttggggatgttttacttgcatcaaggttttactaaatgactaa

SEQ ID NO: 142146 - DNA, 274 bp, Arabidopsis thaliana
acgcctcaggtaaatacaaaaatcactcatataaaaattttaggtgatttattgttcttgcgctttgcatgcgttatggttctagaaaccacaaagggtttagatttccatgacaaagatgtggaatcagagaatagcttgtgggagctatacgaacggtggaggagttatcacactttttttagtatccttgattagtaagctatgatgttgtactttttatatttataattttttttttatttttttttatattcttttttttctttttttt

SEQ ID NO: 142147 - DNA, 454 bp, Arabidopsis thaliana
ggaagaaaaatgggtcgagtctcatctattatctctttctctttgacactcttgatcctcttcaatggctacactgcccaacagtggcccaacgagtgccagctcgatcaactcaatgcgctcgaaccatcccaaatcatcaagagcgagggtggtcgcatcgaggtctgggaccaccatgcaccccagctccgttgctccggctttgcctttgagcgtttcgtcattgagcctcagggtcttttcttgcccactttcttgaacgccggcaaactcacgtttgttgttcacggaaggggtctaatgggaagagttattccgggatgcgccgagacgttcatggagtcaccggtatttggagaaggtcaaggtcagggtcagagtcaaggggtccgtgacatgcaccagaaagtagagcacctacggggcggtgacaccattgcaacaccatctg

SEQ ID NO: 142148 - DNA, 464 bp, Arabidopsis thaliana
gttattttgacgtaaatcgaatatgctccctatatgtttctcagtctctttctccgattgatacatctctcgttactctcgaaataaagctcatcatctgaggaaattcatcaatttgccggtgactttagttcaattccgaccctccgatgggctcgacgttcagagatcggacggtggagcttcattcactgtcccaaacattgaagaagatcggggcaatcccgtccgttcatcaagatgaagatgatccggcatcatccaaacggtcgtctccgggatccgaattcaataagaaggcttcccggatcgggttaggtattaaagaaacgtcacagaagatcacgaggctcgctacattggcagaacatacgacgaacctcaatgaccggactgtggaaatacaggagttaactgtgttgatcaggaacgatatcacggggctgaatatggctctctcggat

SEQ ID NO: 142149 - DNA, 464 bp, Arabidopsis thaliana
cttttcatgagaagcatggcttgtggccatgtatggtagcaccaacaaagattatagctggacttggtatgtcgctcggtattgacattttagaagctccgggagctactggagattaccggacgcttctgacatcgaaagcaactgctatagctaatgctctctcagctcctttgaatccctgccctaatgtctttgtaccgggagaggacgggcataaaccaggaaggtcagatggttatgatttcgggttccttcacataaaggctatagatgatgcaggtcatgataaggcgacaatgttcaaagttcgaggtttagaagctgttgataaggcaatacgtcagcttgctaagcttttatggcaagctgagtcttctacacattaccagtatttcttgtgtgtgaccggtgatcattcaactcctgttgagtatggagaccacagctttgagcctgtccca

SEQ ID NO: 142150 - DNA, 460 bp, Arabidopsis thaliana
gccgcaagactcctttcagattcttacttgcagctatgggtaaagagaagtttcacattaacattgtggtcattggtcatgttgattctggaaaatcgaccacaactggtcacttgatctataagcttggtggtattgacaagcgtgtcatcgagaggttcgagaaggaggctgctgagatgaacaagaggtccttcaagtacgcatgggtgttggacaaacttaaggccgagcgtgagcgtggtattaccatcgatattgctctatggaagttcgagaccaccaagtactactgcacagtcattgatgccccaggacatcgtgatttcatcaagaacatgattactggtacctcccaggctgattgtgctgttcttatcattgactccaccactggaggttttgaggctggtatctctaaggatggtcagacccgtgagcacgctcttcttgctttcac

SEQ ID NO: 142151 - DNA, 452 bp, Arabidopsis thaliana
cacatagcaaaaaatggcaaacaagttgttcctcgtctgcgcagctctcgctctctgcttcctcctcaccaacgcttccatctaccgcaccgtcgttgagttcgaagaagatgacgccactaaccccataggcccaaaaatgaggaaatgccgcaaggagtttcagaaagaacaacacctaagagcttgccagcaattgatgctccagcaagcaaggcaaggccgtagcgatgagtttgatttcgaagacgacatggagaacccacagggacaacagcaggaacaacagctattccagcagtgctgcaacgagcttcgccaggaagagccagattgtgtttgccccaccttgaaacaagctgccaaggccgttagactccagggacagcaccaaccaatgcaagtcaggaaaatttaccagacagccaagcacttgcccaacgtttgcgaca

SEQ ID NO: 142152 - DNA, 456 bp, Arabidopsis thaliana
ccagatatcagagtttgagaacaaaaaaaacgatgccgttttgcgaggtcgtgaaagaagatgtcggcccagagacgacgcttaacaatgccgcaatcaaaatcttctacagaacgtacggtcatggtcctatcaaagctcttctcatcataggtttagccggaacgcatgagtcatggggtcctcaaatcatgggattgacgggaacggataaacccaacgacgatgatgacgacgacggaggtattgtttccgatgattccggcatcgaggtttgcgctttcgataatcgtggtatgggtcgaagctctgtgcctacccacaaatctgagtacacaacaacgataatggcaaatgattcaattagtttgttggatcatttgggttggaaaaaagctcatataattggtcattctatgggagctatgatagcttgcaagttagctgcgatggtgc

SEQ ID NO: 142153 - DNA, 454 bp, Arabidopsis thaliana
tttcttctgaatcatatttgatttttatcttctctctcattttttaaaattattttttctttatggatctttgtagctttagcaaaaaccgaccagctgagaagatgtcttcatcgtacaacacaattgctttgtcctccactccgaccttcctcctctcaagtgccgctgccggacccggaccaaacaactttaaccgtcaagaggctgcgatgaccatggttcaacaacaacccacttcctccgttgctccaccacccaagaagcgaaggaaccaacccggaaacccaaatccagatgctgaagtgatagcgttatcgccaaagacgataatggcgacgaacaggttcctatgtgaagtgtgcaacaaagggttccagagggaacagaatctgcagctccacaggaggggacacaaccttccatggaagctgaaacaaaagtccaacaaaga

SEQ ID NO: 142154 - DNA, 470 bp, Arabidopsis thaliana
agactcctttgagattgttacatcgcacatttgcattgtacttaagaaacggattctcttattggaaactgatttgcttgcttttggcatataacaaaattgggaaaaagaaaggagtagtgcatgaatacctcggataagcgcattgatgatcctccaatttgcatcttctccagagctatgtctctaattgacgacgcaaaggtatcccgcctcattcgttcacttgctgacactccagtatttatcaggtccatgtcaatggtcccttcaccaacataaatacaggtgtttattgttagattggtattgaatgctactgtttatctttatcctgatgataataatgggtctgaaagttactgtgaaaaaactacctgtggcgtgatcccgtgctgattgctgcattgcaactctgagaagtcgaaatgcctcgtccacgtcatgcttttcaacctttatcacaaaaa

SEQ ID NO: 142155 - DNA, 234 bp, Arabidopsis thaliana
tttatattataacgaaagataataaataatttagtatcctacacattggcatcacgtattacacgcgtttagggtatatttggtatgactagttttaccatttttattggtctctataaaaaaatgaaaaggacaattacattttcattttcttaaggagaccggcaaaatttcataacaagtggcaaatggtataatcttcataacctatacttataaatcgaaaacgtttag

SEQ ID NO: 142156 - DNA, 464 bp, Arabidopsis thaliana
cgtgagctgaatgctatacaagaaagaacaatgagtcacattcaaaagatagttgatgatcatgagaaattgaagaggctgttggagtcagagaggaagaaactcgaaatcaaatgtaatgagttggcaaagcgcgaagtgcacaatggaaccgagagaatgaaattgtctgaagatcttgaacagaatgcatctaagaatagctctcttgaactagctgccatggaacaacaaaaggcagacgaggaagttaaaaaacttgctgaagaccaaaggaggcaaaaggaggagcttcatgagaaaatcataagactagaaagacagagagatcagaaacaagcgattgagcctgaagttgagcagttgaaaggacagctcaatgtgatgaagcacatggcatcagatggcgatgctgaagttgtgaaagaggtggacatcatcttcaaagatttaggtgagaagga

SEQ ID NO: 142157 - DNA, 460 bp, Arabidopsis thaliana
caaaagtgttgtgaactttttggttaaagtcgtagtcgtgtattcgtaataacattattgtaatctcgaactgtttcgatatgattttggctcttggaaagtctcctgagttgggcttgtactatgatccaatagtaaataatcacttaaaaagcaacataaacgataaaaatatgataagtatgagccggctctaaaagtcaccaattttccattctcatgatcaaacataattagcaagtattatatttgagatctcataatagatcgtacgttttcattacttgttgaaataccaagattttaaaacaaacttatttagcttctacaccatcaatttttctaagcttatctaatcgaaacaacttttaataaatgaaacaagctgtataagtttattgataattgttatctataacatggtgttaagtcattctggcgccgaatgataacgcgaact

SEQ ID NO: 142158 - DNA, 467 bp, Arabidopsis thaliana
agactcctttgagattcttactcgcagctatgggtaaagagaagtttcacattaacattgtggtcattggtcatgttgattctggaaaatcgaccacaactggtcacttgatctataagcttggtggtattgacaagcgtgtcatcgagaggttcgagaaggaggctgctgagatgaacaagaggtccttcaagtacgcatgggtgttggacaaacttaaggccgagcgtgagcgtggtattaccatcgatattgctctatggaagttcgagaccaccaagtactactgcacagtcattgatgccccaggacatcgtgatttcatcaagaacatgattactggtacctcccaggctgattgtgctgttcttatcattgactccaccactggaggttttgaggctggtatctctaaggatggtcagacccgtgagcacgctcttcttgctttcacccttggtgtcaag

SEQ ID NO: 142159 - DNA, 437 bp, Arabidopsis thaliana
  unsure (1)..(437): unsure at all n locations
cttacaagtaatatacagtccgcattcatacctctccaattgttcgtccanctttgaaagcaagcgctgcactttgctgtggctgagaagtcttgtgcgagagatacgaagtcgtctcattcgggggacatgtgccaggtcactggagaattacgaatgttgtccagccgtggggctcaactcaagggcgacgttttcaaggttacgattttcaagccagacctaatccccgtggagcatctgcctttaggcatttacttgctagattaccccccagagcccattccatatattacagggatgatattggaaatatctccacgtctgagatgaaaagtgattcgaaaaagacagagctactaattgagcctaggtttcctttgtttggtgggtggaaaacttttttcacgataggttatggtttgccacttaccgac

SEQ ID NO: 142160 - DNA, 447 bp, Arabidopsis thaliana
ctccaggctctgcccactggatctacaactcatgagaactttccactggtcatcatcgttcttctcgacatcgccaactaccaaaccaacttgaacccgcaaccttagagtgttccatttggccggaaacaaccagcagggaggctttggcggttcacagcaacaacaagaacagaaaaacttgtggagcgggttcgacgcacaggtcatagctcaagcattgaaaattgacgttcagttggctcagcagcttcagaaccaacaagacagcagaggaaacatcgttcgtgttaagggacctttccaggtcgtgaggccacctctaagacagccctacgagagcgaggagtggagacacccacgtagcccacagggcaacggccttgaggagactatctgcagcatgaggttccacgagaacattgacgaccctgttggtgctgacgt

SEQ ID NO: 142161 - DNA, 461 bp, Arabidopsis thaliana
aaacatacacacatagcaaaaaatggcaaacaagttgttcctcgtctgcgcagctctcgctctctgcttcctcctcaccaacgcttccatctaccgcaccgtcgttgagttcgaagaagatgacgccactaaccccataggcccaaaaatgaggaaatgccgcaaggagtttcagaaagaacaacacctaagagcttgccagcaattgatgctccagcaagcaaggcaaggccgtagcgatgagtttgatttcgaagacgacatggagaacccacagggacaacagcaggaacaacagctattccagcagtgctgcaacgagcttcgccaggaagagccagattgtgtttgccccaccttgaaacaagctgccaaggccgttagactccagggacagcaccaaccaatgcaagtcaggaaaatttaccagacagccaagcacttgcccaacgtttgcgaca

SEQ ID NO: 142162 - DNA, 452 bp, Arabidopsis thaliana
tccgtctctcagccctccgtggatctatccgtcaaaacgcaatggtgcttccacagtggaacgcaaacgcgaacgccattctttacgtgacagacggggaagcccaaatccagatcgtaaacgacaatggtaacagagtgtttgacggacaagtctctcaaggacagctcatagccgtaccacaaggtttctcggtggtgaaacgcgcaacaagcaaccgattccagtgggttgagttcaaaacaaacgcaaacgcgcaaatcaacactcttgcgggacgaacctcagtcttgagaggtttaccacttgaagttataaccaatgggttccaaatctcacctgaagaagcaaggagggtcaagttcaacacgctcgagaccactttgactcacagcagtggcccagctagctacggaaggccaagggtggctgcagcttaagagcttaaaacc

SEQ ID NO: 142163 - DNA, 352 bp, Arabidopsis thaliana
  unsure (1)..(352): unsure at all n locations
ctcttctcttctttctttcttcttaacacttttgatccttttccatggctacgcggctcaacagggtcagcagggtcagcagtttccgaacgagtgccagctcgaccagctcaatgcgctcgagccgtcacacgtactgaagagcgaggctggtcgcatcgaggtgtgggaccaccacgctcctcagctccgttgctcaggtgtctcctttgcacgttacatcatcgagtctaagggtctctacttgccctctntctttaacaccgcgaagctctctttcgtggctaagggacgaggtcttatgggaaaagtgatccctggatgcgccgaaacattccaagactcatcagag

SEQ ID NO: 142164 - DNA, 382 bp, Arabidopsis thaliana
acattgtccgagtccaaggcccgttcggtgtcattaggccgcctttgaggggccagagacctcaggaggaggaagaagaagaagaaggacgacatggacgacacggtaatggcttagaggagaccatctgcagcgccaggtgcaccgataacctcgatgacccgtctcgtgctgacgtgtacaagccacagctcggttacatcagcactctcaacagttacgatctccccatccttcgcttcatccgtctctcagccctccgtggatctatccgtcaaaacgcaatggtgcttccacagtggaacgcaaacgcgaacgctattctttacgtgacagacggggaagcccaaattcagatcgtaaacgacaattggtacagagt

SEQ ID NO: 142165 - DNA, 379 bp, Arabidopsis thaliana
gggttttgctatacctaaagaggcacaagaaaaagtggtaaatttttcgttcgatggacaaccagcagagcttaaacatggaagtgtggtgattgctgcaatcacaagctgtactaatacatcaaatcccagcgtcatgcttggtgctggtcttgttgcaaagaaggcttgtgaccttgggctacaggttaagccttggataaagacaagtcttgctccaggctcaggagttgttacaaaatacttattaaagagtggattgcaagaatatctgaatgaacagggtttcaatattgtcggctacgggtgcactacatgcatcgggaattctggggaaattaatgaatcagtgggagctgctattaccgaaaatgacatt

SEQ ID NO: 142166 - DNA, 353 bp, Arabidopsis thaliana
ccggacggaaggccggcccgccgaccgtcctcacacgtagagaaaggcaacaagttgtttctcgtctgcgcagctctcgtctctggttctctcaccaacgcttcatctaccgaccgtcgtgagttcgaagaagatgacgccactaaccccataggcccaaaaatgaggaaatgccgaaggagtttagaaagaacaacacctaagagcttgcagcaattgatgctccagcaagcaaggcaaggccgtagcgatgagtttgatttcgaagacgacatggagaacccacagggacaacagcaggaacaacagctattccagcagtgctgcaacgagcttcgccaggaagagccaga

SEQ ID NO: 142167 - DNA, 426 bp, Arabidopsis thaliana
gaccggaacgacaggccggcccgaccatgcggcggtctttacttgcccaccttcttcacttccccaaaaatttcctacgtcgttcaaggaacgggtatcagcggaagagtggtccctggatgtgccgagaccttcatggactcgcagccgatgcaaggacaacaacaaggccaaccatggcaaggacgacagggacaacaaggccaaccatgggaaggacagggacaacagggacaacaaggaagacaaggccaaccatgggaaggacagggacaacagggacaacaaggacgacagggacaacaaggccaaccatgggaaggacagggacagcagggacaacaagggctccgtgacatgcaccagaaggtggaacatgtgagacgcggagacatctttgccaacactccaggctgtgcccactgg

SEQ ID NO: 142168 - DNA, 393 bp, Arabidopsis thaliana
gtaagaatacaaatacaaatagcaaaaaaaatggcaaacaagctcttcctcgtctgcgcaactttcgccctctgcttcctcctcaccaacgcttccatctaccgcactgttgtcgagttcgacgaagatgacgccagcaaccccatgggcccaagacagaaatgtcagaaggagtttcagcaatcacagcacctaagagcttgccagaaattgatgcgcatgcaaatgaggcaaggccgtggtggtggtccctccctcgacgatgagttcgatttggaagacgacatcgagaacccacaaggcccccagcagggacaccagatcctccagcagtgctgcagcgagcttcgccaggaagagccagtttgtgtttgccccaccttgagacaagct

SEQ ID NO: 142169 - DNA, 391 bp, Arabidopsis thaliana
acacatagcaaaaaatggcaaacaagttgttcctcgtctgcgcagctctcgctctctgcttcctcctcaccaacgcttccatctaccgcaccgtcgttgagttcgaagaagatgacgccactaaccccataggcccaaaaatgaggaaatgccgcaaggagtttcagaaagaacaacacctaagagcttgccagcaattgatgctccagcaagcaaggcaaggccgtagcgatgagtttgatttcgaagacgacatggagaacccacagggacaacagcaggaacaacagctattccagcagtgctgcaacgagcttcgccaggaagagccagattgtgtttgccccaccttgaaacaagctgccaaggccgttagactccagggacagca

SEQ ID NO: 142170 - DNA, 154 bp, Arabidopsis thaliana
  unsure (1)..(154): unsure at all n locations
caaaaagaaaattggttaagttcagcnaatctccttgttgctaaccttcggggttcttcctcgtgcttaacggctgccttgcgaggcagtcacttggggttcctcctcagttccagaacgggggtaacctcgacaccctaaattttttccaagc

SEQ ID NO: 142171 - DNA, 370 bp, Arabidopsis thaliana
gcgtccgcaaaaagaaaatggttaagctcagcaatcttctcgttgcaaccttcggggttctcctcgtccttaacggctgccttgcgaggcagtcacttggggttcctcctcagctacagaacgagtgtaacctcgacaacctagatgttctccaagccaccgaaactatcaagagtgaagccggtcagatcgagtactgggaccacaaccaccctcagctccgatgtgttggtgtttccgttgctcgttatgtaattgaacaaggcggtctttacttgcccaccttcttcacttccccaaaaatttcctacgtcgttcaaggaacgggtatcagcggaagagtggtccctggatgtgccgagaccttcat

SEQ ID NO: 142172 - DNA, 301 bp, Arabidopsis thaliana
aaacaaaaagaaaatggttaagctcagcaatctcctcgttgcaaccttcggggttctcctcgtccttaacggctgccttgcgaggcagtcacttggggttcctcctcagctacagaacgagtgtaacctcgacaacctagatgttctccaagccaccgaaactatcaagagtgaagccggtcagatcgagtactgggaccacaaccaccctcaagttcgatgtgttggtgtttccggtgctcgttatgtaattgaacaaggcggtctttacttgcccaccttctttactttcccaaaaatt

SEQ ID NO: 142173 - DNA, 396 bp, Arabidopsis thaliana
caaaaagaaaatggttaagctcagcaatctcctcgttgcaaccttcggggttctcctcgtccttaacggctgccttgcgaggcagtcacttggggttcctcctcagctacagaacgagtgtaacctcgacaacctagatgttctccaagccaccgaaactatcaagagtgaagccggtcagatcgagtactgggaccacaaccaccctcagctccgatgtgttggtgtttccgttgctcgttatgtaattgaacaaggcggtctttacttgcccaccttcttcacttccccaaaaatttcctacgtcgttcaaggaacgggtatcagcggaagagtggtccctggatgtgccgagaccttcatggactcgcagccgatgcaaggacaacaacaagg

SEQ ID NO: 142174 - DNA, 383 bp, Arabidopsis thaliana
  unsure (1)..(383): unsure at all n locations
aaataacaaaatggctcgagtctcttctcttctttctttcttcttaacacttttgatccttttccatggctacgcggctcaacagggtcagcagggtcagcagtttccgaacgagtgccagctcgaccagctcaatgcgctcgagccgtcacacgtactgaagagcgaggctggtcgcatcgaggtgtgggaccaccacgctcctcagctccgttgctcaggtgtctcctttgcacgttacatcatcgagtctaagggtctctacttgccctctntctttaacaccgcgaagctctctttcgtggctaagggacgaggtcttatgggaaaagtgatccctggatgcgccgaaacattccaagactcatcagagttccaaccac

SEQ ID NO: 142175 - DNA, 392 bp, Arabidopsis thaliana
aaacttagttgtgtgatctttggtttccttgaaatcatacagttcaaagagtttgctcaatgaaggttcacgagacaagatctcacgctcacatgtctggagacgaacaaaagaagggaaatttgcggaagcacaaagcagaagggaaacttccagaatctgaacagtctcagaagaaggcaaagcctgaaaacgatgacggacgttctgtcaacggcgccggagatgctgcttcagagtacaatgagttctgcaaagcggttgaggagaatctgtccattgatcagattaaagaagttctcgaaatcaacggccaagattgttctgctccagaagagaccttgctagctcaatgtcaagatttgctgttctatggggcattagctaaatgt

SEQ ID NO: 142176 - DNA, 343 bp, Arabidopsis thaliana
ctcttctcttctttctttcttcttaacacttttgatccttttccatggctacgcggctcaacagggtcagcagggtcagcagtttccgaacgagtgccagctcgaccagctcaatgcgctcgagccgtcacacgtactgaagagcgaggctggtcgcatcgaggtgtgggaccaccacgctcctcagctccgttgctcaggtgtctcctttgcacgttacatcatcgagtctaagggtctctacttgccctctttctttaacaccgcgaagctctctttcgtggctaagggacgaggtcttatgggaaaagtgatccctggatgcgccgaaacatttcaagac

SEQ ID NO: 142177 - DNA, 397 bp, Arabidopsis thaliana
ctctaagacagccctacgagagcgaggagtggagacacccacgtagcccacagggcaacggccttgaggagactatctgcagcatgaggtcccacgagaacattgacgaccctgctcgtgctgacgtgtacaagcccagcctaggtcgcgtgaccagcgtcaacagctataccttgcccatcttggagtatgtcaggctcagtgccactcgtggcgttctccagggtaatgcgatggtgcttcctaaatacaacatgaacgctaacgagatcttgtactgcactggaggacaaggaaggatccaagtggtcaacgacaacggacagaacgtgttggaccaacaggtgcagaagggacagctcgtggtcatcccacaagggttcgcatacgttgtcca

SEQ ID NO: 142178 - DNA, 392 bp, Arabidopsis thaliana
ggcccaacgagtgccagctcgatcaactcaatgcgctcgaaccatcccaaatcatcaagagcgagggtggtcgcatcgaggtctgggaccaccatgcaccccagctccgttgctccggctttgcctttgagcgtttcgtcattgagcctcagggtcttttcttgcccactttcttgaacgccggcaaactcacgtttgttgttcacggaaggggtctaatgggaagagttattccgggatgcgccgagacgttcatggagtcaccggtatttggagaaggtcaaggtcagggtcagagtcaagggttccgtgacatgcaccagaaagtagagcacctacggtgcggtgacaccattgcaacaccatctggtgtagctcaatggttctacaac

SEQ ID NO: 142179 - DNA, 328 bp, Arabidopsis thaliana
acacatagcaaaaaatggcaaacaagttgttccttgtctgcgcagctctcgctctctgcttcctgctcaccaacgcttccatctaccgcaccgtcgttgagttcgaagaagatgacgccactaaccccataggcccaaaaatgaggaaatgccgcaaggagtttcagaaagaacaacacctaagagcttgccagcaattgatgctccagcaagcaaggcaaggccgtagcgatgagtttgatttcgaagacgacatggagaacccacagggacaacagcaggaacaacagctattccagcagtgctgcaacgagcttcgccaggaaga

SEQ ID NO: 142180 - DNA, 378 bp, Arabidopsis thaliana
aaagaaaatggttaagctcagcaatctcctcgttgcaaccttcggggttctcctcgtccttaacggctgccttgcgaggcagtcacttggggttcctcctcagctacagaacgagtgtaacctcgacaacctagatgttctccaagccaccgaaactatcaagagtgaagccggtcagatcgagtactgggaccacaaccaccctcagctccgatgtgttggtgtttccgttgctcgttatgtaattgaacaaggcggtctttacttgcccaccttcttcacttccccaaaaatttcctacgtcgttcaaggaacgggtatcagcggaagagtggtccctggatgtgccgagaccttcatggactcgcagccgatgca

SEQ ID NO: 142181 - DNA, 340 bp, Arabidopsis thaliana
aaagaaaatggttaagctcagcaatctcctcgttgcaaccttcggggttctcctcgtccttaacggctgccttgcgaggcagtcacttggggttcctcctcagctacagaacgagtgtaacctcgacaacctagatgttctccaagccaccgaaactatcaagagtgaagccggtcagatcgagtactgggaccacaaccaccctcagctccgatgtgttggtgtttccgttgctcgttatgtaattgaacaaggcggtctttacttgcccaccttcttcacttccccaaaaatttcctacgtcgttcaaggaacgggtatcagcggaagagtggtccct

SEQ ID NO: 142182 - DNA, 394 bp, Arabidopsis thaliana
agaaaacatacacaaatagcaaaacatggctaacaagctcttcctcgtctgcgcaactctcgccctctgcttcctcctcaccaacgcttccatctaccgcaccgttgtcgaattcgaagaagatgacgccagcaaccccgtaggtccaagacagagatgccagaaggagtttcagcaatcacaacacctaagagcttgccagagatggatgagcaagcaaatgaggcaaggacgtggtggtggtccttccctcgacgatgagttcgatttcgagggcccccagcagggataccagctactccagcagtgctgcaacgagcttcgccaggaagagccagtttgcgtttgccccaccttgaaacaagctgccagggcagttagcctccagggacag

SEQ ID NO: 142183 - DNA, 409 bp, Arabidopsis thaliana
  unsure (1)..(409): unsure at all n locations
aaacaaccaagaaaaaatggcnaataacccaacataattatatcattaaccacttnncttctccttatcgtccanntagctgtcgtccactggctnntatccttccgtgtggagatcgacgaagttcgagccaccacagcaaggagaacaagaaggtccccgtcgccgtcctggtggtggctctggcgagggatgggaggaagagtcgacgaatcatccataccacttcaggaagcggagtttcagtgattggttccagtcaaaggaaggttttgtgagagtgctgcctaagttcacaaaacatgcaccggctctcttccgaggaatcgagaactacagattctcgttggtggagatggagccaacaactttctttgtgcctcaccatttggatgccgatgctgttttt

SEQ ID NO: 142184 - DNA, 387 bp, Arabidopsis thaliana
gggtcgagtctcatctattatctctttctctttgacactcttgatcctcttcaatggctacactgcccaacagtggcccaacgagtgccagctcgatcaactcaatgcgctcgaaccatcccaaatcatcaagagcgagggtggtcgcatcgaggtctgggaccaccatgcaccccagctccgttgctccggctttgcctttgagcgtttcgtcattgagcctcagggtcttttcttgcccactttcttgaacgccggcaaactcacgtttgttgttcacggaaggggtctaatgggaagagttattccgggatgcgccgagacgttcatggagtcaccggtatttggagaaggtcaaggtcagggtcagagtcaagggttccgtga

SEQ ID NO: 142185 - DNA, 392 bp, Arabidopsis thaliana
agaggaagaaaaatgggtcgagtctcatctattatctctttctctttgacactcttgatcctcttcaatggctacactgcccaacagtggcccaacgagtgccagctcgatcaactcaatgcgctcgaaccatcccaaatcatcaagagcgagggtggtcgcatcgaggtctgggaccaccatgcaccccagctccgttgctccggctttgcctttgagcgtttcgtcattgagcctcagggtcttttcttgcccactttcttgaacgccggcaaactcacgtttgttgttcacggaaggggtctaatgggaagagttattccgggatgcgccgagacgttcatggagtcaccggtatttggagaaggtcaaggtcagggtcagagtcaagg

SEQ ID NO: 142186 - DNA, 396 bp, Arabidopsis thaliana
tgacatgcaccagaaagtggagcacattaggagcggtgataccattgccacaacacccggtgtagcccagtggttctacaacgacggacagcaaccacttgtcatcgtcagcatcttcgatctagccagtcaccagaaccagcttgaccgcaacccaaggccattttacttagccggaaacaacccacaaggtcaagtatggctacaaggacgagagcaacagccacagaagaacatcttcaatggatttggacccgaggttattgctcaagctttgaagattgatcttcagacagcgcagcaacttcagaaccaagatgacaaccgtggaaacattgtccgagtccaaggcccgttcggtgtcattaggccgcctttgaggggccagagacctca

SEQ ID NO: 142187 - DNA, 397 bp, Arabidopsis thaliana
cttcttctttgagttttttttatcattcttgacgtcatgataaagatactcaacccccactcacaccattctcaaaccacaactcttaaaacagctgagatcttgtctaaatacagacccattgcaccaaagcccgggacgcctcgagtgaacgacgatgatccttcttcctctatgtctcacaaaatcagccaatctccttaccttcgtaacctctggcctcagcttcaagcgcgacctacaagaacccgcaagcgaggccgaggcgggatgggtccctcttctcttgctatgaagagaccaaagtcgtcatgcggttcttctagtacttctactatttctacacaacgtgttcttggacctattaaaacactgtcgtttcaggctttcactcatc

SEQ ID NO: 142188 - DNA, 383 bp, Arabidopsis thaliana
cccccttcgtaagttccgccgaaaagaaccaaattcttcactactctgtctcagctttcgacctctctcttctcattcctttgcaacttctcacttctcgaattccttctcttcaaaatcagaaatggctcaagcggttgctaccaggtcaattcaaggctcgatgttatctcccaacggcggatctgtgtctacaagatccgcgacgctattgaaaccagcgagttttgcagcgaaggttcttggaaacgaagcaaagagaagtggaagagtctctgttagaagcataagagtggttgatactactgtgagatccgctcgtgtttgagactgaagtcattcctgtttctcctgaagatgcgccttacagagaggagcagctt

SEQ ID NO: 142189 - DNA, 363 bp, Arabidopsis thaliana
atgaaatagatttacagaaacgggtataaggggaagagtttcccatggaagcgccgagaccttgaaggattatcactcgaaccagggacagcaacacggccaatcttggctaggactacatgaacaacaaggtccaccacagggacggacgagggcaacgtgaacagcacggtatacaaggacaaccatggaaaggacaggatcaacagggacaacacggacgacagggacaacaaggccaatcattgtaaggacaggcacagcaggaacaacatgggttccgggacatgcaccagaaggttgaacatgtgagactcggcgacgtctaaaggaacactccaggatctgtccactggatctaca

SEQ ID NO: 142190 - DNA, 394 bp, Arabidopsis thaliana
cacatagcaaaaaatggcaaacaagttgttcctcgtctgcgcagctctcgctctctgcttcctcctcaccaacgcttccatctaccgcaccgtcgttgagttcgaagaagatgacgccactaaccccataggcccaaaaatgaggaaatgccgcaaggagtttcagaaagaacaacacctaagagcttgccagcaattgatgctccagcaagcaaggcaaggccgtagcgatgagtttgatttcgaagacgacatggagaacccacagggacaacagcaggaacaacagctattccagcagtgctgcaacgagcttcgccaggaagagccagattgtgtttgccccaccttgaaacaagctgccaaggccgttagactccagggacagcaccaa

SEQ ID NO: 142191 - DNA, 391 bp, Arabidopsis thaliana
atctcctcgttgcaaccttcggggttctcctcgttcttaacggctgccttgcgaggcagtcacttggggttcctcctcagctacagaacgagtgtaacctcgacaacctagatgttctccaagccaccgaaactatcaagagtgaagccggtcagatcgagtactgggaccacaaccaccctcagctccgatgtgttggtgtttccgttgctcgttatgtaattgaacaaggcggtctttacttgcccaccttcttcacttccccaaaaatttcctacgtcgctcaaggaacgggtatcagcggaagagtggtccctggatgtgccgagaccttcatggactcgcagccgatgcaaggacaacaacaaggccaaccatggcaaggacgaca

SEQ ID NO: 142192 - DNA, 392 bp, Arabidopsis thaliana
accgagaatcttaggaaagaaatctattactgtatactatgatgctgtcaaagacattatagtagccgatacgagttcgagttatgaactcccacagggttctcaggggaataaaatccgaaatgtatcggctttgagagaattaggcatgccttctcggttgttattacccttgctcgtctccaaatcgcagcctgtgtgtggaaaagaaaattttgatgcatcccttaagaaggttgttgagatggggtttgatcccaccaccactaagtttgttttagctttgcggatgctttaccaaatgagcgagaaaacgattgaagaaaaagttgtagtctttagaagtttaggttttactgtggatgatgtgtgggaaatcttcaagaagactc

SEQ ID NO: 142193 - DNA, 396 bp, Arabidopsis thaliana
cacagagttaaattgagtttgtgtctcgtaacttatcctgtgagcgaaaatggtgaaagcaactaaggcagagaagaagatcgcctacgataccaagctatgtcagcttatcgatgagtacacccagatcttggtcgttgcggccgataacgtcggatcaactcagcttcagaacatcagaaagggtcttcgtggagactccgtcgtgcttatggggaagaacactatgatgaagcgttccgttaggattcactctgagaacaccggaaacactgcaatcctgaatctgcttcctctccttcagggaaacgttggtttgatctttaccaaaggtgacctcaaggaagtgagcgaggaggttgctaagtacaaggtcggtgcccctgctcgtgtggg

SEQ ID NO: 142194 - DNA, 391 bp, Arabidopsis thaliana
gaaaatggttaagctcagcaatctcctcgttgcaaccttcggggttctcctcgtccttaacggctgccttgcgaggcagtcacttggggttcctcctcagctacagaacgagtgtaacctcgacaacctagatgttctccaagccaccgaaactatcaagagtgaagccggtcagatcgagtactgggaccacaaccaccctcagctccgatgtgttggtgtttccgttgctcgttatgtaattgaacaaggcggtctttacttgcccaccttcttcacttccccaaaaatttcctacgtcgttcaaggaacgggtatcagcggaagagtggtccctggatgtgccgagaccttcatggactcgcagccgatgcaaggacaacaacaaggc

SEQ ID NO: 142195 - DNA, 390 bp, Arabidopsis thaliana
caaagaggaagaaaaagctctcaactttcttcgatttctcagggaactctttcgttaatctcaaactcaatcatgtctaccccagctgaatcttcagactcgaaatcgaagaaagatttcagtactgctattctcgagaggaagaagtctccgaaccgtctcgtcgtcgatgaggctatcaacgatgatcactccgtcgtctctcttcaccctgcaaccatggagaagcttcagctcttccgtggtgataccattctcatcaagggtaagaagaggaaggacactgtctgcattgctcttgctgatgagacatgtgaggagccaaagatcagaatgaataaagtagtcagatctaacttgagggttagactgggcgatgctatatctgtt

SEQ ID NO: 142196 - DNA, 392 bp, Arabidopsis thaliana
aacaaaaagaaaatggttaagctcagcaatctcctcgttgcaaccttcggggttctcctcgtccttaacggctgccttgcgaggcagtcacttggggttcctcctcagctacagaacgagtgtaacctcgacaacctagatgttctccaagccaccgaaactatcaagagtgaagccggtcagatcgagtactgggaccacaaccaccctcagctccgatgtgttggtgtttccgttgctcgttatgtaattgaacaaggcggtctttacttgcccaccttcttcacttccccaaaaatttcctacgtcgttcaaggaacgggtatcagcggaagagtggtccctggatgtgccgagaccttcatggactcgcagccgatgcaaggacaaca

SEQ ID NO: 142197 - DNA, 396 bp, Arabidopsis thaliana
gaaaaaatggcaataaccaacaaattaatcataacacttcttctccttatctccatagctgtcgtccactgcttatccttccgtgtggagatcgacgagttcgagccaccacagcaaggagaacaagaaggtccccgtcgccgtcctggtggtggctctggcgagggatgggaggaagagtcgacgaatcatccataccacttcaggaagcggagtttcagtgattggtttcagtcaaaggaaggttttgtgagagtgctgcctaagttcacaaaacatgcaccggctctcttccgaggaatcgagaactacagattctcgttggtggagatggagccaacaactttctttgtgcctcaccatttggatgccgatgctgtttttatagtcctacaa

SEQ ID NO: 142198 - DNA, 384 bp, Arabidopsis thaliana
atttgcgatcccaggtaagatcggttcaggatcatgggatccttttctatcagataggaagggctgctgcacaaaatgtacttataagtaattgccccatagatcctatatctatctatatgaagaagaaatcatgtaacgaaggggattcttatttgtacaaatggtacttcgagcttggaacgagcatgaagaaattcacgatacttctttatcttttgagttgttctgccggatcggtcgctcaagacctttggtctctacccgtacccgatgaaaaaaataggatcacttcttatggattcgatgagaatgattcggatctagttcatggcctattagaagtgcaaggcgctatggtgggatcctcacggacagaaaaag

SEQ ID NO: 142199 - DNA, 393 bp, Arabidopsis thaliana
aagaaaaatgggtcgagtctcatctattatctctttctctttgacactcttgatcctcttcaatggctacactgcccaacagtggcccaacgagtgccagctcgatcaactcaatgcgctcgaaccatcccaaatcatcaagagcgagggtggtcgcatcgaggtctgggaccaccatgcaccccagctccgttgctccggctttgcctttgagcgtttcgtcattgagcctcagggtcttttcttgcccactttcttgaacgccggcaaactcacgtttgttgttcacggaaggggtctaatgggaagagttattccgggatgcgccgagacgttcatggagtcaccggtatttggagaaggtcaaggtcagggtcagagtcaagggttccg

SEQ ID NO: 142200 - DNA, 391 bp, Arabidopsis thaliana
ccaccatcaataatatccttggtcttagcatatatttcatcaccctgtgtctcttgttttcctacagcatcaattgcgtcactcttttctttactgtcaccatcagtttccttggtagcatcagaccttccatcagccagtgtctcttgttttcccgcagacagaggtttagtcgtttctgcagcagcagtagaaggagcaggagcagtaaaaggaaccaaacgaattccagtaaatggattagaagctggtggtgcagtagcagatcgatctgtgcgcctaactctgataattcttctgcttgccaacacctccttactagcagtgttgaaggtaccactctcgagtgcagaagtgtcttcatcatcatcatcaagaccaggattgtccc

SEQ ID NO: 142201 - DNA, 367 bp, Arabidopsis thaliana
tttagctgtagatgcggttctctctgttatagatccggaaaagcctgagattgtggatttgcgtgatattaagattgttaagaagcttggtgggactgtggatgatacacatactgtgaaaggtttggtttttgataagaaggttagccgtgctgctggtggaccgactcgtgtggagaatgctaagattgctgtgattcagttccagatctcacctcctaagactgatatcgagcagagtattgttgtctctgattatactcagatggataggatcttgaaagaagagaggaattacatattggggatgattaagaagatcaaagcaactggttgcaatgtgttgtttgattcaaaagagtatttt

SEQ ID NO: 142202 - DNA, 393 bp, Arabidopsis thaliana
aaattcaatgtcttatgcttatcttttcaagtatatcatcatcggcgatactggagtggggaaatcatgtcttctgcttcagttcaccgacaagaggtttcagccggtgcatgaccttaccattggtgttgaatttggggctaggatgatcaccatcgataacaaacctatcaagcttcagatctgggatacggctggtcaagaatcctttaggtctattacaaggtcatactatagaggagctgcaggggcattgcttgtctatgatatcacaaggagggagacatttaaccacctagctagctggctagaagatgcaaggcagcatgcaaatgcaaatatgacgataatgctcattgggaataagtgtgatcttgctcacagaaaggcagt

SEQ ID NO: 142203 - DNA, 389 bp, Arabidopsis thaliana
gtacttatcttccaattataggaataaacatttcgccagtgaaaaaaggtctcattccttccttacttgtggagatggagatctgaatctctaaagtttcgatttttatttattcacttttatgcccaaaaagaaaaatcgttactttaaagccaaaaagaagaatacacaaacttcattcactctctcccattctcggatctctctcagtgcacagtggttgtcactcttctcctttggtcgaaactctttcttggaaagtgcattttgttatcaagactctgaagagctcttttgggaggatagtaaggttggatgatgagagggagatctgatggaggcctaaagaagcggcttattgcttcggtctgtgtcgtggctctattcgt

SEQ ID NO: 142204 - DNA, 389 bp, Arabidopsis thaliana
aagttgacaagggcttgtctcccctagccggttccaacgaagagtcttggtgccaaggcttggatggattggcctcacgctctgctgagtactacaagcaaggcgctcgttttgccaagtggaggacagtggtgagtgttccctgcggtccttcagcactggctgtgaaggaagctgcgtgggggctggctcgctatgcagccatctctcaggataatggtcttgtccccattgtggagccagagatccttctggacggggaccacccaatagagaggactctggaggtggcagagaaagtgtggtcagaggtgttcttctacttggcacagaacaacgtcatgtttgagggcattctgttgaagccgagcatggtcaccccaggcgct

SEQ ID NO: 142205 - DNA, 387 bp, Arabidopsis thaliana
gataaaaatggctcgagtctcttctcttctttctttctccttaacacttttgatccttttccatggctacgcggctcaacagggtcagcagggtcagcagtttccgaacgagtgccagctcgaccagctcaatgcgctcgagccttcacacgtactgaagagcgaggctggtcgcatcgaggtgtgggaccaccacgctcctcagctccgttgctcaggtgtctcctttgcacgttacatcatcgagtctaagggtctctacttgccctctttctttaacaccgcgaagctctccttcgtggctaaaggacgaggtcttatgggaaaagtgatccctggatgcgccgaaacattccaagactcatcagagttccaaccacgcttcga

SEQ ID NO: 142206 - DNA, 396 bp, Arabidopsis thaliana
ctcgattctgtatgatctcttcgatctaatcgagtcttctaaacgttccgtgtagaatttcaaatctagggtttgctaaagcttgaacctttcttacccttttctctcgaagaggttttgattcctgggcatgaatttttccctaatcttgttaccttcgaagcataacaacaacgaaagatgtcagattcaatccaggaaagatacttagttggatacgcactcgcagccaagaaacagcatagtttcatccaaccttctttgatcgaacactcaaggcaacgaggcattgatctggtcaagcttgatccgacgaaatcgttgttggagcaagggaagcttgattgcataatccacaagctttacgatgtgtattggaaggagaatcttcatgag

SEQ ID NO: 142207 - DNA, 389 bp, Arabidopsis thaliana
gggacaacaaggccaaccatgggaaggacagggacagcatggacaacaagggttccgtgacatgcaccagaaggtggaacatgtgagacgcggagacgtctttgccaacactccaggctctgcccactggatctacaactcaggagaacagccacttgtcatcatcgctcttctcgacatcgccaactaccaaaaccaactcgaccgcaaccctagagtgttccatttggccggaaacaaccagcagggaggctttggcggttcacagcaacaacaagaacagaaaaacttgtggagcgggttcgacgcacaggtcatagctcaagcattgaaaattgacgttcagttggctcagcagcttcagaaccaacaagacagcagaggaaaca

SEQ ID NO: 142208 - DNA, 398 bp, Arabidopsis thaliana
aaacatacacacatagcaaaaaatggcaaacaagttgttcctcgtctgcgcagctctcgctctctgcttcctcctcaccaacgcttccatctaccgcaccgtcgttgagttcgaagaagatgacgccactaaccccataggcccaaaaatgaggaaatgccgcaaggagtttcagaaagaacaacacctaagagcttgccagcaattgatgctccagcaagcaaggcaaggccgtagcgatgagtttgatttcgaagacgacatggagaacccacagggacaacagcaggaacaacagctattccagcagtgctgcaacgagcttcgccaggaagagccagattgtgtttgccccaccttgaaacaagctgccaaggccgttagactccagggacagc

SEQ ID NO: 142209 - DNA, 397 bp, Arabidopsis thaliana
gaaccaacaagacagcagaggaaacatcgttcgtgttaagggacctttccaggtcgtgaggccacctctaagacagccctacgagagcgaggagtggagacacccacgtagcccacagggcaacggccttgaggagactatctgcagcatgaggtcccacgagaacattgacgaccctgctcgtgctgacgtgtacaagcccagcctaggtcgcgtgaccagcgtcaacagctataccttgcccatcttggagtatgtcaggctcagtgccactcgtggcgttctccagggtaatgcgatggtgcttcctaaatacaacatgaacgctaacgagatcttgtactgcactggaggacaaggaaggatccaagtggtcaacgacaacggacagaacgtg

SEQ ID NO: 142210 - DNA, 379 bp, Arabidopsis thaliana
cttgaacttggaggatcaatggccgacgttcgctcacactcgcaccagcttcaagtgcaccctcaacgccagcatgaaggaggcatcaaagtcctttatcctcagagtggcccttcttccactcaggtgctagccgtgtttgtcggtgtaccgataggaggaacgctgctgactatagccggtttgacattagccggttcggttataggactaatgctagcattcccgttgtttctcatctttagtccggttattgtaccagcagcctttgtcatcggtctagctatgactggattcctggcttcaggggccataggtctcaccggactatcatccatgtcgtgggtactcaactacatccgccgggccgggcagcata

SEQ ID NO: 142211 - DNA, 394 bp, Arabidopsis thaliana
atggactcgcagccgatgcaaggacaacaacaaggccaaccatggcaaggacgacagggacaacaaggccaaccatgggaaggacagggacaacagggacaacaaggaagacaaggccaaccatgggaaggacagggacaacagggacaacaaggacgacagggacaacaaggccaaccatgggaaggacagggacagcagggacaacaagggttccgtgacatgcaccagaaggtggaacatgtgagacgcggagacgtctttgccaacactccaggctctgcccactggatctacaactcaggagaacagccacttgtcatcatcgctcttctcgacatcgccaactaccaaaaccaactcgaccgcaaccctagagtgttccatttggccg

SEQ ID NO: 142212 - DNA, 388 bp, Arabidopsis thaliana
agaaataacaaaatggctcgagtctcttctcttctttctttcttcttaacacttttgatccttttccatggctacgcggctcaacagggtcagcagggtcagcagtttccgaacgagtgccagctcgaccagctcaatgcgctcgagccgtcacacgtactgaagagcgaggctggtcgcatcgaggtgtgggaccaccacgctcctcagctccgttgctcaggtgtctcctttgcacgttacatcatcgagtctaagggtctctacttgccctctttctttaacaccgcgaagctctctttcgtggctaagggacgaggtcttatgggaaaagtgatccctggatgcgccgaaacattccaagactcatcagagttccaaccacgct

SEQ ID NO: 142213 - DNA, 393 bp, Arabidopsis thaliana
ttgaaaacgttaaatgatcttctcctccgatcattaatctcttttaatctttctcagtctcttcttgttcgtgatctctcttcctccggaaaagatgtcggccggtaacggaaatgctactaacggtgacggaggttttagtttccctaaaggaccggtgatgccgaagataacgaccggagcagcaaagagaggtagcggagtctgccacgacgatagtggtccgacggtgaatgccacaaccatcgatgagcttcattcgttacagaagaaacgttctgctcctaccacaccgatcaaccaaaacgccgccgctgcttttgccgccgtctccgaggaggagcgtcagaagattcagcttcaatctatcagtgcatcgttagcatcgttaac

SEQ ID NO: 142214 - DNA, 396 bp, Arabidopsis thaliana
gggacaacagggacaacaaggacgacagggacatcaaggccaaccatgggaaggacagggacagcagggacaacaagggttccgtgacatgcaccagaaggtggaacatgtgagacgcggagacgtctttgccaacactccaggctctgcccactggatctacaactcaggagaacagccacttgtcatcatcgctcttctcgacatcgccaactaccaaaaccaactcgaccgcaaccctagagtgttccatttggccggaaacaaccagcagggaggctttggcggttcacagcaacaacaagaacagaaaaacttgtggagcgggttcgacgcacaggtcatagctcaagcattgaaaattgacgttcagttggctcagcagcttcagaacca

SEQ ID NO: 142215 - DNA, 388 bp, Arabidopsis thaliana
ggacaacaaggccaaccatgggaaggacagggacagcagggacaacaagggttccgtgacatgcaccagaaggtggaacatgtgagacgcggagacgtctttgccaacactccaggctctgcccactggatctacaactcaggagaacagccacttgtcatcatcgctcttctcgacatcgccaactaccaaaaccaactcgaccgcaaccctagagtgttccatttggccggaaacaaccagcagggaggctttggcggttcacagcaacaacaagaacagaaaaacttgtggagcgggttcgacgcacaggtcatagctcaagcattgaaaattgacgttcagttggctcagcagcttcagaaccaacaagacagcagaggaaaca

SEQ ID NO: 142216 - DNA, 392 bp, Arabidopsis thaliana
aaaaagaaaatggttaagctcagcaatctcctcgttgcaaccttcggggttctcctcgtccttaacggctgccttgcgaggcagtcacttggggttcctcctcagctacagaacgagtgtaacctcgacaacctagatgttctccaagccaccgaaactatcaagagtgaagccggtcagatcgagtactgggaccacaaccaccctcagctccgatgtgttggtgtttccgttgctcgttatgtaattgaacaaggcggtctttacttgcccaccttcttcacttccccaaaaatttcctacgtcgttcaaggaacgggtatcagcggaagagtggtccctggatgtgccgagaccttcatggactcgcagccgatgcaaggacaacaaca

SEQ ID NO: 142217 - DNA, 393 bp, Arabidopsis thaliana
caaatattcctactttttcatgctaagattttgatttattgttaaatcacttatatttaaatgattcctgcatttcgagctcgtctaatggaattcatgtttggaatcgatgtctcgacatacgtttttttgttcgattagacatagtagcaaaaacaagtgaagcacaatggggatcatcgaaaggattaaagaaatcgaggccgagatggctcggactcagaagaataaagctacagagtatcatcttggtcagctcaaggcaaagattgcaaaactcaggacacaactgttggagcctccaaaaggtgctagtggaggcggggaaggttttgaagttaccaagtatggtcatggacgtgttgcacttataggatttcctagtgtcggaaa

SEQ ID NO: 142218 - DNA, 395 bp, Arabidopsis thaliana
aacaaacaaaaagaaaatggttaagctcagcaatctcctcgttgcaaccttcggggttctcctcgtccttaacggctgccttgcgaggcagtcacttggggttcctcctcagctacagaacgagtgtaacctcgacaacctagatgttctccaagccaccgaaactatcaagagtgaagccggtcagatcgagtactgggaccacaaccaccctcagctccgatgtgttggtgtttccgttgctcgttatgtaattgaacaaggcggtctttacttgcccaccttcttcacttccccaaaaatttcctacgtcgttcaaggaacgggtatcagcggaagagtggtccctggatgtgccgagaccttcatggactcgcagccgatgcaaggacaac

SEQ ID NO: 142219 - DNA, 388 bp, Arabidopsis thaliana
gttagagccctataaaggacttgttttgttggtcgttgtgtatttctcatgacatgagtgtgtgtaccttctcaggttcttggtgttaaccctatagagggatttgacaagatcaagcaaacttatggaaggaaacttaaagatgctcagaggagcggtgatgaagccactgctgctctagtaagttacgttacctctctctttctttggagtcctgtaagtgattttttttttttttttttttcttgttaacacgtctctgttttaccttttgatagcttgagaaagcatatgataagctcatgtatgcccagttgatgaataggaaaaagggtgtgacttttggttcgtttaaggtgtgtatcgtatcctctttcttgtcatatgc

SEQ ID NO: 142220 - DNA, 394 bp, Arabidopsis thaliana
ctctcaatgagataactcctgggatgatagacaaattgcctccaacagattcaagactgagaccagaccaaagacacttagaaaacggtgaatatgagtcagcaaatgccgagaaactgagacttgaacagttacagagacaggtacaaaatctataggagaatatgttaatcttgactatatacataattgtgcatgaccacaggactgaatatagaagagtgtgccgtttgtgtgttgcaggcaaggaggctgcaggagaaaggatggaaaccaagatggtttgaaaaagatgaagaaggaaattatcggtatctaggaggttactgggaagcaagagagaagaaagattgggatagaatcactgacattttcaagaagcaacaacagcgta

SEQ ID NO: 142221 - DNA, 388 bp, Arabidopsis thaliana
gaaatctgttgaagcgtatgttacacgctccggtggacacgtcatcgaggtacagttaccttttccggttatttcggcggatgagattattgaccggtttaggattggtttagagtctggtaaagcgaatggtaggagagttaggttagctttgattgatcatgtgacttctatgccaagtgttgtgattcctattaaagagcttgtgaagatttgtagaagagaaggtgttgaccaagtttttgttgatgctgctcatgggataggttgtgttgatgttgatatgaaggagattggtgctgatttctatactagtaatcttcataagtggttttttcgcaccgccttctgttgctttcttgtattgtaggaaatcgagtaatggtgg

SEQ ID NO: 142222 - DNA, 393 bp, Arabidopsis thaliana
gtctcatctattatctctttctctttgacactcttgatcctcttcaatggctacactgcccaacagtggcccaacgagtgccagctcgatcaactcaatgcgctcgaaccatcccaaatcatcaagagcgagggtggtcgcatcgaggtctgggaccaccatgcaccccagctccgttgctccggctttgcctttgagcgtttcgtcattgagcctcagggtcttttcttgcccactttcttgaacgccggcaaactcacgtttgttgttcacggaaggggtctaatgggaagagttattccgggatgcgccgagacgttcatggagtcaccggtatttggagaaggtcaaggtcagggtcagagtcaagggttccgtgacatgcaccagaaa

SEQ ID NO: 142223 - DNA, 389 bp, Arabidopsis thaliana
agaaaaatgggtcgagtctcatctattatctctttctctttgacactcttgatcctcttcaatggctacactgcccaacagtggcccaacgagtgccagctcgatcaactcaatgcgctcgaaccatcccaaatcatcaagagcgagggtggtcgcatcgaggtctgggaccaccatgcaccccagctccgttgctccggctttgcctttgagcgtttcgtcattgagcctcagggtcttttcttgcccactttcttgaacgccggcaaactcacgtttgttgttcacggaaggggtctaatgggaagagttattccgggatgcgccgagacgttcatggagtcaccggtatttggagaaggtcaaggtcagggtcagagtcaagggtt

SEQ ID NO: 142224 - DNA, 394 bp, Arabidopsis thaliana
aagaaaaatgggtcgagtctcatctattatctctttctctttgacactcttgatcctcttcaatggctacactgcccaacagtggcccaacgagtgccagctcgatcaactcaatgcgctcgaaccatcccaaatcatcaagagcgagggtggtcgcatcgaggtctgggaccaccatgcaccccagctccgttgctccggctttgcctttgagcgtttcgtcattgagcctcagggtcttttcttgcccactttcttgaacgccggcaaactcacgtttgttgttcacggaaggggtctaatgggaagagttattccgggatgcgccgagacgttcatggagtcaccggtatttggagaaggtcaaggtcagggtcagagtcaagggttccgt

SEQ ID NO: 142225 - DNA, 333 bp, Arabidopsis thaliana
gtttactagattttaacccgcggtacaccgcggagacaattcattttttaaaattaatatatataaaatttgtaaattattttatagtttacaattgttactaagtaacgtcctgccaaacccgtcccgccaaacccatccacaaaaaaaatatttattttattaatgttgatcttatttataatatgtttatgaatcattgtcaaaagattttattcgttacgggatgttgaacccacacatttttcgccaattagttaatatatgttcattcttaaaatttcgaatcataaaatatgacgaattttttttttgagatttttttaaactcta

SEQ ID NO: 142226 - DNA, 394 bp, Arabidopsis thaliana
aaaaccttgaaacctttaaaaaatcgaaactatggctaagctcattctcgttttcgcaactcttgccctcttcatcctcctagccaacgcatccatctaccgcacagtggtggagttcgaggaagatgatgacgtgagcaacccacaacaaggtaagtgccagagggagtttatgaagcatcagcaactaagaggttgcaagcaatggatccgcaagagagctcaacaaggaagaatcggatacgaagctgatgactttgagctcactcttgatgtcgatcttgaggacgatgagaacccaatggggcctcaacaacagtcatctcttaaaatgtgttgtaatgaattaaggcaagtggacaagatgtgtgtgtgtcctacactgaaaaaggcg

SEQ ID NO: 142227 - DNA, 429 bp, Arabidopsis thaliana
cggaacggaagggccggcccacgcgtccgcatacacacatagcaaaaaatggcaaacaagttgttccttgtctgcgcagctctcgctctctgcttgctcctcaccaacgcttccatctaccgcaccgtcgttgagttcgaagaagatgacgccactaaccccataggcccaaaaatgaggaaatgccgcaaggagtttcagaaagaacaacacctaagagcttgccagcaattgatgctccagcaagcaaggcaaggccgtagcgatgagtttgatttcgaagacgacatggagaacccacagggacaacagcaggaacaacagctattccagcagtgctgcaacgagcttcgccaggaagagccagattgtgtttgccccaccttgaaacaagctgccaaggccgttagactccagggacagcaccaa

SEQ ID NO: 142228 - DNA, 124 bp, Arabidopsis thaliana
catacacacatagcaaaaaatggcaaacaagttgttcctcgtctgcgcagctctcgctctctgtttcctcctaaccaacgtttcaattttccggaccggtctttgatttcgaaaaaaataaccc

SEQ ID NO: 142229 - DNA, 389 bp, Arabidopsis thaliana
cgagaaatctttttgggcgacgttggttgctcggtgctctttctccgatctgactccattttcggtgatttaaagacaggatgtggctgcggagatgccttcacttacctccgtcgaatcgaattttctggttttgccatatcttcaggaatcagggtttacacacgctgcattcactctaggttatgacgcacggatttataaagccaacattgatgggaatatggttccacctggtgctcttatcaaatttgctcagaaaggtcttcagtacatgcagatggaagctcatttgagcaataacgaagtggacattgatgaggatttctgattctttcaacccttggatctgatttcaaaggatgcaaaggcactgcacgatatgctca

SEQ ID NO: 142230 - DNA, 395 bp, Arabidopsis thaliana
ctcaggaggaggaagaagaagaagaaggacgacacggacgacacggtaatggcttagaggagaccatctgcagcgccaggtgcaccgataacctcgatgatccgtctcgtgctgacgtgtacaagccacagctcggttacatcagcactctcaacagttacgatctccccatccttcgcttcatccgtctctcagccctccgtggatctatccgtcaaaacgcaatggtgcttccacagtggaacgcaaacgcgaacgccattctttacgtgacagacggggaagcccaaatccagatcgtaaacgacaatggtaacagagtgtttgacggacaagtctctcaaggacagctcatagccgtaccacaaggtttctcggtggtgaaacgcgcaaca

SEQ ID NO: 142231 - DNA, 393 bp, Arabidopsis thaliana
cttccccaaaagcgactgctctaatatagccattgtttcttaaacttgacgaaagacttttgagaacaaaaatagaaaatgtggccaaaatatcaacaagcctatacaaagtttgaagatgacaaaccagtcccggtcaagaatttcgatattatatttatataggttgcaagttgaaactgaggtggggttttccaaatgtttattttataactatgagaacagttctactgataaaggttatataattaattatcaattaatgaaaatgtttaatgtgaaagatttctcaaattcaaagaaaattaaacattgcaaagacttgttaatgttataatgctaaaagcaaggaaaactaagggaggttggttttagagttggatgatgtgacct

SEQ ID NO: 142232 - DNA, 165 bp, Arabidopsis thaliana
cgatgtgttggtgtttccgttgctcgttatgtaattgatcaaggcggtctttacttgcccaccttcttcactttcccaaaaatttcctacgtcgttcaaggaacgggtatcagcggaagagtggtccctggatgtgccgagaccttcatggactcgcagccgatg

SEQ ID NO: 142233 - DNA, 240 bp, Arabidopsis thaliana
ccggaactgaagggccgacccacgcgaccggcttaacggctgccttgcgaggcagtcacttggggttccttctcagctacagaacgagtgtaacctcgacaacctagatgttctccaagccaccgaaactatcaagagtgaagccggtcagatcgagtactgggaccacaaccaccctcagctccgatgtgttggtgtgtccgttgctcgatatgtaattgaacaaggcgggctttactt

SEQ ID NO: 142234 - DNA, 396 bp, Arabidopsis thaliana
acgataagaaagcagcacgaacaccaactcttaaggttaacatctaagttatggttaagtaattgcatgcaatttaaagctacgtgtccagcttaagacactcaagtctcacatctgtccctttttacttcgacttcgcttcttttggcttcttttaaactctctctatctctctctttcttcttcacactttgttgttaatttcaagtgtttgatcataatggcaacatcagctcgtagagcatacggtttcggtagagccgatgaggctacacaccctgactccattagagcaactttagctgagtttctctccacttttgtcttcgtctttgcagctgaaggctctatcctctttcttgataagttgtattgggaacatgcggttcatgcggg

SEQ ID NO: 142235 - DNA, 392 bp, Arabidopsis thaliana
caaaaagaaaatggttaagctcagcaatctcctcgttgcaaccttcggggttctcctcgtccttaacggctgccttgcgaggcagtcacttggggttcctcctcagctacagaacgagtgtaacctcgacaacctagatgttctccaagccaccgaaactatcaagagtgaagccggtcagatcgagtactgggaccacaaccaccctcagctccgatgtgttggtgtttccgttgctcgttatgtaattgaacaaggcggtctttacttgcccaccttcttcacttccccaaaaatttcctacgtcgttcaaggaacgggtatcagcggaagagtggtccctggatgtgccgagaccttcatggactcgcagccgatgcaaggacaacaac

SEQ ID NO: 142236 - DNA, 391 bp, Arabidopsis thaliana
caacaatggaaatgagcctctcattcttgttgcagtcgcggatctcgccagcaaccagaaccagcttgaccgcaaccttagaccatttttgatagccggaaacaacccacaagggcaggaatggctacaaggccgaaagcaacagaagcaaaacaacatcttcaatggcttcgcacctgagatcttggctcaagccttcaagatcaatgtcgagacggctcagcagctccagaaccagcaagataaccgtggcaacatcgtcaaggtcaacggacctttcggcgtcattaggccacccttgagacgcggcgaaggcggccaacaaccacatgaaatagctaatggtttagaggagactttgtgcaccatgcgatgcactgaaaacctcgat

SEQ ID NO: 142237 - DNA, 391 bp, Arabidopsis thaliana
cgcacaggtcatagctcaagcattgaaaattgacgttcagttggctcagcagcttcagaaccaacaagacagcagaggaaacatcgttcgtgttaagggacctttccaggtcgtgaggccacctctaagacagccctacgagagcgaggagtggagacacccacgtagcccacagggcaacggccttgaggagactatctgcagcatgaggtcccacgagaacattgacgaccctgctcgtgctgacgtgtacaagcccagcctaggtcgcgtgaccagcgtcaacagctataccttgcccatcttggagtatgtcaggctcagtgccactcgtggcgttctccagggtaatgcgatggtgcttcctaaatacaacatgaacgctaacgag

SEQ ID NO: 142238 - DNA, 410 bp, Arabidopsis thaliana
gtcgcatcgaggtctgggaccaccatgcaccccagctccgttgctccggctttgcctttgagcgtttcgtcattgagcctcagggtcttttcttgcccactttcttgaacgccggcaaactcacgtttgttgttcacggaaggggtctaatgggaagagttattccgggatgcgccgagacgttcatggagtcaccggtatttggagaaggtcaaggtcagggtcagagtcaagggttccgtgacatgcaccagaaagtagagcacctacggtgcggtgacaccattgcaacaccatctggtgtagctcaatggttctacaacaatggaaatgagcctctcattcttgttgcagccgcggatctcgccagcaaccagaaccagcttgaccgcaaccttagaccatttttg

SEQ ID NO: 142239 - DNA, 408 bp, Arabidopsis thaliana
aacaaaaagaaaatggttaagctcagcaatctcctcgttgcaaccttcggggttctcctcgtccttaacggctgccttgcgaggcagtcacttggggttcctcctcagctacagaacgagtgtaacctcgacaacctagatgttctccaagccaccgaaactatcaagagtgaagccggtcagatcgagtactgggaccacaaccaccctcagctccgatgtgttggtgtttccgttgctcgttatgtaattgaacaaggcggtctttacttgcccaccttcttcacttccccaaaaatttcctacgtcgttcaaggaacgggtatcagcggaagagtggtccctggatgtgccgagaccttcatggactcgcagccgatgcaaggacaacaacaaggccaaccatgg

SEQ ID NO: 142240 - DNA, 407 bp, Arabidopsis thaliana
gccaatctcagtctcatcatctccgatgggaaaacccggcggcgcaaagaccagaaccgccgtatgtttatcagacggtgttttctttctcgccggagctttcatgtctctcactctcgtctggtcttacttctcaatcttttcaccttctttcaccagtttacgtcacgacggcaaaccggttcaatgctccggtttagacatgcaattcgacccatccgagcccggtttttacgacgacccggatctaagctactcgatcgagaaaccaatcacaaaatgggacgagaaacgaaaccaatggtttgaatcacacccatctttcaaacccggttcagaaaaccggatcgtaatggtaaccggttcacaatcctcgccgtgtaaaaacccaatcggagaccatttat

SEQ ID NO: 142241 - DNA, 361 bp, Arabidopsis thaliana
ataaaaacgagtcaaagtggattggccaatactagcacttccgcgtaataattctacaagaggtgatcctattaccggaatagcgtcaggtacacctgttacaattttgaccggccaataaccaatttgatcccaaggtaaagaataacctgttacaccaaaagatgcggtcaatacacccagaaccacaccagtgacccaagttaattcgcgagggtttttaaaaccaccggtgaggtatacaccaaatacgtgccggatcattattaggaccattatacttggcgaccattgatgaactgatcggattaaccaaccaaaggtagcttcagtcattatatattgaacagaagccaaagct

SEQ ID NO: 142242 - DNA, 440 bp, Arabidopsis thaliana
ccggaacggcagggtcggcccaggcgtcccaaagaaaatggttaagctcagcaatctcctcgttgcaaccttcggggttctcctcgtccttaacggctgccttgcgaggcagtcacttggggttcctcctcagctacagaacgagtgtaacctcgacaacctagatgttctccaagccaccgaaactatcaagagtgaagccggtcagatcgagtactgggaccacaaccaccctcagctccgatgtgttggtgtttccgttgctcgttatgtaattgaacaaggcggtctttacttgcccaccttcttcacttccccaaaaatttcctacgtcgttcaaggaacgggtatcagcggaagagtggtccctggatgtgccgagaccttcatggactcgcagccgatgcaaggacaacaacaaggccaaccatggcaaggac

SEQ ID NO: 142243 - DNA, 414 bp, Arabidopsis thaliana
gccacttgtcatcatcgctcttctcgacatcgccaactaccaaaaccaactcgaccgcaaccctagagtgttccatttggccggaaacaaccagcagggaggctttggcggttcacagcaacaacaagaacagaaaaacttgtggagcgggttcgacgcacaggtcatagctcaagcattgaaaattgacgttcagttggctcagcagcttcagaaccaacaagacagcagaggaaacatcgttcgtgttaagggacctttccaggtcgtgaggccacctctaagacagccctacgagagcgaggagtggagacacccacgtagcccacagggcaacggccttgaggagactatctgcagcatgaggtcccacgagaacattgacgaccctgctcgtgctgacgtgtacaagcc

SEQ ID NO: 142244 - DNA, 159 bp, Arabidopsis thaliana
aggccaaccatgggaaggacagggacaacagggacaacttggacgacagggacaacaaggccaaccatgggaaggacagggacagcagggacaacaagggttccgtgacatgcaccagaaggtggaacatgtgagacgcggagacgtctttgccaacac

SEQ ID NO: 142245 - DNA, 408 bp, Arabidopsis thaliana
  unsure (1)..(408): unsure at all n locations
gctgtttttatagtcctacaaggtaaaggagtgatcgagtttgtgacggataaaacaaaagaatcgttccacataactaaaggtgatgtggtaagaatcccttctggtgtcaccaactttatcaccaacactaaccagacggttcctcttcgnctcgcccagatcaccgtccctgtcaacaatcccggcaactacaaggattactttcctgctgcattccaatttcagcaattctacttcaatgggtttaccaaagaagtcctctctaccagtttcaacgtgccggaagaattgctagggagattggttacgagatcaaaagaaattggtcaagggattatccgaagaatttcttcagaccaaatcaaggaacttgctgagcacgctacatcttcttcaaacaaacac

SEQ ID NO: 142246 - DNA, 380 bp, Arabidopsis thaliana
caaccagcagggaggctttggcggttcacagcatttacaagaacagaaaaacttgtggagcgggttcgacgcacaagtcatagctcaagcattgaaaattgacgttcaattggctcaacagcttcagaaccaacaagaccgcagagggaacatcgttcgtgttaagggacctttccaggtcgtgaggccacctttaagacagccctaccagagccaggagtggagacacccacatagcccacaaggcaaccgccttgaggagactatttgcagcatgaggtcccacgagaaccttgaccacccttcttgtgcttacctgtacaagcccaacctaagttgcgtgaccagcgttaacagctattccttggccatcttggagt

SEQ ID NO: 142247 - DNA, 408 bp, Arabidopsis thaliana
aacaaaaagaaaatggttaagctcagcaatctcctcgttgcaaccttcggggttctcctcgtgcttaacggctgccttgcgaggcagtcacttggggttcctcctcagctacagaacgagtgtaacctcgacaacctagatgttctccaagccaccgaaactatcaagagtgaagccggtcagatcgagtactgggaccacaaccaccctcagctccgatgtgttggtgtttccgttgctcgttatgtaattgaacaaggcggtctttacttgcccaccttcttcacttccccaaaaatttcctacgtcgttcaaggaatgggtatcagcggaagagtggtccctggatgtgccgagaccttcatggactcgcagccgatgcaaggacaacaacaaggccaaccatgg

SEQ ID NO: 142248 - DNA, 405 bp, Arabidopsis thaliana
gtgagtgacacgactgtgtttccacatttgctggtacataaacttctgggggaatgtttatccgacatacgtagcgttgccataccttcaccagacgaatggccgaatagtcgtgaatgcatcggttgaaaactggttgcctctaccacggatgagtctttattctgctgcaaaagcagcattagtcaacttctatgagacgctgcgtttcgagctaaatggagacgttggtataactatcgcgactcacgggtggattggcagtgagatgagtggaggaaagttcatgctagaagaaggtgctgagatgcaatggaaggaagagagagaagtacctgcaaatggtggaccgctagaggaatttgcaaagatgattgtggcatgagctttgtagggagatgcata

SEQ ID NO: 142249 - DNA, 409 bp, Arabidopsis thaliana
aaacaaaaagaaaatggttaagctcagcaatctcctcgttgcaaccttcggggttctgctcgtccttaacggctgccttgcgaggcagtcacttggggttcctcctcagctacagaacgagtgtaacctcgacaacctagatgttctccaagccaccgaaactatcaagagtgaagccggtcagatcgagtactgggaccacaaccaccctcagctccgatgtgttggtgtttccgttgctcgttatgtaattgaacaaggcggtctttacttgcccaccttcttcacttccccaaaaatttcctacgtcgttcaaggaacgggtatcagcggaagagtggtccctggatgtgccgagaccttcatggactcgcagccgatgcaaggacaacaacaaggccaaccatgg

SEQ ID NO: 142250 - DNA, 128 bp, Arabidopsis thaliana
aagaaataacaaaatggctcgagtctcttctcttctttctttcttcttaacacttttgatccgtttccatggctacgcggctcaacagggtcagcagggtcagcagtttcccgaacgagtgccagctc

SEQ ID NO: 142251 - DNA, 52 bp, Arabidopsis thaliana
  unsure (1)..(52): unsure at all n locations
cttnncactctctccatctcgtcgtatctgtgactctcgtgatcatcgcctg

SEQ ID NO: 142252 - DNA, 271 bp, Arabidopsis thaliana
cacatagcaaaaaatggcaaacaagttgtttctcgtctgcgcagctctcgctctctggttcctgctcaccaacgcttccatctaccgcaccgtcgttgagttcgaagaagatgacgccactaaccccataggcccaaaaatgaggaaatgccgcaaggagtttcagaaagaacaacacctaagagcttgccagcaattgatgctccagcaagcaaggcaaggccgtagcgatgagtttgatttcgaagacgacatggagaacccacaggga

SEQ ID NO: 142253 - DNA, 408 bp, Arabidopsis thaliana
acaatttctcattagctaacaatggcggatacacaccgtgtcgaccgtactgatagacactgtcaatttcagtcgccctatgaaggcggccgaggtcaaggtcagtatgaaggtgaccgtggttacggtggtggcggttacaagagcatgatgcctgaaagtggcccatctagtacccaagtattgtccctgttgattggagtccctgtcgtcggttcgctacttgccttggctggattacttctagctggttcggtgatcggcttaatggttgctttaccactatttctcctcttcagcccggttatagtcccagcggctctaactatcgggcttgcaatgacaggctttttagcctcggggatgttcggtctaaccgggcttagctcaatctcatgggtcatgaac

SEQ ID NO: 142254 - DNA, 411 bp, Arabidopsis thaliana
tacacacatagcaaaaaatggcaaacaagttgtttcttgtctgcgcagctctcgctctctggttccggctcaccaacgcttccatctaccgcaccgtcgttgagttcgaagaagatgacgccactaaccccataggcccaaaaatgaggaaatgccgcaaggagtttcagaaagaacaacacctaagagcttgccagcaattgatgctccagcaagcaaggcaaggccgtagcgatgagtttgatttcgaagacgacatggagaacccacagggacaacagcaggaacaacagctattccagcagtgctgcaacgagcttcgccaggaagagccagattgtgtttgccccaccttgaaacaagctgccaaggccgttagactccagggacagcaccaaccaatgcaagtca

SEQ ID NO: 142255 - DNA, 133 bp, Arabidopsis thaliana
taaaccctactcttcttcttttacctccagcttttattataccattccttggttgggaaggggttttagttggtaagggttataactggataccagacccccagggcacatggtcttatgaggttttgggcct

SEQ ID NO: 142256 - DNA, 321 bp, Arabidopsis thaliana
caaaaagaaaatggttaagctcagcaatctcctcgttgcaaccttcggggttctcttcgtccttaacggctgccttgcgaggcagtcacttggggttccttcttaactaccaaaccagtgttaccttgaccacctaaattttcttcaagccacccaaactattaaaagtgaaacccgtcaaaacgagttcttggaccaccaccacccttaagttccatttggtgggggtttccgtggttggtattgaattggaccaagccggctttaattggccaactttttcaatttcccaaaaatttcctaccgcggtcaaaggaccgg

SEQ ID NO: 142257 - DNA, 399 bp, Arabidopsis thaliana
gttttacaaaaaaatttgaattgaaaaacctaaatctagttttctaattgtgccttacatctgtgaagtattctgattttatattcttatttagtataaggttaaacaatttattggattatttctttggttttaaaccttttctttcctttttttttgggtcaacaaaacttttattttaaaataacttaattttagggggtatttaaaatttggttggctcatggcatacatatggtttttcttttttagagattttattaaatattaggttatttttttcgaattaaaaggcccggaaaggcatggtacccttttattggccaaatgggcttttaaaatttaggtttggaggtttattggcccgggccggcttggttttaaattttgaaggttgga

SEQ ID NO: 142258 - DNA, 405 bp, Arabidopsis thaliana
ctaaaattaatttacaggaacgggtatcagtggttgagtggtccctggatgtgccgagaccttcatggactcgcagccgatgcaaggacaacaacaaggccaaccatggcaaggacgacagggacaacaaggccaaccatgggaaggacagggacaacagggacaacaaggaagacaaggccaaccatgggaaggacagggacaacagggacaacaaggacgacagggacaacaaggccaaccatgggaaggacagggacagcagggacaacaagggttccgtgacatgcaccagaaggtggaacatgtgagacgcggagacgtctttgccaacactccaggctctgcccactggatctacaactcaggagaacagccacttgtcatcatcgctcttctcgacat

SEQ ID NO: 142259 - DNA, 409 bp, Arabidopsis thaliana
gagaatatatcttcttactctttgtattccaatattggagtgtatttcacgtcatttgtcattatcatttagttcagttttaattttatttagttttgtacaatttcaatcaaaaaaggagtctttatgtcacgttaccgagggcctcgttttaaaaaaatacgccgtctgggggctttaccgggactaactagtaaaaggcctaaggcaggaagcgatcttagaaaccaatcacgctccgtaaaaaaatctcaatatcgtattcgtttagaagaaaaacaaaaattgcgttttcattatggtcttacagaacaccaattacttaaatatgtgcgtatagccggaaaagccaaggggtcaacaggtcaagttttactacaattacttgaaatgcgtttggataacatct

SEQ ID NO: 142260 - DNA, 411 bp, Arabidopsis thaliana
caaaaagaaaatggttaagctcaccaatctcctcgttgcaaccttcggggttctcctcgtccgtaacggctgccttgcgaggcagtcacttggggttcctcctcagctacagaacgagtgtaacctcgacaacctagatgttctccaagccaccgaaactatcaagagtgaagccggtcagatcgagtactgggaccacaaccaccctcagctccgatgtgttggtgtttccgttgctcgttatgtaattgaacaaggcggtctttacttgcccaccttcttcacttccccaaaaatttcctacgtcgttcaaggaacgggtatcagcggaagagtggtccctggatgtgccgagaccttcatggactcgcagccgatgcaaggacaacaacaaggccaaccatggcaagg

SEQ ID NO: 142261 - DNA, 410 bp, Arabidopsis thaliana
aacaaaaagaaaatggttaagctcagcaatctcctcgttgcaaccttcggggttctcctcgtccttaacggctgccttgcgaggcagtcacttggggttcctcctcagctacagaacgagtgtaacctcgacaacctagatgttctccaagccaccgaaactatcaagagtgaagccggtcagatcgagtactgggaccacaaccaccctcagctccgatgtgttggtgtttccgttgctcgttatgtaattgaacaaggcggtctttacttgcccaccttcttcacttccccaaaaatttcctacgtcgttcaaggaacgggtatcagcggaagagtggtccctggatgtgccgagaccttcatggactcgcagccgatgcaaggacaacaacaaggccaaccatggca

SEQ ID NO: 142262 - DNA, 409 bp, Arabidopsis thaliana
aaataaaaaagggaaaagtgggaaatcgatgcgtcaatcttaggtctccgaggtctcaattatttcatcttcttcggtgatttctggggaagatgctctggatttgggaaagcaactctgtcgatggatgaatctcttttcgaaacttctgggtgatatgcttaatgttgattatctgtggaaaatgatggtcttcttagcatgatcaaggtgtctgacttgtgaagtttgttagatgacggatgatgatttctgagaaaccgttgggagaagaatctatacggcaggatctggaggttttaaccgtttcgaggaggcttgtgaaaagtgttagccagaagttgaaaaaaaaaattcataaaactgaggtggtggaagatgaagaggttgcaaggggagcggtgaattg

SEQ ID NO: 142263 - DNA, 410 bp, Arabidopsis thaliana
gacgctgaaactgataaccctcaaaccgagctccagcctggaatcgaccttcttggtcctgttgatgagctgttcttcgacatctatgatagatatgagcctgtcaacgaacccactttggacaactgcttcataacaacgagttatgatgctacaacacactttgacacaactgttgttgatgtgttgaacatgtataaattgatcaccggaaaggaactggatctaagtgtggatcttaacgcagctagtgctgcagaggaggaatgatggaaaatattgcaagctctgtctctctctgttagtcaccaaatgatgtaaccggttctctttctccctcttcttaaaagttgtctcaccaaatgttctgttaaaatactaaatcaaaccgatctcatcatgcgtaccta

SEQ ID NO: 142264 - DNA, 409 bp, Arabidopsis thaliana
gtctcttctcttctttctttctccttaacacttttgatccttttccatggctacgcggctcggcagggtcagcagggtcagcagtttccgaacgagtgccagctcgaccagctcaatgcgctcgagccttcacacgtactgaagagcgaggctggtcgcatcgaggtgtgggaccaccacgctcctcagctccgttgctcaggtgtctcctttgcacgttacatcatcgagtctaagggtctctacttgccctctttctttaacaccgcgaagctctccttcgtggctaaaggacgaggtcttatgggaaaagtgatccctggatgcgccgaaacattccaagactcatcagagttccaaccacgcttcgaaggtcaaggtcaaagccagaggttccgtgacatgcacc

SEQ ID NO: 142265 - DNA, 413 bp, Arabidopsis thaliana
gtagggacaaaagggttataaactctaaacctgtatattagtgaacgataaccattgatgctgttattcatatggtaaggtatgctacttttaatgtcataattgtaaggaataccataatgacatcgtacccattcccctatagtctcctgcaatcatagatcctcctataagaatgacattgttctcttaccaagaaacattgttcccttaccaagaaaattaaaataaattgttaccttcttgatttgaagagctttgcgtacggtttcgtcattggcccaataggcagctagcaaaaaacggtaaatctgcaaaagcaaccttgtatacatatatttttctcaaatggtttaacagagggcaagaataagttgtatgaattacttacatagcaatttggagtttcagtt

SEQ ID NO: 142266 - DNA, 415 bp, Arabidopsis thaliana
gcgggattacccgctgagtttaagcatatcaatatgcgtaggaaaagaaactaacaaggattcccttagtaacggcgagcgaaccgggaagagcccagcttgaaaatcggacgtcttcggcgttcgaattgtagtctggagaagcgtcctcagcgacggaccgggcctaagttccctggaaaggggcgccagagagggtgagagccccgtcgtgcccggaccctgtcgcaccacgaggcgctgtctacgagtcgggttgtttgggaatgcagccccaatcgggcggtaaattccgtccaaggctaaatacgggcgagagaccgatagcgaacaagtaccgcgaggtaaagatgaaaaggactttgaaaagagagtcaaagagtgcttgaaattgtcgggagggaagcggatgggg

SEQ ID NO: 142267 - DNA, 404 bp, Arabidopsis thaliana
aacaatttctcattagcttacaatggcggatacataccgtgtcgaccgtactgatagacactgtcaatttcagtcgccctatgaaggcggccgaggtcaaggtcagtatgaaggtgaccgtggttacggtggtggcggttacaagagcatgatgcctgaaagtggcccatctagtacccaagtattgtccctgttgattggagtccctgtcgtcggttcgctacttgccttggctggattacttctagctggttcggtgatcggcttaatggttgctttaccactatttctcctcttcagcccggttatagtcccagcggctctaactatcgggcttgcaatgacaggctttttagccttgggggatgtcggtctaaccgggcttagcttaatcttatgggtca

SEQ ID NO: 142268 - DNA, 406 bp, Arabidopsis thaliana
caaacaaaaagaaaatggttaagctcagcaatcttctcgttgcaaccttcggggttctgctcgtccttaacggctgccttgcgaggcagtcacttggggttcctcctcagctacagaacgagtgtaacctcgacaacctagatgttctccaagccaccgaaactatcaagagtgaagccggtcagatcgagtactgggaccacaaccaccctcagctccgatgtgttggtgtttccgttgctcgttatgtaattgaacaaggcggtctttacttgcccaccttcttcacttccccaaaaatttcctacgtcgttcaaggaacgggtatcagcggaagagtggtccctggatgtgccgagaccttcatggactcgcagccgatgcaaggacaacaacaaggccaacc

SEQ ID NO: 142269 - DNA, 407 bp, Arabidopsis thaliana
gtgttccatttggccggaaacaaccagcatggaggctttggcggttcacagcaacaacaagaacagaaaaacttgtggagcgggttcgacgcacaggtcatagctcaagcattgaaaattgacgttcagttggctcagcagcttcagaaccaacaagacagcagaggaaacatcgttcgtgttaagggacctttccaggtcgtgaggccacctctaagacagccctacgagagcgaggagtggagacacccacgtagcccacagggcaacggccttgaggagactatctgcagcatgaggtcccacgagaacattgacgaccctgctcgtgctgacgtgtacaagcccagcctaggtcgcgtgaccagcgtcaacagctataccttgcccatcttggagtatgtcag

SEQ ID NO: 142270 - DNA, 407 bp, Arabidopsis thaliana
aaaaatggctcgagtctcttctcttctttctttctccttaacacttttgatccttttccatggctacgctgctcaacagggtcagcagggtcagcagtttccgaacgagtgccagctcgaccagctcaatgcgctcgagccttcacacgtactgaagagcgaggctggtcgcatcgaggtgtgggaccaccacgctcctcagctccgttgctcaggtgtctcctttgcacgttacatcatcgagtctaagggtctctacttgccctctttctttaacaccgcgaagctctccttcgtggctaaaggacgaggtcttatgggaaaagtgatccctggatgcgccgaaacattccaagactcatcagagttccaaccacgcttcgaaggtcaaggtcaaagccagaggt

SEQ ID NO: 142271 - DNA, 351 bp, Arabidopsis thaliana
caaaaagaaaatggtaaagctcagcaatttcctctttgtaaccttcggggttctcctcgtgcttaacggctgtcttgcgaggcagtcacttggggttcctcctcagctacagaacgagtgtaacctcgacaacctagatgttctccaagccaccgaaactatcaagagtgaagccggtcagatcgagtactgggaccacaaccacccttagcttcgatgtgttggtgtttccggtgctcgttatgtaattgaaccaggcggtctttacttggccaccttcttcactttcccaaaaatttcctacgtcgttcaaggaacgggtattagcggaagaggggtccctggatgtgc

SEQ ID NO: 142272 - DNA, 411 bp, Arabidopsis thaliana
aaaaacatacacaagtaattaactaacaacaaatggcgaacaagctcttcctcgtctgcgcagctctcgccctgtgtttcatcctcaccaacgcttccgtctatcgcacggttgtcgagttcgacgaagatgacgccagtaaccccataggcccaatacagaaatgtcagaaggagtttcagcaagaacagcacctaagagcttgccagagatggatgcgcaagcaaatgtggcaaggacgtggtggtggtccttccctcgacgatgagttcgatatggaagacgacatcgagaacccgcagagacgacagctactccagaagtgctgcagcgagcttcgccaagaagagccagtttgcgtttgccccaccttgagacaagctgccaaggccgttagattccagggacagc

SEQ ID NO: 142273 - DNA, 406 bp, Arabidopsis thaliana
aaagaaaatggttaagctcagcaatctcctcgttgcaaccttcggggttctcctcgtccttaacggctgccttgcgaggcagtcacttggggttcctcctcagctacagaacgagtgtaacctcgacaacctagatgttctccaagccaccgaaactatcaagagtgaagccggtcagatcgagtactgggaccacaaccaccctcagctccgatgtgttggtgtttccgttgctcgttatgtaattgaacaaggcggtctttacttgcccaccttcttcacttccccaaaaatttcctacgtcgttcaaggaacgggtatcagcggaagagtggtccctggatgtgccgagaccttcatggactcgcagccgatgcaaggacaacaacaaggccaaccatggcaa

SEQ ID NO: 142274 - DNA, 411 bp, Arabidopsis thaliana
aagaaaatggttaagctcagcaatctcctcgttgcaaccttcggggttctcctcgtccttaacggctgccttgcgaggcagtcacttggggttcctcctcagctacagaacgagtgtaacctcgacaacctagatgttctccaagccaccgaaactatcaagagtgaagccggtcagatcgagtactgggaccacaaccaccctcagctccgatgtgttggtgtttccgttgctcgttatgtaattgaacaaggcggtctttacttgcccaccttcttcacttccccaaaaatttcctacgtcgttcaaggaacgggtatcagcggaagagtggtccctggatgtgccgagaccttcatggactcgcagccgatgcaaggacaacaacaaggccaaccatggcaaggacga

SEQ ID NO: 142275 - DNA, 395 bp, Arabidopsis thaliana
  unsure (1)..(395): unsure at all n locations
cttttcgcaaaacacacatcacacaccattttcacaacatcgaacttatcgncttnctctctgtctcaatacctctctcaatttctggatccaccatgcaagctcttcaatcttcatcttttcgtgcttcttcttcaaacccacttcgcttaccatcaaatcgtcaatcacattagcttattaccaatgcgagacctttgcgaagaccacaacggtcctttatcttcggattaacattcactggcttcggttcttaacgccaaacaaatcccaagaaaccaggtggcattactgggatgggtctcggctctggggttgggtacgatggtggtgcttactacgaggaaattgtggctggtgaggggtggaatcaagttgattgatcgtttcgatgc

SEQ ID NO: 142276 - DNA, 410 bp, Arabidopsis thaliana
agaaaaatgggtcgagtctcatctattatctctttctctttgacactcttgatcctcttcaatggctacactgcccaacagtggcccaacgagtgccagctcgatcaactcaatgcgctcgaaccatcccaaatcatcaagagcgagggtggtcgcatcgaggtctgggaccaccatgcaccccagctccgttgctccggctttgcctttgagcgtttcgtcattgagcctcagggtcttttcttgcccactttcttgaacgccggcaaactcacgtttgttgttcacggaaggggtctaatgggaagagttattccgggatgcgccgagacgttcatggagtcaccggtatttggagaaggtcaaggtcagggtcagagtcaagggttccgtgacatgcaccagaaagt

SEQ ID NO: 142277 - DNA, 415 bp, Arabidopsis thaliana
caactcaggagaacagccacttgtcatcatcgctcttctcgacatcgccaactaccaaaaccaactcgaccgcaaccctagagtgttccatttggccggaaacaaccagcagggaggctttggcggttcacagcaacaacaagaacagaaaaacttgtggagcgggttcgacgcacaggtcatagctcaagcattgaaaattgacgttcagttggctcagcagcttcagaaccaacaagacagcagaggaaacatcgttcgtgttaagggacctttccaggtcgtgaggccacctctaagacagccctacgagagcgaggagtggagacacccacgtagcccacagggcaacggccttgaggagactatctgcagcatgaggtcccacgagaacattgacgaccctgctcgtgct

SEQ ID NO: 142278 - DNA, 416 bp, Arabidopsis thaliana
gaaaacatacacaaatagcaaaacatggctaacaagctcttcctcgtctgcgcaactctcgccctctgcttcctcctcaccaacgcttccatctaccgcaccgttgtcgaattcgaagaagatgacgccagcaaccccgtaggtccaagacagagatgccagaaggagtttcagcaatcacaacacctaagagcttgccagagatggatgagcaagcaaatgaggcaaggacgtggtggtggtccttccctcgacgatgagttcgatttcgagggcccccagcagggataccagctactccagcagtgctgcaacgagcttcgccaggaagagccagtttgcgtttgccccaccttgaaacaagctgccagggcagttagcctccagggacagcacggaccattccaatccaggaa

SEQ ID NO: 142279 - DNA, 405 bp, Arabidopsis thaliana
ctcgatctccgtgaagctctcgaatctctggttttgagttttggagaatggtgggtttccgcagcgtatcggcctttactaggctgaggtctcgcgtcggccaacaatcttcactcagcaattctgtcagatggattcagatgcagagctctaccgacctggacctgaagtcgcagctgcaagagttaattccggaacagcaggaccgtctgaagaaactgaagtcagaacatgggaaggtccaactgggaaacatcactgttgatatggttattggtggaatgagagggatgactggattgctttgggaaacctcattgcttgacccggaagagggtattcgctttaggggattgtcgattcctgagtgccagaaagtattacctactgcccagtctggagctg

SEQ ID NO: 142280 - DNA, 407 bp, Arabidopsis thaliana
gggaaggacagggacaacagggacaacaaggaatacaaggccaaccatgggaaggacagggacaacagggacaacaaggacgacagggacaacaaggccaaccatgggaaggacagggacagcagggacaacaagggttccgtgacatgcaccagaaggtggaacatgtgagacgcggagacgtctttgccaacactccaggctctgcccactggatctacaactcaggagaacagccacttgtcatcatcgctcttctcgacatcgccaactaccaaaaccaactcgaccgcaaccctagagtgttccatttggccggaaacaaccagcagggaggctttggcggttcacagcaacaacaagaacagaaaaacttgtggagcgggttcgacgcacaggtcatagct

SEQ ID NO: 142281 - DNA, 408 bp, Arabidopsis thaliana
aaaacatacacacatagcaaaaaatggcaaacaagttgttcctcgtctgcgcagctctcgctctctgcttcctcctcaccaacgcttccatctaccgcaccgtcgttgagttcgaagaagatgacgccactaaccccataggcccaaaaatgaggaaatgccgcaaggagtttcagaaagaacaacacctaagagcttgccagcaattgatgctccagcaagcaaggcaaggccgtagcgatgagtttgatttcgaagacgacatggagaacccacagggacaacagcaggaacaacagctattccagcagtgctgcaacgagcttcgccaggaagagccagattgtgtttgccccaccttgaaacaagctgccaaggccgttagactccagggacagcaccaaccaa

SEQ ID NO: 142282 - DNA, 403 bp, Arabidopsis thaliana
tttcagagagggagagatgatttccgatcattgctatgtcgtccggatttcttcgtcaaggccgtccggtttgtcaaccggcttcagcccgacatccatatgcctcttgtgatgtggtttgtcggttactttcccggaatcttctggctcctttagcagaattgtccggtgtcgccgtcctccatcggttggttcctctaccaacggtggttggctcttgtctagcttctccgtcgtccgtctccggcggtttaggctagcttttggccggatttcttttccggttttgttttatgttctcgttttctatagatccagtttgattttgctcctttgtgttctaactcttagagggctcaattccttgaacctcctttgtttaaagggctcaatttgtttttga

SEQ ID NO: 142283 - DNA, 412 bp, Arabidopsis thaliana
aacaaaaagaaaatggttaagctcagcaatctcctcgttgcaaccttcggggttctcctcgtccttaacggctgccttgcgaggcagtcacttggggttcctcctcagctacagaacgagtgtaacctcgacaacctagatgttctccaagccaccgaaactatcaagagtgaagccggtcagatcgagtactgggaccacaaccaccctcagctccgatgtgttggtgtttccgttgctcgttatgtaattgaacaaggcggtctttacttgcccaccttcttcacttccccaaaaatttcctacgtcgttcaaggaacgggtatcagcggaagagtggtccctggatgtgccgagaccttcatggactcgcagccgatgcaaggacaacaacaaggccaaccatggcaag

SEQ ID NO: 142284 - DNA, 412 bp, Arabidopsis thaliana
ctgcaggcacgcactccgtgttctctccacaggaaactgttttcaggtccctgataggtatcttccacttaggtggcgcaggatcagcacgtcgtttagcaagacgttcagaagtaacgctgaggatcatggagagagagttcagcttctgcagaatctggtttcgactctggtctcagaatcggctaaatcgaaggagaggctagatattgcaactgagcaaacctccatcctcttatcccgtatcagagagcagcctgtctcctcacttgctatcagagacatttcttcttctgtgcagaggaatttttgataccacaaatgctatgcgtgtctaactatttttagataacataattactttattaacctaatcttacaagattgtaactcttatcttaacttatgcatt

SEQ ID NO: 142285 - DNA, 415 bp, Arabidopsis thaliana
aagaggaagaaaaatgggtcgagtctcatctattatctctttctctttgacactcttgatcctcttcaatggctacactgcccaacagtggcccaacgagtgccagctcgatcaactcaatgcgctcgaaccatcccaaatcatcaagagcgagggtggtcgcatcgaggtctgggaccaccatgcaccccagctccgttgctccggctttgcctttgagcgtttcgtcattgagcctcagggtcttttcttgcccactttcttgaacgccggcaaactcacgtttgttgttcacggaaggggtctaatgggaagagttattccgggatgcgccgagacgttcatggagtcaccggtatttggagaaggtcaaggtcagggtcagagtcaagggttccgtgacatgcaccagaaa

SEQ ID NO: 142286 - DNA, 417 bp, Arabidopsis thaliana
caaccatgggaaggacagggacagcagggacaacaagggttccgtgacatgcaccagaaggtggaacatgtgagacgcggagacgtctttgccaacactccaggctctgcccactggatctacaactcaggagaacagccacttgtcatcatcgctcttctcgacatcgccaactaccaaaaccaactcgaccgcaaccctagagtgttccatttggccggaaacaaccagcagggaggctttggcggttcacagcaacaacaagaacagaaaaacttgtggagcgggttcgacgcacaggtcatagctcaagcattgaaaattgacgttcagttggctcagcagcttcagaaccaacaagacagcagaggaaacatcgttcgtgttaagggacctttccaggtcgtgaggccacct

SEQ ID NO: 142287 - DNA, 407 bp, Arabidopsis thaliana
ctcagcaatctcctcgttgcaaccttcggggttctcctcgtccttaacggctgccttgcgaggcagtcacttggggttcctcctcagctacagaacgagtgtaacctcgacaacctagatgttctccaagccaccgaaactatcaagagtgaagccggtcagatcgagtactgggaccacaaccaccctcagctccgatgtgttggtgtttccgttgctcgttatgtaattgaacaaggcggtctttacttgcccaccttcttcacttccccaaaaatttcctacgtcgttcaaggaacgggtatcagcggaagagtggtccctggatgtgccgagaccttcatggactcgcagccgatgcaaggacaacaacaaggccaaccatggcaaggacgacagggacaaca

SEQ ID NO: 142288 - DNA, 406 bp, Arabidopsis thaliana
aacaaaaagaaaatggttaagctcagcaatctcctcgttgcaaccttcggggttctcctcgtccttaacggctgccttgcgaggcagtcacttggggttcctcctcagctacagaacgagtgtaacctcgacaacctagatgttctccaagccaccgaaactatcaagagtgaagccggtcagatcgagtactgggaccacaaccaccctcagctccgatgtgttggtgtttccgttgctcgttatgtaattgaacaaggcggtctttacttgcccaccttcttcacttccccaaaaatttcctacgtcgttcaaggaacgggtatcagcggaagagtggtccctggatgtgccgagaccttcatggactcgcagccgatgcaaggacaacaacaaggccaaccat

SEQ ID NO: 142289 - DNA, 411 bp, Arabidopsis thaliana
aaagaaaatggttaagctcagcaatctcctcgttgcaaccttcggggttctcctcgtccttaacggctgccttgcgaggcagtcacttggggttcctcctcagctacagaacgagtgtaacctcgacaacctagatgttctccaagccaccgaaactatcaagagtgaagccggtcagatcgagtactgggaccacaaccaccctcagctccgatgtgttggtgtttccgttgctcgttatgtaattgaacaaggcggtctttacttgcccaccttcttcacttccccaaaaatttcctacgtcgttcaaggaacgggtatcagcggaagagtggtccctggatgtgccgagaccttcatggactcgcagccgatgcaaggacaacaacaaggccaaccatggcaaggacg

SEQ ID NO: 142290 - DNA, 413 bp, Arabidopsis thaliana
ctctcaaaaagcctctctttctctctcttttgtttctcgctaccatggctaagtcttgctatttcagaccagctcttcttcttctgttagttcttttggttcatgccgagtcacgcggtcggttcgagccaaagattcttatgccgacagaggaagctaacccggctgaccaagacgaagatggtgtcggtacaagatgggcggttctcgtcgctggttcttctggatatggaaactacagacaccaggctgacgtgtgtcacgcatatcaaatactaagaaaaggaggtttaaaggaagagaacatagtcgttttgatgtatgatgatatcgcaaaccacccacttaatcctcgtccgggtactctcatcaaccatcctgacggtgacgatgtttacgccggagtccctaag

SEQ ID NO: 142291 - DNA, 413 bp, Arabidopsis thaliana
ccgtgctacatgcgagaaactgaaaaaggttctaagcgctaatcctctggcaccgttgaatatcgagtgtttgatggatgagaaagatgttaggggtgtcatcaagagggaagagtttgaagagatcagcatcccgattttggagcgtgtaaagaggcctctagagaaagctctctctgatgcaggcctcactgttgaagatgtacatatggttgaggttattggctctggctctcgtgtccctgctatgatcaagattctaactgagttttttggtaaggagcccaggcgtacaatgaatgcaagtgagtgtgtgtcaaggggatgtgccttgcagtgtgccattctcagtccgacctttaaagttcgcgaatttcaggttcatgagagcttccctttctcaatttctctcg

SEQ ID NO: 142292 - DNA, 342 bp, Arabidopsis thaliana
ggaagattaaataaaaaaagagaaagaaatataatagcttcctcaatcgatcttccatttttcttcttcttcattgtgaaatttgagtccaatgactgtcactggtcgaattttccacctgtagtcaatttgaagaaatttaaccagtttgttctactggaaaaatttctggtttcacacttgtgttgactctttcactggaaaaaagaaacgaaaaaactccgaagagtcttctctgggcagtgttaaaaggtaaggagcaatgttcagggaagctggcttaagaaacataagagaggatgttgattcgaggtggacgattggtaatcggaaattggatgc

SEQ ID NO: 142293 - DNA, 409 bp, Arabidopsis thaliana
agaaaaatgggtcgagtctcatctattatctctttctctttgacactcttgatcctcttcagtggctacactgcccaacagtggcccaacgagtgccagctcgatcaactcaatgcgctcgaaccatcccaaatcatcaagagcgagggtggtcgcatcgaggtctgggaccaccatgcaccccagctccgttgctccggctttgcctttgagcgtttcgtcattgagcctcagggtcttttcttgcccactttcttgaacgccggcaaactcacgtttgttgttcacggaaggggtctaatgggaagagttattccgggatgcgccgagacgttcatggagtcaccggtatttggagaaggtcaaggtcagggtcagagtcaagggttccgtgacatgcaccagaaag

SEQ ID NO: 142294 - DNA, 411 bp, Arabidopsis thaliana
agaaaaatgggtcgagtctcatctattatctctttctctttgacactcttgatcctcttcaatggctacactgcccaacagtggcccaacgagtgccagctcgatcaactcaatgcgctcgaaccatcccaaatcatcaagagcgagggtggtcgcatcgaggtctgggaccaccatgcaccccagctccgttgctccggctttgcctttgagcgtttcgtcattgagcctcagggtcttttcttgcccactttcttgaacgccggcaaactcacgtttgttgttcacggaaggggtctaatgggaagagttattccgggatgcgccgagacgttcatggagtcaccggtatttggagaaggtcaaggtcagggtcagagtcaagggttccgtgacatgcaccagaaagta

SEQ ID NO: 142295 - DNA, 416 bp, Arabidopsis thaliana
cttcaagatcaatgtcgagacggctcagcagctccagaaccagcaagataaccgtggcaacatcgtcaaggtcaacggacctttcggcgtcattaggccacccttgagacgcggcgaaggcggccaacaaccacatgaaatagctaatggtttagaggagactttgtgcaccatgcgatgcactgaaaacctcgatgacccgtcggatgctgacgtgtacaagccatcactcggatacattagcacacttaacagctacaatcttcctatcctcagacttctccgccttagcgctcttcgtggctccatccgtaaaaacgctatggtgctaccgcaatggaacgtaaacgcaaacgcggcactctacgtgacaaacggaaaggctcatatacaaatggtgaacgacaacggagaaa

SEQ ID NO: 142296 - DNA, 415 bp, Arabidopsis thaliana
aaacaaaaagaaaatggttaagctcagcaatctcctcgttgcaaccttcggggttctcctcgtccttaacggctgccttgcgaggcagtcacttggggttcctcctcagctacagaacgagtgtaacctcgacaacctagatgttctccaagccaccgaaactatcaagagtgaagccggtcagatcgagtactgggaccacaaccaccctcagctccgatgtgttggtgtttccgttgctcgttatgtaattgaacaaggcggtctttacttgcccaccttcttcacttccccaaaaatttcctacgtcgttcaaggaacgggtatcagcggaagagtggtccctggatgtgccgagaccttcatggactcgcagccgatgcaaggacaacaacaaggccaaccatggcaagga

SEQ ID NO: 142297 - DNA, 417 bp, Arabidopsis thaliana
aaaagaaaatggttaagctcagcaatctcctcgttgcaaccttcggggttctcctcgtccttaacggctgccttgcgaggcagtcacttggggttcctcctcagctacagaacgagtgtaacctcgacaacctagatgttctccaagccaccgaaactatcaagagtgaagccggtcagatcgagtactgggaccacaaccaccctcagctccgatgtgttggtgtttccgttgctcgttatgtaattgaacaaggcggtctttacttgcccaccttcttcacttccccaaaaatttcctacgtcgttcaaggaacgggtatcagcggaagagtggtccctggatgtgccgagaccttcatggactcgcagccgatgcaaggacaacaacaaggccaaccatggcaaggacgacagg

SEQ ID NO: 142298 - DNA, 404 bp, Arabidopsis thaliana
aatcaataaagaggaagaaaaatgggtcgagtctcatctattatctctttctctttgacactcttgatcctcttcaatggctacactgcccaacagtggcccaacgagtgccagctcgatcaactcaatgcgctcgaaccatcccaaatcatcaagagcgagggtggtcgcatcgaggtctgggaccaccatgcaccccagctccgttgctccggctttgcctttgagcgtttcgtcattgagcctcagggtcttttcttgcccactttcttgaacgccggcaaactcacgtttgttgttcacggaaggggtctaatgggaagagttattccgggatgcgccgagacgttcatggagtcaccggtatttggagaaggtcaaggtcagggtcagagtcaagggtt

SEQ ID NO: 142299 - DNA, 408 bp, Arabidopsis thaliana
caaaaagaaaatggttaagctcagcaatctcctcgttgcaaccttcggggttctcctcgtccttaacggctgccttgcgaggcagtcacttggggttcctcctcagctacagaacgagtgtaacctcgacaacctagatgttctccaagccaccgaaactatcaagagtgaagccggtcagatcgagtactgggaccacaaccaccctcagctccgatgtgttggtgtttccgttgctcgttatgtaattgaacaaggcggtctttacttgcccaccttcttcacttccccaaaaatttcctacgtcgttcaaggaacgggtatcagcggaagagtggtccctggatgtgccgagaccttcatggactcgcagccgatgcaaggacaacaacaaggccaaccatggca

SEQ ID NO: 142300 - DNA, 111 bp, Arabidopsis thaliana
ctcacgagaccaaagtgatcaaatccttaagtcagatttgggataccaacagtagcagcaacaatcagaatccagctaggggtaatgatgaattttaaatattggaattaa

SEQ ID NO: 142301 - DNA, 412 bp, Arabidopsis thaliana
aaaaagaaaatggttaagctcagcaatctcctcgttgcaaccttcggggttctcctcgtccttaacggctgccttgcgaggcagtcacttggggttcctcctcagctacagaacgagtgtaacctcgacaacctagatgttctccaagccaccgaaactatcaagagtgaagccggtcagatcgagtactgggaccacaaccaccctcagctccgatgtgttggtgtttccgttgctcgttatgtaattgaacaaggcggtctttacttgcccaccttcttcacttccccaaaaatttcctacgtcgttcaaggaacgggtatcagcggaagagtggtccctggatgtgccgagaccttcatggactcgcagccgatgcaaggacaacaacaaggccaaccatggcaaggac

SEQ ID NO: 142302 - DNA, 357 bp, Arabidopsis thaliana
atcacaaacgagtaagaatacaaatacaaatagctaaaaaaatggcaaacaagctcttcctcgtctgcgcaactttcgccctctgcttcctcctcaccaacgcttccatctaccgcactgttgtcgagttcgacgaagatgacgccagcaaccccatgggcccaagacagaaatgtcagaaggagtttcagcaatcacagcacctaagagcttgccagaaattgatgcgcatgcaaatgaggcaaggccgtggtggtggtccctccctcgacgatgagttcgatttggaagacgacatcgagaacccacaaggcccccagcagggacaccagatcctccagcagtgctgcagcgagc

SEQ ID NO: 142303 - DNA, 410 bp, Arabidopsis thaliana
ggcgtttactcgaggacttgcacttcagctagctgagaaaggaatccgtgtcaatggtgtgggtcctggtccaatatggacaccccttatcccagcatcattcaatgaggagaagattaagaattttgggtctgaggttccgatgaaaagagcgggtcagccaattgaagtggcaccatcctatgttttcttggcgtgtaaccactgctcttcttacttcactggtcaagttcttcaccctaatggaggagctgtggtaaatgcgtaagcgtggagtggacaagaccggtcttaacgtcttagaccattaaatatgatatgatgatgttgtttgagtttaggggctttttgttatgttggtaatgtgttacgtccgtatatgttggtaatgtgttgcgtccgtaccttct

SEQ ID NO: 142304 - DNA, 353 bp, Arabidopsis thaliana
gataaaaatggctcgagtctcttctcttctttctttctccttaacacttttgatccttttccatggctacgcggctcaacagggtcagcagggtcagcagtttccgaacgagtgccagctcgaccagctcaatgcgctcgagccttcacacgtactgaagagcgaggctggtcgcatcgaggtgtgggaccaccacgctcctcagctccgttgctcaagtgtctcctttgcacgttacatcatcgagtctaagggtctctacttgccctctttctttaacaccgcgaagctcttcttcgtggctaaaggacgaggtcttatgggaaaagggatccctggatgccgccgaacat

SEQ ID NO: 142305 - DNA, 365 bp, Arabidopsis thaliana
aacaaaaagaaaatggttaagctcagcaatctcctcgttgcaaccttcggggttctcctcgtccttaacggctgccttgcgaggcagtcacttggggttcctcctcagctacagaacgagtgtaacctcgacaacctagatgttctccaagccaccgaaactatcaagagtgaagccggtcagatcgagtactgggaccacaaccacccttagcttcgatgtgttggtgtttccggtgctcggtatgtaattgaacaaggcggtctttacttgcccaccttcttcactttcccaaaaatttcctacgtcggtcaagggacgggtattaacggaagaatggtccctggatgtgccgagacctttat

SEQ ID NO: 142306 - DNA, 418 bp, Arabidopsis thaliana
acaaacaaaaagaaaatggttaagctcagcaatctcctcgttgcaaccttcggggttctcctcgtccttaacggctgccttgcgaggcagtcacttggggttcctcctcagctacagaacgagtgtaacctcgacaacctagatgttctccaagccaccgaaactatcaagagtgaagccggtcagatcgagtactgggaccacaaccaccctcagctccgatgtgttggtgtttccgttgctcgttatgtaattgaacaaggcggtctttacttgcccaccttcttcacttccccaaaaatttcctacgtcgttcaaggaacgggtatcagcggaagagtggtccctggatgtgccgagaccttcatggactcgcagccgatgcaaggacaacaacaaggccaaccatggcaaggac

SEQ ID NO: 142307 - DNA, 418 bp, Arabidopsis thaliana
aacaaacaaaaagaaaatggttaagctcagcaatctcctcgttgcaaccttcggggttctcctcgtccttaacggctgccttgcgaggcagtcacttggggttcctcctcagctacagaacgagtgtaacctcgacaacctagatgttctccaagccaccgaaactatcaagagtgaagccggtcagatcgagtactgggaccacaaccaccctcagctccgatgtgttggtgtttccgttgctcgttatgtaattgaacaaggcggtctttacttgcccaccttcttcacttccccaaaaatttcctacgtcgttcaaggaacgggtatcagcggaagagtggtccctggatgtgccgagaccttcatggactcgcagccgatgcaaggacaacaacaaggccaaccatggcaagga

SEQ ID NO: 142308 - DNA, 409 bp, Arabidopsis thaliana
attgctagggagattggttacgagatcaaaagaaattggtcaagggattatccgaagaatttctccagaccaaatcaaggaacttgctgagcacgctacatctccttcaaacaaacacaaagccaaaaaagaaaaggaggaagacaaagacctaagaacgttgtggactcctttcaatctctttgcaatagatccaatctactccaacgactttggtcatttccacgaggcacatcctaagaattataatcaactgcaagaccttcacatagccgccgcttgggctaacatgacacagggatccttgttccttcctcattttaactctaagaccacatttgtaacgtttgtggagaatggttgtgcccgcttcgagatggctactccttataaattccaaagagggcaa

SEQ ID NO: 142309 - DNA, 397 bp, Arabidopsis thaliana
aacaaacaaaaagaaaatggttaagctcagcaatctcctcgttgcaaccttcggggttctcctcgtccttaacggctgccttgcgaggcagtcacttggggttcctcctcagctacagaacgagtgtaacctcgacaacctagatgttctccaagccaccgaaactatcaagagtgaagccggtcagatcgagtactgggaccacaaccaccctcagctccgatgtgttggtgtttccgttgctcgttatgtaattgaacaaggcggtctttacttgcccaccttcttcacttccccaaaatttcctacgtcgttcaaggaacgggtatcagcggaagagtggtccctggatgtgccgagaccttcatggactcgcagccgatgcaaggacaacaac

SEQ ID NO: 142310 - DNA, 397 bp, Arabidopsis thaliana
ctctataatccgatctgagaaatttcgccggagctaggttttgttgtttaccgatcaatcctttaatcaatggcaatggctgttttccgtcgcgaagggaggcgtctcctcccttcaatcgccgctcgcccaatcgctgctatccgatctcctctctcttctgaccaggaggaaggacttcttggagttcgatctatctcaactcaagtggtgcgtaaccgcatgaagagtgttaagaacatccaaaagatcacaaaggcaatgaagatggttgctgcttccaagcttagagcagttcaaggccgagctgagaactcccgtggactttggcagccatttactgcacttctaggagataatcccagcattgatgtaaagaagaagggggtggtcactc

SEQ ID NO: 142311 - DNA, 411 bp, Arabidopsis thaliana
cgacgacgacgagttgttcgcttctccttcactctcctccttcttctcagctctcaaattcaacctccttcttcaatctctcttcttcacgatcctctccagtttctctctacccaatccgatccaaacgctacttccgaattctctcgaagcttccactaaacgacaacaacggtgacgatgatggagatactcttcttcttactccgttctccgccgttaaacctttcttcctcctctgtacctccgtcgcgttatcgttttcactcttcgccgcttctcctgccgttgaatctgcatcggcgtttgtagttagtactccgaagaaacttcagactgatgagctcgcgacggttcgtttgtttcaagagaacactccttccgttgtttacatcactaatctcgccgtga

SEQ ID NO: 142312 - DNA, 414 bp, Arabidopsis thaliana
caaaaagaaaatggttaagctcagcaatcttctcgttgcaaccttcggggttctcctcgtccttaacggctgccttgcgaggcagtcacttggggttcctcctcagctacagaacgagtgtaacctcgacaacctagatgttctccaagccaccgaaactatcaagagtgaagccggtcagatcgagtactgggaccacaaccaccctcagctccgatgtgttggtgtttccgttgctcgttatgtaattgaacaaggcggtctttacttgcccaccttcttcacttccccaaaaatttcctacgtcgttcaaggaacgggtatcagcggaagagtggtccctggatgtgccgagacctttatggactcgcagccgatgcaaggacaacaacaaggccaaccatggcaaggacg

SEQ ID NO: 142313 - DNA, 403 bp, Arabidopsis thaliana
cttagacttatctctatatacccccttttaatttgtgtgctcttagcctttactctatagttttatatcatatcaatcgacatggcgaatgtggaccgtgatcggcgtgtgcatgtagaccgtactgacaaacgtgttcatcagccaaactacgaagatgatgtcggttttggtggctatggcggttatggtgctggttctgattataagagtcgcggccccttcactaaccaaatcttggcacttatagcaggagttcccattggtggcacactgctaaccctagctggactcactctagccggttcggtgatcggcttgctagtctccatacccctcttccttctcttcagtccggtgatagtcccggcggctctcactattgggcttgctgtgacgggaa

SEQ ID NO: 142314 - DNA, 410 bp, Arabidopsis thaliana
cttcttcttcttccatggatcacttaatcacctttcgttttcttgatcttattctccactgtataaaatcagcgagattttaagggattgtgaaggtaccatcttaaacacaaaatgggtacttctactacagagagtgtggtggcgtgtgaattttgcggcgagagaacggcggttctgttttgtagagccgatacggcgaagctttgtttgccttgtgaccagcacgtgcactcggcgaaccttctctcgaggaagcatgttcgttctcagatctgtgataactgtagcaaagagccggtgtccgtacgttgcttcacagataatctcgtattgtgtcaggagtgtgattgggatgttcacggaagctgttgctccttcgcgacgcatgaacgctccggcgtggaagg

SEQ ID NO: 142315 - DNA, 416 bp, Arabidopsis thaliana
acgatgcccctgaccctgtgataaacacatgtaacggtttctactgtgattcatttgctccgaacaagccatacaagcctttgatatggacagaggcatggagcggctggttcactgagttcggtgggccaatgcaccatagaccagttcaggatctggcgtttggtgttgcacgtttcatacaaaaaggaggatcttttgttaactactacatgtatcatggaggaactaactttggaagaacagccggaggtccatttgtcaccaccagctatgattatgatgctccgatcgacgaatatggtttaatcagacaacctaaatatggtcacctaaaggaactccacagagctatcaagatgtgtgagaaggctctggtgtcagctgatcccgttgttacatcaataggaaacaag

SEQ ID NO: 142316 - DNA, 418 bp, Arabidopsis thaliana
aagaaaatggttaagctcagcaatctcctcgttgcaaccttcggggttctcctcgtccttaacggctgccttgcgaggcagtcacttggggttcctcctcagctacagaacgagtgtaacctcgacaacctagatgttctccaagccaccgaaactatcaagagtgaagccggtcagatcgagtactgggaccacaaccaccctcagctccgatgtgttggtgtttccgttgctcgttatgtaattgaataaggcggtctttacttgcccaccttcttcacttccccaaaaatttcctacgtcgttcaaggaacgggtatcagcggaagagtggtccctggatgtgccgagaccttcatggactcgcagccgatgcaaggacaacaacaaggccaaccatggcaaggacgacagggac

SEQ ID NO: 142317 - DNA, 468 bp, Arabidopsis thaliana
  unsure (1)..(468): unsure at all n locations
cgtaccgatannaaaatggcttcgagggtctcttctcttttctttcttttctcctttaacnnacttttganntccttttccagtggctactgcggcttcaaccagggtcagnncagggtcagcagtttctcgaacgaaggtgccagctcgaccacgctcannatgcgctcgagccttcacancgtacctgaagaagcgagggctgnngtcgcatcgagggtgggtgggaccaccanncgctcctcagcttccgttggctcaggggtgtctcctttgcaccgttaccatcnnatcgagtctaaaggggtctctacnnttgcccttctttnctttaacaaccgccgaagcttcttccttcgtggctaaaaggacgaaggtcttatgtggaaaaagtggatccctggattgcgccgaaacattccaagactcatcagagttccaaccacgcttcgaaggtcaaggtcaaag

SEQ ID NO: 142318 - DNA, 408 bp, Arabidopsis thaliana
gcgggttcgacgcacaggtcatagctcaagcattgaaaattgacgttcagttggctcagcagcttcagaaccaacaagacagcagaggaaacatcgttcgtgttaagggacctttccaggtcgtgaggccacctctaagacagccctacgagagcgaggagtggagacacccacgtagcccacagggcaacggccttgaggagactatctgcagcatgaggtcccacgagaacattgacgaccctgctcgtgctgacgtgtacaagcccagcctaggtcgcgtgaccagcgtcaacagctataccttgcccatcttggagtatgtcaggctcagtgccactcgtggcgttctccagggtaatgcgatggtgcttcctaaatacaacatgaacgctaacgagatcttgt

SEQ ID NO: 142319 - DNA, 265 bp, Arabidopsis thaliana
cctaaacaaaatgaattacgttactgcttcaaaataagatcaagccgtacaacaaaagctgtttgccagtcatgacaatgtatgatgtcgggttttttgccggactgaagaagcaactctagtgcagctcggctaaaatacgagaagcgtctgaaatcatcttgctctccataaaactgtcctctccagaagaatttgcttggatgttgaggttcaatgaaatgtacaggtaaacctgtcaatagagagaaacttctaacattac

SEQ ID NO: 142320 - DNA, 261 bp, Arabidopsis thaliana
catcactgtaatgagaaaacagaagaaaaaactgatatacaagaattggtatgctccagaaataacaacttacccgcaattaatcatttcagaagtgtttcaactcctacctggcatggattctgaaggatcttttgtatgaccaccgatagacaaaagctggttatcccatggtatctacataacaaacaaagaaggccagtatgtgatttcaagaggagattactgaaccgaaacctgcccctgatgtttcaaggctag

SEQ ID NO: 142321 - DNA, 184 bp, Arabidopsis thaliana
agaaaaatgggtcgagtctcatctattatctctttctctttgacactcttgatcctcttcaatggctacactgcccaacaagggcccaacgagtgccagctcgatcaactcaatgcgctcgaaccatcccaaatcatcaagagcgagggtggtcgcatcgaggtctgggaccaccatgcacccc

SEQ ID NO: 142322 - DNA, 425 bp, Arabidopsis thaliana
caagcattgaaaattgacgttcagttggctcagcagcttcagaaccaacaagacaggagaggaaacatcgatcgtgttaagggacctttccaggtcgtgaggccacctttaagacagccctacgagagcgaggagtggagacacccacgtagcccacagggcaacggccttgaggagactatctgcagcatgaggtcccacgagaacattgacgaccctgctcgtgctgacgtgtacaagcccagcctaggtcgcgtgaccagcgtcaacagctataccttgcccatcttggagtatgtcaggctcagtgccactcgtggcgttcttcagggtaatgcgatggtgcttgctaaatacaacatgaacgctaacgagatcttgtactgcactggaggacaaggaaggatccaagtggtcaacgacaa

SEQ ID NO: 142323 - DNA, 392 bp, Arabidopsis thaliana
taagaggaagaaaaatgggtcgagtctcatctattatctctttctctttgacactcttgatcctcttcaatggctacactgcccaacagtggcccaacgagtgccagctcgatcaactcaatgcgctcgaaccatcccaaatcatcaagagcgagggtggtcgcatcgaggtctgggaccaccatgcaccccagctccgttgctccggctttgcctttgagcgtttcgtcattgagcctcagggtcttttcttgcccactttcttgaacgccggcaaactcacgtttgttgttcacggaaggggtctaatggggagaggtattaacagattcgcctagacgttcatggagtcaccggtatttggagaaggtcaaggtcagggtcagagtcaa

SEQ ID NO: 142324 - DNA, 434 bp, Arabidopsis thaliana
cacatagcaaaaaatggcaaacaagttgttcctcgtctgcgcagctctcgctctctgcttgctcctcaccaacgcttccatctaccgcaccgtcgttgagttcgaagaagatgacgccactaaccccataggcccaaaaatgaggaaatgccgcaaggagtttcagaaagaacaacacctaagagcttgccagcaattgatgctccagcaagcaaggcaaggccgtagcgatgagtttgatttcgaagacgacatggagaacccacagggacaacagcaggaacaacagctattccagcagtgctgcaacgagcttcgccaggaagagccagattgtgtttgccccaccttgaaacaagctgccaaggccgttagactccagggacagcaccaaccaatgcaagtcaggaaaatttaccagacagccaagcact

SEQ ID NO: 142325 - DNA, 414 bp, Arabidopsis thaliana
aggaaacatcgttcgtgttaagggacctttccaggtcgtgaggccacctctaagacagccctacgagagcgaggagtggagacacccacgtagcccacagggcaacggccttgaggagactatctgcagcatgaggtcccacgagaacattgacgaccctgctcgtgctgacgtgtacaagcccagcctaggtcgcgtgaccagcgtcaacagctataccttgcccatcttggagtatgtcaggctcagtgccactcgtggcgttctccagggtaatgcgatggtgcttcctaaatacaagatctcgttagcgttcatgttgtatttaggaagcaccatgaacgctaacgagatcttgtactgcactggaggacaaggaaggatccaagtggtcaacgacaacggacagaacgt

SEQ ID NO: 142326 - DNA, 425 bp, Arabidopsis thaliana
ataaagaggaagaaaaatgggtcgagtctcatctattatctctttctctttgacactcttgatcctcttcaatggctacactgcccaacagtggcccaacgagtgccagctcgatcaactcaatgcgctcgaaccatcccaaatcatcaagagcgagggtggtcgcatcgaggtctgggaccaccatgcaccccagctccgttgctccggctttgcctttgagcgtttcgtcattgagcctcagggtcttttcttgcccactttcttgaacgccggcaaactcacgtttgttgttcacggaaggggtctaatgggaagagttattccgggatgcgccgagacgttcatggagtcaccggtatttggagaaggtcaaggtcagggtcagagtcaagggttccgtgacatgcaccaagaagtagagc

SEQ ID NO: 142327 - DNA, 373 bp, Arabidopsis thaliana
acgtttgacctgactcgaggatatgggccttagactaaaacaaccaactaggacatggttggctacaaagactacatcaacatcgcacggaacaacatcgcgaatggaattggacccagccatatagctcaggcattgaagactcatcttcatacacctaatctactactgtacacagatgacacccgtggaaacattggccgagcccaaagaccgaatcgagagattaaagcggctcatatgggccaaacacctctggaggaggaagaagaacaagaaggacgactccggcgacacactgatcgcttacatgaaaccatctgcaggtgcaggtgcaccgataacctaggacatccgtcttgggctgacgaat

SEQ ID NO: 142328 - DNA, 358 bp, Arabidopsis thaliana
caacaacaagaacagaaaaacttgtggagcgggttcgacgcacaggtcatagctcaagcattgaaaattgacgttcagttggctcagcagcttcagaaccaacaagacagcagaggaaacatcgttcgtgttaagggacctttccaggtcgtgaggccacctctaagacagccctacgagagcgaggagtggagacacccacgtagcccacagggcaacggccttgaggagactatctgcagcatgaggtcccacgagaacattgacgaccctgctcgtgctgacgtgtacaagcccagcctaggtcgcgtgaccagcgtcaacagctataccttgcccatcttggagtatgtcaagc

SEQ ID NO: 142329 - DNA, 425 bp, Arabidopsis thaliana
caaaaagaaaatggttaagctcagcaatctcctcgttgcaaccttcggggttctcctcgtccttaacggctgccttgcgaggcagtcacttggggttcctcctcagctacagaacgagtgtaacctcgacaacctagatgttctccaagccaccgaaactatcaagagtgaagccggtcagatcgagtactgggaccacaaccaccctcagctccgatgtgttggggtttccgctgctcgttatgtaattgaacaaggcggtctttacttgcccaccttcttcacttccccaaaaatttcctacgtcggtcaaggaacgggtatcagcggaagaatggtccctggatgggccgagaccttcatggactcgcagccgatgcaaggacaacaacaaggccaaccatggcaaggacgacagggacaac

SEQ ID NO: 142330 - DNA, 304 bp, Arabidopsis thaliana
  unsure (1)..(304): unsure at all n locations
ggacggaanggccggggcgacgcgtgcgtacgatgaatggagtctgatctatacagcattttcctcgcgccactcgggtactcttttcggtggatacactgcctgacatgggaggaactaacgccaggtttctcctcagctacagaacgagcgtaacctcgacaacctagatgttcttcaagccatcgaggagtgggaccaccatgcacacgagctctggtgctacaaccacgcctctgatcagatccggaagtgagcctcatggccttttctgtgaccacaatcttgaacgcgggctttactt

SEQ ID NO: 142331 - DNA, 420 bp, Arabidopsis thaliana
aaaaatgggtcgagtctcatctattatctctttctctttgacactcttgatcctcttcaatggctacactgcccaacagtggcccaacgagtgccagctcgatcaactcaatgcgctcgaaccatcccaaatcatcaagagcgagggtggtcgcatcgaggtctgggaccaccatgcaccccagctccgttgctccggctttgcctttgagcgtttcgtcattgagcctcagggtcttttcttgcccactttcttgaacgccggcaaactcacgtttgttgttcacggaaggggtctaatgggaagagttattccgggatgcgccgagacgttcatggagtcaccggtatttggagaaggtcaaggtcagggtcagagtcaagggttccgtgacatgcaccagaaagtagagcacctacg

SEQ ID NO: 142332 - DNA, 422 bp, Arabidopsis thaliana
aacaaaaagaaaatggttaagctcagcaatctcctcgttgcaaccttcggggttctgctcgtccttaacggctgccttgcgaggcagtcacttggggttcctcctcagctacagaacgagtgtaacctcgacaacctagatgttctccaagccaccgaaactatcaagagtgaagccggtcagatcgagtactgggaccacaaccaccctcagctccgatgtgttggtgtttccgttgctcgttatgtaattgaacaaggcggtctttacttgcccaccttcttcacttccccaaaaatttcctacgtcgttcaaggaacgggtatcagcggaagagtggtccctggatgtgccgagaccttcatggactcgcagccgatgcaaggacaacaacaaggccaaccatggcaaggacgacaggg

SEQ ID NO: 142333 - DNA, 424 bp, Arabidopsis thaliana
aacaaaaagaaaatggttaagctcagcaatctcctcgttgcaaccttcggggttctcctcgtccttaacggctgccttgcgaggcagtcacttggggttcctcctcagctacagaacgagtgtaacctcgacaacctagatgttctccaagccaccgaaactatcaagagtgaagccggtcagatcgagtactgggaccacaaccaccctcagctccgatgtgttggtgtttccgttgctcgttatgtaattgaacaaggcggtctttacttgcccaccttcttcacttccccaaaaatttcctacgtcgttcaaggaacgggtatcagcggaagagtggtccctggatgtgccgagaccttcatggactcgcagccgatgcaaggacaacaacaaggccaaccatggcaaggacgacagggac

SEQ ID NO: 142334 - DNA, 428 bp, Arabidopsis thaliana
caaaaagaaaatggttaagctcagcaatctcctcgttgcaaccttcggggttctcctcgtccttaacggctgccttgcgaggcagtcacttggggttcctcctcagctacagaacgagtgtaacctcgacaacctagatgttctccaagccaccgaaactatcaagagtgaagccggtcagatcgagtactgggaccacaaccaccctcagctccgatgtgttggtgtttccgttgctcgttatgtaattgaacaaggcggtctttacttgcccaccttcttcacttccccaaaaatttcctacgtcgttcaaggaacgggtatcagcggaagagtggtccctggatgtgccgagaccttcatggactcgcagccgatgcaaggacaacaacaaggccaaccatggcaaggacgacagggacaacaag

SEQ ID NO: 142335 - DNA, 427 bp, Arabidopsis thaliana
gatgacgccactaaccccataggcccaaaaatgaggaaatgccgcaaggagtttcagaaagaacaacacctaagagcttgccagcaattgatgctccagcaagcaaggcaaggccgtagcgatgagtttgatttcgaagacgacatggagaacccacagggacaacagcaggaacaacagctattccagcagtgctgcaacgagcttcgccaggaagagccagattgtgtttgccccaccttgaaacaagctgccaaggccgttagactccagggacagcaccaaccaatgcaagtcaggaaaatttaccagacagccaagcacttgcccaacgtttgcgacatcccgcaagttgatgtttgtcccttcaacatcccttcattcccttctttctactaaatctcaaacaaaccctcaaagcgtatga

SEQ ID NO: 142336 - DNA, 427 bp, Arabidopsis thaliana
gcgaggagtggagacacccacgtagcccacagggcaacggccttgaggagactatctgcagcatgaggtcccacgagaacattgacgaccctgctcgtgctgacgtgtacaagcccagcctaggtcgcgtgaccagcgtcaacagctataccttgcccatcttggagtatgtcaggctcagtgccactcgtggcgttctccagggtaatgcgatggtgcttcctaaatacaacatgaacgctaacgagatcttgtactgcactggaggacaaggaaggatccaagtggtcaacgacaacggacagaacgtgttggaccaacaggtgcagaagggacagctcgtggtcatcccacaagggttcgcatacgttgtccagtcccacggaaacaagttcgagtggatctctttcaaaactaatgaaaacgc

SEQ ID NO: 142337 - DNA, 413 bp, Arabidopsis thaliana
ggaagagtggtccctggatgtgccgagaccttcatggactcgcagccgatgcaaggacaacaacaaggccaaccatggcaaggacgacagggacaacaaggccaaccatgggaaggacagggacaacagggacaacaaggaagacaaggccaaccatgggaaggacagggacaacagggacaacaaggacgacagggacaacaaggccaaccatgggaaggacagggacagcagggacaacaagggttccgtgacatgcaccagaaggtggaacatgtgagacgcggagacgtctttgccaacactccaggctctgcccactggatctacaactcaggagaacagccacttgtcatcatcgctcttctcgacatcgccaactaccaaaaccaactcgaccgcaaccctagagt

SEQ ID NO: 142338 - DNA, 413 bp, Arabidopsis thaliana
gaaaatggttaagctcagcaatctcctcgttgcaaccttcggggttctcctcgtccttaacggctgccttgcgaggcagtcacttggggttcctcctcagctacagaacgagtgtaacctcgacaacctagatgttctccaagccaccgaaactatcaagagtgaagccggtcagatcgagtactgggaccacaaccaccctcagctccgatgtgttggtgtttccgttgctcgttatgtaattgaacaaggcggtctttacttgcccaccttcttcacttccccaaaaatttcctacgtcgttcaaggaacgggtatcagcggaagagtggtccctggatgtgccgagaccttcatggactcgcagccgatgcaaggacaacaacaaggccaaccatggcaaggacgacagg

SEQ ID NO: 142339 - DNA, 427 bp, Arabidopsis thaliana
ctcatctattatctctttctctttgacactcttgatcctcttcaatggctacactgcccaacagtggcccaacgagtgccagctcgatcaactcaatgcgctcgaaccatcccaaatcatcaagagcgagggtggtcgcatcgaggtctgggaccaccatgcaccccagctccgttgctccggctttgcctttgagcgtttcgtcattgagcctcagggtcttttcttgcccactttcttgaacgccggcaaactcacgtttgttgttcacggaaggggtctaatgggaagagttattccgggatgcgccgagacgttcatggagtcaccggtatttggagaaagtcaaggtcagggtcagagtcaagggttccgtgacatgcaccaaaaagtagagcacctacggtgcggtgacaccattgcaaca

SEQ ID NO: 142340 - DNA, 421 bp, Arabidopsis thaliana
caaaaagaaaatggttaagctcagcaatctcctcgttgcaaccttcggggttctcctcgtccttaacggctgccttgcgaggcagtcacttggggttcctcctcagctacagaacgagtgtaacctcgacaacctagatgttctccaagccaccgaaactatcaagagtgaagccggtcagatcgagtactgggaccacaaccaccctcagctccgatgtgttggtgtttccgttgctcgttatgtaattgaacaaggcggtctttacttgcccaccttcttcacttccccaaaaatttcctacgtcgttcaaggaacgggtatcagcggaagagtggtccctggatgtgccgagaccttcatggactcgcagccgatgcaaggacaacaaccaggccaaccatggcaaggacgacaggga

SEQ ID NO: 142341 - DNA, 432 bp, Arabidopsis thaliana
gcaacagaagcaaaacaacatcttcaatggcttcgcacctgagatcttggctcaagccttcaagatcaatgtcgagacggctcagcagctccagaaccagcaagataaccgtggcaacatcgtcaaggtcaacggacctttcggcgtcattaggccacccttgagacgcggcgaaggcggccaacaaccacatgaaatagctaatggtttagaggagactttgtgcaccatgcgatgcactgaaaacctcgatgacccgtcggatgctgacgtgtacaagccatcactcggatacattagcacacttaacagctacaatcttcctatcctcagacttctccgccttagcgctcttcgtggctccatccgtaaaaacgccttggtgctaccgcaatggaacgtaaacgcaaacgcggcactctacgtgacaaa

SEQ ID NO: 142342 - DNA, 357 bp, Arabidopsis thaliana
ggctcgagtctcttctcttctttctttctccttaacacttttgatccttttccatggctacgcggctcaacagggtcagcagggtcagcagtttccgaacgagtgccagctcgaccagctcaatgcgctcgagccttcacacgtactgaagagcgaggctggtcgcatcgaggtgtgggaccaccacgctcctcagctccgttgctcaggtgtctcctttgcacgttacatcatcgagtctaagggtctctacttgccctctttctttaacaccgcgaagctctccttcgtggctaaaggacgaggtcttatgggaaaagtgatccctggatgcgccgaaacattccaagactcatc

SEQ ID NO: 142343 - DNA, 422 bp, Arabidopsis thaliana
cttcgatcccacttcagactctgtcccctccgttgaccgatctcggccaatcatatctcctagcgatctggtcaagctgaagttgtcgagtgtagctaaagagagaggagctctttgtttggatggaagcttgcctgggtaccactttcatgagggttctggatctggctcccaaagctggcttgttcatttggagggtggaggctggtgcaacacagttgcgtcatgttctgctcgagcattgactaaattaggttcttccaactactttgaacaagaagtggcctttcaaggtgttttaagtagtgacccatctcaaaatcctgaattctttaactggaacaaggttgcgataaggtactgtgatggtgcttctttttctggacgccctgaagctgaattcaagaatggcacacggcttt

SEQ ID NO: 142344 - DNA, 423 bp, Arabidopsis thaliana
gtaagaattgatatatagaataactttttacttgattgataatcacataaaaccgaagaaattttagccatttgcatcaaacttaaacttccttcttgcattcgtgctcctccggaagaacacactaaaataagaggtaaacattgattggtagcatactcgatcaaacgagttattttttcgcctactacggatcccatactaccccccataaaccgaaaatccataaccccaagggctaccggaataccgtttagttgacctgtacctgtttgaacagcgtcagtcaatcctgtagttttttgcgcagagtcaatacggtttttataaggttcctccttcgaatgaaatttaatgggatccgcagagaccatgtcttcatccataggattccaagtacccggatcaatcgaaagctcgatt

SEQ ID NO: 142345 - DNA, 428 bp, Arabidopsis thaliana
caaaaagaaaatggttaagctcagcaatcttctcgttgcaaccttcggggttctcctcgtccttaacggctgccttgcgaggcagtcacttggggttcctcctcagctacagaacgagtgtaacctcgacaacctagatgttctccaagccaccgaaactatcaagagtgaagccggtcagatcgagtactgggaccacaaccaccctcagctccgatgtgttggtgtttccgttgctcgttatgtaattgaacaaggcgggctttacttgcccaccttcttcacttccccaaaaatttcctacgtcgttcaaggaacgggtatcagcggaagagtggtccctggatgtgccgagaccttcatggactcgcagccgatgcaaggacaacaacaaggccaaccatggcaaggacgacagggacaacaag

SEQ ID NO: 142346 - DNA, 432 bp, Arabidopsis thaliana
caaacaaaaagaaaatggttaagctcagcaatctcctcgttgcaaccttcggggttctcctcgtccttaacggctgccttgcgaggcagtcacttggggttcctcctcagctacagaacgagtgtaacctcgacaacctagatgttctccaagccaccgaaactatcaagagtgaagccggtcagatcgagtactgggaccacaaccaccctcagctccgatgtgttggtgtttccgttgctcgttatgtaattgaacaaggcggtctttacttgcccaccttcttcacttccccaaaaatttcctacgtcgttcaaggaacgggtatcagcggaagagtggtccctggatgtgccgagaccttcatggactcgcagccgatgcaaggacaacaacaaggccaaccatggcaaggacgacagggacaacaag

SEQ ID NO: 142347 - DNA, 425 bp, Arabidopsis thaliana
ggcgaggaacattatgaaactgcgcaacaagtaaaacaaactttacaacgttacaaggagcttcaggacattatagctatcctggggttggatgaattatccgaagaggatcgcttaaccgtagcaagagcacgaaaaattgagcgtttcttatcacaaccctttttcgtagcagaagtatttacaggttctccgggaaaatatgttggtctagcggaaacaattagagggtttaatttgatcctttccggagaatttgattctcttcccgaacaggccttttacttagtgggtaacatcgatgaagctactgcgaaggctacgaacttagaaatggagagtaaattgaagaaatgaccttaaatctttgtgtactgactccgaatcgaattgtttgggattcagaagtaaaagaaatcatttta

SEQ ID NO: 142348 - DNA, 418 bp, Arabidopsis thaliana
aaaatgggtcgagtctcatctattatctctttctctttgacactcttgatcctcttcaatggctacactgcccaacagtggcccaacgagtgccagctcgatcaactcaatgcgctcgaaccatcccaaatcatcaagagcgagggtggtcgcatcgaggtctgggaccaccatgcaccccagctccgttgctccggctttgcctttgagcgtttcgtcattgagcctcagggtcttttcttgcccactttcttgaacgccggcaaactcacgtttgttgttcacggaaggggtctaatgggaagagttattccgggatgcgccgagacgttcatggagtcaccggtatttggagaaggtcaaggtcagggtcagagtcaagggttccgtgacatgcaccagaaagtagagcacctac

SEQ ID NO: 142349 - DNA, 404 bp, Arabidopsis thaliana
aagaggaagaaaaatgggtcgagtctcatctattatctctttctctttgacactcttgatcctcttcaatggctacactgcccaacagtggcccaacgagtgccagctcgatcaactcaatgcgctcgaaccatcccaaatcatcaagagcgagggtggtcgcatcgaggtctgggaccaccatgcaccccagctccgttgctccggctttgcctttgagcgtttcgtcattgagcctcagggtcttttcttgcccactttcttgaacgccggcaaactcacgtttgttgttcacggaaggggtctaatgggaagagttattccgggatgcgccgagacgttcatggagtcaccggtatttggagaacgtcaaggtcagggtcagagtcaagggttccgtgaca

SEQ ID NO: 142350 - DNA, 426 bp, Arabidopsis thaliana
aacaaacaaaaagaaaatggttaagctcagcaatctcctcgttgcaaccttcggggttctcctcgtccttaacggctgccttgcgaggcagtcacttggggttcctcctcagctacagaacgagtgtaacctcgacaacctagatgttctccaagccaccgaaactatcaagagtgaagccggtcagatcgagtactgggaccacaaccaccctcagctccgatgtgttggtgtttccgttgctcgttatgtaattgaacaaggcggtctttacttgcccaccttcttcacttccccaaaaatttcctacgtcgttcaaggaacgggtattaacggaagaatggtccctggatgtgccgagaccttcatggactcgcaagcgatgcaaggacaacaacaaggccaaccatggcaaggacgacaggg

SEQ ID NO: 142351 - DNA, 409 bp, Arabidopsis thaliana
tatcaatcgacatggcgaatgtggaccgtgatcggcgtgtgcatgtagaccgtactgacaaacgtgttcatcagccaaactacgaagatgatgtcggttttggtggctatggcggttatggtgctggttctgattataagagtcgcggcccctccactaaccaaatcttggcacttatagcaggagttcccattggtggcacactgctaaccctagctggactcactctagccggttcggtgatcggcttgctagtctccatacccctcttcctcctcttcagtccggtgatagtcccggcggctctcactattgggcttgctgtgacgggaatcttggcttctggtttgtttgggttgacgggtctgaactcggtctcgtgggtcctcaactaccttcgggggacgag

SEQ ID NO: 142352 - DNA, 424 bp, Arabidopsis thaliana
aacaaacaaaaagaaaatggttaagctcagcaatctcctcgttgcaaccttcggggttctcctcgtccttaacggctgccttgcgaggcagtcacttggggttcctcctcagctacagaacgagtgtaacctcgacaacctagatgttctccaagccaccgaaactatcaagagtgaagccggtcagatcgagtactgggaccacaaccaccctcagctccgatgtgttggtgtttccgttgctcgttatgtaattgaacaaggcggtctttacttgcccaccttcttcacttccccaaaaatttcctacgtcgttcaaggaacgggtatcagcggaagagtggtccctggatgtgccgagaccttcatggactcgcagccgatgcaaggacaacaacaaggccaaccatggcaaggacgacag

SEQ ID NO: 142353 - DNA, 407 bp, Arabidopsis thaliana
gtctcttctcttctttctttctccttaacacttttgatccttttccatggctacgcggctcaacagggtcagcagggtcagcagtttccgaacgagtgccagctcgaccagctcaatgcgctcgagccttcacacgtactgaagagcgaggctggtcgcatcgaggtgtgggaccaccacgctcctcagctccgttgctcaggtgtctcctttgcacgttacatcatcgagtctaagggtctctacttgccctctttctttaacaccgcgaagctctccttcgtggctaaaggacgaggtcttatgggaaaagtgatccctggatgcgccgaaacattccaagactcatcagagttccaaccacgcttcgaaggtcaaggtcaaagccagaagttccgtgacatgca

SEQ ID NO: 142354 - DNA, 422 bp, Arabidopsis thaliana
agaaaacatacacaaatagcaaaacatggctaacaagctcttcctcgtctgcgcaactctcgccctctgcttcctcctcaccaacgcttccatctaccgcaccgttgtcgaattcgaagaagatgacgccagcaaccccgtaggtccaagacagagatgccagaaggagtttcagcaatcacaacacctaagagcttgccagagatggatgagcaagcaaatgaggcaaggacgtggtggtggtccttccctcgacgatgagttcgatttcgagggcccccagcagggataccagctactccagcagtgctgcaacgagcttcgccaggaagagccagtttgcgtttgccccaccttgaaacaagctgccagggcagttagcctccaaggacagcacggaccattccaatccaggaaaattt

SEQ ID NO: 142355 - DNA, 424 bp, Arabidopsis thaliana
aagaaaatggttaagctcagcaatctcctcgttgcaaccttcggggttctcctcgtccttaacggctgccttgcgaggcagtcacttggggttcctcctcagctacagaacgagtgtaacctcgacaacctagatgttctccaagccaccgaaactatcaagagtgaagccggtcagatcgagtactgggaccacaaccaccctcagctccgatgtgttggtgtttccgttgctcgttatgtaattgaacaaggcggtctttacttgcccaccttcttcacttccccaaaaatttcctacgtcgttcaaggaacgggtatcagcggaagagtggtccctggatgtgccgagaccttcatggactcgcaggcgatgcaaggacaacaacaaggccaaccatggcaaggacgacagggacaacaag

SEQ ID NO: 142356 - DNA, 350 bp, Arabidopsis thaliana
  unsure (1)..(350): unsure at all n locations
gaaaaaagggacgacccacgcgaacgcaaacgaggaagaanacaaagacaaagaggaaaaaaagggcaaaaaagcgcgcccgagggggcgcaacnaaggccggagggacaccaaaaaacgcagacaacaaccgcacggaagacgagggcgacgaagacgacgccagcaaccccacgggccgaagacagaaangacagaaggagaggcaggaaacacagaaccgaagagcgggccagaaaaggaagcgcaggcaaaagaggcaaggacgcggaggagggcccacacacgacgaagagngcgacaaggaagacgacagcgagaacccacaaggaccccagaagggacaccag

SEQ ID NO: 142357 - DNA, 426 bp, Arabidopsis thaliana
cacacatagcaaaaaatggcaaacaagttgttcctcgtctgcgcagctctcgctctctggttcctcctcaccaacgcttccatctaccgcaccgtcgttgagttcgaagaagatgacgccactaaccccataggcccaaaaatgaggaaatgccgtaaggagtttcagaaagaacaacacctaagagcttgccagcaattgatgctccagcaagcaaggcaaggccgtagcgatgagtttgatttcgaagacgacatggagaacccacagggacaacagcaggaacaacagctattccagcagtgctgcaacgagcttcgccaggaagagccagattgtgtttgccccaccttgaaacaagctgccaaggccgttagactccagggacagcaccaaccaatgcaaggcaggaaaatttaccagaca

SEQ ID NO: 142358 - DNA, 417 bp, Arabidopsis thaliana
aaaaatacccttggtactttattgacgatctcacaaagatgcaatctcagcgaattttgagttacttattcatcttttacagaatcgattccctacgagaatatctggagttcagtatgtctggaagcacaggagaacgttcttttgctgatattattaccagtattcgatactgggtcattcatagcattactataccttccctattcattgcgggctggttattcgtcagcaccggtttagcttacaatgtgttcgggagccctcgtacaaacgagtattttacagagagccgacaaggcatttcattgataacaggccgttttgattctttggaacaactcgatgaatatagtggatctttttaggaggacccaatgactatagataggacctatgcaatttttacagtgcgct

SEQ ID NO: 142359 - DNA, 408 bp, Arabidopsis thaliana
gagagatggggtcaaagacggagatgatggatagagacgcaatggctacggtggctccctatgcgccggtcacttaccatcgccgtgctcgtgttgacttggatgatagacttcctaaaccttatatgccaagagcattgcaagcaccagacagagaacacccgtacggaactccaggccataagaattacggacttagtgttcttcaacagcatgtctccttcttcgatatcgatgataatggcatcatttacccttgggagacctactctggactgcgaatgcttggtttcaatatcattgggtcgcttataatagccgctgttatcaacctgacccttagctatgccactctttcggggtggttaccttcacctgtctttcctatttacatacacaacatacaca

SEQ ID NO: 142360 - DNA, 427 bp, Arabidopsis thaliana
aaagaaaatggttaagctcagcaatctcctcgttgcaaccttcggggttctcctcgtccttaacggctgccttgcgaggcagtcacttggggttcctcctcagctacagaacgagtgtaacctcgacaacctagatgttctccaagccaccgaaactatcaagagtgaagccggtcagatcgagtactgggaccacaaccaccctcagctccgatgtgttggtgtttccgttgctcgttatgtaattgaacaaggcggtctttacttgcccaccttcttcacttccccaaaaatttcctacgtcgttcaaggaacgggtatcagcggaagagtggtccctggatgtgccgagaccttcatggactcgcagccgatgcaaggacaacaacaaggccaaccatggcaaggacgacaggggacaacaggg

SEQ ID NO: 142361 - DNA, 426 bp, Arabidopsis thaliana
gctccacatctagcggagcgtaaattcaaaacttgaggaaggatctgaatccaagtacctgctttctgtaaggctgaatatattcaccattcaactcaacatatttgcatttcatgataccagctggaccacccttgaacccgtaaaatgtgctacctttcgcacgctcttgcaggtaatctaacacgccgaaaacaaaatcaagagtggaacaatgtcagcaactattctacaaaaaaaaaaaaaaacatcatttgacgtaaaaatcaaacccttaccaaacagttcagaaataacattgtgcccaccaggtgcctgacctccagacaaaacaacaccaatctttaattttggtgccgacgaaggtgcatactgatctggaaccactgctactgatggctggccatatagacccggaaacaactt

SEQ ID NO: 142362 - DNA, 425 bp, Arabidopsis thaliana
caaaaagaaaatggttaagctcagcaatctcctcgttgcaaccttcggggttctcctcgtccttaacggctgccttgcgaggcagtcacttggggttcctcctcagctacagaacgagtgtaacctcgacaacctagatgttctccaagccaccgaaactatcaagagtgaagccggtcagatcgagtactgggaccacaaccaccctcagctccgatgtgttggtgtttccgttgctcgttatgtaattgaacaaggcggtctttacttgcccaccttcttcacttccccaaaaatttcctacgtcgttcaaggaacgggtatcagcggaagagtggtccctggatgtgccgagaccttcatggactcgcagccgatgcaaggacaacaacaaggccaaccatggcaaggacgacagggacaac

SEQ ID NO: 142363 - DNA, 424 bp, Arabidopsis thaliana
cacacatagcaaaaaatggcaaacaagttgttcctcgtctgcgcagctctcgctctctgcttcctcctcaccaacgcttccatctaccgcaccgtcgttgagttcgaagaagatgacgccactaaccccataggcccaaaaatgaggaaatgccgcaaggagtttcagaaagaacaacacctaagagcttgccagcaattgatgctccagcaagcaaggcaaggccgtagcgatgagtttgatttcgaagacgacatggagaacccacagggacaacagcaggaacaacagctattccagcagtgctgcaacgagcttcgccaggaagagccagattgtgtttgccccaccttgaaacaagctgccaaggccgttagactccagggacagcaccaaccaatgcaagtcaggaaaatttaccaga

SEQ ID NO: 142364 - DNA, 396 bp, Arabidopsis thaliana
  unsure (1)..(396): unsure at all n locations
ccggggcggcccacgcgnccggccaccgnaacnancaagagggaagccggncagaacgagnacggggaccacaaccaccgggagcnccgaggggaggggggggccgaagcncggcagggaaacgaacaaggcggacnnnacgcgcccacccgcnncacggccccaaaaaaggacgacgcagggaaggaacggggaacagcggaagagaggaccccggangggccgagaccgccacggacgcgcagccgaagcaaggacaacaacaaggccaaccagggcaaggacgacaggggacaacaggaggaacaacagaagggccagcagagcagggacaagaagggacaggaagagacacaaggggagggcagggaccagaaggacaacaaggacgacagg

SEQ ID NO: 142365 - DNA, 412 bp, Arabidopsis thaliana
gccaaccatgggaaggacagggacaacagggacaacaaggaagacaaggccaaccatgggaaggacagggacaacagggacaacaaggacgacagggacaacaaggccaaccatgggaaggacagggacagcagggacaacaagggttccgtgacatgcaccagaaggtggaacatgtgagacgcggagacgtctttgccaacactccaggctctgcccactggatctacaactcaggagaacagccacttgtcatcatcgctcttctcgacatcgccaactaccaaaaccaactcgaccgcaaccctagagtgttccatttggccggaaacaaccagcaaggaggctttggcggttcacagcaacaacaagaacagaaaaacttgtggagcgggttcgacgcacaggtcat

SEQ ID NO: 142366 - DNA, 424 bp, Arabidopsis thaliana
caacagccacagaagaacattttcaatggatttggacccgaggttattgctcaagctttgaagatcgatcttcagacagcgcagcaacttcagaaccaagatgacaaccgtggaaacattgtccgagtccaaggcccgttcggtgtcattaggccgcctttgaggggccagagacctcaggaggaggaagaagaagaagaaggacgacatggacgacacggtaatggcttagaggagaccatctgcagcgccaggtgcaccgataacctcgatgacccgtctcgtgctgacgtgtacaagccacagctcggttacatcagcactctcaacagttacgatctccccatccttcgcttcatccgtctctcagccctccgtggatctatccgtcaaaacgccatggtgcttccacagtggaacgcaa

SEQ ID NO: 142367 - DNA, 387 bp, Arabidopsis thaliana
ggaggactgtgcctgagcaattggagtatgctaagaggagaatggctgatgcggttggctacgcaggacaaaagggcaaagaaatgggccagcatgtgcagaacaaggcccaagatgttaaacaatatgatatttctaagccacatgacactaccactaagggtcatgagactcaggggaggacgacggctgcatgatgagttttcagtatgaacggtagatatgtgttttcactattatgtcgttttttctgcattttcaatatgatgttatgtgttttttttgtttggctttttgttgaaccgtgtatgtgttttatgtttttgtaagcatgaaagatcgcaagtgttgtggtaatatttgaatgtaataatatgataagttgat

SEQ ID NO: 142368 - DNA, 423 bp, Arabidopsis thaliana
gtgacatgcaccagaaggtggaacatgtgagacgcggagacgtctttgccaacactccaggctctgcccactggatctacaactcatgagaacagccacttgtcatcatcgctcttctcgacatcgccaactaccaaaaccaactcgaccgcaaccctagagtgttccatttggccggaaacaaccagcagggaggctttggcggttcacagcaacaacaagaacagaaaaacttgtggagcgggttcgacgcacaggtcatagctcaagcattgaaaattgacgttcagttggctcagcagcttcagaaccaacaagacagcagaggaaacatcggtcgggttaagggacctttccaggtcgtgaggccacctctaagacagccctacgagagcgaggagtggagacacccacgtagcccac

SEQ ID NO: 142369 - DNA, 406 bp, Arabidopsis thaliana
ggaagaaaaatgggtcgagtctcatctattatctctttctctttgacactcttgatcctcttcaatggctacactgcccaacagtggcccaacgagtgccagctcgatcaactcaatgcgctcgaaccatcccaaatcatcaagagcgagggtggtcgcatcgaggtctgggaccaccatgcaccccagctccgttgctccggctttgcctttgagcgtttcgtcattgagcctcagggtcttttcttgcccactttcttgaacgccggcaaactcacgtttgttgttcacggaaggggtctaatgggaagagttattccgggatgcgccgagacgttcatggagtcaccggtatttggagaaggtcaaggtcagggtcagagtcaagggtttcgtgacatgcacc

SEQ ID NO: 142370 - DNA, 423 bp, Arabidopsis thaliana
cgatctagccagtcaccagaaccagcttgaccgcaacccaaggccattttacttagccggaaacaacccacaaggtcaagtatggctacaaggacgagagcaacagccacagaagaacatcttcaatggatttggacccgaggttattgctcaagctttgaagattgatcttcagacagcgcagcaacttcagaaccaagatgacaaccgtggaaacattgtccgagtccaaggcccgttcggtgtcattaggccgcctttgaggggccagagacctcaggaggaggaagaagaagaagaaggacgacacggacgacacggtaatggcttagaggagaccatctgcagcgccaggtgcaccgataacctcgatgatccgtctcgtgctgacgtgtacaagccacaagtcggttacatcagcac

SEQ ID NO: 142371 - DNA, 300 bp, Arabidopsis thaliana
  unsure (1)..(300): unsure at all n locations
gacccacgcgancgagaaaaagganaagcgcagcaaacgccgcggggcaaccaacggggaacaccacgacccgaacggagggcaagcgaggcagaaaccnggggnnccnccncagcnacagaacgaggggaaccgcgacaaccaagaagagcgccaagccaccgaaacgaacaagagagaagccggacagaacgaggacagggaccacaaccacccncagcnccgangagaaggagcgnacgaggccacgaaaggaaacgaacaaggcggggcggacgggcccaccagacgcaanggccc

SEQ ID NO: 142372 - DNA, 397 bp, Arabidopsis thaliana
acgggtatcagcggaagagtggtccctggatgtgccgagaccttcatggactcgcagccgatgcaaggacaacaacaaggccaaccatggcaaggacgacagggacaacaaggccaaccatgggaaggacagggacaacagggacaacaaggaagacaaggccaaccatgggaaggacagggacaacagggacaacaaggacgacagggacaacaaggccaaccatgggaaggacagggacagcagggacaacaagggttccgtgacatgcaccagaaggtggaacatgtgagacgcggagacgtctttgccaacactccaagctcttgccactggatctacaactcaggagaacagccacttgtcatcatcgctcttctcgacatcgccaactacc

SEQ ID NO: 142373 - DNA, 424 bp, Arabidopsis thaliana
gttaagctcagcaatctcctcgttgcaaccttcggggttctcctcgtccttaacggctgccttgcgaggcagtcacttggggttcctcctcagctacagaacgagtgtaacctcgacaacctagatgttctccaagccaccgaaactatcaagagtgaagccggtcagatcgagtactgggaccacaaccaccctcagctccgatgtgttggtgtttccgttgctcgttatgtaattgaacaaggcggtctttacttgcccaccttcttcacttccccaaaaatttcctacgtcgttcaaggaacgggtatcagcggaagagtggtccctggatgtgccgagaccttcatggactcgcagccgatgcaaggacaacaacaaggccaaccatggcaaggacgacagggacaacaaggccaaccat

SEQ ID NO: 142374 - DNA, 402 bp, Arabidopsis thaliana
caacaaacaaaaagaaaatggttaagctcagcaatctcctcgttgcaaccttcggggttctcctcgtccttaacggctgccttgcgaggcagtcacttggggttcctcctcagctacagaacgagtgtaacctcgacaacctagatgttctccaagccaccgaaactatcaagagtgaagccggtcagatcgagtactgggaccacaaccaccctcagctccgatgtgttggtgtttccgttgctcgttatgtaattgaacaaggcggtctttacttgcccaccttcttcacttccccaaaaatttcctacgtcgttcaaggaacgggtatcagcggaagagtggtccctggatgtgccgagaccttcatggactcgcagccgatgcaaggacaacaacaag

SEQ ID NO: 142375 - DNA, 389 bp, Arabidopsis thaliana
aagaaataacaaaatggctcgagtctcttctcttctttctttcttcttaacacttttgatccttttccatggctacgcggctcaacagggtcagcagggtcagcagtttccgaacgagtgccagctcgaccagctcaatgcgctcgagccgtcacacgtactgaagagcgaggctggtcgcatcgaggtgtgggaccaccacgctcctcagctccgttgctcaggtgtctcctttgcacgttacatcatcgagtctaagggtctctacttgccctctttctttaacaccgcgaagctctctttcgtggctaaaggacgaggtcttatgggaaaagtgatccctggatgcgccgaaacattccaagactcatcagagttccaaccacgct

SEQ ID NO: 142376 - DNA, 288 bp, Arabidopsis thaliana
aacaaacaaaaagaaaatgggtaagctcagttttttccttgatgcaaccttcagcgatgtgggtcgtatcttaacggctggcgtgcgaggcaaacacttggggttcctccttagctacagaacgagtgtaacctcgacaacctagatgttttccaagccaccgaaactatcaagagagaagtccggtcagatcgagtactgggaccacaaccacccttagctccgatgtgttggtgtttccgctgctcgttctgtaaataaacaagggggtctatacttgcccacctt

SEQ ID NO: 142377 - DNA, 365 bp, Arabidopsis thaliana
taaaaatggctcgagtctcttctcttctttctttctccttaacacttttgatccttttccatggctacgcggctcaacagggtcagcagggtcagcagtttccgaacgagtgccagctcgaccagctcaatgcgctcgagccttcacacgtactgaagagcgaggctggtcgcatcgaggtgtgggaccaccacgctcctcagctccgttgctcaggtgtctcctttgcacgttacatcatcgagtctaagggtctctacttgccctctttctttaacaccgcgaagctctccttcgtggctaaaggacgaggtcttatgggaaaagtgatccctggatgcgccgaaacattccaagactcatca

SEQ ID NO: 142378 - DNA, 456 bp, Arabidopsis thaliana
  unsure (1)..(456): unsure at all n locations
cgnntccgaaaatgggnnntaagactcagcannatctcctcgtttgcaaccccttacggggttctacctcgtaccttttaacggctgccttgcgacaggcagtcacattgagaggttcactcctcagctaccacgaacgagttgtaacctcgacaancctagatgttnctccaagccgaccgaaactatcaagagtgaagccggtcagatcgagtactgggaccacaaccaccctcagctccgatgtgttggtgtttccgttgctcgttatgtaattgaacaaggcggtctttacttgcccaccttcttcacttccccaaaaatttcctacgtcgttcaaggaacgggtatcagcggaagagtggtccctggatgtgccgagaccttcatggactcgcagccgatgcaaggacaacaacaaggccaaccatggcaaggacgacagggacaacaagg

SEQ ID NO: 142379 - DNA, 422 bp, Arabidopsis thaliana
aacaaacaaaaagaaaatggttaagctcagcaatctcctcgttgcaaccttcggggttctcctcgtccttaacggctgccttgcgaggcagtcacttggggttcctcctcagctacagaacgagtgtaacctcgacaacctagatgttctccaagccaccgaaactatcaagagtgaagccggtcagatcgagtactgggaccacaaccaccctcagctccgatgtgttggtgtttccgttgctcgttatgtaattgaacaaggcggtctttacttgcccaccttcttcacttccccaaaaatttcctacgtcgttcaaggaacgggtatcagcggaagagtggtccctggatgtgccgagaccttcatggactcgcagccgatgcaaggacaacaacaaggccaaccatggcaaggacgac

SEQ ID NO: 142380 - DNA, 424 bp, Arabidopsis thaliana
aatggctcgagtctcttctcttctttctttcttcttaacacttttgatccttttccatggctacgcggctcaacagggtcagcagggtcagcagtttccgaacgagtgccagctcgaccagctcaatgcgctcgagccgtcacacgtactgaagagcgaggctggtcgcatcgaggtgtgggaccaccacgctcctcagctccgttgctcaggtgtctcctttgcacgttacatcatcgagtctaagggtctctacttgccctctttctttaacaccgcgaagctctctttcgtggctaagggacgaggtcttatgggaaaagtgatccctggatgcgccgaaacattccaagactcatcagagttccaaccacgcttcgaaggtcaaggtcaaagccagaggttccgtgacatgcaccagaaa

SEQ ID NO: 142381 - DNA, 427 bp, Arabidopsis thaliana
agaaataacaaaatggctcgagtctcttctcttctttctttcttcttaacacttttgatccttttccatggctacgcggctcaacagggtcagcagggtcagcagtttccgaacgagtgccagctcgaccagctcaatgcgctcgagccgtcacacgtactgaagagcgaggctggtcgcatcgaggtgtgggaccaccacgctcctcagctccgttgctcaggtgtctcctttgcacgttacatcatcgagtctaagggtctctacttgccctctttctttaacaccgcgaagctctctttcgtggctaaaggacgaggtcttatgggaaaagtgatccctggatgcgccgaaacattccaagactcatcagagttccaaccacgcttcgaaggtcaaggtcaaagccagaggttccgtgacatgc

SEQ ID NO: 142382 - DNA, 426 bp, Arabidopsis thaliana
cacatagcaaaaaatggcaaacaagttgttcctcgtctgcgcagctctcgctctctgcttgctcctcaccaacgcttccatctaccgcaccgtcgttgagttcgaagaagatgacgccactaaccccataggcccaaaaatgaggaaatgccgcaaggagtttcagaaagaacaacacctaagagcttgccagcaattgatgctccagcaagcaaggcaaggcgcgagcgatgagtttgatttcgaagacgacatggagaacccacagggacaacagtaggaacaacagctattccagcagtgctgcaacgagcttcgccaggaagagccagattgtgtttgccccaccttgaaacaagctgccaaggccgttagacttcaaggacagtaccaaccaatgcaagtcaggaaaatttaccagacagc

SEQ ID NO: 142383 - DNA, 383 bp, Arabidopsis thaliana
gtcttcctcgttttctctctctctgtctgtgtctcttagaatgcaatcagctatggcgctttcgttctcccagacgtcgtttacaagaccaaaccacgtgctcggatcatctggttctgttttctctacgcccagaagtctccggttctgcggactccggcgggaagcgtttggtttctcaacgtcgaatcagttggctattcgcagtaaccgaatccaatttctaagtaggaagtcattccaagtctccgcttctgcttcaagtaatggtaatggcgctccaccgaaatctttcgattacgatttgatcatcatcggagctggagttggtggccacggagctgctttgcacgccgttgaaaagggacttaaaacagccatta

SEQ ID NO: 142384 - DNA, 378 bp, Arabidopsis thaliana
ataagaaataacaaaatggctcgagtctcttctcttctttctttcttcttaacacttttgatccttttccatggctacgcggctcaacagggtcagcagggtcagcagtttccgaacgagtgccagctcgaccagctcaatgcgctcgagccgtcacacgtactgaagagcgaggctggtcgcatcgaggtgtgggaccaccacgctcctcagctccgttgctcaggtgtctcctttgcacgttacatcatcgagtctaagggtctctacttgccctctttctttaacaccgcgaagctctctttcgtggctaaaggacgaggtcttatgggaaaagtgatccctggatgcgccgaaacattccaagactcatcagag

SEQ ID NO: 142385 - DNA, 419 bp, Arabidopsis thaliana
cgatcgtgtacctgatgaacgatgaaattattcatctccctaagtttgagacgacgaacaaaagaaaacttcacggttttttcttcttctttatttccttcattttttatattttgggaaagtatttttaattttccaagatatctataatcatatcattatatatgtaatattttttttaatgtttgggtgagtctttaatttatgcaatttttcgggtgtaaaattgttactatgtgttattatatgtttttaatgcactcaatccgaatgtggatttgcagtggctatatatataaataaatatatatcccgttgtaattttagtgaaacgtttgtgtgtattgtacccatatataaaaatgtaattcactctttttagtttatatatattttggtttataaatatgcgtttcttt

SEQ ID NO: 142386 - DNA, 389 bp, Arabidopsis thaliana
gaaaatggttaagctcagcaatctcctcgttgcaaccttcggggttctcctcgtccttaacggctgccttgcgaggcagtcacttggggttcctcctcagctacagaacgagtgtaacctcgacaacctagatgttctccaagccaccgaaactatcaagagtgaagccggtcagatcgagtactgggaccacaaccaccctcagctccgatgtgttggtgtttccgttgctcgttatgtaattgaacaaggcggtctttacttgcccaccttcttcacttccccaaaaatttcctacgtcgttcaaggaacgggtatcagcggaagaagtggccctggatgtgccgagaccttcatggactcgcagcccgagcaaggacaacaacaag

SEQ ID NO: 142387 - DNA, 229 bp, Arabidopsis thaliana
caaaaagaaaatggttaagctcagcaatctcctcgttgcaaccttcggggttctcctcgtccttaacggctgccttgcgaggcagtcacttggggttcctcctcagctacagaacgagtgtaacctcgacaacctagatgttctccaagccaccgaaactatcaagagtgaagccggtcagatcgagtactgggaccacaaccaccctcagctccgatgtgttggtgtt

SEQ ID NO: 142388 - DNA, 389 bp, Arabidopsis thaliana
gtaattaactaacaacaaatggcgaacaagctcttcctcgtctgcgcagctctcgccctgtgtttcatcctcaccaacgcttccgtctatcgcacggttgtcgagttcgacgaagatgacgccagtaaccccataggcccaatacagaaatgtcagaaggagtttcagcaagaacagcacctaagagcttgccagagatggatgcgcaagcaaatgtggcaaggacgtggtggtggtccttccctcgacgatgagttcgatatggaagacgacatcgagaacccgcagagacgacagctactccagaagtgctgcagcgagctttgccaagaagagccagtttgcgtttgccccaccttgagacaagctgtcaaggccgttagatttca

SEQ ID NO: 142389 - DNA, 324 bp, Arabidopsis thaliana
  unsure (1)..(324): unsure at all n locations
aaaaaaaacagaacacaaacaaaaacacacgggaacaggaggggaagcgagaagcggcgggacggcgaagaagaagaaggcggcgaccaccgggaaacaagaaacgacgacggcgcgggaagacgcaaacacaaggccgacggagcaancggcggaaaccggaccaggaacaacgagggcgccgacaccgagacccgccggcggancaccggcgagaagaacggggacgggagnaaccgggaagcacccnaanagcagggggaggcgacaacggaacggaaaaaggggaacggagaanagagagccacgggaaacgacaagaaa

SEQ ID NO: 142390 - DNA, 329 bp, Arabidopsis thaliana
cgccgctgccggaactaccgaccttgccgatggccgtggtgcatatctgcgtacgaggggtcaaggaaatgataagattgttgtggcttgtgacataaatgagggtcttggaaactttgtctcggcccttaacagattcattgcggaccgctatttgtcgaaccattcagtcttagaataccatgtctatgagttcttcaagatatggaactgctctcgcaacgaatccgacttacgtggtcatgaattctttaagacatcatatatcaagaaagggttccctcctctttcaggtgccctaagactctttacaagctttcaaaatattg

SEQ ID NO: 142391 - DNA, 235 bp, Arabidopsis thaliana
gacccacgcgttcgaaaatgggtcgagtctcatttattatctttttctctttgacactcttgatcctcttgaatgggtacactgtccaacagtggcctaacgagtgccagctcgatcaactcaatgcgctcgaaccatcccaaatcatcaagagcgagggttggcgcatcgaggtctgggaccaccatgcaccccatcttcgttgctgcggctttggctttgagcgtctcgtcat

SEQ ID NO: 142392 - DNA, 427 bp, Arabidopsis thaliana
agaaaacatacacaaatagcaaaacatggctaacaagctcttcctcgtctgcgcaactctcgccctctgcttcctcctcaccaacgcttccatctaccgcaccgttgtcgaattcgaagaagatgacgccagcaaccccgtaggtccaagacagagatgccagaaggagtttcagcaatcacaacacctaagagcttgccagagatggatgagcaagcaaatgaggcaaggacgtggtggtggtccttccctcgacgatgagttcgatttcgagggcccccagcagggataccagctactccagcagtgctgcaacgagcttcgccaggaagagccagtttgcgtttgccccaccttgaaacaagctgccagggcagttagcctccagggacagcacggaccatttcaatccaggaaaatttaccag

SEQ ID NO: 142393 - DNA, 384 bp, Arabidopsis thaliana
aagaaaacatacacaaatagcaaaacatggctaacaagctcttcctcgtctgcgcaactctcgccctctgcttcctcctcaccaacgcttccatctaccgcaccgttgtcgaattcgaagaagatgacgccagcaaccccgtaggtccaagacagagatgccagaaggagtttcagcaatcacaacacctaagagcttgccagagatggatgagcaagcaaatgaggcaaggacgtgggggtggtccttccctcgacgatgagttcgatttcgagggcccccagcagggataccagctactccagcagtgctgcaacgagcttcgccaggaagagccagtttgcgtttgccccaccttgaaacaagctgccagggcagatagcc

SEQ ID NO: 142394 - DNA, 429 bp, Arabidopsis thaliana
  unsure (1)..(429): unsure at all n locations
aacatacacacatagcaaaaaatggcaaacaagttgttcctcgtctgcgcagctctcgctctctgcttcctcctcaccaacgcttccatctaccgcaccgtcgttgagttcgaagaagatgacgccactaaccccataggcccaaaaatgaggaaatgccgcaaggagtttcagaaagaacaacacctaagagcttgccagcaattgatgctccagcaagcaaggcaaggccgtagcgatgagtttgatttcgaagacgacatggagaacccacagggacaacagcaggaacaacagctattccagcagtgctgcaacgagcttcgccaggaagagccagattgtgtttgccccaccttgaaacaagctgccaaggccgttagactccnaggacagcaccaaccaatgcaagtcaggaaaatttaccag

SEQ ID NO: 142395 - DNA, 425 bp, Arabidopsis thaliana
aacaaacaaaaagaaaatggttaagcttagcaatctcctcgttgcaaccttcggggttctcctcgtccttaacggctgccttgcgaggcagtcacttggggttcctcctcagctacagaacgagtgtaacctcgacaacctagatgttctccaagccaccgaaactatcaagagtgaagccggtcagatcgagtactgggaccacaaccaccctcagctccgatgtgttggtgtttccgttgctcgttatgtaattgaacaaggcggtctttacttgcccaccttcttcacttccccaaaaatttcctacgtcgttcaaggaacgggtatcagcggaagagtggtccctggatgtgccgagaccttcatggactcgcagccgatgcaaggacaacaacaaggccaaccatggcaaggacgacagg

SEQ ID NO: 142396 - DNA, 420 bp, Arabidopsis thaliana
caaaaagaaaatggttaagctcagcaatctcctcgttgcaaccttcggggttctcctcgtccttaacggctgccttgcgaggcagtcacttggggttcctcctcagctacagaacgagtgtaacctcgacaacctagatgttctccaagccaccgaaactatcaagagtgaagccggtcagatcgagtactgggaccacaaccaccctcagctccgatgtgttggtgtttccgttgctcgttatgtaattgaacaaggcggtctttacttgcccaccttcttcacttccccaaaaatttcctacgtcgttcaaagaacgggtatcagcggaagagtggtccctggatgtgccgagaccttcatggactcgcagccgatgcaaggacaacaacaaggccaaccatggcaaggacgacaggg

SEQ ID NO: 142397 - DNA, 422 bp, Arabidopsis thaliana
gtgcttcctaaatacaacatgaacgctaacgagatcttgtactgcactggaggacaaggaaggatccaagtggtcaacgacaacggacagaacgtgttggaccaacaggtgcagaagggacagctcgtggtcatcccacaagggttcgcatacgttgtccagtcccacggaaacaagttcgagtggatctctttcaaaactaatgaaaacgcaatgatcagcactttggcgggtagaacctcgctcttgagggcattgccattggaggtcatatcaaatggtttccagatctctcccgaggaagctaggaagatcaagttcaacacacttgagaccactttgacccgcgctgccggtaggcaacaacaacagttgatcgaagagattgtcgaggcttaaatcaaaacgtttttctttttttt

SEQ ID NO: 142398 - DNA, 421 bp, Arabidopsis thaliana
  unsure (1)..(421): unsure at all n locations
cttgcccaccttcttcacttccccaaaaatttcctacgtcgttcaaggaacgggtatcagcggaagagtggtccctggatgtgccgagaccttcatggactcgcagccgatgcaaggacaacaacaaggccaaccatggcaaggacgacagggacaacaaggccaaccatgggaaggacagggacaacagggacaacaaggaagacaaggccaaccatgggaaggacagggacaacagggacaacaaggacgacagggacaacaaggccaaccatgggaaggacagggacagcagggacaacaagggttccgtgacatgcaccagaaggtggaacatgtgagacgcggagacgtctttgccaacactccangctctgtccactggatctacaactcaggagaacagccacttgtcatcatc

SEQ ID NO: 142399 - DNA, 382 bp, Arabidopsis thaliana
ctttcttcttcccggagaaaatttggccctaaatcactttcccgggaaaatcaaactctgggaaagagttgaaaaaatgtcacaaggcgatacagtaccgcttcatccatcgtctcaatcagacattgacgagatcgagaatctgattaacgaaagcgtccaatcaggtcccggaaccgttctcgccgctcgtccaccgagcccaaccagaccttcgattccagtatcttcttcttcttcttcttctccggttatgcaatcgaatcttccaccgcttcatccgtcgtcatcagctcagaaagtgacacatgtccccgttcctccgcctcttccggcggtaagtaactccagcaattttcaaggagcgagtgcttttggatct

SEQ ID NO: 142400 - DNA, 402 bp, Arabidopsis thaliana
  unsure (1)..(402): unsure at all n locations
atcgaaactatggctaagctcattctcgttttcgcaactcttgccctcttcatcctcctagccaacgcatccatctaccgcacagtggtggagttcgaggaagatgatgacgtgagcaacccacaacaaggtaagtgccagagggagtttatgaagcatcagcaactaagaggttgcaagcaatggatccgcaagagagctcaacaaggaagaatcggatacgaagctgatgactttgagctcactcttgatgtcgatcttgaggacgatgagaacccaatggggcctcaacaacagtcatctcttaaaatgtgttgtaatgaattaaggcaagtggacaagatgtgtgtgtgtcctacactgaaaaaggcgcttaacangtcagattccagggaatgcatg

SEQ ID NO: 142401 - DNA, 425 bp, Arabidopsis thaliana
aacatacacacatagcaaaaaatggcaaacaagttgttcctcgtctgcgcagctctcgctctctgcttcctcctcaccaacgcttccatctaccgcaccgtcgttgagttcgaagaagatgacgccactaaccccataggcccaaaaatgaggaaatgccgcaaggagtttcagaaagaacaacacctaagagcttgccagcaattgatgctccagcaagcaaggcaaggccgtagcgatgagtttgatttcgaagacgacatggagaacccacagggacaacagcaggaacaacagctattccagcagtgctgcaacgagcttcgccaggaagagccagattgtgtttgccccaccttgaaacaagctgccaaggccgttagactccagggacagcaccaaccaatgcaagtcagggaaaatta

SEQ ID NO: 142402 - DNA, 417 bp, Arabidopsis thaliana
gccagagagagagagacaagtgagagggatctaccaaacgaagcaacaatggtgaagttcttgaagcagaacaaggccgtgatccttcttcaaggacgttacgccggaaagaaagccgtcatcatcaaatccttcgacgacggtaaccgtgatcgtccttacggacactgcctcgtcgccggactgaagaagtacccgagcaaagtcatccgcaaagactcagctaagaagacagctaagaaatctagggttaagtgtttcatcaagcttgttaactaccagcatctgatgcctactcgttacacactcgacgtggatctcaaggaagtggcgactcttgatgctcttcagagtaaggataagaaggttgctgctcttaaagaagctaaggctaagcttgaggagaggttcaagact

SEQ ID NO: 142403 - DNA, 407 bp, Arabidopsis thaliana
ccatttttggaaacaccatttcacattccttaaacttttccattttagtatcatttcatattcattgatatggatgtctccaacacgatgctccttgtagctgttgttgcagcttactggctctggttccagcggatctcaaggtggctaaagggtccacgtgtttggccagttttgggcagtcttccgggtctgatcgagcagcgtgaccgtatgcacgactggatcactgagaacctccgtgcgtgtggcggcacttaccagacatgtatctgcgccgtacctttcttggcaaagaagcaaggtctcgtgaccgtcacgtgcgatcccaagaacattgaacacatgctcaagaccaggttcgacaactaccctaaaggtcctacgtggcaagccgtgttccatga

SEQ ID NO: 142404 - DNA, 417 bp, Arabidopsis thaliana
  unsure (1)..(417): unsure at all n locations
aaaacatacacacatagcaaaaaatggcaaacaagttgttcctcgtctgcgcagctctcgctctctgcttcctcctcaccaacgcttccatctaccgcaccgtcgttgagttcgaagaagatgacgccactaaccccataggcccaaaaatgaggaaatgccgcaaggagtttcagaaagaacaacacctaagagcttgccagcaattgatgctccagcaagcaaggcaaggccgtagcgatgagtttgatttcgaagacgacatggagaacccacagggacaacagcaggaacaacagctattccagcagtgctgcaacgagcttcgccaggaagagccagattgtgtttgccccaccttgaaacangctgccaaggctcgtagactccagggacagcaccaaccaatgcaagtca

SEQ ID NO: 142405 - DNA, 443 bp, Arabidopsis thaliana
acaactcaggagaacagccacttgtcatcatcgctcttctcgacatcgccaactaccaaaaccaactcgaccgcaaccctagagtgttccatttggccggaaacaaccagcagggaggctttggcggttcacagcaacaacaagaacagaaaaacttgtggagcgggttcgacgcacaggtcatagctcaagcattgaaaattgacgttcagttggctcagcagcttcagaaccaacaagacagcagaggaaacatcgttcgtgttaagggacctttccaggtcgtgaggccacctctaagacagccctacgagagcgaggagtggagacacccacgtagcccacagggcaacggccttgaggagactatctgcagcatgaggtcccacgagaacattgacgaccctgctcgtgctgacgtgtacaagcccagcctaagtcgc

SEQ ID NO: 142406 - DNA, 428 bp, Arabidopsis thaliana
aagagcatatggattcgggagagctgacgaggcgactcacccggactccattagagccactttggctgagtttctttccacgttcgtcttcgtctttgctggagaaggctcaatcctcgctctagacaagttgtattgggacacggcggctcacacggggacaaacacgcctggagggttagttctggtggcgttagctcatgcattggccttgttcgcggctgtttctgcagccatcaatgtctctggtggccacgtcaaccccgctgtcacttttgctgctctaatcggaggcaggatctcggtcattcgagctatctactattgggttgctcagcttataggtgctatcctcgcttgtctcttgttgaggcttgccactaatggcttgagaccagtaggtttccatgtagcatcaggagttagtg

SEQ ID NO: 142407 - DNA, 432 bp, Arabidopsis thaliana
catttcttcgatacttcccaagttcaccgcaatggccaccgcttcaatcttccccgccgccgtgaccgtcaccagagatgtgacatctcttcttaatccatcttctctgatcatcggaaaatcattatctccttcaaagttcagctcaatcaaatcctccgtttcattttcccgcaaaaccctaactccaattcgatactcttcatctcccgccgatcactcacccgccaccgccgtggaagcgatcacgaatcgatccaaaacctccttgaaatctcgtctccgtggaggagaaactctctacggtctctttttactctccttctcgccgacattagccgagatcgctgctcacgccggttacgattacgtcgtcgttgatatggaacatggtcccggaggtataccggaagctttggattgtattcgagc

SEQ ID NO: 142408 - DNA, 425 bp, Arabidopsis thaliana
caaaaagaaaatggttaagctcagcaatctcctcgttgcaaccttcggggttctcctcgtccttaacggctgccttgcgaggcagtcacttggggttcctcctcagctacagaacgagtgtaacctcgacaacctagatgttctccaagccaccgaaactatcaagagtgaagccggtcagatcgagtactgggaccacaaccaccctcagctccgatgtgttggtgtttccgttgctcgttatgtaattgaacaaggcggtctttacttgcccaccttcttcacttccccaaaaatttcctacgtcgttcaaggaacgggtatcagcggaagagtggtccctggatgtgccgagaccttcatggactcgcagccgatgcaaggacaacaacaaggccaaccatgtgcaggacgacagggacaac

SEQ ID NO: 142409 - DNA, 409 bp, Arabidopsis thaliana
cagccacttgtcatcatcgctcttctcgacatcgccaactaccaaaaccaactcgaccgcaaccctagagtgttccatttggccggaaacaaccagcagggaggctttggcggttcacagcaacaacaagaacagaaaaacttgtggagcgggttcgacgcacaggtcatagctcaagcattgaaaattgacgttcagttggctcagcagcttcagaaccaacaagacagcagaggaaacatcgttcgtgttaagggacctttccaggtcgtgaggccacctctaagacagccctacgagagcgaggagtggagacacccacgtagcccacacggcaacggccttgaggagactatctgcagcatgaggtcccacgagaacattgacgaccctgctcgtgctgacgtgt

SEQ ID NO: 142410 - DNA, 395 bp, Arabidopsis thaliana
caaaaagaaaatggttaagctcagcaatctcctcgttgcaaccttcggggttctcctcgtccttaacggctgccttgcgaggcagtcacttggggttcctcctcagctacagaacgagtgtaacctcgacaacctagatgttctccaagccaccgaaactatcaagagtgaagccggtcagatcgagtactgggaccacaaccaccctcagctccgatgtgttggtgtttccgttgctcgttatgtaattgaacaaggcggtctttacttgcccaccttcttcacttccacaaaaatttcctacgtcgttcaaggaacgggtatcagcggaagagtggtccctggatgtgccgagaccttcatggactcgcagccgatgcaaggacaacaacaag

SEQ ID NO: 142411 - DNA, 280 bp, Arabidopsis thaliana
ctgttttgcatccgaaggagctactgtggctttcacttacgtgaagggtcaagaagaaaaagatgcacaagagaccctacaaatgttgaaggaggtcaaaacctcggactccaaggaacctatcgccattccaacggatttaggatttgacgaaaactgcaaaagggtcgttgatgaggtcgttaatgcttttggccgcatcgatgttttgatcaataacgcagcagagcagtacgagagcagcacaatcgaagagattgatgagcctaggcttgagcga

SEQ ID NO: 142412 - DNA, 422 bp, Arabidopsis thaliana
aatcaataaagaggaagaaaaatgggtcgagtctcatctattatctctttctctttgacactcttgatcctcttcaatggctacactgcccaacagtggcccaacgagtgccagctcgatcaactcaatgcgctcgaaccatcccaaatcatcaagagcgagggtggtcgcatcgaggtctgggaccaccatgcaccccagctccgttgctccggctttgcctttgagcgtttcgtcattgagcctcagggtcttttcttgcccactttcttgaacgccggcaaactcacgtttgttgttcacggaaggggtctaatgggaagagttattccgggatgcgccgagacgttcatggagtcaccggtatttggagaaagtcaaggtcagggtcagagtcaagggttccgtgacatgcaccagaa

SEQ ID NO: 142413 - DNA, 429 bp, Arabidopsis thaliana
cgcagcaacttcagaaccaagatgacaaccgtggaaacattgtccgagtccaaggcccgttcggtgtcattaggccgcctttgaggggccagagacctcaggaggaggaagaagaagaagaaggacgacatggacgacacggtaatggcttagaggagaccatctgcagcgccaggtgcaccgataacctcgatgacccgtctcgtgctgacgtgtacaagccacagctcggttacatcagcactctcaacagttacgatctccccatccttcgcttcatccgtctctcagccctccgtggatctatccgtcaaaacgcaatggtgcttccacagtggaacgcaaacgcgaacgctattctttacgtgacagacggggaagcccaaatccagatcgtaaacgacaatggtaacagagtgtttgacggac

SEQ ID NO: 142414 - DNA, 378 bp, Arabidopsis thaliana
agaaaaatgggtcgagtctcatctattatctctttctctttgacactcttgatcctcttcaatggctacactgcccaacagtggcccaacgagtgccagctcgatcaactcaatgcgctcgaaccatcccaaatcatcaagagcgagggtggtcgcatcgaggtctgggaccaccatgcaccccagctccgttgctccggctttgcctttgagcgtttcgtcattgagcctcagggtcttttcttgcccactttcttgaacgccggcaaactcacgtttgttgttcacggaaggggtctaatgggaagagttattccgggatgcgccgagacgttcatggagtcaccggtatttggagaaagtcaaggtcagggtcag

SEQ ID NO: 142415 - DNA, 359 bp, Arabidopsis thaliana
ggatgatgctgcggatgagatcaaggaagcagcagcgccaaaaccgaccgaggaacagcagtgatcttttgagtgaaactgctagttttcttctagggtttggaatttcttctctttctctcgtccatatgtttttcttaatccatctaagaggtcgctcttgccatttcgctcatcttcaaaagcttattcattcatcatatttgtggcaagtctgaaccatcaatcatctttttatctctttttaatttattttctctgttcttatttctttgttgttatcgatttcaatgtctgtgtaatcgaaacttgctttcttttctcatcaatttgaagatcataaagtctcttgtctctaa

SEQ ID NO: 142416 - DNA, 421 bp, Arabidopsis thaliana
cacattgagcattgtaaccacaattaggatattgtaccaagcgttggtgtatatagtgaccacacgtatcaagcaacacacagaagacaatgacatgtaacaaacagtgtaaaatattgaaaataacttatcaaaaaactttagttcataacacagaaactttcggctattttttattgacttctatgtagtctttttgttgcactgactatttttaaaagcaatatgtatgtttccagcggattcttaggttttacaaaattttggctttaatattttttttgatatacattgccatgcttgatttcattttgttctacactagtatcaaaattggacaaaatgaaacttcaggacacatacgaaaaggttaacaaatgttcgaacagagaatgattttaaaaaggacttaaatgtggag

SEQ ID NO: 142417 - DNA, 422 bp, Arabidopsis thaliana
cttcaaaatttatctataagtgggttccttgagatatgttgttctttgatgatactacagacgtagcttaaaatattacatgcaacaacgagctcagaatgatgaaattggctcagtttctgtcacaggcgtttctatctttgtactatattcacaaaaacttgattcactcttttaggttcaaattttcttatggtaatttagaatttggagctgattgggatgctactaacagaattatgttgttaatctgccagttctgcatgttgacgtgtgttagatgaatcacttatctttttggaccaacatgatataactaagaacctgttctgtcaatagaatttatgtcatgaaccaaaaggattcttgtgaatttcataacatgacgctggctttctttttttcttctccagatgctctca

SEQ ID NO: 142418 - DNA, 451 bp, Arabidopsis thaliana
cagggacaacaaggccaaccatgggaaggacagggacagcagggacaacaagggttccgtgacatgcaccagaaggtggaacatgtgagacgcggagacgtctttgccaacactccaggctctgcccactggatctacaactcaggagaacagccacttgtcatcatcgctcttctcgacatcgccaactaccaaaaccaactcgaccgcaaccctagagtgttccatttggccggaaacaaccagcagggaggctttggcggttcacagcaacaacaagaacagaaaaacttgtggagcgggttcgacgcacaggtcatagctcaagcattgaaaattgacgttcagttggctcagcagcttcagaaccaacaagacagcagaggaaacatcgttcgtgttaagggacctttccaggtcgtgaggccacctctaagacagccctacgaga

SEQ ID NO: 142419 - DNA, 429 bp, Arabidopsis thaliana
gcaaaaaatggcaaacaagttgttcctcgtctgcgcagctctcgctctctgcttcctcctcaccaacgcttccatctaccgcaccgtcgttgagttcgaagaagatgacgccactaaccccataggcccaaaaatgaggaaatgccgcaaggagtttcagaaagaacaacacctaagagcttgccagcaattgatgctccagcaagcaaggcaaggccgtagcgatgagtttgatttcgaagacgacatggagaacccacagggacaacagcaggaacaacagctattccagcagtgctgcaacgagcttcgccaggaagagccagattgtgtttgccccaccttgaaacaagctgccaaggccgttagactccagggacagcaccaaccaatgcaagtcaggaaaatttaccagacagccaagcactt

SEQ ID NO: 142420 - DNA, 311 bp, Arabidopsis thaliana
ccaaaccctaatttctcagctcgaagtttccatttcattgcttcttcttacctcgatttttcccgggtattagaatcggtcaatttactgaattatagtgttctcacatgccaactgattctacttcaaaatcgctgcgaatttctgcgatcagttacgaaaattttgtcaatgggttcgggtaatcatgttgatatagtcgatgtgagctcaggcgaagaggatgtcgatacacggggagacgtaaaatacaccgattggctaaacggtgttatggaacccgtcgatgatacatttgacagtaccgatat

SEQ ID NO: 142421 - DNA, 428 bp, Arabidopsis thaliana
cacgctcctcctccttctgcgcaacaacagtacggttaccaacaaccttacgggattgctggagctgctccaccaccaccacagatgtggaatcctcaagcggcggcgccgccatcagttcagcctacgaccgctgacgagatccggactctttggatcggggacttacagtattggatggatgagaatttcctctacggttgctttgctcataccggagagatggtttctgctaaagtgattcgtaacaagcaaaccggtcaagttgaaggatacggtttcattgaattcgcatctcatgctgctgctgaaagagttctacaaacattcaacaacgctcctatcccgagctttcctgatcagctctttagactgaactgggcatcattgagttcaggagataaacgagacgattcaccggactacac

SEQ ID NO: 142422 - DNA, 430 bp, Arabidopsis thaliana
ggaagaaaaatgggtcgagtctcatctattatctctttctctttgacactcttgatcctcttcaatggctacactgcccaacagtggcccaacgagtgccagctcgatcaactcaatgcgctcgaaccatcccaaatcatcaagagcgagggtggtcgcatcgaggtctgggaccaccatgcaccccagctccgttgctccggctttgcctttgagcgtttcgtcattgagcctcagggtcttttcttgcccactttcttgaacgccggcaaactcacgtttgttgttcacggaaggggtctaatgggaagagttattccgggatgcgccgagacgttcatggagtcaccggtatttggagaaggtcaaggtcagggtcagagtcaagggttccgtgacatgcaccagaaagtagagcacctacggtgcg

SEQ ID NO: 142423 - DNA, 421 bp, Arabidopsis thaliana
aacaaaaagaaaatggttaagctcagcaatctcctcgttgcaaccttcggggttctcctcgtccttaacggctgccttgcgaggcagtcacttggggttcctcctcagctacagaacgagtgtaacctcgacaacctagatgttctccaagccaccgaaactatcaagagtgaagccggtcagatcgagtactgggaccacaaccaccctcagctccgatgtgttggtgtttccgttgctcgttatgtaattgaacaaggcggtctttacttgcccaccttcttcacttccccaaaaatttcctacgtcgttcaaggaacgggtatcagctgaagagtggtccctggatgtgccgagaccttcatggactcgcagccgatgcatggacaacaacaaggccaaccatggcaaggacgacagg

SEQ ID NO: 142424 - DNA, 427 bp, Arabidopsis thaliana
cacagagaaaacttcgtctctcttctctgcttcgccctctcatttcctgtgagataaaggcggagtctctctccagttattttgctcatccatcgattcttagagttcaaaatggttgatcaagttcagcaccccactattgcgcagaaagctgccgggcagttcatgcgttcaagtgtttccaaggacgttcaagtgggttaccagaggccttctatgtatcaaagacatgcaacctacggaaactactccaatgctgcatttcaatttcctccgacatcccggatgttggcaacaactgcttctcccgtgtttgtccaaaccccaggagagaaggggttcactaactttgcccttgactttctgatgggtggtgtttctgctgccgtctccaagactgctgctgctcctattgaacgtgttaagc

SEQ ID NO: 142425 - DNA, 430 bp, Arabidopsis thaliana
caaaaagaaaatggttaagctcagcaatctcctcgttgcaaccttcggggttctcctcgtccttaacggctgccttgcgaggcagtcacttggggttcctcctcagctacagaacgagtgtaacctcgacaacctagatgttctccaagccaccgaaactatcaagagtgaagccggtcagatcgagtactgggaccacaaccaccctcagctccgatgtgttggtgtttccgttgctcgttatgtaattgaacaaggcggtctttacttgcccaccttcttcacttccccaaaaatttcctacgtcgttcaaggaacgggtatcagcggaagagtggtccctggatgtgccgagaccttcatggactcgcagccgatgcaaggacaacaacaaggccaaccatggctaggacgacagggacaacaaggg

SEQ ID NO: 142426 - DNA, 414 bp, Arabidopsis thaliana
cttagcctttactctatagttttatatcatatcaatcgacatggcgaatgtggaccgtgatcggcgtgtgcatgtagaccgtactgacaaacgtgttcatcagccaaactacgaagatgatgtcggttttggtggctatggcggttatggtgctggttctgattataagagtcgcggcccctccactaaccaaatcttggcacttatagcaggagttcccattggtggcacactgctaaccctagctggactcactctagccggttcggtgatcggcttgctagtctccatacccctcttcctcctcttcagtccggtgatagtcccggcggctctcactattgggcttgctgtgacgggaatcttggcttctggtttgtttgggttgacgggtctgagctcggtctcgtgggt

SEQ ID NO: 142427 - DNA, 432 bp, Arabidopsis thaliana
  unsure (1)..(432): unsure at all n locations
ctcttctcttctttctttctccttaacactttggatccttttccatggctacgccggctcaacagggtcagcagggtcagcagtttccgaacgagtgccagctcgaccagctcaatgcgctcgagccttcacacgtactgaagagcgaggctggtcgcatcgaggtgtgggaccaccacgctcctcagctccgttgctcaggtgtctcctttgcacgttacatcatcgagtctaagggtctctacttgccctctntctttaacaccgcgaagctctccttcgtggctaaaggacgaggtcttatgggaaaagtgatccctggatgcgccgaaacattccaagactcatcagagttccaaccacgcttcgaaggtcaaggtcaaagccagaggttccgtgacatgcaccagaaagtggagcacattaggagcg

SEQ ID NO: 142428 - DNA, 366 bp, Arabidopsis thaliana
ctcttctcttatttctttctccttaatacttttgatccttttccatggctacgcgggtgagcagggtcagcagggtcagcatattcccaacgagtgccatctcgaccagctcaatgcgctcgagccttcacacgtactgaagagcgaggctggtcgcatcgaggtgtggtaccaccacgctcctcagctccgatgctcaggtgtctcctttgcacgttacatcatcgagtctactggtttttacttgccctctctctttaacaccgtcaagcttttcttcgttgctataggaccaggccttatggcaaaagtgatccctgaatgcgccgatacatttcatgattgatcattagtgtcaaccacgct

SEQ ID NO: 142429 - DNA, 366 bp, Arabidopsis thaliana
caaaaagaaaatggataagctcagcaatctcctcgttgcaaccttcggggctctcctcgtacttaacggctggcttgcgaggcattcacttggggtttcttctaagctacagaacgagtgtaacctggacaacctagatgatctccaagccaccgaaactatcaagagtgaagccggtcagatcgagttctgtgaccacaaccaccctcagctgcgatgcgtgaggtgattccgctgctcgatatgtaatagaacaaggcggactttacttgcccaccttcttcacttgcccaaaaatttcctacgtggctcaaggaacgggtatcagcggaagagtgcaccctggatgtgccgagaccttcattg

SEQ ID NO: 142430 - DNA, 346 bp, Arabidopsis thaliana
cataagcaatcatgcaactgatgaatgatgatagagcagaggaaatgagatgatgtagcaattatttgtgtttagaagaagagaactgaccaatggtggggatggtggtgacaatctcaccaagcttgagcttgtacaaaatggtggtcttaccagcagcatcaagacccaccataaggatgcgcatctccttcttggcgaaaagcctgctgaaaagctttgcaaatgaaagccccatttttgtgatattgcagagaagacatttcactcaagatttagcatgaaaactattcgcaacaaaatacaaatagatctaaatgaaccaaaatatgagcatgcccaaatg

SEQ ID NO: 142431 - DNA, 298 bp, Arabidopsis thaliana
aacaaaaagaacaagattaagctcactaataatctcgccgcaaccttcggggggctgcttgaccttaacggctgcctcgccaggcacacacttgaggatactactcaactacagaacaagtgtaacccagacaccctagatgttgttcacgccaccgaaactattaagagtgaagccgggtagatcgcagactgtgaccacaaccaccctgagcttggatgtgcaggagctttcgttgctcgtcatttaattgatcatggcggtctttacttgcccacctttttgagtgccgcaaaaa

SEQ ID NO: 142432 - DNA, 433 bp, Arabidopsis thaliana
aagaaaacatacacaaatagcaaaacatggctaacaagctcttcctcgtctgcgcaactctcgccctctgcttcctcctcaccaacgcttccatctaccgcaccgttgtcgaattcgaagaagatgacgccagcaaccccgtaggtccaagacagagatgccagaaggagtttcagcaatcacaacacctaagagcttgccagagatggatgagcaagcaaatgaggcaaggacgtggtggtggtccttccctcgacgatgagttcgatttcgagggcccccagcagggataccagctactccagcagtgctgcaacgagcttcgccaggaagagccagtttgcgtttgccccaccttgaaacaagctgccagggcagttagccttcagggacagcacggaccattccaatccaggaaaaattaccagtcagc

SEQ ID NO: 142433 - DNA, 421 bp, Arabidopsis thaliana
cccaaatatgcataagcttttgttttctcttctctccgacgtctcactctcatttctcctcttcttccatggcgccgaggcacgccagcgagaggcgccgtttccaaacgcctgccatttcagccaaatcaacagcctcgcgcccgctcaggcgacgaagttcgaagccggtcagatggaagtatgggaccacatgagccctgagctccgatgcgccggtgtaacggtggctcgcatcacccttcagcccaattccattttcttgcccgctttctttagcccacctgcccttgcttacgttgtccaaggagaaggagttatggggacgattgcttctggttgtcctgagacttttgcagaagttgaaggatcatcaggaagaggaggaggaggagacccggttcgacgttttgaggacatg

SEQ ID NO: 142434 - DNA, 426 bp, Arabidopsis thaliana
ataagaaataacaaaatggctcgagtctcttctcttctttctttcttcttaacacttttgatccttttccatggctacgcggctcaacagggtcagcagggtcagcagtttccgaacgagtgccagctcgaccagctcaatgcgctcgagccgtcacacgtactgaagagcgaggctggtcgcatcgaggtgtgggaccaccacgctcctcagctccgttgctcaggtgtctcctttgcacgttacatcatcgagtctaagggtctctacttgccctctttctttaacaccgcgaagctctctttcgtggctaaaggacgaggtcttatgggaaaagtgatccctggatgcgccgaaacattccaagactcatcagagttccaaccacgcttcgaaggtcaaggtcaaagccagaggttccgtgac

SEQ ID NO: 142435 - DNA, 280 bp, Arabidopsis thaliana
cacacttgagaccactttgacccgcgctgccggtaggcaacaacaacagttgatcgaggagattgtcgaggcttaaatcaaaacgtttttctttttcttaataaagtatggtcagtttgtaatcacgtccctttacctttaacgtacgtgtaaaatatgtgtctgcggcacctcacttgtaataacactttcttctcataaataaaagggaagtttcgagtttaaaaagaaatcctttgacgttacaatcaatagagtaataagggtctctacttgccct

SEQ ID NO: 142436 - DNA, 437 bp, Arabidopsis thaliana
acatcacaaacgagtaagagtacaattccaaatggcacaaaaagtggcaaacaggcttttcctcgtttgcgcaactttcgccctctgcttactacttaccaacgcttccatataccgcactggtgtggagttcgacgaagatgacgccagcaaccccatgggcccaagacagaaatgtcagaaggagtttcagcaatcacagcacctaagagcttgccagaaattgatgcgcatgcaaatgaggcaaggccgtggtggtggaccctccctcgacgatgagttcgatttggaagacgacatcgagaacccacaaggcccccagcagggacaccagatcctccagcagtgctgcagcgagcttcgccaggaagagccagtttgtgtttgccccaccttgagacaagctgccagggccgttagcctccagggacaacacg

SEQ ID NO: 142437 - DNA, 354 bp, Arabidopsis thaliana
aacaatttatcattagcttacaatggcggatacacaccgtgtcgaccgtactgatagacactttcaatttcagtcggcctatgaaggcggccgaggtcaaggtcagtatgaaggtgaccgtggttacggtggtggcggttacaagagcatgatgcctgaaagtggcccatctagtacccaagtattgtccctgttgatcggagtccctgtcgatcggttcgctacttgccttggctggattactactagctggttcggagatcggcttaatgggtggtttaccactaggtctgctgttcagaccggttatagtcccagaggctttaactatcgggcttgcgatgacaggctttt

SEQ ID NO: 142438 - DNA, 421 bp, Arabidopsis thaliana
caaaaagaaaatggttaagctcagcaatctcctcgttgcaaccttcggggttctcctcgtccttaacggctgccttgcgaggcagtcacttggggttcctcctcagctacagaacgagtgtaacctcgacaacctagatgttctccaagccaccgaaactatcaagagtgaagccggtcagatcgagtactgggaccacaaccaccctcagctccgatgtgttggtgtttccgttgctcgttatgtaattgaacaaggcggtctttacttgcccaccttcttcacttccccaaaaatttcctacgtcgttcaaggaacgggtatcagcggaagagtggtccctggatgtgccgagaccttcatggactcgcagccgatgcaaggacaacaacaaggccaaccatggcaaggacgacaggga

SEQ ID NO: 142439 - DNA, 416 bp, Arabidopsis thaliana
ataagaaataacaaaatggctcgagtctcttctcttctttctttcttcttaacacttttgatccttttccatggctacgcggctcaacagggtcagcagggtcagcagtttccgaacgagtgccagctcgaccagctcaatgcgctcgagccgtcacacgtactgaagagcgaggctggtcgcatcgaggtgtgggaccaccacgctcctcagctccgttgctcaggtgtctcctttgcacgttacatcatcgagtctaagggtctctacttgccctctttctttaacaccgcgaagctctctttcgtggctaagggacgaggtcttatgggaaaagtgatccctggatgcgccgaaacattccaagactcatcagaggtccaaccacgcttcgaaggtcaaggtcaaagccagag

SEQ ID NO: 142440 - DNA, 420 bp, Arabidopsis thaliana
aaagaagtgatcaagattctctaacctaagaatctctccacgtggtttgattggttgtgtcatagtagaaatatcagcaacggaagcaatgagaagcagaagacaacaatgttgtttagttgggccacagaagctaaagatcttgagaactgaactgaacctgagtagcttccacctgagttgcttccagccgttgaatccatgcttggagttcttgtctgtacagtaacatttttgcatgaaccataagctgctcctggctgcaacatcaagaaccaaaatacgggtgccggttttagataatttaggcttgtaagatcttatttcatacccataagtaactttggcgcgagttaataagttaatacctggcaagcagaaagagtttcacaaccgcaaagtaccggtccattcattcta

SEQ ID NO: 142441 - DNA, 422 bp, Arabidopsis thaliana
gtgcttcctaaatacaacatgaacgctaacgagatcttgtactgcactggaggacaaggaaggatccaagtggtcaacgacaacggacagaacgtgttggaccaacaggtgcagaagggacagctcgtggtcatcccacaagggttcgcatacgttgtccagtcccacggaaacaagttcgagtggatctctttcaaaactaatgaaaacgcaatgatcagcactttggcgggtagaacctcgctcttgagggcattgccattggaggtcatatcaaatggtttccagatctctcccgaggaagctaggaagatcaagttcaacacacttgagaccactttgacccgcgctgccggtaggcaacaacaacagttgatcgaggagattgtcgaggcttaaatcaaaacgtttttctttttctt

SEQ ID NO: 142442 - DNA, 416 bp, Arabidopsis thaliana
aaataccctaatcacattttgtaacaataatacaattatacattaaaactctccgacgatgcctcaggcaccgatgccagagttctctagctcggtgaagctcaagtacgtgaaacttggttaccaatatttggttaaccatttcttgagttttcttttgatcccgatcatggctattgtcgccgttgagcttcttcggatgggtcctgaagagatccttaatgtttggaattcactccagtttgacctagttcaggttctatgttcttccttctttgtcatcttcatctccactgtttacttcatgtccaagccacgcaccatctacctcgttgactattcttgttacaagccacctgtcacgtgtcgtgtccccttcgcaactttcatggaacactctcgtttgatcctcaagg

SEQ ID NO: 142443 - DNA, 431 bp, Arabidopsis thaliana
gtcagtggcaacgacttcagccgtcgtagccgccgcctctgcgattcccatcgcgatcgccttctcttcttcttcttcttcttcctctaccaaccccaaatctcaatctctcaatttctccttcctctcccgatcgtctccacgtctcttgggactttcacgaagcttcgttagctctccgatggcgactgctctcacttctgatcgtaatctccatcaggaggatcgagccatgcctcagcttcttactgagtttatggtggatatgacatgtgagggttgtgttaatgctgtgaagaacaaattagaaaccattgaaggtattgagaaagtggaggtggatttgtccaatcaagttgtgaggatacttggatcttcccctgttaaggctatgactcaagctttggagcaaactggtcgaaaagctcgct

SEQ ID NO: 142444 - DNA, 428 bp, Arabidopsis thaliana
agatattttcgcagttccacggttacatccaatggctcaaatgtctttcaacaatgactcgctagtattcgttgggtttactacttcagctaagaataacaagccgcagttcttagccggggaggactcggctttgcggatgcttgaccggcaagtattggctgcgtcgcttaatgtgagtagtgtgacgattgatggattgttgggagctcagaaggaagctgttatcttggaatgtcattcttgtgcggaaggagagatagagaagcttaaggtggagatagagaggaagaaaacagatgatgagaggaagaggagacatgatgaaaggaagaaagaagaagaagaggcgaaaagagaagaggaagagaggaggaaacgtgaagaagaagaagagaagaagcggtggccacctcaacaaccaccac

SEQ ID NO: 142445 - DNA, 423 bp, Arabidopsis thaliana
ggaagaaaaatgggtcgagtctcatctattatctctttctctttgacactcttgatcctcttcaatggctacactgcccaacagtggcccaacgagtgccagctcgatcaactcaatgcgctcgaaccatcccaaatcatcaagagcgagggtggtcgcatcgaggtctgggaccaccatgcaccccagctccgttgctccggctttgcctttgagcgtttcgtcattgagcctcagggtcttttcttgcccactttcttgaacgccggcaaactcacgtttgttgttcacggaaggggtctaatgggaagagttattccgggatgcgccgagacgttcatggagtcaccggtatttggagaaggtcaaggtcagggtcagagtcaagggttccgtgacatgcaccagaaagtagagcaccta

SEQ ID NO: 142446 - DNA, 436 bp, Arabidopsis thaliana
taaagaggaagaaaaatgggtcgagtctcatctattatctctttctctttgacactcttgatcctcttcaatggctacactgcccaacagtggcccaacgagtgccagctcgatcaactcaatgcgctcgaaccatcccaaatcatcaagagcgagggtggtcgcatcgaggtctgggaccaccatgcaccccagctccgttgctccggctttgcctttgagcgtttcgtcattgagcctcagggtcttttcttgcccactttcttgaacgccggcaaactcacgtttgttgttcacggaaggggtctaatgggaagagttattccgggatgcgccgagacgttcatggagtcaccggtatttggagaaggtcaaggtcagggtcagagtcaagggttccgtgacatgcaccagaaagtagagcacctacggtgcg

SEQ ID NO: 142447 - DNA, 261 bp, Arabidopsis thaliana
ggaaacaataacatgtccaacaggaagctctgcaggctctggacattgcattgcgagagctgtcgatctttaggtatattctggcggtacgaaccttaaatttcaatgatataggaaaaaaacaatcattggagcatggctaggagagttggcactgatactaccaaagcataggtcttacacagatagtgttatcacttaagatcgatatgtcaatgacagggatcataggacaggccacactgtgatactgagtgtatg

SEQ ID NO: 142448 - DNA, 431 bp, Arabidopsis thaliana
ctcttcaatggctacaaggccttaagcaacagaagcaaaacaacatcttcaatggcttcgcacctgagatcttggctcaagccttcaagatcaatgtcgagacggctcagcagctccagaaccagcaagataaccgtggcaacatcgtcaaggtcaacggacctttcggcgtcattaggccacccttgagacgcggcgaaggcggccaacaaccacatgaaatagctaatggtttagaggagactttgtgcaccatgcgatgcactgaaaacctcgatgacccgtcggatgctgacgtgtacaagccatcactcggatacattagcacacttaacagctacaatctttctatcctcagacttctccgccttagcgctcttcgtggctccatccgtaaaaacgctatggtgctaccgcaatggaacgtaaac

SEQ ID NO: 142449 - DNA, 433 bp, Arabidopsis thaliana
gtcttgtctagctacttttgctctcgcagtgttagtaacacaaggaagcatttttagtttgtgtttggcctcctctgcttctacaaactctgttcctaattggtttcatcattggccgccgtttaaatggggaccaaaatttccatattctccacctaaaccgccgccaatcgagaaatatcctccaccggtgcagtatccaccaccgatcaagaagtatccaccgccaccatacgagcatccaccggtgaagtatccaccaccgatcaagacttaccctcatccgccggtgaagtatcctccaccagaacagtatccaccgccgattaagaagtatcctccaccagaacagtatccaccgccgattaagaagtatcctccaccagaacagtattcaccgcctttcaagaagtatcctccgccagaacagtat

SEQ ID NO: 142450 - DNA, 433 bp, Arabidopsis thaliana
aactccctagtttatattttttttttttcccctttaacttttcattttatcaaaaaatgtttttaaaaagagtagaggactcataaagcttcgtacttgttttatttatataattaataactcgtatcaatgtcaataactatcatccatcccttttttcttcctagttcaaaaaacttttaatattgtttgtataaatatctagttatctactattagaccattaatacaagaaaacaaaacttttaaactgtaaatagtggcttgattttgaatgacgagacttgtatgtatacgagtggggtctagaatattagtcgctgtctagtacatggtttaatggttcggttggtgcaagtaattaattatgagaatctttgcttattttttaaaactaataattccacaagtaaatagtttaatacgtcaatta

SEQ ID NO: 142451 - DNA, 293 bp, Arabidopsis thaliana
aaaagtaagaagataaaaatggctcgagtctcttctcttctttctttctccttaacacttttgatccttttccatggctacgcggctcaacagggtcagcagggtcagcagtttccgaacgagtgccagctcgaccagctcaatgcgctcgagccttcacacgtactgaagagcgaggctggtcgcatcgaggtgtgggaccaccacgctcctcagctccgttgctcaagtgtctcctttgcacgttacatcatcgagtctaaaggtctctacttgccctctttctttaacac

SEQ ID NO: 142452 - DNA, 440 bp, Arabidopsis thaliana
  unsure (1)..(440): unsure at all n locations
cagaaagtagagcacctacggtgcggtgacaccattgcaacaccatctggtgtagctcaatggttctacaacaatggaaatgagcctctcattcttgttgcagccgcggatctcgccagcaaccagaaccagcttgaccgcaaccttagaccatttttgatagccggaaacaacccacaagggcaggaatggctacaaggccgaaagcaacagaagcaaaacaacatcttcaatggcttcgcacctgagatcttggctcaagccttcaagatcaatgtcgagacggctcagcagctccagaaccagcaagataaccgtggcaacatcgtcaaggtcaacggacctttcggcgtcattaggccacccttgagacgcggcgaaggcggccaacaaccacatgaaatagctaatggtttagaggagactntgtgcaccatgcg

SEQ ID NO: 142453 - DNA, 437 bp, Arabidopsis thaliana
  unsure (1)..(437): unsure at all n locations
atggatttggacccgaggttattgctcaagctttgaagattgatcttcagacagcgcagcaacttcagaaccaagatgacaaccgtggaaacattgtccgagtccaaggcccgttcggtgtcattaggccgcctttgaggggccagagacctcaggaggaggaagaagaagaagaaggacgacacggacgacacggtaatggcttagaggagaccatctgcagcgccaggtgcaccgataacctcgatgatccgtctcgtgctgacgtgtacaagccacagctcggttacatcagcactctcaacagttacgatctccccatccttcgcttcatccgtctctcagccctccgtggatctatccgtcaaaacgcaatggtgcttccacagtggaacgcanacgcgaacgccattctttacgtgacagacggggaagcc

SEQ ID NO: 142454 - DNA, 430 bp, Arabidopsis thaliana
tgctgactaattttacgcttccggatgtttaatcgtcgaatttgaaggtaggtaggtgtctttgaaacaaggacgaatgattcactgcacatgtgattccttgagagagccagatcgaactttcaactttctacagaagcggctgtgatatctcttcttaagtcctcccctcttcttcttcttcttcttctaagaggtgggggtagaagatgactacagaagatgatgatcagatgctaggaccaagcggcacccaggaaaagatctatgtttctgttcgtatgcgacctttaaacgacaaggaaaagtttaggaatgatgtccctgactgggagtgcatcaacaatactaccatcatttacaggagtcatctttctatctccgagcgttccatgtatccttctgcttacacatttgacagagtggttag

SEQ ID NO: 142455 - DNA, 399 bp, Arabidopsis thaliana
aagatttctaaattctcttactgtatcccaacccggtcaaaccgtcccggtttagcctcaaccggctcgttttacctcggagataacccgaattctcgtggtttcaaatacgtttctcttttgacttttcctcaaagtcaacgcatgccgaatctagaccctttagcttacactgtaccattacaaggtatcagaatcggacaaaagagactcaacatacccggttctgtttttagacccgatgcaggtgggtcgggtcaaaccatggttgattcgggttctgaatttactcacttagtcgacgtggcatatgataaagtcaaagaagaaatagtgaggcttgtgggatcaagattaaagaaaggttacgtgtaccgttcgacagctgacatgtgtttt

SEQ ID NO: 142456 - DNA, 400 bp, Arabidopsis thaliana
gttagtgctaggctagatgctcagcagaagaagctcaatctcccaatcctaccaaccacaaccatcggatccttcccacagactgtagagctcaggagagttcgtcgtgagtacaaggccaaaaaggtctctgaggaggactacgttaaggccatcaaggaagagatcaagaaagttgttgacctccaagaggaacttgacatcgatgttcttgtccacggagagccagagagaaacgacatggttgagtacttcggtgagcagttgtctggttttgccttcactgcaaacggatgggtccaatcttatggatctcgctgtgtgaagccaccagttatctatggtgatgtgagccgtcccaaggcaatgaccgtcttttggtccgaatggctcagagcat

SEQ ID NO: 142457 - DNA, 423 bp, Arabidopsis thaliana
  unsure (1)..(423): unsure at all n locations
gaaacccaaaccctcattccaaaaaatggggtctcgctctcaaaacctctcctttatcgtcctcctcctccttggcttcgttgccgtctcctatgcttgcgactgtacccctcctaaaccatcaccagcacctcacaaaccaccaaaacatccagtcaaaccgcctaaacctcctgccgtcaaaccacctaaaccaccggcagtaaaaccacctactccaaaacctcccaccgtgaaaccccatcctaaaccaccaaccgtcaaaccacatcctaaaccaccaaccgtcaaaccccaccctaagccacccaccgtcaaaccaccccaccctaaaccacccaccaaaactcacccccacccaaaacctcccatcgtaaagccaccaaccaagcctnctccgtccacccctaaacctcccaccaa

SEQ ID NO: 142458 - DNA, 428 bp, Arabidopsis thaliana
ggaacaggaaagatcccaaacagggggattcttgaaattgtgaaggagagttttgatttcaggccaggtatgatctccattaacttggatctgaagagaggaggtaatggtaggttcttgaagactgctgcctatggtcactttggaagggacgatgctgatttcacctgggaggtagtcaagccactcaagtctaacaaggtccaagcttgaaacctgtcagcctctgtttcacttctgtccagaatcagtcttgttctctgtattttaggctctttctgcctctttagtttcaactctgagatgggtttattcattttgttttcaactttgaagaaaaaagctaagcagctgggaatttatataattatttatatggtattggtgtgctaagaaagttaaattcataatatgtatttcttacttat

SEQ ID NO: 142459 - DNA, 425 bp, Arabidopsis thaliana
cctatggatagtacagagaatggggtctgtcatctttatcaagatggttttacttcgtcggatattcattcgagtatctggagcacgaaatagatcaaatagatcacaaagtattcgaactatgattcataacttaaatactcaaacctcgtagccggacttctttccgttctatcttataaactttaataaatcaaaaaaattttctgcttttaaactcttatttggatcaaaggacaaacgcttctttgtattttatgtttttagtcattatagctttttttttattgaataagtgatgatccaatggttctcactcagtgaactttggactttgaaggtttcattaaattatcgtggttctcgtatgaatctgaggtttcaattgattagttaagtagggtcttaacaagagaattcctatc

SEQ ID NO: 142460 - DNA, 429 bp, Arabidopsis thaliana
cactctctctctcctttggattcttcagtgaggagaggaaatgtcggatcttcagacaccgcttgtgaggcccaagaggaagaagacttgggttgattactttgtcaagttcagatggatcattgtcatcttcatcgtccttccattctcagccacattctacttcctcatctacctcggggacatgtggtcagagtccaagtcctttgagaaacgtcagaaggaacacgacgagaatgtcaagaaagtcatcaaaaggcttaagggtagggatgctttcaaggacgggcttgtctgcactgctcgtaagccctggatcgctgttggaatgaggaacgttgactacaagagagcccggcattttcaggttgacttgggggagtttcgtaacattcttgagatcaacaaggagaagatgactgctagagt

SEQ ID NO: 142461 - DNA, 407 bp, Arabidopsis thaliana
aaacaaaaagaaaatggttaagctcagcaatctcctcgttgcaaccttcggggttctcctcgtccttaacggctgccttgcgaggcagtcacttggggttcctcctcagctacagaacgagtgtaacctcgacaacctagatgttctccaagccaccgaaactatcaagagtgaagccggtcagatcgagtactgggaccacaaccaccctcagctccgatgtgttggtgtttccgttgctcgttatgtaattgaacaaggcggtctttacttgcccaccttcttcacttccccaaaaatttcctacgtcgttcaaggaacgggtatcagcggaagagtggtccctggatgtgctgagaccttcatggactcgcagccgatgcaaggacaacaacaaggccaaccat

SEQ ID NO: 142462 - DNA, 283 bp, Arabidopsis thaliana
aaacaaaaagaaaatggttaaactcagtatttttctcgttgcaaccttcgttgtggtggcggggccttaacggctggcttgcaagtcaaacacttgttgttcctcctcagctacagaacgagtgtaacctcgacaacctatatgttctccaagccaccgaaactatcaatagtgaagccggtcatatcttgtactgtgaccacaaccaccctcagctcctatgtgttggtgtttccgatgcttcgtatgtaatttgaacaaggctgtctttacatgcccacct

SEQ ID NO: 142463 - DNA, 443 bp, Arabidopsis thaliana
ggacagcagggacaacaagggttccgtgacatgcaccagaaggtggaacatgtgagacgcggagacgtctttgccaacactccaggctctgcccactggatctacaactcaggagaacagccacttgtcatcatcgctcttctcgacatcgccaactaccaaaaccaactcgaccgcaaccctagagtgttccatttggccggaaacaaccagcagggaggctttggcggttcacagcaacaacaagaacagaaaaacttgtggagcgggttcgacgcacaggtcatagctcaagcattgaaaattgacgttcagttggctcagcagcttcagaaccaacaagacagcagaggaaacatcgttcgtgttaagggacctttccaggtcgtgaggccacctctaagacagccctacgagagcgaggagtggagacacccacgtag

SEQ ID NO: 142464 - DNA, 436 bp, Arabidopsis thaliana
  unsure (1)..(436): unsure at all n locations
gagaaaacagatattcctttaccaatgtacatttgaagacgtagaaaattgtagcccctctcagcatctaatggcattagggtagtaagaaatctaaactaaactgcattaggtttcttcttttgactaacattttacctccgtaagaatcctagattaattgtaactcctaatcctagtaatcaggagaagaaaattcacaaaagtcaaaaaacaaatctgactaagttgttaatgtctaaggtcgagctaatcaaagcattgacctctgtttttgtctattgaaaaggttagagggacaaacaaaacaaaaaaaaaaaaaagggcgtnagatccataattacagtataggaaacattcttcgtgttaagggacctttccaggttgtgaggctccctttaagacagccctactagagcgaggagttgtgacaccc

SEQ ID NO: 142465 - DNA, 370 bp, Arabidopsis thaliana
taagaagataaaaatggctcgagtctcttctcttctttctttctccttaacactttggatccttttccatggctacgcggctcaacagggtcagcagggtcagcagtttccgaacgagtgccagctcgaccagctcaatgcgctcgagccttcacacgtactgaagagcgaggctggtcgcatcgaggtgtgggaccaccacgctcctcagctccgttgctcaggtgtctcctttgcacgttacatcatcgagtctaagggtctctacttgccctctttctttaacaccgcgaagctctccttcgtggctaaaggacgaggtcttatgggaaaagtgatccctggatgcgccgaaacattccaagactta

SEQ ID NO: 142466 - DNA, 429 bp, Arabidopsis thaliana
gggacctttccaggtcgtgaggccacctctaagacagccctacgagagcgaggagtggagacacccacgtagcccacagggcaacggccttgaggagactatctgcagcatgaggtcccacgagaacattgacgaccctgctcgtgctgacgtgtacaagcccagcctaggtcgcgtgaccagcgtcaacagctataccttgcccatcttggagtatgtcaggctcagtgccactcgtggcgttctccagggtaatgcgatggtgcttcctaaatacaacatgaacgctaacgagatcttgtactgcactggaggacaaggaaggatccaagtggtcaacgacaacggacagaacgtgttggaccaacaggtgcagaagggacagctcgtggtcatcccacaagggttcgcatacgttgtccagtccca

SEQ ID NO: 142467 - DNA, 429 bp, Arabidopsis thaliana
aacaaaaagaaaatggttaagctcagcaatctcctcgttgcaaccttcggggttctcctcgtccttaacggctgccttgcgaggcagtcacttggggttcctcctcagctacagaacgagtgtaacctcgacaacctagatgttctccaagccaccgaaactatcaagagtgaagccggtcagatcgagtactgggaccacaaccaccctcagctccgatgtgttggtgtttccgttgctcgttatgtaattgaacaaggcggtctttacttgcccaccttcttcacttccccaaaaatttcctacgtcgttcaaggaacgggtatcagcggaagagtggtccctggatgtgccgagaccttcatggactcgcagccgatgcaaggacaacaacaaggccaaccatggcaaggacgacagggacaacat

SEQ ID NO: 142468 - DNA, 424 bp, Arabidopsis thaliana
agaaaatggttaagctcagcaatctcctcgttgcaaccttcggggttctcctcgtccttaacggctgccttgcgaggcagtcacttggggttcctcctcagctacagaacgagtgtaacctcgacaacctagatgttctccaagccaccgaaactatcaagagtgaagccggtcagatcgagtactgggaccacaaccaccctcagctccgatgtgttggtgtttccgttgctcgttatgtaattgaacaaggcggtctttacttgcccaccttcttcacttccccaaaaatttcctacgtcgttcaaggaacgggtatcagcggaagagtggtccctggatgtgccgagaccttcatggactcgcagccgatgcaaggacaacaacaaggccaaccatggcaaggacgacagggacaacaagg

SEQ ID NO: 142469 - DNA, 441 bp, Arabidopsis thaliana
agaaaacatacacaaatagcaaaacatggctaacaagctcttcctcgtctgcgcaactctcgccctctgcttcctcctcaccaacgcttccatctaccgcaccgttgtcgaattcgaagaagatgacgccagcaaccccgtaggtccaagacagagatgccagaaggagtttcagcaatcacaacacctaagagcttgccagagatggatgagcaagcaaatgaggcaaggacgtggtggtggtccttccctcgacgatgagttcgatttcgagggcccccagcagggataccagctactccagcagtgctgcaacgagcttcgccaggaagagccagtttgcgtttgccccaccttgaaacaagctgccagggcagttagcctccagggacagcacggaccattccaatccaggaaaatttaccagtcagctaagtactt

SEQ ID NO: 142470 - DNA, 421 bp, Arabidopsis thaliana
aagaaaatggttaagctcagcaatctcctcgttgcaaccttcggggttctcctcggccttaacggctgccttgcgaggcagtcacttggggttcctcctcagctacagaacgagtgtaacctcgacaacctagatgttctccaagccaccgaaactatcaagagtgaagccggtcagatcgagtactgggaccacaaccaccctcagctccgatgtgttggtgtttccgttgctcgttatgtaattgaacaaggcggtctttacttgcccaccttcttcacttccccaaaaatttcctacgtcgttcaaggaacgggtatcagcggaagagtggtccctggatgtgccgagacctttatggactcgcagccgatgcaaggacaacaacaaggccaaccatggctaggacgacagggacaac

SEQ ID NO: 142471 - DNA, 340 bp, Arabidopsis thaliana
gtgaagaaaaaagccgttttccgtaatcgtttcttcaattatttttcttgtcttttgattgattcgatttcgtatctgtttcaaagattcgcatcaaaccctaagaaactgaagatgaggccgatcctgatgaagggacatgaacgtccattgacgtttctgaggtacaacagagaaggagatctgcttttcttctgcgccaaggaccacacacccaccctctggtttgccgataacggcgagcgccttggaacttaccgtggtcacaacggtgctgtttggtgctgtgatgtcttccgtaagtttctcaatttctcttcaaatagtatcgagtcgatga

SEQ ID NO: 142472 - DNA, 431 bp, Arabidopsis thaliana
caaggaacgggtatcagcggaagagtggtccctggatgtgccgagaccttcatggactcgcagccgatgcaaggacaacaacaaggccaaccatggcaaggacgacagggacaacaaggccaaccatgggaaggacagggacaacagggacaacaaggaagacaaggccaaccatgggaaggacagggacaacagggacaacaaggacgacagggacaacaaggccaaccatgggaaggacagggacagcagggacaacaagggttccgtgacatgcaccagaaggtggaacatgtgagacgcggagacgtctttgccaacactccaggctctgcccactggatctacaactcaggagaacagccacttgtcatcatcgctcttctcgacatcgccaactaccaaaaccaactcgaccgcaaccctagagt

SEQ ID NO: 142473 - DNA, 416 bp, Arabidopsis thaliana
  unsure (1)..(416): unsure at all n locations
acttaatcctcgtccgggtactctcatcaaccatcctgacggtgacgatgtttacgccggagtccctaaagactatactggtagtagtgttacggctgcaaacttctacgctgtactcctaggcgaccagaaagctgttaaaggtggaagcggtaaggtcatcgctagcaagcccaacgatcacattttcgtatattatgcggatcatggtggtcccggagttcttgggatgccaaatacgcctcacatatatgcagctgattttattgaaacgcttaagaagaagcatgctttcggaacatacaaagagatggttatatacgtagaagcgtgtgaaagtgggagtattttcgaagggataatgccaaaggactngaacatttacgtaacaacggcttcaaatgcacaagagagta

SEQ ID NO: 142474 - DNA, 437 bp, Arabidopsis thaliana
cttattctctctttcttgctactggaatctgcaatgagttctttgctttcgaagttgccgcaacctaaacagaattgaagacagtacgtagtaccatgagtcaaacaatggaggaatatcagtctaatgagagtgaagataaaagaagttggatttggagtaaggcggtaagtgttgggaagaaagttctgacagctggtgttgtagtgtcttcagctccacttcttgttccttcactttttgtcgcctcgacactcgcctttctctcctcggttccgttttgtctcttcttggctaattatgcttgtacacaaaaggtcatgagtactctgcttcctgatactgaagaaactggtggagttggcaaggaggatgatgacgaatctagatttgatgagtacagcaagattggtcacggtgaaggcgccgctggagtt

SEQ ID NO: 142475 - DNA, 429 bp, Arabidopsis thaliana
  unsure (1)..(429): unsure at all n locations
cgggaaaacacctttttctgattcgtttttctccagatctttccttctttcttatatccgatttcttcgggaggaggcgaagagacggtcaacaattttatccaatgtcgcgccgtcttttcgcctgtttcggcctcaagaaatcttcaactaaacctatctccggtggtaacaattccgccgccgtagccgcagaaattcccgccggagatggtcccgttctcgtccagctattctcgtctcagggatgtaaaacatcgcccgcggcggagatgttgatgtcccggctaggtcgaggtgatttcgacgctcagatccgtggcgaagatggtggatctggatctccgacgatggttttggtgtttcatgtggattattgggattacaaggngtggaaagatccgtatggatcgagccaatggacggtga

SEQ ID NO: 142476 - DNA, 318 bp, Arabidopsis thaliana
cacaaagtagaagaagaagaagaagaagatggatgatttggcattatgtgaagcaaacaatgttgctctaacccccatgacgttcttgaagagagcttcagagtgttatccaaatcgaacttcaataatctacggaaaaactcgtttcacttggcctcagacctatgaccgttgttgtcgtctagccgcttctctaatctctcttaacatctccaagaacgatgtggtatcagttatggctccaaacacacccgccttgtatgaaatgcactttgccgttcccatggctggagctgtacttaaccctatcaacactcg

SEQ ID NO: 142477 - DNA, 422 bp, Arabidopsis thaliana
aagaaaatggttaagctcagcaatctcctcgttgcaaccttcggggttctcctcgtccttaacggctgccttgcgaggcagtcacttggggttcctcctcagctacagaacgagtgtaacctcgacaacctagatgttctccaagccaccgaaactatcacgagtgaagccggtcagatcgagtactgggaccacaaccaccctcagctccgatgtgttggtgtttccgttgctcgttatgtaattgaacaaggcggtctttacttgcccaccttcttcacttccccaaaaatgtcctacgacgttcaaggaacggctatcagcggaagagtggaccctggatgtgccgagaccttcatggactcgcagccgatgcatggacaacaacaaggccaaccatggtaaggacgacagggacaaca

SEQ ID NO: 142478 - DNA, 422 bp, Arabidopsis thaliana
aaagaaaatggttaagctcagcaatctcctcgttgcaaccttcggggttctcctcgtccttaacggctgccttgcgaggcagtcacttggggttcctcctcagctacagaacgagtgtaacctcgacaacctagatgttctccaagccaccgaaactatcaagagtgaagccggtcagatcgagtactgggaccacaaccaccctcagctccgatgtgttggtgtttccgttgctcgttatgtaattgaacaaggcggtctttacttgcccaccttcttcacttccccaaaaatttcctacgtcgttcaaggaacgggtatcagcggaagagtggtccctggatgtgccgagaccttcatggactcgcagccgatgcaaggacaacaacaaggccaaccatggcaaggacgacagggacaac

SEQ ID NO: 142479 - DNA, 223 bp, Arabidopsis thaliana
  unsure (1)..(223): unsure at all n locations
gaaaacatacacaaatagcaaaacatggctaacaagctcttcctcgtttttttnnnnnnnnnnnnnncttcctcctcaccaacgcttccatctaccggaccggtgtcgaattcgaagaagatgacgccagcaaccccgtaggtccaagacagagatgccagaaggaggttcagcaatcacaacacctaagagcttgccagagatggatgagccagcaaatgag

SEQ ID NO: 142480 - DNA, 417 bp, Arabidopsis thaliana
  unsure (1)..(417): unsure at all n locations
ggacgacagggacaacaaggccaaccatgggaaggacagttttttnnnnnnnnnnnnnnnnttccgtgacatgcaccagaaggtggaacatgtgagacgcggagacgtctttgccaacactccaggctctgcccactggatctacaactcaggagaacagccacttgtcatcatcgctcttctcgacatcgccaactaccaaaaccaactcgaccgcaaccctagagtgttccatttggccggaaacaaccagcagggaggctttggcggttcacagcaacaacaagaacagaaaaacttgtggagcgggttcgacgcacaggtcatagctcaagcattgcaaattgacgttcagttggctcagcagcttcagaaccaacaagacagcagaggaaacatcgttcgtgttaagggacc

SEQ ID NO: 142481 - DNA, 412 bp, Arabidopsis thaliana
  unsure (1)..(412): unsure at all n locations
caaaaacccatttttttctccttctttaaatcccaaaccaacgnnnnnnnnnnnnnnnnnnaatttgggggcaataaaaaaaaaaacctaatttttctctttagtgatgagattgttgttgatgatgaaatgattggagatctaatgaagaataacaacaatggcgacgttgtggataacgaagtgaacaaccggttaagccggtggcatcacaattcttcccggataattagggtttcacgagcttccggtggtaaagatcgacatagcaaagtcttgacttcgaaaggaccacgtgaccgtcgtgtccggttatcagtctccaccgctcttcaattctatgatcttcaagaccggttaggttatgatcaacctagcaaagctgttgaatggttaatcaaagctgctgaag

SEQ ID NO: 142482 - DNA, 407 bp, Arabidopsis thaliana
  unsure (1)..(407): unsure at all n locations
gtgaacaaaggagcacgaggatgctcatgttttgacaaagacaaaacgacaatagtttttttnnnnnnnnnnnnnnncgcggaatagttcaatagaaatccataagccagaattcaaaggacttcttctacgacggacacttctaggatttgatcgcatagaagaagaagaagaagctgtagctgtagctggctgaggagcagccatgggagaaacagtagaaggtctctcttcctcatgttgtaaaggttccaaaacatttgagattctatcatgagaagatgatgatgatgcaatggcggcatttcttggaatgtcaatgatgatgtgctcatttctgcttagattattctctggtgatctttccatgaatctagaaaaagtatcagcttgatttgtaatacgat

SEQ ID NO: 142483 - DNA, 316 bp, Arabidopsis thaliana
  unsure (1)..(316): unsure at all n locations
gctggctacaacagggcccgctggaacgcctgggacgggcattgttattttnnnnnnnnnnnnnnttgggcttttggagaatgggttttgtagagatgcgtttaggatgtttggggatgctagggtttctcggtctgggatgaattcggttaccgctgctagtggtttgggggggttgtgggggatatttgacgagggatgcaacttgcattgttttggcgattaaaatcaaggttttgagatggaaagtttaacgttggaaacctccttttgtttcaaatgttttccaggatgtggaagagtggggtttttggct

SEQ ID NO: 142484 - DNA, 400 bp, Arabidopsis thaliana
  unsure (1)..(400): unsure at all n locations
agaagaagcaaagatataacccccaaaagtatcaattagttttttcttttnnnnnnnnnnnnnnnttttcgaacatttacaccctcaagaatcgccgccatgtgtggaggagctataatatccgatttcattccaccgccgaggtctcgccgtgttactagcgagtttatttggccggatctgaagaagaatttgaaaggatcgaagaaaagctcgaagaatcgttcgaatttcttcgattttgacgctgagttcgaagctgatttccaaggtttcaaagatgattcgtctatcgattgcgattatgatttcgacgtcggtgatgttttcgccgatgtgaaaccattcgttttcacttcgactccaaaacccgccgtctccgccgctgcggaaggttcag

SEQ ID NO: 142485 - DNA, 387 bp, Arabidopsis thaliana
  unsure (1)..(387): unsure at all n locations
gaaaatggttaagctcagcaatctcctcgttgcaaccttcggggtaaaannnnnnnnnnnnnnntgccttgcgaggcagtcacttggggttcctcctcagctacagaacgagtgtaacctcgacatacctagatgttctccaagccaccgaaactatcaagagtgaagccggtcagatcgagtactgggaccacaaccaccctcagctccgatgtgttggtgtttccgttgctcgttatgtaattgaacaaggcggtctttacttgcccaccttcttcactttcccaaaaatttcctacgtcgttcaaggaacgggtatcagcggaagagtggtccctggatgtgccgagaccttcatggactcgcaagcgatgtcaggacaacaac

SEQ ID NO: 142486 - DNA, 339 bp, Arabidopsis thaliana
  unsure (1)..(339): unsure at all n locations
aacaaacaaaaagaaaatggttaagctcagcaatctcctcgttgcaannnnnnnnnnnnnnnnnntccttaacggctgccttgcgaggcagtcacttggggttcctcctcagctacagaacgagtgtaacctcgacaacctagatgttctccaagccaccgaaactatcaagagtgaagccggtcagatcgagtactgggaccacaaccaccctcagctccgatgtgttggtgtttccgttgctcgttatgtaattgaacaaggcggtctttacttgcccaccttcttcacttccccaaaaatttcctacgtcgttcaaggaacgggtatcagcggaag

SEQ ID NO: 142487 - DNA, 357 bp, Arabidopsis thaliana
  unsure (1)..(357): unsure at all n locations
aacaaaaagaaaatggttaagctcagcaatctcctcgttgcattttttnnnnnnnnnnnnnnncttaacggctgccttgcgaggcagtcacttggggttcctcctcagctacagaacgagtgtaacctcgacaacctagatgttctccaagccaccgaaactatcaagagtgaagccggtcagatcgagtactgggaccacaaccaccctcagctccgatgtgttggtgtttccgttgctcgttatgtaattgaacaaggcggtctttacttgcccaccttcttcacttccccaaaaatttcctacgtcgttcaaggaacgggtatcagcggaagagtggtccttggatgtgccgag

SEQ ID NO: 142488 - DNA, 396 bp, Arabidopsis thaliana
  unsure (1)..(396): unsure at all n locations
gggacaacaaggacgacagggacaacaaggccaaccatgggatttttnnnnnnnnnnnnnnnnacaagggttccgtgacatgcaccagaaggtggaacatgtgagacgcggagacgtctttgccaacactccatgctctgcccactggatctacaactcaggagaacagccacttgtcatcatcgctcttctcgacatcgccaactaccaaaaccaactcgaccgcaaccctagagtgttccatttggccggaaacaaccagcagggaggctttggcggttcacagcaacaacaagaacagaaaaacttgtggagcgggttcgacgcacaggtcatagctcaagcattgaaaattgacgttcagttggctcagcagcttcagaaccaacaagacag

SEQ ID NO: 142489 - DNA, 273 bp, Arabidopsis thaliana
  unsure (1)..(273): unsure at all n locations
gaacgggtatcagcggaagagtggtccctggatttgccgagaccttcatggactcggagnnnnnnnnnntntntnttaaggccacccatggcaaggacaacagggacaacaaggccaaccatgggaaggacagggccaacaggtacaacaaggaagacaaggccaaccatgggaaggacagggacaacagggacaacaaggacaacagggacaacaaggccaaccatgggaaggacagggacagcagggccaacaaggtttttttgacatgca

SEQ ID NO: 142490 - DNA, 407 bp, Arabidopsis thaliana
  unsure (1)..(407): unsure at all n locations
cggacgcgtgggcaaaaagaaaatggttaagctcagcaatctnnnnnnnnntnnnnnnnntgttctcctcgtccttaacggctgccttgcgaggcagtcacttggggttcctcctcagctacagaacgagtgtaacctcgacaacctagatgttctccaagccaccgaaactatcaagagtgaagccggtcagatcgagtactgggaccacaaccaccctcagctccgatgtgttggtgtttccgttgctcgttatgtaattgaacaaggcggtctttacttgcccaccttcttcacttccccaaaaatttcctacgtcgttcaaggaacgggtatcagcggaagagtggtccctggatgtgccgagaccttcatggactcgcagccgatgcaaggacaacaacaag

SEQ ID NO: 142491 - DNA, 418 bp, Arabidopsis thaliana
  unsure (1)..(418): unsure at all n locations
gaaaatggttaagctcagcaatctcctcgttgcaaccttttggggnnnnnnnnnnnnnncggctgccttgcgaggcagtcacttggggttcctcctcagctacagaacgagtgtaacctcgacaacctagatgttctccaagccaccgaaactatcaagagtgaagccggtcagatcgagtactgggaccacaaccaccctcagctccgatgtgttggtgtttccgttgctcgttatgtaattgaacaaggcggtctttacttgcccaccttcttcacttccccaaaaatttcctacgtcgttcaaggaacgggtatcagcggaagagtggtccctggatgtgccgagaccttcatggactcgcagccgatgcatggacaacaacaaggccaaccatggcaaggacgacaggtacaac

SEQ ID NO: 142492 - DNA, 316 bp, Arabidopsis thaliana
  unsure (1)..(316): unsure at all n locations
gaaagaaaaatgggtcgagtctgatttattatttctttctttttnnnnnnnnnnnnnnntttaatggatacactgcccaacaatgacccaacgagtgccaactcgatcaactcaaagcgctcgaaccatcccaaatcatcaatagcgagggtggacgcattgaggactgagaccaccatgcaccccagctgcgatgatccggctttgcctttgagcgtttcatcattgagcctcacggtctacatttgcccactttcttgaacgccgtcaaactcacgtttgatgatcacggaaggggtctaatgggaagaggtat

SEQ ID NO: 142493 - DNA, 425 bp, Arabidopsis thaliana
  unsure (1)..(425): unsure at all n locations
gataccattgccacaacacccggtgtagcacagtggttctacaacgnnnnttnnnnnntntnnttgatcgtcagcgtcttcgatctagccagtcaccagaaccagcttgaccgcaacccaaggccattttacttagccggaaacaacccacaaggtcaagtatggctacaaggccgagagcaacagccacagaagaacattttcaatggatttggacccgaggttattgctcaagctttgaagatcgatcttcagacagcgcagcaacttcagaaccaagatgacaaccgtggaaacattgtccgagtccaaggcccgttcggtgtcattaggccgcctttgaggggccagagacctcatgaggaggaagaagaagaagaaggacgacatggacgacacggtaatggcttagaggagaccatttg

SEQ ID NO: 142494 - DNA, 326 bp, Arabidopsis thaliana
  unsure (1)..(326): unsure at all n locations
gggtcagcagggtcagcagtttccgaacgagtgccagctcgaccgaggggnnnnnnnnnnnnnnctacacgtactgaagagcgaggctggtcgcatcgaggtgtgggaccaccacgctcctcagctccgttgctcaggtgtctcctttgcacgttacatcatcgagtctaagggtctctacttgccctctttctttaacaccgcgaagctctctttcgtggctaagggacgaggtcttatgggaaaagtgacccctggatgcgccgaaacattccaagactcatcagagttccaaccacgcttcgaaggtcaaggtcaaagccaga

SEQ ID NO: 142495 - DNA, 400 bp, Arabidopsis thaliana
  unsure (1)..(400): unsure at all n locations
ctcatcaccagcttcgcatcttcttctccggcttgatcttctctcgnnnnnnnnnnnnnnnnnnttcggaatatcaaatccgatcgattaattctgtcaatcacacaaaaaccgaaaaccaaaaaaaaaccatggcgtttgagaagatcaaggtggcaaatcccatcgtcgagatggatggtgatgaaatgaccagggttatttggaagtctatcaaggataagcttattactccttttgtggagttggatatcaagtacttcgaccttggtcttcctcaccgtgatgctacggatgacaaagttactattgaaagtgctgaagctactaagaagtacaatgtggcgatcaagtgtgccaccatcactccagatgaaggccgtgttacggaatttggctt

SEQ ID NO: 142496 - DNA, 222 bp, Arabidopsis thaliana
  unsure (1)..(222): unsure at all n locations
cccacgcgtccgaacaaaaagaaaatggttaagctcagcaatcnnnnnnnnnnnnnnnnnnnctgttctcctcgtccttaacggctgccttgcgaggcagtcacttggggttcctcctcagctacagaacgagtgtaacctcgacaacctagatgttctccaagccaccgaaactatcaagagtgaagccggtcagatcgagtactgggaccacaaccaccc

SEQ ID NO: 142497 - DNA, 322 bp, Arabidopsis thaliana
  unsure (1)..(322): unsure at all n locations
cggacgcgtgggcggacgcgtgggcggacgcgtggggactcttttnnnnnnnnnnnnnnatttactctagcaagaaagtcaatgcgacggagcttgacaagaatatttcctcatctgctgtagactcagagcagaaagggaagttggatgatgcacctaattcagggacagagaatggcaaaacaatacggaaggtaacaagaatgattccacgtcccaaacaaccgaaaaagaaaattttgcttaagaagaagttaaaaatcggngatgtgtcagcaacttacccaacaaaagacgatgaagaaattgttccttccttgga

SEQ ID NO: 142498 - DNA, 224 bp, Arabidopsis thaliana
  unsure (1)..(224): unsure at all n locations
tcacaaacgagtaagaatacaaatacaaatagcaaaaaaattgttttnnnnnnnnnnnnnnnagtgcgcaactttcgccctctgcttcctcctcaccaacgcttccatctaccgcactgttgtcgagttcgacgaagatgacgccagcaaccccatgggcccaagacagaaatgtcagaaggagtttcagcaatcacagcacctaagagcttgccagaaattga

SEQ ID NO: 142499 - DNA, 328 bp, Arabidopsis thaliana
  unsure (1)..(328): unsure at all n locations
gaaggatccaagtggtcaacgacaacggacagaacgtgttggaccaattttnnnnnnnnnnnnnnnctgtggtcatcccacaagggttcgcatacgttgtccagtcccacggaaacaagttcgagtggatctctttcaaaactaatgaaaacgcaatgatcagcactttggcgggtagaacctcgctcttgagggcattgccattggaggtcatatcaaatggtttccagatctctcccgaggaagctaggaagatcaagttcaacacacttgagaccactttgacccgcgctgccggtaggcaacaacaacagttgatcgaggagat

SEQ ID NO: 142500 - DNA, 411 bp, Arabidopsis thaliana
  unsure (1)..(411): unsure at all n locations
aattgtggtgagcaaatcggaaaatcaacctccggtggagannnnnnnnnnnnnnnnnnatatcggccaaaagaaaccggtggttaagactacaccagcagaaaggaattctatgagagcgttgagagttgcgaaaccgaaacgtaacgagacgttagagaatacgtggaagatgattatggaaggcaacaagtcaacgcttccgttgaccagttattacaagagacccgacacgttcggacttggcgaagagacaaaacaatcaggtgttttgaagaaatcggagacgtttagtgacagaactaactgttaccagtctctgccgccgccaccttcgccgctagtgaaggtgaagaaggtgaaagtgtcacggagtanggatgagctttaaccgaaagtagaagcgtttat

SEQ ID NO: 142501 - DNA, 396 bp, Arabidopsis thaliana
  unsure (1)..(396): unsure at all n locations
ctaaaagctaaagggttttgcttcgaattcaagtgtctccctnnnnnnnnnnnnnnnnnnaagctgctctgtttctgctgtcaattccctaagaaagtcctgatttttagggtgatcgagagaagttgaagaatcatgtttattgagtttccttttttgatccatagggtcatctaattttgctaattttattgtcatctccttcaggtaagggattgttgttgccaatggggtggctaactaaaatccttaaaggttctagccataagttttctgatggacaatgtaatggaagatatagagaagatagaaacttggaaggtcctcgttattctgcggaaggatctgattttgacaaagaggagattgaatgtgctattgcactttctctttctg

SEQ ID NO: 142502 - DNA, 231 bp, Arabidopsis thaliana
  unsure (1)..(231): unsure at all n locations
gtctgttctattctttctttctccttaacactatcgatcctttttttttnnnnntnnnnnnnnnaaggtcagcagggtcagcaggttccgaaccagtgccacgtcgaccagcttcatgcgctcgagcctttacacccactctaaagcaaagctagtgacgtcgaggtgtgggagcaccaccctcctcatgtccgctgcttccgtgtattctttgtacgtttcattatcgag

SEQ ID NO: 142503 - DNA, 255 bp, Arabidopsis thaliana
  unsure (1)..(255): unsure at all n locations
gggtaatgcgatggtgctttctaaatacaacatgaacgctaacgtatnnnnnnnnnntnnnnnntttcaaggaaggatccaagtggtcaacgacaacggacataacgtgttggaccaacaggtgcagaagggacagctcgtggtcatctccacatgggttcgcatacattgtacagtcgctcgggaacaagttcgagtggatctctttcaaaactaatgaaaacgcaatgatcagcactttggcgggtagaacct

SEQ ID NO: 142504 - DNA, 332 bp, Arabidopsis thaliana
  unsure (1)..(332): unsure at all n locations
aactaaattgttaaaactcagcaatctcatagttgcaacttaagtggggnnnnnnnnnnnnncggatggcttgcgaggcagccacttgaggttcctcctcagcttacagaacgagtgtaacctcgtcaacctagatgttctgcaagccaccggaactatcaagagtgaagccggtcagatcgatgtactgtgaccacaaccaccctcagctccgatgtgttggagtctacggtgctcgatatgtaattgaacaaggcggtctttacttgcacacacttttcacttacccaaagatgtactacgtcagtcaaagaacgggaatcaacggaaga

SEQ ID NO: 142505 - DNA, 406 bp, Arabidopsis thaliana
  unsure (1)..(406): unsure at all n locations
caaaaagaaaatggttaagctcagcattctcctcgttgcaactctgttnnnnnnnnnnnnnnnnnnatctgctgccttgcgaggcagtcacttggggttcctcctcagctacagaacgagtgtaacctcgacaacctagatgttctccaagccaccgaaactatcaagagtgaagccggtcagatcgagtactgggaccacaaccaccctcagctccgatgtgttggtgtttccgttgctcgttatgtaattgaacaaggcggtctttacttgcccaccttcttcacttccccaaaaatttcctacgtcgttcaaggaacgggtattagcggaagagtggtccctggatgtgccgagacctttattggactcgcagccgattcatggacaacaacatggcccacca

SEQ ID NO: 142506 - DNA, 181 bp, Arabidopsis thaliana
  unsure (1)..(181): unsure at all n locations
caaccatgggaaggacagggacaacagggacaacaagtatattttnnnnnnnnnnnnnnnatatgggaaggacagggacagcagggacaacaagggttccgtgacatgcaccaaaaggtggaacatgtgagacgcggagacgtctttgccaacactccaggctctgcccactggatctaca

SEQ ID NO: 142507 - DNA, 315 bp, Arabidopsis thaliana
  unsure (1)..(315): unsure at all n locations
aagaggaagaaaaatgggtcgagtctcatctattatctcttttttnnnnnnnnnnnnnnncctcttcaatggctacactgcccaacagtggcccaacgagtgccagctcgatcaactcaatgcgctcgaaccatcccaaatcatcaagagcgagggtggtcgcatcgaggtctgggaccaccatgcaccccagctccgttgctccggctttgactttgagcgtttcgtcattgagcctcagggtcttttcttgcccactttcttgaacgccggcaaactcacgtttgttgttcacggaaggggtctaatgggaag

SEQ ID NO: 142508 - DNA, 403 bp, Arabidopsis thaliana
  unsure (1)..(403): unsure at all n locations
nncgacaaccacaatacttcacaagtgcatttatcggataccctgnnnnnnnnnnnnnnnnnctggagtcatgaactggtttcaagcaacacagcctgctttgttatacattgtcccagccgttattgggttcttggcttctcactgcatttggaacggtgacatcaaaccgttgttggcgtttgatgaatcaaagacagaggaagcaacgactgatgaatcaaagactagtgaggaggttaataaagctcatgatgaatgaggaaaaatcgagaaagaagggcagaggagaaatatatacacataaatgtgtcttaatatatggaacaagaaagaaaacaaatttgtttccaaatgatcatcaatcagtcccttctaaccccttttttggttttttagattt

SEQ ID NO: 142509 - DNA, 207 bp, Arabidopsis thaliana
  unsure (1)..(207): unsure at all n locations
caaaaagaaaatggttaagctcagcaatctcctcgttgcaacctttttttnnnnnnnnnnnnnnnacggctgccttgcgaggcagtcacttggggttcctcctcagctacagaacgagtgtaacctcgacaacctagatgttctccaagccaccgaaactatcaagagtgaagccggtcagatcgagtactgggaccacaaccaccc

SEQ ID NO: 142510 - DNA, 386 bp, Arabidopsis thaliana
  unsure (1)..(386): unsure at all n locations
atggatctgcatcagatcgcttggcctcagaaaatgaatatnnnnnnnnnnnnnnnnnnncagaaggaccagtttgctgtaccttattctgataataaaaattacccttcgactttatctgggagtgagcatccttctgcttctgcagctaatgggagtgtgtatagaagtgagttctataattcagcatcacaaaaggaaggggaagctagtcagcagcatgagatccctgctgggacttaccatcacccagaagcatcaacagtttccaatactacaaagtccatgcaaccagatatgcaggcagttagtgttgctcaatctcataccgagacagctggctatcctacaccggcacatggtgaagcttcacaaccacctgctgg

SEQ ID NO: 142511 - DNA, 413 bp, Arabidopsis thaliana
  unsure (1)..(413): unsure at all n locations
tatttctcacattttcgtagccgcaagactcctttcagatttttnnnnnnnnnnnnnnnnaaagagaagtttcacattaacattgtggtcattggtcatgttgattctggaaaatcgaccacaactggtcacttgatctataagcttggtggtattgacaagcgtgtcatcgagaggttcgagaaggaggctgctgagatgaacaagaggtccttcaagtacgcatgggtgttggacaaacttaaggccgagcgtgagcgtggtattaccatcgatattgctctatggaagttcgagaccaccaagtactactgcacagtcattgatgccccaggacatcgtgatttcatcaagaacatgattactggtacctcccaggctgattgtgctgttcttatcattgactccaccac

SEQ ID NO: 142512 - DNA, 335 bp, Arabidopsis thaliana
  unsure (1)..(335): unsure at all n locations
atcaagagtgaagccggtcagatcgagtactgggaccacaaccacncnnnnnnntntntttttnccttttccgttgctcgttatgtaattgaacaaggcggtctttacttgcccaccttcttcacttccccaaaaatttcctacgtctttcaaggaacgggtatcagcggaagagtggtccctggatgtgccgtgaccttcatggactcgcagccgatgcaaggacaacaacaaggccaaccatggcaaggacgacagggacaacaaggccaaccatgggaaggacagggacaacatggacaacaaggaagacaaggccaaccatgggaaggaca

SEQ ID NO: 142513 - DNA, 401 bp, Arabidopsis thaliana
  unsure (1)..(401): unsure at all n locations
gaccgcggaaacgtctttgccaacactccaggctctgcccactggatnnnnnnnnnnnnnnnnaagcacttgtcatcatcgctcttttcgacatcgccaactaccaaaaccaactcgaccgcaaccctagagtgttccatttggccggaaacaaccagcagggaggctttggcggttcacagcaacaacaagaacagaaaaacttgtggagcgggttcgacgcacaggtcatagctcaagcattgaaaattgacgttcagttggctcagcagcttcagaaccaacaagacagcagaggaaacatcgttcgtgttaagggacctctccaggtcgtgaggccacctctaagacagccctacgagagcgaggagtggagacacccacgtagcccacagggcaac

SEQ ID NO: 142514 - DNA, 415 bp, Arabidopsis thaliana
  unsure (1)..(415): unsure at all n locations
atcaggcaaagaagtaaaggagccttaaaactttttctctctcccggggnnnnnnnnnnnnnnaatcttaaagggactctttaacactcttcttcaccggtgcactcgtcgccgtcggcatctactggttcctctgcgttctcgggccagcagagcgtaaaggcaaacgagccgtaaatctctctggcggctcaatctccgccgagaaagtccaagacaactacaaacagtactggactttcttccgccggccaaaagaaaccgaaaccgccgagaaagctccagacttcgtcgacacatactacaatctcgtcaccgacatatacgagtggggatggggacaatacattcactttttaccaacaagccccggaaaactctacaaagacgccacgcgccttcactaagagatggc

SEQ ID NO: 142515 - DNA, 327 bp, Arabidopsis thaliana
  unsure (1)..(327): unsure at all n locations
aaacaatttctcattagcttacaatggcggatacacaccgtgttgttttnnnnnnnnnnnnnnntcaatttcagtcgccctatgaaggcggccgaggtcaaggtcagtatgaaggtgaccgtggttacggtggtggcggttacaagagcatgatgcctgaaagtggcccatctagtacccaagtattgtccctgttgattggagtccctgtcgtcggttcgctacttgccttggctggattacttctagctggctcggagatcggcttaatggtagctttaccactatttctcctctttagcccggttattagtcccagcgtcttta

SEQ ID NO: 142516 - DNA, 262 bp, Arabidopsis thaliana
  unsure (1)..(262): unsure at all n locations
ccggaaaaggtaagctcagcaatccctcgtgaacctcgccccnnnnnnnnnnnnncgtcggccttgcgagagcagtcacatggggttcctcctcagctacagaacgagtgtaacctcgacaaccctagatgtctccaagccaccgaaactatcaagagtgaagcccggcaaatcgagtactgggaccacaaccaccctcagctccgatgtgttgggcgtttccgtcgccccggaatggaaattgaaacaaggcggggccttt

SEQ ID NO: 142517 - DNA, 302 bp, Arabidopsis thaliana
  unsure (1)..(302): unsure at all n locations
tccttattaagaaagaccaacacagacacggaagaagtctcttttnnnnnnnnnnnnnnntgtgaatgcgggagatggggactggagattctgcttcgagactgattctctggttctgcttagggtttttgattctaggtgttggatttgtgcaatgtggagttacttatgaccggaaagcacttctcattaatggacagagacgaatcctcttctctggctccatacattaccctcgaagcactcctgatatgtgggaagatttgattcacaaagcgaaagatggaggcattgatgtgatt

SEQ ID NO: 142518 - DNA, 338 bp, Arabidopsis thaliana
  unsure (1)..(338): unsure at all n locations
tagacttatctctatatacccccttttaatttgggtgctcttnnnnntnntnnnnnnnncctatatcatatcaatcgacatggcaaatgtggaccgtgatcggcgtgtgcatgtagaccgtactgacaaacgtgttcatcagccaaactacgaagatgatgtcggttttggtggctatggcggttttggtgctggttctgattataagagtcgcggccccttcactaaccaaatcttggcacttatagcaagagttcccattggtggcacacctgctaccctagctggactcactctagccggttcggtgatcggcttgcattgtcttcatacccctt

SEQ ID NO: 142519 - DNA, 415 bp, Arabidopsis thaliana
  unsure (1)..(415): unsure at all n locations
cgacgatggagagaatggagagagacgcaatggagacggtggctctttttnnnnnnnnnnnnnntaccgccgtgttcgtggtgacttggatgacacacttcctaaaccttatttgccgagagcactacaagcacctgacatggaacacccacaaggaacaccagatcatagacataatggccttagtgttcttcagcaacatgtcgctttcttcgatttggacaataatggcatcatttatccctttgaaaccttctctgggttccggttactcggtttcaatttactcgcgtcgcttatcttggctgctggtatcaacatagctcttagctatgctactctcccgggatggttaccgtctccgttcttccctatatatattcacaacattcacaaggcaaagcacggaagcgac

SEQ ID NO: 142520 - DNA, 420 bp, Arabidopsis thaliana
  unsure (1)..(420): unsure at all n locations
agaaaacatacacaaatagcaaaacatggctaacaagctctgnnnnnnnnnnnnnnnnncgccctctgcttcctcctcaccaacgcttccatctaccgcaccgttgtcgaattcgaagaagatgacgccagcaaccccgtaggtccaagacagagatgccagaaggagtttcagcaatcacaacacctaagagcttgccagagatggatgagcaagcaaatgaggcaaggacgtggtggtggtccttccctcgacgatgagttcgatttcgagggcccccagcagggataccagctactccagcagtgctgcaacgagcttcgccaggaagagccagtttgcgtttgccccaccttgaaacaagctgccagggcagttagcctccagggacagcacggaccattccaatccagggaaatt

SEQ ID NO: 142521 - DNA, 414 bp, Arabidopsis thaliana
  unsure (1)..(414): unsure at all n locations
caacaatggaaatgagcctctcattcttgttgcagccgctgttttnnnnnnnnnnnnnnnccagcttgaccgcaaccttagaccatttttgatagccggaaacaacccacaagggcaggaatggctacaaggccgaaagcaacagaagcaaaacaacatcttcaatggcttcgcacctgagatcttggctcaagccttcaagatcaatgtcgagacggctcagcagctccagaaccagcaagataaccgtggcaacatcgtcaaggtcaacggacctttcggcgtcattaggccacccttgagacgcggcgaaggcggccaacaaccacatgaaatagctaatggtttagaggagactttgtgcaccatgcgatgcactgaaaacctcgatgacccttcggatgctgacgtgta

SEQ ID NO: 142522 - DNA, 422 bp, Arabidopsis thaliana
  unsure (1)..(422): unsure at all n locations
taagaaagcagcacgaacaccaactcttaaggaaaacatctannnnnnnnnnnnnnnnnnncatgcaatttaaagctacgtgtccagcttaagacactcaagtctcacatctgtccctttttacttcgacttcgcttcttttggcttcttttaaactctctctatctctctctttcttcttcacactttgttgttaatttcaagtgtttgatcataatggcaacatcagctcgtagagcatacggtttcggtagagccgatgaggctacacaccctgactccattagagcaactttagctgagtttctctccacttttgtcttcgtctttgcagctgaaggctctatcctctctctcgataagttgtattgggaacatgcggctcatgcggggacaaacacaccaggagggctgattttagt

SEQ ID NO: 142523 - DNA, 311 bp, Arabidopsis thaliana
  unsure (1)..(311): unsure at all n locations
aagaaaatggttaagctcagcaatctcctcgttgcaaccttcgttgttttnnnnnnnttnnnnnnctgccttgcgaggcagtcacttggggttcctccttagctacagaacgagtgtaacctcgacaacctagatgttctccaagccaccgaaactatcaagagtgaagccggtcagatcgagtactgggaccacaaccacaccttagcttcgatttgttggtgttttcgttgctcgctatgtaattgaacaaggcgggctttacttgcccaccttttttactttcccaaaaaatttctacgtctttcaag

SEQ ID NO: 142524 - DNA, 422 bp, Arabidopsis thaliana
  unsure (1)..(422): unsure at all n locations
aaagaaaatggttaagctcagcaatctcctcgttgcaaccttcggtttttnnnnnnnnnnnnnnntctgccttgcgaggcagtcacttggggttcctcctcagctacagaacgagtgtaacctcgacaacctagatgttctccaagccaccgtaactatcaagagtgaagccggtcagatcgagtactgggaccacaaccaccctcagctccgatgtgttggtgtttccgttgctcgttatgtaattgaacaaggcggtctttacttgcccaccttcttcacttccccaaaaatttcctacgtcgttcaaggaacgggtatcagcggaagagtggtccctggatgtgcctagaccttcatggacttgcagccgatgcaaggacaacaacaaggccaaccatggcaaggacgacagggacaac

SEQ ID NO: 142525 - DNA, 349 bp, Arabidopsis thaliana
  unsure (1)..(349): unsure at all n locations
ggccaactaccaaaaccaactcgaccgcaaccctagagtgttcctttttnnnnntttntnnnncagggaggcttaggcggttcacagcaacaacatgaacagtaaaacttgtggagcgggttcgacacacaggtcatagctcaagcattgaaaattgacgtacagttggctcagcagcttcagaaccaacaatacagcagaggtaacatcgttcgtgttaagggacctttccaggtcgtgaggccacctctaagacagccctacgagagcgaggagtggagacacccacgtagcccacagggcaacggccttgaggagactatctgcagcatgaggtcctacgagaaca

SEQ ID NO: 142526 - DNA, 311 bp, Arabidopsis thaliana
  unsure (1)..(311): unsure at all n locations
caaaaagaaaatggttaagctcagcaatctcctcgttgcaatccccnnnnnnnnnnnnnnncttaacggctgccttgcgaggcagtcacttggggttcctcctcagctacagaacgagtgtaacctcgacaacctagatgttctccaagccaccgaaactatcaagagtgaagccggtcagatcgagtactgggaccacaaccaccctcagctccgatgtggtggtggtttccttgctcggtatgtaattgaacaaggcgggctttacttgcccaccttttttactttcccaaaaattttctacgtcgttc

SEQ ID NO: 142527 - DNA, 414 bp, Arabidopsis thaliana
  unsure (1)..(414): unsure at all n locations
caaaaagaaaatggttaagctcagcaatctcctcgttgcaacnnnnnnnnnnnnnnnnnnnccttaacggctgccttgcgaggcagtcacttggggttcctcctcagctacagaacgagtgtaacctcgacaacctagatgttctccaagccaccgaaactatcaagagtgaagccggtcagatcgagtactgggaccacaaccaccctcagctccgatgtgttggtgtttccgttgctcgttatgtaattgaacaaggcggtctttacttgcccaccttctttacttccccaaaaatttcctacgtcgttcaaggaacgggtatcagcggaagagtggtccctggatgtgccgagaccttcatggactcgcagtccatgcaaggacaacaacaaggccaaccatggcatggac

SEQ ID NO: 142528 - DNA, 420 bp, Arabidopsis thaliana
  unsure (1)..(420): unsure at all n locations
aacaaaaagaaaatggttaagctcagcaatctcctcgttgcannnnnnnnnnnnnnnnnnnctccttaacggctgccttgcgaggcagtcacttggggttcctcctcagctacagaacgagtgtaacctcgacaacctagatgttctccaagccaccgaaactatcaagagtgaagccggtcagatcgagtactgggaccacaaccaccctcagctccgatgtgttggtgtttccgttgctcgttatgtaattgaacaaggcggtctttacttgcccaccttcttcacttccccaaaaatttcctacgtcgttcaaggaacgggtatcagcggaagagtggtccctggatgtgccgagaaccttatggactcgcagccgatgcaaggacaacaacaaggccaaccatggcaaggacgaca

SEQ ID NO: 142529 - DNA, 409 bp, Arabidopsis thaliana
  unsure (1)..(409): unsure at all n locations
caaggaacgggaataagcggaagagtggtccctggatgtgccgacaaaannnnnnnnnnnnnnnctttgcaaggacaacaacaaggccaaccatggcaaggacgacagggacaacaaggccaaccatgggaaggacagggacaacagggacaacaaggaagacaaggccaaccatgggaaggacagggacaacagggacaacaaggacgacagggacaacaaggccaaccatgggaaggacagggacagcagggacaacaagggttccgtgacatgcaccagaaggtggaacatgtgagacgcggagacgtctttgccaacactccaggctctgcccactggatctacaactcaggagaacagccacttgtcatcatcgctcttctcgacatcgccaactaccaaaacc

SEQ ID NO: 142530 - DNA, 305 bp, Arabidopsis thaliana
  unsure (1)..(305): unsure at all n locations
gaatggacgagatggagttcactgaagcagagagtaacatgatnnnnnnnnnnnnnnnnnttcagcaatatcaagatgctacagtcggtgaagaggagtacgaggaggacgaagaagaagaagaagcctaaagaaaagatgattgattattacttttgtaaggctgtaagttcgtcgcactcatttccttttacctctttttctgaattgggattctctctttttgtgctttgtgtgttttgttattgaatttctttcccaaacctaagatttgttccagagtgtaatcacatttgcctatgctt

SEQ ID NO: 142531 - DNA, 424 bp, Arabidopsis thaliana
  unsure (1)..(424): unsure at all n locations
gaaatcggaaatgatattcattgtgaattatctgtgaatcttnnnnnnnnnnnnnnnnnntttatcgttctctttgctttcgtttgattttattatttatttgtagataatagaaacaacaaaaatgcagaggctgagttgaaaaaacacaccgtcgtttctattgcctgagttcaccatggatgtcgttctcaaaagtctcagctattattattgtagatgaatgagggtaaatccgtcatttcgcaagaacaaaagtacctatttctataagtcattacgcaaatgcctgtttgtataagtttcttattttttagggttattcagacaattaattctatttttattaataatgctttaaaactttttttgctcgggaaaatagttgcccactactgtatttcttgacctttttcccaaacca

SEQ ID NO: 142532 - DNA, 419 bp, Arabidopsis thaliana
  unsure (1)..(419): unsure at all n locations
cgaaaggaaaagcatgtttaaactctgtctcgttctcgtcttggttnnnnnnnnnnnnnnnnnccggttaagtccggttcttgtagttgctccgggaatatatcagcgagcgatgtcgatcgagttcatttcgcgatgaacttggagttcaccgaggcggagttcttcttgaaaggggctaccggaaaaggacttgatgcctataacgcgacacttgctaaaggcggaccaccgccggtaggggccaagaaagccaaccttgatcctataactaaccgaatcatcgaggagtttggttatcaagaaatcggtcatcttagggcgattacggatatgacgggaggaattccacgtccgctaataaatctgacgagagagaatttcgcagtgtttatggacagagcggttggacgcaaatc

SEQ ID NO: 142533 - DNA, 305 bp, Arabidopsis thaliana
  unsure (1)..(305): unsure at all n locations
aaaacatacacaaatagcaaaacatggctaacaagctcttcctccccccnnnnnnnnnnnnnnnctgcttcctcctcaccaacgcttccatctaccgcaccgttgtcgaattcgaagaagatgacgccagcaaccccgtaggtccaagacagagatgccagaaggagtttcagcaatcacaacacctaagagcttgccagagatggatgagcaagcaaatgaggcaaggacgtggtggtggtccttccctcgacgatgagttcgaattcgagggcccccagcagggataccagcttcttcagcag

SEQ ID NO: 142534 - DNA, 409 bp, Arabidopsis thaliana
  unsure (1)..(409): unsure at all n locations
taccggttttggctcggattcgtccgtcttctttcttctcagccgtgnnnnnnnnnnnnnnnnnntgtaacgattgatgattttgagttaattgaacgttcggcgtatgagtggtgatcggatagctagtgttcgtaggctccatgctcgcgcatcgaactacctaccacctatccttctcagttaattcacgggcgatgttacgctcgatgatgagttccggggcctgtgtttcgtacctaatttgaaggaattgttgagtttggtttacacctttgcccgcggcttcttcctcgtggggaagtcgtgggcacaaacatcggcacttgttcacctttcgtcatcgcatttgttgccttgctcgcattggtgaatgagatgcgggttgaaatctcggatgcggaaaagt

SEQ ID NO: 142535 - DNA, 420 bp, Arabidopsis thaliana
  unsure (1)..(420): unsure at all n locations
caaccatgacggaaggcaaaatcgtttcctgtatcaaatttgtagtnnnncnnnnnnnnnnnnntcgagtgttgtggttgttgaatctgataaagccgatatggatgtagaaacgttttacgatggttatcttgctgcgattgtcgtcggagaaggtgaaacagctccggttggttgctgcgattggattgttagctgagactgaagctgtgatcgaagaagctaatagtaaagccgcttcgaaatcttcttcttctgtggttgaggctgacgttccatctcctcctccggttacttcttctcctgctccggcgattgctcaaccggctccggtgacggctgtatcatatggtccgaggaagactgttgcgaaccccgtttgctaataagcttgcttaacatcacaaggttgtgattgaa

SEQ ID NO: 142536 - DNA, 427 bp, Arabidopsis thaliana
  unsure (1)..(427): unsure at all n locations
agaaaaatgggtcgagtctcatctattatctctttctctttgacactnnnnnnnnnnnnnnnnnnctacactgcccaacagtggcccaacgagtgccagctcgatcaactcaatgcgctcgaaccatcccaaatcatcaagagcgagggtggtcgcatcgaggtctgggaccaccatgcaccccagctccgttgctccggctttgcctttgagcgtttcgtcattgagcctcagggtcttttcttgcccactttcttgaacgccggcaaactcacgtttgttgttcacggaaggggtctaatgggaagagttattccgggatgcgccgagacgttcatggagtcaccggtatttggagaaggtcaaggtcagggtcagagtcaagggttccgtgacatgcaccagaaagtagagcacctacggtgcg

SEQ ID NO: 142537 - DNA, 417 bp, Arabidopsis thaliana
  unsure (1)..(417): unsure at all n locations
ttcagaaccaagatgacaaccgtggaaacattgtccgagttcnnnnnnnnnnnntnnnnttaggccgcctttgaggggccagagacctcaggaggaggaagaagaagaagaaggacgacatggacgacacggtaatggcttagaggagaccatctgcagcgccaggtgcaccgataacctcgatgacccgtctcgtgctgacgtgtacaagccacagctcggttacatcagcactctcaacagttacgatctccccatccttcgcttcatccgtctctcagccctccgtggatctatccgtcaaaacgcaatggtgcttccacagtggaacgcaaacgcgaacgctattctttacgtgacagacggtgaagcccaaatccagatcgtaaacgacaatggtaacagagtggttgacgg

SEQ ID NO: 142538 - DNA, 406 bp, Arabidopsis thaliana
  unsure (1)..(406): unsure at all n locations
gaaataacaaaatggctcgagtctcttctcttctttcttagatnnnnnnnnnnnnnnnnnatttccatggctacgcggctcaacagggtcagcagggtcagcagtttccgaacgagtgccagctcgaccagctcaatgcgctcgagccgtcacacgtactgaagagcgaggctggtcgcatcgaggtgtgggaccaccacgctcctcagctccgttgctcaggtgtctcctttgcacgttacatcatcgagtctaagggtctctacttgccctctttctttaacaccgcgatgctctctttcgtggctaagggacgaggtcttatgggaaaagtgatccctggatgcgccgaaacattccaagactcatcagagttccaaccacgcttcgaaagtcaaggtcaaag

SEQ ID NO: 142539 - DNA, 415 bp, Arabidopsis thaliana
  unsure (1)..(415): unsure at all n locations
ctcgacatttctctctctcaagctagtctaaagtttcttcttnnnnnnnnnnnnnnnnnnnaacttcgacttctctcttattttcaccctcagagagtaaccatggatgccttgacctcgagtttggttcgatctcccatcgtaccatcgagaacttccgacaacggttctggatctatgttccttaccgccagtggccctggattcacgcgttctagttcttcaagacttcaacttcgtttaaggcaaaacgcgtctgctagatcctcaagatcattacagagcttaacaacgactgctaaaactcggagaagttttgtggttagagcttcttcagcgtctaatgatgcttcatctggttcttcccccaaaccgatcgctccgctccagctgcaatcgcctgctggtcagtttc

SEQ ID NO: 142540 - DNA, 418 bp, Arabidopsis thaliana
  unsure (1)..(418): unsure at all n locations
aaaatggttaagctcagcaatctcctcgttgcaaccttcggtttttnnnnnnnnnnnnnnntctgccttgcgaggcagtcacttggggttcctcctcagctacagaacgagtgtaacctcgacaacctagatgttctccaagccaccgaaactatcaagagtgaagccggtcagatcgagtactgggaccacaaccaccctcagctccgatgtgttggtgtttccgttgctcgttatgtaattgaacaaggcggtctttacttgcccaccttcttcacttccccaaaaatttcctacgtcgttcaaggaacgggtatcagcggaagagtggtccctggatgtgccgagaccttcatggactcgcagccgatgcaaggacaacaacaaggccaaccatggcaaggacgacagggacaac

SEQ ID NO: 142541 - DNA, 420 bp, Arabidopsis thaliana
  unsure (1)..(420): unsure at all n locations
cttcatcattaccaaatcatcaacttaatcgtttctctcaaatnnnnnnnnnnnnnnnnnnncgaaagtcttgcggttttctgaatcatctctatctggtttgagggtttcgtttgatatctggagaaaggggtttctggaaacaaggagttcataattcgcgatcttgatctatcgatcttcatttatatataaaagcgtgaatgagattatgatggagtcgaaaggtggtaaaaagaagtccagcagtagtagttccttattttacgaagctcccctcggttacagcattgaagacgttcgtccaaacggtggaatcaagaaattcaaatcttctgtctactcaaactgctccaagaggccatcctgagtaccagcgtgcaccgatcttcataatatagttatagctttctttacttt

SEQ ID NO: 142542 - DNA, 423 bp, Arabidopsis thaliana
  unsure (1)..(423): unsure at all n locations
gagacactccacgtagcccacagggcaacggccttgaggagactattgnnnnnnnnnnnnnnnnnnagaacattgacgaccctgctcgtgctgacgtgtacaagcccagcctaggtcgcgtgaccagcgtcaacagctataccttgcccatcttggagtatgtcaggctcagtgccactcgtggcgttctccagggtaatgcgatggtgcttcctaaatacaacatgaacgctaacgagatcttgtactgcactggaggacaaggaaggatccaagtggtcaacgacaacggacagaacgtgttggaccaacaggtgcagaagggacagctcgtggtcatcccacaagggttcgcatacgttgtccagtcccacggaaacaagttcgagtggatctctttcaaaactaatgaaaacgcaatga

SEQ ID NO: 142543 - DNA, 426 bp, Arabidopsis thaliana
  unsure (1)..(426): unsure at all n locations
aatgggtcgagtctcatctattatctctttctctttgacactcttgannnnnnnnnnnnnnnnnnctgcccaacagtggcccaacgagtgccagctcgatcaactcaatgcgctcgaaccatcccaaatcatcaagagcgagggtggtcgcatcgaggtctgggaccaccatgcaccccagctccgttgctccggctttgcctttgagcgtttcgtcattgagcctcagggtcttttcttgcccactttcttgaacgccggcaaactcacgtttgttgttcacggaaggggtctaatgggaagagttattccgggatgcgccgagacgttcatggagtcaccggtatttggagaaggtcaaggtcagggtcagagtcaagggttccgtgacatgcaccagaaagtagagcacctacggtgcggtga

SEQ ID NO: 142544 - DNA, 429 bp, Arabidopsis thaliana
  unsure (1)..(429): unsure at all n locations
aacaaacaaaaagaaaatggttaagctcagcaatctcctcgttgcacgnnnnnnnnnnnnnnnnnccttaacggctgccttgcgaggcagtcacttggggttcctcctcagctacagaacgagtgtaacctcgacaacctagatgttctccaagccaccgaaactatcaagagtgaagccggtcagatcgagtactgggaccacaaccaccctcagctccgatgtgttggtgtttccgttgctcgttatgtaattgaacaaggcggtctttacttgcccaccttcttcacttccccaaaaatttcctacgtcgttcaaggaacgggtatcagcggaagagtggtccctggatgtgccgagaccttcatggactcgcagccgatgcaaggacaacaacaaggccaaccatggcaaggacgacagggacaa

SEQ ID NO: 142545 - DNA, 426 bp, Arabidopsis thaliana
  unsure (1)..(426): unsure at all n locations
atcatgacgaccaccgttattatcattatcttcgttgccatcttcgctnnnnnnnnnnnnnnnnttgaggagcaaccatggaaccgtgtctcgaatcaatgaagactgcttcgcttcctgatcttccgtatgcttatgatgcgctagagccagcaatcagtgaggagatcatgcggctacaccatcagaaacaccaccagacttatgtcactcagtacaacaaagccctcaacagccttcgttctgccatggctgacggtgatcactcctccgtcgtcaaactccaaagcctcatcaagttcaacggcggagggcacgttaaccatgcaatcttctggaaaaacctagccccggttcatgaaggaggtggcaaaccaccgcatgatcctttggcttcggcgatcgatgctcatttcggatcactag

SEQ ID NO: 142546 - DNA, 413 bp, Arabidopsis thaliana
  unsure (1)..(413): unsure at all n locations
aaacgcgaacgctattctttacgtgacagacggggaagcccannnnnnnnnnnnnnnnccaatggtaacagagtgtttgacggacaagtctctcaaggacagctcatagccgtaccacaaggtttctcggtggtgaaacgcgcaacaagcaaccgattccagtgggttgagttcaaaacaaacgctaacgcgcaaatcaacactctggcgggacgaacctcagtcttgagaggtttaccacttgaagtcataaccaatgggttccaaatctcacccgaagaagcaaggagggtcaagttcaacacgctcgagaccactttgactcacagcagtggcccagctagctacggaaggccaagagtggctgcagcttaagagcttaaaaccgcggcttaacaatgaaccgctactgt

SEQ ID NO: 142547 - DNA, 404 bp, Arabidopsis thaliana
  unsure (1)..(404): unsure at all n locations
atcacaaacgagtaagaatacaaatacaaatagcaaaaaanannnnnnnnnnnnnnnnnnncgtctgcgcaactttcgccctctgcttcctcctcaccaacgcttccatctaccgcactgttgtcgagttcgacgaagatgacgccagcaaccccatgggcccaagacagaaatgtcagaaggagtttcagcaatcacagcacctaagagcttgccagaaattgatgcgcatgcaaatgaggcaaggccgtggtggtggtccctccctcgacgatgagttcgatttggaagacgacatcgagaacccacaaggcccccagcagggacaccagatcctccagcagtgctgcagcgagcttcgccaggaagagccagtttgttgttgccccaccttgagacaagct

SEQ ID NO: 142548 - DNA, 404 bp, Arabidopsis thaliana
  unsure (1)..(404): unsure at all n locations
agggacaacagggacaacaaggaagacaaggccaaccatggttttnnnnnnnnnnnnnntttttacaaggacgacagggacaacaaggccaaccatgggaaggacagggacagcagggacaacaagggttccgtgacatgcaccagaaggtggaacatgtgagacgcggagacgtctttgccaacactccaggctctgcccactggatctacaactcaggagaacagccacttgtcatcatcgctcttctcgacatcgccaactaccaaaaccaactcgaccgcaaccctagagtgttccatttggccggaaacaaccagcagggaggctttggcggttcacagcaacaacaagaacagaaaaacttgtggagcgggttcgacgcacaggtcatagctcaagca

SEQ ID NO: 142549 - DNA, 423 bp, Arabidopsis thaliana
  unsure (1)..(423): unsure at all n locations
agaaaatggttaagctcagcaatctcctcgttgcaaccttcgtgnnnnnnnnnnnnnnnnnnggctgccttgcgaggcagtcacttggggttcctcctcagctacagaacgagtgtaacctcgacaacctagatgttctccaagccaccgaaactatcaagagtgaagccggtcagatcgagtactgggaccacaaccaccctcagctccgatgtgttggtgtttccgttgctcgttatgtaattgaacaaggcggtctttacttgcccaccttcttcacttccccaaaaatttcctacgtcgttcaaggaacgggtatcagcggaagagtggtccctggatgtgccgagaccttcatggactcgcagccgatgcaaggacaacaacaaggccaaccatggcaaggacgacagggacaacaag

SEQ ID NO: 142550 - DNA, 427 bp, Arabidopsis thaliana
  unsure (1)..(427): unsure at all n locations
ggtgcttccacagtggaacgcaaacgcgaacgccattctttactnnnnnnnnnnnnnnnnnnnaatccagatcgtaaacgacaatggtaacagagtgtttgacggacaagtctctcaaggacagctcatagccgtaccacaaggtttctcggtggtgaaacgcgcaacaagcaaccgattccagtgggttgagttcaaaacaaacgcaaacgcgcaaatcaacactcttgcgggacgaacctcagtcttgagaggtttaccacttgaagttataaccaatgggttccaaatctcacctgaagaagcaaggagggtcaagttcaacacgctcgagaccactttgactcacagcagtggcccagctagctacggaaggccaagggtggctgcagcttaagagcttaaaaccgcggctcaacaatgaacc

SEQ ID NO: 142551 - DNA, 430 bp, Arabidopsis thaliana
  unsure (1)..(430): unsure at all n locations
gtcgagacggctcagcagctccagaaccagcaagataaccgtggcaaccccnnnnnnnnnnnnnnncctttcggcgtcattaggccacccttgagacgcggcgaaggcggccaacaaccacatgaaatagctaatggtttagaggagactttgtgcaccatgcgatgcactgaaaacctcgatgacccgtcggatgctgacgtgtacaagccatcactcggatacattagcacacttaacagctacaatcttcctatcctcagacttctccgccttagcgctcttcgtggctccatccgtaaaaacgctatggtgctaccgcaatggaacgtaaacgcaaacgcggcactctacgtgacaaacggaaaggctcatatacaaatggtgaacgacaacggagaaagagtgttcgaccaagagatctccagcg

SEQ ID NO: 142552 - DNA, 426 bp, Arabidopsis thaliana
  unsure (1)..(426): unsure at all n locations
acactcgaccggaaccctagagtgttccatttggccggaaacaaccgnnnnnnnnnnnnnnnnnattcacagcaacaacaagaacagaaaaacttgtggagcgggttcgacgcacaggtcatagctcaagcattgaaaattgacgttcagttggctcagcagcttcagaaccaacaagacagcagaggaaacatcgttcgtgttaagggacctttccaggtcgtgaggccacctctaagacagccctacgagagcgaggagtggagacacccacgtagcccacagggcaacggccttgaggagactatctgcagcatgaggtcccacgagaacattgacgaccctgctcgtgctgacgtgtacaagcccagcctatgtcgcgtgaccagcgtcaacagctataccttgcccatcttggagtatgtc

SEQ ID NO: 142553 - DNA, 442 bp, Arabidopsis thaliana
  unsure (1)..(442): unsure at all n locations
agagcctaccgcacatgaacaaaacaacaagaaaaaatggcattaaccaacaaattaatcannnnnttnnntnnnnnnncttccatagctgtcgtccactgcttatccttccgtgtggagatcgacgagttcgagccaccacagcaaggagaacaagaaggtccccgtcgccgtcctggtggtggctctggcgagggatgggaggaagagtcgacgaatcatccataccacttcaggaagcggagtttcagtgattggttccagtcaaaggaaggttttgtgagagtgctgcctaagttcacaaaacatgcaccggctctcttccgaggaatcgagaactacagattctcgttggtggagatggagccaacaactttctttgtgcctcaccatttggatgccgatgctgtttttatagtcctacaaggtaaaggagtgatcg

SEQ ID NO: 142554 - DNA, 414 bp, Arabidopsis thaliana
  unsure (1)..(414): unsure at all n locations
ggaaatgagcctctcattcttgttgcagccgcggatctttttttnnnnnnnnnnnnnnnngaccgcaaccttagaccatttttgatagccggaaacaacccacaagggcaggaatggctacaaggccgaaagcaacagaagcaaaacaacatcttcaatggcttcgcacctgagatcttggctcaagccttcaagatcaatgtcgagacggctcagcagctccagaaccagcaagataaccgtggcaacatcgtcaaggtcaacggacctttcggcgtcattaggccacccttgagacgcggcgaaggcggccaacaaccacatgaaatagctaatggtttagaggagactttgtgcaccatgcgatgcactgaaaacctcgatgacccgtcagatgctgacgtgtacaagcca

SEQ ID NO: 142555 - DNA, 399 bp, Arabidopsis thaliana
  unsure (1)..(399): unsure at all n locations
cacaattcctcttatcaagtaagtaacaatgatataacaaatnnnnnnnnnnnnnnnnncatgatttgaaagctaataacgatactatagctaagattgtttgtatcacttgtgatatagaaagtagcgatagatggcgctaaagaaaagacaagtgaagccatcctaaaaaacctcgatctcgaactcctgaaccgtaattctgatgcaaatatcctaagaattgcggattttggttgttctattggacccaacacgttcgaagtagtccaaaatattatcgatacggtgaaacagaaaaccctaaaagaaaacaatgcctatattggtgctcctctcgagttccaagtttgctttaatgatcaaccaaacaatgattttaacacactttttagaacc

SEQ ID NO: 142556 - DNA, 418 bp, Arabidopsis thaliana
  unsure (1)..(418): unsure at all n locations
gggctctctctaaattcctcagtctcgagaatcttcatcngcnnnnnnnnnnnnnnnnntatgttaacggcagatataccaccgaatcaatcaatctacatccaaaacctcaacgaaaggatcaagaaagaggaattgaagagatctctttactgtttgttctctcagtttgggaggatacttgatgtggttgctttgaagactccgaagctccgaggacaagcttgggttacttttagtgaagtcactgctgctggtcatgctgttcgtcagatgcaaaattttcccttctatgataaaccaatgcgcttacaatatgcaaaagcaaagtcagattgtctagctaaagctgagggaactttcgttccaaaagataagaagaggaagcaagaagaaaaagttgaaagaaagcgtgaag

SEQ ID NO: 142557 - DNA, 169 bp, Arabidopsis thaliana
cacggtaatggcttataggagaccatctgcagcgccaggtgcaccgataacctcgatgatccgtctcgtgctgacgtgtacaagccacagctcggttacatcagcactcttaacaggtacgatctccccatccttggctttatacgtctctcaaaccttcttggattta

SEQ ID NO: 142558 - DNA, 419 bp, Arabidopsis thaliana
agcaaatctaaaccaaagatctccattttcgtagtttctttaagctttttcagtatcatagagacactttttttattagaaatggctttagctgttacttcttcttcaactgcaatctctggatcgagtttctctcgttctggagcttcttctgaatctaaagctcttcagatatgttcgattaggttatctgatcgaacccatttgtctcagagacgttactctatgaaacctttaaacgctgagtcacattcacgaagcgaatcttgggttactcgtgcttcaactctaattgctcctgaagttgaagagaaagaaggagaagttgaagactttgagcaacttgctaaaaagcttgaagatgcttctccacttgaaatcatggataaagctcttgagaaatttggagacgaaatcgc

SEQ ID NO: 142559 - DNA, 436 bp, Arabidopsis thaliana
caactcaggagaacagccacttgtcatcatcgctcttctcgacatcgccaactaccaaaaccaactcgaccgcaaccctagagtgttccatttggccggaaacaaccagcagggaggctttggcggttcacagcaacaacaagaacagaaaaacttgtggagcgggttcgacgcacaggtcatagctcaagcattgaaaattgacgttcagttggctcagcagcttcagaaccaacaagacagcagaggaaacatcgttcgtgttaagggacctttccaggtcgtgaggccacctctaagacagccctacgagagcgaggagtggagacacccacgtagcccacagggcaacggccttgaggagactatctgcagcatgaggtcccacgagaacattgacgaccctgctcgtgctgacgtgtacaagcccagccta

SEQ ID NO: 142560 - DNA, 423 bp, Arabidopsis thaliana
atcgacatggcgaatgtggaccgtgatcggcgtgtgcatgtagaccgtactgacaaacgtgtgcatcagccaaactacgaagatgatgtcggttttggtggctatggcggttatggtgctggttctgattataagagtcgcggcccctccactaaccaaatcttggcacttatagcaggagttcctattggtggcacactgctaaccctagctggactcactctagccggttcggtgatcggcttgctagtctccatacccctcttgctcctcttcagtccggtgatagtcccggcggctctcactattgggcttgctgtgacgggaatcttggcttctggattgcatgggtcgacgggtctgagcttggtcttgtggtcctcaactaccttcgcgggacgtgtgatacatgagccagagcaa

SEQ ID NO: 142561 - DNA, 426 bp, Arabidopsis thaliana
tgaaaaccttatattccctgaggaggttctaccacgtggaaacgctctttaatggaactttagctttagctggtcgtgaccaagaaaccaccggtttcgcttgttgggccgggaatgcccgacttatcaatttatctggtgaacttttgggagctcatgtagcccatgccggattaatcgtattctgggccggagcaatgaacttatttgaagtggcccattttgtacctgaaaagcccatgtatgaacaaggattaattttacttccccacctagccactttatgatggggggtaggtcctgggggagaagttatagacacctttccgtactttgtatctggagtacttcacttaatttcttctgcagttttgggctttggcgggatttatcatgcacttctgggacccgcaactcttgaagaat

SEQ ID NO: 142562 - DNA, 422 bp, Arabidopsis thaliana
atcgctcttctcgacatcgccaactaccaaaaccaactcgaccgcaaccctagagtgttccatttggccggaaacaaccagcagggaggctttggcggttcacagcaacaacaagaacagaaaaacttgtggagcgggttcgacgcacaggtcatagctcaagcattgaaaattgacgttcagttggcgtcagcagcttcagaaccaacaagacagcagaggaaacatcgttcgtgttaagggacctttccaggtcgtgaggccacctctaagacagacctactagagcgaggagtggagacacccacgtagcccacagggcaacggccttgaggagactatctggaggatgaggtcccacgagaacattgacgaccctgctcgtgctgacgtgtacaagcccagcctaggtcgcgtgacca

SEQ ID NO: 142563 - DNA, 428 bp, Arabidopsis thaliana
aagaagaagaagaaggacgacacggacgacacggtaatggcttagaggagaccatctgcagcgccaggtgcaccgataacctcgatgatccgtctcgtgctgacgtgtacaagccacagctcggttacatcagcactctcaacagttacgatctccccatccttcgcttcatccgtctctcagccctccgtggatctatccgtcaaaacgcaatggtgcttccacagtggaacgcaaacgcgaacgccattctttacgtgacagacggggaagcccaaatccagatcgtaaacgacaatggtaacagagtgtttgacggacaagtctctcaaggacagctcatagccgtaccacaaggtttctcggtggtgaaacgcgcaacaagcaaccgattccagtgggttgaggtcaaaacaaacgcaaacgcg

SEQ ID NO: 142564 - DNA, 382 bp, Arabidopsis thaliana
caaaaacgccaaagtgatctgcaatggagatttagtgttgtactttatgtccacaagctttgatgatgtgaactagtaacttgtctccggttatgcttctgactcgttggattagttcgctccgtgtaattctcctattctgttaaatccaaaggaaagcaacaattagaatgtgaaatgaaatcacctcaaaagataattgaagaggaaacaaacaaaaaaaaacacttacttgttgatctttgtaatgtttctgaatgacaagtatttgagaaggggggtagaaacttggacaatgctttgatcaatacaggaaatgccatccatggtgatctcaatctctttggacttcctgcaaaaccagttataactatgtcaaaaa

SEQ ID NO: 142565 - DNA, 384 bp, Arabidopsis thaliana
aatggtttttaataatgtgagtctccatggagaattagacaaatgggatatgattatactgagatgggttatagcgtgaaaaaaagaaacatctactttaagcaacagcagaaagcattaaagaatagataacccccattttcgagaggaacgttaggagaaaagaactgaagatttactaaccaacttgttagcagatgcttaatttcatcagtgattgccaagcaagtttgaattaaggattaataaaattgttatgtatattatgaaataatgaagataggtcgcgatctctagcgtcctaagagtttagaagtaggggccttggtggttgacacacgaaaagaagcagagattagcatttgcgtctaacattgcttttat

SEQ ID NO: 142566 - DNA, 418 bp, Arabidopsis thaliana
atcggagccaccatgaccacagtttcgactcagaacgagtctactcaaaaacccgtccaggtggcgaagagattagagaagttcaagactactattttcactcaaatgagcatattggcagttaaacatggagcgatcaatttaggccaaggctttcccaatttcgacggtcctgattttgttaaagaagctgcgatccaagctattaaagatggtaaaaaccagtatgctcgtggatacggcattcctcagctcaactctgctatagctgcgcggtttcgtgaagatacgggtcttgttgttgatcctgagaaagaagttactgttacatctggttgcacagaagccatagctgcagctatgttgggtttaataaaccctggtgatgaagtcattctctttgcaccgttttatgatt

SEQ ID NO: 142567 - DNA, 382 bp, Arabidopsis thaliana
gtaaatttaccaagggctatagtcatagcgatcctcctattcatctacttcaaccatttccgaacaccttaatgttatagattttgatgttatatattatggcattttcagggcgctcaaattctatcatttgcttatgatttaatttctcgcgcactgccccataaaatggaacccttagaatttcatttaattggtttcgaagatcaaaatttttgattttattggtccttacttaggtaaacggatcaactcaacaagttacttgcttgctataagcggattaataagtataagtagttgaatctaaatcatgaattgtcggatgactcattattcagataaagaataaagaactcttttttttcttttttgcgtgtat

SEQ ID NO: 142568 - DNA, 433 bp, Arabidopsis thaliana
ggtatttggagaaggtcaaggtcagggtcagagtcaagggttccgtgacatgcaccagaaagtagagcacctacggtgcggtgacaccattgcaacaccatctggtgtagctcaatggttctacaacaatggaaatgagcctctcattcttgttgcagccgcggatctcgccagcaaccagaaccagcttgaccgcaaccttagaccatttttgatagccggaaacaacccacaagggcaggaatggctacaaggccgaaagcaacagaagcaaaacaacatcttcaatggcttcgcacctgagatcttggctcaagccttcaagatcaatgtcgagacggctcagcagctccagaaccagcaagataaccgtggcaacatcgtcaaggtcaacggacctttcggcgtcattaggccacccttgagacgcggc

SEQ ID NO: 142569 - DNA, 419 bp, Arabidopsis thaliana
  unsure (1)..(419): unsure at all n locations
acaaatcatcactctcgatgtcgattctcaggagactgttgagaatgttaaagccttgctcgaggttgagtccaatgttccgattcagcagcagcagctgttgtataatggaaacgagatgggaaattccgataaattgagtgccttgggtgttaaggatgatgatttattgatgatgatggtttccaatgcctcatctggtagtgccactagtgcggcggngaatgatttgggcatgaatcctgatgggtcagctttgaaccctgcagcctttcaacaacacattcgtggggattctaatcttatgggacagttatttcagaatgatcctgagcttgcacaagtgatttctggaagcgatttaaataagttacaggatgttttgcgtgcacggcatcgtcagcgatctgttttacagc

SEQ ID NO: 142570 - DNA, 419 bp, Arabidopsis thaliana
caaaaagaaaatggttaagctcagcaatctcctcgttgcaaccttcggggttctcctcgtccttaacggctgccttgcgaggcagtcacttggggttcctcctcagctacagaacgagtgtaacctcgacaacctagatgttctccaagccaccgaaactatcaagagtgaagccggtcagatcgagtactgggaccacaaccaccctcagctccgatgtgttggtgtttccgttgctcgttatgtaattgaacaaggcggtctttacttgcccaccttcttcacttccccaaaaatttcctacgtcgttcaaggaacgggtatcagcggaagagtggtccctggatgtgccgagaccttcatggactcgcagccgatgcaaggacaacaacaaggccaaccatggcaaggacgacagg

SEQ ID NO: 142571 - DNA, 431 bp, Arabidopsis thaliana
ccaaaaccaactcgaccgcaaccctagagtgttccatttggccggaaacaaccagcagggaggctttggcggttcacagcaacaacaagaacagaaaaacttgtggagcgggttcgacgcacaggtcatagctcaagcattgaaaattgacgttcagttggctcagcagcttcagaaccaacaagacagcagaggaaacatcgttcgtgttaagggacctttccaggtcgtgaggccacctctaagacagccctacgagagcgaggagtggagacacccacgtagcccacagggcaacggccttgaggagactatctgcagcatgaggtcccacgagaacattgacgaccctgctcgtgctgacgtgtacaagcccagcctaggtcgcgtgaccagcgtcaacagctataccttgcccatcttggagtatg

SEQ ID NO: 142572 - DNA, 418 bp, Arabidopsis thaliana
aagaggaagaaaaatgggtcgagtctcatctattatctctttctctttgacactcttgatcctcttcaatggctacactgcccaacagtggcccaacgagtgccagctcgatcaactcaatgcgctcgaaccatcccaaatcatcaagagcgagggtggtcgcatcgaggtctgggaccaccatgcaccccagctccgttgctccggctttgcctttgagcgtttcgtcattgagcctcagggtcttttcttgcccactttcttgaacgccggcaaactcacgtttgttgttcacggaaggggtctaatgggaagagttattccgggatgcgccgagacgttcatggagtcaccggtatttggagaaggtcaaggtcagggtcagagtcaagggttccgtgacatgcaccagaaagta

SEQ ID NO: 142573 - DNA, 418 bp, Arabidopsis thaliana; identical to SEQ ID NO: 130016

SEQ ID NO: 142574 - DNA, 398 bp, Arabidopsis thaliana
cgaagatattggcgtttacgaaccaagggccacgcgcaatctgtattctctcagctacaggagctgtaactaatgtgatgcttcgtcaagctaacaatagcaatcctactggaactgttaagtatgagggccgatttgaaatcatttctctgtcaggttctttcttgaattctgagagtaatggtactgtgaccaaaactggtaacttgagtgtgtcgctggctggacacgaaggccggattgtgggtggatgtgttgatggaatgctagttgctggatcacaagtccaggtcattgtgggaagctttgtaccagatggaaggaagcagaaacaaagtgcggggcgtgctcagaatacttcggagccagcttcagcaccagccaatatgttgagcttt

SEQ ID NO: 142575 - DNA, 415 bp, Arabidopsis thaliana
cggacgcgtgggagaaaaatgggtcgagtctcatctattatctctttctctttgacactcttgatcctcttcaatggctacactgcccaacagtggcccaacgagtgccagctcgatcaactcaatgcgctcgaaccatcccaaatcatcaagagcgagggtggtcgcatcgaggtctgggaccaccatgcaccccagctccgttgctccggctttgcctttgagcgtttcgtcattgagcctcagggtcttttcttgcccactttcttgaacgccggcaaactcacgtttgttgttcacggaaggggtctaatgggaagagttattccgggatgcgccgagacgttcatggagtcaccggtatttggagaaggtcaaggtcagggtcagagtcaagggttccgtgacatgcacc

SEQ ID NO: 142576 - DNA, 429 bp, Arabidopsis thaliana
cttggctcaagccttcaagatcaatgtcgagacggctcagcagctccagaaccagcaagataaccgtggcaacatcgtcaaggtcaacggacctttcggcgtcattaggccacccttgagacgcggcgaaggcggccaacaaccacatgaaatagctaatggtttagaggagactttgtgcaccatgcgatgcactgaaaacctcgatgacccgtcggatgctgacgtgtacaagccatcactcggatacattagcacacttaacagctacaatcttcctatcctcagacttctccgccttagcgctcttcgtggctccatccgtaaaaacgctatggtgctaccgcaatggaacgtaaacgcaaacgcggcactctacgtgacaaacggaaaggctcatatacaaatggtgaacgacaacggagaaag

SEQ ID NO: 142577 - DNA, 430 bp, Arabidopsis thaliana
aaggacgacagggacaacaaggccaaccatgggaaggacagggacagcagggacaacaagggttccgtgacatgcaccagaaggtggaacatgtgagacgcggagacgtctttgccaacactccaggctctgcccactggatctacaactcaggagaacagccacttgtcatcatcgctcttctcgacatcgccaactaccaaaaccaactcgaccgcaaccctagagtgttccatttggccggaaacaaccagcagggaggctttggcggttcacagcaacaacaagaacagaaaaacttgtggagcgggttcgacgcacaggtcatagctcaagcattgaaaattgacgttcagttggctcagcagcttcagaaccaacaagacagcagaggaaacatcgttcgtgttaagggacctttccaggtcgt

SEQ ID NO: 142578 - DNA, 402 bp, Arabidopsis thaliana
cggacgcgtgggaagaaaatggttaagctcagcaatctcctcgttgcaaccttcggggttctcctcgtccttaacggctgccttgcgaggcagtcacttggggttcctcctcagctacagaacgagtgtaacctcgacaacctagatgttctccaagccaccgaaactatcaagagtgaagccggtcagatcgagtactgggaccacaaccaccctcagctccgatgtgttggtgtttccgttgctcgctatgtaattgaacaaggcggtctttacttgcccaccttcttcacttccccaaaaatttcctacgtcgttcaaggaacgggtatcagcggaagagtggtccctggatgtgccgagaccttcatggactcgcaagccgtgcaaggacaacaacaa

SEQ ID NO: 142579 - DNA, 419 bp, Arabidopsis thaliana
agagagaggacagtcgcatcctgcggccgcctaaacagaagatcacagattcggatgagcttgccgagtacagactccgacgtcggaaggagtttgaggacaagatccgcggcgcaaaaacgaactcacaagtttgggtgaggtatgctgattgggaagagtctcagaaggatcacgatcgtgctcggagcgtgtgggaacgagctttggaagacgagagttacaggaaccatacgctctggctcaagtacgcagagttcgagatgaggaacaaagacgtcaaccatgcgaggaacgtttgggatcgagccgtgaagattctacctcgcgtggaccagttttggtataagtatattcacatggaggagatacttggtaatatcgacggagctagaaagatttttgaacggtggatggat

SEQ ID NO: 142580 - DNA, 272 bp, Arabidopsis thaliana
gtgtcgaggctaatctaacatctctctatgtttgacactctcgatcctcttcaagggctacactgcccaacagtggcccgactagtgccagttctgacaactcaatgcgctcgaaccatcccaaatcatcgagagcgagggtggtcgtatctagggatgtgaccaccatgcacgccaatttcggtggtgccgctctgtctgtgagcgttttggcattgagcctcaagtaattgctttgcgcacttgtttgagcgccggcaaactcacgttta

SEQ ID NO: 142581 - DNA, 307 bp, Arabidopsis thaliana
ttccttcattgaatgaataaaaaattgtattcttcatccgcttgggtgggaccaacgaaagggagtgcttactcccactttttattgaattaaccgattaatttgctatctaagattttttctgtattcgaaataatttgtatcaaaatttaacatattttttttattatgagaacatattctactacttcaaatccagaggttattatacgtgtaaaaaaaaaacctgtgacgtattgcccaaatcatttgttcggtactggatgtatcctttccttctggcaaaatgcctaatatttacaatgct

SEQ ID NO: 142582 - DNA, 420 bp, Arabidopsis thaliana
atcacaaacgagtaagaatacaaatacaaatagcaaaaaaaatggcaaacaagctcttcctcgtctgcgcaactttcgccctctgcttcctcctcaccaacgcttccatctaccgcactgttgtcgagttcgacgaagatgacgccagcaaccccatgggcccaagacagaaatgtcagaaggagtttcagcaatcacagcacctaagagcttgccagaaattgatgcgcatgcaaatgaggcaaggccgtggtggtggtccctccctcgacgatgagttcgatttggaagacgacatcgagaacccacaaggcccccagcagggacaccagatcctccagcagtgctgcagcgagcttcgccaggaagagccagtttgtgtttgccccaccttgagacaagctgccagggccgttagcc

SEQ ID NO: 142583 - DNA, 421 bp, Arabidopsis thaliana
gttctccagggtaatgcgatggtgcttcctaaatacaacatgaacgctaacgagatcttgtactgcactggaggacaaggaaggatccaagtggtcaacgacaacggacagaacgtgttggaccaacaggtgcagaagggacagctcgtggtcatcccacaagggttcgcatacgttgtccagtcccacggaaacaagttcgagtggatctctttcaaaactaatgaaaacgcaatgatcagcactttggcgggtagaacctcgctcttgagggcattgccattggaggtcatatcaaatggtttccagatctctcccgaggaagctaggaagatcaagttcaacacacttgagaccactttgacccgcgctgccggtaggcaacaacaacagttgatcgaggagattgtcgaggcttaaa

SEQ ID NO: 142584 - DNA, 421 bp, Arabidopsis thaliana
atttgatttttatttttctctctcaaagtttttcttgggagagcaacaatggcgatgaggaagcttttatcgaagaaactcttcaatatcacgaatgttgcttcacagagtcttatgaattgtcgcatttcgtcttcttcgttagccgtacgaaccagagttccgaatgattcaacagatacaaccaaaatcgcaccggagcctggagatttggcgatgtcgcgaaggttcatgcataacagtgctatgattaggccggcggagattatgcagatgccggtgggagagagtttgattgagaaactccgtgagattgatggaagcaaggatcggattcgattagacggactttctccgccggagagggagacgagtttgacggtggcggatacgaagaagctgcttagagcggcgcagatcg

SEQ ID NO: 142585 - DNA, 405 bp, Arabidopsis thaliana
ggaagaaaaatgggtcgagtctcatctattatctctttctctttgacactcttgatcctcttcaatggctacactgcccaacagtggcccaacgagtgccagctcgatcaactcaatgcgctcgaaccatcccaaatcatcaagagcgagggtggtcgcatcgaggtctgggaccaccatgcaccccagctccgttgctccggctttgcctttgagcgtttcgtcattgagcctcagggtcttttcttgcccactttcttgaacgccggcaaactcacgtttgttgttcacggaaggggtctaatgggaagagttattccgggatgcgccgagacgttcatggagtcaccggtatttggagaaggtcaaggtcagggtcagagtcaagggttccgtgacatgcac

SEQ ID NO: 142586 - DNA, 400 bp, Arabidopsis thaliana
aagaaaatggttaagctcagcaatctcctcgttgcaaccttcggggttctcctcgtccttaacggctgccttgcgaggcagtcacttggggttcctcctcagctacagaacgagtgtaacctcgacaacctagatgttctccaagccaccgaaactatcaagagtgaagccggtcagatcgagtactgggaccacaaccaccctcagctccgatgtgttggtgtttccgttgctcgttatgtaattgaacaaggcggtctttacttgcccaccttcttcacttccccaaaaatttcctacgtcgttcaaggaacgggtatcaacggaagagtggtccctggatgtgcctagacctttatggactctcagccgatgcatggacaacaacaaggcccaccat

SEQ ID NO: 142587 - DNA, 417 bp, Arabidopsis thaliana
aatcaataaagaggaagaaaaatgggtcgagtctcatctattatctctttctctttgacactcttgatcctcttcaatggctacactgcccaacagtggcccaacgagtgccagctcgatcaactcaatgcgctcgaaccatcccaaatcatcaagagcgagggtggtcgcatcgaggtctgggaccaccatgcaccccagctccgttgctccggctttgcctttgagcgtttcgtcattgagcctcagggtcttttcttgcccactttcttgaacgccggcaaactcacgtttgttgttcacggaaggggtctaatgggaagagttattccgggatgcgccgagacgttcatggagtcaccggtatttggagaaggtcaaggtcagggtcagagtcaagggttccgtgacatgcac

SEQ ID NO: 142588 - DNA, 381 bp, Arabidopsis thaliana
ggttaagctcagcaatctcctcgttgcaaccttcggggttctcctcgtccttaacggctggcttgcgaggcagtcacttggggttcctcctcagctacagaacgagtgtaacctcgacaacctagatgttctccaagccaccgaaactatcaagagtgaagccggtcagatcgagtactgggaccacaaccaccctcagctccgatgtgttggtgtttccgttgctcgttatgtaattgaacaaggcggtctttacttgcccaccttctttactttcacaaaaatttaatacgtcgttcaaggaacgggtatcagcggaagagtggtccctggatgtgccgagaccttcatggactcgcagccgatgcaaggacaacaaca

SEQ ID NO: 142589 - DNA, 293 bp, Arabidopsis thaliana
aacgagcacacagaaactgcttaagctcagcagtctactaggtgcaaccttcggggggctcctcgtccattaactggtgccttgcgaggcactcacttggggttgcttctaactgcagaacgagcgtgccctgggacaacctaggtgttctggaggccaccgaaactataaagagtgaagccgttcagatcgagtactgggaccacaaccactcatagatgcgatgtgttggcgattccaacggtcgatgagttatagcgcatggcaagatgctcttggccatctattgaact

SEQ ID NO: 142590 - DNA, 415 bp, Arabidopsis thaliana
aacaaacaaaaagaaaatggttaagctcagcaatctcctcgttgcaaccttcggggttctcctcgtccttaacggctgccttgcgaggcagtcacttggggttcctcctcagctacagaacgagtgtaacctcgacaacctagatgttctccaagccaccgaaactatcaagagtgaagccggtcagatcgagtactgggaccacaaccaccctcagctccgatgtgttggtgtttccgttgctcgttatgtaattgaacaaggcggtctttacttgcccaccttcttcacttccccaaaaatttcctacgtcgttcaaggaacgggtatcagcggaagagtggtccctggatgtgccgagaccttcatggactcgcagccgatgcaaggacaacaacaaggccaaccatggcaa

SEQ ID NO: 142591 - DNA, 97 bp, Arabidopsis thaliana
caacaaatacttttacgaaaaaatgcttttaaacttatctagtatcgcttgatacacaattgaagaaagaaatggcatacaaccaacagagcttcaa

SEQ ID NO: 142592 - DNA, 369 bp, Arabidopsis thaliana
aaatcatacacacatagcaaaaaatggtatacattttgtttctcgtctgctcacctctcggtgtgtgttttctcctaaccaacgcttccatttaccgcaccgtcgttgtgatctaataatatgacaccactaaccccatatgcccagaaattatgaaatagcccatggagtttcataaagaacaacatctaagagcttgccagtattgatgcttcatcacgcaaggcacggccgtatttattagtttgatttctaagactacttgtaaaacccacatggtcaacagcaggagcatcattttttcctatattgctgctacaagctttattaggatgagccagattgtgtttgccccaccttgtaactagc

SEQ ID NO: 142593 - DNA, 424 bp, Arabidopsis thaliana
aacaaacaaaaagaaaatggttaagctcagcaatctcctcgttgcaaccttcggggttctcctcgtccttaacggctgccttgcgaggcagtcacttggggttcctcctcagctacagaacgagtgtaacctcgacaacctagatgttctccaagccaccgaaactatcaagagtgaagccggtcagatcgagtactgggaccacaaccaccctcagctccgatgtgttggtgtttccgttgctcgttatgtaattgaacaaggcggtctttacttgcccaccttcttcacttccccaaaaatttcctacgtcgttcaaggaacgggtatcagcggaagagtggtccctggatgtgccgagacctttatggactcgcagccgatgcaaggacaacaacaaggccaaccatggcaaggacgacag

SEQ ID NO: 142594 - DNA, 367 bp, Arabidopsis thaliana
caacactgctcacagacatggcgtcaaagtattggggactttcatcacagaatgggacgaaggaaaagctacctgcaaagagttgttggccacaaaggaatctgcgcagatgtatgcagagcgtttggctgaacttgctgctgctcttggctttgatggctggctgataaatatagagaatgtaatagatgaaattcaaattccaaatttgatggtttttgtaagccatctaacaaaagttatgcattcatttgtacctggaggcttagttatatggtatgatagagtcactattcgatggtcatcttgcttggcatgatcagctaaccttataataattaacctttctttgatttatgctatggta

SEQ ID NO: 142595 - DNA, 425 bp, Arabidopsis thaliana
aacaaaaagaaaatggttaagctcagcaatctcctcgttgcaaccttcggggttctcctcgtccttaacggctgccttgcgaggcagtcacttggggttcctcctcagctacagaacgagtgtaacctcgacaacctagatgttctccaagccaccgaaactatcaagagtgaagccggtcagatcgagtactgggaccacaaccaccctcagctccgatgtgttggtgtttccgttgctcgttatgtaattgaacaaggcggtctttacttgcccaccttcttcacttccccaaaaatttcctacgtcgttcaaggaacgggtatcagcggaagagtggtccctggatgtgccgagaccttcatggactcgcagccgatgcaaggacaacaacaaggccaaccatggcaaggacgacagggaca

SEQ ID NO: 142596 - DNA, 224 bp, Arabidopsis thaliana
gtcggcttgatcaaactaaagcgcttggaccatccgcaaatattaaaaaccaggggggtcggattcaggtctgggaccaccatgcaccccaactccgttgcttcggctttggctatgagcgtttcgtcattgagcctcaaggtctttactttgcccacttttcttgaaacgccgtgcaaacatcacgttttggtggttcaacgggaagggggtcttaaatgggg

SEQ ID NO: 142597 - DNA, 413 bp, Arabidopsis thaliana
ctctcttctctctccaaaatctttcagagaggagagcttgataatcgttttgtctccggtttgatccggatttgtttatattctcgtctctatgcgagatcaataatttccgattacatatcggatcttctgttaccggctatgaccggtcttttctccgtttttaacggaacttgatctctatctccatcgttgctcacccatcgatctcaacgttttcttccaagatttttgttgtctccatttcttcgtggattaacatcttcgtcacctccgattgctcaagacgcaagagcaaaaatggactttagactacatcaagatagatgtagtcggtggtggagtctcccgaaactggtgattccaaagaatttatgaagcagctctaccctttaatccggtaaatgatttcg

SEQ ID NO: 142598 - DNA, 391 bp, Arabidopsis thaliana
gtttcattgaaaatttcaagaaccctagttaataacgataatgggttcgagagttttggcttccttctttgttttcttaatcttcacggtcatcacattgcctcccacgatccaagcttgcactccttgtactcgtcctcatcctccggttccgaaacctccacaacacggcggtggtggaggtggtggtagcaagccgcctccacatcacggtggaaaaggtggtggtaaacccccaccccacggtggaaaaggtggaggaccgccgcatcatggtggaggaggaggaggaggagggaaatcaccgtcggttgttagacctcctcccgtagtggtgaggccaccgccaatcataagaccttctccggtcgtctatccaccaccaattgtg

SEQ ID NO: 142599 - DNA, 413 bp, Arabidopsis thaliana
aaaatgggtcgagtctcatctattatctctttctctttgacactcttgatcctcttcaatggctacactgcccaacagtggcccaacgagtgccagctcgatcaactcaatgcgctcgaaccatcccaaatcatcaagagcgagggtggtcgcatcgaggtctgggaccaccatgcaccccagctccgttgctccggctttgcctttgagcgtttcgtcattgagcctcagggtcttttcttgcccactttcttgaacgccggcaaactcacgtttgttgttcacggaaggggtctaatgggaagagttattccgggatgcgccgagacgttcatggagtcaccggtatttggagaaggtcaaggtcagggtcagagtcaagggttccgtgacatgcaccagaaagtagagca

SEQ ID NO: 142600 - DNA, 386 bp, Arabidopsis thaliana
ctcacttcccttctccaacctttaaacatttctctcaaaatggagtcgtacactttatccacctcttccatctcctacgccaaacctctttcaccgctcctcctcacggcggagcaaccttccttcatcctccgcaacatcactctcacctctcatccttcccaaatcctcgccattattggccctagcggcgccggaaaatcaactctccttgatatccttgccgcaagaacctccccgacctcaggctcaatacttctaaactccgtccttattaacccttcttcttaccgtaaaatctcctcctacgttcctcaacacgacaccttcttccctctcctcaccgtctccgagaccttcactttctccgcctctctcttgctccc

SEQ ID NO: 142601 - DNA, 423 bp, Arabidopsis thaliana
catacacacatagcaaaaaatggcaaacaagttgttcctcgtctgcgcagctctcgctctctgcttcctcctcaccaacgcttccatctaccgcaccgtcgttgagttcgaagaagatgacgccactaaccccataggcccaaaaatgaggaaatgccgcaaggagtttcagaaagaacaacacctaagagcttgccagcaattgatgctccagcaagcaaggcaaggccgtagcgatgagtttgatttcgaagacgacatggagaacccacagggacaacagcaggaacaacagctattccagcagtgctgcaacgagcttcgccaggaagagccagattgtgtttgccccaccttgaaacaagctgccaaggccgttagactccagggacagcaccaaccaatgcaagtcaggaaaattta

SEQ ID NO: 142602 - DNA, 379 bp, Arabidopsis thaliana
aatataaatagtgagcgcataacatcttctagacatgagactaacactctcgatcctgtttcatggttacgcggtttatcaggcgaaggatggtgatatggaccaaaacaagaaggagatcggccagctcaatgcgctcgagccttcaaacgtactgaggagcgaggctggtgcactaccagcgtggaagaaccacgctattaaggcggggagttcaaatgactgctgggctcagagcatcatgaggtctaagggtttctacttgcgatacattattaacaccgcgaagctgtccatcgttgctaaaggacgaggtcgtattgtaaaagggatcctttaatgcgccgaaacatgaacagacttatgagagatctaacca

SEQ ID NO: 142603 - DNA, 416 bp, Arabidopsis thaliana
ggttcacagcaacaacaagaacagaaaaacttgtggagcgggttcgacgcacaggtcatagctcaagcattgaaaattgacgttcagttggctcagcagcttcagaaccaacaagacagcagaggaaacatcgttcgtgttaagggacctttccaggtcgtgaggccacctctaagacagccctacgagagcgaggagtggagacacccacgtagcccacagggcaacggccttgaggagactatctgcagcatgaggtcccacgagaacattgacgaccctgctcgtgctgacgtgtacaagcccagcctaggtcgcgtgaccagcgtcaacagctataccttgcccatcttggagtatgtcaggctcagtgccactcgtggcgttcttcagggtaatgcgatggtgcttcctaa

SEQ ID NO: 142604 - DNA, 418 bp, Arabidopsis thaliana
gaaaatggttaagctcagcaatctcctttttgcaaccttcggggttctcctcgtccttaacggctgccttgcgaggcagtcacttggggttcctcctcagctacagaacgagtgtaacctcgacaacctagatgttctccaagccaccgaaactatcaagagtgaagccggtcagatcgagtactgggaccacaaccaccctcagctccgatgtgttggtgtttccgttgctcgttatgtaattgaacaaggcggtctttacttgcccaccttcttcacttccccaaaaatttcctacgtcgttcaaggaacgggtatcagcggaagagtggtccctggatgtgccgagaccttcatggactcgcagccgatgcaaggacaacaacaaggccaaccatggcaaggacgacagggacaa

SEQ ID NO: 142605 - DNA, 413 bp, Arabidopsis thaliana
aaacaaccagcagggaggctttggcggttcacagcaacaacaagaacagaaaaacttgtggagcgggttcgacgcacaggtcatagctcaagcattgaaaattgacgttcagttggctcagcagcttcagaaccaacaagacagcagaggaaacatcgttcgtgttaagggacctttccaggtcgtgaggccacctctaagacagccctacgagagcgaggagtggagacacccacgtagcccacagggcaacggccttgaggagactatctgcagcatgaggtcccacgagaacattgacgaccctgctcgtgctgacgtgtacaagcccagcctaggtcgcgtgaccagcgtcaacagctataccttgcccatcttggagtatgtcaggctcagtgccactcgtggcgttc

SEQ ID NO: 142606 - DNA, 265 bp, Arabidopsis thaliana
aatcatacacacatagcaaaaaatggcaaacatgtttgtcctcgtctgcgcagctctcgctgtgtgcttcctcctcaccaacgcttccatctaccgcaccgttgttgagttcgaagaagatgacgccactaaccccatatgcccaaaaatgaggaaatgccgccaggggtttccgatagaacgacacctaaaagcttgccagcaattgatgctccagctaagcatggctaggccgtatcgatgagtttgatttcgaagactacat

SEQ ID NO: 142607 - DNA, 421 bp, Arabidopsis thaliana
ccaaaaccaactcgaccgcaaccctagagtgttccatttggccggaaacaaccagcagggaggctttggcggttcacagcaacaacaagaacagaaaaacttgtggagcgggttcgacgcacaggtcatagctcaagcattgaaaattgacgttcagttggctcagcagcttcagaaccaacaagacagcagaggaaacatcgttcgtgttaagggacctttccaggtcgtgaggccacctctaagacagccctacgagagcgaggagtggagacacccacgtagcccacagggcaacggccttgaggagactatctgcagcatgaggtcccacgagaacattgacgaccctgctcgtgctgacgtgtacaagcccagcctaggtcgcgtgaccagcgtcaacagctataccttgcccatc

SEQ ID NO: 142608 - DNA, 424 bp, Arabidopsis thaliana
ctccatccgtaaaaacgctatggtgctaccgcaatggaacgtaaacgcaaacgcggcactctacgtgacaaacggaaaggctcatatacaaatggtgaacgacaacggagaaagagtgttcgaccaagagatctccagcggacagttactagtcgtgccacaaggcttttcggtcatgaaacatgccataggcgaacagttcgagtggatcgaattcaagacaaacgaaaacgcacaggtcaacacactcgcgggccgtacctcagtcatgagaggtttgccgcttgaggttataaccaatgggtaccagatctctcccgaagaagctaaacgagtaaagtttagcacgattgagaccacactgacccatagcagtccaatgagctacggaaggcctagggcttgaggcttgatgagcgcgttg

SEQ ID NO: 142609 - DNA, 396 bp, Arabidopsis thaliana
atggattcttcttatctaaccaagcttgtgttttttggtcgtctcctcctgctcacatttgcggacaaccttgtggctggaaaatctcgcaaagtgaacctcaacctttactacgaatcacttcgtcccggctgtcaggaattcatcgtcgttgacctacgtgaaatctttgactacaacctgtacacaatcaccggtctcaagctgttttcatttggtcatgccgaaccccacagataatcgactgtcacttgccaacctggtgaatgaggaagtcaaacttaacgcccttgaagcttgcgcattaagaacttggcccgatcagaaatcacattacttttttatacagtgcgtccaaagcgatactaaaggctgggattcactttttaaaacttt

SEQ ID NO: 142610 - DNA, 422 bp, Arabidopsis thaliana
agcttactgactctcttgtgtatcgctctctcctcatttccattaaccctccaattttcccgcctttgtctcactctcttcccgccttgcactcgccggggactccatggttcagaagcagcaagcctccgccggtccgggtaccgagcctaagaagcgtcgccgtgtcggattttctcccgccgatactggtgtcgaggctaacgagtgcatcaaaatttatctcgtttcaagcaaagaggaagttgattcctctgatatttccagcgtgaagccagttgacttgaatgatttctttgatggagatggcaagatttatggttaccaaggtttgaagataaatgtatggatcaatagcatctcattacattcatatgctgatatcacataccagagcaccattaacggagacaaaggcatta

SEQ ID NO: 142611 - DNA, 427 bp, Arabidopsis thaliana
attgaataaaaatttccatcaaaactcctttgatataattgctatgcttagtgtgtgactcgttggtttaggattagataaagataaaaaaaaagaaaaaagaacttacctataacagaaactaataactatagcattaataaataacctaagcaactcattgcttcacattatctggataaaaaaatcagtcaagatatgatggattgatcatattattgtagcaactgaaaaaaaaaaagaataaagaactataattataagttatgaaaggtaatcgaaaagtatgcggattcagtggaaggatgaaagaaagagagaaaaaattgaatattaatgatatattattccaatttggaaagtctatgaggtcactgtaagaaaagcaatgtaataaagcatcaatacagattcattcagaataatt

SEQ ID NO: 142612 - DNA, 419 bp, Arabidopsis thaliana
gttatgtaattgaacaaggcggtctttacttgcccaccttcttcacttccccaaaaatttcctacgtcgttcaaggaacgggtatcagcggaagagtggtccctggatgtgccgagaccttcatggactcgcagccgatgcaaggacaacaacaaggccaaccatggcaaggacgacagggacaacaaggccaaccatgggaaggacagggacaacagggacaacaaggaagacaaggccaaccatgggaaggacagggacaacagggacaacaaggacgacagggacaacaaggccaaccatgggaaggacagggacagcagggacaacaagggttccgtgacatgcaccaaaaggtggaacatgtgagacgcggagacgtctttgccaacactccaggctctgcccactggatctac

SEQ ID NO: 142613 - DNA, 424 bp, Arabidopsis thaliana
caaaaagaaaatggttaagctcagcaatctcctcgttgcaaccttcggggttctcctcgtccttaacggctgccttgcgaggcagtcacttggggttcctcctcagctacagaacgagtgtaacctcgacaacctagatgttctccaagccaccgaaactatcaagagtgaagccggtcagatcgagtactgggaccacaaccaccctcagctccgatgtgttggtgtttccgttgctcgttatgtaattgaacaaggcggtctttacttgcccaccttcttcacttccccaaaaatttcctacgtcgttcaaggaacgggtatcagcggaagagtggtccctggatgtgccgagaccttcatggactcgcagccgatgcaaggacaacaacaaggccaaccatggcaaggacgacagggacat

SEQ ID NO: 142614 - DNA, 423 bp, Arabidopsis thaliana
gtcgagacggctcagcagctccagaaccagcaagataaccgtggcaacatcgtcaaggtcaacggacctttcggcgtcattaggccacccttgagacgcggcgaaggcggccaacaaccacatgaaatagctaatggtttagaggagactttgtgcaccatgcgatgcactgaaaacctcgatgacccgtcggatgctgacgtgtacaagccatcactcggatacattagcacacttaacagctacaatcttcctatcctcagacttctccgccttagcgctcttcgtggctccatccgtaaaaacgctatggtgctaccgcaatggaacgtaaacgcaaacgcggcactctacgtgacaaacggaaaggctcatatacaaatggtgaacgacaacggagaaagagtgttcgaccaagagatc

SEQ ID NO: 142615 - DNA, 417 bp, Arabidopsis thaliana
aaacaaaaagaaaatggttaagctcagcaatctcctcgttgcaaccttcggggttctcctcgtccttaacggctgccttgcgaggcagtcacttggggttcctcctcagctacagaacgagtgtaacctcgacaacctagatgttctccaagccaccgaaactatcaagagtgaagccggtcagatcgagtactgggaccacaaccaccctcagctccgatgtgttggtgtttccgttgctcgttatgtaattgaacaaggcggtctttacttgcccaccttcttcacttccccaaaaatttcctacgtcgttcaaggaacgggtatcagcggaagagtggtccctggatgtgccgagaccttcatggactcgcagccgatgcaaggacaacaacaaggccaaccatggcaaggacg

SEQ ID NO: 142616 - DNA, 420 bp, Arabidopsis thaliana
caaatagcaaaacatggctaacaagctcttcctcgtctgcgcaactctcgccctctgcttcctcctcaccaacgcttccatctaccgcaccgttgtcgaattcgaagaagatgacgccagcaaccccgtaggtccaagacagagatgccagaaggagtttcagcaatcacaacacctaagagcttgccagagatggatgagcaagcaaatgaggcaaggacgtggtggtggtccttccctcgacgatgagttcgatttcgagggcccccagcagggataccagctactccagcagtgctgcaacgagcttcgccaggaagagccagtttgcgtttgccccaccttgaaacaagctgccagggcagttagcctccagggacagcacggaccattccaatccaggaaaatttaccagtcagc

SEQ ID NO: 142617 - DNA, 249 bp, Arabidopsis thaliana
ctcgtacttaacagctgccttgcgaggcagtcacttgtggttcctcctcatctacagaacgaggggtacctctacaacctagatgatcttcaagccaccgaaactatcaagagtgaagccggtcagatcgagtactgggaccacaaccaccctcagtttcgatgtggtggggttttcagtgctcgctatgtaattgaacaaggcgggctttactttgcccaccctcttcacttcctcaaaaaattttcc

SEQ ID NO: 142618 - DNA, 418 bp, Arabidopsis thaliana
aagaggaagaaaaagggtcgagctatctattatctctttctctttgacactcttgatcctcttcaatggctacactgcccaacagtggcccaacgagtgccagctcgatcaactcaatgcgctcgaaccatcccaaatcatcaagagcgagggtggtcgcatcgaggtctgggaccaccatgcaccccagctccgttgctccggctttgcctttgagcgtttcgtcattgagcctcagggtcttttcttgcccactttcttgaacgccggcaaactcacgtttgttgttcacggaaggggtctaatgggaagagttattccgggatgcgccgagacgttcatggagtcaccggtatttggagaaggtcaaggtcagggtcagagtcaagggttccgtgacatgcaccaagaagtagag

SEQ ID NO: 142619 - DNA, 390 bp, Arabidopsis thaliana
agaaaatggttaagctcagcaatctacacgttttatccttcggggttctcctcggccttaacggctgccttgcgaggcagtcacttggggttcctcctcagctacagaacgagtgtaacctcgacaacctagatgttctccaagccaccgaaactatcaagagtgaagccggtcagatcgagtactgggaccacaaccaccctcagcttcgatgtgttggcgtttccgttgctcgttatgtaattgaacaaggcggactttacttgcccaccttcttcacttccccaaaaatttcctacgtcgttcaaggaacgggtatcagcggaagagtgtgccctggatgtgccgagaccttcatggactcgcaggcgatgcatggacaacaacaag

SEQ ID NO: 142620 - DNA, 200 bp, Arabidopsis thaliana
acgcgaagaaaaatgggtcgagtctcatctattatctctttctctttgacactcttgatcctcttcaatggctacactgcccaacagtggcccaacgagggccagcttgatcaaattaatggccctcgaaccatcccaaaatcaatcaagagcgaggggtgggtcgccatcgagggtctggggaaccaaccatgcaaccc

SEQ ID NO: 142621 - DNA, 421 bp, Arabidopsis thaliana
aacaaaaagaaaatggttaagctcagcaatctcctcgttgcaaccttcggggttctcctcgtccttaacggctgccttgcgaggcagtcacttggggttcctcctcagctacagaacgagtgtaacctcgacaacctagatgttctccaagccaccgaaactatcaagagtgaagccggtcagatcgagtactgggaccacaaccaccctcagctccgatgtgttggtgtttccgttgctcgttatgtaattgaacaaggcggtctttacttgcccaccttcttcacttccccaaaaatttcctacgtcgttcaaggaacgggtatcagcggaagagtggtccctggatgtgccgagaccttcatggactcgcagccgatgcaaggacaacaacaaggccaaccatggcaaggacgacagg

SEQ ID NO: 142622 - DNA, 421 bp, Arabidopsis thaliana
agaaaaatgggtcgagtctcatctattatctctttctctttgacactcttgatcctcttcaatggctacactgcccaacagtggcccaacgagtgccagctcgatcaactcaatgcgctcgaaccatcccaaatcatcaagagcgagggtggtcgcatcgaggtctgggaccaccatgcaccccagctccgttgctccggctttgcctttgagcgtttcgtcattgagcctcagggtcttttcttgcccactttcttgaacgccggcaaactcacgtttgttgttcacggaaggggtctaatgggaagagttattccgggatgcgccgagacgttcatggagtcaccggtatttggagaaggtcaaggtcagggtcagagtcaagggttccgtgacatgcaccagaaagtagagcacctac

SEQ ID NO: 142623 - DNA, 417 bp, Arabidopsis thaliana
aatggctcgagtctcttctcttctttctttcttcttaacacttttgatccttttccatggctacgcggctcaacagggtcagcagggtcagcagtttccgaacgagtgccagctcgaccagctcaatgcgctcgagccgtcacacgtactgaagagcgaggctggtcgcatcgaggtgtgggaccaccacgctcctcagctccgttgctcaggtgtctcctttgcacgttacatcatcgagtctaagggtctctacttgccctctttctttaacaccgcgaagctctctttcgtggctaagggacgaggtcttatgggaaaagtgatccctggatgcgccgaaacattccaagactcatcagagttccaaccacgcttcgaaagtcaaggtcaaagccagaggttccgtgacatgca

SEQ ID NO: 142624 - DNA, 235 bp, Arabidopsis thaliana
acgcgtacgcatacacagatcgcagatcgtggctaccaagctcttactcgtctgtgcaacgctggcccgctgtttgctcctgaccaacgcttccatgtaccgcaccgttgctgcagtcctagaacatgactccagcgtccctgtaagttcatgacagagatgccagtaggagtctaagcaatcacaacgcctaggaggttgccggaggtggattagccagcaaatgatgcaagga

SEQ ID NO: 142625 - DNA, 354 bp, Arabidopsis thaliana
ctctccttcgtggctaaaggacgaggtcttatgggaaaagtgatccctggatgcgccgaaacattccaagactcatcagagttccaaccacgcttcgaaggtcaaggtcaaagccagaggttccgtgacatgcaccagaaagtggagcacattaggagcggtgataccattgccacaacacccggtgtagcccagtggttctacaacgacggacagcaaccacttgtcatcgtcagcatcttcgatctagccagtcaccagaaccagcttgaccgcaacccaaggccattttacttagccggaaacaacccacaaggtcaagtatggctacaaggacgagagcaacagccacag

SEQ ID NO: 142626 - DNA, 416 bp, Arabidopsis thaliana
gtctagagacaaagagagagagagatggggtcaaagacggagatgatggagagagacgcaatggctacggtggctccctatgcgccggtcacttaccatcgccgtgctcgtgttgacttggatgatagacttcctaaaccttatatgccaagagcattgcaagcaccagacagagaacacccgtacggaactccaggccataagaattacggacttagtgttcttcaacagcatgtctccttcttcgatatcgatgataatggcatcatttacccttgggagacctactctggactgcgaatgcttggtttcaatatcattgggtcgcttataatagccgctgttatcaacctgacccttagctatgccactcttccggggtggttaccttcacctttcttccctatatacataca

SEQ ID NO: 142627 - DNA, 410 bp, Arabidopsis thaliana
aaaagaaaatggttaagctcagcaatctcctcgttgcaaccttcggggttctcctcgtccttaacggctgccttgcgaggcagtcacttggggttcctcctcagctacagaacgagtgtaacctcgacaacctagatgttctccaagccaccgaaactatcaagagtgaagccggtcagatcgagtactgggaccacaaccaccctcagctccgatgtgttggtgtttccgttgctcgttatgtaattgaacaaggcggtctttacttgcccaccttcttcacttccccaaaaatttcctacgtcgttcaaggaacgggtatcagcggaagagtggtccctggatgtgccgagaccttcatggactcgcagccgatgcaaggacaacaacaaggccaaccatggcaagga

SEQ ID NO: 142628 - DNA, 329 bp, Arabidopsis thaliana
ctacgcagaaataacaaaatggctcgagtctcttctcttctttctttcttcttaacacttttgatccttttccatggctacccggctcaacagggtcagcacggtcagcagcttccgaacgagtgccagatcgaccagctcaatgcgctcgagccgtcacacgtactgaagagcgaggctggtcgcatcgaggtgtgggaccaccacgctcctcagctacgttgctcaggtgttttctttgcacgttacatcatcgagtctaaggggctctacttgccctctttctttaacaccgggaagctctctttcgtggcttagggaccaggact

SEQ ID NO: 142629 - DNA, 428 bp, Arabidopsis thaliana
aacgagtaagaatacaaatacaaatagcaaaaaaaatggcaaacaagctcttcctcgtctgcgcaactttcgccctctgcttcctcctcaccaacgcttccatctaccgcactgttgtcgagttcgacgaagatgacgccagcaaccccatgggcccaagacagaaatgtcagaaggagtttcagcaatcacagcacctaagagcttgccagaaattgatgcgcatgcaaatgaggcaaggccgtggtggtggtccctccctcgacgatgagttcgatttggaagacgacatcgagaacccacaaggcccccagcagggacaccagatcctccagcagtgctgcagcgagcttcgccaggaagagccagtttgtgtttgccccaccttgagacaagctgccagggcccgtagcctccagggacaacac

SEQ ID NO: 142630 - DNA, 409 bp, Arabidopsis thaliana
ggacaacaaggccaaccatgggaaggacaggtacagcagggacaacaagggttccgtgacatgcaccagaaggtggaacatgtgagacgcggagacttctttgccaacactccaggctctgcccactggatctacaactcaggagaacagccacttgtcatcatcgctcttctcgacatcgtcaactaccaaaaccaactcgaccgcaaccctagagtgttccatttggccggaaacaaccagcagggaggctttggcggttcacagcaacaacaagaacagaaaaacttgtggagcgggttcgacgcacaggttatagctcaagcattgaaaattgacgttcagttggctcagcagctttagaaccaacaagacagcagaggaaacatcgtttgtgttaagggacctt

SEQ ID NO: 142631 - DNA, 419 bp, Arabidopsis thaliana
agaaaacatacacaaatagcaaaacatggctaacaagctcttcctcgtctgcgcaactctcgccctctgcttcctcctcaccaacgcttccatctaccgcaccgttgtcgaattcgaagaagatgacgccagcaaccccgtaggtccaagacagagatgccagaaggagtttcagcaatcacaacacctaagagcttgccagagatggatgagcaagcaaatgaggcaaggacgtggtggtggtccttccctcgacgatgagttcgatttcgagggcccccagcagggataccagctactccagcagtgctgcaacgagcttcgccaggaagagccagtttgcgtttgccccaccttgaaacaagctgccagggcagttagcctccagggacagcacggaccattccaatccaggaaaa

SEQ ID NO: 142632 - DNA, 414 bp, Arabidopsis thaliana
tgttctccaagccaccgaaactatcaagagtgaagccggtcagatcgagtactgggaccacaaccaccctcagctccgatgtgttggtgtttccgttgctcgttatgtaattgaacaaggcggtctttacttgcccaccttcttcacttccccaaaaatttcctacgtcgttcaaggaacgggtatcagcggaagagtggtccctggatgtgccgagaccttcatggactcgcagccgatgcaaggacaacaacatggccaaccatggtaaggacgacagggacaacaaggccaaccatgggaaggacagggacaacagggacaacaaggaagacatggccaaccatgggaaggacagggtcatcagggacaacaaggtcgacagggacaacaaggccaaccatgggaaggaca

SEQ ID NO: 142633 - DNA, 271 bp, Arabidopsis thaliana
acgcgtccgtcacagtggaacgccaacgcgtacgccattctttacgtgacagacggctaagctgagatacagatcgttaacgacaatggcaacagaatgtttgacggacaagtatttcaaggacagctcatagacgtaccacaaggtttctcggtggtgcaacgaccgacaagcaaccgattgtcagagggttgagttgaaaacaaacgcatacgcgcaaatgaacactcttgcgggacgaacctcacgcttgagaggtttaccacttgaa

SEQ ID NO: 142634 - DNA, 300 bp, Arabidopsis thaliana
gacgccagcaaccccgtaggtccaagacagagatgccagaaggagtttcagcaatcacaacacctaagagcttgccagagatggatgagcaagcaaatgaggcaaggacgtggtggtggtccttccctcgacgatgagttcgatttcgagggcccccagcagggataccagctactccagcagtgctgcaacgagcttcgtcaggaagagccagtttgcgtttgccccaccttggaacaagctgtcagggcagttagcctccagggacagcacgggccattcccatccaggaaaatttac

SEQ ID NO: 142635 - DNA, 343 bp, Arabidopsis thaliana
cacgcgaaaacatacacaaatagcaaaacatgcctgacaggctcttcctcggctgcgcaactctcgccctctgcttcctcttgaccaacactgacatctaccgcaccgatgccaaattcgaagaagatgactccagtaaccccgtaggtccaagacagagatgccagaaggagtttcagcattcacaagaactgctgcctcgagctacatcagggagagcgagtatgaggtagggccaccttggaacaagttgcctgggcagttagcctgcatggacaggacggcacattggaatccaggtaattcaaccaggctgctacgagcttggccaacaatagccaga

SEQ ID NO: 142636 - DNA, 391 bp, Arabidopsis thaliana
gacatcgccaactaccaaaaccaactcgaccgcaaccctagagtgttccatttggccggaaacaaccagcagggaggctttggcggttcacagcaacaacaagaacagaaaaacttgtggagcgggttcgacgcacaggtcatagctcaagcattgaaaattgacgttcagttggctcagcagcttcagaaccaacaagacagcagaggaaacatcgttcgtgttaagggacctttccaggtcgtgaggccacctctaagacagccctacgagagcgaggagtggagacacccacgtagcccacagggcaacggccttgaggagactatctgcagcatgaggtcccacgagaacattgacgaccctgctcgtgctgacgtgtacaagccca

SEQ ID NO: 142637 - DNA, 416 bp, Arabidopsis thaliana
caaatagcaaaaaaaatggcaaacaagctcttcctcgtctgcgcaactttcgccctgtgcttcctcctcaccaacgcttccatctaccgcactgttgtcgagttcgacgaagatgacgccagcaaccccatgggcccaagacagaaatgtcagaaggagtttcagcaatcacagcacctaagagcttgccagaaattgatgcgcatgcaaatgaggcaaggccgtggtggtggtccctccctcgacgatgagttcgatttggaagacgacatcgagaacccacaaggcccccagcagggacaccagatcctccagcagtgctgcagcgagcttcgccaggaagagccagtttgtgtttgccccaccttgagacaagctgccagggccgttagcctccagggacaacacggaccatt

SEQ ID NO: 142638 - DNA, 418 bp, Arabidopsis thaliana
acaaggccaaccatgggaaggacagggtcaacagggacaacaaggacgacagggacaacaaggccaaccatgggaaggacagggacagcagggacaacaagggttccgtgacatgcaccagaaggtggaacatgtgagacgcggagacgtctttgccaacactccaggctctgcccactggatctacaactcaggagaacagccacttgtcatcatcgctcttctcgacatcgccaactaccaaaaccaactcgaccgcaaccctagagtgttccatttggccggaaacaaccagcagggaggctttggcggttcacagcaacaacaagaacagaaaaacttgtggagcgggttcgacgcacaggtcatagctcaagcattgaaaattgacgttcagttggctcaacagcttcagaac

SEQ ID NO: 142639 - DNA, 425 bp, Arabidopsis thaliana
acgccagaataggaaaccattcttttaaccttttcgttgacatactatgcattacagacgtatgggcattacgcttcaaccgggatattctattccacctcttataaagaaaagatcttaaattaaaatacttaatagcatggcgatacatttatacaaaacttctaccctgagcacacgcaatggagccgtatacagtcatgtgatattcaattcacaaaataatttgatttgtgggcagcatcattgtggtaaaggtcgtaatgccagaggaataattaccgaaaggcatatagggggaggtcataagcgtttataccgtataatatattttcgacgaaatgcaaaaaacaaaaatggttggaatcgttaccatagtattcgaccctaatcgaaatgcatacatttgtctcatacactatggg

SEQ ID NO: 142640 - DNA, 423 bp, Arabidopsis thaliana
cacaaagaaaatggttaagctcagcattcttctcgttgcaaccttcggggttctcctcgtccttaacggctgccttgcgaggcagtcacttggggttcctcctcagctacagaacgagtgtaacctcgacaacctagatgttctccaagccaccgaaactatcaagagtgaagccggtcagatcgagtactgggaccacaaccaccctcagctccgatgtgttggtgcttccgctgctcggtatgtaattgaacaaggcggtctttacttgcccaccttcttcactttcccaaaaatttcctacgtcgttcaaggaacgggtatcagcggaagagtggtccctggatgtgccgagaccttcatggactcgcaggcgatgcaaggacaacaacaaggtcaaccatggcaaggacgacagggaca

SEQ ID NO: 142641 - DNA, 398 bp, Arabidopsis thaliana
ggagtccctgtcgtcggttcgctacttgccttggctggattacttctagctggttcggtgatcggcttaatggttgctttaccactatttctcctcttcagcccggttatagtcccagcggctctaactatcgggcttgcaatgacaggctttttagcctcggggatgttcggtctaaccgggcttagctcaatctcatgggtcatgaactatcttcgtgggacaaggaggactgtgcctgagcaattggagtatgctaagaggagaatggctgatgcggttggctacgcaggacaaaagggcaaagaaatgggccagcatgtgcagaacaaggcccaagatgttaaacaatatgatatttctaagccacatgacactaccactaaaggtcatgagac

SEQ ID NO: 142642 - DNA, 417 bp, Arabidopsis thaliana
caaaaagaaaatggttaagctcagcaatctcctcgttgcaaccttcggggttctcctcgtccttaacggctgccttgcgaggcagtcacttggggttcctcctcagctacagaacgagtgtaacctcgacaacctagatgttctccaagccaccgaaactatcaagagtgaagccggtcagatcgagtactgggaccacaaccaccctcagctccgatgtgttggtgtttccgttgctcgttatgtaattgaacaaggcggtctttacttgcccaccttcttcacttccccaaaaatttcctacgtcgttcaaggaacgggtatcagcggaagaagggtccctgtatgtgccgagacctttatggactcgcagccgatgcaaggacaacaacaaggtcaaccatggcaaggacgaca

SEQ ID NO: 142643 - DNA, 452 bp, Arabidopsis thaliana
  unsure (1)..(452): unsure at all n locations
cgcagaacagcggcagcaaactttcagaaaccatatatgacatacccgtggaaaccatttgtccgagtcgcaagggcgccgttcggtnggtcattagnngccgcctttgtaggggccccagagacctcagtgtaggaggtaagaagtaagaagaagggactgacacggacgacactggtaatgggcttagaggnagacacatctgcatgcgccaggtnggcaccgataacctcgatgatctcgtctcgtgctgacgtgtacaagccacagctcggttacatcagcactctcaacagttacgatctccccatccttcgcttcatccgtctctcagccctccgtggatctatccgtcaaaacgcaatggtgctttcacagtggaacgcaaacgcgaacgccattctttacgtgacagacggtgaagcccaaatccagatcgtaaacgacaatgg

SEQ ID NO: 142644 - DNA, 325 bp, Arabidopsis thaliana
caacaaacaaaaagaaaatggttaagctcagcaatctcctcgttgcaaccttcggggttctcctcgtccttaacggctgccttgcgaggcagtcacttggggttccttctcagctacagaacgagtgtaacctcgacaacctagatgttctccaagccaccgaaactatcaagagtgaagccggtcagatcgagtactgggaccacaaccaccctcagctccgatgtgttggtgtttccgttgctcgttatgtaattgaacaaggtggtctttacttgcccaccttttttacttccccaaaaatttcctacgttgttcaaggaac

SEQ ID NO: 142645 - DNA, 306 bp, Arabidopsis thaliana
taaaaaatgaatctaagaccgtttatcgtgttaagagctcgaattcagacactgaagatctgcaaaggtttgtggatcagcgcctagagagcaatgaaaattcagatggtgtcgttgcttcgcctcctttacccacaaaagtcattaaggaaaatattttggatgatagtgactctggagaagtgaaggatataaagactgatgttaaatcaaaggctgattgttcatttgacttatcaaaaagagtagcatgctcaattgctaaccgaatgctcagtatgtatgtaaacggtagattttgtgtct

SEQ ID NO: 142646 - DNA, 302 bp, Arabidopsis thaliana
aaaaagaaaatggttaagctcagcaatttcctcgttgcaaccttcggggttctcctcgtccttaacggctgccttgcgaggcagtcacttggggttcctcctcagctacagaacgagtgtaacctcgacaacctagatgttctccaagccaccgaaactatcaagagtgaagccggtcagatcgagtactgggaccacaaccaccctcagctccgatgtgttggtgtttccgttgctcgttatgtaattgaacaaggcggtctttacttgcccaccttcttcactttcccaaaaatttccta

SEQ ID NO: 142647 - DNA, 419 bp, Arabidopsis thaliana
acaaggccgagagcaacagccacagaagaacattttcaatggatttggacccgagggtattgctcaagctttgaagatcgatcttcagacagcgcagcaacttcagaaccaagatgacaaccgtggaaacattgtccgagtccaaggcccgttcggtgtcattaggccgcctttgaggggccagagacctcatgaggaggaagaagaagaagaaggacgacatggacgacacggtattggcttataggagaccatctgctgcgccaggtgcaccgataaccttgatgacccgtcttgtgctgacgtgtacaagccacagttcggttacatcagcactcttaacagttacgatctccccttccttcgctttattcgtcttttcagacttccgtggattctattcgttaaaacgcaatggt

SEQ ID NO: 142648 - DNA, 406 bp, Arabidopsis thaliana
agaaaacatacacaaatagcaaaacatggctaacaagctcttcctcgtctgcgcaactctcgccctctgcttcctcctcaccaacgcttccatctaccgcaccgttgtcgaattcgaagaagatgacgccagcaaccccgtaggtccaagacagagatgccagaaggagtttcagcaatcacaacacctaagagcttgccagagatggatgagcaagcaaatgaggcaaggacgtggtggtggtccttccctcgacgatgagttcgatttcgagggcccccagcagggataccagctactccagcagtgctgcaacgagcttcgccaggaagagccagtttgcgtttgccccaccttgaaacaagctgccagggcagttagcctccagggacagcacggtccattc

SEQ ID NO: 142649 - DNA, 421 bp, Arabidopsis thaliana
ccgggatgcgccgagacgttcatggagtcaccggtatttggagaaggtcaaggtcagggtcagagtcaagggttccgtgacatgcaccagaaagtagagcacctacggtgcggtgacaccattgcaacaccatctggtgtagctcaatggttctacaacaatggaaatgagcctctcattcttgttgcagccgcggatctcgccagcaaccagaaccagcttgaccgcaaccttagaccatttttgatagccggaaacaacccacaagggcaggaatggctacaaggccgaaagcaacagaagcaaaacaacatcttcaatggcttcgcacctgagatcttggctcaagccttcaagatcaatgtcgagacggctcagcagctccagaaccagcaagataaccgtggcaacatcgtcaagg

SEQ ID NO: 142650 - DNA, 364 bp, Arabidopsis thaliana
agaaaatggttaagctcagcaatctcctcgttgcaaccttcggggttctcctcgtccttaacggctgccttgcgaggcagtcacttggggttcctcctcagctacagaacgagtgtaacctcgacaacctagatgttctccaagccaccgaaactatcaagagtgaagccggtcagatcgagtactgggaccacaaccaccctcagctccgatgtgttggtgtttccgttgctcgttatgtaattgaacaaggcggtctttacttgcccaccttcttcacttccccaaaaattgtcctacgtcgttcaaggaacgggtatcatcggaagagtggtccttggatgtgccgagaccttcatggact

SEQ ID NO: 142651 - DNA, 401 bp, Arabidopsis thaliana
aaagaaaatggttaagctcagcaatcttcctttttgcacccttcggggttctcctcggccttaacggctgccttgcgaggcagtcacttggggttcctcctcagctacagaacgagtgtaacctcgacaacctagatgttctccaagccaccgaaactatcaagagtgaagccggtcagatcgagtactgtgaccacaaccaccctcagctccgatgtgttggtgtttccgttgctcgttatgtaattgaacaaggcggtctttacttgcccaccttcttcacttccccaaaaatttcctacgtcgttcaaggaacgggtattagcggaagagtggtccctggatgtgccgagaccttcatggactcgcagccgatgcaaggacaacaacaaggccaacca

SEQ ID NO: 142652 - DNA, 402 bp, Arabidopsis thaliana
caaaaagaaaatggttaagctcagcaatctcctcgttgcaaccttcggggttctcctcgtccttaacggctgccttgcgaggcagtcacttggggttcctcctcagctacagaacgagtgtaacctcgacaacctagatgttctccaagccaccgaaactatcaagagtgaagccggtcagatcgagtactgggaccacaaccaccctcagctccgatgtgttggtgtttccgttgctcgttatgtaattgaacaaggcggtctttacttgcccaccttcttcacttccccaaaaatttcctacgtctgtcaaggaacgggtttcagcggaagagaggttcctggatgtgccgagacctttatggactctcagccgatgcaaggacaacaacaaggccaacc

SEQ ID NO: 142653 - DNA, 415 bp, Arabidopsis thaliana
cagtggtgcggtgaggagagcttcgttgtcttctccgattgcaattagggttttcaaaacgggtaatcgaattcggtggtgctcggctttgaaattgaggatgagatcctttccacttccttctacctgctgacaatgggcaactgcggtactagagacgaggctgccgtcttcactcctcaagctcaagcccaacagctccagaagaagcactcccgatccgtctcagatctgagcgatccatccactcctcgcttccgagacgactctcgcactcctatttcgtatgcccaagtcatcccctttactttgtttgagcttgagaccattaccaagagcttccgcccagattatatactcggagaaggtggtttcggtaccgtctacaagggttacattgatgacaatctccgcg

SEQ ID NO: 142654 - DNA, 415 bp, Arabidopsis thaliana
gttcgacgcacaggtcatagctcaagcattgaaaattgacgttcagttggctcagcagcttcagaaccaacaagacagcagaggaaacatcgttcgtgttaagggacctttccaggtcgtgaggccacctctaagacagccctacgagagcgaggagtggagacacccacgtagcccacagggcaacggccttgaggagactatctgcagcatgaggtcccacgagaacattgacgaccctgctcgtgctgacgtgtacaagcccagcctaggtcgcgtgaccagcgtcaacagctataccttgcccatcttggagtatgtcaggctcagtgccactcgtggcgttctccagggtaatgcgatggtgcttcctaaatacaacatgaacgctaacgagatcttgtactgcactgga

SEQ ID NO: 142655 - DNA, 418 bp, Arabidopsis thaliana
aaacgagtaagaatacaaatacaaatagcaaaaaaaatggcaaacaagctcttcctcgtctgcgcaactttcgccctctgcttcctcctcaccaacgcttccatctaccgcactgttgtcgagttcgacgaagatgacgccagcaaccccatgggcccaagacagaaatgtcagaaggagtttcagcaatcacagcacctaagagcttgccagaaattgatgcgcatgcaaatgaggcaaggccgtggtggtggtccctccctcgacgatgagttcgatttggaagacgacatcgagaacccacaaggcccccagcagggacaccagatcctccagcagtgctgcagcgagcttcgccaggaagagccagtttgtgtttgccccaccttgagacaagctgccagggccgttagccttc

SEQ ID NO: 142656 - DNA, 415 bp, Arabidopsis thaliana
caaaaagaaaatggttaagctcagcaatctcctcgttgcaaccttcggggttctcctcgtccttaacggctgccttgcgaggcagtcacttggggttcctcctcagctacagaacgagtgtaacctcgacaacctagatgttctccaagccaccgaaactatcaagagtgaagccggtcagatcgagtactgggaccacaaccaccctcagctccgatgtgttggtgtttccgatgctcgttatgtaattgaacaaggcggtctttacttgcccaccttcttcactttcccaaaaatttcctacgttgttcaaggaacgggtatcagcggaagagtggtccctggatgtgccgagaccttcatggactcgcagccgttgcaaggacaacaacaaggtcaaccatggcaaggacga

SEQ ID NO: 142657 - DNA, 421 bp, Arabidopsis thaliana
agaaaatggttaagctcagcaatctcctcgttgcaaccttcggggttctcctcgtccttaacggctgccttgcgaggcagtcacttggggttcctcctcagctacagaacgagtgtaacctcgacaacctagatgttctccaagccaccgaaactatcaagagtgaagccggtcagatcgagtactgggaccacaaccaccctcagctccgatgtgttggtgtttccgttgctcgttatgtaattgaacaaggcggtctttacttgcccaccttcttcacttccccaaaaatttcctacgtcgttcaaggaacgggtatcagcggaagagtggtccctggatgtgccgagaccttcatggactcgcagccgatgcaaggacaacaacaaggccaaccatggcaaggacgacagggacaaca

SEQ ID NO: 142658 - DNA, 420 bp, Arabidopsis thaliana
caaaaagaaaatggttaagctcagcaatctcctcgttgcaaccttcggggttctcctcgtccttaacggctgccttgcgaggcagtcacttggggttcctcctcagctacagaacgagtgtaacctcgacaacctagatgttctccaagccaccgaaactatcaagagtgaagccggtcagatcgagtactgggaccacaaccaccctcagctccgatgtgttggtgtttccgttgctcgttatgtaattgaacaaggcggtctttacttgcccaccttcttcacttccccaaaaatttcctacgtcgttcaaggaacgggtatcagcggaagagtggtccctggatgtgccgagaccttcatggactcgcagccgatgcaaggacaacaacaaggccaaccatggcaaggacgacaggg

SEQ ID NO: 142659 - DNA, 412 bp, Arabidopsis thaliana
cgtcgttcaaggaacgggtatcagcggaagagtggtccctggatgtgccgagaccttcatggactcgcagccgatgcaaggacaacaacaaggccaaccatggcaaggacgacagggacaacaaggccaaccatgggaaggacagggacaacagggacaacaaggaagacaaggccaaccatgggaaggacagggacaacagggacaacaaggacgacagggacaacaaggccaaccatgggaaggacagggacagcagggacaacaagggttccgtgacatgcaccagaaggtggaacatgtgagacgcggagacgtctttgccaacactccaggctctgcccactggatctacaactcaggagaacagccacttgtcatcatcgctcttctcgacatcgccaactaccca

SEQ ID NO: 142660 - DNA, 351 bp, Arabidopsis thaliana
caaaaagaaaatggttaagctcaccaatctcctcgttgcaaccttcggggttctcctcgtccttaacggctgccttgcgaggcagtcacttggggttcctcctcagctacagaacgagtgtaacctcgacaacctagatgttctccaagccaccgaaactatcaagagtgaagccggtcagatcgagtactgggaccacaaccaccctcagctccgatgtgttggtgtttccgctgctcgttatgtaatagaacaaggcggtctttacttgcccaccttcttcactttcccaaagatttgctacgtcgttcaaggaacgggtttcatcggaagagtggtccctggatgtgc

SEQ ID NO: 142661 - DNA, 417 bp, Arabidopsis thaliana
agaaaaatgggtcgggtctaatctataatctctttctcttggacactctggatcctcttaaatggctacaactgcccaacagtggcccaacgagtgccagctcgatcaactcaatgcgctcgaaccatcccaaatcatcaagagcgagggtggtcgcatcgaggtctgggaccaccatgcaccccagctccgttgctccggctttgcctttgagcgtttcgtcattgagcctcagggtcttttcttgcccactttcttgaacgccggcaaactcacgtttgttgttcacggaaggggtctaatgggaagagttattccgggatgcgccgagacgttcatggagtcaccggtatttggagaaggtcaaggtcagggtcagagtcaagggttccgtgacatgcaccagaaagtagagca

SEQ ID NO: 142662 - DNA, 392 bp, Arabidopsis thaliana
  unsure (1)..(392): unsure at all n locations
aaaaagaaaatggttaagctcagcaatctcctcgttgcaaccttcggggttctcctcgtccttaacggctgccttgcgaggcagtcacttggggttcctcctcagctacagaacgagtgtaacctcgacaacctagatgttctccaagccaccgaaactatcaagagtgaagccggtcagatcgagtactgggaccacaaccaccctcagctccgatgtgttggtgtttccgttgctcgttatgtaattgaacaaggcggtctttacttgcccaccttcttcacttccccaaaaattttctacgtcgttcaaggaacgggtatcagcggaagagtggtccctggatgtgccgagacccttatggactcgcagncgatgcaaggacaacaaca

SEQ ID NO: 142663 - DNA, 272 bp, Arabidopsis thaliana
caaaaagaaaatggttaagctcagcaatctcctcgttgcaaccttcggggttctcctcgtccttaacggctgccttgcgaggcagtcacttggggttcctcctcagctacagaacgagtgtaacctcgacaacctagatgttctccaagccaccgaaactatcaagagtgaagccggtcagatcgagtactgggaccacaaccaccctcagctccgatgtgttggtgtttccgctgctcgtaatgtaattgaacaaggcggtctttacttgc

SEQ ID NO: 142664 - DNA, 319 bp, Arabidopsis thaliana
tgttattcggaatccaaagaaagccatagatattgagatttacagtgaaaatctacagaggaagagatagcgaaggacaattattaatttattttcctattttagttttcattacaaccttaatcttcgtgttgtgtgttctgtaacttcccagattttttctttctctttgctgggcttcagtgccttttcccctttttttctctttcctctgctctcgattcagtttagggcgagaaaaagttgctgtttttacagggtttattacaaagatcctttctttgttacttgaagctttgtcatttttttttagggtttt

SEQ ID NO: 142665 - DNA, 415 bp, Arabidopsis thaliana
atcaaagtgaaatagagaacttcattctctttttttttcatttcatgcctattggcgttccaaaagtaccttttcgaagtcctggagaaggagatacatcttgggttgacatatagtgcgacttgtcagatatatcgggctatatgggatttccccattttctccctcgatcgagatatcctctgtttcgctcaaaaagattgattgaattatcaaaaatttgtaacgcgaagcgcaaaaaataaagtggaattaaatgcagggagtatttagattgatattagattatcaaaatttttttatggtttacgtgatcggactaataaaatgaagtatccaggctccgtttagcaaaaacccaattgataattaatatataatatttttataattactacttttattatatgcaaaa

SEQ ID NO: 142666 - DNA, 417 bp, Arabidopsis thaliana
ataacaaaatggctcgagtctcttctcttctttctttcttcttaacacttttgatccttttccatggctacgcggctcaacagggtcagcagggtcagcagtttccgaacgagtgccagctcgaccagctcaatgcgctcgagccgtcacacgtactgaagagcgaggctggtcgcatcgaggtgtgggaccaccacgctcctcagctccgttgctcaggtgtctcctttgcacgttacatcatcgagtctaagggtctctacttgccctctttctttaacaccgcgaagctctctttcgtggctaagggacgaggtcttatgggaaaagtgatccctggatgcgccgaaacattccaagactcatcagagttccaaccacgcttcgaaggtcaaggtcaaagccagaggttccgtg

SEQ ID NO: 142667 - DNA, 411 bp, Arabidopsis thaliana
atgattcaagctcttcaagccaaactcaagaacggctggtcgaatgatgttccgtcgtggaagtcatgtcactttcaccaaaaggcctgtccaaatctgtatgcttctgaaagcattgatctcgcctgcaagtatgcttacaggaacgctactccggggactactttaggagatgagtatttcctttctcggttacccgttgtagagaagagacttgcacaaggtgggattcgcttggcagctactcttaatcgtatcttttctgcaaaaccgaagctcgcaggattatgaatctaagaaaaagatccttgagaacccacgtaacaactctttttaagtgttttttataacactgtgaatggttgagtcatgactaatgagtgaacctccaaaatctttatgcaaaaattt

SEQ ID NO: 142668 - DNA, 419 bp, Arabidopsis thaliana
gacgaggtgaaaagatgcccgtggggacatctcggtaatatcatgcgaacaagttatgtaccgccacccctaggcctcgaagaatccatgtcagcccacgcatggcacgcccattcttctcggccactcagcaatttttgtccgagaactgctgaaaaaactccgacacttttataccgccgccaccctaacgcctcgaagaactagcaaaaagaaaatggttaagctcagcaatctcctcgttgcaaccttcggggttctcctcgtccttaacggctgccttgcgaggcagtcacttggggttcctcctcagctacagaacgagtgtaacctcgacaacctagatgttctccaagccaccgaaactatcaagagtgaagccggtcagatcgagtactgtgaccacaaccaccctcagc

SEQ ID NO: 142669 - DNA, 420 bp, Arabidopsis thaliana
cagttggctcagcagcttcagaaccaacaagacagcagaggaaacatcgttcgtgttaagggacctttccaggtcgtgaggccacctctaagacagccctacgagagcgaggagtggagacacccacgtagcccacagggcaacggccttgaggagactatctgcagcatgaggtcccacgagaacattgacgaccctgctcgtgctgacgtgtacaagcccagcctaggtcgcgtgaccagcgtcaacagctataccttgcccatcttggagtatgtcaggctcagtgccactcgtggcgttctccagggtaatgcgatggtgcttcctaaatacaacatgaacgctaacgagatcttgtactgcactggaggacaaggaaggatccaagtggtcaacgacaacggacagaacgtgttg

SEQ ID NO: 142670 - DNA, 422 bp, Arabidopsis thaliana
ggcggttcacagcaacaacaagaacagaaaaacttgtggagcgggttcgacgcacaggtcatagctcaagcattgaaaattgacgttcagttggctcagcagcttcagaaccaacaagacagcagaggaaacatcgttcgtgttaagggacctttccaggtcgtgaggccacctctaagacagccctacgagagcgaggagtggagacacccacgtagcccacagggcaacggccttgaggagactatctgcagcatgaggtcccacgagaacattgacgaccctgctcgtgctgacgtgtacaagcccagcctaggtcgcgtgaccagcgtcaacagctataccttgcccatcttggagtatgtcaggctcagtgccactcgtggcgttctccagggtaatgcgatggtgcttcctaaata

SEQ ID NO: 142671 - DNA, 373 bp, Arabidopsis thaliana
aagagtttcattgaaaatttcaagaaccctagttaataacgataatgggttcgagagttttggcttccttctttgttttcttaatcttcacggtcatcacattgcctcccacgatccaagcttgcactccttgtactcgtcctcatcctccggttccgaaacctccacaacacggcggtggtggaggtggtggtagcaagccgcctccacatcacggtggaaaaggtggtggtaaacccccaccccacggtggaaaaggtggaggaccgccgcatcatggtggaggtggaggaggttgttctcttcttcctctttttttttttatctattctttttttcactttttgctttatttttattttttttccttttt

SEQ ID NO: 142672 - DNA, 416 bp, Arabidopsis thaliana
ttaatttccccttactcaagaattttcatttttcttttaacttatattttttaattatattttatctatttgactagataaaatccacttaaataggcgggcgtaagaaataaataaaaaatttcttataatatttgaattctaatagtaatccaaacttttttcattttatctaaatattcttaaaccaaattttaatcttatccattccattttgcagtaaaatttaattatttacgtcatgacaacaaactgaattttaattctatatattttatcttaatggataagagcctcaaaaaaattaattctacatattccatcttcttgtttttattttttatgatatttaaattctaaatagtaacccacacagtttttcaatatttagtgttcttaatgttatctcaatttat

SEQ ID NO: 142673 - DNA, 390 bp, Arabidopsis thaliana
gctcgatcaactcaatgcgctcgaaccatcccaaataatcaaaagcgagggtggtcgcatcgaggtctgggaccaccatgcaccccagctccgttgctccggctttgcctttgagcgtttcgtcattgagcctcagggtcttttcttgcccactttcttgaacgccggcaaactcacgtttgttgttcacggaaggggtctaatgggaagagttattccgggatgcgccgagacgttcatggagtcaccggtatttggagaaggtcaaggtcagggtcagagtcaagggttccgtgacatgcaccagaaagtagagcacctacggtgcggtgacaccattgcaacaccatctggtgtagctcaatggttctacaacaatggaaatgagcc

SEQ ID NO: 142674 - DNA, 423 bp, Arabidopsis thaliana
caaaaagaaaatggttaagctcagcaatctcctcgttgcaaccttcggggttctcctcgtccttaacggctgccttgcgaggcagtcacttggggttcctcctcagctacagaacgagtgtaacctcgacaacctagatgttctccaagccaccgaaactatcaagagtgaagccggtcagatcgagtactgggaccacaaccaccctcagctccgatgtgttggtgtttccgttgctcgttatgtaattgaacaaggcggtctttacttgcccaccttcttcacttccccaaaaatttcctacgtcgttcaaggaacgggtatcagcggaagagtggtccctggatgtgccgagaccttcatggactcgcagccgatgcaaggacaacaacaaggtcaaccatggcaaggacgacagggaca

SEQ ID NO: 142675 - DNA, 415 bp, Arabidopsis thaliana
aaaaagaaaatggttaagctcagcaatctcctcgttgcaaccttcggggttctcctcgtccttaacggctgccttgcgaggcagtcacttggggttcctcctcagctacagaacgagtgtaacctcgacaacctagatgttctccaagccaccgaaactatcaagagtgaagccggtcagatcgagtactgggaccacaaccaccctcagctccgatgtgttggtgtttccgttgctcgttatgtaattgaacaaggcggtctttacttgcccaccttcttcacttccccaaaaatttcctacgtcgttcaaggaacgggtatcagcggaagagtggtccctggatgtgccgagaccttcatggactcgcagccgatgcaaggacaacaacaaggccaaccatggcatggacgac

SEQ ID NO: 142676 - DNA, 414 bp, Arabidopsis thaliana
accaaaaccaactcgaccgcaaccctagagtgttccatttggccggaaacaaccagcagggaggctttggcggttcacagcaacaacaagaacagaaaaacttgtggagcgggttcgacgcacaggtcatagctcaagcattgaaaattgacgttcagttggctcagcagcttcagaaccaacaagacagcagaggaaacatcgttcgtgttaagggacctttccaggtcgtgaggccacctctaagacagccctacgagagcgaggagtggagacacccacgtagcccacagggcaacggccttgaggagactatctgcagcatgaggtcccacgagaacattgacgaccctgctcgtgctgacgtgtacaagcccagcctaggtcgcgtgaccagcgtcaacagctatacct

SEQ ID NO: 142677 - DNA, 417 bp, Arabidopsis thaliana
aaaaaaagctctctctctctctcccatcccatcacaatctctccatctccatcttcatctcccatctatgtctcttgtataaagataatcccacaagtcttaaaactattcctttctcttcctctctctctctctcttcaccatgactgatccttattccaatttcttcacagactggttcaagtctaatccttttcaccattaccctaattcctccactaacccctctcctcatcctcttcctcctgttactcctccctcttccttcttcttcttccctcaatccggagacctccgccgtccaccgccgtcaccaactcctcctccttctcctcctctccgagaagccctccctctcctcagccttagccccgccaacaaacaacaagaccaccatcacaaccatgaccaccttat

SEQ ID NO: 142678 - DNA, 307 bp, Arabidopsis thaliana
gtagtgtgggatatgatggtagtagctatggaggtaatacttgaaatggtggtgggttggggataatttcaagaattttctgtaacatgtataaatttactaaattttaaaacttatttgtttatttaatatttttatttatttcatttttttttatttttttcatatttttattaataaatattaagttttttctttttacattttctatttatttttaaactttactttttttaaattttttattttttaaatttataaaatttctaataattttatctttttatcaatattttcttcttttttt

SEQ ID NO: 142679 - DNA, 345 bp, Arabidopsis thaliana
atgagagttgtgttatcaccattaggaaggatcattgagaagccaatgcacattgggtttctaacaatggaacctaagaccctctttgtccctcagtatcttgactcaagccttctcatctttattcgtcaaggtgaagcaacccttggagtgatatgcaaagacgaattcggagagaggaaactgaaagcaggagacatctactggattccggctggttctgtcttttatttacattacacatgcctaggttaacgcctttttgtcattttcagcatttatccaacgttcagatttggtttcttatctcttcttcttttttatatatgttgttttccttttttt

SEQ ID NO: 142680 - DNA, 417 bp, Arabidopsis thaliana
  unsure (1)..(417): unsure at all n locations
cttccccaaaaatttcctacgtcgttcaaggaacgggtatcagcggaagagtggtccctggatgtgccgagaccttcatggactcgcagccgatgcaaggacaacaacaaggccaaccatggcaaggacgacagggacaacaaggccaaccatgggaaggacagggacaacagggacaacaaggaagacaaggccaaccatgggaaggacagggacaacagggacaacaaggacgacagggacaacaaggccaaccatgggaaggacagggacagcagggacaacaagggttccgtgacatgcaccagaaggtggaacatgtgagacgcggagacgtctttgccaacactccaagctctgcccactggatctacaactcaggagaacagncacttgtcatcatcgctcttttcgaca

SEQ ID NO: 142681 - DNA, 411 bp, Arabidopsis thaliana
aaaatctcttaacaacttctccaccttctcccccccaccaccactcaccgtcggagaaagaaaaaaaacaaccaccatgaaagactgtgaaaaccacggccactctcgccggaaactaataaggcgaatattttggtcattaatcttcgtcctcttcatcatcttcctaacaatcctcctcatttgggcaattctccaaccttcaaagccacgcttcatcctccaagacgccaccgtctacgccttcaacgtctccggcaatccaccgaacctcctcacctccaacttccaaatcactctctcttcccggaaccctaacaacaaaatcggcatttactacgaccggcttgacgtctacgctacttaccggagccaacaaatcactttcccaacatcaatcccttccacgta

SEQ ID NO: 142682 - DNA, 415 bp, Arabidopsis thaliana
tggacacgtgggcctgaatgtgccaaaaccttaatggactcgcacccgatgcaaggacaacaacaaggccaaccatggaaaggacgacaggtacaacaaggccaatcatgggaaggacagggacaacagggtcaacaaggaagacaaggccaaccatgggaaggacagggacaacagggacaacaaggacgacagggacaacaaggccaaccatgggaaggacagggacagcagggacaacaagggtttcgagacatgcaccagaaggtggaacatgtgagacgcggagacgtatttgccaacactccatgctctgcccactggatctacaactcaggagaacagccacttgtcatcatcgctcttctagacatgggcgactaccaaaaccaactcgaccgcaaacctagagtgt

SEQ ID NO: 142683 - DNA, 399 bp, Arabidopsis thaliana
ctttattttggtgtgaggaacttatcatgaatccactggtttctgctgcttcggttattgctgctgggttggctgttgggcttgcttctattggacctggagtcggtcaaggtacagctgcgggtcaagctgtcgaaggtatcgcgagacaacctgaggcagaaggaaaaatacgaggtactttattgcttagtttggcttttatggaagctttaacaatttatggcctggttgtagcattagcgcttttatttgcgaatccttttgtttaagcccagaaatcacaaaattctggattttttttgtagtttttttaattctatcaagatttaacttctacaattatttattgagacaacaatccttgggaaggactaatttgaggatggggaattagca

SEQ ID NO: 142684 - DNA, 385 bp, Arabidopsis thaliana
caaaaagaaaatggttaagctcagcaatctcctcgttgcaaccttcggggttctcctcgtccttaacggctgccttgcgaggcagtcacttggggttcctcctcagctacagaacgagtgtaacctcgacaacctagatgttctccaagccaccgaaactatcaagagtgaagccggtcagatcgagtactgggaccacaaccaccctcagctccgatgtgttggtgtttccgttgctcgttatgtaattgaacaaggcggtctttacttgcccaccttcttcacttccccaaaaatttcctacgtcgttcaaggaacgggtatcagcggaagagtggtccctggatgtgccgagaccttcatggactcgcagccgatgcaagga

SEQ ID NO: 142685 - DNA, 80 bp, Arabidopsis thaliana
gaaaatggttaagctcagcaatctcctttttgtaaccttcggcgtactcctctaccttaacggctatctttcgaggcaga

SEQ ID NO: 142686 - DNA, 298 bp, Arabidopsis thaliana
cttcccttagagatcaaagctgaaaatgactttgataaattcttcaatttcagctttgatctctaagggaagagttgcgacaagaggtgcacatatttcaggtgtcagggaagcacctgttggtaaaaatattgtcttgaccttgtcccagttctcctcgatctcaattccttcacactcagaaaagcttaaattgaagaatttatcaaagtcattttcaccctattccaagatcttgttttcactttctttggtatgaaatcttttcactcttttcgttggaagtccatatttcttt

SEQ ID NO: 142687 - DNA, 329 bp, Arabidopsis thaliana
caacaaacaaaaagaaaatggttaagctcagcaatctcctcgttgcaaccttcgggggtctcctcgtccttaacggctgccttgcgaggcagtcacttggggttcctcctcagctacagaacgagtgtaacctcgacaacctagatgttctccaagccaccgaaactatcaagagtgaagccggtcagatcgagtactgggaccacaaccaccctcagctccgatgtgttggtgcttccgtcgctcgttatgtaattgaacaaggcggtctttacttgcccaacttcattactttccccaaaaatttcctacgtcgtttaaggaacggt

SEQ ID NO: 142688 - DNA, 289 bp, Arabidopsis thaliana
gaaataacaaaatggctcgagtctcttctcttctttctttcttcttaacacttttgatcctgtttccatggctacgcggctcaacagggtcagcagggtcagcagtttccgaacgagtgccagcttgaccagctcaatgcgctcgagccgtcacacgtactgaagagcgaggctggtcgcatcgaggtgtgggaccaccacgctcctcagctccggtgcttaggagttttctttgcacgttacattatcgcggcgcagggtttgtactagctcctcgctctttaacacc

SEQ ID NO: 142689 - DNA, 387 bp, Arabidopsis thaliana
acaaaacaaaacacacccaaatatgcataagcttttgttttctcttctctccgtcgtctcactctcatttctcctcttcttccatggcgccgaggcacgccagcgagaggcgccgtttctaaacgcctgccatttcagccaaatcaacagcctcgcgcccgctcaggcgacgaagttcgaagccggtcagatggaagtatgggaccacatgagccctgagctccgatgcgccggtgtaacggtggctcgcatcacccttcagcccaattccattttcttgcccgctttctttagcccacctgcccttgcttacgttgtccaaggagaaggagttatggggacgattgcttctggttgttctgagacttttgcagaagttgaaggatc

SEQ ID NO: 142690 - DNA, 413 bp, Arabidopsis thaliana
ggttaagctcagcaatctcctcgttgcaaccttcggggttctcctcgtccttaacggctgccttgcgaggcagtcacttggggttcctcctcagctacagaacgagtgtaacctcgacaacctagatgttctccaagccaccgaaactatcaagagtgaagccggtcagatcgagtactgggaccacaaccaccctcagctccgatgtgttggtgtttccgttgctcgttatgtaattgaacaaggcggtctttacttgcccaccttcttcacttccccaaaaatttcctacgtcgttcaaggaacgggtatcagcggaagagtggtccctggatgtgccgagaccttcatggactcgcagccgatgcaaggacaacaacaaggccaaccatggcaaggacgacagggacaac

SEQ ID NO: 142691 - DNA, 423 bp, Arabidopsis thaliana
cacaagtaattaactaacaacaaatggcgaacaagctcttcctcgtctgcgcagctctcgccctgtgtttcatcctcaccaacgcttccgtctatcgcacggttgtcgagttcgacgaagatgacgccagtaaccccataggcccaatacagaaatgtcagaaggagtttcagcaagaacagcacctaagagcttgccagagatggatgcgcaagcaaatgtggcaaggacgtggtggtggtccttccctcgacgatgagttcgatatggaagacgacatcgagaacccgcagagacgacagctactccagaagtgctgcagcgagcttcgccaagaagagccagtttgcgtttgccccaccttgagacaagctgccaaggccgttagattccagggacagcaacaccaaccagagcaagtca

SEQ ID NO: 142692 - DNA, 410 bp, Arabidopsis thaliana
cgtcattgagcctcagggtcttttcttgcccactttcttgaacgccggcaaactcacgtttgttgttcacggaaggggtctaatgggaagagttattccgggatgcgccgagacgttcatggagtcaccggtatttggagaaggtcaaggtcagggtcagagtcaagggttccgtgacatgcaccagaaagtagagcacctacggtgcggtgacaccattgcaacaccatctggtgtagctcaatggttctacaacaatggaaatgagcctctcattcttgttgcagccgcggatctcgccagcaaccagaaccagcttgaccgcaaccttagaccatttttgatagccggaaacaacccacaagggcaggaatggctacaaggtcgaaagcaacagaagcaaacaacat

SEQ ID NO: 142693 - DNA, 251 bp, Arabidopsis thaliana
caaaaagaaaatggttaagctcagcaatctcctcgttgcaaccttcggggttctcctcgtccttaacggctgccttgcgaggcagtcacttggggttccttctcagctacagaacgagtgtaacctcgacaacctatatgttctccaagccaccgaaactatcaagagtgaagccggtcagatcgagttctgggaccacaaccaccctcagcttcgatgtgttggtgctttcgttgcttgtttgtaatttt

SEQ ID NO: 142694 - DNA, 414 bp, Arabidopsis thaliana
cgcgagagcaattgagcagccatggtttgcatcaggcgagcgacggtggatgatctgctggcgatgcaagcctgcaatctcatgtgtcttcctgagaactaccagatgaagtactacctctaccatatcctctcatggcctcagcttctctacgtcgccgaggactacaatggtcgcatcgttggctatgtcttggctaagatggaggaagagagcaacgagtgccacggccacatcacttctctcgccgttcttcgtacccatcgcaagctcggtctcgccactaagctcatgaccgccgctcaagctgccatggaacaggtttacgaggctgagtatgtttcgttgcatgtgaggagaagtaaccgagcagcattcaatctatacactgagacattaggctacaagattaat

SEQ ID NO: 142695 - DNA, 405 bp, Arabidopsis thaliana
aaaaatggctcgagtctcttctcttctttctttctccttaacacttttgatccttttccatggctacgcggctcaacagggtcagcagggtcagcagtttccgaacgagtgccagctcgaccagctcaatgcgctcgagccttcacacgtactgaagagcgaggctggtcgcatcgaggtgtgggaccaccacgctcctcagctccgttgctcaggtgtctcctttgcacgttacatcatcgagtctaagggtctctacttgccctctttctttaacaccgcgaagctctccttcgtggctaaaggacgaggtcttatgggaaaagtgatccctggatgcgccgaaacattccaagactcatcagagtttcaaccacgcttcgaaagtcaaggtcaaagccagag

SEQ ID NO: 142696 - DNA, 335 bp, Arabidopsis thaliana
cgattcaatgggttatctctcctgcaaagctggatccgccgtcgcaatcgccgtttcatctgccgcatcaacctccggatccacctccagcaaagcttctgctcctcccgaatctcccattgaagaccgtcctagacttcgtcgtttcctccatcgcgatctcgaatcagccacaggaggtttcgacatcaacaatctcctcggacgtggaagccatggaagcgtttacaaagctgtcatcggttcacgtcacatcgtggtcaagagaccttcgaaatctcgagaaatcagccgtgagttccacaaccaattctagattctcttcaaaatccgta

SEQ ID NO: 142697 - DNA, 421 bp, Arabidopsis thaliana; identical to SEQ ID NO: 130019

SEQ ID NO: 142698 - DNA, 359 bp, Arabidopsis thaliana
  unsure (1)..(359): unsure at all n locations
cgaacctcagtcttgagaggtttaccacttgaagtcataaccaatgggttccaaatctcacccgaagaagcaaggagggtcaagttcaacacgctcgagaccactttgactcacagcagtggcccagctagctacggaaggccaagagtggctgcagcttaagagcttaaaaccgcggcttaacaatgaaccgctactgtaaaaggaagttaaatagtacgtagtaattataataatgtacgaaaatgtgacaagttttgttgaggtttacctgtaaaatgccactccttttctgaataaaatctttctttccgntcnaaaaaaaaaaaaaataatatataatattatatatttatttt

SEQ ID NO: 142699 - DNA, 358 bp, Arabidopsis thaliana
caaaaagaaaatggttaagctcagcaatctcctcgttgcaaccttcggggttctcctcgtccttaacggctgccttgcgaggcagtcacttggggttcctcctcagctacagaacgagtgtaacctcgacaacctagatgttctccaagccaccgaaactatcaagagtgaagccggtcagatcgagtactgggaccacaaccaccctcagctccgatgtgttggtgtttccgctgctcgttatgtaattgaacaaggcgggctttacttgcccaccttcttcacttgcccaaaaattttctacgtcgttcaaggaacgggtatcagcggaagaggggtccctggatgtgccgagacc

SEQ ID NO: 142700 - DNA, 417 bp, Arabidopsis thaliana
cataagcgtttactgtgagtctctcaaagaaaccaaaggcagagaaaagagataacacacacaaaaaaaaatggcatcaacctcactcctcaaggcttctccggtgttggacaaatccgaatgggtcaagggacaaagcgttctcttccgtcagccttcttccgcttctgtcgtcctccgcaaccgtgccacctccctcaccgtccgtgccgcttcctcctacgccgatgagcttgttaagacagcgaaaactattgcgtctcccggacgtggaatcttggcgatggacgagtcgaacgcgacttgcgggaaacgtttggattcgatagggctagagaacactgaggcaaatcgtcaagctttccggactttgctggtctctgcaccgggactcggacagtacgtctccggcgcaat

SEQ ID NO: 142701 - DNA, 422 bp, Arabidopsis thaliana
  unsure (1)..(422): unsure at all n locations
cacaaacacaatctaatcccaaaaatcaaaagatgaatgccacaaagnttgttgtgcttctcgtgattggcgttttgtgtgccattgtcaccgcaaggcaggtcaaagatttgtccacggagaccaaattaggggcctctcttccaaaaactactaccaaaggcattggagctcagctttctgcaactggcacaacttacagcaccagcagtgtcgttagctatgctaatggttttaacaatcccaaaggtccaggggccaatgcattcgaaagtgccaacacatttaccagcggacaagtcactgccaagggtcgcaaggcaagagtttcttctacaagtgcttctgccgctgaaggcgatgctgcagctgcagtgactcgcaaagctgctgctgcacgtgcaaagggtaaggtagctttc

SEQ ID NO: 142702 - DNA, 380 bp, Arabidopsis thaliana
caacaagaaaaatgaagtcttgtctagctacttttgctctcgcagtgttagtaacacaaggaagcatttttagtttgtgtttggcctcctctgcttctacaaactctgttcctaattggtttcatcattggccgccgtttaaatggggaccaaaatttccatattctccacctaaaccgccgccaatcgagaaatatcctccaccggtgcagtatccaccaccgatcaagaagtatccaccgccaccatacgagcatccaccggtgaagtatccaccaccgatcaagacttaccctcatccgccggtgaagtatccttcaccagaacagtatccaccgccgatttagaagtatcctccaccagaacagtatccaccgccg

SEQ ID NO: 142703 - DNA, 417 bp, Arabidopsis thaliana
aacaaaaagaaaatggttaagctcagcaatctcctcgttgcaaccttcggggttctcctcgtccttaacggctgccttgcgaggcagtcacttggggttcctcctcagctacagaacgagtgtaacctcgacaacctagatgttctccaagccaccgaaactatcaagagtgaagccggtcagatcgagtactgggaccacaaccaccctcagctccgatgtgttggtgtttccgttgctcgttatgtaattgaacaaggcggtctttacttgcccaccttcttcacttccccaaaaatttcctacgtcgttcaaggaacgggtatcagcggaagagtggtccctggatgtgccgagaccttcatggactcgcagccgatgcaaggacaacaacaaggccaaccatggcaaggacga

SEQ ID NO: 142704 - DNA, 428 bp, Arabidopsis thaliana
gctacaaggccgaaagcaacagaagcaaaacaacatcttcaatggcttcgcacctgagatcttggctcaagccttcaagatcaatgtcgagacggctcagcagctccagaaccagcaagataaccgtggcaacatcgtcaaggtcaacggacctttcggcgtcattaggccacccttgagacgcggcgaaggcggccaacaaccacatgaaatagctaatggtttagaggagactttgtgcaccatgcgatgcactgaaaacctcgatgacccgtcggatgctgacgtgtacaagccatcactcggatacattagcacacttaacagctacaatcttcctatcctcagacttctccgccttagcgctcttcgtggctccatccgtaaaaacgctatggtgctaccgcaatggaacgtaaacgcaaact

SEQ ID NO: 142705 - DNA, 427 bp, Arabidopsis thaliana
ccgggctgactggttgggtgttggggagatcggacttttcaattttaaaccaagcgtcaggcctgtaccaattgaagttcatattcagggttatcctggaaagtattactgcccaaggatgaatagcatgaacaagccagcatatgcagccatatgtactcattcacctacgaaacctgttcttatctttgtttcatcccgtaggcagacaaggcttactgcattggatcttattcagtttgctgcctccgacgaacatccgcggcaatttctgagtgtgtcagaggaagacttgcagatggtcctctcacagataactgatcaaaaccttcgacatacgttgcaattcggcatcggactgcatcatgcaggtttaaacgaccacgatagatctgcagtcgaagagcttttcacgaacaacaagatt

SEQ ID NO: 142706 - DNA, 393 bp, Arabidopsis thaliana
aaacaaaaagaaaatggttaagctcagcaatctcctcgttgcaaccttcggggttctcctcgtccttaacggctgccttgcgaggcagtcacttggggttcctcctcagctacagaacgagtgtaacctcgacaacctagatgttctccaagccaccgaaactatcaagagtgaagccggtcagatcgagtactgggaccacaaccaccctcagctccgatgtgttggtgtttccgttgctcgttatgtaattgaacaaggcggtctttacttgcccaccttctttactttcccaaaaattttctacgtcgttcaaggaacgggtatcagcggaagagtggttcctggatgtgcctagacctttatggacttgcatccgatgcatggacaaca

SEQ ID NO: 142707 - DNA, 386 bp, Arabidopsis thaliana
  unsure (1)..(386): unsure at all n locations
gggacaacagggacaacaaggaagacaaggccaaccatgggaaggacagggacaacagggacaacaaggacgacagggacaacaaggccaaccatgggaaggacagggacagcagggacaacaagggttccgtgacatgcaccagaaggtggaacatgtgagacgcggagacgtctttgccaacactccaggctctgcccactggatctacaactcaggagaacagccacttgtcatcatcgctcttctcgacatcgccaactaccaaaaccaactcgaccgnaaccctagagtgttccatttggccggaaacaaccagcaaggaggctttggcggttcacagcaacaacaagaacagaaaaacttgtggagcgggtttgacgcac

SEQ ID NO: 142708 - DNA, 411 bp, Arabidopsis thaliana
acacaatttcacattcttttgcatatttcttcttcttcttccattatggagatacggagcttgattgtttctatgaaccctaatttatcttcctttgagctctctcgccctgtatctcctctcactcgctcactagttccgttccgatcgactaaactagttccccgctccatttctagggtttcggcgtcgatctccaccccgaatagtgaaactgacaagatctccgttaaacctgtttacgtcccgacgtctcccaatcgcgaactccggactcctcacagtggataccatttcgatggaacacctcggaagttcttcgagggatggtatttcagggtttccatcccagagaagaaggagaggttttggtttatgtattctgtggagaatcctgcatttcggcagagt

SEQ ID NO: 142709 - DNA, 101 bp, Arabidopsis thaliana
cttccaaaaaattggttaacctaaccaatttcttcgttgcaaccttcggggttctcctcgtccttaacggctgccttgcaaggcagcactttggggttcct

SEQ ID NO: 142710 - DNA, 367 bp, Arabidopsis thaliana
tgaaaatttcacgaaccctagttaataacgataatgggttcgagagttttggctgtggttctttgttttcttaatcttcacggtcatcacattgcctcccacgatccaagcttgcactccttgtactcgtcctcatcctccggttccgaaacctccacaacacggcggtggtggaggtggtggtagcaagccgactccacatcacggtggaaaaggtggtgggcaacccccacccgacggctgaaatggcggtggaccgccacatcatggtggaggccgctgtctttagcccacctgcccttgcttacgttgaccaacgagaaggagttatggggacgattgcttatgggtgccctgagacttttgc

SEQ ID NO: 142711 - DNA, 388 bp, Arabidopsis thaliana
cgaaacccttcttcatcttcttcttctcctccacctaaccaatgggagcaattgagctctctttctcacagagtcttctcttctcttcgtcgcgttccaatctttcctcctccacacaccgttccgtctcttttttgccgccgggaagcaagtcacggtgtctgccgccgttgcgttcaatgagtcatgacgacgacacggcctcaaaggaggtgaagctatggggtggaaggttcgaagagagtgtcactgagaaagtggagaagttcactgagtcaatttcatttgataaggttctctacaagcaggacattatgggtagcaaagctcatgcttcaatgcttgctcaccaggggctaataactgatagcgataaagatagcatttt

SEQ ID NO: 142712 - DNA, 419 bp, Arabidopsis thaliana
atagaaaatggttaatcttaccaattttctcgacccaaccaacgggagcatccggggtcttttcggctgagtggcgaggctgctattaggcgcgcctcaatatttactgatcgagacacacctccgcatcttatttgtcgtcgaagcgaacgtaactatgactagcgacgtcgcgcataacgagtcatgacaccaccaccacactcaaagtacgtgaagctatggtgtggaaggttcgaatagagtgtcactgagaaagtcgagaagtgcactgagtcaatatcatttgataaggtgctatacaagcagagacattatgggttgcaaagctcatgcttcaatgcttgctcaccaggggctaataactgatagcgataaagattgcattttgagaggtcttgatgatattgagagacaaa

SEQ ID NO: 142713 - DNA, 362 bp, Arabidopsis thaliana
ccgacccatgcgaacaaataacaaaatggctcgagtctcttctcttctttctttcttcttaacacttttgatccttttccatggctacgcggctcaacagggtcagcagggtcagcagtttccgaacgagtgccagctcgaccagctcaatgcgctcgagccgtcacacgtactgaagagcgaggctggtcgcatcgaggtgtgggaccaccacgctcctcagctgcgttgctcaagtgtctgctttgcacgttacatcatcgagtctaagggtctctacttgccctctttctttaacaccgcgaagctctctttcgtggctaacggacgaggtcttatgggaaaagtgatccctggatgcg

SEQ ID NO: 142714 - DNA, 400 bp, Arabidopsis thaliana
ttccggttacgccgccggagcaggtcatcctcgagtcggtgggaaaattgttcgaccacgacgcaccgatgtggtgaggacgccgaatgagcgccccgttcagagatcccgagatcctcctcagcaaaaccctagttggatctccaggctcgtttacaaacccgccagcgtaattgcttccggcgccggaaaattcatttcttgcgtcgtattctacgactcttcctcatcttcggaggaggacgaggattcatcttcagatattgatggtgatgaggatgttgagaagaacaatcccgattttactgaagaggaccttgtgtgtgcccagcaaccaagcattcaacgactcaattctaagcgaggaattgagcagcttctcttgcaagaaacatttgca

SEQ ID NO: 142715 - DNA, 422 bp, Arabidopsis thaliana
agccttccgaaaaccttcattccaaaaaatggggttttgttctcaaaacctctcctttatcgtccgcctcctccttggcttcgttggcgcctcctatgcttgcgactgtacccctcctaaaccatcaccagcacctcacaaaccaccaaaacatccagtcaaaccgcctaaacctcctgccgtcaaaccacctaaaccaccggcagtaaaaccacctactccaaaaccttccaccgtgaaaccccatcctaaaccaccaaccgtcaaaccccatcctaaaccaccaaccgtcaaaccccaccctaagccacccaccgtcaaaccaccccaccctaaaccacccaccaaaactcacccccacccaaaacctgccatcgtaaagccaccaaccaagcctgctgcgtccacccctaaaccttcca

SEQ ID NO: 142716 - DNA, 414 bp, Arabidopsis thaliana
ggttaagctcagcaatctcctcgttgcaaccttcggggttctcctcgtccttaacgggtgccttgcgaggcagtcacttggggttcctcctcagctacagaacgagtgtaacctcgacaacctagatgttctccaagccaccgaaactatcaagagtgaagccggtcagatcgagtactgggaccacaaccaccctcagctccgatgtgttggtgtttcccgtgctcgatatgtaattgaacaaggcggtctttacttgcccaccttcttcacttacgcaaaaatttcctacgtcgttcaaggaacgggtatcagcggacgagtggtccctggatgtgccgagaccttcatggactcgcagccgatgcaaggacaacaacaaggccaaccatggcaaggacgacagggacaaca

SEQ ID NO: 142717 - DNA, 224 bp, Arabidopsis thaliana
ctaaacgcaaccttcacaactgggcgggtgcttaacgggtggggtgcgaggcagtcacttgtggttactgctcaggtacagaacgagtgtaacctatacaacctagatgatctccacgctaccgaaactatcaagagtgaagccggtctgatcgagtactgagaccacaaccacccttagctgcgatgtgttggcgcgtcctgtgatcgaaaaagaagagaaca

SEQ ID NO: 142718 - DNA, 321 bp, Arabidopsis thaliana
ggggacccacgcgtccgcaaaaagaaaatggttaagctcagcaatctcctcgttgcaaccttcggggttctcctcgtccttaacggctgccttgcgaggcaatcacttggggttcctcctcagctacagaacgagtgtaacctcgacaacctagatgttctccaagccaccgaaactatcaagagtgaagccggtcagatcgagtactgggaccacaaccaccctcagctccgatgtgttggtgtttccgttgctcgttatgtaattgaacaaggcggtctttacttgcccaccttcttcacttccccaaaaatttcctac

SEQ ID NO: 142719 - DNA, 338 bp, Arabidopsis thaliana
acaaaacacacccaaatatgcataagcttttgttttctcttctctccgtcgtctcggtctcatttctcctgttgttgcatggcgccgaggcacgccagcgagaggcgccgtttccaaacgcctgccatttcagccaaatcaacagcctcgcgcccgctcaggcgacgaagttcgaagccggtcagatggaagtatgggaccacatgagccctgagctccgatgcgccggtgtaacggtggctcgcatcacccttcagcccaattccattttcttgcccgctttctttagcccacctgcccttgcttacgttgtccaaagagaaagagttatggggacg

SEQ ID NO: 142720 - DNA, 407 bp, Arabidopsis thaliana
  unsure (1)..(407): unsure at all n locations
ggaaanaacggggtggaccaacgcgtccgcgccaactaccaaaaccaactcgaccgcaaccctagagtgttccatttggccggaaacaaccagcagggaggctttggcggttcacagcaacaacaagaacagaaaaacttggggagcgggttcgacgcacaggtcatagctcaagcattgaaaattgacgttcagttggctcagcagcttcagaaccaacaagacagcagaggaaacatcgttcgtgttaagggacctttccaggtcgtgaggccacctctaagacagccctacgagagcgaggagtggagacacccacgtagcccacagggcaacggccttgaagagactatctgcagcatgaggtcccacgagaacattgacgaccctgctcgtgctgacgtgta

SEQ ID NO: 142721 - DNA, 417 bp, Arabidopsis thaliana
aaaaagaaaatggttaagctcagcaatctcctcgttgcaaccttcggggttctcctggtccttaacggctgccttgcgaggcaatcacttggggttcctcctcagctacagaacgagtgtaacctcgacaacctagatgttctccaagccaccgaaactatcaagagtgaagccggtcagatcgagtactgggaccacaaccaccctcagctccgatgtgttggtgtttccgttgctcgttatgtaattgaacaaggcggtctttacttgcccaccttcttcacttacccaaaaatttcctacgtcgttcaaggaacgggtatcagcggaagagtggtccctggatgtgccgagaccttcatggactcgcagccgatgcaaggacaacaacaaggccaaccatggcaaggacgacag

SEQ ID NO: 142722 - DNA, 356 bp, Arabidopsis thaliana
gagagaggatctgatcaaaaaaacattttaaatgatgacacacgcttattcaacaggtgtccttacgttgatggtattgatctcactaatggcggtgacactgaaccttattacacgggagacgcaaagaacctgcgtagagatgctgctatagtgaaaggtctttcatggaacttttaccataaagcatgtgcggaagtcgaaaacatcatccgaaaagagctcaagaaagtcttcaagagagatattggtttagccggaggcatccttcgcatacatgttcatgattgctttgttcagggctgggaaacattagtgctgataactggatcagacagtggaccaagagaacaatc

SEQ ID NO: 142723 - DNA, 415 bp, Arabidopsis thaliana
caaatggcgaacaagctcttcctcgtttgcgcagctctcgccctgtgtttcatgggcaccaacgcttgcgtgtatcggacggctgtcgagttcgacgaacatgacgccagtaaccccataggcccaatacagaaatgtcagaaggagtttcagcaagaacagcacctaagagcttgccagagatggatgcgcaagcaaatgtggcaaggacgtggtggtggtccttccctcgacgatgagttcgatatggaagacgacatcgagaacccgcagagacgacagctactccagaagtgctgcagcgagcttcgccaagaagagccagtttgcgttagccccaccttgagacaagctgccatggccgttagattccacggacagcaacaccaaccagagcatgtcaggaaaatttacc

SEQ ID NO: 142724 - DNA, 336 bp, Arabidopsis thaliana
aaacatacacacatagcaaaaaatggcaaacaagttgttcctcgactgcgcagctctcgctctctgcttactcctcaccaacgcttacatctaccgcaccgtcgttgagttcgaagaagatgacgccactaaccccataggcccaaaaatgaggaaatgccgcaaggagtttcagaaagaacaacacctaagagcttgccagcaattgatgctccagcaagcaaggcaaggccgtagcgatgagtttgatttcgaagacgacatggagaacccacagggacaacagcaggaacaacagctattccagcagtgctgcaacgacgcttcgcaggaaga

SEQ ID NO: 142725 - DNA, 375 bp, Arabidopsis thaliana
gaaaacatacacaaatagcaaaacatggtttacaagctcttcctcgtctgcgcaactctcgccctctgcttcctcctcaccaacgcttccatctaccgcaccgttgtcgaattcgaagaagatgacgccagcaaccccgtaggtccaagacagagatgccagaaggagtttcagcaatcacaacacctaagagcttgccagagatggatgagcaagcaaatgaggcaaggacgtggtggtggtccttccctcgacgatgagttcgatttcgagggcccccagcagggataccagctactccagcagtgctgcaacgagcttcgccaggaagagccagtttgcgtttgccccaccttgaaacaagctgccagggca

SEQ ID NO: 142726 - DNA, 420 bp, Arabidopsis thaliana
tccgttgattgccccgaacctttccaggattcttaaaagttccaaccacgcttcgaaggtcagggtcaaagccagaggttccgggacatgcaccagaaagtggagcacattaggagcggtgataccattgccacaacacccggtgtagcacagtggttctacaacgacggacaggaaccacttgtcatcgtcagcgtcttcgatctagccagtcaccagaaccagcttgaccgcaacccaaggccattttacttagccggaaacaacccacaaggtcaagtatggctacaaggccgagagcaacagccacagaagaacattttcaatggatttggacccgaggttattgctcaagctttgaagatcgatcttcagacagcgcagcaacttcagaaccaagatgacaaccgtggaaacatt

SEQ ID NO: 142727 - DNA, 436 bp, Arabidopsis thaliana
  unsure (1)..(436): unsure at all n locations
ccggngcggaaataccggggcggcccaagccgtcggacatttcacttttaattttctagaaaaattggcttcgccttgcctcttcaatgcctgggtatcgtccttaaaccctaaacaagaccccatccgccggcaccggtcaacctctctccttcgccaccgccccgtcgtcatctcctgtaccggcgatggcaacaacatcaaagccccgatcgagacagcggtcaagcctcctcaccgtaccgaggataacattcgagatgaggctcgtcggaatcgttccaacgccgtgaatccattttcagctaaatacgttccgcttaatgcagctcctggatccacggagtcttactctctcgacgagatcgcgtaccgtagccgctccggtggttagcttgatgtcgaacacgatatggaggctttgaagcgattcgat

SEQ ID NO: 142728 - DNA, 398 bp, Arabidopsis thaliana
  unsure (1)..(398): unsure at all n locations
accgggncggaaataccggggcggccccacccgtccgaagaggaagaaaaatgggtcgagacttatttattatctctttctctttgacactctggagcctcttcaatggctacactgcccaacagtggcccaacgagtgccagctcgatcaactcaatgcgctcgaaccatcccaaatcatcaagagcgagggtggccgcatcgaggtctgggaccaccatgcaccccagctccgttgctccggctttgacttcgagcgtgtcgtcattgagcctcagggtcttttcttgcccactttcttgaacgccggcaaactcacgtttgttgatcacggaaggggactaatgggaagagttattccgggatgcgccgcgacattcatggagtcaccgggattt

SEQ ID NO: 142729 - DNA, 403 bp, Arabidopsis thaliana
acagaggagaaaaaaccgattcaaattccgacggagcaaccgtctccgccgcaacggccgaatcgatgcaccgtatgtaggaaacgggtcgggttaaccgggtttatgtgtcggtgcgggacgactttttgtgggagtcataggtatccggaggttcatggttgtacgtttgatttcaaatcggcgggacgtgaagagatcgcgaaagctaatccgttggttattgcggcgaagcttcagaaaatatgaatcggagccgttgaccgatttctatctttaccctgagaaaatttcgattgtctcggtggatctcaaccgttcattatgttattgtattacggacacgtgtcgcaagattaaagttgagatggtttcgtaactttttaattattttctttggtta

SEQ ID NO: 142730 - DNA, 366 bp, Arabidopsis thaliana
caaaaccaactcgaccgcaaccctagtttgttccatttggccggaaacaaccagcagggaggctttggcggttcacagcaacaacaagaacagaaaaacttgtggagcgggttcgacgcacaggtcatagctcaagcattgaaaattgacgttcagttggctcagcagcttcagaaccaacaagacagcagaggaaacatcgttcgtgttaagggacctttccaggtcgtgaggccacctctaagacagccctacgagagcgaggagtggagacacccacgtagcccacagggcaacggccttgaggagactatctgcagcatgaggtcccacgagaacattgacgaccctgctcgtgctgacgtg

SEQ ID NO: 142731 - DNA, 456 bp, Arabidopsis thaliana
accgggcggaaataccggggggaccacgcgtccggtgcggtgacaccattgcaacaccatctgttgtagctcaatggttctacaacaatggagatgagcctctcattcttgttgcagccgcggatctcgccagcaaccagaaccagcttgaccgcaaccttagaccatttttgatagccggaaacaacccacaagggcaggaatggctacaaggccgaaagcaacagaagcaaaacaacatcttcaatggcttcgcacctgagatcttggctcaagccttcaagatcaatgtcgagacggctcagcagctccagaaccagcaagataaccgtggcaacatcgtcaaggtcaacggacctttcggcgtcattaggccacccttgagacgcggcgaaggcggccaacaaccacatgaaatagctaatggtttagaggagactttgtgcaccatgcgat

SEQ ID NO: 142732 - DNA, 368 bp, Arabidopsis thaliana
gtgagacgcggagacgtctttgccaacactccaggctctgcccactggatctacagctcaggagaacagccacttgtcatcatcgctcttctcgacatcgccaactaccaaaaccaactcgaccgcaaccctagagtgttccatttggccggaaacaaccagcagggaggctttggcggttcacagcaacaacaagaacagaaaaacttgtggagcgggttcgacgcacaggtcatagctcaagcattgaaaattgacgttcagttggctcagcagcttcagaaccaacaagacagcagaggaaacatcgttcgtgtaagggacctttccaggtcgtgaggccacctctaagacagccctacgagagc

SEQ ID NO: 142733 - DNA, 235 bp, Arabidopsis thaliana
caacaaacaaaaagaaaatggttaagctcatcaatctcctcgcagcaaccttaggggttctcctagcacttaacgggtgacttgcgaggcagtcacttggggttcctcctcagctacataacgcgtgtaacctcaacaacctatatgttctccaagacaccgaaactatcatgagtgaagccacacaaatcgcgtactgagaccacatccaccctcagcttcgatgtacaggtga

SEQ ID NO: 142734 - DNA, 412 bp, Arabidopsis thaliana
gttaagctcagcaatctcctcgttgcaaccttcggggttctcctcgtacttaacggctgccttgcgaggcagtcacttggggttcctcctcagctacagaacgagtgtaacctcgacaacctagatgttctccaagccaccgaaactatcaagagtgaagccggtcagatcgagtactgggaccacaaccaccctcagctccgatgtgttggtgtttccgttgctcgttatgtaattgaacaaggcggtctttacttgcccaccttcttcacttccccaaaaatttcctacgtcgttcaaggaacgggtatcagcggaagagtggtccctggatgtgccgagaccttcatggactcgcagccgatgcaaggaccaacaacaggccaaccatggcaaggacgacagggacaac

SEQ ID NO: 142735 - DNA, 426 bp, Arabidopsis thaliana
agaaaacatacacaaatagcaaaacatggctaacaagctcttcctcgtctgcgcagctggtcgccctctgcttcctcctcaccaacgcttccatctaccgcaccgttgtcgaattcgaagaagatgacgccagcaaccccgtaggtccaagacagagatgccagaaggagtttcagcaatcacaacacctaagagcttgccagagatggatgagcaagcaaatgaggcaaggacgtggtggtggtccttccctcgacgatgagttcgatttcgagggcccccagcagggataccagctactccagcagtgctgcaacgagcttcgccagaaagagccagtttgcgtttgccccaccttggaacaagctgccagggcagttagccttcacggacaggacggaccattccaatccaagaaaatttacc

SEQ ID NO: 142736 - DNA, 447 bp, Arabidopsis thaliana
ggaaaaaccgggtcggcccaccccttcggcaaaccaggaaaccttccccaattggcaaaccttggttaacaagtttttcctggtttgggcaactttcgccctctgtttcctcctcaccaacgcttccatctaccgcaccgttgtcgaattcgaagaagatgacgccagcaaccccgtaggtccaagacagagatgccagaaggagtttcagcaatcacaacacctaagagcttgccagagatggatgagcaagcaaatgaggcaaggacgtggtggtggtccttccctcgacgatgagttcgatttcgagggcccccagcagggataccagctactccagcagtgctgcaacgagcttcgccaggaagagccagtttgcgtttgccccaccttgaaacaagctgccagggcagttagcctccagggacagcacggaccattccaatc

SEQ ID NO: 142737 - DNA, 391 bp, Arabidopsis thaliana
attgccaaccttgctggtaaccccaagattgtgctaccagttcctgccttcaacgtcatcaatggtggatcccatgccggaaacaagcttgctatgcaggagtttatgatcctccctgttggagctgcttctttcaaggaagccatgaagatgggtgtggaagtttaccaccacttgaagtctgtgattaagaagaagtacggccaggatgccacaaatgttggtgatgaacgtgggtttgcaccaaacattcaggagaacaaggagggtcttgaattgctcaagactgctatcgagaaggctggatacactggaaaggttgtcattggaatggatggtgccgcttcagagttctactcaaaagacaagacctacgactttgacttcaaag

SEQ ID NO: 142738 - DNA, 383 bp, Arabidopsis thaliana
cttctgtcctgaagcagcttcattgctgcttcataacttctgcatttaccatatcagtccacctgggcatgagttaggagctgctccaatttgtcctaatgattcagtcccttctgctgaaaacttggcagatcagatccttgaagttctcaactttttcggccttggtgttgtgatgtgtatgggagtgactgcaggtgcttatatcctcaccttattcgcgatgaaacatagagaacgggttcttggtttgattcttgtctcaccgttatgcaaggcgccgtcttggtctgaatggttttacaacaaggttatcacaaacttgttatattattacggaatgtgtggagtggtaaaggaatttttgcttcaaagatatttta

SEQ ID NO: 142739 - DNA, 421 bp, Arabidopsis thaliana
agaggaagaaaaatgggtcgagtctcatctattatctctttctctttgacactcttgagcctcttcaatggctacactgcccaacagtggcccaacgagtgccagctcgatcaactcaatgcgctcgaaccatcccaaatcatcaagagcgagggtggtcgcatcgaggtctgggaccaccatgcaccccagctccgttgctccggctttgcctttgagcgtttcgtcattgagcctcaaggtcttttcttgcccactttcttgaacgccggcaaactcacgtttgttgttcacggaaggggtctaatgggaagagttattccgggatgcgccgagacgttcatggagtcaccggtatttggagaaggtcaaggtcagggtcagagtcaagggttccgtgacatgcaccaaaaagtagagc

SEQ ID NO: 142740 - DNA, 355 bp, Arabidopsis thaliana
  unsure (1)..(355): unsure at all n locations
caaaaagaaaatggttaagctcagcaatctcctcgttgcaaccttcggggttctccgcgtccttaacggctgccttgcgaggcagtcacttggggttcctcctcagctacagaacgagtgtaacctcgacaacctagatgttctccaagccaccgaaactatcaagagtgaagccggtcagatcgagtactgggaccacaaccaccctcagctccgatgtgttggtgtttccgttgctcgttatgtaattgaacaaggcggtctttacttgcccaccttcttcacttccccaaaaatttcctacgtcgntcaaggaacgggtatcagcggaagaagggtccctggatgtgccgag

SEQ ID NO: 142741 - DNA, 411 bp, Arabidopsis thaliana
gcaccagaaggtggaacatgtgagacgcggagacgtctttgccaacactccaggctctgcccactggatctacaactcaggagaacagccacttgtcatcatcgctcttctcgacatcgccaactaccaaaaccaactcgaccgcaaccctagagtgttccatttggccggaaacaaccagcagggaggctttggcggttcacagcaacaacaagaacagaaaaacttgtggagcgggttcgacgcacaggtcatagctcaagcattgaaaattgacgttcagttggctcagcagcttcagaaccaacaagacagcagaggaaacatcgttcgtgttaagggacctttccaggtcgtgaggccacctctaagacagccctacgagagcgaggagtggagacacccacgtag

SEQ ID NO: 142742 - DNA, 424 bp, Arabidopsis thaliana
  unsure (1)..(424): unsure at all n locations
ctttctttaacaccgcgaagctctctttcgtggctaagggacgaggtcttatgggaaaagtgatccctggatgcgccgaaacattccaagactcatcagagttccaaccacgcttcgaaggtcaaggtcaaagccagaggttccgtgacatgcaccagaaagtggagcacattaggagcggtgataccattgccacaacacccggtgtagcacagtggttctacaacgacggacaggaaccacttgtcatcgtcagcgtcttcgatctagccagtcaccagaaccagcttgaccgcaacccaaggccattttacttagccggaaacaacccacanggtcaagtatggctacaaggccgagagcaacagccacagaagaacattttcaatggatttggacccgaggttattgctcaagctttgaa

SEQ ID NO: 142743 - DNA, 427 bp, Arabidopsis thaliana
ccgtccgaaagcacttacggggcggggacaccattgcaacaccatctggggtagctcaatgggggtacaacaatggaaaggagcctctcattcttgttgcagccgcggatctcgccagcaaccagaaccagcttgaccgcaaccttagaccatttttgatagccggaaacaacccacaagggcaggaatggctacaaggccgaaagcaacagaagcaaaacaacatcttcaatggcttcgcacctgagatcttggctcaagccttcaagatcaatgtcgagacggctcagcagctccagaaccagcaagataaccgtggcaacatcgtcaaggtcaacggaccttttcgcgtcattaggccacccttgagacgcggcgaaagcggccaacaaccacatgaaatagctaatggtttagaggagacttt

SEQ ID NO: 142744 - DNA, 398 bp, Arabidopsis thaliana
accgggccggaaataccggggcggccccacccgtccgcaaaaatttttcatcgactcaaatccaaaaactcatctctctctatctctattgctgtggctccatagctcaccggcgcatcgcagatctactccttccgcaataaattttaccggcggaggtatcagatctcgccgatctgctgtagcagctactgtatttcgggcttctcatttgatattggggaaacgaggagtagaggacgatggaaaatctgatctctctggttaacaagatacagagagcttgcacggctttaggagaccatggagactccagcgctttacctactctttgggattccctgcctgcgatcgccgacggtggtcgtcagagctcacggaagtattccgccctggag

SEQ ID NO: 142745 - DNA, 401 bp, Arabidopsis thaliana
agctcaagcattgaaaattgacgttcagttggctcagcagcttcagaaccaacaggacagcagaggaaacatcgttcgtgttaagggacctttccaggtcgtgaggccacctctaagacagccctacgagagcgaggagtggagacacccacgtagcccacagggcaacggccttgaggagactatctgcagcatgaggtcccacgagaacattgacgaccctgctcgtgctgacgtgtacaagcccagcctaggtcgcgtgaccagcgtcaacagctataccttgcccatcttggagtatgtcaggctcagtgccactcgtggcgttctccagggtaatgcgatggtgcttcctaaatacaacatgaacgctaacgagatcttgtactgcactggaggac

SEQ ID NO: 142746 - DNA, 407 bp, Arabidopsis thaliana
gtacaagccatcactcggatacattagcacacttaacagctacaatcttcctatcctcagacttctccgccttagcgctcttcgtggctccatccgtaaaaacgctatggtgctaccgcaatggaacgtaaacgcaaacgcggcactctacgtgacaaacggaaaggctcatatacaaatggtgaacgacaacggagaaagagtgttcgaccaagagatctccagcggacagttactagtcgtgccacaaggcttttcggtcatgaaacatgccataggcgaacagttcgagtggatcgaattcaagacaaacgaaaacgcacaggtcaacacactcgcgggccgtacctcagtcatgagaggtttgccgcttgaggttataaccaatgggtaccagatctctcccg

SEQ ID NO: 142747 - DNA, 381 bp, Arabidopsis thaliana
caaaaagaaaatggttaagctcagcaatctcctcgttgcaaccttcggggttctcgtcgtccttaacggctgccttgcgaggcagtcacttggggttcctcctcagctacagaacgagtgtaacctcgacaacctagatgttctccaagccaccgaaactatcaagagtgaagccggtcagatcgagtactgggaccacaaccaccctcagctccgatgtgttggtgtttccgttgctcgttatgtaattgaacaaggcggtctttacttgcccaccttcttcacttccccaaaaatttcctacgtcgttcaaggaacgggtatcagcggaagagtggtccctggatgtgccgagaccttcatggactcgcagccgatgca

SEQ ID NO: 142748 - DNA, 420 bp, Arabidopsis thaliana
acaaggccaaccatgggaaggacagggacaacagggacaacaaggacgacagggacaacaaggccaaccatgggaaggacagggacagcagggacaacaagggttccgtgacatgcaccagaaggtggaacatgtgagacgcggagacgtctttgccaacactccaggctctgcccactggatctacaactcaggagaacagccacttgtcatcatcgctcttctcgacattggccaactaccaaaaccaactcgaccgcaaccctagagtgttccatttggccggaaacaaccagcagggaggctttggcggttcacagcaacaacaagaacagaaaaacttgtggagcgggttcgacgcacaggtcatagctcaagcattgaaaattgacgttcagttggctcagcagcttcagaacc

SEQ ID NO: 142749 - DNA, 412 bp, Arabidopsis thaliana
cgcgaacgccattctttacgtgacagacggggaagcccaaatccagatcgtaaacgacaatggtaacagagtgtttgacggacaagtctctcaaggacagctcatagccgtaccacaaggtttctcggtggtgaaacgcgcaacaagcaaccgattccagtgggttgagttcaaaacaaacgcaaacgcgcaaatcaacactcttgcgggacgaacctcagtcttgagaggtttaccacttgaagttataaccaatgggttccaaatctcacctgaagaagcaaggagggtcaagttcaacacgctcgagaccactttgactcacagcagtggcccagctagctacggaaggccaagggtggctgcagcttaagaagctaaaaccgcggctcaacaatgaacctctagtact

SEQ ID NO: 142750 - DNA, 410 bp, Arabidopsis thaliana
cttacaacaacaaatcttaaacgttttactttgtgctgcactactcaacctcaatggccgcctcaacaatggctctctcctcccctgccttcgccggtaaggccgtcaagctttcccccgcggcatctgaagtccttggaagcggccgtgtgacaatgaggaagactgttgccaagccaaagggcccatcaggcagcccatggtacggatctgaccgtgtcaagtacttgggtccattctctggcgaatcaccgagctaccttaccggagagttccccggagactacggatgggacaccgccggactttcagctgaccccgagacattcgcaaggaaccgtgagctagaagttatccacagcaggtgggctatgctcggagccctaggctgcgtcttccctgagcttttg

SEQ ID NO: 142751 - DNA, 359 bp, Arabidopsis thaliana
tttacaccaacacattttcaacgtttttatttggcctgcacaaaacaacatgagcggtcacctgaacaagggctgtgttctaccacaccttaggcgccaaggccgtaacgacaacccacacaacatgtgaaaccaacagaagcagacgggtcacattgaggaaaactgacaccaagccaaatgccccatcaagcaccacatgaaccggatctaaccgatccaagtactaacttacatactctcacgaatcaccaatctaccttaccgaacagttctcttgagactacggatgggacaccgcacaactttcagctgaccccgagacattcgcaaggaaccgagagcctagagttatccac

SEQ ID NO: 142752 - DNA, 420 bp, Arabidopsis thaliana
aacatacacaaatagcaaaacatggctaacaagctcttcctcgtctgcgcaactctcgccctctgcttcctcctcaccaacgcttccatctaccgcaccgttgtcgaattcgaagaagatgacgccagcaaccccgtaggtccaagacagagatgccagaaggagtttcagcaatcacaacacctaagagcttgccagagatggatgagcaagcaaatgaggcaaggacgtggtggtggtccttccctcgacgatgagttcgatttcgagggcccccagcagggataccagctactccagcagtgctgcaacgagcttcgccaggaagagccagtttgcgtttgccccaccttgaaacacgctgccagggcagttagccttcagggacagcacggaccattccaatccaggaaaatttac

SEQ ID NO: 142753 - DNA, 417 bp, Arabidopsis thaliana
catgattcaagcatcattgtcttcttcttttttaactcaaatcattgtctttttaacgtgttttaaactattaaatccaaaactcgaattaaagacaagaaaataaaaattgtaagctatgtcacaaatcaactctataaaaattgatttgataaaatgatttatactccttttttgacaataacatttaacgtttgattttagagtacaatattaataatatttattttttaactaccgccttttatttgataataaagctgtccgtgtaccgtatgtgtacgtattggttagtgtgcatgtacgtatgcaaatataatatacgttaaaagttttaagagtgttgaaagatacaagaggcgacaatcttgttctttcagatgcattctggttttttgacgatttatgttaattgct

SEQ ID NO: 142754 - DNA, 432 bp, Arabidopsis thaliana
ccgggccggaaataccggggcggcccaccccttccgcggccccatggaaggaaaaatgggtcgtgtctaacctataatctctttctttttgacgctcttgaaccttttaaatggctacactgcccaacagtggcccaacgagtgccagctcgatcaactcaatgcgctcgaaccatcccaaatcatcaagagcgagggtgtgctcatcgagggctgggaccaccatgcacccgagcttcgttgctccggctatgcctttgagcgtttcgacattgagcctcaaggtctttacttgcccactttcttgaacgccggcaaactcacgtttggtgttcacggaaggggtctaatgggaagagctattccgggatgcgccgagacgttcatggcatcaccggtatttggagaaggtcaaggtcagggtcagagtca

SEQ ID NO: 142755 - DNA, 416 bp, Arabidopsis thaliana
aagaaaatggttaagctcagcaatctcctcgttgcaaccttcggggttctcctcgtccttaacggctgccttgcgaggcagtcacttggggttcctcctcagctacagaacgagtgtaacctcgacaacctagatgttctccaagccaccgaaactatcaagagtgaagccggtcagatcgagtactgggaccacaaccaccctcagctccgatgtgttggtgtttccgttgctcgttatgtaattgaacaaggcggtctttacttgcccaccttcttcacttccccaaaaatttgctacgtcgttcaaggaacgggtatcagcggaagagtggtccctggatgtgccgagaccttcatggactcgcagccgatgcaaggacaacaacaaggccaaccatggcaaggacgacaggg

SEQ ID NO: 142756 - DNA, 440 bp, Arabidopsis thaliana
taccggggcggcccaacccgtccggcattgaaaattgacgttcagttggctcatcagcttcagaaccaacaagacagcagaggaaacatcgttcgtgtgaagggacctttccaggtcgtgaggccacctctaagacagccctacgagagcgaggagtggagacacccacgtagcccacagggcaacggccttgaggagactatctgcagcatgaggtcccacgagaacattgacgaccctgctcgtgctgacgtgtacaagcccagcctaggtcgcgtgaccagcgtcaacagctataccttgcccatcttggagtatgtcaggctcagtgccactcgtggcgttctccagggtaatgcgatggtgcttcctaaatacaacatgaacgctaacgagatcttgtactgcactggaagacaaggaaggatccaagtggtcaa

SEQ ID NO: 142757 - DNA, 414 bp, Arabidopsis thaliana
ctgcccaacagtggcccaacgagtgccagctcgatcaactcaatgcgctcgaaccatcccaaatcatcaagagcgagggtggtcgcatcgaggtctgggaccaccatgcaccccagctccgttgctccggctttgcctttgagcgtttcgtcattgagcctcagggtcttttcttgcccactttcttgaacgccggcaaactcacgtttgttgttcacggaaggggtctaatgggaagagttattccgggatgcgccgagacgttcatggagtcaccggtatttggagaaggtcaaggtcagggtcagagtcaagggttccgtgacatgcaccagaaagtagagcacctacggtgcggtgacaccattgcaacaccatctggtgtagcttaatgggtctacaacatgggaatga

SEQ ID NO: 142758 - DNA, 360 bp, Arabidopsis thaliana
atcaataacaaggaagaaaaatgggtcgagtctcacatattatctctctctatttgacactattgatcctgtgcgagggctacactgcccaacagtggcccaacgagtgccagctcgatcaactcaatgcgctcgaaccatcccaaatcatcaagagcgagggtggtcgcatcgaggtctgggaccaccatgcaccccaactccggtgctccggctttgcctttgagcgaatcgtaattgagcctcagggacttttcttgcccactatcttgaacgccggcaaactcacgtgtgttggtcacggaaggggtctaatgggaagagatattcccggatgcgccgagacgctaatggagtcac

SEQ ID NO: 142759 - DNA, 371 bp, Arabidopsis thaliana
gtttcgaaggtcaaggtcaaagccagttgttccgtgacatgcaccagaaagtggggcacattaggagcgggggtaccattgccacaacacccggtgtagcacagtggttctacaacgacggacaggaaccacttgtcatcgtcagcgtcttcgatctacccagtcaccagaaccagcttgaccgcaacccaaggccattttacttagccggaaacaacccacaaggtcaagtatggctacaaggccgagagcaacagccacagaagaacattttcaatggatttggacccgaggttattgctcaagctttgaagatcgatcttcagacagcgcagcaacttcagaaccaagatgacaaccgtggaaacatt

SEQ ID NO: 142760 - DNA, 415 bp, Arabidopsis thaliana
ctctttttaatacgtgccgactcttctctacataaactctacacttaaatctgtgtcttagagttagagagagagagaccacgccagatatacctttcttgtttcaccggttttcatacacaaaaatggcgggcagtgcctcattcgccgccgcattattcatcggactctctcttctcttcgccgtcacggctgaagatccgtacagattctttgaatggaacataacttacggcgatatctacccactcggtgttcgccaacagggtattttgatcaacggggcgtttccgggaccggacattcattcggttactaatgacaatctcatcatcaacgtctacaatagcctcgacgaacctttccttctttcatggaatggaattcaacagaggaagaactcttttcgtgatgg

SEQ ID NO: 142761 - DNA, 374 bp, Arabidopsis thaliana
cttagaatgcaatcagctatggcgctttcgttctcccagacgtcgtttacaagaccaaaccacgtgctcggatcatctggttctgttttctctacgcccagaagtctccggttctgcggactccggcgggaagcgtttggtttctcaacgtcgaatcagttggctattcgcagtaaccgaatccaatttctaagtaggaagtcattccaagtctccgcttctgcttcaagtaatggtaatggcgctccaccgaaatctttcgattacgatttgatcatcatcggagctggagttggtggccacggagctgctttgcacgccgttgaaaagggacttaaaacagccattattgaaggagatgttgttggagggac

SEQ ID NO: 142762 - DNA, 405 bp, Arabidopsis thaliana
tacacacatagcaaaaaatggcaaacaagttgttcctcgtctgcgcagctctcgctctctgcttcctcctcaccaacgcttccatctaccgcaccgtcgttgagttcgaagaagatgacgccactaaccccataggcccaaaaatgaggaaatgccgcaaggagtttcagaaagaacaacacctaagagcttgccagcaattgatgctccagcaagcaaggcaaggccgtagcgatgagtttgatttcgaagacgacatggagaacccacagggacaacagcaggaacaacagctattccagcagtgctgcaacgagcttcgccaggaagagccagattgtgtttgccccaccttgaaacaagctgccaaggcccgtagacttcaaggacagcaccaaccaatgc

SEQ ID NO: 142763 - DNA, 424 bp, Arabidopsis thaliana
  unsure (1)..(424): unsure at all n locations
agaagatccagacgaagtggtttgccttcagggaacgagagagagaaagagattttaacaaacgatgtcgctgaggccgagcacacgcgcggagctaaggaagaagatatacaagacaggcgtcgatgccgatgaggccaggcggaggagagaggacaatctcgtcgagattaggaaaaacaagcgtgaggatagtcttctcaagaagcgtcgtgaaggaatgatgcttcagcagcagctgcctctcggagctggccttgatggtccccagaccgctgccgccgttgagaaacgattagaaggtatcccaatgatggtacaaggtgtttattctgatgatcctcaagctcagctagaagcgactacccaatttaaaaagttggtatctatagagcgtagtcctncaattgatgaagtgatcaaa

SEQ ID NO: 142764 - DNA, 414 bp, Arabidopsis thaliana
ccgtccgaccaaaacaacatcttaaatggcttcgcacctgaaatcttggctcaagccttcaagatcaatgtcgagacgggtcagcagctccagaaccagcaagataaccgtggcaacatcgtcaaggtcaacggacctttcggcgtcattaggccacccttgagacgcggcgaaggcggccaacaaccacatgaaatagctaatggtttagaggagactttgtgcaccatgcgatgcactgaaaacctcgatgacccgtcggatgctgacgtgtacaagccatcactcggatacattagcacacttaacagctacaatcttgctatcctcagacttctccgccttagcgctcttcgtggctccatccgtaaaaacgctatggtgctaccgcaatggaacgtaaacgcaaacgcg

SEQ ID NO: 142765 - DNA, 350 bp, Arabidopsis thaliana
ggaagaaaaatgggtcgagtgtcatctattatctctttctctttgacactcttgagcctcttcaatggctacactggccaacagtggcccaacgagtgccagctcgatcaactcaatgcgctcgaaccattccaaatcatcaagagcgagggtggtcacatcgaggtctgggaccaccatgcaccccagctccgatgctccggctttgactttgagcgctacgtcattgagcctcaaggtcttttattgcccactttcttgaacgcccgcaaactcacgtttgttgatcacggcacgggtctaatgcgaagagtctttcctgaatgtgctcagacttatcatgtagtcac

SEQ ID NO: 142766 - DNA, 411 bp, Arabidopsis thaliana
  unsure (1)..(411): unsure at all n locations
cggacgcgtgggccacgaggcacatcctaagaattataatcaactgcaagaccttgacatagccgccgcttgggctaacatgacacagggatccttgttccttcctcattttaactctaagaccacatttgtaacgtttgtggagaatggttgtgcccgcttcgagatggctactccttataaattccaaagagggcaacaacaatggccaggacaaggacaagaagaagaagaagatatgagtgaaaacgtacacaaagttgtgtcacgagtgtgtaaaggcgaagtttttatcgttccggcaggtcatccattcactatactctcgcaagatcaagactntatcgcggtagggtttggtatttatgcgaccaacagcaaaagaacgttccttgcaggggaagagaattt

SEQ ID NO: 142767 - DNA, 420 bp, Arabidopsis thaliana
aacagattttgatgctccttcgtcttacggctcgctctattcgtcgtttcacaacttcttcttcgtccttaccatttctctcatcgtcttcgtattgtactgtttcaacaatggcagctaatcatccaaaggatgaagcgtatctctccgccgtcatccccaaacgtatcaggcttttcgagcagatccaagcgaatcaactcgagaatcttaagtctcttccacacgatccgatcaaggttacgttaccagatggaaatgtgaaagaaggaaagaaatgggagacaactccgatggatatcgctgctcagatttctaagggtttggctaattctgcgttgatttcggctggtgatgatgttctttgggatatgaataggccattggaaggtgattgtaagcttgagcttttcaaatttg

SEQ ID NO: 142768 - DNA, 373 bp, Arabidopsis thaliana
gggtcgagtctcatctattatctctttctctttgacactcttgatcctcttcaatggctacactgcccaacagtggcccaacgagtgccagctcgatcaactcaatgcgctcgaaccatcccaaatcatcaagagcgagggtggtcgcatcgaggtctgggaccaccatgcaccccagctccgttgctccggctttgcctttgagcgtttcgtcattgagcctcaaggtcttttcttgcccactttcttgaacgccggcaaactcacgtttgttgttcacggaaggggtctaatgggaagagttattccgggatgcgccgagacgttcatggagtcaccggtatttggagaatgtcaaggtcagggtcagagt

SEQ ID NO: 142769 - DNA, 363 bp, Arabidopsis thaliana
gtcgcatcgaggtctgggaccaccatgcaccccagctccgttgctccggctttgcctttgagcgtttcgtcattgagcctcaaggtcttttcttgcccactttcttgaacgccggcaaactcacgtttgttgttcacggaaggggtctaatgggaagagttattccgggatgcgccgagacgttcatggagtcaccggtatttggagaaggtcaaggtcagggtcagagtcaagggttccgtgacatgcaccagaaagtagagcacctacggtgcggtgacaccattgcaacaccatctggtgtagctcaatggttctacaacaatggaaatgagcctctcattcttggtgcagccgcggatc

SEQ ID NO: 142770 - DNA, 288 bp, Arabidopsis thaliana
ttctctctgaaaatctcttctactttctcaaaaaccgatactctcttcttcaatgtccgtctcttatctctccaagctaattctacaaaccggcttttctcaaaccctaacgtacggattagggattttgatcgtcgattccaaaggatacgactatgaatttctacaccaaacactatgtaaaggcgacgctgaatgagaaaggcgaaaagacttgtcctgtatgtactgaggagatggacttgactgctcaacatcttacaccttgcaactgcggttatcacatct

SEQ ID NO: 142771 - DNA, 263 bp, Arabidopsis thaliana
gtatctctaagacttcgtggagcaatgaagagcctatgcatcgcccatgtcttgggatgggatgttgtgggagcaaaatggggaacagaggtttttcagaccgcatggtttcacttcataacttgctttctataccgaatcggatcattgggcacgtactgaacagcaatgcttgcattttaactcaacagcgacacaaggttattcatcagcacgcaatgattgtgtctgaagattttatctcgaatgatgctaccttttcc

SEQ ID NO: 142772 - DNA, 400 bp, Arabidopsis thaliana
acaaaacaaaacacacccaaatatgcataagcttttgttttctcttctctccggcgggtcactctcatttctgctgttcttccatggcgccgaggcacgccagcgagaggcgccgtttccaaacgcctgccatttcagccaaatcaacagcctcgcgcccgctcaggcgacgaagttcgaagccggtcagatggaagtatgggaccacatgagccctgagctccgatgcgccggtgtaacggtggctcgcatcacccttcagcccaattccattttcttgcccgctttctttagcccacctgcccttgcttacgttgtccaaggagaaggagttatggggacgattgcttctggttgtcctgagacttttgcagaagttgaaggatcatcaagacgagga

SEQ ID NO: 142773 - DNA, 393 bp, Arabidopsis thaliana
caaaaagaaaatggttaagctcagcaatctcctcgttgcaaccttcggggttctccgcggccttaacggctgccttgcgaggcagtcacttggggttcctcctcagctacagaacgagtgtaacctcgacaacctagatgttctccaagccaccgaaactatcaagagtgaagccggtcagatcgagtactgggaccacaaccaccctcagctccgatgtgttggtgtttccgttgctcgttatgtaattgaacaaggcggtctttacttgcccaccttgttcacttccccaaaaatttcctacgtcgttcaaggaacgggtatcaaacgaagagtggtccctggatgtgccgggacctttatggactcgcagacgatgcaaggacaacaaca

SEQ ID NO: 142774 - DNA, 414 bp, Arabidopsis thaliana
gtaattaactaacaacaaatggcgaacaagctcttcctcgtctgcgcagctctcgccctgtgtttcatcctcaccaacgcttccgtctatcgcacggttgtcgagttcgacgaagatgacgccagtaaccccataggcccaatacagaaatgtcagaaggagtttcagcaagaacagcacctaagagcttgccagagatggatgcgcaagcaaatgtggcaaggacgtggtggtggtccttccctcgacgatgagttcgatatggaagacgacatcgagaacccgcagagacgacagctactccagaagtgctgcagcgagcttcgccaagaagagccagtttgcgtttgccccaccttgagacaagctgccaaggccgttagattccagggacagcaacaccaaccagagcaa

SEQ ID NO: 142775 - DNA, 309 bp, Arabidopsis thaliana
cgcataacccttcagcccaattccattttcttgcccgctttctttagcccacctgcccttgcttacgttgtccaaggagaaggagttatggggacgattgcttctggttgtcctgagacttttgcagaagttgaaggatcatcacgaagaggaggaggaggagacccgggtcgacgtttcgaggacatgcaccaaaagttggacaatttccgacgaggggatgtcgttgcttcggttgtcgcatttacacagaggtggatctaccagacggcatccagaacccgcattgacgacagcttctgaagaagt

SEQ ID NO: 142776 - DNA, 413 bp, Arabidopsis thaliana
aagaaataacaaaatggctcgagtctcttctcttctttctttcttcttaacacttttgatccttttccatggctacgcggctcaacagggtcagcagggtcagcagtttccgaacgagtgccagctcgaccagctcaatgcgctcgagccgtcacacgtactgaagagcgaggctggtcgcatcgaggtgtgggaccaccacgctcctcagctccgttgctcaggtgtctcctttgcacgttacatcatcgagtctaagggtctctacttgccctctttctttaacaccgcgaagctctctttcgtggctaagggacgaggtcttatgggaaaagtgatccctggatgcgccgaaacattccaagactcatcagagttccaaccacgcttcgaaggtcaaggtcaaagccaga

SEQ ID NO: 142777 - DNA, 384 bp, Arabidopsis thaliana
tgatcccactcgtcttaaattacagtacaagtcctagtaaaaccgaacatttttgaaatccaaagagtataagaattgggacagaataaaacatatatataaccaaaaacctgtaattagttggaacatcaatcatgttccctgctaggattgggtaaattttgtctgtaattagtaaaaataaatctccgttgccgggactcgaacccgggtctctcgggtgagagccgagtatcctgaccagctagactacaacggatttgtaataaataatattaattagtcaatatgttagtaacaccaaattttttgaaaaaaaaagaaagaaaagaaaacattaaacaaggagaagatataacatccaaatcgtaaaggaaaacaaca

SEQ ID NO: 142778 - DNA, 383 bp, Arabidopsis thaliana
gcttctttctctttcctctctgattttttttctttctctatatacctcattcgtgggggatataaagagtgcgggggttgggacagaataaaacatatatataaccaaaaacctgtaatgagcgggaacatcactcatgttccctcctaggatagggtaaattttgtctggaattactaaaaataaatcttcgttgccgggactcgaacccggatctatcgggtgagagccgagtatgctgaccagctagactacaacggatctgcaataaatgatattaatcaggcaatatgtgagtaacaccaaatttttcgaaaaagaaagaaagaaacgaaaacattaaacacgagaagaaataacatccaaatcgtaaaggaaaacaa

SEQ ID NO: 142779 - DNA, 419 bp, Arabidopsis thaliana
  unsure (1)..(419): unsure at all n locations
cacacatagcaaaaaatggcaaacaagttgttcctcgtctgcgcagctctcgctctgtgcttcctcctcaccaacgcttccatctaccgcaccgtcgttgagttcgaagaagatgacgccactaaccccataggcccaaaaatgaggaaatgccgcaaggagtttcagaaagaacaacacctaagagcttgccagcaattgatgctccagcaagcaaggcaaggccgtagcgatgagtttgatttcgaagacgacatggagaacccacagggacaacagcaggaacaacagctattccagcagtgctgcaacgagcttcgccagggaagagcagattgtgtttgccccaccttggaacaagctgccaaggccgttagactccanggacagcaccaaccaatgcaagtcaggaaaattta

SEQ ID NO: 142780 - DNA, 423 bp, Arabidopsis thaliana
gcagcatgaggtcccacgagaacattgacgaccctgctcgtgctgacgtgtacaagcccagcctaggtcgcgtgaccagcgtcaacagctataccttgcccatcttggagtatgtcaggctcagtgccactcgtggcgttctccagggtaatgcgatggtgcttcctaaatacaacatgaacgctaacgagatcttgtactgcactggaggacaaggaaggatccaagtggtcaacgacaacggacagaacgtgttggaccaacaggtgcagaagggacagctcgtggtcatcccacaagggttcgcatacgttgtccagtcccacggaaacaagttcgagtggatctctttcaaaactaatgaaaacgcaatgatcagcactttggcgggtagaacctcgctcttgagggcattgccattgg

SEQ ID NO: 142781 - DNA, 360 bp, Arabidopsis thaliana
  unsure (1)..(360): unsure at all n locations
aaaaaaaaatttataaacgacattttttacgcggtttttggggccgcccaaanccagancgggggggacaatggnaacagagtgtgtgacggacaagtctctcaaggacagctcatagccgtaccacaaggtttctcggtggtgaaacgcgcaacaagcaaccgattccagtgggttgagttcaaaacaaacgcaaacgcgcaaatcaacactcttgcgggacgaacctcagtcttgagaggtttaccacttgaagttataaccaatgggttccaaatctcacctgaagaagcaaggagggtcaagttcaacacgctcgagaccactttgactcacaacagtggcccaacttgctacgga

SEQ ID NO: 142782 - DNA, 422 bp, Arabidopsis thaliana
caaaaagaaaatggttaagctcagcaatctcctcgttgcaaccttcggggttctccgcgtccttaacggctgccttgcgaggcagtcacttggggttcctcctcagctacagaacgagtgtaacctcgacaacctagatgttctccaagccaccgaaactatcaagagtgaagccggtcagatcgagtactgggaccacaaccaccctcagctccgatgtgttggtgtttccgttgctcgttatgtaattgaacaaggcggtctttacttgcccaccttcttcacttccccaaaaatttcctacgtcgttcaaggaacgggtatcagcggacgagtggtccctggatgtgccgagaccttcatggactcgcaggcgatgcaaggacaacaacaaggccaaccatggcaaggacgacagggac

SEQ ID NO: 142783 - DNA, 374 bp, Arabidopsis thaliana
aaacaaaaagaaaatgggtaagctcagtaatctcctcgttgcaaccttcggggttctactcgtgcttaacggctgccttgcgaggcagtcacttggggctccttctcagctacagaacgagtgtaacctcgacaacctagatgttctccaagccaccgaaactatcaagagcgaagccgggcagatcgagtactgggaccacaaccaccctcagctccgatgtgctggtgtgtccgttgctgcgtatgtaattgaacaaggcggtctttacttgcccaccttcttcacttccccaaaaatgtcctacgtcgttcaaggaacgggtatcagcggcagagtggtccctggatgtgccgagaccttcatggactcgc

SEQ ID NO: 142784 - DNA, 386 bp, Arabidopsis thaliana
gaaacttaaagaaaatggtttagctcagcaatctcctcgttgcaaccttcggggttctcctcgtccttaacggctgccttgcgaggcagtcacttggggttcctcctcagctacagaacgagtgtaacctcgacaacctagatgttctccaagccaccgaaactatcaagagtgaagccggtcagatcgagtactgggaccacaaccaccctcagctccgatgtgttggtgtttccgatgctcggtatgtaattgaacaaggcggactttacttgcccaccttcttcacttccccaaaaatttcctacgtcgttcaaggaacgggtatcagcggaagagtggtccctggatgtgccgagacctttatggactcgcagccgatgcaa

SEQ ID NO: 142785 - DNA, 350 bp, Arabidopsis thaliana
  unsure (1)..(350): unsure at all n locations
cacaaacgagtaagaatacaaatacaaatagcaaaaaaaatggcaaacaagctgttgctcgtctgcgcaactttcgccctctgcttactcctcaccaacgcttccatctaccgcactgttggcgagttcgacgaagatgacgccagcaaccccatgggcccaagacagaaatgtcagaaggagtttcagcaatcacagcacctaagagcttgccagaaattgatgcgcatgcaaatgaggcaaggccggggtggtggtccctccctcgacgatgagttcgatttggaagacgacatcgagaacccacaaggcccccagcagggacaccagatcctncagcagtgctgcag

SEQ ID NO: 142786 - DNA, 399 bp, Arabidopsis thaliana
cacaaacgagtaagaatacaaattcatttagctaaaaaaatggcaaacaagctgggggttgtttgcgcaacgtgttggccctctgcttactcctcaccaacgcttccatctaccgcactgctgtcgagttcgacgaagatgacgccagcaaccccatgggcccaagacagaaatgtcagaaggagtttcagcaatcacagcacctaagagcttgccagaaattgatgcgcatgcaaatgaggcaaggccggggtggtggtccctccctcgacgatgagttcgatttggaagacgacatcgagaacccacaaggcccccagcagggacaccagatccttcaacagtgctgcagcgagcttcggcaggaagagccagattgtgttgccccaccttgagaca

SEQ ID NO: 142787 - DNA, 419 bp, Arabidopsis thaliana
tacgtggttgatcgtttttgtgtgttgaaaatcaaaatggcgtcgagcgatgagcgtccaggagcgtatccggcacgtgacggatcagagaacttacctccgggagatccaaagacgatgaagacggtggtgatggataaaggagcggcgatgatgcaatcgttgaaaccgatcaaacagatgagtctccatttgtgttctttcgcttgttatggtcacgatcctagccgtcagattgaagtcaacttctatgttcatcgactcaaccaagactttcttcaatgtgctgtttacgattgcgactcctctaaaccccatctcatcgggatcgagtatattgtgtcggagaggttatttgagagtcttgatccggaggagcaaaagctttggcactctcatgactatgagatccaaacagg

SEQ ID NO: 142788 - DNA, 427 bp, Arabidopsis thaliana
caaaaagaaaatggttaagctcagcaatctcctcgttgcaaccttcggggttctccgcgtccttaacggctgccttgcgaggcagtcacttggggttcctcctcagctacagaacgagtgtaacctcgacaacctagatgttctccaagccaccgaaactatcaagagtgaagccggtcagatcgagtactgggaccacaaccaccctcagctccgatgtgttggtgtttccgttgctcgttatgtaattgaacaaggcggtctttacttgcccaccttcttcacttccccaaaaatttcctacgtcgttcaaggaacgggtatcagcggaagagtggtccctggatgtgccgagaccttcatggactcgcagccgatgcaaggacaacaacaaggccaaccatggcaaggacgacagggacaacaa

SEQ ID NO: 142789 - DNA, 413 bp, Arabidopsis thaliana
ggagtatgtcaggctcagtgccactcgtggcgttctccagggtaatgcgatggtgcttcctaaatacaacatgaacgctaacgagatcttgtactgcactggaggacaaggaaggatccaagtggtcaacgacaacggacagaacgtgttggaccaacaggtgcagaagggacagctcgtggtcatcccacaagggttcgcatacgttgtccagtcccacggaaacaagttcgagtggatctctttcaaaactaatgaaaacgcaatgatcagcactttggcgggtagaacctcgctcttgagggcattgccattggaggtcatatcaaatggtttccagatctctcccgaggaagctaggaagatcaagttcaacacacttgagaccactttgacccgcgctgccggtaggc

SEQ ID NO: 142790 - DNA, 404 bp, Arabidopsis thaliana
taggcattatttttttttcttccaacaaaagaatcaggacaatactcatggtaaccattagagccgacgaaattagtaatattatccgtgaacgtattgagcaatataatagagaagtaacgattgtaaataccggtaccgtacttcaagtgggcgatggcatcgctcgtatttatggtcttgatgaagtaatggcaggtgaattagtagaatttgaggagggtactataggtattgcccttaatttagaatccaataatgttggtgttgtattaatgggtgacggtttgatgatccaagaaggaagttcagtcaaagctacgggaaaaattgctcagataccggtgagtgaggcttatttggtgcgtgttataaacgccttggctaaccctattgatggtcga

SEQ ID NO: 142791 - DNA, 412 bp, Arabidopsis thaliana
tacacacatagcaaaaaatggcaaacaagttgttcctcgtctgcgcagctctcgctctctgcttcctcctcaccaacgcttccatctaccgcaccgtcgttgagttcgaagaagatgacgccactaaccccataggcccaaaaatgaggaaatgccgcaaggagtttcagaaagaacaacacctaagagcttgccagcaattgatgctccagcaagcaaggcaaggccgtagcgatgagtttgatttcgaagacgacatggagaacccacagggacaacagcaggaacaacagctattccagcagtgctgcaacgagcttcgccaggaagagccagattgtgtttgccccaccttgaaacaagctgccaaggccgttagactccagggacagcaccaaccaatgcaagtcag

SEQ ID NO: 142792 - DNA, 441 bp, Arabidopsis thaliana
cacgggtgaggaatgccgggcgcgtaccaccttgcggagaatgggagacaagctgttcctcgtctgcgcagctctcgcgtgtctgcttcctcctcaccaacgcttccatctaccgcaccgtcgttgagttcgaagaagatgacgccactaaccccataggcccaaaaatgaggaaatgccgcaaggagtttcagaaagaacaacacctaagagcttgccagcaattgatgctccagcaagcaaggcaaggccgtagcgatgagtttgatttcgaagacgacatggagaacccacagggacaacagcaggaacaacagctattccagcagtgctgcaacgagcttcgccaggaagagccagattgtgtttgccccacctttgaacaagctgccaaggccgtagactccagggacagcaccaaccaatgcaagtcaggaaaat

SEQ ID NO: 142793 - DNA, 418 bp, Arabidopsis thaliana
gtctttgccaacactccaggctctgcccactggatctacaactcaggagaacagccacttgtcatcatcgctcttctcgacatcgccaactaccaaaaccaactcgaccgcaaccctagagtgttccatttggccggaaacaaccagcagggaggctttggcggttcacagcaacaacaagaacagaaaaacttgtggagcgggttcgacgcacaggtcatagctcaagcattgaaaattgacgttcagttggctcagcagcttcagaaccaacaagacagcagaggaaacatcgttcgtgttaagggacctttccaggtcgtgaggccacctctaagacagccctacgagagcgaggagtggagacacccacgtagcccacagggcaacggccttgaggagactatctgcagcatga

SEQ ID NO: 142794 - DNA, 94 bp, Arabidopsis thaliana
ggaagaaaaattagtcgagactcatattttaggtccaactatttgacactcttgatcctcttcaatggctacactgccaaacagtggcccaacc

SEQ ID NO: 142795 - DNA, 384 bp, Arabidopsis thaliana
ctagaaaccaaatgtcgttgataataatagaacactttctttcgctctctaaaaaggagaggggggctagtcactgattacttctaatcctccggaggagtgagagatgatatctccgacgttgtttcctctcctctgcgctttatttctatgtcttccagtggctggtatcttcacaggccagcgagaactcacctgcgttatctcgccggagtttggtatccgctctcttaccggctcctctctttactctcgaaaagtccccgactcatactacttccttttacggcgggtcggtatctacagccgattcccaaagaagacgaccctcttcttcgaatatctcttgggttaacccgaatctaacctcccggtcgacccggt

SEQ ID NO: 142796 - DNA, 425 bp, Arabidopsis thaliana
  unsure (1)..(425): unsure at all n locations
caaaaagaaaatggttaagctcagcaatctcctcgttgcaaccttcggggttctcctcgtccttaacggctgccttgcgaggcagtcacttggggttcctcctcagctacagaacgagtgtaacctcgacaacctagatgttctccaagccaccgaaactatcaagagtgaagccggtcagatcgagtactgggaccacaaccaccctcagctccgatgtgttggtgtttccgttgctcgttatgtaattgaacaaggcggtctttacttgcccaccttcttcacttccccaaaaatttcctacgtcgntcaaggaacgggtatcagcggaagagtggtccctggatgtgccgagaccttcatggactcgcagccgatgcaaggacaacaacaaggccaaccatggcaaggacgacagggacaac

SEQ ID NO: 142797 - DNA, 191 bp, Arabidopsis thaliana
aaacacacacaaatctctgaagtaaaatgacgttcccttctctttctgtctcatttctcttctttgccttcatattcgttacgcatgcattcgacctcagcatcatccagatgcaacagggaacatgtccgtacacggtggttgtcatgacaagctgtctttcttcggagttgacaagagatcagatctgc

SEQ ID NO: 142798 - DNA, 294 bp, Arabidopsis thaliana
caaaaagaaaatggttaagctcagcattctcctcgttgcaaccttcggggttcttctcgtccttaacggctgccttgcgaggcagtcacttggtgatcctcctcagctacagaacgagtgtaaccttgacaacctagatgttctccaagccaccgaatctattaagagtgatgccggtcagattgagtactgtgaccacaaccaccctcatcttctatgtgttgttgttcacgttcctctttttgtaattaataataggctgtttatttctttgcttcaactctttttattttt

SEQ ID NO: 142799 - DNA, 188 bp, Arabidopsis thaliana
agaaaaatgggtcgagtctcatctattatctctctctctttgacactcttgatccggttcaatggctgcgctgcccaacagtggcccaactagttccagctcgatcaactcaatgcgcttgaaccattccaaatcatcaagagcgtggactgttcttattgatgatttcgttatcatctatttctatt

SEQ ID NO: 142800 - DNA, 427 bp, Arabidopsis thaliana
aacagctacaatcttcctatcctcagacttctccgccttagcgctcttcgtggctccatccgtaaaaacgctatggtgctaccgcaatggaacgtaaacgcaaacgcggcactctacgtgacaaacggaaaggctcatatacaaatggtgaacgacaacggagaaagagtgttcgaccaagagatctccagcggacagttactagtcgtgccacaaggcttttcggtcatgaaacatgccataggcgaacagttcgagtggatcgaattcaagacaaacgaaaacgcacaggtcaacacactcgcgggccgtacctcagtcatgagaggtttgccgcttgaggttataaccaatgggtaccagatctctcccgaagaagctaaacgagtaaagtttagcacgattgagaccacactgacccatagca

SEQ ID NO: 142801 - DNA, 404 bp, Arabidopsis thaliana
ctctttctctcttcgaccagtttcttccttcaacttacgtttccgccattttcttgtacgatgatcactcaaaccaagaagacatccagaggctcaaaagctcactctctcagactctgtctctcttttatccactcgctggacaaatcaaagatggagtcactgtccattgcaacgatgagggagctttgtttacagaggaacgggctgatatatttctctcggattttctgagaaccccatcagatgctgatttgattcaaaagttcattgtctctccggaccatgcagatccagaaacatggccgttgttgcacgtcaaggtcatcttctttaaagacaaaggatttgcggttgcagttagcgtgtcgcacaagatatgcgatgcggcctcgttgtcaacg

SEQ ID NO: 142802 - DNA, 396 bp, Arabidopsis thaliana
ccgggatgcgccgagacgttcatggagtcaccggtatttggagaaggtcaaggtcagggtcagagtcaagggttccgtgacatgcaccagaaagtagagcacctactgtgcggagacaccattgcaacaccatctggtgtagctcaatggttctacaacaatggaaatgagcctctcattcttgttgcagtcgtggatcttgccagcaaccataaccagctttgaccgtaaccttagaccatttttgatagccggaaacaacccacaagggcaggaatggctacatggccgtaagcaacatatgcaaaacaacatctttaatggcttcgctccttgagatcttggctcaagccttcatatcaatgtcgtgacggctcatcatcttcagaaccagca

SEQ ID NO: 142803 - DNA, 417 bp, Arabidopsis thaliana
cgaaaaaatgccggcggcgaagaggactcccaaggttaaccgtaaccctgacctaatcaggggagttggaaaatattcgaggtctcagatgtaccacaagagaggtttgtgggctatcaaggccaagaacggtggcgttttccctcgtcacgatgctcagccaaaggtcgacgctccggttgagaagcctgccaagttttattcggcggaagacgtgaagaagccgcttgttaacagacgcaagcctaagcctaccaagctaaaagccagcatcactccaggaacagtgttgatcattcttgctggtagattcaagggcaagagagatgtcttcctcaagccaacttcttctgggttgcttcttgtaacaggaccattcaagattaatggtggttcattgagacgtgttaaccaagc

SEQ ID NO: 142804 - DNA, 410 bp, Arabidopsis thaliana
aacaaaaagaaaatggttaagctcagtaatctcctcgttgcaaccttcggggttctcctcgtccttaacggctgccttgcgaggcagtcacttggggttcctcctcagctacagaacgagtgtaacctcgacaacctagatgttctccaagccaccgaaactatcaagagtgaagccggtcagatcgagtactgggaccacaaccaccctcagctccgatgtgttggtgtttccgttgctcgttatgtaattgaacaaggcggtctttacttgcccaccttcttcacttccccaaaaatttcctacgtcgttcaaggaacgggtatcagcggaagagtggtccctggatgtgccgagaccttcatggactcgcagccgatgcaaggacaacaacaaggccaaccatggca

SEQ ID NO: 142805 - DNA, 301 bp, Arabidopsis thaliana
  unsure (1)..(301): unsure at all n locations
ccacgcgtncgaaacaacaaggccaaccatggcaaggactacagggacaacaaggccaaccatgggggggacagggacaacagggacagcaaggaagacaaggccaaccatgggaaggacagggacaacagggacaacaaggacgacagggacaacaaggccaaccatgggaaggacagggacagcagggacaacaagggttacgtgacatgcaccagaaggtggaacaagtgagacgcggagaccttgatgccaacacttcaagctatttccactggatctacaaactaatgagaacagt

SEQ ID NO: 142806 - DNA, 413 bp, Arabidopsis thaliana
gaaaaacttgtggagcgggttcgacgcacaggtcatagctcaagcattgaaaattgacgttcagttggctcagcagcttcagaaccaacaagacagcagaggaaacatcgttcgtgttaagggacctttccaggtcgtgaggccacctctaagacagccctacgagagcgaggagtggagacacccacgtagcccacagggcaacggccttgaggagactatctgcagcatgaggtcccacgagaacattgacgaccctgctcgtgctgacgtgtacaagcccagcctaggtcgcgtgaccagcgtcaacagctaccttgcccatcttggagtatgtcaggctcagtgccactcgtggcgttctccagggtaatgcgatggtgcttcctaaatacaacatgaacgctaacgag

SEQ ID NO: 142807 - DNA, 154 bp, Arabidopsis thaliana
tcggaaaaacttgtggtgcggattccacgcacaggtcatagctcaagcattgaaaatggtcgttctgttgacttagcagctccagaacctacttgacatcatatgtaacatcttcttgtgtcacggtacctatccaggtattgtggccaccttt

SEQ ID NO: 142808 - DNA, 392 bp, Arabidopsis thaliana
ccaaaaacaaacgaaaagaagcgacttttgcctcttttggtctctccccttctccggagagatctgctctctctatctatctctcaatctgtaagaagaagattcccacttcagtaaaagccctaactttacttgggaaagttcttcatctatcatccttcaatcgtcatcatccatggctgatcaacaaaccctagattcctctactcctcctcctactcaatccgatgatctatctcactcccactctacttcctctactacttcagcttcttcttcctcagatccatcactcttgaggtctctctccttaagtcgactcaacgccggagctcctgagttcgttcctggtcgaactactcctccgctgcctcaacctccgaggatgatta

SEQ ID NO: 142809 - DNA, 426 bp, Arabidopsis thaliana
caaaaagaaaatggttaagctcagcaatctcctcgttgcaaccttcggggttctcctcgtccttaacggctgccttgcgaggcagtcacttggggttcctcctcagctacagaacgagtgtaacctcgacaacctagatgttctccaagccaccgaaactatcaagagtgaagccggtcagatcgagtactgggaccacaaccaccctcagctccgatgtgttggtgtttccgttgctcgttatgtaattgaacaaggcggtctttacttgcccaccttcttcacttccccaaaaatttcctacgtcgttcaaggaacgggtatcagcggaagagtggtccctggatgtgccgagaccttcatggactcgcagccgatgcaaggacaacaacaaggccaaccaaggcaaggacgacagggacaaca

SEQ ID NO: 142810 - DNA, 227 bp, Arabidopsis thaliana
gtggaacatgtgagacgcggagacgatttttccaacactccatgttgtgcccactggagctacaaacggggggatcgggcggtagtcattatcgctcttttcgacattgccaaccaccaaaaccaacttcaccgcatccctagagcgtgccatctgaccgtttacaacctaaatcgaggctatcgagtgctgttgccacaacttctccaagttactatgtgttgctg

SEQ ID NO: 142811 - DNA, 319 bp, Arabidopsis thaliana
aaacaaaaagaaaatggttaagctcagcaatctcctcgttgcaaccttcggcggtgtcctcgtccttaacggctgccttgcgaggcagtcacttggggttcctcctcacctacagaacgagtgtaacctcgacaacctagatgttctgcaagccaccggaactatcaagagtgcagccggtccgatcgagtactgggaccacaaccaccctcagctccgatgcgttggtgttaacgctgctcgctatgtcaactgacacggcggcctttgcttgcccaccctcgtcactatcgcaaaaattgactacgtcgattaccga

SEQ ID NO: 142812 - DNA, 401 bp, Arabidopsis thaliana
aaagaaaatggttaagctcagcaatctcctcgttgcaaccttcggggttctcctcgtccttaacggctgccttgcgaggcagtcacttggggttcctcctcagctacagaacgagtgtaacctcgacaacctagatgttctccaagccaccgaaactatcaagagtgaagccggtcagatcgagtactgggaccacaaccaccctcagctccgatgtgttggtgtttccgttgctcgttatgtaattgaacaaggcggtctttacttgcccaccttcttcacttccccaaaaatttcctacgtcgttcaaggaacgggtatcagcggaagagtggtccctggatgtgccgagaccttcatggactcgcagccgatgcatggacaacaacaaggccaaccat

SEQ ID NO: 142813 - DNA, 306 bp, Arabidopsis thaliana
cagacagccaagtacttgcccaacgtttgcgacgttctcctcgtccataacggttcgtctagcatgccttcattcccttctttctacctcagctacagcacgcgcttaacgcgtatgacatagatgttgtccaagcctccaaaactatcatgggtgcataccgccccatctagtactgggaccacaaccaccctcagctccgatgtgttggggttaccgttgctctatatgaaaaagaacaaggcggtttttactagcccaccttcttcactgtcccaaaaatttcctacgtcgtccaaggatacg

SEQ ID NO: 142814 - DNA, 429 bp, Arabidopsis thaliana
ggccaaccatggcaaggacgacagggacaacaaggccaaccatgggaaggacagggacaacagggacaacaaggaagacaaggccaaccatgggaaggacagggacaacagggacaacaaggacgacagggacaacaaggccaaccatgggaaggacagggacagcagggacaacaagggttccgtgacatgcaccagaaggtggaacatgtgagacgcggagacgtctttgccaacactccaggctctgcccactggatctacaactcaggagaacagccacttgtcatcatcgctcttctcgacatcgccaactaccaaaaccaactcgaccgcaaccctagagtgttccatttggccggaaacaaccagcaaggaggctttggcggttcacagcaacaacaagaacagaaaaacttgtggagcggg

SEQ ID NO: 142815 - DNA, 323 bp, Arabidopsis thaliana
ataaaaatggctcgagtctcttctcttctttctttctccttaacacttttgatccttttccatggctacgcggctcaacagggtcagcagggtcagcagtttcccaacgagtgccagctcgaccagctcaatgcgctcgagcctttacacgtactgaagagcgaggctggtcgcatcgaggtgtggcaccaccacgctcctcagctccgttgctcacgtgtactctttggacgttacatcatcgtgtgtaagggtctctacttgccctgtatccttaacactcgtgaagatctccttcgtggctataggccgctgtcttattc

SEQ ID NO: 142816 - DNA, 421 bp, Arabidopsis thaliana
ccggggcgagccacgcgtccggccctactagagcgaggagtggagacacccacgtagcccacagggcaacggccttgaggagactatctgcagcatgaggtcccacgagaacattgacgaccctgctcgtgctgacgtgtacaagcccagcctaggtcgcgtgaccagcgtcaacagctataccttgcccatcttggagtatgtcaggctcagtgccactcgtggcgttctccagggtaatgcgatggtgcttcctaaatacaacatgaacgctaacgagatcttgtactgcactggaggacaaggaaggatccaagtggtcaacgacaacggacagaacgtgttggaccaacaggtgcagaagggacagctcgtggtcataccacaagggttcgcatacgttgtccagtcccacggaaac

SEQ ID NO: 142817 - DNA, 316 bp, Arabidopsis thaliana
aaagaaaatggttaagctcagcaatctcctcgttgcaaccttcggggttctcctcgtccttaacggctgccttgcgaggcagtcacttggggttcctcctcagctacagaacgagtgtaacctcgacaacctagatgttctccaagccaccgaaactatcaagagtgaagccggtcagatcgagtactgggaccacaaccaccctcagctccgatgtgttggtgtttccgttgctcgttatgtaattgaacaaggcggtctttacttgcccaccttcttcactgtcccaaaaattatctacgtcgtccaaggaacg

SEQ ID NO: 142818 - DNA, 411 bp, Arabidopsis thaliana
agagcgaggagtggagacacccacgtagcccacagggcaacggccttgaggagactatctgcagcatgaggtcccacgagaacattgacgaccctgctcgtgctgacgtgtacaagcccagcctaggtcgcgtgaccagcgtcaacagctataccttgcccatcttggagtatgtcaggctcagtgccactcgtggcgttctccagggtaatgcgatggtgcttcctaaatacaacatgaacgctaacgagatcttgtactgcactggaggacaaggaaggatccaagtggtcaacgacaacggacagaacgtgttggaccaacaggtgcagaagggacagctcgtggtcattccacaagggttcgcatacgttgtccagtcccacggaaacaagttcgagtggatctctt

SEQ ID NO: 142819 - DNA, 408 bp, Arabidopsis thaliana
agaaatataagaaataacaaaatggctcgagtctcttctcttctttctttcttcttaacacttttgatccttttccatggctacgcggctcaacagggtcagcagggtcagcagtttccgaacgagtgccagctcgaccagctcaatgcgctcgagccgtcacacgtactgaagagcgaggctggtcgcatcgaggtgtgggaccaccacgctcctcagctccgttgctcaggtgtctcctttgcacgttacatcatcgagtctaagggtctctacttgccctctttctttaacaccgcgaagctctctttcgtggctaagggacgaggtcttatgggaaaagtgatccctggatgcgccgaaacattccaagactcatcagagttccaaccacgcttcgaaggtcaa

SEQ ID NO: 142820 - DNA, 424 bp, Arabidopsis thaliana
aaataacaaaatggctcgagtctcttctcttctttctttcttcttaacacttttgatccttttccatggctacgcggctcaacagggtcagcagggtcagcagtttccgaacgagtgccagctcgaccagctcaatgcgctcgagccgtcacacgtactgaagagcgaggctggtcgcatcgaggtgtgggaccaccacgctcctcagctccgttgctcaggtgtctcctttgcacgttacatcatcgagtctaagggtctctacttgccctctttctttaacaccgcgaagctctctttcgtggctaagggacgaggtcttatgggaaaagtgatccctggatgcgccgaaacattccaagactcatcagagttccaaccacgcttcgaaggtcaaggtcaaagccagaggtttcgtgacatg

SEQ ID NO: 142821 - DNA, 417 bp, Arabidopsis thaliana
gaaccacttgtcatcgtcagcgtcttcgatctagccagtcaccagaaccagcttgaccgcaacccaaggccattttacttagccggaaacaacccacaaggtcaagtatggctacaaggccgagagcaacagccacagaagaacattttcaatggatttggacccgaggttattgctcaagctttgaagatcgatcttcagacagcgcagcaacttcagaaccaagatgacaaccgtggaaacattgtccgagtccaaggcccgttcggtgtcattaggccgcctttgaggggccagagacctcaagaggaggaagaagaagaagaaggacgacatggacgacacggtaatggcttagaggagaccatctgcagcgccaggtgcaccgataacctcgatgacccgtctcgtgctgac

SEQ ID NO: 142822 - DNA, 414 bp, Arabidopsis thaliana
aaaaagaaaatggttaagctcagcaatctcctcgttgcaaccttcggggttctcctcgtccttaacggctgccttgcgaggcagtcacttggggttcctcctcagctacagaacgagtgtaacctcgacaacctagatgttctccaagccaccgaaactatcaagagtgaagccggtcagatcgagtactgggaccacaaccaccctcagctccgatgtgttggtgtttccgttgctcgttatgtaattgaacaaggcggtctttacttgcccaccttcttcacttccccaaaaatttcctacgtcgttcaaggaacgggtatcagcggaagagtggtccctggatgtgccgagaccttcatggactcgcagccgatgcaaggacaacaacaaggccaaccatggcaaggacga

SEQ ID NO: 142823 - DNA, 390 bp, Arabidopsis thaliana
caaacaaaaagaaaatggttaagctcagcaatctccccgttgcaaccttcggggttctcctcgtccttaacggctgccttgcgaggcagtcacttggggttcctcctcagctacagaacgagtgtaacctcgacaacctagatgttctccaagccaccgaaactatcaagagtgaagccggtcagatcgagtactgggaccacaaccaccctcagctccgatgtgttggtgtttcctgtgctcgttatgtaattgaacaaggcggtctttacttgcccaccttcttcactttcccaaaaatttcctacgtcgttcaaggaacgggtatcagcggaagagtggtccctggatgtgccgagacctttaaggactcgcagccgatgcaaggac

SEQ ID NO: 142824 - DNA, 409 bp, Arabidopsis thaliana
gtcccgtgaagaaaagggttgaacgagacagagatgatccgagctttgtgataacaacttacgagggttcccacaatcactcaagcatgaactaagactcgaactaaggctcaaggagaccatgctatattcagcacatcttattttctatggttacaaacgatacttaaaactgcttctagttctttatattcattgtaaactggttgcaggttcacaaattttgagaggtttatgacattctaaatctgtagtacttctatagcatcttattttgctacaagtgagaatcgatggacgtaacagtccagagaacctcatatcatatcataaactagcaatcttagaatatcaatgcaaatctaagcagataattaccagaacaattcccaaaccactaatgaacaca

SEQ ID NO: 142825 - DNA, 384 bp, Arabidopsis thaliana
tgcttcctaaatacaacatgaacgctaacgagatcttgtactgcactggaggacaaggaaggatccaagtggtcaacgacaacggacagaacgtgttggaccaacaggtgcagaagggacagctcgtggtcatcccacaagggttcgcatacgttgttcagtcccacggaaacaagttcgagtggatctctttcaaaactaatgaaaacgcaatgatcagcactttggcgggtagaacctcgctcttgagggcattgccattggaggtcatatcaaatggttttcagatctcttccgaggaagctaggaagatcaagttcaacacacttgagaccactttgacccgcgctgtcggtaggcaacaacaacagttgatcgaggaga

SEQ ID NO: 142826 - DNA, 428 bp, Arabidopsis thaliana
caaaaagaaaatggttaagctcagcaatctcctcgttgcaaccttcggggttctcctcgtccttaacggctgccttgcgaggcagtcacttggggttcctcctcagctacagaacgagtgtaacctcgacaacctagatgttctccaagccaccgaaactatcaagagtgaagccggtcagatcgagtactgggaccacaaccaccctcagctccgatgtgttggtgtttccgttgctcgttatgtaattgaacaaggcggtctttacttgcccaccttcttcacttccccaaaaatttcctacgtcgttcaaggaacgggtatcagcggaagagtggtccctggatgtgccgagaccttcatggactcgcagccgatgcaaggacaacaaccaggccaaccatggcaaggacgacagggacaacaag

SEQ ID NO: 142827 - DNA, 288 bp, Arabidopsis thaliana
caaaaagaaaatggttaagctcagcaatctcctcgatgcaaccttcggggttctcctcgtccttaacggctgccttgcgaggcaggcacttggggttcctcctcagctacagaacgagtgtaacctcgacaacctagatgttctccaagccaccgaaactatcaagagtgaagccggtcagatcgagtactgggaccacaaccaccctcagctccgatgtgttggtgtttccgttgctcgttatgatattgaacaaggcggtctttacttgtccaccttttttacttt

SEQ ID NO: 142828 - DNA, 409 bp, Arabidopsis thaliana
ctcctcgttgcaaccttcggggttctcctcgtccttaacggctgccttgcgaggcagtcacttggggttcctcctcagctacagaacgagtgtaacctcgacaacctagatgttctccaagccaccgaaactatcaagagtgaagccggtcagatcgagtactgggaccacaaccaccctcagctccgatgtgttggtgtttccgttgctcgttatgtaattgaacaaggcggtctttacttgcccaccttcttcacttccccaaaaatttcctacgtcgttcaaggaacgggtatcagcggaagagtggtccctggatgtgccgagaccttcatggactcgcagccgatgcaaggacaacaacaaggccaaccatggcaaggacgacagggacaacaaggccaaccat

SEQ ID NO: 142829 - DNA, 409 bp, Arabidopsis thaliana
  unsure (1)..(409): unsure at all n locations
ttttgattcccaaaacaaaaaactttcttcaattattctattcatcttctcatggcggctctctccaccaccttctactaccacccactctgcactaaccaccgtacaaagagacaagcctcaagcagacacggagttagatctatgagagtgatgtcttgtcggaagcagaaattaccagaagagaatgaaggagtgatccagagaacattgagaaggatgatttcagaggctgggaagattgggaagaatctgaagccagagaagaagaaaggagacgtcaaggacctgatgcttatgagtctctcttttgctggttatgtttatatctctcaactattnggttgtgcttacttctcctggcaacatctcagcttcctcaaatcttcatggtagtagctaagctagc

SEQ ID NO: 142830 - DNA, 417 bp, Arabidopsis thaliana
tcgcaaaaagaaaatggttaagctcagcaatctcctcgttgcaaccttcggggttctcctcgtccttaacggctgccttgcgaggcagtcacttggggttcctcctcagctacagaacgagtgtaacctcgacaacctagatgttctccaagccaccgaaactatcaagagtgaagccggtcagatcgagtactgggaccacaaccaccctcagctccgatgtgttggtgtttccgttgctcgttatgtaattgaacaaggcggtctttacttgcccaccttcttcacttccccaaaaatttcctacgtcgttcaaggaacgggtatcagcggaagagtggtccctggatgtgccgagaccttcatggactcgcagccgatgcaaggacaacaacaaggccaaccatggccaggacg

SEQ ID NO: 142831 - DNA, 210 bp, Arabidopsis thaliana
caaaaagaaaatggttaagctcagcaatctcctcgttgcaaccttccgggttctcctcgtccttaacggctgacttgcgaggcagccacttggaggatccacgcagacacacaccgagatgcaacttgataacctatatatagtgtcagctaacgacaatatactgagcgaagccttacaacgcgaggactgggaccaccaccacgctaa

SEQ ID NO: 142832 - DNA, 424 bp, Arabidopsis thaliana
aattcaacaagagatcgcagcagttaccgtgcaggctgcgtatagaggatacttggcacgacgtgctttcaagatattaaaaggtataataaggctacaagcacttatccgtggtcacatggttagaaggcaagctgtttcgactctgtgctgtgttatgggaattgtcagattgcaagcacttgctcgtgggagagagatcagacattcagacattggagttgaagttcagaggaaatgtcatttgcatcatcagcctttagagaataaagccaactcggttgttgatacacattcttacttgggaatcaataagctaacaggaaatgcttttgctcagaagcttctagcttcatcgccaaacgtgcttgccttgtccctcgacaatgattcttccaattcaatctggttagagaactggtca

SEQ ID NO: 142833 - DNA, 411 bp, Arabidopsis thaliana
caaaaagaaaatggttaagctcagcaatctcctcgttgcaaccttcggggttctcctcgtccttaacggctgccttgcgaggcagtcacttggggttcctcctcagctacagaacgagtgtaacctcgacaacctagatgttctccaagccaccgaaactatcaagagtgaagccggtcagatcgagtactgggaccacaaccaccctcagctccgatgtgttggtgtttccgttgctcgttatgtaattgaacaaggcggtctttacttgcccaccttcttcactttcccaaaaatttcctacgtcgttcaaggaacgggtatcagcggaagagtggtccctggatgtgccgagaccttcatggactcgcagccgatgcaaggacaacaacaaggccaaccatggcaagg

SEQ ID NO: 142834 - DNA, 410 bp, Arabidopsis thaliana
catttctttagctcaaccttcattactaatctccttttaaggtttctttcgtgaatcagatcggaaaaatggaatcttttttgttcacatctgaatccgtcaacgagggacatcccgacaagctttgtgatcagatctccgacgctatcctcgatgcttgccttgaacaagaccctgagagcaaagttgcttgtgagacttgtaccaagactaacatggtcatggtttttggagaaatcaccaccaaggctaacgttgattacgagcagattgttcgtaaaacatgccgtgagattggattcgtatctgctgacgttggtctagatgctgacaattgcaaggttctggttaacattgagcaacagagtcctgacattgcacaaggtgttcatggtcatcttaccaagaag

SEQ ID NO: 142835 - DNA, 423 bp, Arabidopsis thaliana
cgttatgtaattgaacaaggcggtctttacttgcccaccttcttcacttccccaaaaatttcctacgtcgttcaaggaacgggtatcagcggaagagtggtccctggatgtgccgagaccttcatggactcgcagccgatgcaaggacaacaacaaggccaaccatggcaaggacgacagggacaacaaggccaaccatgggaaggacagggacaacagggacaacaaggaagacaaggccaaccatgggaaggacagggacaacagggacaacaaggacgacagggacaacaaggccaaccatgggaaggacagggacagcagggacaacaagggttccgtgacatgcaccagaaggtggaacatgtgagacgcggagacgtctttgccaacactccaggctctgtccactggatctacaac

SEQ ID NO: 142836 - DNA, 449 bp, Arabidopsis thaliana
  unsure (1)..(449): unsure at all n locations
ccggggcgacccacgcgnnncgaaaacatacacacatagcaaaaaatggcaaacaagttgttcctcgtctgcgcagctctcgctctctgcttcctcctcaccaacgcttccatctaccgcaccgtcgttgagttcgaagaagatgacgccactaaccccataggcccaaaaatgaggaaatgccgcaaggagtttcagaaagaacaacacctaagagcttgccagcaattgatgctccagcaagcaaggcaaggccgtagcgatgagtttgatttcgaagacgacatggagaacccacagggacaacagcaggaacaacagctattccagcagtgctgcaacgagcttcgccaggaagagccagattgtgtttgccccaccttgaaacaagctgccaaggccgttagactccagggacagcaccaaccaatgcaggtcaggaaaattta

SEQ ID NO: 142837 - DNA, 418 bp, Arabidopsis thaliana
  unsure (1)..(418): unsure at all n locations
cctacagttagcctcacgtgagcagaaaaaggctgacgaaagcgtcttgagacttgtagaagaacatcagaggcaaaaagaagatgctttgaacaagatccttctgcttgagaagcagctagacaccaaacagacactggaaatggagattcaagagctaaaaggcaaattacaagtgatgaagcatctgggggatgatgatgatgaggcggtccagaagaaaatgaaagagatgaatgatgagctggatgacaagaaagctgagttagaagggctagaaagtatgaactcagtcttgatgacaaaagaacgccaaagcaatgatgagatacaagcagcgcggaaaaanatgattgcgggtttgacaggattgttgggtgccgagaccgatatgggagtaaaaaggatgggagaactt

SEQ ID NO: 142838 - DNA, 400 bp, Arabidopsis thaliana
aagaaaatggttaagctcagcaatctcctcgttgcaaccttcggggttctcctcgtccttaacggctgccttgcgaggcagtcacttggggttcctcctcagctacagaacgagtgtaacctcgacaacctagatgttctccaagccaccgaaactatcaagagtgaagccggtcagatcgagtactgggaccacaaccaccctcagctccgatgtgttggtgtttccgttgctcgttatgtaattgaacaaggcggtctttacttgcccaccttcttcacttccccaaaaatttcctacgtcgttcaaggaacgggtatcagcggaagagtggtccctcgatgtgccgagaccttcatggactcgcagccgatgcaaggacaacaacaaggccaaccat

SEQ ID NO: 142839 - DNA, 225 bp, Arabidopsis thaliana
  unsure (1)..(225): unsure at all n locations
gggggacccacgcgnccgcggacgcgtgggcggacgcgtgggaagagattgaagacgaaacaggagaaagatggaaaattgaaagctgataataacaataacaatgttgatgcgttttctgatgctggatggactatgagagttaggtccgtcttctgagatctctgagaagagaatctattgggaagaatcgagttatgattatggagtgtttgtgaaggaatt

SEQ ID NO: 142840 - DNA, 332 bp, Arabidopsis thaliana
catacacacatagcaaaaaatggcaaacaagttgttcctcgtctgcgcagctctcgctctctgcttcctcctcaccaacgcttccatctaccgcaccgtcgttgagttcgaagaagatgacgccactaaccccataggcccaaaaatgaggaaatgccgcaaggagtttcagaaagaacaacacctaagagcttgccagcaattgatgctccagcaagcaaggcaaggccgtagcgatgagtttgatttcgaagacgacatggagaacccacagggacaacagcaggaacaacagctattccagcagtgctgcaacgagcttcgtcaggaag

SEQ ID NO: 142841 - DNA, 409 bp, Arabidopsis thaliana
agaaatataagaaataacaaaatggctcgagtctcttctcttctttctttcttcttaacacttttgatccttttccatggctacgcggctcaacagggtcagcagggtcagcagtttccgaacgagtgccagctcgaccagctcaatgcgctcgagccgtcacacgtactgaagagcgaggctggtcgcatcgaggtgtgggaccaccacgctcctcagctccgttgctcaggtgtctcctttgcacgttacatcatcgagtctaagggtctctacttgccctctttctttaacaccgcgaagctctctttcgtggctaagggacgaggtcttatgggaaaagtgatccctggatgcgccgaaacattccaagactcatcagagttccaaccacgcttcgaaggtcaag

SEQ ID NO: 142842 - DNA, 408 bp, Arabidopsis thaliana
cagaagcggtgcctatatcgtgaggcaggctgcaaagagcgtggtagcagcaggactcgcacgccgttgtatcgtgcaggtatcatacgccattggtgtccctgagccgctctcagtgtttgttgacacctacaagaccgggaccatcccagacaaggatatccttgtgttgatcaaggaagcatttgacttcaggccgggaatgatggccattaaccttgaccttaagaggggaggtaacttcaggttccagaaaaccgctgcgtatggccatttcgggcgtgatgaccctgacttcacttgggaggttgtcaagccgctcaagccaaaggcctagacagaaacaaagctggcaattgcaagaactgagttgagtcactccccaactactgggaacttatcattata

SEQ ID NO: 142843 - DNA, 233 bp, Arabidopsis thaliana
  unsure (1)..(233): unsure at all n locations
aacaaacanaaagaaaatggttaagctcagcaatctcctcgttgcaacccttcgggggttctcctcgtccttaacgggctgccttgcgaggcagtcacttggggttcctcctcagctacagaacgagtgtaacctcgacaacctagatgttctccaagccaccgaaactatcaagagtgaagccggtcagatcgagtactgggaccacaaccaccctcagcttcgatgtgttg

SEQ ID NO: 142844 - DNA, 427 bp, Arabidopsis thaliana
cctctctctcatttctcggagatattcaccagagcaataaccatggacgctaaagctgccaccgatttgaaaagaccgagagaagaggatgataacggcggcgccgctaccatggagacggagaacggagatcagaaaaaggaacctgcttgtttctccactgttattcctgggtggttctctgaaatgagtcctatgtggccaggagaggcacactcattgaaggttgagaaagttttgtttcaagggaaatcagattatcaggatgttattgttttccagtctgcaacatatggaaaagttttggttttggatggagtaatccaacttacggagagagatgaatgtgcttatcaggaaatgatcactcatcttcctttgtgttctatccctaaccctaagaaggttttggtcattggaggaggag

SEQ ID NO: 142845 - DNA, 431 bp, Arabidopsis thaliana
gcagccgatgcaaggacaacaacaaggccaaccatggcaaggacgacagggacaacaaggccaaccatgggaaggacagggacaacagggacaacaaggaagacaaggccaaccatgggaaggacagggacaacagggacaacaaggacgacagggacaacaaggccaaccatgggaaggacagggacagcagggacaacaagggttccgtgacatgcaccagaaggtggaacatgtgagacgcggagacgtctttgccaacactccaggctctgcccactggatctacaactcaggagaacagccacttgtcatcatcgctcttctcgacatcgccaactaccaaaaccaactcgaccgcaaccctagagtgttccatttggccggaaacaaccagcagggaggctttggcggttcacagcaacaacaag

SEQ ID NO: 142846 - DNA, 421 bp, Arabidopsis thaliana
gtgaactgttgttgttgtgctctttggtttcatcgagagagaacctaaacccgatctgaaccaataacaataagaagacgaatggcgtcttcgtcgttctcagtcacatctccagctgctgctgcttccgtctatgcagtcactcaaaccttctcgcacttcccaatccaaaaccgctctcgcagagtttctttccgtctctctgctaagcccaagcttcgctttctctccaagcctagtcgcagtagctaccctgtggtgaaagcacaatctaacaaggttagtactggtgcatcatcaaatgctgccaaagttgatgggccatcatcagctgaaggaaaggagaaaaactcattgaaggagtcgtctgcttcttctcctgaattagctacagaagagtctatttctgagttccttaccc

SEQ ID NO: 142847 - DNA, 358 bp, Arabidopsis thaliana
aaacatacacacatagcaaaaaatggcaaacaagttgttcctcgtctgcgcagctctcgctctctgcttcctcctcaccaacgcttccatctaccgcaccgtcgttgagttcgaagaagatgacgccactaaccccataggcccaaaaatgaggaaatgccgcaaggagtttcagaaagaacaacacctaagagcttgccagcaattgatgctccagcaagcaaggcaaggccgtagcgatgagtttgatttcgaagacgacatggagaacccacagggacaacagcaggaacaacagctattccagcagtgctgcaacgagcttcgccaggaagagccagattgtgtttgccccacc

SEQ ID NO: 142848 - DNA, 417 bp, Arabidopsis thaliana
gaaatattaagcataaatattatcattcatgtgaatgtcaaagcatccaaattgtattcagtactacattcacatcgttaaacatatcttctaaaattaatacccggataaccaacaatctaactaacaagatacactttaaaaattggatatgttgaaaacaaaaatgctacaatcaatcaacaaaaccgtataaccagtttgagaatgtattacgaatttttctttttttataaagaagaattattttgttattcctatttatcatgtaaaaatataagttatttaaagaaattgagcttagtattaagaattgcgtatgtcaatattttgatattttttaagtcgcatattttacattatggggaagaatgttcttttatttgcagtgaacgtcttcatttagcactttacgca

SEQ ID NO: 142849 - DNA, 441 bp, Arabidopsis thaliana
gagagatagagggacacattaaaagctaattcaacttttctgcaatggctgagaaggagaagaagaagcatttacatgagtttcttgaagatgaccaagagccttttcatcttaaccattacatcggcaaccttcgttctcagatgggttgctccgatatgcgtgtcaagaagcgaaagtccgataacgtcgccacgtttcctcctggtttgttctcctgcgagaactcttgtttcttcgcagctcataaatctcctgacccgagaaagtctccactctttgagctccggtcgccgggaaagaagaagatacgtgacggtcgagttttccttcagataccggcgagaaccgccgcaattctcttggacgcagcggcgaggattcagaagcagcagtcagaagaggctaagaccaataaagctcggaccagagaaacgggtt

SEQ ID NO: 142850 - DNA, 399 bp, Arabidopsis thaliana
aagaggaagaaaaatgggtcgagtcttatctattatctctttctctttgacactcttgatcctcttcaatggctacactgcccaacagtggcccaacgagtgccagctcgatcaactcaatgcgctcgaaccatcccaaatcatcaagagcgagggtggtcgcatcgaggtctgggaccaccatgcaccccagctccgttgctccggctttgcctttgagcgtttcgtcattgagcctcagggtcttttcttgcccactttcttgaacgccggcaaactcacgtttgttgttcacggaaggggtctaatgggaagagttattccgggatgcgccgtgacgttcatggagtcaccggtatttggagaaggtcaaggtcagggtcagagtcaagggttccg

SEQ ID NO: 142851 - DNA, 419 bp, Arabidopsis thaliana
tgcttcatcattaccaaatcatcaacttaatcgtttctctcaaatttagggttttctcttttctcgaaagtcttgcggttttctgaatcatctctatctggtttgagggtttcgtttgatatctggagaaaggggtttctggaaacaaggagttcataattcgcgatcttgatctatcgatcttcatttatatataaaagcgtgaatgagattatgatggagtcgaaaggtggtaaaaagaagtccagcagtagtagttccttattttacgaagctcccctcggttacagcattgaagacgttcgtccaaacggtggaatcaagaaattcaaatcttctgtctactcaaactgctccaagaggccatcctgagtaccagcgtgcaccgatcttcataatatagttatagctttctttac

SEQ ID NO: 142852 - DNA, 329 bp, Arabidopsis thaliana
atcaaaatggctagcgactcttctattctttctttctccttaacactagggatccttttccatggctacgcggctcaacagggtcagcaaggtcagtagttttcgaacgagtgccagcttgaccagctcaatgcgcttgagccttcacacgtactgaagagcgaggctggtcgcatctgaggtgtgggaccaccacgctcctcagctctgatgctcaggtgtcttctttgcacgttacatcaaagagtcttagggtctgtacttgacctttctttttaacaccgtgatgctgtactgtatggcttaaggactaggtcttatggaaaaag

SEQ ID NO: 142853 - DNA, 413 bp, Arabidopsis thaliana
tctgaagatactctctcctcgaatcctctattgcagaattttgacttccctccgtttgactccgttgatgctcaccatgtcagacctgggattcgtgctctgttgcagcagctcgaagctgaattggagcagctagaaaaagctgtagagccttcatggccaaaactagtggagccattagagaagattattgatcggttatctgttgtttggggaatgatcaatcatcttaaggctgtcaaggacacacctgagcttcgtgctgccattgaagaagttcagccggagaaggtgaagttccagctcaggttgggacagagcaaacccatttacaatgcatttaaagctattcgagaatctccagactggaattcattgagcgaagctcgtcaacgattagttgaagcccaaat

SEQ ID NO: 142854 - DNA, 375 bp, Arabidopsis thaliana
  unsure (1)..(375): unsure at all n locations
gcctcggcaatatacctgcaagtcagcatcataagtcaggcgcttatctttgtgacccgatcacggagttggtcttatgtagaacgtcctgggatgttgcttgtggtagcctttatccttgcacaattggtggctactctaattgcagtctatgcgaattggagctttgctgcaatagaaaggatcgggtggggatgggccggggtcatctggctttacaatatcgnattctatattcctcttgatatcatcaagttcttgattcgttatgcccttagcggaagagcctgggatcttgttatcgaacaaagggttgcattcacgaggcagaaggatttcgggaaagaacaaaaggagctacaatgggcacatgca

SEQ ID NO: 142855 - DNA, 420 bp, Arabidopsis thaliana
cagaaggtggaacatgtgagacgcggagacgtctttgccaacactccaggctctgcccactggatctacaactcaggagaacagccacttgtcatcatcgctcttctcgacatcgccaactaccaaaaccaactcgaccgcaaccctagagtgttccatttggccggaaacaaccagcagggaggctttggcggttcacagcaacaacaagaacagaaaaacttgtggagcgggttcgacgcacaggtcatagctcaagcattgaaaattgacgttcagttggctcagcagcttcagaaccaacaagacagcagaggaaacatcgttcgtgttaagggacctttccaggtcgtgaggccacctctaagacagccctacgagagcgaggagtggagacacccacgtagcccacagggcaac

SEQ ID NO: 142856 - DNA, 426 bp, Arabidopsis thaliana
cccctttccagaaaaatcaaccaaacccatttcagtttccccggaaagtttttgtctttcaatcaccattagaattcagctgcaacacaagtgtttgcaacagagagaatcatggagagagctatggaaagacaaaagatattgcttcgtcatctcaatccagtttcttcttctaattcttctcttaaacatgaaccttctcttctgtctcctgtgaattgtgtttctgaagtttccccaatggctgcttttggagatgacattgtgattgtagcggcatatcgtaccgccatttgcaaagcgagacgtggaggtttcaaagacactcttcctgatgatcttcttgcttctgttcttaaggctgtagtggaaagaacatctttggatccaagtgaagttggtgatatcgttgttggtaccgtgata

SEQ ID NO: 142857 - DNA, 433 bp, Arabidopsis thaliana
  unsure (1)..(433): unsure at all n locations
cagcaacaacaagaacagaaaaacttgtggagcgggttcgacgcacaggtcatagctcaagcattgaaaattgacgttcagttggctcagcagcttcagaaccaacaagacagcagaggaaacatcgttcgtgttaagggacctttccaggtcgtgaggccacctctaagacagccctacgagagcgaggagtggagacacccacgtagcccacagggcaacggccttgaggagactatctgcagcatgaggtcccacgagaacattgacgaccctgctcgtgctgacgtgtacaagcccagcctaggtcgcgtgaccagcgtcaacagctataccttgcccatcttggagtatgtcaggctcagtgccactcgtggcgttctccagggtaatgcgatggtgcttncctaatacaacatgaacgctaacgaga

SEQ ID NO: 142858 - DNA, 247 bp, Arabidopsis thaliana
agacaataacaaacctttagttgtagttcgttcctttatttgctgtcggtattactcttttaagtctttttgtgttttactcttcagatttatgctggggctgactttattcttgtaccgtcgatatttgagccatgtggactgacacagcttatagtcatgagatacggcgctgttcctgttgtttgaaatactggaggtaactgttcatgagtttggttagatatctaagcttttcttattttat

SEQ ID NO: 142859 - DNA, 228 bp, Arabidopsis thaliana
aaaaagaaaatggttaagctcagcaatctcctcgttgcaaccttcggggttctcctcgtccttaacggctgccttgcgaggcagtcacttggggttcctcctcagctacagaacgagtgtaacctcgacaacctagatgttctccaagccaccgaaactatcaagagtgaagccggtcagatcgagttctgggaccacaaccaccctcagctccgatgtgttggtgtt

SEQ ID NO: 142860 - DNA, 427 bp, Arabidopsis thaliana
tcaagagtgaagccggtcagatcgagtactgggaccacaaccaccctcagctccgatgtgttggtgtttccgttgctcgttatgtaattgaacaaggcggtctttacttgcccaccttcttcacttccccaaaaatttcctacgtcgttcaaggaacgggtatcagcggaagagtggtccctggatgtgccgagaccttcatggactcgcagccgatgcaaggacaacaacaaggccaaccatggcaaggacgacagggacaacaaggccaaccatgggaaggacagggacaacagggacaacaaggaagacaaggccaaccatgggaaggacagggacaacagggacaacaaggacgacagggacaacaaggccaaccatgggaaggacagggacagcagggacaacaagggttccgtgacatgca

SEQ ID NO: 142861 - DNA, 423 bp, Arabidopsis thaliana
cgcttcgaaggtcaaggtcaaagccagaggttccgtgacatgcaccagaaagtggagcacattatgagcggtgataccattgccacaacacccggtgtagcacagtggttctacaacgacggacaggaaccacttgtcatcgtcagcgtcttcgatctagccagtcaccagaaccagcttgaccgcaacccaaggccattttacttagccggaaacaacccacatggtcaagtatggctacaaggccgagagcaacagccacagaagaacattttcaatggatttggacccgaggttattgctcaagctttgaagatcgatcttcagacagcgcagcaacttcagaaccaagatgacaaccgtggaaacattgtccgagtccaaggcccgttcggtgtcattaggccgtctttgagggggcag

SEQ ID NO: 142862 - DNA, 419 bp, Arabidopsis thaliana
caaaaagaaaatggttaagctcagcaatctcctcgttgcaaccttcggggttctcctcgtccttaacggctgccttgcgaggcagtcacttggggttcctcctcagctacagaacgagtgtaacctcgacaacctagatgttctgcaagccaccgaaactatcaagagtgaagccggtcagatcgagtactgggaccacaaccaccctcagctccgatgtgttggtgtttccgttgctcgatatgtaattgaacaaggcggactttacttgcccaccttcttcacttccccaaaaatttgctacgtcgttcaaggaacgggtatcagcggaagagtggttcctggatgtgccgagaccttcatggactcgcagccgatgcaaggacaacaacaaggccaaccatggcaaggacgacagg

SEQ ID NO: 142863 - DNA, 427 bp, Arabidopsis thaliana
caaaaaaagagagagtaaaacagaatagagttatcctaataaccaaacactctcaaaatcatttcccaaaaaccccaaagctttgtcacacacacttcttctcgtttagaaaatttgcatttcaatcagaaaattggtcttccccttggagacgacaatgcagaggttttgcactaagctacgttccatttccctccaatccaatcggaatctctcctttttcggtgcttctcctcaccgtctcattcaccattctccttctccgagtcgtcacttaacaacaacaacaaccctaggtttcgccaattcgaccaaatggagtttccttcccgccgccggagtttctccgttgaatgttagctccatgggctctacctttgttcctcatcacgtaagtttccagaatttagcttcaattgcttttata

SEQ ID NO: 142864 - DNA, 422 bp, Arabidopsis thaliana
cacggtaatggcttagaggagaccatctgcagcgccaggtgcaccgataacctcgatgacccgtctcgtgctgacgtgtacaagccacagctcggttacatcagcactctcaacagttacgatctccccatccttcgcttcatccgtctctcagccctccgtggatctatccgtcaaaacgcaatggtgcttccacagtggaacgcaaacgcgaacgctattctttacgtgacagacggggaagcccaaatccagatcgtaaacgacaatggtaacagagtgtttgacggacaagtctctcaaggacagctcatagccgtaccacaaggtttctcggtggtgaaacgcgcaacaagcaaccgattccagtgggttgagttcaaaacaaacgctaacgcgcaaatcaacactctggcgggacg

SEQ ID NO: 142865 - DNA, 416 bp, Arabidopsis thaliana
agaaaaatgggtcgagtctcatctattatctctttctctttgacactcttgatcctcttcaatggctacactgcccaacagtggcccaacgagtgccagctcgatcaactcaatgcgctcgaaccatcccaaatcatcaagagcgagggtggtcgcatcgaggtctgggaccaccatgcaccccagctccgttgctccggctttgcctttgagcgtttcgtcattgagcctcaaggtcttttcttgcccactttcttgaacgccggcaaactcacgtttgttgttcacggaaggggtctaatgggaagagttattccgggatgcgccgagacgttcatggagtcaccggtatttggagaaggtcaaggtcagggtcagagtcaagggtttcgtgacatgcaccagaaagttgagca

SEQ ID NO: 142866 - DNA, 431 bp, Arabidopsis thaliana
ctctactctctcctcaaaaactcaaaagagcaaaaaaaagagaagaagaatcaaaatcccacacaatggcaacacactcttccttcaccgcaacaacacctctctttctcatcgttcttctatccctatcctccgtctcagttctcggcgcatctcaccaccacgcaacggcgccggctccgtctgtagactgttcgactctcatactcaacatggctgactgtttatccttcgtttcgagcggaggcacggtggcgaaaccggaaggtacatgttgctctggtcttaagacggtgcttaaagctgactctcagtgtctatgtgaagcgtttaagagcagtgcttctcttggagttactttgaatatcactaaggcttctactcttcccgccgcatgcaagcttcacgctccttctatcgctacttgtgga

SEQ ID NO: 142867 - DNA, 429 bp, Arabidopsis thaliana
caaaatggctcgagtctcttctcttctttctttcttcttaacacttttgatccttttccatggctacgcggctcaacagggtcagcagggtcagcagtttccgaacgagtgccagctcgaccagctcaatgcgctcgagccgtcacacgtactgaagagcgaggctggtcgcatcgaggtgtgggaccaccacgctcctcagctccgttgctcaggtgtctcctttgcacgttacatcatcgagtctaagggtctctacttgccctctttctttaacaccgcgaagctctctttcgtggctaagggacgaggtcttatgggaaaagtgatccctggatgcgccgaaacattccaagactcatcagagttccaaccacgcttcgaaggtcaaggtcaaagccagaggttccgtgacatgcaccagaaagt

SEQ ID NO: 142868 - DNA, 437 bp, Arabidopsis thaliana
aagaaaatggttaagctcagcaatctcctcgttgcaaccttcggggttctcctcgtccttaacggctgccttgcgaggcagtcacttggggttcctcctcagctacagaacgagtgtaacctcgacaacctagatgttctccaagccaccgaaactatcaagagtgaagccggtcagatcgagtactgggaccacaaccaccctcagctccgatgtgttggtgtttccgttgctcgttatgtaattgaacaaggcggtctttacttgcccaccttcttcacttccccaaaaattttctacgtcgttcaaggaacgggtatcagcggaagagtggtccctggatgtgcccagaccttcatggactcgcaagcgatgcaaggacaacaacaaggccaaccatggcaaggacgacagggacaacaaggccaaccatggga

SEQ ID NO: 142869 - DNA, 417 bp, Arabidopsis thaliana
aacaaaaagaaaatggttaagctcagcaatctcctcgttgcaaccttcggggttctcctcgtccttaacggctgccttgcgaggcagtcacttggggttcctcctcagctacagaacgagtgtaacctcgacaacctagatgttctccaagccaccgaaactatcaagagtgaagccggtcagatcgagtactgggaccacaaccaccctcagctccgatgtgttggtgtttccgttgctcgttatgtaattgaacaaggcggtctttacttgcccaccttcttcacttccccaaaaattttctacgtcgttcaaggaacgggtattagcggaagagtggtccctggttgtgccgagaccttcatggactcgcagccgatgcaaggacaacaacatggtcaaccatggtaaggacta

SEQ ID NO: 142870 - DNA, 416 bp, Arabidopsis thaliana
acccttccaaaaccttaatggactcgaagccgatgcagggacaacaccaaggccaaccatggcaaggacgacagggacaacaaggccaaccatgggaaggacagggacaacagggacaacaaggaagacaaggccaaccatgggaaggacagggacaacagggacaacaaggacgacagggacaacaaggccaaccatgggaaggacagggacagcagggacaacaagggttccgtgacatgcaccagaaggtggaacatgtgagacgcggagacgtctttgccaacactccaggctctgcccactggatctacaactcaggagaacagccacttgtcatcatcgctcttctcgacatcgccaactaccaaaaccaactcgaccgcaaccctagagtgttccatttggccggaaac

SEQ ID NO: 142871 - DNA, 428 bp, Arabidopsis thaliana
ggatcattctcacttcgccggccgacgttcttccttccgccgtcggtatctatatttacgatccacgatctctcttgctgtttctgtcttcatcgtgacgaaaatggctgctcgtatcgggatcttctccgtcttcgtagctgtattgttatctatttctgcattttcctcagctcaggatctccagatcgtaaatgccgagcgaaggattgatttaagctcacatatcgtgaaggccttcttgactctcaaggttgaaaatattgggaaagatcctgctgcagaaatgcttcttgctttcccacctacccagatcaagaatttggctatggtacaagccctggcaactactggcaagaagaagaagaaaacttatttgccattagatgtaaaaccaactgaacaacctgatgcaccaaatgacactg

SEQ ID NO: 142872 - DNA, 421 bp, Arabidopsis thaliana
cacaagcatcaaaagcagaaacaaatatatacatcaccataatcatcatcatcattagaaccttcatctttttgagcaacaaagttatgggtttctcgggaatttggttaaatctttatgtggtgtttggatctttaatggtttttgagagaatggtggtgatgaaggcacagccactggttccagcaattttcatatttggtgattcggtggttgatgtgggaaacaacaatgatatctacacaatcgtcaaagctaatttccctccttatggaagagatttcacaacccatacacccaccggacgcttctgcaatggaaagttagctactgacttcaccgctgagaatcttgggttcaaatcatacccacaagcttatctaagcaaaaaggcaaaaggcaagaaccttttgattggagc

SEQ ID NO: 142873 - DNA, 425 bp, Arabidopsis thaliana
gatgacaaccgtggaaacattgtccgagtccaaggcccgttcggtgtcattaggccgcctttgaggggccagagacctcaggaggaggaagaagaagaagaaggacgacacggacgacacggtaatggcttagaggagaccatctgcagcgccaggtgcaccgataacctcgatgatccgtctcgtgctgacgtgtacaagccacagctcggttacatcagcactctcaacagttacgatctccccatccttcgcttcatccgtctctcagccctccgtggatctatccgtcaaaacgcaatggtgcttccacagtggaacgcaaacgcgaacgccattctttacgtgacagacggggaagcccaaatccagatcgtaaacgacaatggtaacagagtgtttgacggacaagtctctcaaggaca

SEQ ID NO: 142874 - DNA, 395 bp, Arabidopsis thaliana
  unsure (1)..(395): unsure at all n locations
gcgaacccaacgcgnntccggaataagaaactcctcatgntgnntctgtgtgtngnngtgatgtcannagctggctttttgcaagggnngatgaatannaggttcttgtagnnnaccgagctgtagganngcttaagnnnttgattttggagttctggaaggaatgtagtttgaacgtacacgaaacaagaagtttccagttgtagctttacagacgtttaggggaacagctattcctccacagtattgcgattaagggtctcttgatgaagttgactgatggaaaaagccattataagtacctggtgttcgggcaacatcaaatgtgggcggcgcagttctacaattacaagaagccaaggcagtggctatcatcaggaggccttggagctatg

SEQ ID NO: 142875 - DNA, 420 bp, Arabidopsis thaliana
ccttcattgaatgaataaaaaattgaattccacatccgcttgggtgggaccaacgaaatcgagtgcttactcccactttttattgaattaaccgattaatttgctatcgaagattttttctgtattcgaaaaaattcgtaacaaaatttaacatattttttttattatgagaacaaatcctactacttcaaatccagaggtttcgatacgtgaaaaaaaaaacctgggacgtatcgcccaaatcattggtccggtactggatgtagccttccccccgggcaaaatgcctaatatttacaatgctctggtggttaagggtcgagatactcttggtcagaaattaatgtgacttgggaaggtcagcaattttttggaaataatcgagttagagctgtagctatgagtgcgacagaaggttta

SEQ ID NO: 142876 - DNA, 428 bp, Arabidopsis thaliana
caaccctagagtgttccatttggccggaaacaaccagcagggaggctttggcggttcacagcaacaacaagaacagaaaaacttgtggagcgggttcgacgcacaggtcatagctcaagcattgaaaattgacgttcagttggctcagcagcttcagaaccaacaagacagcagaggaaacatcgttcgtgttaagggacctttccaggtcgtgaggccacctctaagacagccctacgagagcgaggagtggagacacccacgtagcccacagggcaacggccttgaggagactatctgcagcatgaggtcccacgagaacattgacgaccctgctcgtgctgacgtgtacaagcccagcctaagtcgcgtgaccagcgtcaacagctataccttgcccatcttggagtatgtcaggctcagtgcca

SEQ ID NO: 142877 - DNA, 424 bp, Arabidopsis thaliana
ctcttctcttctttctttcttcttaacacttttgatccttttccatggctacgcggctcaacagggtcagcagggtcagcagtttccgaacgagtgccagctcgaccagctcaatgcgctcgagccgtcacacgtactgaagagcgaggctggtcgcatcgaggtgtgggaccaccacgctcctcagctccgttgctcaggtgtctcctttgcacgttacatcatcgagtctaagggtctctacttgccctctttctttaacaccgcgaagctctctttcgtggctaagggacgaggtcttatgggaaaagtgatccctggatgcgccgaaacattccaagactcatcagagttccaaccacgcttcgaaggtcaaggtcaaagccagaggttccgtgacatgcaccagaaagtggagcacatt

SEQ ID NO: 142878 - DNA, 436 bp, Arabidopsis thaliana
atcacaaagaaagagtttttttaactagcttagctcaaagtgtttgcttaagacaagaagaacatggcgtcttaccagaaccgtccaggaggtcaggccactgacgagtacggaaacccgatccagcagcagtatgacgagtacggaaatccgatgggaggaggaggatacggaactggtggtggtggaggagctacaggtggccaaggatacggaacaggtggccaagggtacggatcaggtggccaagggtacggaaccggtggccaaggatacggaaccgggaccgggactgaaggctttggaactggcggaggagctaggcaccacggccaagagcaactccacaaggaaagtggtggtggcttgggaggaatgcttcaccgctccggatctggatccagctctagctcggaggatgatggacaaggagggg

SEQ ID NO: 142879 - DNA, 393 bp, Arabidopsis thaliana
cgaatggatctcttagttgttgagagggttgcccaaaggcagtatatagagcatacccagtaaaacttacaagtaacccagatataaagatggcgactagggttgctgtttccattattatagaattgaaagaccacaccggatctatgctaagatcatttatttacaacggaatggtatacaaagtcaacagatcgtaatgaatacaaaataagatttatggctacacaaactgttgaagatagttctagatctggtccaagaagcactactgtagggaagttattgaaaccattgaattccgaatttggtaaagtagctcccggatggggaacgacccctttgatgggtgttgcaatggctttatttgcggtatttctatctatttatttg

SEQ ID NO: 142880 - DNA, 168 bp, Arabidopsis thaliana
cgtatggacatcttagatgttgacaggtattgtccaaaggcagtatataagagcatagctctttaatcttacaagtaacccatatataaagatggcgactagggtggctgtttctattattatagcaattgaaagaatacaccgtgatattatgctaaatgtcattta

SEQ ID NO: 142881 - DNA, 429 bp, Arabidopsis thaliana
aaaattgtggaagaaagatcaaatctttgacgacatcaaggaggaggatttggtaagctacagataaaaacaaaagctatgatatgagataatgtagtccaccaccacaccaaattcccccttcaccgtctctcttcgtcggtgattcacattccgatttggtgtcttttttactcttaacaagtcctcaaaaaccctacttttactcgagattttgtctccgccgccgagtaccaagtgcctcccgatctacgccccaatccctaaatggctacggaggctacaaccgtacccaaattccaggaacctgatctccggcaggtttctcagacaccggatttcaaaccggaaatcgctcacgatggtcttaagttctggcaatttatgattgctggttcgattgctggctccgtcgaacacatggcgatg

SEQ ID NO: 142882 - DNA, 433 bp, Arabidopsis thaliana
  unsure (1)..(433): unsure at all n locations
atgtgagacgcggagacgtctttgccaacactccaggctctgcccactggatctacaactcaggagaacagccacttgtcatcatcgctcttctcgacatcgccaactaccaaaaccaactcgaccgcaaccctagagtgttccatttggccggaaacaaccagcagggaggctttggcggttcacagcaacaacaagaacagaaaaacttgtggagcgggttcgacgcacaggtcatagctcaagcattgaaaattgacgttcagttggctcagcagcttcagaaccaacaagacagcagaggaaacatcgttcgtgttaagggacctttccaggtcgtgaggccacctctaagacagccctacgagagcgaggagtggagacacccacgtagcccacagggcaacggcctngaggagactatctgcagcat

SEQ ID NO: 142883 - DNA, 410 bp, Arabidopsis thaliana
ggtcacaccggtccatgatgtggaaggagtagagttatgtgggactttgaagaatgtagttgctattgcagcgggtttcgtggacggtttggaaatgggtaataacacaaaggctgcaatcatgaggattggtctaagagagatgaaagcactctcaaagcttttgtttccatctgttaaagattgtactttcttcgagagctgcggtgtagcagatgtcattacaacttgcttaggaggaagaaaccggagagttgcggaagcatttgcaaaaagcagaggaaaaaggtcttttgatgagcttgaagcagagatgctacaagggcaaaagctacaggtgggatcgacggtaaaagaggtctacgaggtgttgaaacattgtcgatggttggagctttttaccttctttt

SEQ ID NO: 142884 - DNA, 422 bp, Arabidopsis thaliana
cacatagcaaaaaatggcaaacaagttgttcctcgtctgcgcagctctcgctctctgcttcctcctcaccaacgcttccatctaccgcaccgtcgttgagttcgaagaagatgacgccactaaccccataggcccaaaaatgaggaaatgccgcaaggagtttcagaaagaacaacacctaagagcttgccagcaattgatgctccagcaagcaaggcaaggccgtagcgatgagtttgatttcgaagacgacatggagaacccacagggacaacagcaggaacaacagctattccagcagtgctgcaacgagcttcgccaggaagagccagattgtgtttgccccaccttgaaacaagctgccaaggccgttagactccagggacagcaccaaccaatgcaagtcaggaaaatttaccaga

SEQ ID NO: 142885 - DNA, 399 bp, Arabidopsis thaliana
gaaatataagaaataacaaaatggctcgagtctcttctcttctttctttcttcttaacacttttgatccttttccatggctacgcggctcaacagggtcagcagggtcagcagtttccgaacgagtgccagctcgaccagctcaatgcgctcgagccgtcacacgtactgaagagcgaggctggtcgcatcgaggtgtgggaccaccacgctcctcagctccgttgctcaggtgtctcctttgcacgttacatcatcgagtctaagggtctctacttgccctctttctttaacaccgcgaagctctctttcgtggctaagggacgaggtcttatgggaaaagtgatccctggatgcgccgaaacattccaagacttatcagagtttcaaccccgcttcg

SEQ ID NO: 142886 - DNA, 426 bp, Arabidopsis thaliana
aaaatggctcgagtctcttctcttctttctttctccttaacacttttgatccttttccatggctacgcggctcaacagggtcagcagggtcagcagtttccgaacgagtgccagctcgaccagctcaatgcgctcgagccttcacacgtactgaagagcgaggctggtcgcatcgaggtgtgggaccaccacgctcctcagctccgttgctcaggtgtctcctttgcacgttacatcatcgagtctaagggtctctacttgccctctttctttaacaccgcgaagctctccttcgtggctaaaggacgaggtcttatgggaaaagtgatccctggatgcgccgaaacattccaagactcatcagagttccaaccacgcttcgaaggtcaaggtcaaagccagaggtttcgtgacatgcaccagaaa

SEQ ID NO: 142887 - DNA, 415 bp, Arabidopsis thaliana
aaagaaaatggttaagctcagcaatctcctcgttgcaaccttcggggttctcctcgtccttaacggctgccttgcgaggcagtcacttggggttcctcctcagctacagaacgagtgtaacctcgacaacctagatgttctccaagccaccgaaactatcaagagtgaagccggtcagatcgagtactgggaccacaaccaccctcagctccgatgtgttggtgtttccgttgctcgttatgtaattgaacaaggcggtctttacttgcccaccttcttcactttcccaaaaatttcctacgtcgttcaaggaacgggtatcagcggaagagtggtccctggatgtgccgagaccttcatggactcgcatgctatgcaaggacaacaacaaggccaaccatgggcaggtcgacag

SEQ ID NO: 142888 - DNA, 423 bp, Arabidopsis thaliana
tacacacatagcaaaaaatggcaaacaagttgttcctcgtctgcgcagctgtcgctctctgcttcctcctcaccaacgcttccatctaccgcaccgtcgttgagttcgaagaagatgacgccactaaccccataggcccaaaaatgaggaaatgccgcaaggagtttcagaaagaacaacacctaagagcttgccagcaattgatgctccagcaagcaaggcaaggccgtagcgatgagtttgatttcgaagacgacatggagaacccacagggacaacagcaggaacaacagctattccagcagtgctgcaacgagcttcgccaggaagagccagattgtgtttgtcccaccttgaaacaagctgtcaatgccgttagacttcagggacagcaccaaccaatgcaggtcaggaaaatttacc

SEQ ID NO: 142889 - DNA, 389 bp, Arabidopsis thaliana
gacggtaaaaatcaacagatttatattttctcagcttccaagtcatggacgaaacagatagggcaagtcgaaggcatatttttgctaacttcatgaagtactatcgtttccaaactttccattgcaagtttataagcactactaatttgagttctagtctccagaataggattgctagacttcaattgttttcggatgcgatgcacatcatccattagcaaggcaatgttatccttaagcgcggatgtacccatgacctattaacattcaagaaataacattaattatgatattaaacaaacgactttgtagccatgaaagagttaccaaatcgataagtttagtatgaatcgcagtaatattttgaattcagataatccccaattctc

SEQ ID NO: 142890 - DNA, 427 bp, Arabidopsis thaliana
caaaaagaaaatggttaagctcagcaatctcctcgttgcaaccttcggggttctcctcgtccttaacggctgccttgcgaggcagtcacttggggttcctcctcagctacagaacgagtgtaacctcgacaacctagatgttctccaagccaccgaaactatcaagagtgaagccggtcagatcgagtactgggaccacaaccaccctcagctccgatgtgttggtgtttccgttgctcgttatgtaattgaacaaggcggtctttacttgcccaccttcttcacttccccaaaaatttcctacgtcgttcaaggaacgggtatcagcggaagagtggtccctggatgtgccgagaccttcatggactcgcagccgatgcaaggacaacaacaaggccaaccatggcaaggacgacagggacaacaa

SEQ ID NO: 142891 - DNA, 326 bp, Arabidopsis thaliana
caacaaacaaaaagaaaatggttaagctcagcaatctcctcgttgcaaccttcggggttctcctcgtccttaacggctgccttgcgaggcagtcacttggggttccttctcagctacagaacgagtgtaacctcgacaacctagatgttctccaagccaccgaaactatcaagagtgaagccggtcagatcgagtactgagaccacaaccactctcagctccgatgtgttggtgtttccgttgctcgatatgacattgaacaaggcggtctttacttgcccaccttttttactttcccaaaaatttcctacgtcgatcaaggaacg

SEQ ID NO: 142892 - DNA, 243 bp, Arabidopsis thaliana
caacaaacaaaaagaaaatggttaagctcagcaatctcctcgttgcaaccttcggggttctcctagtccttaacggctgccttgcgaggcagtcacttggggttccttctcagctacagaacgagtgtaacctcgacaacctagatgttctccaagccaccgaaactatcaagagtgaagccggtcagatcgagtactgggaccacaaccaccctcagctcctatgtgttgctgttgtcgttg

SEQ ID NO: 142893 - DNA, 373 bp, Arabidopsis thaliana
aaaagaaaatggttaagctcagcaatctcctcgttgcaaccttcggggttctcctcgtccttaacggctgccttgcgaggcagtcacttggggttcctcctcagctacagaacgagtgtaacctcgacaacctagatgttctccaagccaccgaaactatcaagagtgaagccggtcagatcgagtactgggaccacaaccaccctcagctccgatgtgttggtgtttccgttgctcgttatgtaattgaacaaggcggtctttacttgcccaccttcttcactttcccaaaaatttcctacgtcgttcaaggaacgggtatcagcggaagagtggtccctggatgtgccgagaccttcatggactcgcagcc

SEQ ID NO: 142894 - DNA, 422 bp, Arabidopsis thaliana
aaaaatggctcgagtctcttctcttctttctttctccttaacacttttgatccttttccatggctacgcggctcaacagggtcagcagggtcagcagtttccgaacgagtgccagctcgaccagctcaatgcgctcgagccttcacacgtactgaagagcgaggctggtcgcatcgaggtgtgggaccaccacgctcctcagctccgttgctcaggtgtctcctttgcacgttacatcatcgagtctaagggtctctacttgccctctttctttaacaccgcgaagctctccttcgtggctaaaggacgaggtcttatgggaaaagtgatccctggatgcgccgaaacattccaagactcatcagagttccaaccacgcttcgaaggtcaaggtcaaagccagaggttccgtgacatgcacc

SEQ ID NO: 142895 - DNA, 426 bp, Arabidopsis thaliana
gtttgagcggtggattttgtatggagccgccgagttcgagaccggaggaacctccgtcatgggaggatctttacaaaatcaatcttatgccgtcggagctattccttaagttccgcaaagagcttcaaggccttcgcgtcggcgtcaatctcgagttatataacgaccccacgaatgattaccacgcaaagcttgttttgaagcctctatgtccagaaaggaagtggaagtttatatatgagccgctacaccaagaagttcgtgttttatcgaagaagattcctgtcaccagatttttaaacctccaggttggtgttggacataactttcaaatgaatgcaattggttggaaatggaagcttacttcatgtttgggtggagatggtgtgtctcggattcgaaataaaactactcttggtcttagtc

SEQ ID NO: 142896 - DNA, 402 bp, Arabidopsis thaliana
cccaaaagttccattctttttcacaaagccattgtgctgttttctccatttggatcaaaatggttgctgagaacaataaaaacaaggacgtaacactctctgcatcaatggacaacaacaacaacaacatcaaaggaactaacattcatcttgaggttcatcaaaaggaaccagctttggtcaaacctgaatccgagacacgaaagggcctttacttcttgtcgaatcttgaccagaacatcgccgtgattgttcgtacaatctactgtttcaaatccgaggagagagggaacgaggaagcagtccaagtgatcaagaaagctctgagtcaagttcttgttcattactatcctctcgctggaacgcctaccatcagtcctgaaggtaaactcacagttgact

SEQ ID NO: 142897 - DNA, 393 bp, Arabidopsis thaliana
tagtcataaaaaaaaaaaaacatacaaaaaagtttcaatggccgcctcaacaatggctctctcctcccctgctttcgccggaaaggctgtgaacctttcccctgcggcatcagaagtccttggaagcggccgtgtgacaatgaggaagactgttgccaagccaaagggtccatcaggcagcccatggtacggatccgaccgagtcaagtacttgggtccattctctggcgagtcacccagctaccttaccggagagttccctggagactacggatgggacacagctggtctatccgctgaccccgagacattcgcaaggaaccgtgagctagaagttatccacagcaggtgggccatgctcggagccctaggctgcgtcttccctgagctttt

SEQ ID NO: 142898 - DNA, 502 bp, Arabidopsis thaliana
  unsure (1)..(502): unsure at all n locations
cgnntccgaaatatttaagaaataacccaaaatggggctcgaggtctnncttctcttnnctttctttcnnttcttaacgacnnttttganntcctttnntccatggctacccgcggctttcaacccagggtcangnncagggtcangggcagtttctcgaaccgaggtgccanngctcgacnncagctcnnaatgtcgctcnngagccgnntcacacgtaccctgaaganngcgaggctgnnngtcgcatcgannggtgtgggacncnnaccacgccttcctcagctcncgttggctcagnngtgtctcctttgcaccgttacccatcatcgaagtctaaggggtnnctctacttgcnncctctttctttaacccaccgcgaagctctctttcgtggcttaagggaccgaggtcnnttatgggaaaagtgatctcctggattgcgccgaaacattccaagactcatcagagttccaaccacgcttcgaaggtcaaggtcaaa

SEQ ID NO: 142899 - DNA, 339 bp, Arabidopsis thaliana
aaacaaccagcggggaggctttggcggttcacagcagcaacatgaacagagaaacttgtgcatcgcgtttgacgcacacgtcataccttaagcattgaataattgaccttcagatggcttatcagcttcagaacctacatgacagccaaggaaacattactcgtgttatgggaccttttcaggtcgtgtggccacatctcagacagccctactagagcgaggagaggggacacccacgtagtccacagggcaaccgtcttgaggagactatctgcagcatgaggtctcacgagaacattttctacctttgtttgtgcttgccgtgatcaagcccagtct

SEQ ID NO: 142900 - DNA, 331 bp, Arabidopsis thaliana
aagtaataaactaacaacatatggcgaacaagctcttcctcgtttgcgcagatctcgccctgtgtttcatgctcaccaacgctaccgtctatcgcacggatgtcgagttcgacgaagatgaccccagtaaccccataggcccaatacagaaatgtcagaaggagtttcagcaagaacagcacctaagagcttgccagagatggatgcgcaagcaaatgtggtaaggacgtgggggtggaccttcccttaacgataagatcgatatggattaccacattttgtaaccctgagtgacgacagcttctccagaagtgctgtagtgagctttctc

SEQ ID NO: 142901 - DNA, 417 bp, Arabidopsis thaliana
caaaaagaaaatggttaagctcagcaatctcctcgttgcaaccttcggggttctcctcgtccttaacggctgccttgcgaggcagtcacttggggttcctcctcagctacagaacgagtgtaacctcgacaacctagatgttctccaagccaccgaaactatcaagagtgaagccggtcagatcgagtactgggaccacaaccaccctcagctccgatgtgttggtgtttccgttgctcgttatgtaattgaacaaggcggtctttacttgcccaccttcttcacttccccaaaaatttcctacgtcgttcaaggaacgggtatcagcggaagagtggtccctggatgtgccgagaccttcatggactcgcagccgatgcaaggacaacaacaaggccaaccatggcaaggacgaca

SEQ ID NO: 142902 - DNA, 408 bp, Arabidopsis thaliana
atcacaaacgagtaagaatacaaatacaaatagcaaaaaaaatggcaaacaagctcttcctcgtctgcgcaactttcgccctctgcttcctcctcaccaacgcttccatctaccgcactgttgtcgagttcgacgaagatgacgccagcaaccccatgggcccaagacagaaatgtcagaaggagtttcagcaatcacagcacctaagagcttgccagaaattgatgcgcatgcaaatgaggcaaggccgtggtggtggtccctccctcgacgatgagttcgatttggaagacgacatcgagaacccacaaggcccccagcagggacaccagatcctccagcagtgctgcagcgagcttcgccaggaagagccagttttgtgttgccccaccttgagacaagctgcca

SEQ ID NO: 142903 - DNA, 409 bp, Arabidopsis thaliana
ggttaagctcagcaatctcctcgttgcaaccttcggggttctcctcgtccttaacggctgccttgcgaggcagtcacttggggttcctcctcagctacagaacgagtgtaacctcgacaacctagatgttctccaagccaccgaaactatcaagagtgaagccggtcagatcgagtactgggaccacaaccaccctcagctccgatgtgttggtgtttccgttgctcgttatgtaattgaacaaggcggtctttacttgcccaccttcttcacttccccaaaaatttcctacgtcgttcaaggaacgggtatcagcggaagagtggtccctggatgtgccgagaccttcatggactcgcagccgatgcaaggacaacaacaaggccaaccatggcaaggacgacaggga

SEQ ID NO: 142904 - DNA, 406 bp, Arabidopsis thaliana
aagaggaagaaaaatgggtcgagtctcatctattatctctttctctttgacactcttgatcctcttcaatggctacactgcccaacagtggcccaacgagtgccagctcgatcaactcaatgcgctcgaaccatcccaaatcatcaagagcgagggtggtcgcatcgaggtctgggaccaccatgcaccccagctccgttgctccggctttgcctttgagcgtttcgtcattgagcctcagggtcttttcttgcccactttcttgaacgccggcaaactcacgtttgttgttcacggaaggggtctaatgggaagagttattccgggatgcgccgagacgttcatggagtcaccggtatttggagaaggtcaaggtcagggtcagagtcaagggttccgtgacatg

SEQ ID NO: 142905 - DNA, 428 bp, Arabidopsis thaliana
aacaaaaagaaaatggttaagctcagcaatctcctcgttgcaaccttcggggttctcctcgtccttaacggctgccttgcgaggcagtcacttggggttcctcctcagctacagaacgagtgtaacctcgacaacctagatgttctccaagccaccgaaactatcaagagtgaagccggtcagatcgagtactgggaccacaaccaccctcagctccgatgtgttggtgtttccgttgctcgttatgtaattgaacaaggcggtctttacttgcccaccttcttcacttccccaaaaatttcctacgtcgttcaaggaacgggtatcagcggaagagtggtccctggatgtgccgagaccttcatggactcgcagccgatgcaaggacaacaacaaggccaaccatggcaaggacgacagggacaaca

SEQ ID NO: 142906 - DNA, 421 bp, Arabidopsis thaliana
cgccaactaccaaaaccaactcgaccgcaaccctagagtgttccatttggccggaaacaaccagcagggaggctttggcggttcacagcaacaacaagaacagaaaaacttgtggagcgggttcgacgcacaggtcatagctcaagcattgaaaattgacgttcagttggctcagcagcttcagaaccaacaagacagcagaggaaacatcgttcgtgttaagggacctttccaggtcgtgaggccacctctaagacagccctacgagagcgaggagtggagacacccacgtagcccacagggcaacggccttgaggagactatctgcagcatgaggtcccacgagaacattgacgaccctgctcgtgctgacgtgtacaagcccagcctaggtcgcgtgaccagcgtcaacagctatacc

SEQ ID NO: 142907 - DNA, 419 bp, Arabidopsis thaliana
aaaaagcttatcgcggcgattagttcccggcgaagaagaagaagagagataagaaaatggcgactaatggatctgctagctcagcgcagctctctcagaaggaagctgatgtcaggatgatgtgtgccgctgaggttcatcttggaaccaagaattgcaattaccagatggagcgttacgtcttcaagagacgcaacgatggtatttacatcttcaaccttggcaaaacatgggaaaagctccagatggctgctagagttattgttgccattgagaacccacaggacatcatcgtccagtcagctaggccctatggacagagagctgtgttgaagtttgctcagtacactggagccaatgccattgctggaagacacactcctggtaccttcaccaatcagatgcagacattcttcagt

SEQ ID NO: 142908 - DNA, 418 bp, Arabidopsis thaliana
aaaaagaaaatggttaagctcagcaatctcctcgttgcaaccttcggggttctcctcgtccttaacggctgccttgcgaggcagtcacttggggttcctcctcagctacagaacgagtgtaacctcgacaacctagatgttctccaagccaccgaaactatcaagagtgaagccggtcagatcgagtactgggaccacaaccaccctcagctccgatgtgttggtgtttccgttgctcgttatgtaattgaacaaggcggtctttacttgcccaccttcttcacttccccaaaaatttcctacgtctgtcaaggaacgggtatcagcggaagagtggtccctggatgtgccgagaccttcatggactcgcagccgatgcaaggacaacaacaaggccaaccatggcaaggacgacagg

SEQ ID NO: 142909 - DNA, 416 bp, Arabidopsis thaliana
gtttctccttctctctgcagaaaccgtaattaaaaacccccacaacttcttcaacataacgtcttcttcttccatctttcgttgcattcacgtttttaaaggttctctgaatcactccattaaaaatagctttgaacaagttttctcaatagtcaacaaaaacaatggccgttgaagctcaccatctaaatcctctgttctcttccaacagagaaatgattcatcccgttgaagcaagcggtgtagtctataacacccagatgagatacggcaccgttccgacgtttaaccccaccgtggaatgtcaaacttctctgtttaacccaatctacaacatctcaccagtcgatggtttggttcatcaatccatgaaaccaacgatacagtccgttgatagttctctcacattcaacagc

SEQ ID NO: 142910 - DNA, 357 bp, Arabidopsis thaliana
ctctttcaaaactaatgaaaacgcaatgatcagcactttggcgggtagaacctcgctcttgagggcattgccattggaggtcatatcaaatggtttccagatctctcccgaggaagctaggaagatcaagttcaacacacttgagaccactttgacccgcgctgccggtaggcaacaacaacagttgatcgaggagattgtcgaggcttaaatcaaaacgtttttctttttcttaataaagtatggtcagtttgtaatcacgtccctttacctttaacgtacgtgtaaaatatgtgtctgcggcacctcacttgtaataacactttcttctcataaataaaagggaagtttcgagtt

SEQ ID NO: 142911 - DNA, 242 bp, Arabidopsis thaliana
taccgcaataagaaaatggatcattttatatttctcctcgctgcaaccgtcggagttctcctcgtgcttaacgggtgacttgcgaggcaatcacttggggttcctactcctctacagaacgagtgtaacctcgacatcctatatgtttataaaacctctcgtaactatcaggagtgtagacgatcaactcgtgtacttggaccacttccaccctcagctccgaagggattggctgtttcctt

SEQ ID NO: 142912 - DNA, 399 bp, Arabidopsis thaliana
aacaagttgttcctcgtctgcgcagctctcgctctctgcttcctcctcaccaacgcttccatctaccgcaccgtcgttgagttcgaagaagatgacgccactaaccccataggcccaaaaatgaggaaatgccgcaaggagtttcagaaagaacaacacctaagagcttgccagcaattgatgctccagcaagcaaggcaaggccgtagcgatgagtttgatttcgaagacgacatggagaacccacagggacaacagcaggaacaacagctattccagcagtgctgcaacgagcttcgccaggaagagccagattgtgtttgccccaccttgaaacaagctgccaaggccgttagactccagggacagcacctaccaatgcaagtcaagaaatttacc

SEQ ID NO: 142913 - DNA, 414 bp, Arabidopsis thaliana
gaaaaaatggcaataaccaacaaattaatcataacacttcttctccttatctccatagctgtcgtccactgcttatccttccgtgtggagatcgacgagttcgagccaccacagcaaggagaacaagaaggtccccgtcgccgtcctggtggtggctctggcgagggatgggaggaagagtcgacgaatcatccataccacttcaggaagcggagtttcagtgattggttccagtcaaaggaaggttttgtgagagtgctgcctaagttcacaaaacatgcaccggctctcttccgaggaatcgagaactacagattctcgttggtggagatggagccaacaactttctttgtgcctcaccatttggatgccgatgctgtttttatagtcctacaaggtaaaggagtgatcgag

SEQ ID NO: 142914 - DNA, 424 bp, Arabidopsis thaliana
aaaatgggtcgagtctcatctattatctctttctctttgacactcttgatcctcttcaatggctacactgcccaacagtggcccaacgagtgccagctcgatcaactcaatgcgctcgaaccatcccaaatcatcaagagcgagggtggtcgcatcgaggtctgggaccaccatgcaccccagctccgttgctccggctttgcctttgagcgtttcgtcattgagcctcagggtcttttcttgcccactttcttgaacgccggcaaactcacgtttgttgttcacggaaggggtctaatgggaagagttattccgggatgcgccgagacgttcatggagtcaccggtatttggagaaggtcaaggtcagggtcagagtcaagggttccgtgacatgcaccagaaagtagagcacctacggtgcg

SEQ ID NO: 142915 - DNA, 323 bp, Arabidopsis thaliana
aaacaaaaagaaaatggttaagctcagcaatcttctcgttgcaaccttcggggttctcctcgtccttaacggctgccttgcgaggcagtcacttggggttcctcctcagctacagaacgagtgtaacctcgacaacctagatgttctccaagccaccgaaactatcaagagtgaagccggtcagatcgagtactgggaccacaaccaccctcagcttcgatgtgttggtgtttccgttgctcgttatgtaattgaacaaggcggtctttacttgcccaccttttttacttccccaaaaattttctacgtgcgttcaaggaacg

SEQ ID NO: 142916 - DNA, 415 bp, Arabidopsis thaliana
aaagaaaatggttaagctcagcaatcttctcgttgcaaccttcggggttctcctcgtccttaacggctgccttgcgaggcagtcacttggggttcctcctcagctacagaacgagtgtaacctcgacaacctagatgttctccaagccaccgaaactatcaagagtgaagccggtcagatcgagtactgggaccacaaccaccctcagctccgatgtgttggtgtttccgttgctcgttatgtaattgaacaaggcggtctttacttgcccaccttctttactttcccaaaaatttcctacgttcgtcaaggaacgggtatcagcggaagagtggtccctggatgtgccgagacctttatggactcgcagccgatgcaaggtcaacaacaaggccaaccatgggaaggactacag

SEQ ID NO: 142917 - DNA, 347 bp, Arabidopsis thaliana
agaaataacaaaatggctcgagtctcttctcttctttctttcttcttaacacttttgatccttttccatggctacgcggctcaacagggtcagcagggtcagcagtttccgaacgagtgccagctcgaccagctcaatgcgctcgagccgtcacacgtactgaagagcgaggctggtcgcatcgaggtgtgggaccaccacgctcctcatctccgttgctcaggtgtctcctttgcacgttacatcatcgagtctaagggtctctacttgccctctttctttaacaccgcgaagctctttttcgaggctattggacgaggtcttatgggataagtgatccctggatg

SEQ ID NO: 142918 - DNA, 372 bp, Arabidopsis thaliana
ctttagtgtaatcattagcaacgcaaagaaatgcctaaacgacaggctcagcggcgtttcactcgcaagactgactcgaaaacaccatcccagcctctggtatcccgccgctctgcaaactatcaaccgcctctttggcagcacgaatatctcctctcgctcggtaatacatatgtgaaagaggacaacgtcgagagagttacgctattgaagcaggaagtgtgtaaaatgctcaatgaaacggaaggtttactcgaacagctagagctcatcgacacttttacaaaggcttggagttttttaccattttgtacaagaaatcaagaatacactaacgaatgtgcatgttaaaaaagtgctagcacacaaaaa

SEQ ID NO: 142919 - DNA, 422 bp, Arabidopsis thaliana
aacgccggcaaactcacgtttgttgttcacggaaggggtctaatgggaagagttattccgggatgcgccgagacgttcatggagtcaccggtatttggagaaggtcaaggtcagggtcagagtcaagggttccgtgacatgcaccagaaagtagagcacctacggtgcggtgacaccattgcaacaccatctggtgtagctcaatggttctacaacaatggaaatgagcctctcattcttgttgcagccgcggatctcgccagcaaccagaaccagcttgaccgcaaccttagaccatttttgatagccggaaacaacccacaagggcaggaatggctacaaggccgaaagcaacagaagcaaaacaacatcttcaatggcttcgcacctgagatcttggctcaagcctttaagatcaatgt

SEQ ID NO: 142920 - DNA, 391 bp, Arabidopsis thaliana
agaaataacaaaatggctcgagtctcttctcttctttctttcttcttaacacttttgatccggttccatggctacgcggctcaacagggtcagcagggtcagcagtttccgaacgagtgccagctcgaccagctcaatgcgctcgagccgtcacacgtactgaagagcgaggctggtcgcatcgaggtgtgggaccaccacgctcctcagctccgttgctcaggtgtctcctttgcacgttacatcatcgagtctaagggtctctacttgccctctttctttaacaccgcgaagctctctttcgtggctaagggacgaggtcttatgggaaaagtgatccctggatgcgccgaaacatttcaagactcatcagagttccaaccacgcttcg

SEQ ID NO: 142921 - DNA, 410 bp, Arabidopsis thaliana
atcatccccgacgacgtgatggaaacagaagcggtggttaataccgtcgccggcgtcgactgtttcgtctcactccctcgggaattactacacgcgcttcaatccaccagctcctgtgctctccctccgcttctccctgtcgagctacgctccggtgaccgccgttggtcagttgcttggtccggctctagctcctcctcttctgcgatcgaggtcgctcgagtgtttgcggaaagcatttcgttgccggatggtacagttgttaaagttcgcgttcttcctaatgtgcccaaggctactttagtaacagtcgagccagagactgaagatgactgggaagttcttgagctcaatgctgaacttgccgaggcagctatacttagtcaggtgaggatactacatgagaccat

SEQ ID NO: 142922 - DNA, 411 bp, Arabidopsis thaliana
taaagaggaagaaaaatgggtcgagtctcatctattatctctttctctttgacactcttgatcctcttcaatggctacactgcccaacagtggcccaacgagtgccagctcgatcaactcaatgcgctcgaaccatcccaaatcatcaagagcgagggtggtcgcatcgaggtctgggaccaccatgcaccccagctccgttgctccggctttgcctttgagcgtttcgtcattgagcctcatggtcttttcttgcccactttcttgaacgccggcaaactcacgtttgttgttcacggaaggggtctaatgggaagagttattccgggatgcgccgagacgttcatggagtcaccggtatttggagaaggtcaaggtcagggtcagagtcaagggttccgtgacatgcac

SEQ ID NO: 142923 - DNA, 411 bp, Arabidopsis thaliana
aaacaaaaagaaaatggttaagctcagcaatctcctcgttgcaaccttcggggttctcctcgtccttaacggctgccttgcgaggcagtcacttggggttcctcctcagctacagaacgagtgtaacctcgacaacctagatgttctccaagccaccgaaactatcaagagtgaagccggtcagatcgagtactgggaccacaaccaccctcagctccgatgtgttggtgtttccgttgctcgttatgtaattgaacaaggcggtctttacttgcccaccttcttcacttccccaaaaatttcctacgtcgttcaaggaacgggtatcagcggaagagtggtccctggatgtgccgagaccttcatggactcgcagccgatgcaaggacaacaacaaggccaaccatggca

SEQ ID NO: 142924 - DNA, 426 bp, Arabidopsis thaliana
cgacccacgcgtacgcatcgacggacagcaaccacttgtcatcgtcagcatcttctatctagccagtcaccagaaccagcttgaccgcatcccaaggccattttacttagccggaaacaacccacaaggtcaagtatggctacaaggacgagagcaacagccacagaagaacatcttcaatggatttggacccgaggttattgctcaagctttgaagattgatcttcagacagcgcagcaacttcagaaccaagatgacaaccgtggaaacattgtccgagtccaaggcccgctcggtgtcattaggccgcctttgaggggccagagacctcatgaggaggaagaagaagaagaaggacgactcggacgacacggttatggcttagaggagaccatctgcagcgccaggtgcaccgataacctcga

SEQ ID NO: 142925 - DNA, 371 bp, Arabidopsis thaliana
caaaaagaaaatggttaagctcagcaatctcctcgttgcaaccttcggggttctcctcgtccttaacggctgccttgcgaggcagtcacttggggttcctcctcagctacagaacgagtgtaacctcgacaacctagatgttctccaagccaccgaaactatcaagagtgaagccggtcagatcgagtactgggaccacaaccaccctcagctccgatgtgttggtgtttccgttgctcgttatgtaattgaacaaggcggtctttacttgcccaccttcttcacttccccaaaaatttcctacgtcgttcaaggaacgggtatcagcggaagagtggtccctggatgtgccgagaccttcatggactcgc

SEQ ID NO: 142926 - DNA, 415 bp, Arabidopsis thaliana
cttctttagtcatctcccgcaagtttaggaaagctctgaaattagggtttttcgtctgcgatcacgatccttcaattactttgcgataatggagaagataagacaaccaacacatgcaggctcttggtataccgataatcctacaaaattgtcatctgatcttgaagaatggcttaatgcaactggtttgaccaaatctcctgatgtacgaggcgtcattgcaccacacgcaggttattcgtactccggtcgtgcagctgcctatgcttttgcaaacattgatcctactaacatttcacggatatttcttcttggtccatctcaccacttttatactccaaaatgtgccctttcgactgcaacagtttataaaacccccattggaaatctacctgttgatgtggagatgattaag

SEQ ID NO: 142927 - DNA, 416 bp, Arabidopsis thaliana
gatggtgcttcctaaatacaacatgaacgctaacgagatcttgtactgcactggaggacaaggaaggatccaagtggtcaacgacaacggacagaacgtgttggaccaacaggtgcagaagggacagctcgtggtcatcccacaagggttcgcatacgttgtccagtcccacggaaacaagttcgagtggatctctttcaaaactaatgaaaacgcaatgatcagcactttggcgggtagaacctcgctcttgagggcattgccattggaggtcatatcaaatggtttccagatctctcccgaggaagctaggaagatcaagttcaacacacttgagaccactttgacccgcgctgccggtaggcaacaacaacagttgatcgaggagattgtcgaggcttaaatcaaaacgtttt

SEQ ID NO: 142928 - DNA, 409 bp, Arabidopsis thaliana
gtcaaatagtcaacaaattttgaattatattatatattatttgtatttgatttgagcaacagttttagatcgccctgtttcaattttttttatagagtttttatcataattttgcatataatagaagtagtaattataaaaatattatatattaattatcaattgggtttttgctaaacggagcctggatacttcattttattagtccgatcacgtaaaccataaaaaaattttgataatctaatatcaatctaaatactccctgcatttaattccactttattttttgcgcttcgcgttacaaatttttgataattcaatcaatctttttgagcgaaacagaggatatctcgatcgagggagaaaatggggaaatcccatatagcccgatatatctgacaagtcgcac

SEQ ID NO: 142929 - DNA, 410 bp, Arabidopsis thaliana
gaagataaaaatggctcgagtctcttctcttctttctttctccttaacacttttgatccttttccatggctacgcggctcaacagggtcagcagggtcagcagtttccgaacgagtgccagctcgaccagctcaatgcgctcgagccttcacacgtactgaagagcgaggctggtcgcatcgaggtgtgggaccaccacgctcctcagctccgttgctcaagtgtctcctttgcacgttacatcatcgagtctaagggtctctacttgccctctttctttaacaccgcgaagctctccttcgtggctaaaggacgaggtcttatgggaaaagtgatccctggatgcgccgaaacattccaagactcatcagagttccaaccacgcttcgaaggtcaaggtcaaagccaga

SEQ ID NO: 142930 - DNA, 416 bp, Arabidopsis thaliana
ctccaggctctgcccactggatctacaactcaagtgaacagccacttgtcatcatcgctctggtcgacatcgccaactaccaaaaccaactcgaccgcaaccctagagtgttccatttggccggaaacaaccagcagggaggctttggcggttcacagcaacaacaagaacagaaaaacttgtggagcgggttcgacgcacaggtcatagctcaagcattgaaaattgacgttcagttggctcagcagcttcagaaccaacaagacagcagaggaaacatcgttcgtgttaagggacctttccaggtcgtgaggccacctctaagacagccctacgagagcgaggagtggagacacccacgtagcccacagggcaacggccttgaggagactatctgcagcatgaggtcccacgag

SEQ ID NO: 142931 - DNA, 412 bp, Arabidopsis thaliana
gtccactgcttatccttccgtgtggagatcgacgtgttcgagccaccacagcaaggagaacaagaaggtccccgtcgccgtcctggtggtggctctggcgagggatgggaggaagagtcgacgaatcatccataccacttcaggaagcggagtttcagtgattggttccagtcaaaggaaggttttgtgagagtgctgcctaagttcacaaaacatgcaccggctctcttccgaggaatcgagaactacagattctcgttggtggagatggagccaacaactttctttgtgcctcaccatttggatgccgatgctgtttttatagtcctacaaggtaaaggagtgatcgagtttgtgacggataaaacaaaagaatcgttccacataactaaaggtgatgtggtaagaatcc

SEQ ID NO: 142932 - DNA, 412 bp, Arabidopsis thaliana
caaaaagaaaatggttaagctcagcaatctcctcgttgcaaccttcggggttctcctcgtccttaacggctgccttgcgaggcagtcacttggggttcctcctcagctacagaacgagtgtaacctcgacaacctagatgttctccaagccaccgaaactatcaagagtgaagccggtcagatcgagtactgggaccacaaccaccctcagctccgatgtgttggtgtttccgttgctcgttatgtaattgaacaaggcggtctttacttgcccaccttcttcacttccccaaaaatttcctacgtcgttcaaggaacgggtatcagcggaagagtggtccctggatgtgccgagaccttcatggactcgcagccgatgcaaggacaacaacatggccaaccatggcaagga

SEQ ID NO: 142933 - DNA, 412 bp, Arabidopsis thaliana
acgcaatggtgcttccacagtggaacgcatacgctaacgccattctttacgtgacagacggggaagcccaaatccagatcgtaaacgacaatggtaacagagtgtttgacggacaagtctctcaaggacagctcatagccgtaccacaaggtttctcggtggtgaaacgcgcaacaagcaaccgattccagtgggttgagttcaaaacaaacgcaaacgcgcaaatcaacactcttgcgggacgaacctcagtcttgagaggtttaccacttgaagttataaccaatgggttccaaatctcacctgaagaagcaaggagggtcaagttcaacacgctcgagaccactttgactcacagcagtggcccagctagctacggaaggccaagggtggctgcagcttaagagcttaa

SEQ ID NO: 142934 - DNA, 418 bp, Arabidopsis thaliana
ggaagacaaggccaaccatgggaaggacagggacatcagggacaacaaggacgacagggacaacaaggccaaccatgggaaggacagggacagcagggacaacaagggttccgtgacatgcaccagaaggtggaacatgtgagacgcggagacgtctttgccaacactccaagctctgcccactggatctacaactcaagagaacagccacttgtcatcatcgctcttctcgacatcgccaactaccaaaaccaactcgaccgcaaccctagagtgttccatttggccggaaacaaccagcaaggaggctttggcggttcacagcaacaacaagaacagaaaaacttgtggagcgggttcgacgcacaggtcatagctcaagcattgaaaattgacgttcagttggctcagcagcttt

SEQ ID NO: 142935 - DNA, 419 bp, Arabidopsis thaliana
catggacaacagggacaacaaggacgacagggacttcaaggccaaccatgggaaggacagggacagcagggacaacaagggttccgtgacatgcaccagaaggtggaacatgtgagacgcggagacgtctttgccaacactccaggctctgcccactggatctacaactcaagagaacagccacttgtcatcatcgctcttctcgacatcgccaactaccaaaaccaactcgaccgcaaccctagagtgttccatttggccggaaacaaccagcagggaggctttggcggttcacagcaacaacaagaacagaaaaacttgtggagcgggttcgacgcacaggtcatagctcaagcattgaaaattgacgttcagttggctcagcagcttcagaaccaacaagacagcagaggaaacat

SEQ ID NO: 142936 - DNA, 415 bp, Arabidopsis thaliana
ccagaaccagcttgaccgcaacccaaggccattttacttatccggaaacaacccacaaggtcaagtatggctacaaggacgagagcaacagccacagaagaacatcttcaatggatttggacccgaggttattgctcaagctttgaagattgatcttcagacagcgcagcaacttcagaaccaagatgacaaccgtggaaacattgtccgagtccatggcccgttcggtgtcattaggccgcctttgaggggccagagacctcaagaggaggaagaagaagaagaaggacgacacggacgacacggtaatggcttagaggagaccatctgcagcgccaggtgcaccgataacctcgatgatccgtctcgtgctgacgtgtacaagccacagctcggttacatcagcactctcaac

SEQ ID NO: 142937 - DNA, 367 bp, Arabidopsis thaliana
aaacaaaaagaaaaaggttaacctcagcattctcttctttgcaaccttcggagttctcctcgacctgaacagctgccttgcgaagcagacacccggggttccctctaaccttcagatcgtgtgtaacctcgaccacctagatgtccttcaagccaccgtaactctcaagagtgaagccgggcagatcgagtaccgtgaccacacccacccccagctgcgatgtgttggtgtttgcgtccacacctatgtaagaataacaaggcggtctgtaccttcccaccttcttcacttgcgcaaaaagttactacgtcgtccaaggaacgaggctcagctgaagagtgggccctggatcgaccgagaccaacat

SEQ ID NO: 142938 - DNA, 389 bp, Arabidopsis thaliana
caaaaagaaaatggttaagctcagcaatctcctctttgctaccttcggggttctcctcgtccttaacggctgccttgcgaggcagtcacttggggttcctcctcagctacagaacgagtgtaacctcgacaacctagatgttctccaagccaccgaaactatcaagagtgaagccggtcagatcgagtactgggaccacaaccaccctcagctccgatgtgttggtgtttccgttgctcgttatgtaattgaacaaggcggtctttacttgcccaccttcttcactttcccaaaaatttcctacgtcgttcaaggaacgggtatcatcggaagagtggtccctggatgttccgagaccttcatggactcgcagccgatgctaggacatc

SEQ ID NO: 142939 - DNA, 406 bp, Arabidopsis thaliana
gctcagcaatctcctcgttgcaaccttcggggttctcctcgtccttaacggctgccttgcgaggcagtcacttggggttcctcctcagctacagaacgagtgtaacctcgacaacctagatgttctccaagccaccgaaactatcaagagtgaagccggtcagatcgagtactgggaccacaaccaccctcagctccgatgtgttggtgtttccgttgctcgttatgtaattgaacaaggcggtctttacttgcccaccttcttcacttccccaaaaatttcctacgtcgttcaaggaacgggtatcagcggaagagtggtccctggatgtgccgagaccttcatggactcgcagccgatgcaaggacaacaacaaggccaaccatggcaaggacgacagggacaa

SEQ ID NO: 142940 - DNA, 410 bp, Arabidopsis thaliana
aaaaagaaaatggttaagctcagcaatctcctcgttgcaaccttcggggttctcctcgtccttaacggctgccttgcgaggcagtcacttggggttcctcctcagctacagaacgagtgtaacctcgacaacctagatgttctccaagccaccgaaactatcaagagtgaagccggtcagatcgagtactgggaccacaaccaccctcagctccgatgtgttggtgtttccgttgctcgttatgtaattgaacaaggcggtctttacttgcccaccttcttcacttccccaaaaatttcctacgtcgttcaaggaacgggtatcagcggaagagtggtccctggatgtgccgagaccttcatggactcgcagccgatgcaaggacaacaacaaggccaaccatggcaagg

SEQ ID NO: 142941 - DNA, 409 bp, Arabidopsis thaliana
aatggttaagctcagcaatctcctcgttgcaaccttcggggttctcctcgtccttaacggctgccttgcgaggcagtcacttggggttcctcctcagctacagaacgagtgtaacctcgacaacctagatgttctccaagccaccgaaactatcaagagtgaagccggtcagatcgagtactgggaccacaaccaccctcagctccgatgtgttggtgtttccgttgctcgttatgtaattgaacaaggcggtctttacttgcccaccttcttcacttccccaaaaatttcctacgtcgttcaaggaacgggtatcagcggaagagtggtccctggatgtgccgagaccttcatggactcgcagccgatgcaaggacaacaacaaggccaaccatggcaaggacgacag

SEQ ID NO: 142942 - DNA, 409 bp, Arabidopsis thaliana
caaaaagaaaatggttaagctcagcaatctcctcgttgcaaccttcggggttctcctcgtccggaacggctgccttgcgaggcagtcacttggggttcctcctcagctacagaacgagtgtaacctcgacaacctagatgttctccaagccaccgaaactatcaagagtgaagccggtcagatcgagtactgggaccacaaccaccctcagctccgatgtgttggtgtttccgttgctcgttatgtaattgaacaaggcggtctttacttgcccaccttcttcacttccccaaaaatttcctacgtcgttcaaggaacgggtatcagcggaagagtggtccctggatgtgccgagaccttcatggactcgcagccgatgcaaggacaacaacaaggccaaccatggcaa

SEQ ID NO: 142943 - DNA, 405 bp, Arabidopsis thaliana
aacaaaaagaaaatggttaagctcagcaatctcctcgttgcaaccttcggggttctcctcgtccttaacggctgccttgcgaggcagtcacttggggttcctcctcagctacagaacgagtgtaacctcgacaacctagatgttctccaagccaccgaaactatcaagagtgaagccggtcagatcgagtactgggaccacaaccaccctcagctccgatgtgttggtgtttccgttgctcgttatgtaattgaacaaggcggtctttacttgcccaccttcttcacttccccaaaaatttcctacgtcgttcaaggaacgggtatcagcggaagagtggtccctggatgtgccgagaccttcatggactcgcagccgatgcaaggacaacaacaaggccaacca

SEQ ID NO: 142944 - DNA, 409 bp, Arabidopsis thaliana
aacaaacaaaaagaaaatggttaagctcatcaatctcctcgttgcaaccttcggggttctcctcgtccttaacggctgccttgcgaggcagtcacttggggttcctcctcagctacagaacgagtgtaacctcgacaacctagatgttctccaagccaccgaaactatcaagagtgaagccggtcagatcgagtactgggaccacaaccaccctcagctccgatgtgttggtgtttccgttgctcgttatgtaattgaacaaggcggtctttacttgcccaccttcttcacttccccaaaaatttcctacgtcgttcaaggaacgggtatcagcggaagagtggtccctggatgtgccgagacctttatggactcgcaagccgtgcatggacaacaacaaggccatcca

SEQ ID NO: 142945 - DNA, 406 bp, Arabidopsis thaliana
ctcgttctcatctttctctttaagagattttgtaggtgacaatcaaaagtttgacaaaatggtgaagtttacagctgatgagcttcgaaggattatggactacaaacacaacatccgtaatatgtctgttattgctcatgtcgaccacgggaaatccactcttactgattctttggttgctgctgctggtatcattgcccaagaggttgctggtgatgttcgtatgactgataccagagctgatgaggctgaacgtggtatcactatcaagtccactggtatttctctctactacgagatgactgatgaatccttgaagagtttcactggagccagagacggaaatgagtacctcatcaatcttattgattcacctgggcacgttgacttttcttctgaggttact

SEQ ID NO: 142946 - DNA, 414 bp, Arabidopsis thaliana
gtgagacgcggagacgtctttgccaacactccattctctgcccactggatctacaactcaggagaacagccacttgtcatcatcgctcttctcgacatcgccaactaccaaaaccaactcgaccgcaaccctagagtgttccatttggccggaaacaaccagcagggaggctttggcggttcacagcaacaacaagaacagaaaaacttgtggagcgggttcgacgcacaggtcatagctcaagcattgaaaattgacgttcagttggctcagcagcttcagaaccaacaagacagcagaggaaacatcgttcgtgttaagggacctttccaggtcgtgaggccacctctaagacagccctacgagagcgaggagtggagacacccacgtagcccacagggcaacggccttgag

SEQ ID NO: 142947 - DNA, 417 bp, Arabidopsis thaliana
catcatcacaaacgagtaagaatacaaatacaaattgcaaaaaaaatggcaaacaagctcttgctcgtctgcgcaactttcgccctctgcttcctcctcaccaacgcttccatctaccgcactgttgtcgagttcgacgaagatgacgccagcaaccccatgggcccaagacagaaatgtcagaaggagtttcagcaatcacagcacctaagagcttgccagaaattgatgcgcatgcaaatgaggcaaggccgtggtggtggtccctccctcgacgatgagttcgatttggaagacgacatcgagaacccacaaggcccccagcagggacaccagatcctccagcagtgctgcagcgagcttcgccaggaagagccagtttgtgtttgccccaccttgagacaagctgccagggcc

SEQ ID NO: 142948 - DNA, 415 bp, Arabidopsis thaliana
cacaagtaattaactaacaacaaatggcgaacattctcttcctcgtctgcgcagctctcgccctgtgtttcatcctcaccaacgcttgcgtctatcgcacggttgtcgagttcgacgaagatgacgccagttaccccataggcccaatacagaaatgtcagaaggagtttcagcaagaacagcacctaagagcttgccagagatggatgcgcaagcaaatgtggcaaggacgtggtggtggtccttccctcgacgatgagttcgatatggaagacgacatcgagaacccgcagagacgacagctactccagaagtgctgcagcgagcttcgccaagaagagccagtttgcgttttgccccaccttgagacaagctgccaaggccgttagattccagggacagcaacaccaaccag

SEQ ID NO: 142949 - DNA, 411 bp, Arabidopsis thaliana
tttgcatccatggcgtcgatgccgagcaaacttcttccagtcctagtctgctacgtttttcttttcccctttgcatcatcatctgattattctggggtatctcttccatcttcgtcgcctaaagtctcggtgggcctgtactacgagtctctctgtccctactgctcttccttcattgttaaccacctcgcgaagctcttcgaagacgatctcatatcaatcgtcgatctccatctctctccgtggggcaataccaagctccgttccgataacgtcactgccgtttgccagcatggggcatttgaatgcttcttggataccgtagaagcttgtgcaattgatgcttggcctaaagtaagcgatcatttcccgttcatatactgtgtcgagaagttggtgactgaacataag

SEQ ID NO: 142950 - DNA, 294 bp, Arabidopsis thaliana
gttagaactagatttactttgtaacacattatgtttcctcaatactctagataatcaggctagtgttccatatatgataactaatgaacaactatgagtattcatatgcatacatatctcctttatgactaattgccctttacttcaattctgtatctccttactcctctttcttaatcattaaccacctctctaatctcttctaatccgatcttatatcttttctcttattccatttctatccgtatatcaataccaatctcctttcttattacttcactgttcttttttctt

SEQ ID NO: 142951 - DNA, 401 bp, Arabidopsis thaliana
caaagattgtcctgtcgatgctaactcatgagaccctttgttcttggagcctttctggatgcaacaagcagagagaagcgcggttttggtctcgggatggcacaggatgagttatatttatgaagatgggacatatgtgtctcgagagctcgagaaggtcattagaaaacttcatagtgtagtgggaaatgcagttacagataacagattcgtaatctttggatctggtaccacacaattgcttgcagcagctgttcatgccttgtctttgacaaactcatcagtatcatcacctgcaaggcttctgacttctattccatactatgctatgtacaaggaccaagcagagttctttgattcagcacatttcaagtttgaaggagatgcgtctgcgtggaagc

SEQ ID NO: 142952 - DNA, 410 bp, Arabidopsis thaliana
caacactccaggctctttccactggatcttcaactcaagagaacagccacttgtcatgatcggtcttctcgacatcgccaactaccaaaaccaactcgaccgcaaccctagagtgttccatttggccggaaacaaccagcagggaggctttggcggttcacagcaacaacaagaacagaaaaacttgtggagcgggttcgacgcacaggtcatagctcaagcattgaaaattgacgttcagttggctcagcagcttcagaaccaacatgacagcagaggaaacatcgttcgtgttaagggacctttccaggtcgtgaggccacctctaagacagccctacgagagcgaggagtggagacacccacgtagcccacagggcaacggccttgaggagactatctgctgcatga

SEQ ID NO: 142953 - DNA, 413 bp, Arabidopsis thaliana
cgcacctgagatctcggctcatgccttcaagatttatgtcgagacggctcagcagctccagaaccagcaagataaccgtggcatcatcgtcaaggtcaacggacctttcagcgtcattaggccacccttgagacgcggcgaatgcggtctacaaccacatgaaatagctaatggtttagaggagactttgagcaccatgcgatgcactgaaaacctcgatgacccgtcagatgctgacgtgtacaagccatcactcggatacattagcacacttaacagctacaatcttcctatgctcaaacttctacgccttagcgctcttcgtggctccatccgtaaaaacgctttggtgctaccgcaatggaacgtaaacgcatacgcggcactgtacgtgacaaacggaaaggctcata

SEQ ID NO: 142954 - DNA, 411 bp, Arabidopsis thaliana
aaggagaggaagtagtaaacggtagttctaaagttgaaaccaggcagaaggaaacactaaaggttgttgttacggaagtacttggaggcggtcgtttctatgttcagacggttggcgatcaaaaagtagcttcgattcaaaaccagcttgcagctctgagtcttaaagacgctcccattattggatcgtttaatcctaagaagggtgacatcgtccttgcacaatttagcctcgataactcctggaaccgcgcaatgattgttaatggacctcgaggagcagttcaatctccagaggaggaatttgaagtgttctacatcgattatggaaaccaagaaatagttccgtacagtgcaatacgccctgtggacccttcagtatcctcagcaccagggctagcacagctctgca

SEQ ID NO: 142955 - DNA, 409 bp, Arabidopsis thaliana
caaaaagaaaatggttaagctcagcaatctcctcgttgcaaccttcggggttctcctcgtccttaacggctgccttgcgaggcagtcacttggggttcctcctcagctacagaacgagtgtaacctcgacaacctagatgttctccaagccaccgaaactatcaagagtgaagccggtcagatcgagtactgggaccacaaccaccctcagctccgatgtgttggtgtttccgttgctcgttatgtaattgaacaaggcggtctttacttgcccaccttcttcacttccccaaaaatttcctacgtcgttcaaggaacgggtatcagcggaagagtggtccctggatgtgccgagaccttcatggactcgcagccgatgcaaggacaacaacaaggccaaccatggcaa

SEQ ID NO: 142956 - DNA, 413 bp, Arabidopsis thaliana
caattttcttctgctgctgcttcttcacaagaggttgaagaatgtcagctccgaaatcgggtggtgatccactaccacatccgccgaaagaacagcttccagatatctcttactgcattacaagtcctcctccatggcctgaggctgttctgcttgggtttcaacactaccttgtgatgcttggaacaacagttctgattccatcggctcttgttccacaaatgggaggttgaaatgaagagaaggcaaagctgatccagacaatactgtttgtagctggattgaacacattgctccaaactgtgtttggaactagattacctgctgttattggagcatcttatacatttgtcccagttactatctcaatcatgctttctgggagattcaatgacgttgcagatccagttgag

SEQ ID NO: 142957 - DNA, 416 bp, Arabidopsis thaliana
aagagatctccagcggacagttactagtcgtgccacaaggcttttcggtcatgaaacatgccataggcgaacagttcgagtggatcgaattcaagacaaacgaaaacgcacaggtcaacacactcgcgggccgtacctcagtcatgagaggtttgccgcttgaggttataaccaatgggtaccagatctctcccgaagaagctaaacgagtaaagtttagcacgattgagaccacactgacccatagcagtccaatgagctacggaaggcctagggcttgaggcttgatgagcgcgtggtggaatagcgtttgaatctaaagttcggtttggtacgacttgtaatatgaaataataatgtacaaagaagttctacgcttaagggaactgttttgtcttgagctttgtattaggacg

SEQ ID NO: 142958 - DNA, 414 bp, Arabidopsis thaliana
aacaaaaagaaaatggttaagctcagcaatctcctcgttgcaaccttcggggttctcctcgggcttaacggctgccttgcgaggcagtcacttggggttcctcctcagctacagaacgagtgtaacctcgacaacctagatgttctccaagccaccgaaactatcaagagtgaagccggtcagatcgagtactgggaccacaaccaccctcagctccgatgtgttggtgtttccgttgctcgttatgtaattgaacaaggcggtctttacttgcccaccttcttcacttccccaaaaatttcctacgtcgttcaaggaacgggtatcagcggaagagtggtccctggatgtgccgagaccttcatggactcgcagccgatgcaaggacaacaacaaggccaaccatggctagga

SEQ ID NO: 142959 - DNA, 416 bp, Arabidopsis thaliana
cctttccaggtcgtgaggccacctctaagacagctctactagagcgaggagtggagacaccgacgtagcccacagggcaacggccttgaggagactatctgcagcatgaggtcccacgagaacattgacgaccctgctcgtgctgacgtgtacaagcccagcctaggtcgcgtgaccagcgtcaacagctataccttgcccatcttggagtatgtcaggctcagtgccactcgtggcgttctccagggtaatgcgatggtgcttcctaaatacaacatgaacgctaacgagatcttgtactgcactggaggacaaggaaggatccaagtggtcaacgacaacggacagaacgtgttggaccaacaggtgcagaagggacagctcgtggtcatcccacaagggttcgcatacgttgt

SEQ ID NO: 142960 - DNA, 416 bp, Arabidopsis thaliana
aaaaagaaaatggttaagctcagcaatctcctcgttgcatccttcggggttctcctcgtccttaacggctgccttgcgaggcagtcacttggggttcctcctcagctacagaacgagtgtaacctcgacaacctagatgttctccaagccaccgaaactatcaagagtgaagccggtcagatcgagtactgggaccacaaccaccctcagctccgatgtgttggtgtttccgttgctcgttatgtaattgaacaaggcggtctttacttgcccaccttcttcacttccccaaaaatttcctacgtcgttcaaggaacgggtatcagcggaagagtggtccctggatgtgccgagaccttcatggactcgcagccgatgcaaggacaacaacaaggccaaccatggcaaggacgaca

SEQ ID NO: 142961 - DNA, 405 bp, Arabidopsis thaliana
ctcttgagtatatacataatatgggactgatacatcgagatattaagccggagaatctgttgttaactttagatgggcacataaagattgctgattttggtagcgtaaagccaatgcaagacagccaaatcacagtgcttcctaatgcggcttctgatgataaggcgtgcacttttgtcgggacggctgcatatgttcctcctgaagttctaaactcctctccagcaacgttcggaaatgatctctgggcactcggctgcactctgtaccaaatgctttcaggaacttccccattcaaggatgcaagtgaatggctgattttccaaagaattatagctagagatataaagtttccaaatcatttctcagaagcagcaagagacctcatcgtccgattgcttgata

SEQ ID NO: 142962 - DNA, 411 bp, Arabidopsis thaliana
ctcttactctgttctcgctacagaatctcctgggaaaaaaaaaaaagaaacttgatccacccgaattccccaaatcttcacaatttctggaaactctctcgatcgtgaagcagaaaagtgaggttccaaatgggttctgtttcgggtcaaacccgaattacaacgatgaacctctcgctctcaacagcagagaagaaccctaatttccgctcgtcgcttctcaattctaaggtaattgttatcacttcgtcgagcttcaccaaaaaaatgactccttttgcttgatttcttcttctcctctttcgcttgtgtttagaacgcaatttcagatactttaggggtctcttccaaatgcagtacattcctcaggggtcaatttcaaagaatacatttttcttggctacaacacac

SEQ ID NO: 142963 - DNA, 413 bp, Arabidopsis thaliana
cccgaggttattgctcaagctttgaagatcgatcttcagacagcgcagcaacttcagaaccaagatgacaaccgtggaaacattgtccgagtccaaggcccgttcggtgtcattaggccgcctttgaggggccagagacctcaggaggaggaagaagaagaagaaggacgacatggacgacacggtaatggcttagaggagaccatctgcagcgccaggtgcaccgataacctcgatgacccgtctcgtgctgacgtgtacaagccacagctcggttacatcagcactctcaacagttacgatctccccatccttcgcttcatccgtctctcagccctccgtggatctatccgtcaaaacgcaatggtgcttccacagtggaacgcaaacgcgaacgctattctttacgtgac

SEQ ID NO: 142964 - DNA, 411 bp, Arabidopsis thaliana
caattttcttctgctgctgcttcttcacaagaggttgaagaatgtcagctccgaaatcgggtggtgatccactaccacatccgccgaaagaacagcttccagatatctcttactgcattacaagtcctcctccatggcctgaggctgttctgcttgggtttcaacactaccttgtgatgcttggaacaacagttctgattccatcggctcttgttccacaaatgggaggtagaaatgaagagaaggcaaagctgatccagacaatactgtttgtagctggattgaacacattgctccaaactgtgtttggaactagattacctgctgttattggagcatcttatacatttgtcccagttactatctcaatcatgctttctgggagattcaatgacgttgcagatccagttg

SEQ ID NO: 142965 - DNA, 411 bp, Arabidopsis thaliana
cccacgcgtccgcccacgcgtccgaatgggtcgagtctcatctattatctctttctctttgacactcttgatcctcttcaatggctacactgcccaacagtggcccaacgagtgccagctcgatcaactcaatgcgctcgaaccatcccaaatcatcaagagcgagggtggtcgcatcgaggtctgggaccaccatgcaccccagctccgttgctccggctttgcctttgagcgtttcgtcattgagcctcaaggtcttttcttgcccactttcttgaacgccggcaaactcacgtttgttgttcacggaaggggtctaatgggaagagttattccgggatgcgccgagacgttcatggagtcaccggtatttggagaaggtcaaggtcagggtcagagtcaagggttccg

SEQ ID NO: 142966 - DNA, 413 bp, Arabidopsis thaliana
caaaaagaaaatggttaagctcagcaatctcctcgttgctaccttcggggttctcctcgtccttaacggctgccttgcgaggcagtcacttggggttcctcctcagctacagaacgagtgtaacctcgacaacctagatgttctccaagccaccgaaactatcaagagtgaagccggtcagatcgagtactgggaccacaaccaccctcagctccgatgtgttggtgtttccgttgctcgttatgtaattgaacaaggcggtctttacttgcccaccttcttcacttccccaaaaatttcctacgtcgttcaaggaacgggtatcagcggaagagtggtccctggatgtgccgagaccttcatggactcgcagccgatgcaaggacatcaacaaggccaaccatggcaaggac

SEQ ID NO: 142967 - DNA, 416 bp, Arabidopsis thaliana
cacacatagcaaaaaatggcaaacaagttgttcctcgtctgcgcagctctcgctctctgcttcctcctcaccaacgcttccatctaccgcaccgtcgttgagttcgaagaagatgacgccactaaccccataggcccaaaaatgaggaaatgccgcaaggagtttcagaaagaacaacacctaagagcttgccagcaattgatgctccagcaagcaaggcaaggccgtagcgatgagtttgatttcgaagacgacatggagaacccacagggacaacagctggaacaacagctattccagcagtgctgcaacgagcttcgccaggaagagccagattgtgtttgccccaccttgaaacaagctgccaaggccgttagactccagggacagcaccaaccaatgcaagtcaggaaaat

SEQ ID NO: 142968 - DNA, 414 bp, Arabidopsis thaliana
agaggaagaaaaatgggtcgagcctcatctattatctctttctctttgacactcttgatcctcttcaatggctacactgcccaacagtggcccaacgagtgccagctcgatcaactcaatgcgctcgaaccatcccaaatcatcaagagcgagggtggtcgcatcgaggtctgggaccaccatgcaccccagctccgttgctccggctttgcctttgagcgtttcgtcattgagcctcaaggtcttttcttgcccactttcttgaacgccggcaaactcacgtttgttgttcacggaaggggtctaatgggaagagttattccgggatgcgccgagacgttcatggagtcaccggtatttggagaaggtcaaggtcagggtcagagtcaagggttccgtgacatgcaccagaaa

SEQ ID NO: 142969 - DNA, 414 bp, Arabidopsis thaliana
ataaaaatggctcgagtctcttctcttctttctttctccttaacactttagatccttttccatggctacgcggctcaacagggtcagcagggtcagcagtttccgaacgagtgccagctcgaccagctcaatgcgctcgagccttcacacgtactgaagagcgaggctggtcgcatcgaggtgtgggaccaccacgctcctcagctccgttgctcaggtgtctcctttgcacgttacatcatcgagtctaagggtctctacttgccctctttctttaacaccgcgaagctctccttcgtggctaaaggacgaggtcttatgggaaaagtgatccctggatgcgccgaaacattccaagactcatcagagttccaaccacgcttcgaaggtcaaggtcaaagccagaggttccgt

SEQ ID NO: 142970 - DNA, 410 bp, Arabidopsis thaliana
aaacaaaaagaaaatggttaagctcagcaatctcctcgttgcaaccttcggggttctcctcgtccttaacggctgccttgcgaggcagtcacttggggttcctcctcagctacagaacgagtgtaacctcgacaacctagatgttctccaagccaccgaaactatcaagagtgaagccggtcagatcgagtactgggaccacaaccaccctcagctccgatgtgttggtgtttccgttgctcgttatgtaattgaacaaggcggtctttacttgcccaccttcttcacttccccaaaaatttcctacgtcgttcaaggaacgggtatcagcggaagagtggtccctggatgtgccgagaccttcatggactcgcagccgatgcaaggacaacaacatggccaaccatggc

SEQ ID NO: 142971 - DNA, 214 bp, Arabidopsis thaliana
cggacgcgtgggtttaaatactctaaaagttaacgtaattttttttaaaaattatttaagaaaactaaaataaaaattaaaaagataaagacaaataaaataaagtaaaaatggtctctcatattatttttattctctctcaagataaagggtattatagtatttgatatgtattttgttttttagtctattagacatatccatctctcacaac

SEQ ID NO: 142972 - DNA, 412 bp, Arabidopsis thaliana
aagaaaatggttaagctcagcaatctcctcgttgcaaccttcggggttctcctcgtccttaacggctgccttgcgaggcagtcacttggggttcctcctcagctacagaacgagtgtaacctcgacaacctagatgttctccaagccaccgaaactatcaagagtgaagccggtcagatcgagtactgggaccacaaccaccctcagctccgatgtgttggtgtttccgttgctcgttatgtaattgaacaaggcggtctttacttgcccaccttcttcacttccccaaaaatttcctacgtcgttcaaggaacgggtatcagcggaagagtggtccctggatgtgccgagaccttcatggactcgcagccgatgcaaggacatcaacatggccaaccatggcaaggacgac

SEQ ID NO: 142973 - DNA, 409 bp, Arabidopsis thaliana
aaaaagaaaatggttaagctcagcaatctcctcgttgcaaccttcggggttctcctcgtccttaacggctgccttgcgaggcagtcacttggggttcctcctcagctacagaacgagtgtaacctcgacaacctagatgttctccaagccaccgaaactatcaagagtgaagccggtcagatcgagtactgggaccacaaccaccctcagctccgatgtgttggtgtttccgttgctcgttatgtaattgaacaaggcggtctttacttgcccaccttcttcacttccccaaaaatttcctacgtcgttcaaggaacgggtatcagcggaagagtggtccctggatgtgccgagaccttcatggactcgcagccgatgcaaggacaacaacaaggccaaccatggcaag

SEQ ID NO: 142974 - DNA, 409 bp, Arabidopsis thaliana
ctaggcttctaatccatctcatgcttaactccacacaaatttcagcaaagtttcttaaatgacttttcttattcttacctcgccatggtagtttgttgggataccacccatgttataatgaaccgtgggtaagacaggaattggctctttggtaacatcaacaccagcaaagatggcagcggtctcagagattccaggaagcctttcttttagaacttctggaggaagatgattcagatggagatagatatgatccttatgcggtcctggaagatatcagcaaaaagttgtccagggtgagaatcaaactagacggatcacaatatcaaagcatatcatgtaatgagagttcactctgaaaataagaagtagttttcagtggaacatacctacaccacgaccttccctg

SEQ ID NO: 142975 - DNA, 415 bp, Arabidopsis thaliana
cgagccttcacacgtactgaagagcgaggctggtcgcatcgaggtgtgggaccaccacgctcctcagctccgttgctcaagtgtctcctttgcacgttacatcatcgagtctaagggtctctacttgccctctttctttaacaccgcgaagctctccttcgtggctaaaggacgaggtcttatgggaaaagtgatccctggatgcgccgaaacattccaagactcatcagagttccaaccacgcttcgaaggtcaaggtcaaagccagaggttccgtgacatgcaccagaaagtggagcacattaggagcggtgataccattgccacaacacccggtgtagcccagtggttctacaacgacggacagcaaccacttgtcatcgtcagcatcttcgatctagccagtcaccagaac

SEQ ID NO: 142976 - DNA, 417 bp, Arabidopsis thaliana
gtgagacgcggagacgtctttgccaacactccaggctctgcccactggatctacaactcaagagaacagccacttgtcatcatcgctcttctcgacatcgccaactaccaaaaccaactcgaccgcaaccctagagtgttccatttggccggaaacaaccagcagggaggctttggcggttcacagcaacaacaagaacagaaaaacttgtggagcgggttcgacgcacaggtcatagctcaagcattgaaaattgacgttcagttggctcagcagcttcagaaccaacaagacagcagaggaaacatcgttcgtgttaagggacctttccaggtcgtgaggccacctctaagacagccctacgagagcgaggagtggagacacccacgtagcccacagggcaacggccttgaggag

SEQ ID NO: 142977 - DNA, 385 bp, Arabidopsis thaliana
gtcgacacatcttctctctttatataaacaaatctcacataccccaaaaattcatcaaaccctttcttcaccacattattttcactgagcgcataacatttttgagacaagagactctctctctctctcttctctctttctctccccctctctccggcgatggttgttgctatggaccaacgcaccaatgtgaacggagatcccggcgccggagaccggaagaaagaagaaaggtttgatccgagtgcacaaccaccgttcaagatcggagatataagggcggcgattcctaagcactgttgggttaagagtcctttgagatcaatgagttacgtcgtcagagacattatcgccgtcgcggcttttgccatcgctgccgtgtatg

SEQ ID NO: 142978 - DNA, 409 bp, Arabidopsis thaliana
caaaaagaaaatggttaagctcagcaatctcctcgttgcaaccttcggggttctcctcgtccttaacggctgccttgcgaggcagtcacttggggttcctcctcagctacagaacgagtgtaacctcgacaacctagatgttctccaagccaccgaaactatcaagagtgaagccggtcagatcgagttctgggaccacaaccaccctcagctccgatgtgttggtgtttccggtgctcgctatgtaattgaacaaggcggtctttacttgcccaccttcttcactttcccaaaaatttcctacgtcggtcaaggaacgggtctcagcggaagagtggtccctggatgtgccgagaccttcatggactcgcagccgatgcaaggacaacaacaaggccaaccatggcaa

SEQ ID NO: 142979 - DNA, 408 bp, Arabidopsis thaliana
cacttttgatccttttacatggctacgcgcgctcatacagggtcagcacggtcagcagtttccgatcgagtgccagctcgacctgctcattgcgctcgagccggctcacgtactgaagagcgaggctggtcggatcagaggtgtgggaccaccacgctgctcaggtggcgggttcaggtgggtactttacgcgttacatcatcgagtctaagggcctctactggccctctttctttaacaccgcgaagctctctttcgtggctaagggacgaggtcttatgggaaaagtgatccctggatgcgccgaaacattgcaagactcatcacagttccaaccacgctttgaaggtcaaggtcaaagccagaggttccgtgacatgcaccagaaagtggagcacattaggagcg

SEQ ID NO: 142980 - DNA, 407 bp, Arabidopsis thaliana
ggaagaaaaatgggtcgagtctcatctattatctctttctctttgacactcttgatcctcttcaatggctacactgcccaacagtggcccaacgagtgccagctcgatcaactcaatgcgctcgaaccatcccaaatcatcaagagcgagggtggtcgcatcgaggtctgggaccaccatgcaccccagctccgttgctccggctttgcctttgagcgtttcgtcattgagcctcaaggtcttttcttgcccactttcttgaacgccggcaaactcacgtttgttgttcacggaaggggtctaatgggaagagttattccgggatgcgccgagacgttcatggagtcaccggtatttggagaaggtcaaggtcagggtcagagtcaagggttccgtgacatgcacca

SEQ ID NO: 142981 - DNA, 411 bp, Arabidopsis thaliana
gaaaaggatacgatggagtcttctttaattcatcatatcatcattgagttgctgttactctggttcatctcttccttgaatcgatcccacgcctttttctatttcctcgctctcatttatctctacctggttcacgaacggtatgtgatgagattgaagagaaaattgcagttcgaagagaggaagcaagcaaatcagagaagggttctatctgattctgaatctgtgagatggatgaattatgctgtggagaagatatggccaatatgcatggaacagatagcgtctcagaagattctgggtccaatcataccttggttcttggaaaaatatagaccttggacagcgaaaaaagctgtgatacagcacctttacatgggaagaaacccacctctgttgactgatattagg

SEQ ID NO: 142982 - DNA, 271 bp, Arabidopsis thaliana
aaaatggttaagctcagcaatctcctcgttgcaaccttcggggttctcctcgtccttaacggctgccttgcgaggcagtcacttggggttcctcctcagctacagaacgagtgtaacctcgacaacctagatgttctccaagccaccgaaactatcaagagtgaagccggtcagatcgagtactgtgaccacatccaccctcagctccgatgtgttggagtttcccgtgctcgctacgtaattgaacatggcgatttttacttgaccacct

SEQ ID NO: 142983 - DNA, 413 bp, Arabidopsis thaliana
catacacacatagcaaaaaatggcaaacaagttgttcctcgtctgcgcagctctcgctctctgcttcctcctcaccaacgcttccatctaccgcaccgtcgttgagttcgaagaagatgacgccactaaccccataggcccaaaaatgaggaaatgccgcaaggagtttcagaaagaacaacacctaagagcttgccagcaattgatgctccagcaagcaaggcaaggccgtagcgatgagtttgatttcgaagacgacatggagaacccacagggacaacagcaggaacaacagctattccagcagtgctgcaacgagcttcgccaggaagagccagattgtgtttgccccaccttgaaacaagctgccaaggccgttagactccagggacagcaccaaccaatgcaagtca

SEQ ID NO: 142984 - DNA, 414 bp, Arabidopsis thaliana
ataaaaatggctcgagtctcttctcttctttctttctccttaacacttttgatccttttccatggctacgcggctcaacagggtcagcagggtcagcagtttccgaacgagtgccagctcgaccagctcaatgcgctcgagccttcacacgtactgaagagcgaggctggtcgcatcgaggtgtgggaccaccacgctcctcagctccgttgctcaagtgtctcctttgcacgttacatcatcgagtctaagggtctctacttgccctctttctttaacaccgcgaagctctccttcgtggctaaaggacgaggtcttatgggaaaagtgatccctggatgcgccgaaacattccaagactcatcagagttccaaccacgcttcgaaggtcaaggtcaaagccagaggttccgt

SEQ ID NO: 142985 - DNA, 416 bp, Arabidopsis thaliana
cgaattcgaagaagatgacgccagcaaccccgtaggtccaagacagagatgccagaaggagtttcagcaatcacaacacctaagagcttgccagagatggatgagcaagcaaatgaggcaaggacgtggtggtggtccttccctcgacgatgagttcgatttcgagggcccccagcagggataccagctactccagcagtgctgcaacgagcttcgccaggaagagccagtttgcgtttgccccaccttgaaacaagctgccagggcagttagcctccatggacagcacggaccattccaatccaggaaaatttaccagtcagctaagtacttgcctaacatttgcaagatccagcaagttggtgaatgtcccttccagaccaccatccctttcttccctccttactactagagtc

SEQ ID NO: 142986 - DNA, 416 bp, Arabidopsis thaliana
ggaaggacagggacaacagggacaacaaggacgacagggacaacaaggccaaccatgggaaggacagggacagcagggacaacaagggttccgtgacatgcaccagaaggtggaacatgtgagacgcggagacgtctttgccaacactccaggctctgcccactggatctacaactcaggagaacagccacttgtcatcatcgctcttctcgacatcgccaactaccaaaaccaactcgaccgcaaccctagagtgttccatttggccggaaacaaccagcagggaggctttggcggttcacagcaacaacaagaacagaaaaacttgtggagcgggttcgacgcacaggtcatagctcaagcattgaaaattgacgttcagttggctcagcagcttcagaaccaacaagacagca

SEQ ID NO: 142987 - DNA, 420 bp, Arabidopsis thaliana
ggacctttccaggtcgtgaggccacctctaagacagccctacgagagcgaggagtggagacacccacgtagcccacagggcaacggccttgaggagactatctgcagcatgaggtcccacgagaacattgacgaccctgctcgtgctgacgtgtacaagcccagcctaggtcgcgtgaccagcgtcaacagctataccttgcccatcttggagtatgtcaggctcagtgccactcgtggcgttctccagggtaatgcgatggtgcttcctaaatacaacatgaacgcttacgagatcttgtactgcactggaggacaaggaaggatccaagtggtcaacgacaacggacagaacgtgttggaccaacaagtgcagaagggacagctcgtggtcatcccacaagggttcgcatacgttgtc

SEQ ID NO: 142988 - DNA, 416 bp, Arabidopsis thaliana
gtccgttaacgttaagctcctttaccgttacgtcttaaccaactttttcaacctctgtttgttcccgttaacggcgttcctcgccggaaaagcctctcggcttaccataaacgatctccacaacttcctttcctatctccaacacaaccttataacagtaactttactctttgctttcactgttttcggtttggttctctacatcgtaacccgacccaatccggtttatctcgttgactactcgtgttaccttccaccaccgcatctcaaagttagtgtctctaaagtcatggatattttctaccaaataagaaaagctgatacttcttcacggaacgtggcatgtgatgatccgtcctcgctcgatttcctgaggaagattcaagagcgttcaggtctaggtgatgagacgtaca

SEQ ID NO: 142989 - DNA, 408 bp, Arabidopsis thaliana
aagaaaatggttaagctcagcaatctcctcgttgcaaccttcggggttctcctcgtccttaacggctgccttgcgaggcagtcacttggggttcctcctcagctacagaacgagtgtaacctcgacaacctagatgttctccaagccaccgaaactatcaagagtgaagccggtcagatcgagtactgggaccacaaccaccctcagctccgatgtgttggtgtttccgttgctcgtcatgtaattgaacaaggcggtctttacttgcccaccttcttcacttccccaaaaatttcctacgtcgttcaaggaacgggtatcagcggaagagtggtccctggatgtgccgagaccttcatggactcgcagccgatgcaaggacaacaacaaggccaaccatggcaagga

SEQ ID NO: 142990 - DNA, 410 bp, Arabidopsis thaliana
ctccaaagtccaagctcacaatgaacacttccccaaaaatggaaatggaaatgaaaatggaaacgaaggcggctcctgaagctggtatgatcaaaaagtccaacgaggagtggcgtacggttctatctcctgaacagtttaagattcttagagagaaatctattgaaaagagagggtcaggagaatatgtgaagttgttcgaggaaggaatctactgttgtgttggttgtggaaatccggtttataaatcaaccactaaattcgattccggttgcggttggccggctttttttgatgctattcctggcgccattaaccgaaccgtaaacctaatctcctcttttttttcttttttttaatgaatattgaatttttatcataactctaaagaaacctaaactaatctctga

SEQ ID NO: 142991 - DNA, 417 bp, Arabidopsis thaliana
catgggaaggacagggacaacagggtcaacaaggtctacagggacaacaaggccaaccatgggaaggacagggacagctgggacaacaagggttccgtgacatgcaccagaaggtggaacatgtgagacgcggagacgtctttgccaacactccaagctctgcccactggatctacaactcaagagaacagccacttgtcatcatcgctcttctcgacatcgccaactaccaaaaccaactcgaccgcaaccctagagtgttccatttggccggaaacaaccagcaaggaggctttggcggttcacagcaacaacaagaacagaaaaacttgtggagcgggttcgacgcacaggtcatagctcaagcattgaaaattgacgttcagttggctcagcagcttcagaaccaacaagaca

SEQ ID NO: 142992 - DNA, 412 bp, Arabidopsis thaliana
agcgattctcactaaaaccctcgaacacatcgcctttatctctttctctagatctactcgctatggctactatcaccgttgttaaggctagacagatcttcgacagtcgtggtaatcccaccgttgaggttgatatccacacgtcaaatggtattaaggttacagcagctgttccaagtggagcttccactggtatctatgaggctcttgagctgagggatggaggatctgactaccttggaaagggtgtatctaaggctggtggcaatgtgatcaacatcatctggccagcacttattggtaaggacccaactcagcagactgctattgacaacttcatgtgccatgaacttgacggaacccaaaacgtgtggaggtggtgcaagcataagcttggagccaatgcgattct

SEQ ID NO: 142993 - DNA, 394 bp, Arabidopsis thaliana
  unsure (1)..(394): unsure at all n locations
gcggacgaaaaaagataagttcatctatctcctcttttcattttntttttcccnccaaggattatctacgtgagatgccttttataacataatcggaggcttgacttttattttccaataagtcgcctgcaaaagtaaaattaaaagccgtcacgtctccgataaataatagagcatcgtcagataggtagcttcatcgtaaggaatctaaattggctcatctcataaaacgaaaacgatgtgttccatcgaataagaagcaagacctttcatcgaagaaaggttaattttacagtaagtgaaattgtatgctgaaaattgttcaatggacttttatggaatcccaccattgtaggagataacatgaaacttgcaagcttgtccttctattctt

SEQ ID NO: 142994 - DNA, 409 bp, Arabidopsis thaliana
aacaaacaaaaagaaaatggttaagctcagcaatctcctcgttgcaaccttcggggttctcctcgtccttaacggctgccttgcgaggcagtcacttggggttcctcctcagctacagaacgagtgtaacctcgacaacctagatgttctccaagccaccgaaactatcaagagtgaagccggtcagatcgagtactgggaccacaaccaccctcagctccgatgtgttggtgtttccgttgctcgttatgtaattgaacaaggcggtctttacttgcccaccttcttcacttccccaaaaattacctacgtcgttcaaggaacgggtatcagcggaagagtggtccctggatgtgccgagaccttcatggactcgcattcgatgcaaggacaacatcaaggccaacca

SEQ ID NO: 142995 - DNA, 408 bp, Arabidopsis thaliana
acaaaaagaaaatggttaagctcagcaatctcctcgttgcaaccttcggggttctcctcgtccttaacggctgccttgcgaggcagtcacttggggttcctcctcagctacagaacgagtgtaacctcgacaacctagatgttctccaagccaccgaaactatcaagagtgaagccggtcagatcgagtactgggaccacaaccaccctcagctccgatgtgttggtgtttccgttgctcgttatgtaattgaacaaggcggtctttacttgctcaccttcttcacttccccaaaaatttcctacgtcgttcaaggaacgggtatcagcggaagagtggtccctggatgtgccgagaccttcatggactcgcagtcgatgcaaggacaacaacaaggccaaccatggc

SEQ ID NO: 142996 - DNA, 413 bp, Arabidopsis thaliana
gcaaatgatgcattaccttatgagtgtggtgtgaatatagaagaattgatcaagttagaagatgttatgtcggaacactcgcttggtcctaatggaggtcttgtatattgtatggagtacttggagaaaaacattgactggctggaatctaaactaaagcctcttctgaaggatcattacattctctttgattttcctggccaagtggaattgttcttcattcatgacagtaccaagaatgttctcacgaagctgattaaatcattgaaccttagattaactgctgtgcaactaattgattcccatctatgttgtgatcccgggaactacgtaagttcgctacttctctccttatccacaatgcttcacatggaactcccacatgtcaatgtattgtctaaaatcgatctgat

SEQ ID NO: 142997 - DNA, 330 bp, Arabidopsis thaliana
aacaaaaagaaaatggtttagctcagcaatctccttgttgtatccttcggggttctcctcgtccttaacggctgccttgcgaggcagtcacttggggttcctcctcagctacagaacgagtgtaacctcgacaacctatatgttctccaagccaccgaaactatcaagagtgaagccggtcagatcgagttctgggaccacatccaccctcatctccgatgtggtggtgttttcgtagctcgttatgtaatgtgaacaaggcaggcttttacttgcccacctatttcacttccccaaaaattttctatcgtatggacggaacgggtatca

SEQ ID NO: 142998 - DNA, 286 bp, Arabidopsis thaliana
gacgcgtgggtctatctttacgtcataataattacaatttattcgtaaaaagatgagttttgttaattacttctcttattataatcaaagttttgatttttattttccaataagtcgccgggaaaagtaaaataaaaagccgtcacgtctccgataaataatagagtatcgttagataggtagcttcaacgtaaggaatctaaattggttcagctcaaaaaacgaaaacgatgggttccatcgaagaagatacatgacctctcatcgaagatagtttaattttaca

SEQ ID NO: 142999 - DNA, 410 bp, Arabidopsis thaliana
gtcaggctcagtgccactcgtggcgttctccagggtaatgcgatggtgcttcctaaatacaacatgaacgctaacgagatcttgtactgcactggaggacaaggaaggatccaagtggtcaacgacaacggacagaacgtgttggaccaacaggtgcagaagggacagctcgtggtcatcccacaagggttcgcatacgttgtccagtcccacggaaacaagttcgagtggatctctttcaaaactaatgaaaacgcaatgatcagcactttggcgggtagaacctcgctcttgagggcattgccattggaggtcatatcaaatggtttccagatctctcccgaggaagctaggaagatcaagttcaacacacttgagaccactttgacccgcgctgtcggtaggcaaca

SEQ ID NO: 143000 - DNA, 411 bp, Arabidopsis thaliana
caaaaagaaaatggttaagctcagcaatctcctcgttgcaaccttcggggttctcctcgtccttaacggctgccttgcgaggcagtcacttggggttcctcctcagctacagaacgagtgtaacctcgacaacctagatgttctccaagccaccgaaactatcaagagtgaagccggtcagatcgagtactgggaccacaaccaccctcagctccgatgtgttggtgtttccgttgctcgttatgtaattgaacaaggcggtctttacttgcccaccttcttcacttccccaaaaatttcctacgtcgttcaaggaacgggtatcagcggaagagtggtccctggatgtgccgagaccttcatggactcgcagccgatgcaaggacaacaacaaggccaaccatggcaagg

SEQ ID NO: 143001 - DNA, 341 bp, Arabidopsis thaliana
aaaaagaaaatggttaagctcagcaatctcctcgttgcaaccttcggggttctcctcgtccttaacggctgccttgcgaggcagtcacttggggttcctcctcagctacagaacgagtgtaacctcgacaacctagatgttctccaagccaccgaaactatcaagagtgaagccggtcagatcgagtactgggaccacaaccaccctcagctccgatgtgttggtgtttccgttgctcgttatgtaattgaacaaggcggtctttacttgcccaccttcttcacttccccaaaaatttcctacgtcgttcaaggaacgggtttcagcggtagagtggtccc

SEQ ID NO: 143002 - DNA, 408 bp, Arabidopsis thaliana; identical to SEQ ID NO: 130044

SEQ ID NO: 143003 - DNA, 405 bp, Arabidopsis thaliana
acaatttctcattagcttacaatggcggatacacaccgtgtcgaccgtactgatagacactttcaatttcagtcgccctatgaaggcggccgaggtcaaggtcagtatgaaggtgaccgtggttacggtggtggcggttacaagagcatgatgcctgaaagtggcccatctagtacccaagtattgtccctgttgattggagtccctgtcgtcggttcgctacttgccttggctggattacttctagctggttcggtgatcggcttaatggttgctttaccactatttctcctcttcagcccggttatagtcccagcggctctaactatcgggcttgcaatgacaggctttttagcctcggggatgttcggtctaaccgggcttagctcaatctcatgggtcatg

SEQ ID NO: 143004 - DNA, 367 bp, Arabidopsis thaliana
aagacataacacaatggctcgagtctctcctcttctttctttcttcttaacacttttgatccttttcgatggctacgcggctcaacagggtcagcagggtcagcagtttccgaacgagtgccagctcgaccagctcaatgcgctcgagccgtcacacgtactgaagagcgaggctggtcgcatcgaggtgtgggaccaccacgctcctcagctccgttgctcaggtgtctccttcgcacggtacatcatctagtctaagggtctgtacttgccctctttctttaacaccgcgaagctctctttcgtggctaatggacgaggtcttatgggaaaagtgatccctggatgcgccgaaacatttcaagac

SEQ ID NO: 143005 - DNA, 404 bp, Arabidopsis thaliana
aattttaaaaatcttatcttaagctctactctcttctatctccaaaatctttcagagaggagagctggataatcgatttgtcttccgtttgatccggatttgctctatattctcgtctctatgcgagatcaataatttccgattacatatcggatcttctgttaccggctatgaccgggcttttctacgattttaacggaacttgatctctatctccatcgctgctcacccatcgatctcaacgttttcttccaagattcatgttgtctccatttcttcgaggattaacatctacgtcacctccgattgctcaagacgcaagagcaaaaatggactttagactacatcaagatagatgtagtcggtgggggagtctcccgaaacttgtgattccaaagaattta

SEQ ID NO: 143006 - DNA, 414 bp, Arabidopsis thaliana
aaacgctatggtgctaccgcaatggaacgtaaacgcaatctcggcactctacgtgacaaacggaaaggctcatatacaaatggtgaacgacaacggagaaagagtgttcgaccaagagatctccagcggacagttactagtcgtgccacaaggcttttcggtcatgaaacatgccataggcgaacagttcgagtggatcgaattcaagacaaacgaaaacgcacaggtcaacacactcgcgggccgtacctcagtcatgagaggtttgccgcttgaggttataaccaatgggtaccagatctctcccgaagaagctaaacgagtaaagtttagcacgattgagaccacactgacccatagcagtccaatgagctacggaaggcctagggcttgaggcttgatgagcgcgtggtg

SEQ ID NO: 143007 - DNA, 409 bp, Arabidopsis thaliana
tatttgtgttggagggatatattataataaaaagaaccaatggcggaccaaacaagaacccatcacgagatgataagccgagacagtacccaagaggcccatccgaaggccaggcagatggtgaaggcagcaaccgctgtcacagccggtggatccctccttgtcctctccggcttaacactcgctggaacagtcatcgcactcacggtggctactcctctcctcgtcatcttcagccccgtcttggttccagcagtggtaaccgttgctctcatcattaccggattccttgcatccggtggctttggaatagccgccattaccgccttctcttggctctacaggcacatgacgggatctggatcggataagatagagaatgctcggatgaaggttggaagcagagtgc

SEQ ID NO: 143008 - DNA, 279 bp, Arabidopsis thaliana
gcggaaaacatacacaaatggcaaaacatggttaacatgctctttctcgcttgcgcaactgttgccctgtgcttactgctcaccaacgcttccatctaccgcaccgttgtcgaattcgaagaagatgaacgcccgcaaccccgtaggaccaagacagagatgcctggaggagtgtgagcactcaccacacctaatagcttgcccgagatgggtgtgcgagcgaatgaggcatgggcctgggggtggttccttgctcgacgatttgtacgatttcgaggg

SEQ ID NO: 143009 - DNA, 409 bp, Arabidopsis thaliana
aagaggaagaaaaatgggtcgagtctcatctattatctctttctctttgacactcttgatcgtcttcaatggctacactgcccaacagtggcccaacgagtgccagctcgatcaactcaatgcgctcgaaccatcccaaatcatcaagagcgagggtggtcgcatcgaggtctgggaccaccatgcaccccagctccgttgctccggctttgcctttgagcgtttcgtcattgagcctcagggtcttttcttgcccactttcttgaacgccggcaaactcacgtttgttgttcacggaaggggtctaatgggaagagttattccgggatgcgccgagacgttcatggagtcaccggtatttggagaaagtcaaggtcagggtcagagtcaagggttccgtgacatgcac

SEQ ID NO: 143010 - DNA, 318 bp, Arabidopsis thaliana
ggataggcttgttagtgctccatacaagcttaactttagagatgagaaagactcagaggtgtactgtaaaaagaagcttagtagagaagaagttgaacactttcgaagagctgttgaaaaagattattactttcagatgtattatgatgatttgcctatttggggattcattgggaaggtggacaaagagagcaaatctgatcctagcgagtttaaatattttctctacaaacacatccagtttgagattttgtacaataaggatcgggtgattgaaatcaaagctagaatggatcctcattcgcttgtggatcttac

SEQ ID NO: 143011 - DNA, 418 bp, Arabidopsis thaliana
aatggctcgagtctcttctcttctttctttctccttaacacttttgatccttttccatggctacgcggctcaacagggtcagcagggtcagcagtttccgaacgagtgccagctcgaccagctcaatgcgctcgagccttcacacgtactgaagagcgaggctggtcgcatcgaggtgtgggaccaccacgctcctcagctccgttgctcaggtgtctcctttgcacgttacatcatcgagtctaagggtctctacttgccctctttctttaacaccgcgaagctctccttcgtggctaaaggacgaggtcttatgggaaaagtgatccctggatgcgccgaaacattccaagactcatcagagttccaaccacgcttcgaaggtcaaggtcaaagccagaggttccgtgacatgcac

SEQ ID NO: 143012 - DNA, 405 bp, Arabidopsis thaliana
ctctctgcctatctccgccgcggagatccatcgtgttttctacttctgctggtatccatggattctctcgttgaatccggttggaagtaccttgttacgcatttcagtgactttcaactggcgtgtattgggagttttatacttcatgaaagcgtgtttttcttgtctggactcccttacattttcctagaaaggactggttttctgagcaactacaaaattcagaccaaaagtaatactcctgaagcccagggaaaatgcattgctcgactattactttaccattgctgcgtaaacttgcccctcatgatggcgtcgtatcctgtattcagattcatgggcatggaaagcagttttcctctgccgtcctggaaagtggtgtctgcccagatcttattctacttc

SEQ ID NO: 143013 - DNA, 416 bp, Arabidopsis thaliana
gtcgcatcgaggtctgggaccaccatgcaccccatctccgttgctccggctttgcctttgagcgttgggtcattgagcctcagggtcttttcttgcccactttcttgaacgccggcaaactcacgtttgttgttcacggaaggggtctaatgggaagagttattccgggatgcgccgagacgttcatggagtcaccggtatttggagaaggtcaaggtcagggtcagagtcaagggttccgtgacatgcaccagaaagtagagcacctacggtgcggtgacaccattgcaacaccatctggtgtagctcaatggttctacaacaatggaaatgagcctctcattcttgttgcagccgcggatcttgccagcaaccagaaccagcttgaccgcaaccttagaccatttttgatagcc

SEQ ID NO: 143014 - DNA, 418 bp, Arabidopsis thaliana
aagaaaatggttaagctcagcaatctcctcgttgcaaccttcggggttctcctcgtccttaacggctgccttgcgaggcagtcacttggggttcctcctcagctacagaacgagtgtaacctcgacaacctagatgttctccaagccaccgaaactatcaagagtgaagccggtcagatcgagtactgggaccacaaccaccctcagctccgatgtgttggtgtttccgttgctcgttatgtaattgaacaaggcggtctttacttgcccaccttcttcacttccccaaaaatttcctacgtcgttcaaggaacgggtatcagcggaagagtggtccctggatgtgccgagaccttcatggactcgcagccgatgcaaggacaacaacaaggccaaccatggcaaggacgacagggac

SEQ ID NO: 143015 - DNA, 414 bp, Arabidopsis thaliana
cacagggatccttgttccttcctcattttaactctaagaccacatttgtaacgtttgtggagaatggttgtgcccgcttcgagatggctactccttataaattccaaagagggcaacaacaatggccaggacaaggacaagaagaagaagaagatatgagtgaaaacgtacacaaagttgtgtcacgagtgtgtaaaggcgaagtttttatcgttccggcaggtcatccattcactatactctcgcaagatcaagactttatcgcggtagggtttggtatttatgcgaccaacagcaaaagaacgttccttgcaggggaagagaatttgctgagcaacctcaacccggcggcaactagggtaacctttggtgttggaagtaaagtcgcggagaaactgttcacgagccaaaact

SEQ ID NO: 143016 - DNA, 403 bp, Arabidopsis thaliana
ctcatctattatctctttctctttgacactcttgatcctcttcaatggctacactgcccaacagtggcccaacgagtgccagctcgatcaactcaatgcgctcgaaccatcccaaatcatcaagagcgagggtggtcgcatcgaggtctgggaccaccatgcaccccagctccgttgctccggctttgcctttgagcgtttcgtcattgagcctcagggtcttttcttgcccactttcttgaacgccggcaaactcacgtttgttgttcacggaaggggtctaatgggaagagttattccgggatgcgccgagacgttcatggagtcaccggtatttggagaaggtcaaggtcagggtcagagtcaagggttccgtgacatgcaccagaaagtagagcaccta

SEQ ID NO: 143017 - DNA, 410 bp, Arabidopsis thaliana
gccgccgaaactagcatcaggaagctcccatctctctccggcctccgtcaccgacgtaatccactggaagataatccctacttccacccctccaatggcttctacatcactccttctgacgtcatcctcgcccaggtcgcctacgacctctccgcccaatcccaatcacgcgtggcctaccacagggctgggcctcgccgtgagatcatgtacgagccatcggctgtgaaggcggcgatcgtaacgtgcggtgggctgtgccctggcatgaacacagtcataagagaactcgtggtgggtctttgggagctgtacggtgtgagagagatatatgggataccagctggttacagaggcttttattccatggaagccgtcaagttagatcccaaggcggttcatgattggca

SEQ ID NO: 143018 - DNA, 387 bp, Arabidopsis thaliana
  unsure (1)..(387): unsure at all n locations
tttttgttttctctctctagaagtctctctgttttcatctttctctctctctctctagctgttcttcctcgtttctggcttttctgggaattttgatcctttggcccccattgctcgcttgaattacgaatcagatatcgccgatcgtcgtagatctgcgttgatactgtccggctgagtaaacagggtgaacaaaaaccaaaaacagagagggggtttaaaaatcctgaagaaaatcgcatgaatttgtttggaagcctgattttttcatcttcgatttcgagccacttcacgacttgtcttctcatctttattcttcatttctctccccagcttaatagtnataataataataataatagtaatcgtaattccaataatctcgag

SEQ ID NO: 143019 - DNA, 408 bp, Arabidopsis thaliana
atttgacttcacagagatagagagagagatggcgacggaaacggaagttgtggctccggtaagcaacggcggaggcaaaggatgttgcaagtacggtggtcctggttacgcgacgcctctcgccgctatgtctggtccatcagagaaacttatctacgtcaccgccgtctacaccggaactggaatagataaaccggactatttggcgacggtggatgtagatccaagctcgccttcgtattcaagtgttattcatagattaccaatgccttttgttggtgatgagcttcatcattctggttggaactcttgtagttcttgccatggtgatgcttctgttgatagacgttatttcgtgttaccggctcttatatctggtcgcatttatgcgattgatactaaggaaaa

SEQ ID NO: 143020 - DNA, 417 bp, Arabidopsis thaliana
gtaattaactaacaacaaatggcgaacaagctcttcctcgtctgcgcagctctcgccctgtgtttcatcctcaccaacgcttccgtctatcgcacggttgtcgagttcgacgaagatgacgccagtaaccccataggcccaatacagaaatgtcagaaggagtttcagcaagaacagcacctaagagcttgccagagatggatgcgcaagcaaatgtggcaaggacgtggtggtggtccttccctcgacgatgagttcgatatggaagacgacatcgagaacccgcagagacgacagctactccagaagtgctgcagcgagcttcgccaagaagagccagtttgcgtttgccccaccttgagacaagctgccaaggccgttagattccagggacagcaacaccaaccagagcaagtc

SEQ ID NO: 143021 - DNA, 406 bp, Arabidopsis thaliana
cccacgcgtccgcccacgcgtccgcccacgcgttcgcccacgcgtccgctcaagcattgaaaattgacgttcagttggctcagcagcttcagaaccaacaagacagcagaggaaacatcgttcgtgttaagggacctttccaggtcgtgaggccacctctaagacagccctacgagagcgaggagtggagacacccacgtagcccacagggcaacggccttgaggagactatctgcagcatgaggtcccacgagaacattgacgaccctgctcgtgctgacgtgtacaagcccagcctaggtcgcgtgaccagcgtcaacagctataccttgcccatcttggagtatgtcaggctcagtgccactcgtggcgttctccagggtaatgcgatggtgctttctaaata

SEQ ID NO: 143022 - DNA, 273 bp, Arabidopsis thaliana
acatatcagatctgttgaaaaaggatgaaatgagacggcattttgtcaatacgtccttatcttgaatgtattaacgagttttttatttttcgatcgcctggaaggtgcaaaagaaacatctcgtgcttactttaacaagtactggtgcctagtggacccttcacgaggagttggacccagatgaagatctgaccatctgtcagagaaaaaagaacgaatggctcttgtgggattgccaagaaattcttagctttctttcggaagcagaagatt

SEQ ID NO: 143023 - DNA, 435 bp, Arabidopsis thaliana
aaaatttactacgtcgttcaaggaacgggtatcagcggaagagtggtccctggatgtgccgagaccttcatggactcgcagccgatgcaaggacaacaacaaggccaaccatggcaaggacgacagggacaacaaggccaaccatgggaaggacagggacaacagggacaacaaggaagacaaggccaaccatgggaaggacagggacaacagggacaacaaggacgacagggacaacaaggccaaccatgggaaggacagggacagcagggacaacaagggttccgtgacatgcaccagaaggtggaacatgtgagacgcggagacgtctttgccaacactccaggctctgcccactggatctacaactcaggagaacagccacttgtcatcatcgctcttttcgacatcgccaactaccaaaaccaactcgac

SEQ ID NO: 143024 - DNA, 412 bp, Arabidopsis thaliana
aacgagtctgatctccctgtatatatacttaactttacaagaatatatggattgtcatgtcctgtgaaagtattgaagataactgaatatgaaggaacaattgaagagctagaggaaatgagacatttcatagagaaactgtcatgtcttgtgcttgtcaaagttcgtgcctgtgcaataaacgacaaggagaagtatcgaatcaccggagatctgctaatggttcgtagatcatcgaagtgcaatatccagatcaagttttatgagaaaactagtaaaggcatgaaaaaacattgttccctcctagtttaatagtatagtaagttggaacattattcagtttgtacgcatatttgcttattgttctgctaaactactctcgctacatataaaatgtttggtcgcatacata

SEQ ID NO: 143025 - DNA, 411 bp, Arabidopsis thaliana
ggtgctaccggactggaacgtaaacgcaaacgcggtactttacgtgacaaacggaaaggctcatatacaaatggtgaacgacaacggagaaagagtgttcgaccaagagatctccagcggacagttactagtcgtgccacaaggcttttcggtcatgaaacatgccataggcgaacagttcgagtggatcgaattcaagacaaacgaaaacgcacaggtcaacacactcgcgggccgtacctcagtcatgagaggtttgccgcttgaggttataaccaatgggtaccagatctctcccgaagaagctaaacgagtaaagtttagcacgattgagaccacactgacccatagcagtccaatgagctacggaaggcctagggcttgaggcttgatgagcgcgtggtggaatag

SEQ ID NO: 143026 - DNA, 410 bp, Arabidopsis thaliana
acgctcgcttttccagattcttctccactggttctaccgatacgagatcctcttatacgatagtggatcacacttatgatgcggttgtggtgggagctggtggtgctggtcttagggcggcgattgggttatcggagcatggctttaacaccgcttgcattactaagcttttccccacaaggtcacatactgttgctgctcagggtggtattaatgctgcactgggaaatatgtccgaagatgactggagatggcacatgtatgacactgtcaaaggaagtgactggctaggtgatcaagatgctatccagtacatgtgtagagaggcaccaaaagcagtcattgaacttgagaattatgggctgcctttctctcgtactgaagaagggaaaatttaccagcgtgcattt

SEQ ID NO: 143027 - DNA, 360 bp, Arabidopsis thaliana
cacattttcgtagccgcaagactcctttcagattcttacttgcagctatgggtaaagagaagtttcacattaacattgtggtcattggtcatgttgattctggaaaatcgaccacaactggtcacttgatctataagcttggtggtattgacaagcgtgtcatcgagaggttcgagaaggaggctgctgagatgaacaagaggtccttcaagtacgcatgggtgttggacaaacttaaggccgagcgtgagcgtggtattaccatcgatattgctctatggaagttcgagaccaccaagtactactgcacagtcattgatgccccaggacatcgtgatttcatcaagaacatgattactg

SEQ ID NO: 143028 - DNA, 352 bp, Arabidopsis thaliana
aaacaagaaaacatacacaaatagcaaaacatggctaacaagctcttcctcgtctgcgcaactctcgccctctgcttcctcctcaccaacgcttccatctaccgcaccgttgtcgaattcgaagaagatgacgccagcaaccccgtaggtccaagacagagatgccagaaggagtttcagcaatcacaacacctaagagcttgccagagatggatgagcaagcaaatgaggcaaggacgtggtggtggtccttccctcgacgatgagttcgatttcgagggcccccagcagggataccagctactccagcagtgctgcaacgagcttcgccaggaagagccagtttgcgttt

SEQ ID NO: 143029 - DNA, 412 bp, Arabidopsis thaliana
gcagccgatgcaaggacaacaacaaggccaaccatggcaaggacgacagggacaacaaggccaaccatgggaaggacagggacaacagggacaacaaggaagacaaggccaaccatgggaaggacagggacaacagggacaacaaggacgacagggacaacaaggccaaccatgggaaggacagggacagcagggacaacaagggttccgtgacatgcaccagaaggtggaacatgtgagacgcggagacgtctttgccaacactccaggctctgcccactggatctacaactcaggagaacagccacttgtcatcatcgctcttctcgacatcgccaactaccaaaaccaactcgaccgcaaccctagagtgttccatttggccggaaacaaccagcagggaggctttggc

SEQ ID NO: 143030 - DNA, 409 bp, Arabidopsis thaliana; identical to SEQ ID NO: 130047

SEQ ID NO: 143031 - DNA, 409 bp, Arabidopsis thaliana
gctaccgcaatggaacgtaaacgcaaacgcggcactctacgtgacaaacggaaaggctcatatacaaatggtgaacgacaacggagaaagagtgttcgaccaagagatctccagcggacagttactagtcgtgccacaaggcttttcggtcatgaaacatgccataggcgaacagttcgagtggatcgaattcaagacaaacgaaaacgcacaggtcaacacactcgcgggccgtacctcagtcatgagaggtttgccgcttgaggttataaccaatgggtaccagatctctcccgaagaagctaaacgagtaaagtttagcacgattgagaccacactgacccatagcagtccaatgagctacggaaggcctagggcttgaggcttgatgagcgcgtggtggaatagc

SEQ ID NO: 143032 - DNA, 407 bp, Arabidopsis thaliana
atcgagtactgggaccacaaccaccctcagctccgatgtgttggtgtttccgttgctcgttatgtaattgaacaaggcggtctttacttgcccaccttcttcacttccccaaaaatttcctacgtcgttcaaggaacgggtatcagcggaagagtggtccctggatgtgccgagaccttcatggactcgcagccgatgcaaggacaacaacaaggccaaccatggcaaggacgacagggacaacaaggccaaccatgggaaggacagggacaacagggacaacaaggaagacaaggccaaccatgggaaggacagggacaacagggacaacaaggacgacagggacaacaaggccaaccatgggaaggacagggacagcagggacaacaagggttccgtgacatgca

SEQ ID NO: 143033 - DNA, 408 bp, Arabidopsis thaliana
gaaggaagaagatccagacgaagtggtttgccttcagggaacgagagagagaaagagattttaacaaacgatgtcgctgaggccgagcacacgcgcggagctaaggaagaagatatacaagacaggcgtcgatgccgatgaggccaggcggaggagagaggacaatctcgtcgagattaggaaaaacaagcgtgaggatagtcttctcaagaagcgtcgtgaaggaatgatgcttcagcagcagctgcctctcggagctggccttgatggtccccagaccgctgccgccgttgagaaacgattagaaggtatcccaatgatggtacaaggtgtttattctgatgatcctcaagctcagctagaagcgactacccaatttagaaagttgttatctatagagcgtagtcc

SEQ ID NO: 143034 - DNA, 439 bp, Arabidopsis thaliana
  unsure (1)..(439): unsure at all n locations
ccggaacggaaggcccggcccgaccgacgcgttcagggtggaggatgtaacggttcaccagctccagatccagcaagataaccgtggcaacatcgtcaaggtcaacggacctttcggcgtcattaggccacccttgagacgcggcgaaggcggccaacaaccacatgaaatagctaatggtttagaggagactttgtgcaccatgcgatgcactgaaaacctcgatgacccgtcggatgctgacgtgtacaagccatcactcggatacattagcacacttaacagctacaatcttcctatcctcagacttctccgccttagcgctcttcgtggctccatccgtaaaaacgncttggtgctaccgcaatggaacgtaaacgcaaacgcggcactctacgtgacaaacggaaaggctcatatacaaatggtgaacgacaac

SEQ ID NO: 143035 - DNA, 476 bp, Arabidopsis thaliana
  unsure (1)..(476): unsure at all n locations
cggaaatnncccgggtccgaccccacgccggtcccgcaaaaagggaaaatgtgttaagctcagnncaatctcctcgtttgcataccttcggggnnttctcctcgtcccttaaccggctgccttgcgnnaggcagtcacttggggnttcctcctcagctaccagaacgagtgtnaacctcnngacaacctagatgttctccaagnnccaccgaaactatcaagaagtgaagnccggtcagaatcgagtacctggganccacaaccaccctcagnnctccgatgtgttggtgtttccgttgctcgttatgtaattgaacaaggcggtctttacttgcccaccttcttcacttccccaaaaatttcctacgtcgttcaaggaacgggtatcagcggaagagtggtccctggatgtgccgagaccttcatggactcgcagccgatgcaaggacaacaacaaggccaaccatggcaaggac

SEQ ID NO: 143036 - DNA, 413 bp, Arabidopsis thaliana
aaaatggttaagctcagcaatctcctcgttgcaaccttcggggttctcctcgtccttaacggctgccttgcgaggcagtcacttggggttcctcctcagctacagaacgagtgtaacctcgacaacctagatgttctccaagccaccgaaactatcaagagtgaagccggtcagatcgagtactgggaccacaaccaccctcagctccgatgtgttggtgtttccgttgctcgttatgtaattgaacaaggcggtctttacttgcccaccttcttcacttccccaaaaatttcctacgtcgttcaaggaacgggtatcagcggaagagtggtccctggatgtgccgagaccttcatggactcgcagccgatgcaaggacaacaacaaggccaaccatggcaaggacgacaggg

SEQ ID NO: 143037 - DNA, 409 bp, Arabidopsis thaliana; identical to SEQ ID NO: 126043

SEQ ID NO: 143038 - DNA, 272 bp, Arabidopsis thaliana
cacacatagcaaaaaatggcaaacaagttgttcctcgtctgcgcagctctcgctctctgctggctcctcaccaacgcttccatctaccgcaccgtcgttgagttcgaagaagatgacgccactaaccccataggcccaaaaatgaggaaatgccgcaaggagtttcagaaagaacaacacctaagagcttgccagcaattgatgctccagcaagcaaggcaaggccgtagcgatgagtttgatttcgaagacgacatggagaacccacaggg

SEQ ID NO: 143039 - DNA, 401 bp, Arabidopsis thaliana
agaaaaatgggtcgagtctcatctattatctctttctctttgacactcttgatcctcttcaatggctacactgcccaacagtggcccaacgagtgccagctcgatcaactcaatgcgctcgaaccatcccaaatcatcaagagcgagggtggtcgcatcgaggtctgggaccaccatgcaccccagctccgttgctccggctttgcctttgagcgtttcgtcattgagcctcagggtcttttcttgcccactttcttgaacgccggcaaactcacgtttgttgttcacggaaggggtctaatgggaagagttattccgggatgcgccgagacgttcatggagtcaccggtatttggagaaggtcaaggtcagggtcagagtcaagggttccgtgacatgca

SEQ ID NO: 143040 - DNA, 408 bp, Arabidopsis thaliana
aaaaagaaaatggttaagctcagcaatctcctcgttgcaaccttcggggttctcctcgtccttaacggctgccttgcgaggcagtcacttggggttcctcctcagctacagaacgagtgtaacctcgacaacctagatgttctccaagccaccgaaactatcaagagtgaagccggtcagatcgagtactgggaccacaaccaccctcagctccgatgtgttggtgtttccgttgctcgttatgtaattgaacaaggcggtctttacttgcccaccttcttcacttccccaaaaatttcctacgtcgttcaaggaacgggtatcagcggaagagtggtccctggatgtgccgagaccttcatggactcgcagccgatgcaaggacaacaacaaggccaaccatggcaa

SEQ ID NO: 143041 - DNA, 401 bp, Arabidopsis thaliana
cggacgcgtgggcggacgcgtgggcacatagcataaaatggcaaacaagttgttcctcgtctgcgcagctctcgctctctgcttcctcctcaccaacgcttccatctaccgcaccgtcgttgagttcgaagaagatgacgccactaaccccataggcccaaaaatgaggaaatgccgcaaggagtttcagaaagaacaacacctaagagcttgccagcaattgatgctccagcaagcaaggcaaggccgtagcgatgagtttgatttcgaagacgacatggagaacccacagggacaacagcaggaacaacagctattccagcagtgctgcaacgagcttcgccaggaagagccagattgtgtttgccccaccttgaaacaagctgccaaggccgttagac

SEQ ID NO: 143042 - DNA, 399 bp, Arabidopsis thaliana
gcaaacgacgtcgcttcagctcttcatttactagtacgcagccttatctatctccccgcgtttggaaactgcgttagagctcaaggctagatctctcctcttcctccgtcgtttcaaggatgtcgccgatatgcttcaggattatatccccagtcttaaactcgacgacgaaggatccgcttcttctcaaggctcttcttcctccgacggtatcaaccttctctccgacgcctcttcccctggctcctttaaatgcttctctgtttccgacttgaagaagaaagtcatggcaggcatttgtaaaaaatgcgacaaagaagggcaatggaggtatgtggtgttgggtcaagcttgttgccatctaggactaatggaggatgccatggttctccttcaaac

SEQ ID NO: 143043 - DNA, 380 bp, Arabidopsis thaliana
cggacgcgtgggttcgagtggatctctttcaaaactaatgaaaacgcaatgatcagcactttggcgggtagaacctcgctcttgagggcattgccattggaggtcatatcaaatggtttccagatctctcccgaggaagctaggaagatcaagttcaacacacttgagaccactttgacccgcgctgccggtaggcaacaacaacagttgatcgaggagattgtcgaggcttaaatcaaaacgtttttctttttcttaataaagtatggtcagtttgtaatcacgtccctttacctttaacgtacgtgtaaaatatgtgtctgcggcacctcacttgtaataacactttcttctcataaataaaagggaagtttcgagtt

SEQ ID NO: 143044 - DNA, 309 bp, Arabidopsis thaliana
ctcgttcgcttcctcaaacctggttcacatcacaacaacaagtttttttccatcaccacacatgacatttacatcctctattatatataacacaactgtctattttgaatgtttgtattgtatgtatgaaaaaaacttacctcttaagattgttgtacagtaaagtgagtcccctagtgataccacttgtctgcactctagcaactccttctgtataagtgaatagagaaggaaggaaagccgcaaggatcgtcgcaggatcatgaaggtacacacctgccccccacacacactttttaaaatatattt

SEQ ID NO: 143045 - DNA, 408 bp, Arabidopsis thaliana
gaaaaacttgtggagcgggttcgacgcacaggtcatagctcaagcattgaaaattgacgttcagttggctcagcagcttcagaaccaacaagacagcagaggaaacatcgttcgtgttaagggacctttccaggtcgtgaggccacctctaagacagccctacgagagcgaggagtggagacacccacgtagcccacagggcaacggccttgaggagactatctgcagcatgaggtcccacgagaacattgacgaccctgctcgtgctgacgtgtacaagcccagcctaggtcgcgtgaccagcgtcaacagctataccttgcccatcttggagtatgtcaggctcagtgccactcgtggcgttctccagggtaatgcgatggtgcttcctaaatacaacatgaacgc

SEQ ID NO: 143046 - DNA, 412 bp, Arabidopsis thaliana
caaggccaaccatgggaaggacggggacagcacttacatcaggggtttcgagacatgcaccagagggtggaacatgtaaaacgcggagacgtatttggcaacactccaggctctggccactggatctacaactcaggagaacagccacttgtcatcatcgctcttatagacatcgtcaactaccaaaaccaactcgaccgcaaccctagagtgttccatttggccggaaacaaccagcatggaggctttggcggttcacagcaacaacaagaacagaaaaacttgtggagcgggttcgacgcacaggtcatagctcaagcattgaaaattgacgttcagttggctcagcagcttcagaaccaacaagacagcagaggaaacatcgttcgtgttaagggacctttccaggtcg

SEQ ID NO: 143047 - DNA, 386 bp, Arabidopsis thaliana
cggacgcgtgggcggacgcgtgggttgattttggttgaaaatggagatatcagagagagttcgagctcgattagctgttctctcaggtcatttatcggaaggaaaacaggattctccagcgatcgagcgatggtgcacgtcggcggatacgagtgtcgcaccgcttggatctttgaagggaacactgacgatcgtcgacgaacgcaccggaaaaaattataaagttccggtctcagatgatggtaccgttaaagccgctgatttcaaaaagatagtgacggtgaaggaagacaaggggcttaagttatacgatccaggttacttgaacacggcttctgttcgatcttcgatttcttacatcgatggagatgaaaggatccttcgtt

SEQ ID NO: 143048 - DNA, 397 bp, Arabidopsis thaliana
ctcgaccagctcaatgcgctcgagccttcacacgtactgaagagcgaggctggtcgcatcgaggtgtgggaccaccacgctcctcagctccgttgctcaggtgtctcctttgcacgttacatcatcgagtctaagggtctctacttgccctctttctttaacaccgcgaagctctccttcgtggctaaaggacgaggtcttatgggaaaagtgatccctggatgcgccgaaacattccaagactcatcagagttccaaccacgcttcgaaggtcaaggtcaaagccagaggttccgtgacatgcaccagaaagtggagcacattaggagcggtgataccattgccacaacacccggtgtagcccagtggttctacaacgacggacagcaaccacttg

SEQ ID NO: 143049 - DNA, 404 bp, Arabidopsis thaliana
aaagagcaagactaataagccatataagagacaccttgaacaacctagacgagatcaagatcgagagcaagacctgcctcaacgatcaagaacaagaagtcaaaatagacaacatgcacatgagcgaccaagacaagaacaagatcgaaatcaagaacaagagtggcctcggcgaaaagtggccagaacccatcgtccgagtccaatctctagccgagagcaacctcactagtctccctgaccgttacatcaagccgccgtctcaacgccctcaaaccaccatcatcgaccaccaaccggaagtagctgacataaatataccgatcatagacctagacagtctattctctggcaatgaagacgacaagaagaggatatccgaggcatgccgtgaatggggattc

SEQ ID NO: 143050 - DNA, 296 bp, Arabidopsis thaliana
caaaaagaaaatggttaagctcagcaatctcctttttgcaaccttcggggttctccttgtccttaacggctgccttgcgaggcagtcaacttggggttcttcttaagttccaaaccgggggtaccttgaccacctaaattttcttcaaggcacccaaactattaagagtgaagccggtcagatcgagtactgggaccacaaccaccctcagctccgatgtgttggtgtttccgttgctcgttatgtaattgaacaaggcggtctttacttggccacacttttttactttcccaaaa

SEQ ID NO: 143051 - DNA, 334 bp, Arabidopsis thaliana
aagagtttcattgaaaatttcaagaaccctagttaataacgataatgggttcgagagttttggcttccttctttgttttcttaatcttcacggtcatcacattgcctcccacgatccaagcttgcactccttgtactcgtcctcatcctccggttccgaaacctccacaacacggcggtggtggaggtggtggtagcaagccgcctccacatcacggtggaaaaggtggtggtaaacccccaccccacggtggaaaaggtggaggaccgccgcatcatggtggaggaggaggaggaggagggcattcaccgccgattgttagacctcttacctt

SEQ ID NO: 143052 - DNA, 412 bp, Arabidopsis thaliana
cgtttcgtcattgagcctcagggtcttttcttgcccactttcttgaacgccggcaaactcacgtttgttgttcacggaaggggtctaatgggaagagttattccgggatgcgccgagacgttcatggagtcaccggtatttggagaaggtcaaggtcagggtcagagtcaagggttccgtgacatgcaccagaaagtagagcacctacggtgcggtgacaccattgcaacaccatctggtgtagctcaatggttctacaacaatggaaatgagcctctcattcttgttgcagccgcggatctcgccagcaaccagaaccagcttgaccgcaaccttagaccatttttgatagccggaaacaacccacaagggcaggaatggctacaaggccgaaagcaacagaagcaaaaca

SEQ ID NO: 143053 - DNA, 408 bp, Arabidopsis thaliana
tagagagtagtagaccctctggctcacacaccgtttcaatgcgccgggtgagggtaaacggtgtgagtgcggtgagcttgaaggatacaagcacaatgaacagattgtagattcaaacaaccgctcatgacaagtgaatgtctgcctgaacaagtgtggagagcagggaatgtatcacagacagcttgaacagctgaaggtgttaggtaagtgcattgactaatgttaaggcttcttagtccttcttcatcgaattttcctttctttaccgctcgccacatctcgtgtttgttcttgactccgctctgagctaaagagtacattgctctgtctgtaatgtttctgcagtagtataaccccaatgacctcaagtgaatgcaccgattcgccaaagccacaacactctca

SEQ ID NO: 143054 - DNA, 404 bp, Arabidopsis thaliana
  unsure (1)..(404): unsure at all n locations
acaaacgacgagnctcatctattatctctttctttttgacactcttgatcctcccgaatgggtacactgcccaacagcggcccaacgagtgccagctcgatcaactcaatgcgctcgaaccatcccaaatcatcaagagcgagggtggtcgcatcgaggtctgggaccaccatgcaccccagctccgttgctccggctttgcctttgagcgtttcgtcattgagcctcagggtcttttcttgcccactttcttgaacgccggcaaactcacgtttggtgttcacggaaggggtctaatgggaagagttattccgggatgcgccgagacgttcatggagtcaccggtatttggagaaggtcaaggtcagggtcagagtcaagggttttctgacatgcaccaaaaa

SEQ ID NO: 143055 - DNA, 416 bp, Arabidopsis thaliana
aacgggtatcagcggaagagtggtccctggatgtgccgagaccttcatggactcgcagccgatgcaaggacaacaacaaggccaaccatggcaaggacgacagggacaacaaggccaaccatgggaaggacagggacaacagggacaacaaggaagacaaggccaaccatgggaaggacagggacaacagggacaacaaggacgacagggacaacaaggccaaccatgggaaggacagggacagcagggacaacaagggttccgtgacatgcaccagaaggtggaacatgtgagacgcggagacgtctttgccaacactccaggctctgcccactggatctacaactcaggagaacagccacttgtcatcatcgctcttctcgacatcgccaactaccaaaaccaactcgaccgca

SEQ ID NO: 143056 - DNA, 338 bp, Arabidopsis thaliana
gaaaatggttaagctcagcaatctcctcgttgcaaccttcggggttctcctcgtccttaacggctgccttgcgaggcagtcacttggggttcctcctcagctacagaacgagtgtaacctcgacaacctagatgttctccaagccaccgaaactatcaagagtgaagccggtcagatcgagtactgggaccacaaccaccctcagctccgatgtgttggtgtttccgttgctcgttatgtaattgaacaaggcggtctttacttgcccaccttcttcacttccccaaaaatttcctacgtcgttcaaggaacgggtttcagcggaggagtggtccctg

SEQ ID NO: 143057 - DNA, 416 bp, Arabidopsis thaliana
cttccccaaaaatttcctacgtcgttcaaggaacgggtatcagcggaagagtggtccctggatgtgccgagaccttcatggactcgcagccgatgcaaggacaacaacaaggccaaccatggcaaggacgacagggacaacaaggccaaccatgggaaggacagggacaacagggacaacaaggaagacaaggccaaccatgggaaggacagggacaacagggacaacaaggacgacagggacaacaaggccaaccatgggaaggacagggacagcagggacaacaagggttccgtgacatgcaccagaaggtggaacatgtgagacgcggagacgtctttgccaacactccaggctctgcccactggatctacaactcaggagaacagccacttgtcatcatcgctcttctcgac

SEQ ID NO: 143058 - DNA, 407 bp, Arabidopsis thaliana
ctttctctctctctttttctccgcggaaggaatctcttcttctggttgcgtttgagtccgtacgaaaacaaaagaaaagagagagatggcggaagagaagaaagctccaatcagtgtctggactaccgtgaagcccttcgtcaatggcggtgcctctggtatgctcgctacttgcgttatccagccgatcgacatgattaaggtgaggattcaacttggtcagggatctgcagcaagtataaccaccaacatgcttaagaatgagggcgttggtgccttctacaagggattatctgctgggttgctgaggcaagcaacttacacgacagcccgtcttggatcattcaagttgctgactgcaaaggcaattgagtctaatgatggaaagcctctaccgctgtatcaga

SEQ ID NO: 143059 - DNA, 409 bp, Arabidopsis thaliana
ctcttgagtatatacataatatgggactgatacatcgagatattaagccggagaatctgttgttaactttagatgggcacataaagattgctgattttggtagcgtaaagccaatgcaagacagccaaatcacagtgcttcctaatgcggcttctgatgataaggcgtgcacttttgtcgggacggctgcatatgttcctcctgaagttctaaactcctctccagcaacgttcggaaatgatctctgggcactcggctgcactctgtaccaaatgctttcaggaacttccccattcaaggatgcaagtgaatggctgattttccaaagaattatagctagagatataaagtttccaaatcatttctcagaagcagcaagagacctcatcgaccgattgctagatacaga

SEQ ID NO: 143060 - DNA, 415 bp, Arabidopsis thaliana
ctcgtggcgttctccagggtaatgcgatggtgcttcctaaatacaacatgaacgctaacgagatcttgtactgcactggaggacaaggaaggatccaagtggtcaacgacaacggacagaacgtgttggaccaacaggtgcagaagggacagctcgtggtcatcccacaagggttcgcatacgttgtccagtcccacggaaacaagttcgagtggatctctttcaaaactaatgaaaacgcaatgatcagcactttggcgggtagaacctcgctcttgagggcattgccattggaggtcatatcaaatggtttccagatctctcccgaggaagctaggaagatcaagttcaacacacttgagaccactttgacccgcgctgccggtaggcaacaacaacagttgatcgaggagat

SEQ ID NO: 143061 - DNA, 412 bp, Arabidopsis thaliana
gccgcactagatgttataaacattattattgcccggcactagatagatagtgtttgaaatttataacgatcaaccagacagaaccagtttggtgcagtataagtaaacatggacaaagaaggctagaagataaaggtaaggacaagaaatcaacactcacaagtaggtttataggatgagggcaaagtggagctttccgtgacgtagtctagtcccctgcgataacaagatgaaagaccattataggtcccaaacatacccatattaggactctgtcgttctgaagaattctggtagaagtcattgccacgtgacatctggttagaggcgttgtaagaatcaaaagcttgatcctttggttcctcttgcctggcaaaagaaaaccgggattgattatcctcaactttactgg

SEQ ID NO: 143062 - DNA, 414 bp, Arabidopsis thaliana
gaaaatggttaagctcagcaatctcctcgttgcaaccttcggggttctcctcgtccttaacggctgccttgcgaggcagtcacttggggttcctcctcagctacagaacgagtgtaacctcgacaacctagatgttctccaagccaccgaaactatcaagagtgaagccggtcagatcgagtactgggaccacaaccaccctcagctccgatgtgttggtgtttccgttgctcgttatgtaattgaacaaggcggtctttacttgcccaccttcttcacttccccaaaaatttcctacgtcgttcaaggaacgggtatcagcggaagagtggtccctggatgtgccgagaccttcatggactcgcagccgatgcaaggacaacaacaaggccaaccatggcaaggacgacaggg

SEQ ID NO: 143063 - DNA, 415 bp, Arabidopsis thaliana
ggcagaggaatactacagcctccgctcggagagagtaactcagcttcttgtccctaactcggagtctgactcagtgagtgacaaaagcaaagctgagcaaagcgagaagaagactacacgtgggagagactccggtaaacaccctgtttatcgcggagtaaggatgaggaactggggaaaatgggtgtcggagattcgtgagccgaggaagaaatcacgtatttggctgggaactttcccgacgccggagatggcggcgcgtgcacacgacgtggcggctctgagcattaaaggaacggccgctatactaaacttccctgaactcgctgactcattccctcgacccgtttcattaagccctcgagacattcagacagcagctcttaaagcagctcacatggaaccgacgacgtcg

SEQ ID NO: 143064 - DNA, 414 bp, Arabidopsis thaliana
ctacactctcagattctctctctctctctttcctttctctttgtcttctctcaggttttgtaatggcggaatcttccaaagtcgttcatgttcgtaatgttggtcatgagatttctgaaaatgatttgcttcagctttttcaaccatttggtgttataactaagcttgtgatgctcagggcaaagaatcaggctcttctccaaatgcaagatgtttcttctgcagttagtgctcttcagttttttactaatgttcagccaactataagaggtaggaatgtgtatgtccaattctcttctcaccaagaattgacaacgatagagcagaatattcatggaagggaagatgagccgaaccgtattctcttagtcacaatccatcacatgctgtatccaattactgttgacgtcctgc

SEQ ID NO: 143065 - DNA, 410 bp, Arabidopsis thaliana
  unsure (1)..(410): unsure at all n locations
tggttctacaacgacggacagcaaccacttgtcatcgtcagcatcttcgatctagccagtcggcagaaccagcttgaccgcaacccaaggccattttacttagccggaaacaacccacaaggtcaagtatggctacaaggacgagagcaacagccacagaagaacatcttcaatggatttggacccgaggttattgctcaagctttgaagattgatcttcagacagcgcagcaacttcagaaccaagatgacaaccgtggaaacattgtccgagtccaaggcccgttcggtgtcattaggccgcctttgaggggccagagacctcangaggaggaagaagaagaagaaggacgacacggacgacacggtaatggcttagaggagaccatctgcagcgccaggtgcaccga

SEQ ID NO: 143066 - DNA, 411 bp, Arabidopsis thaliana
agaaaacatacacaaatagcaaaacatggctaactttctcttcctcgtctgcgcaactctcgccctctgcttcctcctcaccaacgcttccatctaccgcaccgttgtcgaattcgaagaagatgacgccagcaaccccgtaggtccaagacagagatgccagaaggagtttcagcaatcacaacacctaagagcttgccagagatggatgagcaagcaaatgaggcaaggacgtggtggtggtccttccctcgacgatgagttcgatttcgagggcccccagcagggataccagctactccagcagtgctgcaacgagcttcgccaggaagagccagtttgcgtttgccccaccttgaaacaagctgccagggcagttagcctccagggacagcacggaccattccaatc

SEQ ID NO: 143067 - DNA, 414 bp, Arabidopsis thaliana
atcagtctcaaagcaaaactgcaagatgccaagcaaagttaggcctatgcaaacatcgagcttctccagcaacaggttaaagcccgagagaaacagcttttaccagtttatatccaaatcgccaccaaatttgcggaacttcatgacacttccatgagaatggctgcaaagggagtgatcaaaagtgtagtggaatggagcggctcgcgatccttcttccataaaaagctcaataggagaatcgctgagagctctcttgtgaaaaacgtaagagaagcatctggagacagcttaacatataaatctgcaatgggtttgattcaggattggttctgcaactctgttattgcaaaggggaaagaagaagcttggacagacgaccaagtgttctttacatggaaggacaatgttagt

SEQ ID NO: 143068 - DNA, 412 bp, Arabidopsis thaliana
aagaaataacaaaatggctcgagtctcttctcttctttctttcttcttaacacttttgatccttttccatggctacgcggctcaacagggtcagcagggtcagcagtttccgaacgagtgccagctcgaccagctcaatgcgctcgagccgtcacacgtactgaagagcgaggctggtcgcatcgaggtgtgggaccaccacgctcctcagctccgttgctcaggtgtctcctttgcacgttacatcatcgagtctaagggtctctacttgccctctttctttaacaccgcgaagctctctttcgtggctaagggacgaggtcttatgggaaaagtgatccctggatgcgccgaaacattccaagactcatcagagttccaaccacgcttcgaaggtcaaggtcaaagccag

SEQ ID NO: 143069 - DNA, 398 bp, Arabidopsis thaliana
ctctctctctcaatctctcaaaagatctccggtaacgttttaacgtcggtgaaaaaatgcggaagttaacggcggttaattcactactgaaacggaacaattatcttcttccgcgccatggctcctcacaaacagcagctcagagaacatcctccgtccgcgagaccgagaccgaaacaaaacttccgaaaatgcccccgttcaattattctccgccgccttacgacggtccatctacggcagagatcatcgcaaagcggcgagagttcctcagccccgctctttttcacttctacaacacacccttaaacattgtggaggcaaagatgcagtatgtgttcgacgagaatggacgtcgatatttagatgcctttggaggaatagcgacggtttcgtgc

SEQ ID NO: 143070 - DNA, 414 bp, Arabidopsis thaliana
cagcaatctcctcgttgcaaccttcggggttcttctcgttcttaacggctgccttgcgaggcagtcacttggggttcctcctcagctacagaacgagtgtaacctcgacaacctagatgttctccaagccaccgaaactatcaagagtgaagccggtcagatcgagtactgggaccacaaccaccctcagctccgatgtgttggtgtttccgttgctcgttatgtaattgaacaaggcggtctttacttgcccaccttcttcacttccccaaaaatttcctacgtcgttcaaggaacgggtatcagcggaagagtggtccctggatgtgccgagaccttcatggactcgcagccgatgcaaggacaacaacaaggccaaccatggcaaggacgacagggacaacaaggccaacc

SEQ ID NO: 143071 - DNA, 113 bp, Arabidopsis thaliana
ataagttatttaatcatataattttttgggtccttttagtttaacaaaaatggggttagagaggaagatggtctttttggttatggtgtctttcgaacttatggcttttgcaa

SEQ ID NO: 143072 - DNA, 326 bp, Arabidopsis thaliana
tgaagaacaactcctttagatccaagattccagttttgatcaagaagttgaataagcttcaaagtttagacctttcttccaacgaattcaccgggtcgattccagagtttctgttttcgattccttctcttcaaattctcagtttggatcagaatctgttaagcgggtcacttccaaattcttcttgcagctcctcaaagattataactttagacgtgtctcacaatcttctaaccgggaaggtttcttcttgctactcttcaaagaggtttagttattagaccgggcttttcttaatcaaccggttggctttgattggcacttct

SEQ ID NO: 143073 - DNA, 390 bp, Arabidopsis thaliana
gccacgcgtccgacgagaacattgacgaccatgctcgtgctgacttgtacaagcccagcctaggtcgcgtgaccagcgtcaacagctataccttgcccatcttggagtatgtcaggctcagtgccactcgtggcgttctccagggtaatgcgatggtgcttcctaaatacaacatgaacgctaacgagatcttgtactgcactggaggacaaggaaggatccaagtggtcaacgacaacggacagaacgtgttggaccaacaggtgcagaagggacagctcgtggtcatcccacaagggttcgcatacgttgtccagtcccacggaaacaagttcgagtggatctctttcaaaactaatgaaaacgcaatgatcagcactttggcgggta

SEQ ID NO: 143074 - DNA, 407 bp, Arabidopsis thaliana
tgcagacaggattcccgaagctcatattcttgaaatggcagaacgatctgctaaaaatcagagactgaagatttgggaaaactatgttgaaggagaggaagtagtaaacggtagttctaaagtagaaaccaggcagaaggaaacactaaaggttgttgttacggaagtacttggaggcggtcgtttctatgttcagacggttggcgatcaaaaagtagcttcgattcaaaaccagcttgcagctctgagtcttaaagacgctcccattattggatcgtttaatcctaagaagggtgacatcgtccttgcacaatttagcctcgataactcctggaaccgcgcaatgattgttaatggacctcgaggagcagttcaatctccagaggaggaatttgaagtgttctaca

SEQ ID NO: 143075 - DNA, 387 bp, Arabidopsis thaliana
gctgcaacgagcttcgccaggaagagccagtttgcgtttgccccaccttgaaacaagctgccagggcagttagcctccagggacagcacggaccattccaatccaggaaaatttaccagtcagctaagtacttgcctaacatttgcaagatccagcaagttggtgaatgtcccttccagaccaccatccctttcttccctccttactactagagtccaagcccggcctagcacgatgatcatgagtgttgctattgatgtatgttaatactatacacagtcatcgtgtgtgttttataaaactgtaagcttaggatgtttgaggctaatgtaattagcactacaccgtaataaatgagaggtttacttaaaaaaaaaaaaaaaataa

SEQ ID NO: 143076 - DNA, 415 bp, Arabidopsis thaliana
aagaaaatggttaagctcagcaatctcctcgttgcaaccttcggggttctcctcgtccttaacggctgccttgcgaggcagtcacttggggttcctcctcagctacagaacgagtgtaacctcgacaacctagatgttctccaagccaccgaaactatcaagagtgaagccggtcagatcgagtactgggaccacaaccaccctcagctccgatgtgttggtgtttccgttgctcgttatgtaattgaacaaggcggtctttacttgcccaccttcttcacttccccaaaaatttcctacgtcgttcaaggaacgggtatcagcggaagagtggtccctggatgtgccgagaccttcatggactcgcagccgatgcaaggacaacaacaaggccaaccatggcaaggacgacagg

SEQ ID NO: 143077 - DNA, 427 bp, Arabidopsis thaliana
gcaacagccacagaagaacatcttcaatggatttggacccgaggttattgctcaagctttgaagattgatcttcagacagcgcagcaacttcagaaccaagatgacaaccgtggaaacattgtccgagtccaaggcccgttcggtgtcattaggccgcctttgaggggccagagacttcaggaggaggaagaagaagaagaaggacgaccacggacgacacggtaatggcttagaggagaccatctgcagcgccaggtgcaccgataacctcgatgatccgtctcgtgctgacgtgtacaagccacagctcggttacatcagcactctcaacagttacgatctccccatccttcgcttcatccgtctctcagccctccgtggatctatccgtcaaaacgcaatggtgcttccacagtggaacgcaaa

SEQ ID NO: 143078 - DNA, 419 bp, Arabidopsis thaliana
aaagaaaatggttaagctcagcaatctcctcgttgcaaccttcggggttctcctcgtccttaacggctgccttgcgaggcagtcacttggggttcctcctcagctacagaacgagtgtaacctcgacaacctagatgttctccaagccaccgaaactatcaagagtgaagccggtcagatcgagtactgggaccacaaccaccctcagctccgatgtgggggtgtttccgttgctcgttatgtaattgaacaaggcggtctttacttgcccaccttcttcacttccccaaaaatttcctacgtcgttcaaggaacgggtatcagcggaagagtggtccctggatgtgccgagaccttcatggactcgcagccgatgcaaggacaacaacaaggccaaccatggtcaggacgacagggac

SEQ ID NO: 143079 - DNA, 417 bp, Arabidopsis thaliana
cggacgcgtgggaaaaatggctcgagtctcttctcttctttctttctccttaacacttttgatccttttccatggctacgcggcgcaacagggtcagcagggtcagcagtttccgaacgagtgccagctcgaccagctcaatgcgctcgagccttcacacgtactgaagagcgaggctggtcgcatcgaggtgtgggaccaccacgctcctcagctccgttgctcaggtgtctcctttgcacgttacatcatcgagtctaagggtctctacttgccctctttctttaacaccgcgaagctctccttcgtggctaaaggacgaggtcttatgggaaaagtgatccctggatgcgccgaaacattccaagactcatcagagttccaaccacgcttcgaaggtcaaggtcaaagccagag

SEQ ID NO: 143080 - DNA, 455 bp, Arabidopsis thaliana
taccgaaccggagggccgggctagacccacgcgttcggatactctcatccttcgcttcatccgtctctcagtcctccgtggatctatccgtcaaaacgcaatggtgcttccacagtggaacgcaaacgcgaacgctattctttacgtgacagacggggaagcccaaatccagatcgtaaacgacaatggtaacagagtgtttgacggacaagtctctcaaggacagctcatagccgtaccacaaggtttctcggtggtgaaacgcgcaacaagcaaccgattccagtgggttgagttcaaaacaaacgctaacgcgcaaatcaacactctggcgggacgaacctcagtcttgagaggtttaccacttgaagtcataaccaatgggttccaaatctcacccgaagaagcaaggagggtcaagttcaacacgctcgagaccactttgactcacagca

SEQ ID NO: 143081 - DNA, 427 bp, Arabidopsis thaliana
gataaaaatggctcgagtctcttctcttctttctttctccttaacacttttgatccttttccatggctacgcggctcaacagggtcagcagggtcagcagtttccgaacgagtgccagctcgaccagctcaatgcgctcgagccttcacacgtactgaagagcgaggctggtcgcatcgaggtgtgggaccaccacgctcctcagctccgttgctcaggtgtctcctttgcacgttacatcatcgagtctaagggtctctacttgccctcttctttaacaccgcgaagctctccttcgtggctaaaggacgaggtcttatgggaaaagtgatccctggatgcgccgaaacattccaagactcatcagagttccaaccacgcttcgaaggtcaaggtcaaagccagaggttccgtgacatgcaccaga

SEQ ID NO: 143082 - DNA, 415 bp, Arabidopsis thaliana
gccacctctaagacagccctacgagagcgaggagtggagacacccacgtagcccacagggcaacggccttgaggagactatctgcagcatgaggtcccacgagaacattgacgaccctgctcgtgctgacgtgtacaagcccagcctaggtcgcgtgaccagcgtcaacagctataccttgcccatcttggagtatgtcaggctcagtgccactcgtggcgttctccagggtaatgcgatggtgcttcctaaatacaacatgaacgctaacgagatcttgtactgcactggaggacaaggaaggatccaagtggtcaacgacaacggacagaacgtgttggaccaacaggtgcagaagggacagcttcgggtcattccacaagggttcgcatacgttgtccagtcccacggaaac

SEQ ID NO: 143083 - DNA, 393 bp, Arabidopsis thaliana
ccaggacatcgtgatttcatcaagaacatgattactggtacctcccaggctgattgtgctgttcttatcattgactccaccactggaggttttgaggctggtatctctaaggatggtcagacccgtgagcacgctcttcttgctttcacccttggtgtcaagcagatgatttgctgttgtaacaagatggatgccaccacccccaaatactccaaggctaggtacgatgaaatcatcaaggaggtgtcttcatacctgaagaaggtgggatacaaccctgacaaaatcccatttgtgccaatctctggattcgagggagacaacatgattgagaggtcaaccaaccttgactggtacaagggaccaactctttttgaggctcttgaccagatc

SEQ ID NO: 143084 - DNA, 412 bp, Arabidopsis thaliana
atttggtcagcgatcaaaacatgggtcacagagtactgttcaatctactacaagaatgacatatccgtgcaaacggatacagagatccagtgatggcggaccgagctccgaaccaaaagccacaggtgacaaacaacacgagtaatgggggccttgcatgcaaacccgcgacgacctaatcggaacctgcgcgatcatgatctggatcgactttgctgtttacgcaacagtgaatttcatacagaacccttacggccgttgtgtccctaactcgcctaccgataggcgccggtttatgcctgaaccgggtacggatgagtacgctgagctggaggaagatgctgacataacggtcttgaagacgatcacgccgaagttacagactgtacttggtatatccatcataaagata

SEQ ID NO: 143085 - DNA, 345 bp, Arabidopsis thaliana
gggacaacagggacaacaaggacgacagggacaacaaggccaaccatgggaaggacagggacagcagggacaacaagggttccgtgacatgcaccagaaggtggaacatgtgagacgcggagacgtctttgccaacactccaggctctgcccactggatctacaactcaggagaacagccacttgtcatcatcgctcttctcgacatcgccaactaccaaaaccaactcgaccgcaaccctagagtgttccatttggccggaaacaaccagcagggaggctttggcggttcacagcaacaacaagaacagaaaaacttgtggagcgggttcgacgcacaggtcat

SEQ ID NO: 143086 - DNA, 365 bp, Arabidopsis thaliana
tacacacatagcaaaaaatggcaaacaagttgttcctcgtctgcgcagctctcgctctctgcttcctcctcaccaacgcttccatctaccgcaccgtcgttgagttcgaagaagatgacgccactaaccccataggcccaaaaatgaggaaatgccgcaaggagtttcagaaagaacaacacctaagagcttgccagcaattgatgctccagcaagcaaggcaaggccgtagcgatgagtttgatttcgaagacgacatggagaacccacagggacaacagcaggaacaacagctattccagcagtgctgcaacgagcttcgccaggaagagccagattgtgtttgccccaccttgaaacaagct

SEQ ID NO: 143087 - DNA, 424 bp, Arabidopsis thaliana
aaacaaaaagaaaatggttaagctcagcaatctcctcgttgcaaccttcggggttctcctcgtccttaacggctgccttgcgaggcagtcacttggggttcctcctcagctacagaacgagtgtaacctcgacaacctagatgttctccaagccaccgaaactatcaagagtgaagccggtcagatcgagtactgggaccacaaccaccctcagctccgatgtgttggtgtttccgttgctcgttatgtaattgaacaaggcggtctttacttgcccaccttcttcacttccccaaaaatttcctacgtcgttcaaggaacgggtatcagcggaagagtggtccctggatgtgccgagaccttcatggactcgcagccgatgcaaggacaacaacaaggccaaccatggcaaggacgacaggga

SEQ ID NO: 143088 - DNA, 426 bp, Arabidopsis thaliana
ggaagagttattccgggatgcgccgagacgttcatggagtcaccggtatttggagaaggtcaaggtcagggtcagagtcaagggttccgtgacatgcaccagaaagtagagcacctacggtgcggtgacaccattgcaacaccatctggtgtagctcaatggttctacaacaatggaaatgagcctctcattcttgttgcagccgcggatctcgccagcaaccagaaccagcttgaccgcaaccttagaccatttttgatagccggaaacaacccacaagggcaggaatggctacaaggccgaaagcaacagaagcaaaacaacatcttcaatggcttcgcacctgagatcttggctcaagccttcaagatcaatgtcgagacggctcagcagctccagaaccagcaagataaccgtggcaacatc

SEQ ID NO: 143089 - DNA, 421 bp, Arabidopsis thaliana
ataaaaatggctcgagtctcttctcttctttctttctccttaacacttttgatccttttccatggctacgcggctcaacagggtcagcagggtcagcagtttccgaacgagtgccagctcgaccagctcaatgcgctcgagccttcacacgtactgaagagcgaggctggtcgcatcgaggtgtgggaccaccacgctcctcagctccgttgctcaggtgtctcctttgcacgttacatcatcgagtctaagggtctctacttgccctctttctttaacaccgcgaagctctccttcgtggctaaaggacgaggtcttatgggaaaagtgatccctggatgcgccgaaacattccaagactcatcagagttccaaccacgcttcgaaggtcaaggtcaaagccagaggttccgtgacatgc

SEQ ID NO: 143090 - DNA, 425 bp, Arabidopsis thaliana
aacaaacaaaaagaaaatggttaagctcagcaatctcctcgttgcaaccttcggggttctcctcgtccttaacggctgccttgcgaggcagtcacttggggttcctcctcagctacagaacgagtgtaacctcgacaacctagatgttctccaagccaccgaaactatcaagagtgaagccggtcagatcgagtactgggaccacaaccaccctcagctccgatgtgttggtgtttccgttgctcgttatgtaattgaacaaggcggtctttacttgcccaccttcttcacttccccaaaaatttcctacgtcgttcaaggaacgggtatcagcggaagagtggtccctggatgtgccgagaccttcatggactcgcagccgatgcaaggacaacaacaaggccaaccatggcaaggacgacagg

SEQ ID NO: 143091 - DNA, 428 bp, Arabidopsis thaliana
cagcaatctcctcgttgcaaccttcggggttctcctcgttcttaacggctgccttgcgaggcagtcacttggggttcctcctcagctacagaacgagtgtaacctcgacaacctagatgttctccaagccaccgaaactatcaagagtgaagccggtcagatcgagtactgggaccacaaccaccctcagctccgatgtgttggtgtttccgttgctcgttatgtaattgaacaaggcggtctttacttgcccaccttcttcacttccccaaaaatttcctacgtcgttcaaggaacgggtatcagcggaagagtggtccctggatgtgccgagaccttcatggactcgcagccgatgcaaggacaacaacaaggccaaccatggcaaggacgacagggacaacaaggccaaccatgggaaggacagg

SEQ ID NO: 143092 - DNA, 425 bp, Arabidopsis thaliana
cttagcctttactctatagttttatatcatatcaatcgacatggcgaatgtggaccgtgatcggcgtgtgcatgtagaccgtactgacaaacgtgttcatcagccaaactacgaagatgatgtcggttttggtggctatggcggttatggtgctggttctgattataagagtcgcggcccctccactaaccaaatcttggcacttatagcaggagttcccattggtggcacactgctaaccctagctggactcactctagccggttcggtgatcggcttgctagtctccatacccctcttcctcctcttcagtccggtgatagtcccggcggctctcactattgggcttgctgtgacgggaatcttggcttctggtttgtttgggttgacgggtctgagctcggtctcgtgggtcctcaactacc

SEQ ID NO: 143093 - DNA, 419 bp, Arabidopsis thaliana
aaggcaatgaagatggttgctgcttccaagcttagagcagttcaaggccgagctgagaactcccgtggactttggcagccatttactgcacttctaggagataatcccagcattgatgtaaagaagagtgtggtggtcactctctcttctgacaagggtctctgtggtggaatcaactccactgtcgttaaagtgagcagggctctgtacaaattgaatgctggtcctgaaaaggaagttcagtttgttattgtcggagagaaagcaaaggctataatgtttcgtgactcaaagaacgacattgtcctctctgtaacagagctgaataagaacccactcaattatgctcaggtgtcagttctagctgatgacatcctgaagaacgttgaatttgatgctttgcgcattgtctacaacaa

SEQ ID NO: 143094 - DNA, 347 bp, Arabidopsis thaliana
  unsure (1)..(347): unsure at all n locations
caaaaagaaaatggttaagctcacaactcctcgttgaaccttcgnggttctcctcgtccttaacggctgccttgcgaggcagtcacttggggttcctcctcagctacagaacgagtgtaacctcgacaacctagatgttctccaagccaccgaaactatcaagagtgaagccggtcagatcgagtactgggaccacaaccaccctcagcttcgatgtgttggtgtttccgttgctcgttatgtaattgaacaaggcgggctttacttgcccaccttcttcactttcccaaaaattttctacgtcgttcaaggaacgggtatcagcggaagagtggtccctggatgtg

SEQ ID NO: 143095 - DNA, 358 bp, Arabidopsis thaliana
gccggtcagatcgagtactgggaccacaaccaccctcagctccgatgtgttggtgtttccgttgctcgttatgtaattgaacaaggcggtctttacttgcccaccttcttcacttccccaaaaatttcctacgtcgttcaaggaacgggtatcagcggaagagtggtccctggatgtgccgagaccttcatggactcgcagccgatgcaaggacaacaacaaggccaaccatggcaaggactacagggacaacaaggccaaccatgggaaggacagggacaacagggacaacaaggaagacaaggccaaccatgggaaggacagggacaacagggacaacaaggacgacagggacaac

SEQ ID NO: 143096 - DNA, 370 bp, Arabidopsis thaliana
caaaaagaaaatggttaagctcagcaatctcctcgttgcaaccttcggggttctcctcgtccgtaacggctgccttgcgaggcagtcacttggggttcctcctcagctacagaacgagtgtaacctcgacaacctagatgttctccaagccaccgaaactatcaagagtgaagccggtcagatcgagtactgggaccacaaccaccctcagctccgatgtgttggtgtttccgttgctcgttatgtaattgaacaaggcggtctttacttgcccaccttcttcacttccccaaaaatttcctacgtcgttcaaggaacgggtatcagcggaagagtggtccctggatgtgccgagaccttcatggactcg

SEQ ID NO: 143097 - DNA, 79 bp, Arabidopsis thaliana
gatttcaccatgtataaaatctaaaagttttgaaatatttatgataaaaatataaaagtttgtaaccgtattagaaaaa

SEQ ID NO: 143098 - DNA, 420 bp, Arabidopsis thaliana
agaaaaatgggtcgagtctcatctattatctctttctctttgacactcttgatcctcttcaatggctacactgcccaacagtggcccaacgagtgccagctcgatcaactcaatgcgctcgaaccatcccaaatcatcaagagcgagggtggtcgcatcgaggtctgggaccaccatgcaccccagctccgttgctccggctttgcctttgagcgtttcgtcattgagcctcagggtcttttcttgcccactttcttgaacgccggcaaactcacgtttgttgttcacggaaggggtctaatgggaagagttattccgggatgcgccgagacgttcatggagtcaccggtatttggagaaagtcaaggtcagggtcagagtcaagggttccgtgacatgcaccagaaagtagagcaccta

SEQ ID NO: 143099 - DNA, 423 bp, Arabidopsis thaliana
  unsure (1)..(423): unsure at all n locations
aacaaaaagaaaatggttaagctcagcaatctcctcgttgcaaccttcggggttctcctcgtccttaacggctgccttgcgaggcagtcacttggggttcctcctcagctacagaacgagtgtaacctcgacaacctagatgttctccaagccaccgaaactatcaagagtgaagccggtcagatcgagtactgggaccacaaccaccctcagctccgatgtgttggtgtttccgttgctcgttatgtaattgaacaaggcggtctttacttgcccaccttcttcacttccccaaaaatntcctacgtcgttcaaggaacgggtatcagcggaagagtggtccctggatgtgccgagaccttcatggactcgcagccgatgcaaggacaacaacaaggccaaccatggcaaggacgacaggga

SEQ ID NO: 143100 - DNA, 423 bp, Arabidopsis thaliana
ccaacacaaaacaaaaaatattaagaaagtgatattatgacttgcagccaaacactcggaaacaacaacaccaacaaataccagatctgcgaggagatcggccgtggccgtttcggcaccgtctctcgcgtctacgctccggccaccggtgatttcttcgcttgcaaaaccatcgacaaagcctctctctccaacgaccttgaccgtgcctgtctcgacaacgagcctaagctcatggctctcttgtcctatcaccctaacatcgttcaaatccatgatctcatcgacactgattcgactctctccatcttcatggagctcgtccatccctctgtttcgatctacgaccgtctcgtctcttctggaaccttctttgagcctcagacggcgtcgttcgctaaacagattctccaggcgctttcg

SEQ ID NO: 143101 - DNA, 416 bp, Arabidopsis thaliana
tggttaagctcagcaatctcctcgttgcaaccttttgggttctcctcgtccttaacggctggcttgcgaggcagtcacttggggttcctcctcagctacagaacgagtgtaacctcgacaacctagatgttctccaagccaccgaaactatcaagagtgaagccggtcagatcgagtactgggaccacaaccaccctcagctccgatgtgttggtgtttccgttgctcgttatgtaattgaacaaggcgggctttacttgcccaccttcttcacttccccaaaaatttcctacgtcgttcaaggaacgggtatcagcggaagagtggtccctggatgtgccgagaccttcatggactcgcagccgatgcaaggacaacaacaaggccaaccatggcaaggacgacagggacaacaa

SEQ ID NO: 143102 - DNA, 429 bp, Arabidopsis thaliana
gaaaatggttaagctcagcaatctcctcgttgcaaccttcggggttctcctcgtccttaacggctgccttgcgaggcagtcacttggggttcctcctcagctacagaacgagtgtaacctcgacaacctagatgttctccaagccaccgaaactatcaagagtgaagccggtcagatcgagtactgggaccacaaccaccctcagctccgatgtgttggtgtttccggtggctcgttatgtaattgaacaaggcggtctttacttgcccaccttcttcacttccccaaaaatttcctacgtcgttcaaggaacgggtatcagcggaagagtggtccctggatgtgccgagaccttcatggactcgcagccgatgcaaggacaacaacatagccaaccatggcaaaggacgacaggggacaacaagggcc

SEQ ID NO: 143103 - DNA, 420 bp, Arabidopsis thaliana
gaaaatggttaagctcagcaatctcctcgttgcaacctttggggttctcctcgtccttaacggctgccttgcgaggcagtcacttggggttcctcctcagctacagaacgagtgtaacctcgacaacctagatgttctccaagccaccgaaactatcaagagtgaagccggtcagatcgagtactgggaccacaaccaccctcagctccgatgtgttggtgtttccgttgctcgttatgtaattgaacaaggcggtctttacttgcccaccttcttcacttccccaaaaatttcctacgtcgttcaaggaacgggtatcagcggaagagtggtccctggatgtgccgagaccttcatggactcgcagccgatgcaaggacaacaacaaggccaaccatggcaaggacgacagggacaaca

SEQ ID NO: 143104 - DNA, 417 bp, Arabidopsis thaliana
cttgaggagactatctgcagcatgaggtcccacgagaacattgacgaccctgctcgtgctgacgtgtacaagcccagcctaggtcgcgtgaccagcgtcaacagctataccttgcccatcttggagtatgtcaggctcagtgccactcgtggcgttctccagggtaatgcgatggtgcttcctaaatacaacatgaacgctaacgagatcttgtactgcactggaggacaaggaaggatccaagtggtcaacgacaacggacagaacgtgttggaccaacaggtgcagaagggacagctcgtggtcatcccacaagggttcgcatacgttgtccagtcccacggaaacaagttcgagtggatctcttcaaaactaatgaaaacgcaatgatcagcactttggcgggtagaacctcgc

SEQ ID NO: 143105 - DNA, 425 bp, Arabidopsis thaliana
caagaaaacatacacaaatagcaaaacatggctaacaagctcttcctcgtctgcgcaacgtctcgccctctgcttcctcctcaccaacgcttccatctaccgcaccgttgtcgaattcgaagaagatgacgccagcaaccccgtaggtccaagacagagatgccagaaggagtttcagcaatcacaacacctaagagcttgccagagatggatgagcaagcaaatgaggcaaggacgtggtggtggtccttccctcgacgatgagttcgatttcgagggcccccagcagggataccagctactccagcagtgctgcaacgagcttcgccaggaagagccagtttgcgtttgccccaccttgaaacaagctgccagggcagttagccttcagggacagcacggaccatttcaatccaggaaaattt

SEQ ID NO: 143106 - DNA, 418 bp, Arabidopsis thaliana
cacaaaactaacaaaagatcaaaagcaagttcttcactgttgataatgtctaccaccggacagattattcgatgcaaagctgctgtggcatgggaagccggaaagccactggtgatcgaggaagtggaggttgctccaccgcagaaacacgaagttcgtatcaagattctcttcacttctctctgtcacaccgatgtttacttctgggaagctaagggacaaacaccgttgtttccacgtatcttcggccatgaagctggagggattgttgagagtgttggagaaggagtgactgatcttcagccaggagatcatgtgttgccgatctttaccggagaatgtggggagtgtcgtcattgccactcggaggaatcaaacatgtgtgatcttttcaggatcaacaccgagcgaggaggga

SEQ ID NO: 143107 - DNA, 425 bp, Arabidopsis thaliana
gataaaaatggctcgagtctcttctcttctttctttctccttaacacttttgatccttttccatggctacgcggctcaacagggtcagcagggtcagcagtttccgaacgagtgccagctcgaccagctcaatgcgctcgagccttcacacgtactgaagagcgaggctggtcgcatcgaggtgtgggaccaccacgctcctcagctccgttgctcaggtgtctcctttgcacgttacatcatcgagtctaagggtctctacttgccctctttctttaacaccgcgaagctctccttcgtggctaaaggacgaggtcttatgggaaaagtgatccctggatgcgccgaaacattccaagactcatcagagttccaaccacgcttcgaaagtcaaggtcaaagccagaggttccgtgacatgcacc

SEQ ID NO: 143108 - DNA, 402 bp, Arabidopsis thaliana
cttccccaaaaatttcctacgtcgttcaatttacgtgtatcagcggaagagtggtccctggaggtgcctagaccttcatggactcgcagccgatgcaaggacaacaacaaggccaaccatggcaaggacgacagggacaacaaggccaaccatgggaaggacagggacaacagggacaacaaggaagacaaggccaaccatgggaaggacagggacaacagggacaacaaggacgacagggacaacaaggccaaccatgtgaaggacagggacagcatggacaacaagggttccgtgacatgcaccagaaggtggaacatgtgagacgcggagacttctttgtcaacacttcatgctctgcccactggatctacaactcatgagaacagccacttgtcatta

SEQ ID NO: 143109 - DNA, 428 bp, Arabidopsis thaliana
gggacaacaaggccaaccatgggaaggacagggacaacagggacaacaaggaagacaaggccaaccatgggaaggacagggacaacagggacaacaaggacgacagggacaacaaggccaaccatgggaaggacagggacagcagggacaacaagggttccgtgacatgcaccagaaagtggaacatgtgagacgcggagacgtctttgccaacactccaggctctgcccactggatctacaactcaggagaacagccacttgtcatcatcgctcttctcgacatcggcaactaccaaaaccaactcgaccgcaaccctagagtgttccatttggccggaaacaaccagcagggaggctttggcggttcacagcaacaacaagaacagaaaaacttgtggagcgggttcgacgcacaggtcatagctt

SEQ ID NO: 143110 - DNA, 427 bp, Arabidopsis thaliana
atggcttcgcacctgagatcttggctcaagccttcaagatcaatgtcgagacggctcagcagctccagaaccagcaagataaccgtggcaacatcgtcaaggtcaacggacctttcggcgtcattaggccacccttgagacgcggcgaaggcggccaacaaccacatgaaatagctaatggtttagaggagactttgtgcaccatgcgatgcactgaaaacctcgatgacccgtcggatgctgacgtgtacaagccatcactcggatacattagcacacttaacagctacaatcttcctatcctcagacttctccgccttagcgctcttcgtggctccatccgtaaaaacgctatggtgctaccgcaatggaacgtaaacgcaaacgcggcactctacgtgacaaacggaaaggctcatatacaaat

SEQ ID NO: 143111 - DNA, 427 bp, Arabidopsis thaliana
caaaaagaaaatggttaagctcagcaatctcctcgttgcaaccttcggggttctcctcgtccttaacggctgccttgcgaggcagtcacttggggttcctcctcagctacagaacgagtgtaacctcgacaacctagatgttctccaagccaccgaaactatcaagagtgaagccggtcagatcgagtactgggaccacaaccaccctcagctccgatgtgttggtgtttccgttgctcgttatgtaattgaacaaggcggtctttacttgcccacctttttcacttccccaaaaatttcctacgtcgttcaaggaacgggtatcagcggaagagtggtccctggatgtgccgagaccttcatggactcgcagccgatgcaaggacaacaacaaggccaaccatggcaaggacgacagggacaacaa

SEQ ID NO: 143112 - DNA, 422 bp, Arabidopsis thaliana
gccgtaccacaaggtttctcggtggtgaaacgcgtttcatgcaaccgattccagtgggttgagttcagaacaaacgcaaacgcgcaaatcaacactcttgcgggacgaacctcagtcttgagaggtttaccacttgaagttataaccaatgggttccaaatctcacctgaagaagcaaggagggtcaagttcaacacgctcgagaccactttgactcacagcagtggcccagctagctacggaaggccaagggtggctgcagcttaagagcttaaaaccgcggctcaacaatgaacctctagtactgtaaaaggaagttaaatagtacgaagtaataataataatgtacgaacatgtgacaagttttgttgaggtttacctgtaaaatgccactccttttctgaattaaatctttttcgatc

SEQ ID NO: 143113 - DNA, 412 bp, Arabidopsis thaliana
ctcggtttcatcgtccgctgtctcaacaatggcgttattgtcggtaccttgcgtcaagatctgtgctctgaacaggcgggtcggatctctccctggaatctctactcaaagatggcagccgcaacccaatgggatctcctttccctccgatgtttctcagaatcattctgcattctggaggttgcgtgcaacaactaatgaggttgtttctaactccactccaatgactaatggtgggtatatgaacggaaaagcgaaaaccaatgttcctgaacccgccgagctctctgaatttatgggtaaagtctctggtcttcttaagcttgtggattcaaaagacatagtggaacttgaactaaaagcgctcgactgtgagaacgttattcgaaagaaggaagctttacagcaagct

SEQ ID NO: 143114 - DNA, 417 bp, Arabidopsis thaliana
cattgttcccatttgtgagaataaacaagtcaactaaatagcgcatatttattcctcaaggtcatcttgataacttactgggaaacgataaaccttccaatagaaactggaagaggaacatacccaagagtccagatccaaacacgtataggtaagcagcgactatagtggtgccatgaaacagaaagtgtttcttttattaacaccttcatgttcttgagcacatttagttaacgtgtgattttatttcgtacctgatgctgtctcaacctttgaaaacgctgaggaaagtagaaaggctatggagatttgtagatttatgtagacgaaatagaaactgaattgtaagctgaagtcattaagcagaaagaacttcaatcctgaaaggaaccataactgttatagcaggttctataa

SEQ ID NO: 143115 - DNA, 410 bp, Arabidopsis thaliana
cttctcccaccgccgtatgttcttccagcgctccggaccgccgtctggtctgactttaatttgagatctattccgatccctaacagctacttctgcaagtttcaacttggaaagaaacaatgggaatcattgaaaacggaactatctcgggtaacttgcctagcaaggaggcgtttgtggttcactatcctggctatccatcatctatttcccgagccgtggagactctcgggggaatccaaggaatcacaaccgcaagagaatcaacgtcaaacaagcttgagctgcatttccgccctgaagacccttctgcacatcctgcctatggagaacgacgtcattgtaatggttttctgttaaaaatttcgaaggaggatgttaagaaagattctctgcctgaaagtcaacct

SEQ ID NO: 143116 - DNA, 419 bp, Arabidopsis thaliana
aacaaaaagaaaatggttaagctcagcaatctcctcgttgcaaccttcggggttctcctcgtccttaacggctgccttgcgaggcagtcacttggggttcctcctcagctacagaacgagtgtaacctcgacaacctagatgttctccaagccaccgaaactatcaagagtgaagccggtcagatcgagtactgggaccacaaccaccctcagctccgatgtgttggtgtttccgttgctcgttatgtaattgaacaaggcggtctttacttgcccaccttcttcacttccccaaaaatttcctacgtcgttcaaggaacgggtatcagcggaagagtggtccctggatgtgccgagaccttcatggactcgcagccgatgcaaggacaacaacaaggccaaccatggcaaggacgaca

SEQ ID NO: 143117 - DNA, 408 bp, Arabidopsis thaliana
tctgctgctgcttcttcaaaagaggttgaagaatgtcagctccgaaatcgggtggtgatccactaccacatccgccgaaagaacagcttccagatatctcttactgcattacaagtcctcctccatggcctgaggctgttctgcttgggtttcaacactaccttgtgatgcttggaacaacagttctgattccatcggctcttgttccacaaatgggaggtagaaatgaagagaaggcaaagctgatccagacaatactgtttgtagctggattgaacacattgctccaaactgtgtttggaactagattacctgctgttattggagcatcttatacatttgtcccagttactatctcaatcatgctttctgggagattcaatgacgttgcagatccagttgagcgat

SEQ ID NO: 143118 - DNA, 403 bp, Arabidopsis thaliana
tgggaaggacagggacagcagggacaacaagggtttcgtgacatgcaccagaaggtggaacatgtgagacgcggagacgtctttgccaacactccaggctctgcccactggatctacaactcaggagaacagccacttgtcatcatcgctcttctcgacatcgccaactaccaaaaccaactcgaccgcaaccctagagtgttccatttggccggaaacaaccagcagggaggctttggcggttcacagcaacaacaagaacagaaaaacttgtggagcgggttcgacgcacaggtcatagctcaagcattgaaaattgacgttcagttggctcagcagcttcagaaccaacaagacagcagaggaaacatcgttcgtgttaaaggaccttttcaggtcgtga

SEQ ID NO: 143119 - DNA, 423 bp, Arabidopsis thaliana
gagaaaatggtgaaagcagctgagaaaggagaaatagtgaagtgttgttgtttcgggtaattaatttcttctatttgtttttgcctcatcagctaaacaaaatactctctgaaaaagaaagctctctcacaacatttactttacttatttatttccgctttttctatgatatttattccttttttaattaaaatattcaatgtataacgccaagtcatcattagtatggtaggtccaaattaaattccagggacaatattttatcattttagtaatatgatatgtcgcatcaattttttagttgcttgcctcatagaatctctcccaactttttgtcacactaatgctagttgacaatattaatcttcattttatatttgccacaaagctttaagctttaggactaccatcccccaacataaa

SEQ ID NO: 143120 - DNA, 426 bp, Arabidopsis thaliana
agaaaacatacacaaatagcaaaacatggctaacaagctcttcctcgtctgcgcaactctcgccctctgcttcctcctcaccaacgcttccatctaccgcaccgttgtcgaattcgaagaagatgacgccagcaaccccgtaggtccaagacagagatgccagaaggagtttcagcaatcacaacacctaagagcttgccagagatggatgagcaagcaaatgaggcaaggacgtggtggtggtccttccctcgacgatgagttcgatttcgagggcccccagcagggataccagctactccagcagtgctgcaacgagcttcgccaggaagagccagtttgcgtttgccccaccttgaaacaagctgccagggcagttagcctccagggacagcacggaccattccaatccaggaaaatttacca

SEQ ID NO: 143121 - DNA, 404 bp, Arabidopsis thaliana
atcacaaacgagtaagaatacaaatacaaatagcaaaaaaaatggcaaacaagctcttcctcgtctgcgcaactttcgccctctgcttcctcctcaccaacgcttccatctaccgcactgttgtcgagttcgacgaagatgacgccagcaaccccatgggcccaagacagaaatgtcagaaggagtttcagcaatcacagcacctaagagcttgccagaaattgatgcgcatgcaaatgaggcaaggccgtggtggtggtccctccctcgacgatgagttcgatttggaagacgacatcgagaacccacaaggcccccagcagggacaccagatcctccagcagtgctgcagcgagcttcgccaggaagagccagtttgtgtttgccccaccttgagacaagct

SEQ ID NO: 143122 - DNA, 422 bp, Arabidopsis thaliana
caaaaagaaaatggttaagctcagcaatctcctcgttgcaaccttcggggttctcctcgtccttaacggctgccttgcgaggcagtcacttggggttcctcctcagctacagaacgagtgtaacctcgacaacctagatgttctccaagccaccgaaactatcaagagtgaagccggtcagatcgagtactgggaccacaaccaccctcagctccgatgtgttggtgtttccgttgctcgttatgtaattgaacaaggcggtctttacttgcccaccttcttcacttccccaaaaatttcctacgtcgttcaaggaacgggtatcagcggaagagtggtccctggatgtgccgagaccttcatggactcgcagccgatgcaaggacaacaacaaggccaaccatggcaaggacgacagggac

SEQ ID NO: 143123 - DNA, 421 bp, Arabidopsis thaliana
aagaaaatggttaagctcagcaatctcctcgttgcaaccttcggggttctcctcgtccttaacggctgccttgcgaggcagtcacttggggttcctcctcagctacagaacgagtgtaacctcgacaacctagatgttctccaagccaccgaaactatcaagagtgaagccggtcagatcgagtactgggaccacaaccaccctcagctccgatgtgttggtgtttccgttgctcgttatgtaattgaacaaggcggtctttacttgcccaccttcttcacttccccaaaaatttcctacgtcgttcaaggaacgggtatcagcggaagagtggtccctggatgtgccgagaccttcatggactcgcagccgatgcaaggacaacaacaaggccaaccatggcaaggacgacagggacaac

SEQ ID NO: 143124 - DNA, 414 bp, Arabidopsis thaliana
cacgcttcgaaggtcaaggtcaaagccagaggttttgtgacatgcaccagaaagtggagcacattaggagcggtgataccattgccacaacacccggtgtagcacagtggttctacaacgacggacaggaaccacttgtcatcgtcagcgtcttcgatctagccagtcaccagaaccagcttgaccgcaacccaaggccattttacttagccggaaacaacccacaaggtcaagtatggctacaaggccgagagcaacagccacagaagaacattttcaatggatttggacccgaggttattgctcaagctttgaagatcgatcttcagacagcgcagcaacttcagaaccaagatgacaaccgtggaaacatttgtcgagtccaaggcccgtttggtgttattaggccggctt

SEQ ID NO: 143125 - DNA, 425 bp, Arabidopsis thaliana
caataaactcctccgagaaccatcagcacagggatcaccaataagatgaccaaaccaataagtagcggatgtaatttctttttttcctctctaggaacgggggcctgttcatttctaggaataggagcctgggggagtttagagaggtccagagactgcataaattctttgcttttactaaaactccacccaagtatatactggttactggtcaatctcccatttgatccagagaacccaatatacatcttatcttgaaaaatttctgacagattgatgtctcttgatataagaggccggtttggtttctgaatctctataggggccagtgtaacatttagcaacgatccatcataatcaatccacacctgaacaggctccccactcacgagatttatgcttatattcttccccaaagcgtcaga

SEQ ID NO: 143126 - DNA, 422 bp, Arabidopsis thaliana
aaaaagaaaatggttaagctcagcaatctcctcgttgcaaccttcggggttctcctcgtccttaacggctgccttgcgaggcagtcacttggggttcctcctcagctacagaacgagtgtaacctcgacaacctagatgttctccaagccaccgaaactatcaagagtgaagccggtcagatcgagtactgggaccacaaccaccctcagctccgatgtgttggtgtttccgttgctcgttatgtaattgaacaaggcggtctttacttgcccaccttcttcacttccccaaaaatttcctacgtcgttcaaggaacgggtatcagcggaagagtggtccctggatgtgccgagaccttcatggactcgcagccgatgcaaggacaacaacaaggccaaccatggtcaggacgacagggaca

SEQ ID NO: 143127 - DNA, 382 bp, Arabidopsis thaliana
gagaaacgaaacaacaatggccgtctcatcattccagtgccctaccatcttctcctcctcctgaatctccggctttcaatgccgttctgatccagatctcgtcggttctcccgtcggtggatcatctcgccgtcgtgtccatgcctccgccgggatttcttcctcattcaccggggacgctggattatcctccaggatcttaagatttcctcctaatttcgtccgtcagctgagcattaaagcccgtagaaactgtagcaacatcggtgttgcacagatcgtggcggctaagtggtccaacaacccatcctccgcgttacccttcggcggcggcggctgctgctacctcgtctgcatctgcgggttcttccggcgcatcttg

SEQ ID NO: 143128 - DNA, 417 bp, Arabidopsis thaliana
cctccgtcgatttccctctccctccgtcgtctcctccttcttcctccgtcgctcaatggcttcctcaacaatctcctcggatataatcactccatcaaacaccaaaatcggatggatcggaaccggagtcatgggccgatcaatgtgtggacacttaatcaaagccggttacacagtcaccgtcttcaatcgaaccatctccaaagctcaaactctcatcgacatgggtgctaacgtcgccgactcaccaaactcagtcgctgaacaatccgacgtcgttttcaccatcgttggttatccttccgatgtccgtcacgtccttctcgatccaaagtccggagctttatctggtctccgtcaaggaggtgttctcgttgatatgactacttctgagccttctttagcagaggagatagc

SEQ ID NO: 143129 - DNA, 428 bp, Arabidopsis thaliana
cttccacagtggaacgcaaacgcgaacgctattctttacgtgacagacggggaagcccaaatccagatcgtaaacgacaatggtaacagagtgtttgacggacaagtctctcaaggacagctcatagccgtaccacaaggtttctcggtggtgaaacgcgcaacaagcaaccgattccagtgggttgagttcaaaacaaacgctaacgcgcaaatcaacactctggcgggacgaacctcagtcttgagaggtttaccacttgaagtcataaccaatgggttccaaatctcacccgaagaagcaaggagggtcaagttcaacacgctcgagaccactttgactcacagcagtggcccagctagctacggaaggccaagagtggctgcagcttaagagcttaaaaccgcggcttaacaatgaaccgctac

SEQ ID NO: 143130 - DNA, 285 bp, Arabidopsis thaliana
agaaaacatacacaaatagcaaaacatggctaacaagctcttcctcgtctgcgcaactctcgccctctgcttcctcctcaccaacgcttccatctaccgcaccgttgtcgaattcgaagaagatgacgccagcaaccccgtaggtccaagacagagatgccagaaggagtttcagcaatcacaacacctaaaagctggccggagatggatgagcaggcaaatgaggcagggccgtggggggggcccttccctcgacgatgagtccgatttcaggggccccaagca

SEQ ID NO: 143131 - DNA, 417 bp, Arabidopsis thaliana
aaacgcgaacgctattctttacgtgacagacggggaagcccaaatccagatcgtaaacgacaatggtaacagagtgtttgacggacaagtctctcaaggacagctcatagccgtaccacaaggtttctcggtggtgaaacgcgcaacaagcaaccgattccagtgggttgagttcaaaacaaacgctaacgcgcaaatcaacactctggcgggacgaacctcagtcttgagaggtttaccacttgaagtcataaccaatgggttccaaatctcacccgaagaagcaaggagggtcaagttcaacacgctcgagaccactttgactcacagcagtggcccagctagctacggaaggccaagagtggctgcagcttaagagcttaaaaccgcggcttaacaatgaaccgctactgtaaa

SEQ ID NO: 143132 - DNA, 377 bp, Arabidopsis thaliana
cttccccaaaaatttcctacgtcgttcaaggaacgggtatcagcggaagagtggtccctggatgtgccgagaccttcatggactcgcagccgatgcaaggacaacaacaaggccaaccatggcaaggacgacagggacaacaaggccaaccatgggaaggacagggacaacagggacaacaaggaagacaaggccaaccatgggaaggacagggacaacagggacaacaaggacgacagggacaacaaggccaaccatgggaaggacagggacagcagggacaacaagggttccgtgacatgcaccaaaaagtggaacatgtgagacgcggagacgtctttgccaacactccaggctctgcccactggatctacaac

SEQ ID NO: 143133 - DNA, 123 bp, Arabidopsis thaliana
ctagactttttcttagtaatgactaataagcatttattgaaataggataatattatctataaaaaaaataggctacatttcggaacttaataattgaaatatgaatacactcgattaggttat

SEQ ID NO: 143134 - DNA, 419 bp, Arabidopsis thaliana
cgtctgcgcagctctcgctctctgcttcctcctcaccaacgcttccatctaccgcaccgtcgttgagttcgaagaagatgacgccactaaccccataggcccaaaaatgaggaaatgccgcaaggagtttcagaaagaacaacacctaagagcttgccagcaattgatgctccagcaagcaaggcaaggccgtagcgatgagtttgatttcgaagacgacatggagaacccacagggacaacagcaggaacaacagctattccagcagtgctgcaacgagcttcgccaggaagagccagattgtgtttgccccaccttgaaacaagctgccaaggccgttagactccagggacagcaccaaccaatgcaagtcaggaaaatttaccagacagccaagcacttgcccaacgtttgcgaca

SEQ ID NO: 143135 - DNA, 429 bp, Arabidopsis thaliana
gccaaaaaccttgaaacctttaaaaaatcgaaactatggctaagctcattctcgttttcgcaactcttgccctcttcatcctcctagccaacgcatccatctaccgcacagtggtggagttcgaggaagatgatgacgtgagcaacccacaacaaggtaagtgccagagggagtttatgaagcatcagcaactaagaggttgcaagcaatggatccgcaagagagctcaacaaggaagaatcggatacgaagctgatgactttgagctcactcttgatgtcgatcttgaggacgatgagaacccaatggggcctcaacaacagtcatctcttaaaatgtgttgtaatgaattaaggcaagtggacaagatgtgtgtgtgtcctacactgaaaaaggcggctcaacaagtcagattccagggaatgcatg

SEQ ID NO: 143136 - DNA, 160 bp, Arabidopsis thaliana
gggaccaccatgcaccccagctccgttgctccggctttgcctttgagcgtttcgtcattgagcctcagggtcttttcttgcccactttcttgaacgccggcaaactcacgtttgttgttcacggaaggggtctaatgggaagagttattccgggatgccc

SEQ ID NO: 143137 - DNA, 422 bp, Arabidopsis thaliana
cccgaggttattgctcaagctttgaagattgatcttcagacagcgcagcaacttcagaaccaagatgacaaccgtggaaacattgtccgagtccaaggcccgttcggtgtcattaggccgcctttgaggggccagagacctcaggaggaggaagaagaagaagaaggacgacacggacgacacggtaatggcttagaggagaccatctgcagcgccaggtgcaccgataacctcgatgatccgtctcgtgctgacgtgtacaagccacagctcggttacatcagcactctcaacagttacgatctccccatccttcgcttcatccgtctctcagcccttcgtggatctatccgtcaaaacgcaatggtgctttcacaagtggaacgcaaacgcgaacgccattctttacgtgacagacgggg

SEQ ID NO: 143138 - DNA, 381 bp, Arabidopsis thaliana
aaaatggctcgagtctcttctcttctttctttctccttaacacttttgatccttttccatggctacgcggctcaacagggtcagcagggtcagcagtttccgaacgagtgccagctcgaccagctcaatgcgctcgagccttcacacgtactgaagagcgaggctggtcgcatcgaggtgtgggaccaccacgctcctcagctccgttgctcaggtgtctcctttgcacgttacatcatcgagtctaagggtctctacttgccctctttctttaacaccgcgaagctcttcttcgtggctaaaggacgaggtcttatgggaaaagtgatccctggatgcgccgaaacattccaagactcatcagagttccaaccacgcttt

SEQ ID NO: 143139 - DNA, 418 bp, Arabidopsis thaliana
cccgagaaaacgaaaaccctagtttcagaggcatcttcagacaccgaaaatggcggaaggactcgttttgaagggcaccatgcgtgcacacactgacatggtgacggcaatcgccaccccaatcgataacgcagacatcatcgtctcagcttcccgcgacaaatccatcattttgtggaaactcaccaaggacgacaaagcctacggtgtagctcagaggcgtctcactggtcactctcacttcgttgaggatgttgttctctcctccgatggacaattcgcgctttccggcagctgggacggcgagctccgtctttgggatcttgctgctggtgtctccactcgtagattcgttggacacaccaaggacgtgctctccgtcgccttctcactcgacaaccgtcagatcgtctctgca

SEQ ID NO: 143140 - DNA, 424 bp, Arabidopsis thaliana
aacaaaaagaaaatggttaagctcagcaatctcctcgttgcaaccttcggggttctcctcgtccttaacggctgccttgcgaggcagtcacttggggttcctcctcagctacagaacgagtgtaacctcgacaacctagatgttctccaagccaccgaaactatcaagagtgaagccggtcagatcgagtactgggaccacaaccaccctcagctccgatgtgttggtgtttccgttgctcgttatgtaattgaacaaggcggtctttacttgcccaccttcttcacttccccaaaaatttcctacgtcgttcaaggaacgggtatcagcggaagagtggtccctggatgtgccgagaccttcatggactcgcaaccgatgcaaggacaacaaccaggccaaccatggcaaggacgacagggac

SEQ ID NO: 143141 - DNA, 385 bp, Arabidopsis thaliana
agaaaaatgggtcgagtctcatctattatctctttctctttgacactcttgatcctcttcaatggctacactgcccaacagtggcccaacgagtgccagctcgatcaactcaatgcgctcgaaccatcccaaatcatcaagagcgagggtggtcgcatcgaggtctgggaccaccatgcaccccagctccgttgctccggctttgcctttgagcgtttcgtcattgagcctcagggtcttttcttgcccactttcttgaacgccggcaaactcacgtttgttgttcacggaaggggtctaatgggaagagttattcctggatgcgccgagacgttcatgagtcaccggtatttggagaaggtaaggtcagggtcagagtcagggg

SEQ ID NO: 143142 - DNA, 417 bp, Arabidopsis thaliana
caaaaccctaatctcacaatctcctacgagatccatcagtctccacgaaaatgaaggttgttgccgcatacttgctcgctgttttgagcggaaaagcttcaccaaccagtgccgatatcaagactatccttggatcagttggtgctgagacagaggattctcagattgagcttttgttgaaggaagtgaaaggaaaagatttggctgagttgattgctgctggaagggagaagttagcttcagtgccgtctggtggcggaggtggtgttgcggttgcttctgctacatctggaggtggaggaggtggtggtgctcctgctgctgagtccaagaaagaagagaagaaggaagaaaaggaagaatccgatgatgacatgggtttcagtctattcgagtaagctggtagtagcatgaaaa

SEQ ID NO: 143143 - DNA, 430 bp, Arabidopsis thaliana
caaaaagaaaatggttaagctcagcaatctcctcgttgcaaccttcggggttctcctcgtccttaacggctgccttgcgaggcagtcacttggggttcctcctcagctacagaacgagtgtaacctcgacaacctagatgttctccaagccaccgaaactatcaagagtgaagccggtcagatcgagtactgggaccacaaccaccctcagctccgatgtgttggtgtttccgttgctcgttatgtaattgaacaaggcggtctttacttgcccaccttcttcacttccccaaaaatttcctacgtcgttcaaggaacgggtatcagcggaagagtggtccctggatgtgccgagaccttcatggactcgcagccgatgcaaggacaacaacaaggccaaccatggcaaggacgacagggacaacaaggg

SEQ ID NO: 143144 - DNA, 428 bp, Arabidopsis thaliana
  unsure (1)..(428): unsure at all n locations
tgtctcctttgcacgttacatcatcgagtctaagggtctctacttgccctctttctttaacaccgcgaagctctctttcgtggctaagggacgaggtcttatgggaaaagtgatccctggatgcgccgaaacattccaagactcatcagagttccaaccacgcttcgaaggtcaaggtcaaagccagaggttccgtgacatgcaccagaaagtggagcacattaggagcggtgataccattgccacaacacccggtgtagcacagtggttctacaacgacggacaggaaccacttgtcatcgtcagcgtcttcgatctagccagtcaccagaaccagcttgaccgcaacccaaggccattttacttagccggaaacaacccacanggtcaagtatggctacaaggccgagagcaacagccacagaaga

SEQ ID NO: 143145 - DNA, 382 bp, Arabidopsis thaliana
ctccgatctcagatccattcaacaatctccaaagaagatggaaccagtctcttcatggggtaacacctctctcgtctccgtagatccagagatccacgacctaatcgagaaggagaaacgtcggcaatgtcgaggaatcgaacttatcgcttccgagaatttcacttccttcgccgtcatcgaagctctcggaagtgccttaaccaacaaatacttcgaaagtattcctggtaatcggtattaacggaggtaacgaattcatcgatgagatcgagaatctttgccgttcaagagctctcgaagctttccattgtgatccagcagcgtggggcgttaatgttcagccgtattctggatctccggcgaatttcgctgcttacac

SEQ ID NO: 143146 - DNA, 423 bp, Arabidopsis thaliana
atcgccaactaccaaaaccaactcgaccgcaaccctagagtgttccatttggccggaaacaaccagcagggaggctttggcggttcacagcaacaacaagaacagaaaaacttgtggagcgggttcgacgcacaggtcatagctcaagcattgaaaattgacgttcagttggctcagcagcttcagaaccaacaagacagcagaggaaacatcgttcgtgttaagggacctttccaggtcgtgaggccacctctaagacagccctacgagagcgaggagtggagacacccacgtagcccacagggcaacggccttgaggagactatctgcagcatgaggtcccacgagaacattgacgaccctgctcgtgctgacgtgtacaagcccagcctaggtcgcgtgaccagcgtcaacagctatacc

SEQ ID NO: 143147 - DNA, 348 bp, Arabidopsis thaliana
gacatgcaccagaaagtagagcacctacggtgcggtgacaccattgcaacaccatctggtgtagctcaatggttctacaacaatggaaatgagcctctcattcttgttgcagccgcggatctcgccagcaaccagaaccagcttgaccgcaaccttagaccatttttgatagccggaaacaacccacaagggcaggaatggctacaaggccgaaagcaacagaagcaaaacaacatcttcaatggcttcgcacctgagatcttggctcaagccttcaagatcaatgtcgagacggctcagcagctccagaaccagcaagataaccgtggcaacatcgtcaaggtcaac

SEQ ID NO: 143148 - DNA, 410 bp, Arabidopsis thaliana
cacattttcgtagccgcaagactcctttcagattcttacttgcagctatgggtaaagagaagtttcacattaacattgtggtcattggtcatgttgattctggaaaatcgaccacaactggtcacttgatctataagcttggtggtattgacaagcgtgtcatcgagaggttcgagaaggaggctgctgagatgaacaagaggtccttcaagtacgcatgggtgttggacaaacttaaggccgagcgtgagcgtggtattaccatcgatattgctctatggaagttcgagaccaccaagtactactgcacagtcattgatgccccaggacatcgtgatttcatcaagaacatgattactggtacctcccaggctgattgtgctgttcttatcattgactccaccactgga

SEQ ID NO: 143149 - DNA, 424 bp, Arabidopsis thaliana
cgtctttgccaacactccaggctctgcccactggatctacaactcaggagaacagccacttgtcatcatcgctcttctcgacatcgccaactaccaaaaccaactcgaccgcaaccctagagtgttccatttggccggaaacaaccagcagggaggctttggcggttcacagcaacaacaagaacagaaaaacttgtggagcgggttcgacgcacaggtcatagctcaagcattgaaaattgacgttcagttggctcagcagcttcagaaccaacaagacagcagaggaaacatcgttcgtgttaagggacctttccaggtcgtgaggccacctctaagacagccctacgagagcgaggagtggagacacccacgtagcccacagggcaacggccttgaggagactatctgcagcatgaggtcc

SEQ ID NO: 143150 - DNA, 431 bp, Arabidopsis thaliana
gcggtctttacttgcccaccttcttcacttccccaaaaatttcctacgtcgttcaaggaacgggtatcagcggaagagtggtccctggatgtgccgagaccttcatggactcgcagccgatgcaaggacaacaacaaggccaaccatggcaaggacgacagggacaacaaggccaaccatgggaaggacagggacaacagggacaacaaggaagacaaggccaaccatgggaaggacagggacaacagggacaacaaggacgacagggacaacaaggccaaccatgggaaggacagggacagcagggacaacaagggttccgtgacatgcaccagaaggtggaacatgtgagacgcggagacgtctttgccaacactccaggctctgcccactggatctacaactcaggagaacagccacttgtcatcatc

SEQ ID NO: 143151 - DNA, 428 bp, Arabidopsis thaliana
ctttccctcaaacccaaaacacattttgttttttgtttcccatctaaaatgcgtatgagttgtaacggatgtcgagttctacgaaaaggctgcagtgaaaactgtagcataagaccttgtcttcaatggatcaaatccgctgaatctcaagccaacgccaccgtcttcctcgccaagttttatggccgtgcggggctcatgaacctcctcaacaccggtcctgaccacctccgtcctgcgatatttagatcattgttgtacgaagcatgcgggaggattgtgaatccgatatacggatccgtggggttattgtggtcaggaaactggcatctttgtcaagcggccgttgaggcagtaatgagaggctcacccgtgactccgatcgcatgcgacgcagcggttactggtcaagcacctccttttaacaa

SEQ ID NO: 143152 - DNA, 412 bp, Arabidopsis thaliana
  unsure (1)..(412): unsure at all n locations
acggtcaaatgttgacattcacacttttaaccagagcaaatatccccgtgttgtggcagatgagtttgtgccatggcccagcaagggaaagaccgacaaggagggctggtatcctcccggtcatggtgatgtattcccagccctcatgaacagtggaaagctcgatactttcttatcacagggtaaggaatatgtgtttgttgccaattcagacaacttgggtgccatcgttgacttaacaatcctgaagcatttgatccagaacaagaacgaatactgcatggaggttacacccaaaaccttagctgatgtaaaggggggaactctcatttcttatgaaggaaagtccagcttctggagaatgtcangttcctgatgaacatgtcaatgagttcaaatcaattgagaagtt

SEQ ID NO: 143153 - DNA, 382 bp, Arabidopsis thaliana
agaaaaatgggtcgagtctcatctattatctctttttctttgacactcttgatcctcttcaatggctacactgcccaacagtggcccaacgagtgccagctcgatcaactcaatgcgctcgaaccatcccaaatcatcaagagcgagggtggtcgcatcgaggtctgggaccaccatgcaccccagcttcgttgctccggctttgcctttgagcgtttcgtcattgagcctcagggtcttttcttgcccactttcttgaacgcccgcaaactcacgtttgttgatcacggaaggggtctaatgggaagagttattctcggatgcgccgagacgttcatggagtcaccggtatttggagaaagtcacggtcagggtcagagtc

SEQ ID NO: 143154 - DNA, 426 bp, Arabidopsis thaliana
attattttaactgggcgcctaacaattttggggccagagaatctctctttttctcttctctctttctcttcccctctctccggggaaggatgttgctatggaccaacgcaccaatgtgaacggagatccccgcgccggagaccggaagaaagaagaaagggttgatccgagtgcacaaaccaccgtcaagatcggagatataagggcggcgattcctaagcactgttgggttaagagtcctttgagatcaatgagttacgtcgtcagagacattatcgccgtcgcggctttggccatcgctgccgtgtatgttgatagctggttcctttggcctctttattgggccgcccaaggaacaactttttgggccatctttgttctcggccacgactgtggacatgggagtttctcagacattcctctact

SEQ ID NO: 143155 - DNA, 446 bp, Arabidopsis thaliana
  unsure (1)..(446): unsure at all n locations
ccggnccggaannnccagctcggccgaccgcaaaaggctcgagtctcttctatactttctttcttcttaacactcccgatccctttccatggctacgcggctcaacagggtcagcagggtcagcagtttccgaacgagtgccagctcgaccagctcaatgcgctcgagccgtcacacgtactgaagagcgaggctggtcgcatcgaggtgtgggaccaccacgctcctcagctccgttgctcaggtgtctcctttgcacgttacatcatcgagtctaagggtctctacttgccctctttctttaacaccgcgaagctctctttcgtggctaatggacgaggtcttatggggaactctcatttcttatgaaggcaaacattccaagacttaatagaagttcaaccactcttttaaggtcaaggtcaaagccagaggttttcgtgaca

SEQ ID NO: 143156 - DNA, 419 bp, Arabidopsis thaliana
ctaaatagtagtgtttactgtcttcagccgtcgtctccggattccattatcgaaggcgacggaagcagtatcttaggttttgtccgacgaagctccgtttgattgttatcggttccgttgtattcgtcgatcttccattttcgcatttgttttctatatccgaagatgggaagcagtccagctccgtttgccgatattggcaagaaagccaaagatctcctaaacaaggattacatttttgaccacaagtttactctcacaatgctgagtgctacaggaacggaatttgtggctactggtttgaagaaggatgatttcttttttggcgatataagcacactatataaaggtcaaaacaccattgttgatctgaaaatcgacagccactctagtgtgtcgacgaaagtaactttcaaaaa

SEQ ID NO: 143157 - DNA, 407 bp, Arabidopsis thaliana; identical to SEQ ID NO: 130053

SEQ ID NO: 143158 - DNA, 407 bp, Arabidopsis thaliana
aaaaatgggtcgagtctcatctattatctctttctctttgacactcttgatcctcttcaatggctacactgcccaacagtggcccaacgagtgccagctcgatcaactcaatgcgctcgaaccatcccaaatcatcaagagcgagggtggtcgcatcgaggtctgggaccaccatgcaccccagctccgttgctccggctttgcctttgagcgtttcgtcattgagcctcagggtcttttcttgcccactttcttgaacgccggcaaactcacgtttgttgttcacggaaggggtctaatgggaagagttattccgggatgcgccgagacgttcatggagtcaccggtatttggagaaggtcaaggtcagggtcagagtcaagggttccgtgacatgcaccagaaag

SEQ ID NO: 143159 - DNA, 440 bp, Arabidopsis thaliana
taccgaaccgcgtttcgaccacgcgtccggagatttttgtcttttatacttggtgagatcaatatcgtcgggtcaagtgacgtcatggcgtctatatgtctacatcacctatcttgacgtggcgcttttgttgatgccctgatggctaactagccgacggcggcttccacttttttttttacttatcctcatattttccatcacgtgattgttcagcgcgtgcaacacacgcccgggactcagaaaaaattaaaacagtcattatttatccgatttgacgacaaccattgaatgttcaaatggtatagatatctctatgttgtcaattatttaaatactggttaaggggttattcaagtagatatactataataacaaaaatatgactatcatcagtttagtcttgtttataaaagttaatactaaaaactccacattgg

SEQ ID NO: 143160 - DNA, 414 bp, Arabidopsis thaliana
atccgtcaaaacgcaatggtgcttccacagtggaacgcaaacgcgaacgccattctttacgtgacagacggggaagcccaaatccagatcgtaaacgacaatggtaacagagtgtttgacggacaagtctctcaaggacagctcatagccgtaccacaaggtttctcggtggtgaaacgcgcaacaagcaaccgattccagtgggttgagttcaaaacaaacgcaaacgcgcaaatcaacactcttgcgggacgaacctcagtcttgagaggtttaccacttgaagttataaccaatgggttccaaatctcacctgaagaagcaaggagggtcaagttcaacacgctcgagaccactttgactcacagcagtggcccagctagctacggaaggccaagggtggctgcagcttat

SEQ ID NO: 143161 - DNA, 409 bp, Arabidopsis thaliana
gatgaatccttctcacggtggcgacgacaagcaacgaccggcgatgtatccccaagttgatcaatccattcctgataatccttttgcttctacaaatccttacgtcgcttcttccccttatctctatccttctctatcctctcacaatctcggacctaatctcttcccagaccacggagatgcatccaacgaccaatcaccatctgctcctcctcaggcgacggaggaggttctcatccgtgttcccggcgctattctcaaccttatcgacaaatcctacagcgttgaactcgcgtgcggtgatttcaccatctttcgaatcatccaggggcaaaatattgtagcggttctagctaatgttgggaatgagattcaatggccgttgacgaagaacgaggttgctgcgaag

SEQ ID NO: 143162 - DNA, 408 bp, Arabidopsis thaliana
aaaaatggctcgagtctcttctcttctttctttctccttaacacttttgatccttttccatggctacgcggctcaacagggtcagcagggtcagcagtttccgaacgagtgccagctcgaccagctcaatgcgctcgagccttcacacgtactgaagagcgaggctggtcgcatcgaggtgtgggaccaccacgctcctcagctccgttgctcaggtgtctcctttgcacgttacatcatcgagtctaagggtctctacttgccctctttctttaacaccgcgaagctctccttcgtggctaaaggacgaggtcttatgggaaaagtgatccctggatgcgccgaaacattccaagactcatcagagttccaaccacgcttcgaaggtcaaggtcaaagccagaggtt

SEQ ID NO: 143163 - DNA, 387 bp, Arabidopsis thaliana
attcattcaatttttgttcatcgttttctctagatctctcttctatatagtcctctcggaggttttccgatgaagatcgtcactgatctccttccgatctacagatcggcgtcttatacgaagagatccagaggctccggttgattcctcgtcagaagacggatcgtcgcggttgagctccgaagattggttgaagatctgatctgatcttagatcatgaaccggcctcgaggttcgtcagatctgcgttactgagcttttgatgaggtgatgaatgatgaatccgtcaattctctatggagctagagagatgagagggtgaagaagagagaagaagctgatatgtgatattgatgtgagttaagttgattgatggatgtatgagat

SEQ ID NO: 143164 - DNA, 394 bp, Arabidopsis thaliana; identical to SEQ ID NO: 130054

SEQ ID NO: 143165 - DNA, 408 bp, Arabidopsis thaliana
aagaaaatggttaagctcagcaatctcctcgttgcaaccttcggggttctcctcgtccttaacggctgccttgcgaggcagtcacttggggttcctcctcagctacagaacgagtgtaacctcgacaacctagatgttctccaagccaccgaaactatcaagagtgaagccggtcagatcgagtactgggaccacaaccaccctcagctccgatgtgttggtgtttccgttgctcgttatgtaattgaacaaggcggtctttacttgcccaccttcttcacttccccaaaaatttcctacgtcgttcaaggaacgggtatcagcggaagagtggtccctggatgtgccgagaccttcatggactcgcagccgatgcaaggacaacaacaaggccaaccattgcaagga

SEQ ID NO: 143166 - DNA, 377 bp, Arabidopsis thaliana
cttagcctttactctatagttttatatcatatcaatcgacatggcgaatgtggaccgtgatcggcgtgtgcatgtagaccgtactgacaaacgtgttcatcagccaaactacgaagatgatgtcggttttggtggctatggcggttatggtgctggttctgattataagagtcgcggcccctccactaaccaaatcttggcacttatagcaggagttcccattggtggcacactgctaaccctagctggactcactctagccggttcggtgatcggcttgctagtctccatacccctcttccttctcttcagtccggtgatagtcccggcggctctcactattgggcttgctgtgacgggaatcttggcttctggtt

SEQ ID NO: 143167 - DNA, 397 bp, Arabidopsis thaliana
cacaaggaatggtgagacccatgtcatgatcaaaaccaaactcttcctcagctcttctaaggagacattggaagtcaagattggtcaagaaagagataggaaccatgtatctgcttctggtggggcccacacagacacgggaagtgtcccttgggtacacaaagtgggagagcaacctcttcatatactcctcctccatatttttttcccaagcttgaacatctcttcagaatctgcctaagcattgctgtttgagccagttttgtagatttcttgagaatggacatttttgttttttggtggtttgagagaatcttctggttgttggagagagagagagagagagagtttggtggatattgaagggaggggtgttaatatttataaaggcgtgcat

SEQ ID NO: 143168 - DNA, 402 bp, Arabidopsis thaliana
ataaatttgccctcaatttctccgtccctactactctttttgatcaatttctacgggaaaaagcacgaatctttaaacccgggcatgtccttgtaatcgagtatgttgtgtaagtgatgaatttgtggtgagatctggtgagaagtttcctcttttttctcagattgcggtaaaaaaaagagtttttaataaggaagagattgagattagattttatcgcttttgtttgtgtgatatgggtaacgtgaacgcgagagaagaagcgaatagtaacaacgcttctgctgttgaagacgaagacgctgagatttgttctcgtgaagctatgtctgctgcttctgatggtaaccatgtcgctcctcctgagcttatgggtcaatctcctcctcatagccctcgagc

SEQ ID NO: 143169 - DNA, 406 bp, Arabidopsis thaliana
cagccgtctgtcttacctccagaagtcgactacaacaatggcaccgaagaagggagttaaagtggcttcaaagaagaagccggagaaagttaccaacccattgtttgagagacgccctaagcaattcggtattggtggcgctttgcctcctaagaaggatctttctcgttacatcaaatggcctaagtcaatccgtcttcaaaggcagaagcgtatccttaagcagaggttgaaggttcctccagctcttaaccagttcaccaagacccttgataagaatctcgccaccagcctcttcaagattcttctgaagtataggccagaggacaaagccgcaaagaaggaacgccttttgaacaaggctcaagctgaggcagaaggaaagcctgctgaatccaagaagccc

SEQ ID NO: 143170 - DNA, 285 bp, Arabidopsis thaliana
gaaagatcctacaggacatgatatatcctttcagtatgatcttggacgtgaggttggtcgaggcgagtttggtataacttacttgtgtactgataaggaaactggtgagaagtatgcctgcaagtccatatctaagaagaagctgagaacagcagttgatatagaggatgttaggagggaggtggagattatgaagcatatgcctaaacacccaaatgtcgtctctttgaaggattcctttgaggatgatgatgcggtgcatatagttatggagttgagttaagg

SEQ ID NO: 143171 - DNA, 282 bp, Arabidopsis thaliana
aaattttgtaaactcagatttactccaaaattctgtctatttttaaccatgagctaagtttaaaatctacttaaacatataattatatcaaaaatatttggctgttttaaaataaaccattacattcacagtatggcatatattggtaaagaatttgtacaagtaatcagagagattattttatttcaaggtttggtggtcatgattgtattattgagttattaatttaagtatataacatctctcatgtgattgcctaattaattaatagtttcattacac

SEQ ID NO: 143172 - DNA, 411 bp, Arabidopsis thaliana
caaatacccaaagagctcttcttcttcacaattcagatttcaattttctcaaactctaaaatcaatctctcaaatctctcaaccgtgatcaagatgcagatcttcgttaagactctcaccggaaagactatcaccctcgaggtggaaagctctgacaccatcgacaacgttaaggccaagatccaggataaggaaggtattcctccggatcagcagaggcttatcttcgccggaaagcagttggaggatggccgcacgttggcggattacaatatccagaaggaatccaccctccacttggttctcaggctccgtggtggtatgcagattttcgttaaaaccctaacgggaaagacgattactcttgaggtggagagctctgacaccattgacaacgtcaaggccaagatc

SEQ ID NO: 143173 - DNA, 404 bp, Arabidopsis thaliana; identical to SEQ ID NO: 130056

SEQ ID NO: 143174 - DNA, 440 bp, Arabidopsis thaliana
ggaccgggactgccaggctcggacccacgcgtccgcaaaaagaaaatggttaagctcagcaatctcctcgttgtaaccttcggggatctcctcgtccttaacggctgccttgcgaggcagtcacttggggttcctcctcagctacagaacgagtgtaacctctacaacctagatgttcttcaagccaccgaaactatcaagagtgaagccggtcagatcgagtactgggaccacaaccaccctcagctccgatgtgttggtgtctctcgtgctcgttatgtaattgaacaaggcgggctttacttgcccaccttcttcacttgcccaaaaatttcctacgtcgttcaaggaacgggtatcagcggaagagtggtccctggatgtgccgagaccttcatggactcgcagccgatgcaaggacaacaacatggtcaaccatg

SEQ ID NO: 143175 - DNA, 408 bp, Arabidopsis thaliana
gaaaacatacacaaatagcaaaacatggctaacatgctcttcctcgtctgcgcaactctcgccctctgcttcctcctcaccaacgcttccatctaccgcaccgttgtcgaattcgaagaagatgacgccagcaaccccgtaggtccaagacagagatgccagaaggagtttcagcaatcacaacacctaagagcttgccagagatggatgagcaagcaaatgaggcaaggacgtggtggtggtccttccctcgacgatgagttcgatttcgagggcccccagcagggataccagctactccagcagtgctgcaacgagcttcgccaggaagagccagtttgcgtttgccccaccttgaaacaagctgccagggcagttagcctccagggacagcacggaccattccaa

SEQ ID NO: 143176 - DNA, 396 bp, Arabidopsis thaliana
cttcttcttcttccttccttctctctccttattaataaagaccaacacagacacggaagaagtagcttggttcttctctttgtgaaggtgaatgcgggagatggggactggagattctgcttcgagactgattctctggttctgcttagggtttttgattctaggtgttggatttgtgcaatgtggagttacttatgaccggaaagcacttctcattaatggacagagacgaatcctcttctctggctccatacattaccctcgaagcactcctgatatgtgggaagatttgattcagaaggcgaaagatggaggcattgatgtgattgagacgtatgtgttctggaatcttcatgagccttcttctggaaaatacgattttgaagggagaaatga

SEQ ID NO: 143177 - DNA, 264 bp, Arabidopsis thaliana
aatgaacggaaaaaatcataacatacacaaaggtttctttggtctttaataatttagaacatggtttattgacgagccacagaaattgcacctatcaaagcaactaaaagaattattgaaatgagttcaaatggcagaaaaaaatctgttgataaatgaattcctatttgttgactattacttattaaatcttgctctagaatctggtttaattttgtagtccaaataaccccgtaccatgacgtatcgagaatagtagacatt

SEQ ID NO: 143178 - DNA, 405 bp, Arabidopsis thaliana
cacaaacacaatctaatcccaaaaatcaaaagatgaatgccacaaagtttgttgtgcttctcgtgattggcgttttgtgtgccattgtcaccgcaaggcaggtcaaagatttgtccacggagaccaaattaggggcctctcttccaaaaactactaccaaaggcattggagctcagctttctgcaactggcacaacttacagcaccagcagtgtcgttagctatgctaatggttttaacaatcccaaaggtccaggggccaatgcattcgaaagtgccaacacatttaccagcggacaagtcactgccaagggtcgcaaggcaagagtttcttctacaagtgcttctgccgctgaaggcgatgctgcagctgcagtgactcgcaaagctgctgctgcacgtgcaa

SEQ ID NO: 143179 - DNA, 404 bp, Arabidopsis thaliana
gagaaaacgaaaaccctagtttcagaggcatctccagacaccgaaaatggcggaaggactcgttttgaagggcaccatgcgtgcacacactgacatggtgacggcaatcgccaccccaatcgataacgcagacatcatcgtctcagcttcccgcgacaaatccatcattttgtggaaactcaccaaggacgacaaagcctacggtgtagctcagaggcgtctcactggtcactctcacttcgttgaggatgttgttctctcctccgatggacaattcgcgctttccggcagctgggacggcgagctccgtctttgggatcttgctgctggtgtctccactcgtagattcgttggacacaccaaggacgtgctctccgtcgccttctcactcgacaaccgtcaga

SEQ ID NO: 143180 - DNA, 409 bp, Arabidopsis thaliana
ataaaagttttctttcttaatcacttccgaacggcatggttcgattttgtttagatactaaagattttttttcgttcatgcttctgaaaggattcgacatatttttgtataggtatacctataggataaaaaggtaaaattttgagtaagttcttaagtataagttaataaggggacagccattttctagactccataataagtattcaaatgagtaagtgttttttcaatttcaaccattcctttcacgaagatacaattcaagattcaaaaatatcaagaaacctttttttcgtccaccaataaatatattcacagaattaaggaataacaactatgaaaataagggcttccgttcgtaaaatttgtgaaaagtgtcgactaatccgcaggaggggacgaattatag

SEQ ID NO: 143181 - DNA, 409 bp, Arabidopsis thaliana
ataagaaataacaaaatggctcgagtctcttctcttctttctttcttcttaacacttttgatccttttccatggctacgcggctcaacagggtcagcagggtcagcagtttccgaacgagtgccagctcgaccagctcaatgcgctcgagccgtcacacgtactgaagagcgaggctggtcgcatcgaggtgtgggaccaccacgctcctcagctccgttgctcaggtgtctcctttgcacgttacatcatcgagtctaagggtctctacttgccctctttctttaacaccgcgaagctctctttcgtggctaagggacgaggtcttatgggaaaagtgatccctggatgcgccgaaacattccaagactcatcagagttccaaccacgcttcgaaggtcaaggtcaaa

SEQ ID NO: 143182 - DNA, 408 bp, Arabidopsis thaliana
cagccacttgtcatcatcgctcttctcgacatcgtcaactaccaaaaccaactcgaccgcaaccctagagtgttccatttggccggaaacaaccagcagggaggctttggcggttcacagcaacaacaagaacagaaaaacttgtggagcgggttcgacgcacaggtcatagctcaagcattgaaaattgacgttcagttggctcagcagcttcagaaccaacaagacagcagaggaaacatcgttcgtgttaagggacctttccaggtcgtgaggccacctctaagacagccctacgagagcgaggagtggagacacccacgtagcccacagggcaacggccttgaggagactatctgcagcatgaggtcccacgagaacattgacgaccctgctcgtgctgacgtg

SEQ ID NO: 143183 - DNA, 408 bp, Arabidopsis thaliana
ggaaggacagggacaacagggacaacaaggacgacagggacaacaaggccaaccatgggaaggacagggacagcagggacaacaagggttccgtgacatgcaccagaaggtggaacatgtgagacgcggagacgtctttgccaacactccaggctctgcccactggatctacaactcaggagaacagccacttgtcatcatcgctcttctcgacatcgccaactaccaaaaccaactcgaccgcaaccctagagtgttccatttggccggaaacaaccagcagggaggctttggcggttcacagcaacaacaagaacagaaaaacttgtggagcgggttcgacgcacaggtcatagctcaagcattgaaaattgacgttcagttggctcagcagcttcagaaccaaca

SEQ ID NO: 143184 - DNA, 406 bp, Arabidopsis thaliana
agaaataacaaaatggctcgagtctcttctcttctttctttcttcttaacacttttgatccttttccatggctacgcggctcaacagggtcagcagggtcagcagtttccgaacgagtgccagctcgaccagctcaatgcgctcgagccgtcacacgtactgaagagcgaggctggtcgcatcgaggtgtgggaccaccacgctcctcagctccgttgctcaggtgtctcctttgcacgttacatcatcgagtctaagggtctctacttgccctctttctttaacaccgcgaagctctctttcgtggctaagggacgaggtcttatgggaaaagtgatccctggatgcgccgaaacattccaagactcatcagagttccaaccacgcttcgaaggtcaaggtcaaa

SEQ ID NO: 143185 - DNA, 409 bp, Arabidopsis thaliana
aacgaattgtcgaagagaaagagactgaaatcgaaaaatctatagagagctcactcactaacaatggcgtctcttctcggaagatctccttcttcaatcttgacctgccctcgtatatcttctccttcctcaacatcttcaatctcccatctctgcttcggaccagagaaattttctggaagaatccaattcaatccaaagaggaacagatctcgttaccatgtctctgttatgaatgtcgctacagagatcaactctattgaacaagcaaagaagattgattcaaaggaaagtgcaagaccggtttatccgtttgctgccatagttggacaagatgagatgaagctatgccttttgttaaatgtgattgacccgaagataggtggtgtgatgataatgggagatagag

SEQ ID NO: 143186 - DNA, 405 bp, Arabidopsis thaliana
gtagatttgaaaataccaacgatttgttgttgagttttagacacgagtaaataaatggtgggaaatcgattaaacacacatatgaagcgatgtatgaaaacgacatgcgaattttatataaacaaatatcagctcatattgacccatgcgatcccaaaatgaatggagaatgacgacgtctgatctgaccatatcatatgtatggaaaagaccatttatgttcaagcttcgaaataaacttgatgatatgatcttctctatgttttgatttggagttgttcgattgctcattgagagagataattaataaatatggtgacactttctctcttattcgtcttagtcatatcatatattcatatctcatgttgatttgttattttgctatccagggagaccacaacg

SEQ ID NO: 143187 - DNA, 405 bp, Arabidopsis thaliana
gcccactggatctacaactcaggagaacagccacttgtcatcatcgctcttctcgacatcgccaactaccaaaaccaactcgaccgcaaccctagagtgttccatttggccggaaacaaccagcagggaggctttggcggttcacagcaacaacaagaacagaaaaacttgtggagcgggttcgacgcacaggtcatagctcaagcattgaaaattgacgttcagttggctcagcagcttcagaaccaacaagacagcagaggaaacatcgttcgtgttaagggacctttccaggtcgtgaggccacctctaagacagccctacgagagcgaggagtggagacacccacgtagcccacagggcaacggccttgaggagactatctgcagcatgaggtcccacgag

SEQ ID NO: 143188 - DNA, 410 bp, Arabidopsis thaliana
cgcagcaacttcagaaccaagatgacaaccgtggaaacattgtccgagtccaaggcccgttcggtgtcattaggccgcctttgaggggccagagacctcaggaggaggaagaagaagaagaaggacgacacggacgacacggtaatggcttagaggagaccatctgcagcgccaggtgcaccgataacctcgatgatccgtctcgtgctgacgtgtacaagccacagctcggttacatcagcactctcaacagttacgatctccccatccttcgcttcatccgtctctcagccctccgtggatctatccgtcaaaacgcaatggtgcttccacagtggaacgcaaacgcgaacgccattctttacgtgacagacggggaagcccaaatccagatcgtaaacgacaatggt

SEQ ID NO: 143189 - DNA, 407 bp, Arabidopsis thaliana
cggacgcgtggggaaagaaatctaatccgatattcttaattctatatagaaattctatcctatatagaaatagaaatcgtttttattttgatccgatcaaaataggattttagagataaggaataaaaataaaaattatgaataaatctaagcgactttttactaaatccaagcgatcttttcgtaggcgtttgcccccgatccaatcgggggatcgaattgattatagaaacatgagtttaattagtcgatttattagtgaacaaggaaaaatattatctagacgggtgaatagagtgactttaaaacaacaacgattaatcactattgctataaaacaagctcgtattttatctttgttaccttttcttaataatcagaaacaatttgaaagaagtgagtcgact

SEQ ID NO: 143190 - DNA, 408 bp, Arabidopsis thaliana
caaaaaatggcaaacaagttgttcctcgtctgcgttgctctcgctctctgcttcctcctcaccaacgcttccatctaccgcaccgtcgttgagttcgaagaagatgacgccactaaccccataggcccaaaaatgaggaaatgccgcaaggagtttcagaaagaacaacacctaagagcttgccagcaattgatgctccagcaagcaaggcaaggccgtagcgatgagtttgatttcgaagacgacatggagaacccacagggacaacagcaggaacaacagctattccagcagtgctgcaacgagcttcgccaggaagagccagattgtgtttgccccaccttgaaacaagctgccaaggccgttagactccagggacagcaccaaccaatgcaagtcaggaaaatt

SEQ ID NO: 143191 - DNA, 381 bp, Arabidopsis thaliana
aaaagaaaatggttaagctcagcaatctcctcgttgcaaccttcggggttctcctcgtccttaacggctgccttgcgaggcagtcacttggggttcctcctcagctacagaacgagtgtaacctcgacaacctagatgttctccaagccaccgaaactatcaagagtgaagccggtcagatcgagtactgggaccacaaccaccctcagcttcgatgtgttggtgttaccggtgctcgctatgtaattgaacaaggcggtctttacttgcccaccttcttcactttcccaaaaatttcctacgtcgttcaaggaacgggtatcaactgaagagtggtccctggatgtgcccagaccttcatggacgcacaggccttgcagg

SEQ ID NO: 143192 - DNA, 404 bp, Arabidopsis thaliana
gaagtgagatgtgtacgagaggatcttacatagagctgtgaaaccggtgagaaggttgttggtgtaggatcttttaatgtttggagcactaaaccttgcgagagaggtatttggtctcgtggagtggaggttgggtcattcgtttgctctactaatgatctgtcttctgataataaagccgccatgaacattgcgtgtttgaaaaatctcgacccgagcctacaaggtatgccaaatcttgatcaggtccatgcacttattcaccattatggaccgatggtctacttccatcccgaagagacttacatgccttcgtctgtgccatggttctttaaaaacggagctttgttgcaccggtttgggaaatctcaaggcgaaccgattaactcagctggctcgaactt

SEQ ID NO: 143193 - DNA, 411 bp, Arabidopsis thaliana
ctcaaaacaagacccatcgataacagcgatcatggtggctaaagccttagcacagctgataacatgcatcatcttattctgccacgttgtagcttccgtagaagacctcaccatacgccaagtcacggccgacaatcggcgaattcgcccgaatcttctcgggactcacacagagagtaaattccggcttttcatgtccgattacggcaagaactactccacgagggaggagtacatccaccgcctcggaatatttgccaaaaacgtccttaaggccgcagagcaccagatgatggacccctccgccgtccacggagtcacacagttctctgacctcacggaagaggagttcaagcggatgtacactggagtagccgatgttggcggcagccgtggcggtacggttggagc

SEQ ID NO: 143194 - DNA, 408 bp, Arabidopsis thaliana
aaaaagaaaatggttaagctcagcaatctcctcgttgcaaccttcggggttctcctcgtccttaacggctgccttgcgaggcagtcacttggggttcctcctcagctacagaacgagtgtaacctcgacaacctagatgttctccaagccaccgaaactatcaagagtgaagccggtcagatcgagtactgggaccacaaccaccctcagctccgatgtgttggtgtttccgttgctcgttatgtaattgaacaaggcggtctttacttgcccaccttcttcacttccccaaaaatttcctacgtcgttcaaggaacgggtatcagcggaagagtggtccctggatgtgccgagaccttcatggactcgcagccgatgcaaggacaacaacaaggccaaccatggcat

SEQ ID NO: 143195 - DNA, 408 bp, Arabidopsis thaliana
cttaaaaactttctctcaattctctctaccgtgatcaagatgcagatctttgttaagactctcaccggaaagacaatcaccctcgaggtggaaagctccgacaccatcgacaacgttaaggccaagatccaggataaggagggcattcctccggatcagcagaggcttattttcgccggcaagcagctagaggatggccgtacgttggctgattacaatatccagaaggaatccaccctccacttggtcctcaggctccgtggtggtatgcagattttcgttaaaaccctaacgggaaagacgattactcttgaggtggagagttctgacaccatcgacaacgtcaaggccaagatccaagacaaagagggtattcctccggaccagcagaggctgatcttcgccgga

SEQ ID NO: 143196 - DNA, 408 bp, Arabidopsis thaliana
catcaatctctcttacacactacacaaattcaacaactgaaaccaactcagagcaaaagcttgatttgacactatggcgagcattagcaacgagcccgagcgtgagaacagagacgaagaagagactggagccaacgaagatgaagacaccggtgctcaggttgctcctatcgtcaggcttgaagaagtcgccgtcaccaccggtgaagaagacgaagacaccatcctcgatctgaaatcgaagttgtatcgatttgataaagatggaagtcagtggaaggagagaggtgctggtactgttaagtttttgaaacatagagtttctgggaagattcgtctcgttatgaggcaatcgaaaactttgaagatctgtgctaatcatcttgttggatcgggtatgagtgttca

SEQ ID NO: 143197 - DNA, 411 bp, Arabidopsis thaliana
  unsure (1)..(411): unsure at all n locations
gaaaacatacacaagtattaactaacaacaaatggcgaacaagctcttcctcngtctgcgcagctctcgccctgtgtttcatcctcaccaacgcttccgctatcgcacggttgtcgagttcgacgaagatgacgccagtaaccccataggcccaatacagaaatgtcagaaggagtttcagcaagaacagcacctaagagcttgccagagatggatgcgcaagcaaatgtggcaaggacgtggtggtggtccttccctcgacgatgagttcgatatggaagacgacatcgagaacccgcagagacgacagctactccagaagtgctgcagcgagcttcgccaagaagagccagtttgcgtttgccccaccttgagacaagctgccaaggccgttagattccagggacagca

SEQ ID NO: 143198 - DNA, 405 bp, Arabidopsis thaliana
cgaatgtggaccgtgatcggcgtgtgcatgtagaccgtactgacaaacgtgttcatcagccaaactacgaagatgatgtcggttttggtggctatggcggttatggtgctggttctgattataagagtcgcggcccctccactaaccaaatcttggcacttatagcaggagttcccattggtggcacactgctaaccctagctggactcactctagccggttcggtgatcggcttgctagtctccatacccctcttcctcctcttcagtccggtgatagtcccggcggctctcactattgggcttgctgtgacgggaatcttggcttctggtttgtttgggttgacgggtctgagctcggtctcgtgggtcctcaactacctccgtgggacgagtgatacagtgc

SEQ ID NO: 143199 - DNA, 407 bp, Arabidopsis thaliana
gaaaatggttaagctcagcaatctcctcgttgcaaccttcggggttctcctcgtccttaacggctgccttgcgaggcagtcacttggggttcctcctcagctacagaacgagtgtaacctcgacaacctagatgttctccaagccaccgaaactatcaagagtgaagccggtcagatcgagtactgggaccacaaccaccctcagctccgatgtgttggtgtttccgttgctcgttatgtaattgaacaaggcggtctttacttgcccaccttcttcacttccccaaaaatttcctacgtcgttcaaggaacgggtatcagcggaagagtggtccctggatgtgccgagaccttcatggactcgcagccgatgcaaggacaacaacaaggccaaccatggcaaggac

SEQ ID NO: 143200 - DNA, 409 bp, Arabidopsis thaliana
gcagcctccttcaacataaatcagtttaatttattttcttgaaatataacaatggttcaagaaataaaagtcaccaatccttactcaaggtgtgattgtaaaagtgagtataaagtggatgaagagagaagtagtaaatatccttttgtgggtgctctatgtatgaatggtggagatgtagacaacagttacaccaccaattctcttcttcagaaaagagttttatcaataaccaatccgatcttagttaaaaacacagaggaaatgttgacaaacttggactttcctaaatgcattaaggtagccgatttaggttgttcttcaggacaaaacacgtttttggccatgtctgagatcgtcaacacaatcaatgtattgtgtcaaaaatggaaccaaagccggccggaga

SEQ ID NO: 143201 - DNA, 412 bp, Arabidopsis thaliana
cggacgcgtgggctccaagccaccgaaactatcaagagtgaagccggtcagatcgagtactgggaccacaaccaccctcagctccgatgtgttggtgtttccgttgctcgttatgtaattgaacaaggcggtctttacttgcccaccttcttcacttccccaaaaatttcctacgtcgttcaaggaacgggtatcagcggaagagtggtccctggatgtgccgagaccttcatggactcgcagccgatgcaaggacaacaacaaggccaaccatggcaaggacgacagggacaacaaggccaaccatgggaaggacagggacaacagggacaacaaggaagacaaggccaaccatgggaaggacagggacaacagggacaacaaggacgacagggacaacaaggccaaccat

SEQ ID NO: 143202 - DNA, 406 bp, Arabidopsis thaliana
cggacgcgtgggatcactatcactctctctttctctctctatctctcaagaactgcacggacaacgacatgcttttaatttccatgcaaatctctcctttcttctcaagtcatttttgaaaatcaatcaaaaaactgaaacttggtggagcttttatcattcactcatcaatggtggctggtaaggttcgtgtaacaatgggttttcacaaatcaccttctactaaaaaaaccaaagacatgccttctcctttacctcttcctcctcctcctcctcctccacttaaaccaccttcttccggttccgctactactaaaccaccgattaatcctagtaaaccgggtttcactcgctctttcggtgtttatttcccacgcgcttccgctcaagttcacgccactgctgc

SEQ ID NO: 143203 - DNA, 358 bp, Arabidopsis thaliana
aaacaagaaaacatacacaaatagcaaaacatggctaacaagctcttcctcgtctgcgcaactctcgccctctgcttcctcctcaccaacgcttccatctaccgcaccgttgtcgaattcgaagaagatgacgccagcaaccccgtaggtccaagacagagatgccagaaggaggttcagcaatcacaacacctaaaagcttgccagagatggatgagcaagcaaatgaggcagggccgtgggggtggcccttccttcgccaataagtccgatttcagggcccccaaccaggataccaactactccagcagtgctgtaacgagcttcgccaggaagagccagtttgcgtttgccccac

SEQ ID NO: 143204 - DNA, 410 bp, Arabidopsis thaliana
catcaaccttctatcatcaccatggatccttacaattatcgtccttcgagcgcgtacaacgccccattctacaccacaaacggtggtgctccagtctccaacaacatctcttccctcaccatcggagaaagaggtccggttcttcttgaggattatcatttgatcgagaaggttgccaatttcaccagagagaggatccctgagagagtggttcatgccagaggaatcagtgctaagggtttctttgaagtcacccatgacatttcaaacctcacttgtgctgattttctcagagcccctggtgttcaaactccagttattgtccgtttttccactgttgtccacgaacgtgccagtcctgaaaccatgagggatattcgtggttttgctgtcaagttttacaccagaga

SEQ ID NO: 143205 - DNA, 404 bp, Arabidopsis thaliana
aagaaaaatgggtcgagtctcatctattatctctttctctttgacactcttgatcctcttcaatggctacactgcccaacagtggcccaacgagtgccagctcgatcaactcaatgcgctcgaaccatcccaaatcatcaagagcgagggtggtcgcatcgaggtctgggaccaccatgcaccccagctccgttgctccggctttgcctttgagcgtttcgtcattgagcctcagggtcttttcttgcccactttcttgaacgccggcaaactcacgtttgttgttcacggaaggggtctaatgggaagagttattccgggatgcgccgagacgttcatggagtcaccggtatttggagaaggtcaaggtcagggtcagagtcaagggttccgtgacatgcacc

SEQ ID NO: 143206 - DNA, 410 bp, Arabidopsis thaliana
agaaaacatacacaaatagcaaaacatggctaacaagctcttcctcgtctgcgcaactctcgccctctgcttcctcctcaccaacgcttccatctaccgcaccgttgtcgaattcgaagaagatgacgccagcaaccccgtaggtccaagacagagatgccagaaggagtttcagcaatcacaacacctaagagcttgccagagatggatgagcaagcaaatgaggcaaggacgtggtggtggtccttccctcgacgatgagttcgatttcgagggcccccagcagggataccagctactccagcagtgctgcaacgagcttcgccaggaagagccagtttgcgtttgccccaccttgaaacaagctgccagggcagttagcctccagggacagcacggaccattccaat

SEQ ID NO: 143207 - DNA, 410 bp, Arabidopsis thaliana
gaaacaaccagcagggaggctttggcggttcacagcaacaacaagaacagaaaaacttgtggagcgggttcgacgcacaggtcatagctcaagcattgaaaattgacgttcagttggctcagcagcttcagaaccaacaagacagcagaggaaacatcgttcgtgttaagggacctttccaggtcgtgaggccacctctaagacagccctacgagagcgaggagtggagacacccacgtagcccacagggcaacggccttgaggagactatctgcagcatgaggtcccacgagaacattgacgaccctgctcgtgctgacgtgtacaagcccagcctaggtcgcgtgaccagcgtcaacagctataccttgcccatcttggagtatgtcaggctcagtgccactcgtggc

SEQ ID NO: 143208 - DNA, 300 bp, Arabidopsis thaliana
  unsure (1)..(300): unsure at all n locations
tatttgtgttggagggatatattataataaaaagaaccaatggcggaccaaacaagaacccatcacgagatgataagccgagacagtacccaagaggcccatccgaaggccaggcagatggtgaaggcagcaaccgctgtcacagccggtggatccctccttgtcctctccggcttaacactcgctggaacagtcatggcactcacggaggctactgctctcctatgcngcnttttccccgttttggttccagcagnggtaaccgttgctctcatcattaccggatgccttgcatccggt

SEQ ID NO: 143209 - DNA, 409 bp, Arabidopsis thaliana
aagaaaatggttaagctcagcaatctcctcgttgctaccttcggggttctcctcgtccttaacggctgccttgcgaggcagtcacttggggttcctcctcagctacagaacgagtgtaacctcgacaacctagatgttctccaagccaccgaaactatcaagagtgaagccggtcagatcgagtactgggaccacaaccaccctcagctccgatgtgttggtgtttccgttgctcgttatgtaattgaacaaggcggtctttacttgcccaccttcttcacttccccaaaaatttcctacgtcgttcaaggaacgggtatcagcggaagagtggtccctggatgtgccgagaccttcatggactcgcagccgatgcaaggacaacaacaaggccaaccatggcaaggac

SEQ ID NO: 143210 - DNA, 409 bp, Arabidopsis thaliana
aacaaaaagaaaatggttaagctcagcaatctcctcgttgcaaccttcggggttctcctcgtccttaacggctgccttgcgaggcagtcacttggggttcctcctcagctacagaacgagtgtaacctcgacaacctagatgttctccaagccaccgaaactatcaagagtgaagccggtcagatcgagtactgggaccacaaccaccctcagctccgatgtgttggtgtttccgttgctcgttatgtaattgaacaaggcggtctttacttgcccaccttcttcacttccccaaaaatttcctacgtcgttcaaggaacgggtatcagcggaagagtggtccctggatgtgccgagaccttcatggactcgcagccgatgcaaggacaacaacaaggccaaccatggc

SEQ ID NO: 143211 - DNA, 414 bp, Arabidopsis thaliana
agctcaagcattgaaaattgacgttcagttggctcagcagcttcagaaccaacaagacagcagaggaaacatcgttcgtgttaagggacctttccaggtcgtgaggccacctctaagacagccctacgagagcgaggagtggagacacccacgtagcccacagggcaacggccttgaggagactatctgcagcatgaggtcccacgagaacattgacgaccctgctcgtgctgacgtgtacaagcccagcctaagtcgcgtgaccagcgtcaacagctataccttgccccatcttggagtatgtcaggctcagtgccactcgtggcgttctccagggtaatgcgatggtgctttctaaatacaacatgaacgctaacgagatcttgtactgcactggaggacaaggaaggatcc

SEQ ID NO: 143212 - DNA, 407 bp, Arabidopsis thaliana
agaaaacatacacaaatagcaaaacatggctaacaagctcttcctcgtctgcgcaactctcgccctctgcttcctcctcaccaacgcttccatctaccgcaccgttgtcgaattcgaagaagatgacgccagcaaccccgtaggtccaagacagagatgccagaaggagtttcagcaatcacaacacctaagagcttgccagagatggatgagcaagcaaatgaggcaaggacgtggtggtggtccttccctcgacgatgagttcgatttcgagggcccccagcagggataccagctactccagcagtgctgcaacgagcttcgccagaaagagccagtttgcgtttgccccaccttgaaacaagctgccagggcagttagcctccagggacagcacggaccattcc

SEQ ID NO: 143213 - DNA, 402 bp, Arabidopsis thaliana
cacaaacgagtaagaatacaaatacaaatagcaaataaaatggcaaacaagctcttcctcgtctgcgcaactttcgccctctgcttcctcctcaccaacgcttccatctaccgcactgttgtcgagttcgacgaagatgacgccagcaaccccatgggcccaagacagaaatgtcagaaggagtttcagcaatcacagcacctaagagcttgccagaaattgatgcgcatgcaaatgaggcaaggccgtggtggtggtccctccctcgacgatgagttcgatttggaagacgacatcgagaacccacaaggcccccagcagggacaccagatcctccagcagtgctgcagcgagcttcgccaggaagagccagtttgtgtttgccccaccttgagacaagct

SEQ ID NO: 143214 - DNA, 401 bp, Arabidopsis thaliana
ctcatcaaagtctaatatcacaaagaaagagtttttttaactagcttagctcaaagtgtttgcttaagacaagaagaacatggcgtcttaccagaaccgtccaggaggtcaggccactgacgagtacggaaacccgatccagcagcagtatgacgagtacggaaatccgatgggaggaggaggatacggaactggtggtggtggaggagctacaggtggccaaggatacggaacaggtggccaagggtacggatcaggtggccaagggtacggaaccggtggccaaggatacggaaccgggaccgggactgaaggctttggaactggcggaggagctaggcaccacggccaagagcaactccacaaggaaagtggtggtggcttgggaggaatgcttcacc

SEQ ID NO: 143215 - DNA, 406 bp, Arabidopsis thaliana
ccgaaacattccaagactcatcagagttccaaccacgcttcgaaggtcaaggtcaaagccagaggttccgtgacatgcaccagaaagtggagcacattaggagcggtgataccattgccacaacacccggtgtagcccagtggttctacaacgacggacagcaaccacttgtcatcgtcagcatcttcgatctagccagtcaccagaaccagcttgaccgcaacccaaggccattttacttagccggaaacaacccacaaggtcaagtatggctacaaggacgagagcaacagccacagaagaacatcttcaatggatttggacccgagggttgctcaagctttgaagattgatcttcagacagcgcagcaacttcagaaccaagatgacaaccgtggaaacattg

SEQ ID NO: 143216 - DNA, 405 bp, Arabidopsis thaliana
caataaagaggaagaaaaatgggtcgagtctcatctattatctctttctctttgacactcttgatcctcttcaatggctacactgcccaacagtggcccaacgagtgccagctcgatcaactcaatgcgctcgaaccatcccaaatcatcaagagcgagggtggtcgcatcgaggtctgggaccaccatgcaccccagctccgttgctccggctttgcctttgagcgtttcgtcattgagcctcagggtcttttcttgcccactttcttgaacgccggcaaactcacgtttgttgttcacggaaggggtctaatgggaagagttattccgggatgcgccgagacgttcatggagtcaccggtatttggagaaggtcaaggtcagggtcagagtcaagggttccgt

SEQ ID NO: 143217 - DNA, 407 bp, Arabidopsis thaliana
cggcaacggatatctcggctctcgcatcgatgaagaacgtagcgaaatgcgatacttggtgtgaattgcagaatcccgtgaaccatcgagtctttgaacgcaagttgcgccccaagccttctggccgagggcacgtctgcctgggtgtcacaaatcgtcgtccctcaccatcctttgctgatgcgggacggaagctggtctcccgtgtgttaccgcacgcggttggcctaaatccgagccaaggacgcctggagcgtaccgacatgcggtggtgaacttgatccattacattttatcggtcgctcttgtccggaagctgtagatgacccaaagtccatatagcgaccccaggtcaggcgggattacccgctgagtttaagcatatcaataagcggaggaaaagaaac

SEQ ID NO: 143218 - DNA, 414 bp, Arabidopsis thaliana
caaaaaatggcaaacaagttgttcctcgtctgcgcagctctcgctctctgcttcctcctcaccaacgcttccatctaccgcaccgtcgttgagttcgaagaagatgacgccactaaccccataggcccaaaaatgaggaaatgccgcaaggagtttcagaaagaacaacacctaagagcttgccagcaattgatgctccagcaagcaaggcaaggccgtagcgatgagtttgatttcgaagacgacatggagaacccacagggacaacagcaggaacaacagctattccagcagtgctgcaacgagcttcgccaggaagagccagattgtgtttgccccaccttgaaacaagctgccaaggccgttagactccagggacagcaccaaccaatgcaagtcaggaaaatttaccag

SEQ ID NO: 143219 - DNA, 414 bp, Arabidopsis thaliana; identical to SEQ ID NO: 130064

SEQ ID NO: 143220 - DNA, 398 bp, Arabidopsis thaliana
gagaacagccacttgtcatcatcgctcttctcgacatcgccaactaccaaaaccaactggaccgcaaccctagagtgttccatttggccggaaacaaccagcagggaggctttggcggttcacagcaacaacaagaacagaaaaacttgtggagcgggttcgacgcacaggtcatagctcaagcattgaaaattgacgttcagttggctcagcagcttcagaaccaacaagacagcagaggaaacatcgttcgtgttaagggacctttccaggtcgtgaggccacctctaagacagccctacgagagcgaggggtggagacacccacgtagcccacagggcaacggccttgaggagactatctgcagcatgaggtcccacgagaacattgacgaccct

SEQ ID NO: 143221 - DNA, 339 bp, Arabidopsis thaliana
gtttcattgaaaatttcaagaaccctagttaataacgataatgggttcgagagttttggcttccttctttgttttcttaatcttcacggtcatcacattgcctcccacgatccaagcttgcactccttgtactcgtcctcatcctccggttccgaaacctccacaacacggcggtggtggaggtggtggtagcaagccgcctccacatcacggtggaaaaggtggtggtaaacccccaccccacggtggaaaaggtggaggaccgccgcatcatggtggaggaggaggaggaggagggaaatcaccgccggtttgttgaccctctcccgtagtggtgag

SEQ ID NO: 143222 - DNA, 411 bp, Arabidopsis thaliana
tacacacatagcaaaaaatggcaaacaagttgttcctcgtctgcgcagctctcgctctctgctggctcctcaccaacgcttccatgtaccgcaccgtcgttgagttcgaagaagatgacgccactaaccccataggcccaaaaatgaggaaatgccgcaaggagtttcagaaagaacaacacctaagagcttgccagcaattgatgctccagcaagcaaggcaaggccgtagcgatgagtttgatttcgaagacgacatggagaacccacagggacaacagcaggaacaacagctattccagcagtgctgcaacgagcttcgccaggaagagccagattgtgtttgccccaccttgaaacaagctgccaaggccgttagactccagggacagcaccaaccaatgcaagtca

SEQ ID NO: 143223 - DNA, 411 bp, Arabidopsis thaliana
aatcaacctacaaaagttaaaagttacaccttactaaacacaaacaacttcataatggctttccacttccggcgactttgcttcttctcagctcttcttgccgtggttctccaactccttcatggcgtctctggccaactagttgtggttgaggaacctatttctgctcctccgcctccgctggtcgacctaaacaccggtgatggcattgtgccggcgctgtttgtcttcggtgactctctaatagacaatgggaataacaataacattccttcctttgccaaagccaattattttccttatggcattgatttcaatggcggtccgaccggtcgattctgcaatggcttaacgatggtcgatgggattgctcaactattgcggctgccactgattccggcctactcggat

SEQ ID NO: 143224 - DNA, 411 bp, Arabidopsis thaliana
cggacgcgtgggtttggccggaaacaaccagcagggaggctttggcggttcacagcaacaacaagaacagaaaaacttgtggagcgggttcgacgcacaggtcatagctcaagcattgaaaattgacgttcagttggctcagcagcttcagaaccaacaagacagcagaggaaacatcgttcgtgttaagggacctttccaggtcgtgaggccacctctaagacagccctaccagagcgaggagtggagacacccacgtagcccacaaggcaacggccttgaggagactatctgcagcatgaggtcccacgagaacattgacgaccctgctcgtgctgacgtgtacaagcccagcctaagtcgcgtgaccaggcgtaacagctataccttgcccatcttggagtatgtcag

SEQ ID NO: 143225 - DNA, 412 bp, Arabidopsis thaliana
gtttcattgaaaatttcaagaaccctagttaataacgataatgggttcgagagttttggcttccttctttgttttcttaatcttcacggtcatcacattgcctcccacgatccaagcttgcactccttgtactcgtcctcatcctccggttccgaaacctccacaacacggcggtggtggaggtggtggtagcaagccgcctccacatcacggtggaaaaggtggtggtaaacccccaccccacggtggcaaaggtggaggaccgccgcatcatggtggaggaggacgaggaggagggaaatcaccgccggttgctagacctactcccgtagtggtgaggccaccgacaatcatatgacctgcttcggccgtctatccaccaccaattgtgacgtctccgacaatcacatga

SEQ ID NO: 143226 - DNA, 408 bp, Arabidopsis thaliana
ctcacattttcgtagccgcaagactcctttcagattcttacttgcagctatgggtaaagagaagtttcacattaacattgtggtcattggtcatgttgattctggaaaatcgaccacaactggtcacttgatctataagcttggtggtattgacaagcgtgtcatcgagaggttcgagaaggaggctgctgagatgaacaagaggtccttcaagtacgcatgggtgttggacaaacttaaggccgagcgtgcgcgtggtattaccatcgatatcgctctatggaagttcgagaccaccaagtactactgcacaggcattgatgccccaagacatcttgatttcatcaagaacatgattactgggacctgccaggctgattgtgctgctcttatcattgactccaccac

SEQ ID NO: 143227 - DNA, 410 bp, Arabidopsis thaliana
cagagttatttattttgttaccgtgtaacagcgcttactagcttcctctagacatgtattcgaaaacaacgagcttttcgtcgcggctgaagtaatatgcaatcaatgtcacaagattggcatggcttatggatccaagaacctgcaatttctctctgaactctttctcaggaaccacgacatctctcaatcgtttcacagccaccactaatccgtgatcgaaactggccttgtacgaagatccgaacgttcctttaccaagtacttccgcagaagctttcagcaatccatcaagatcaaactcgccgaaagatttcacgaaaaatgtcagatctttactcactgcagcagggttctttgatacaccattttcagatgcaccattagccaccaccgcaggaggaccattc

SEQ ID NO: 143228 - DNA, 415 bp, Arabidopsis thaliana
aaagaaaatggttaagctcagcaatctcctcgttgcataccttcggggttctcctcgtccttaacggctgccttgcgaggcagtcacttggggttcctcctcagctacagaacgagtgtaacctcgacaacctagatgttctccaagccaccgaaactatcaagagtgaagccggtcagatcgagtactgggaccacaaccaccctcagctccgatgtgttggtgtttccgttgctcgttatgtaattgaacaaggcggtctttacttgcccaccttcttcacttccccaaaaatttcctacgtcgttcaaggaacgggtatcagcggaagagtggtccctggatgtgccgagaccttcatggactcgcagccgatgcaaggacaacaacaaggccaaccatggcaaggacgaca

SEQ ID NO: 143229 - DNA, 413 bp, Arabidopsis thaliana
caaaaagaaaatggttaagctcagcaatctcctcgttgcaaccttcggggttctcctcgtccttaacggctgccttgcgaggcagtcacttggggttcctcctcagctacagaacgagtgtaacctcgacaacctagatgttctccaagccaccgaaactatcaagagtgaagccggtcagatcgagtactgggaccacaaccaccctcagctccgatgtgttggtgtttccgttgctcgttatgtaattgaacaaggcggtctttacttgcccaccttcttcacttccccaaaaatttcctacgtcgttcaaggaacgggtatcagcggaagagtggtccctggatgtgccgagaccttcatggactcgcagccgatgcaaggacaacaacaaggccaaccatggcaaggac

SEQ ID NO: 143230 - DNA, 399 bp, Arabidopsis thaliana
ggctcaccagcttcagaaccaacaagacagcataggaaacatcgttcgtgttaagggacctttccaggtcgtgaggccacctctaagacagccctacgagagcgaggagtggagacacccacgtagcccacagggcaacggccttgaggagactatctgcagcatgaggtcccacgagaacattgacgaccctgctcgtgctgacgtgtacaagcccagcctaggtcgcgtgaccagcgtcaacagctataccttgcccatcttggagtatgtcaggctcagtgccactcgtggcgttctccagggtaatgcgatggtgcttcctaaatacaacatgaacgctaacgagatcttgtactgcactggaggacaaggaaggatccaagtggtcaacgacaa

SEQ ID NO: 143231 - DNA, 406 bp, Arabidopsis thaliana
cttatacaaacagatctttttgaaattggattcatctaagaagcagactctgttttcatggctgtttacaataccaaactctgtttggcctctgttttcttgctcttagggcttcttttggcttttgacttgaagggtatagaagcagaaagtcttaccaaacagaaactggactcgaagatacttcaggatgagattgtgaagaaagtcaacgaaaacccaaacgctggatggaaagctgctataaatgatcgattttcaaacgccactgttgcagagtttaagcgtcttctcggtgttaaaccaacaccaaagaagcatttcttaggtgttcctattgtgagccatgatccatctttgaagctacctaaagcttttgatgctagaactgcttggccacagtgca

SEQ ID NO: 143232 - DNA, 410 bp, Arabidopsis thaliana
tgctcgttatgtaattgaacaaggcggtctttacttgcccaccttcttcacttccccaaaaatttcctacgtcgttcaaggaacgggtatcagcggaagagtggtccctggatgtgccgagaccttcatggactcgcagccgatgcaaggacaacaacaaggccaaccatggcaaggacgacagggacaacaaggccaaccatgggaaggacagggacaacagggacaacaaggaagacaaggccaaccatgggaaggacagggacaacagggacaacaaggacgacagggacaacaaggccaaccatgggaaggacagggacagcagggacaacaagggttccgtgacatgcaccagaaggtggaacatgtgagacgcggagacgtctttgccaacactccaagctctg

SEQ ID NO: 143233 - DNA, 407 bp, Arabidopsis thaliana
atcgagtctaagggtctctacttgccctctttctttaacaccgcgaagctctctttcgtggctaagggacgaggtcttatgggaaaagtgatccctggatgcgccgaaacattccaagactcatcagagttccaaccacgcttcgaaggtcaaggtcaaagccagaggttccgtgacatgcaccagaaagtggagcacattaggagcggtgataccattgccacaacacccggtgtagcacagtggttctacaacgacggacaggaaccacttgtcatcgtcagcgtcttcgatctagccagtcaccagaaccagcttgaccgcaacccaaggccattttacttagccggaaacaacccacaaggtcaagtatggctacaaggccgagagcaacagccacagaagaa

SEQ ID NO: 143234 - DNA, 413 bp, Arabidopsis thaliana
cagaacgagtgtaacctcgacaacctagatgttctccaagccaccgaaactatcaagagtgaagccggtcagatcgagtactgggaccacaaccaccctcagctccgatgtgttggtgtttccgttgctcgttatgtaattgaacaaggcggtctttacttgcccaccttcttcacttccccaaaaatttcctacgtcgttcaaggaacgggtatcagcggaagagtggtccctggatgtgccgagaccttcatggactcgcagccgatgcaaggacaacaacaaggccaaccatggcaaggacgacagggacaacaaggccaaccatgggaaggacagggacaacagggacaacaaggaagacaaggccaaccatgggaaggacagggacaacagggacaacaaggacgaca

SEQ ID NO: 143235 - DNA, 392 bp, Arabidopsis thaliana
gcagcttcagaaccaacaagacagcagaggaaacatcgttcgtgttaagggacctttccaggtcgtgaggccacctctaagacagccctacgagagcgaggagtggagacacccacgtagcccacagggcaacggccttgaggagactatctgcagcatgaggtcccacgagaacattgacgaccctgctcgtgctgacgtgtacaagcccagcctaggtcgcgtgaccagcgtcaacagctataccttgcccatcttggagtatgtcaggctcagtgccactcgtggcgttctccagggtaatgcgatggtgcttcctaaatacaacatgaacgctaacgagatcttgtactgcactggaggacaaggaaggatccaagtggtcaacgaca

SEQ ID NO: 143236 - DNA, 308 bp, Arabidopsis thaliana
aatcggactacgtgaagcgtccggtttcgagtaaccggcctcggtttgatactcaagaaattggttgaggtggagaaagttgaaatgaattggaatccgtatggaggaagaatgggtgagatcccgagttcgaggacaccttttccacatagaggaggcaatttgttcaacattgaatatatcatagactggtcagaagctgtggatgttgtggataaggatcgtttcgttcgttcacacgttttgttcatatatatgacaccgtgtgagtctagttatccgttgttggcttttattaaattatttgt

SEQ ID NO: 143237 - DNA, 420 bp, Arabidopsis thaliana
gacctacgcctcacgcagtaaaaatgactcgagtctaatgtatatatgtttatctcagcaatcttctcgatgcagcctaaggggttctcctcgtacttaacggctgccttgcgaggcagtcacttggggttcctcctcagctacagaacgagtgtaacctcgacaacctagatgttctccaagccaccgaaactatcaagagtgaagccggtcagatcgagtactgggaccacaaccaccctcagctccgatgtgttggtgtttccgttgctcgttatgtaattgaacaaggcggtctttacttgcccaccttcttcactttcccaaaaatttcctacgtcgttcaaggaacgggtatcagcggaagagtggtccctggatgtgccgagacctttatggactcgcagccgatgcaaggac

SEQ ID NO: 143238 - DNA, 221 bp, Arabidopsis thaliana
caaaaagaaaatggttaagctcagcaatctcctttttgcaaccttcggggttctcctcgtccttaacggctgccttgcgaggcagtcacttggggttcctcctcagctacagaacgagtgtaacctcgacaacctagatgttctccaagccaccgaaactatcaagagtgaagccggtcagatcgagtactgtgaccacaaccaccctcagctccgatgtg

SEQ ID NO: 143239 - DNA, 348 bp, Arabidopsis thaliana
aaagaaaatggttaagctcagcaatctcctcgttgtaaccttcggggttctcctcgtccttaacggctgccttgcgaggcagtcacttggggttcctcctcagctacagaacgagtgtaacctcgacaacctagatgttctccaagccaccgaaactatcaagagtgaagccggtcagatcgagtactgggaccacaaccaccctcagctccgatgtgttggtgtttccgttgctcgttatgtaattgaacaaggcggtctttacttgcccaccttcttcacttccccaaaaattttctacgtcgttcaaggaacgggtttcatcggatgagtggtccctggatgtgc

SEQ ID NO: 143240 - DNA, 413 bp, Arabidopsis thaliana
cacgcagaaaaatgggccgagtctcatctattatctctttctctttgacactcttgatccgcttcaatggctacactgcccaacagtggcccaacgagtgccagctcgatcaactcaatgcgctcgaaccatcccaaatcatcaagagcgagggtggtcgcatcgaggtctgggaccaccatgcaccccagctccgttgctccggctttgcctttgagcgtttcgtcattgagcctcagggtcttttcttgcccactttcttgaacgccggcaaactcacgtttgttgttcacggaaggggtctaatgggaagagttattccgggatgcgccgagacgttcatggagtcaccggtatttggagaaggtcaaggtcagggtcagagtcaagggttccgtgacatgcaccagaat

SEQ ID NO: 143241 - DNA, 334 bp, Arabidopsis thaliana
agactcctttcatattcttacttgcagctatgggtaaagagaagtgtcacattaacattgtggtcattggtcatgttgattctggaaaatcgaccacaactggtcacttgatctataagcttggtggtattgacaagcgtgtcatcgagaggttcgagaaggaggctgctgagatgaacaagaggtccttcaagtacgcatgggtgttggacaaacttaaggccgagcgtgagcgtggtattaccatcgatattgctctatggaagttcgagaccaccaagtactactgcacagtcattgatgccccaggacatcgtgatttcatcaagaacat

SEQ ID NO: 143242 - DNA, 402 bp, Arabidopsis thaliana
aaccaacaagagagctaatgtttccagtagatgagaactgtactatgaagtcagtgattgagtatttccaagagatgtatggattcacgatccagcacacgcatttgccatgtctccaagttggaaaccaaaagaaggcaagctatttgccgatggaggcatgcaaaattgtcgagggacaacggtacacgaaaaggttgaatgagaagcagattactgctctcttgaaagttacatgccaaaggccgagggacagagaaaacgatattttgcggactgtccaacacaacgcatatgatcaagatccatatgcaaaggagtttggcatgaacataagcgaaaagttagcttctgttgaagctcgtattcttccagctccatggcttaagtatcacgagaacg

SEQ ID NO: 143243 - DNA, 440 bp, Arabidopsis thaliana
ccggaccggagggccgggctagacccacgcgtacgtaacgactcaaggaatgtaacagccaatagtattaagcacgccgggtttcaaattcaagaggacagagctacaattatgcacataaaagaaatggtcagaatcacagagatagtttttaaaacagcagatgctttcgatacagaaaagggaatttttattactgaaagtaaatagtggcaaaatgcagcagctaaagttatattaagtaatgctgcaaataggcaaaagatctcgaaagagactaaccgaatgcgttatattctcaagagaatcaacagtgcagtgggcataatcataactcggatagatacaccacttgtcaccagccttaggatgaggtgcgaactgcaaagcatattaacaagtcagacaggaaaagaagagagagagcctactttttatat

SEQ ID NO: 143244 - DNA, 399 bp, Arabidopsis thaliana
tccgtctctcagccctccgtggatctatccgtcaaaacgcaatggtgcttccacagtggaacgcaaacgcgaacgccattctttacgtgacagacggggaagcccaaatccagatcgtaaacgacaatggtaacagagtgtttgacggacaagtctctcaaggacagctcatagccgtaccacaaggtttctcggtggtgaaacgcgcaacaagcaaccgattccagtgggttgagttcaaaacaaacgcaaacgcgcaaatcaacactcttgcgggacgaaccttagtcttgagaggtttaccacttgaagttataaccaatgggttccaaatctcacctgaagaagcaaggagggtcaagttcaacacgctcgagaccactttgactcacagcagtg

SEQ ID NO: 143245 - DNA, 223 bp, Arabidopsis thaliana
acgctcgagaccactttgactcacagcagtggctcagctagctacggaaggccaagagtggctgcagcttaagagcttaaaaccgcggcttaacaatgaaccgctactgtaaaaggaagttaaatagtacgaagtaataataataatgtacgaacatgtgacaagttttgttgaggtttacctgtaaaatgccactccttttctgaataaatcttttttcgat

SEQ ID NO: 143246 - DNA, 398 bp, Arabidopsis thaliana
catctagtcactagatcataaaacgtttatttattttaagtatatgattatatacccgttggaacgcggtccgacctgcatagataaacaagacatgttagtttcatacaaggtagtacttagttaatcatatataagttatttcagctatcttaattattcatcatgtacaaattagcccgaacgtacgtaccttcttcgcctgcagaattactggatgaagaatccatagatggaaacaactaaacaagagatcagagatatccgtgaatacgaagcttgttttttttattttatttttattttttaatgttcttaatttcaaatatatagagagaaaaattattattcttgttctcttagggacgacgccttgtaattggtctgctcacaaagca

SEQ ID NO: 143247 - DNA, 403 bp, Arabidopsis thaliana
agaaaacatacacaaatagcaaaacatggctaacaagctcttcctcgtctgcgcaactctcgccctgtgcttcctcctcaccaacgcttccatctaccgcaccgttgtcgaattcgaagaagatgacgccagcaaccccgtaggtccaagacagagatgccagaaggagtttcagcaatcacaacacctaagagcttgccagagatggatgagcaagcaaatgaggcaaggacgtggtggtggtccttccctcgacgatgagttcgatttcgagggcccccagcagggataccagctactccagcagtgctgcaacgagcttcgccaggaagagccagtttgcgtttgccccaccttgaaacaagctgccagggcagttagcctccagggacagcacggacca

SEQ ID NO: 143248 - DNA, 387 bp, Arabidopsis thaliana
gaaaatggttaagctcagcaatctcctcgttgcatccttcggggttctcctcgtccttaacggctgccttgcgaggcagtcacttggggttcctcctcagctacagaacgagtgtaacctcgacaacctagatgttctccaagccaccgaaactatcaagagtgaagccggtcagatcgagtactgggaccacaaccaccctcagctccgatgtgttggtgtttccgttgctcgttatgtaattgaacaaggcggtctttacttgcccaccttcttcacttccccaaaaatttcctacgtcgttcaaggaacgggtatcatcggaagagtggtccctggattgtgccgagacctttatggactcgcagccgatgcaaggacatcaac

SEQ ID NO: 143249 - DNA, 402 bp, Arabidopsis thaliana
gcaacagccacagaagaacatcttcaatggatttggacccgaggttattgctcaagctttggagattgatcttcagacagcgcagcaacttcagaaccaagatgacaaccgtggaaacattgtccgagtccaaggcccgttcggtgtcattaggccgcctttgaggggccagagacttcaggaggaggaagaagaagaagaaggacgacacggacgacacggtaatggcttagaggagaccatctgcagcgccaggtgcaccgataacctcgatgatccgtctcgtgctgacgtgtacaagccacagctcggttacatcagcactctcaacagttacgatctccccatccttcgcttcatccgtctctcagccctccgtggatctatccgtcaaaacgcaat

SEQ ID NO: 143250 - DNA, 397 bp, Arabidopsis thaliana
caagaagaagaaagagaagaaggagaagaaagagtatggtgaagaaagcaaagacattcaatgtttttgaatctgaaccggatttcgagagcccctacggtagtactataacgattaacaggaaggatctgaaagttttaaaaggctcaatggttggagtttccatggtgaatctcactcaaggatcgatgatgggaccgcactggaatccatgggcttgcgagatttcaattgtgttgaaaggagcaggaatggttagggtacttaggtcttcgatatcatcaaactcatcatccgactgtaagaacgtgaggtttaaagtagaggaaggagatattttcgcagttccacggttacatccaatggctcaaatgtctttcaacaatgactcgctagt

SEQ ID NO: 143251 - DNA, 339 bp, Arabidopsis thaliana
ctccaggctctgcccactggatctacaactcatgtgaacagccacttgtcatcatcgctctggtcgacatcgccaactaccaaaaccaactcgaccgcaaccctagagtgttccatttggccggaaacaaccagcagggaggctttggcggttcacagcaacaacaagaacagaaaaacttgtggagcgggttcgacgcacaggtcatagctcaagcattgaaaattgacgttcagttggctcagcagcttcagaaccaacaagacagcagaggaaacatcgttcgtgttaagggacctttccaggtcgtgaggccacctctaagacagccctacgaga

SEQ ID NO: 143252 - DNA, 406 bp, Arabidopsis thaliana
tacttgcccaccttcttcacttccccaaaaattttctacgtcgttcaaggaacgggtatcagcggaagagtggtccctggatgtgccgagaccttcatggactcgcagccgatgcaaggacaacaacaaggccaaccatggcaaggacgacagggacaacaaggccaaccatgggaaggacagggacaacagggacaacaaggaagacaaggccaaccatgggaaggacagggacaacagggacaacaaggacgacagggacaacaaggccaaccatgggaaggacagggacagcagggacaacaagggttccgtgacatgcaccaaaaggtggaacatgtgagacgcggagacgtctttgccaacactccaagctcttcccactggatctacaactcaagagaac

SEQ ID NO: 143253 - DNA, 337 bp, Arabidopsis thaliana
gttaagctcagcaatctcctcgttgcaacctttttggttctcctcgtccttaacggctgcggtgcgaggcagtcacttggggttcctcctcagctacagaacgagtgtaacctcgacaacctagatgttctccaagccaccgaaactatcaagagtgaagccggtcagatcgagtactgggaccacaaccaccctcagctccgatgtgttggtgtttccgttgctcgttatgtaattgaacaaggcggtctttacttgcccaccttcttcactttcccaaaatttttctacgtcgttcaaggtacggttttcagcgtaagagtggtccttggatttt

SEQ ID NO: 143254 - DNA, 387 bp, Arabidopsis thaliana
aacgaagtcgaagattctctggtagatctatctttatttgattcgattcctcttttttcccagaaaagtcgctattgaaatcgaacgaaagtgttgaagattttaccagtcagaggtatatatatatatagagagagagttatggatttggatcaatggatttccaaggttaaagatggtcagcatctctccgaagacgagcttcagcttctctgcgaatacgtgaaagagattctgattgaggagtcaaacgtacagcctgtaaacagtccagtcaccgtatgtggtgatatccatggccagtttcatgatcttatgaagctttttcagaccggaggtcatgttcccgacaccaattacatttttatgggggacttcgtggataga

SEQ ID NO: 143255 - DNA, 398 bp, Arabidopsis thaliana
gggttttggcgttttgagttgataaaccattcttagttgtgaatcagggatacaagagagagaggaaagtggttttacggtgaccggagagatgaacggagaagggatctctgatggtttgtcggctgagaggaaagtggaaattagagtgaggaagaatgggagaaaggataaggttatagttgagaaatctgctgctcaaggtttacctgaaggatggatcaagaaacttgaaataacaaatagatcaggccgtaaaaccagaagagatccattcttcattgaccctaaaagtgagtatatctttcaatccttcaaagacgcatcacggtatgttgagactggcaatattggacattatgcacgtaaattgaaagaaagtgatatcgaagatgatg

SEQ ID NO: 143256 - DNA, 406 bp, Arabidopsis thaliana
cacaaacgagtaagaatacaaatacaaatagcaaaaaaaatggcaaacaagctcttcctcgtgtgcgcaactttcgccctctgcttcctcctcaccaacgcttccatctaccgcactgttgtcgagttcgacgaagatgacgccagcaaccccatgggcccaagacagaaatgtcagaaggagtttcagcaatcacagcacctaagagcttgccagaaattgatgcgcatgcaaatgaggcaaggccgtggtggtggtccctccctcgacgatgagttcgatttggaagacgacatcgagaacccacaaggcccccagcagggacaccagatcctccagcagtgctgcagcgagcttcgccaggaagagccagtttgtgtttgccccaccttgagacaagctgcca

SEQ ID NO: 143257 - DNA, 406 bp, Arabidopsis thaliana
aaagaccggtctgattacctgtggcataagacaagaataagcgtatctgaagatgatatctcgttctggaagaaaaatggacctaactcaacagtgtcgattgatagcatgagggatgtgttacgtgtgtttgttaacaaacaactcgcaggcagtattgttggtcactgggtgaaggcagtgcagcctgtacgatttatacagggaaacaatgatttacttctgttgactcaaacagttggtttacagaattatggtgctttcttggagaaggatggagccggttttagaggcaaagctaagcttactggattcaagaatggagatttagacctgtcaaaatcgtcatggacgtatcaggtgggattgaagggcgaggctgataaaatatatactgttgaacaca

SEQ ID NO: 143258 - DNA, 305 bp, Arabidopsis thaliana
tccttctttcttcttaaccactttggttcctttcccatggttccccggttcaccagggtaaggagggtcagcagtttccgaccaagggccagttcgaccagttaattgcgctcaagccttaaaacgtcctgaaaagcggggctggtccaatcgaggtgtgggacaaccaccttcttaagctccgttgttaaggggtctcctttgcacgttacataatcgagtctaagggtctcaacttgccctctttattcaacaccgcgaagctttctttcgtggctaaaggacgaggtcttatgggaaaagtg

SEQ ID NO: 143259 - DNA, 404 bp, Arabidopsis thaliana
acacacatagcaaaaaatggcaaacaagttgttcttcgtttgcgcagctctcgctctctgctggctgctcaccaacgcttccatctaccgcaccgtcgttgagttcgaagaagatgacgccactaaccccataggcccaaaaatgaggaaatgccgcaaggagtttcagaaagaacaacacctaagagcttgccagcaattgatgctccagcaagcaaggcaaggccgtagcgatgagtttgatttcgaagacgacatggagaacccacagggacaacagcaggaacaacagctattccagcagtgctgcaacgagcttcgccaggaagagccagattgtgtttgccccaccttgaaacaagctgccaaggccgttagactccagggacagcaccaaccaatgt

SEQ ID NO: 143260 - DNA, 402 bp, Arabidopsis thaliana
gtttgttgcttgccaagaggccaaaaagggcgtcctcattctcagtgaatttgcaggtgctgcacagtctctgggtgctggagctattcttgtgaatccttggaacatcacagaagttgctgcctccattggacaagccctaaacatgacagctgaagaaagagagaaaagacatcgccataattttcatcatgtcaaaactcacactgctcaagaatgggctgaaacttttgtcagtgaactaaatgacactgtaattgaggcgcaactacgaattagtaaagtcccaccagagcttccacagcatgatgcaattcaacggtattcaaagtccaacaacaggcttctaatcctgggtttcaatgcaacattgactgaaccagtggataatcaagggagaag

SEQ ID NO: 143261 - DNA, 401 bp, Arabidopsis thaliana
agaaaatggttaagctcagcaatctcctcgttgtataccttcggggttctcctcgtccttaacggctgccttgcgaggcagtcacttggggttcctcctcagctacagaacgagtgtaacctcgacaacctagatgttctccaagccaccgaaactatcaagagtgaagccggtcagatcgagtactgggaccacaaccaccctcagctccgatgtgttggtgtttccgttgctcgttatgtaattgaacaaggcggtctttacttgcccaccttcttcacttccccaaaaatttcctacgtcgttcaaggaacgggtatcagcggaagagtggtccctggatgtgccgagaccttcatggactcgcagccgatgcaaggacaacaacaaggccaaccatg

SEQ ID NO: 143262 - DNA, 405 bp, Arabidopsis thaliana
cttatcatcaaacgttacgttctcgttttctcaaattccaaacaataccaagaaacctctacttgaaaagagaagattatcgccgcgtgtgtgcctaagagcgatggcgtctgagaaacaaaaacaacatgcacaacctggcaaagaacatgtcatggaatcaagcccacaattctctagctcagattaccaaccttccaacaagcttcgtggtaaggtggcgttgataactggtggagactctgggattggtcgagccgtgggatactgttttgcatccgaaggagctactgtggctttcacttacgtgaagggtcaagaagaaaaagatgcacaagagaccctacaaatgttgaaggaggtcaaaacctcggactccaaggaacctatcgccattccaacgga

SEQ ID NO: 143263 - DNA, 404 bp, Arabidopsis thaliana
agaaaacatacacaaatagcaaaacatggctaacaagctcttcctcgtctgcgcaactctcgccctctgcttcctcctcaccaacgcttccatctaccgcaccgttgtcgaattcgaagaagatgacgccagcaaccccgtaggtccaagacagagatgccagaaggagtttcagcaatcacaacacctaagagcttgccagagatggatgagcaagcaaatgaggcaaggacgtggtggtggtccttccctcgacgatgagttcgatttcgagggcccccagcagggataccagctactccagcagtgctgcaacgagcttcgccaggaagagccagtttgcgtttgccccaccttgaaacaagctgccagggcagttagcctccagggacagcacggaccat

SEQ ID NO: 143264 - DNA, 399 bp, Arabidopsis thaliana
ggcaaagtttaaagaatccatcttaaatctttacttggaagccaagcaaacaagaaacaaagcatggcatcaggacaacgggaggcagagaggtccgccaaggccgagagagctgaggctgcagcgagtctagcggctgaagatttgaaagatatcaacaaaggtgatgtgacgtacaaattaacggagaggacaacgacgaccgagcctgagaggcctggcctgataggctcggtgatgaaggcggtgcaaggaactaaagacgcagtcatcggtaaaagtcatgatacggctgagtcaacgagggagggagccgatattgcatcggagaaggcagcggggatgagagacaccaccggagaggttagagacagtactgcgcagaagactaaagaaact

SEQ ID NO: 143265 - DNA, 403 bp, Arabidopsis thaliana
ctcgagtctcttctcttctttctttcttcttaacacttttgatccttttccatggctacgcggctcaacagggtcagcagggtcagcagtttccgaacgagtgccagctcgaccagctcaatgcgctcgagccgtcacacgtactgaagagcgaggctggtcgcatcgaggtgtgggaccaccacgctcctcagctccgttgctcaggtgtctcctttgcacgttacatcatcgagtctaagggtctctacttgccctctttctttaacaccgcgaagctctctttcgtggctaagggacgaggtcttatgggaaaagtgatccctggatgcgccgaaacattccaagactcatcagagttccaaccacgcttcgaaggtcaaggtcaaagccagaggttccg

SEQ ID NO: 143266 - DNA, 397 bp, Arabidopsis thaliana
aaacaaaaagaaaatggttaagctcagcaatctcctcgttgcaaccttcggggttctcctcgtccttaacggctgccttgcgaggcagtcacttggggttcctcctcagctacagaacgagtgtaacctcgacaacctagatgttctccaagccaccgaaactatcaagagtgaagccggtcagatcgagtactgggaccacaaccaccctcagctccgatgtgttggtgtttccgttgctcgttatgtaattgaacaaggcggtctttacttgcccaccttcttcacttccccaaaaatttcctacgtcgttcaaggaacgggtatcagcggaagagtggtccctggatgtgccgagaccttcatggactcgcagccgatgcaaggacaacaacaa

SEQ ID NO: 143267 - DNA, 397 bp, Arabidopsis thaliana
  unsure (1)..(397): unsure at all n locations
ctcatctattatctctttctctttgacactcttgatcctcttcaatggctacactgcccaacagtggcccaacgagtgccagctcgatcaactcaatgcgctcgaaccatcccaaatcatcaagagcgagggtggtcgcatcgaggtctgggaccaccatgcaccccagctccgttgctccggctttgcctttgagcgtttcgtcattgagcctcagggtcttttcttgcccactttcttgaacgccggcaaactcacgtttgttgttcacggaaggggtctaatgggaagagttattccgggatgcgccgagacgttcatggagtcaccggtatttggagaaggtcaaggtcagggtcagagtcaagggtttcgtgacatgcanccagaagtagag

SEQ ID NO: 143268 - DNA, 397 bp, Arabidopsis thaliana
caaaaagaaaatggttaagctcagcaatctcctttttgttaccttcggggttctcctcgtccttaacggctgccttgcgaggcagtcacttggggttcctcctcagctacagaacgagtgtaacctcgacaacctagatgttctccaagccaccgaaactatcaagagtgaagccggtcagatcgagtactgggaccacaaccaccctcagctccgatgtgttggtgtttccgttgctcgttatgtaattgaacaaggcggtctttacttgcccaccttcttcacttccccaaaaatttcctacgtcgttcaaggaacgggtatcagcggaagagtggtccctggatgtgccgagaccttcatggactcgcagccgatgcaaggacaacaacaaggc

SEQ ID NO: 143269 - DNA, 398 bp, Arabidopsis thaliana
cactttagtaccatttccaatatcaaaatttcttttttattgagaagaatttctgcagcaaatttgatctcaaatcgaaatctttcaaccatttcttctactgaagatcccgagctcagagattttgtgggatttttagaatctctcaaaaactatgagaaatcaggtgtaccaaaaggagctggaactgattctgatgatggattcgatctgggtcgaatgaaacgtctcatgcttcgcctccgtaatcctcattacaaatacaaggttgttcatgttgctggaactaagggaaaaggatcaacttctgcttttctctctaatatcttacgagctggaggatattctgttggttgttattctagcccacatattctgagtatcaaagaacgtatttc

SEQ ID NO: 143270 - DNA, 287 bp, Arabidopsis thaliana
aagaggaagaaaaatgggtcgagtctcatctattatctctttctctttgacactcttgatcctcttcaatggctacactgcccaacagtggcccaacgagtgccagctcgatcaactcaatgcgctcgaaccatcccaaatcatcaagagcgagggtggtcgcatcgaggtctgggaccaccatgcaccccagctccgttgctccggctttgcctttgagcgtttcgtcattgagcctcaggggtctttcttgcccactttcttgaacgccggcaaaactaacgttt

SEQ ID NO: 143271 - DNA, 279 bp, Arabidopsis thaliana
aaaaacatacacaagtaattaactaacaacaaatggcgaacaagctcttcctcgtctgcgcagctctcgccctgtgtttcatcctcaccaacgcttccgtctatcgcacggttgtcgagttcgacgaagatgacgccagtaaccccataggcccaatacagaaatgtcagaaggagtttcagcaagaacagcacctaagagcttgccagagatggatgcgcaagcaaatgtggcaaggacgtggtggttggccttcccttgactattgagttcgatatg

SEQ ID NO: 143272 - DNA, 402 bp, Arabidopsis thaliana
gataaaaatggctcgagtctcttctcttctttctttctccttaacacttttgatccttttgcatggctacgcggctcaacagggtcagcagggtcagcagtttccgaacgagtgccagctcgaccagctcaatgcgctcgagccttcacacgtactgaagagcgaggctggtcgcatcgaggtgtgggaccaccacgctcctcagctccgttgctcaggtgtctcctttgcacgttacatcatcgagtctaagggtctctacttgccctctttctttaacaccgcgaagctctccttcgtggctaaaggacgaggtcttatgggaaaagtgatccctggatgcgccgaaacattccaagactcatcagagttccaaccacgcttcgaaggtcaaggtcaaag

SEQ ID NO: 143273 - DNA, 399 bp, Arabidopsis thaliana
gtatccaccaccgatcaagacttaccctcatccgtcggttaagtatcctccaccagaacagtatccaccgccgattaagaagtatcctccaccagaacagtatccaccgccgattaagaagtatcctccaccagaacagtattcaccgcctttcaagaagtatcctccgccagaacagtatccaccaccgatcaagaagtatcctccgccagaacattatccaccgccgataaaaaagtatccttcgcaagaacagtatccaccaccgattaaaaagtatcctccgccagaaaagtatccacccccgatcaagaagtattcttcgccagaacagaattcaccgtcgatcaagaagtattctccgccaaataagaagtattcttcgccagaagagttttc

SEQ ID NO: 143274 - DNA, 395 bp, Arabidopsis thaliana
gttctccaagccaccgaaactatcaagagtgaagtcggtcagatcgagtactgggaccacaaccaccctcagctccgatgtgttggtgtttccgttgctcgttatgtaattgaacaaggcggtctttacttgcccaccttcttcactttcccaaaaatttcctacgtcgttcaaggaacggttatcagcggaagagtggttcctggatgtgccgagaccttcatggactcgcagccgatgcaaggacaacaacatggccaaccatggcaaggacgacagggacaacaaggtcaaccatgggaaggacagggacaacagggacaacaaggaagacaaggccaactctgggaaggacaggtacaactgggacatcaaggactacagggacaacaagg

SEQ ID NO: 143275 - DNA, 395 bp, Arabidopsis thaliana
aagaaataacaaaatggctcgagtctcttctcttttttctttcttcttaacacttttgatccttttccatggctacgcggctcaacagggtcagcagggtcagcagtttccgaacgagtgccagctcgaccagctcaatgcgctcgagccgtcacacgtactgaagagcgaggctggtcgcatcgaggtgtgggaccaccacgctcctcagctccgttgctcaggtgtctcctttgcacgttacatcatcgagtctaagggtctctacttgccctctttctttaacaccgtgaagctctctttcgtggctaagggacgaggtcttatgggaaaagtgatccctggatgcgccgaaacattccaagactcatcagagttccaaccacgcttcgaag

SEQ ID NO: 143276 - DNA, 401 bp, Arabidopsis thaliana
aacaaaaagaaaatggttaagctcagcaatctcctcgttgcaaccttcggggttctcctcgtccttaacggctgccttgcgaggcagtcacttggggttcctcctcagctacagaacgagtgtaacctcgacaacctagatgttctccaagccaccgaaactatcaagagtgaagccggtcagatcgagtactgggaccacaaccaccctcagctccgatgtgttggtgtttccgttgctcgttatgtaattgaacaaggcggtctttacttgcccaccttcttcactttcccaaaaatttcctacgtcgttcaaggaacgggtattagcggaagagtggtccctggatgtgccgagaccttcatggactcgtagccgatgcatggacaacatcatggcct

SEQ ID NO: 143277 - DNA, 398 bp, Arabidopsis thaliana
cccaaatatgcataagcttttgttttctcttctttccgtcgtctcactctcatttctcctcttcttccatggcgccgaggcacgccagcgagaggcgccgtttccaaacgcctgccatttcagccaaatcaacagcctcgcgcccgctcaggcgacgaagttcgaagccggtcagatggaagtatgggaccacatgagccctgagctccgatgcgccggtgtaacggtggctcgcatcacccttcagcccaattccattttcttgcccgctttctttagcccacctgcccttgcttacgttgtccaaggagaaggagttatggggacgattgcttctggttgtcctgagacttttgcagaagttgaaggatcatcatgaagaggaggaggaggagacc

SEQ ID NO: 143278 - DNA, 328 bp, Arabidopsis thaliana
ggaagaaaaatgggtcgagtctcatctattatctttttttttttgacactcttgatcctcttcaatggctacactgcccaacagtggcccaacgagtgccagctcgatcaactcaatgcgctcgaaccatcccaaatcatcaagagcgagggtggtcgcatcgaggtctgggaccaccatgcaccccagctccgttgctccggctttgcctttgagcgtttcgtcattgagcctcagggtcttttcttgcccactttcttgaacgccggcaaactcacgtttgttgttcacggaaggggtctaatgggaagagttattccgggatgcg

SEQ ID NO: 143279 - DNA, 374 bp, Arabidopsis thaliana
aaaaccttgaaacctttaaaaaatcgaaactattgtctattctcattctcgttttcgcaactcttgccctcttcatcctcctagccaacgcatccatctaccgcacagtggtggagttcgaggaagatgatgacgtgagcaacccacaacaaggtaagtgccagagggagtttatgaagcatcagcaactaagaggttgcaagcaatggatccgcaagagagctcaacaaggaagaatcggatacgaagctgatgactttgagctcactcttgatgtcgatcttgaggacgatgagaacccaatggggccttaacaacagtcatcttttaaaatgtgttgtaatgaattaaggcaagtggacaagatgtgtgtt

SEQ ID NO: 143280 - DNA, 310 bp, Arabidopsis thaliana
caaacaaaaaaaaaagataagctcagcaatcttctttttgcaaccttcggggaccaactcgagcgtaacggatgcctagcgaggtagacactatgagcagcgccagaagttcacgaacgagtgccagctcgaccagctaaatgcgctcgagccgacacacatactgaagagcgaagctggtcgcatcgaagagtgggaccacaacgccccttaactacggtgcttaagtgtcttctttgcacgttacatcatcgagtctaaaggtctctacttgccctctttctttaacactcgtaaattctcttttttt

SEQ ID NO: 143281 - DNA, 407 bp, Arabidopsis thaliana
gagcgaggtgtgagtgtcgcccatgggcatcgactaccttgcggctaggaactggaacgagacgggtagcaaagatttcgagtagcacttcatactaccgtgggttttttaaaccttcccctagttttgttgatgttattccgagaattagcaaaccgtaacgaagatgttcttggcaaccatcttttgatgggagtccggctgttctaaagccggccaagggtgatgaacgaaatgtgaacccttgtctcgcctaggttggatggtcgtgcttcgttggaaagcatggatccgtctaggttgttcctaatgtattttttcgcttgtactgttttgttcttgtatttttttcgtcttttttttttctttgctcttttcttcttgtttgtttttttttttctttttgt

SEQ ID NO: 143282 - DNA, 387 bp, Arabidopsis thaliana
aaacatacacacatagcaaaaaatggcaatcaagttgttcctcgtctgcgcagctctcgctctctgcttcctcctcaccaacgcttccatctaccgcaccgtcgttgagttcgaagaagatgacgccactaaccccataggcccaaaaatgaggaaatgccgcaaggagtttcagaaagaacaacacctaagagcttgccagcaattgatgctccagcaagcaaggcaaggccgtagcgatgagtttgatttcgaagacgacatggagaacccacagggacaacagcaggaacaacagctattccagcagtgctgcaacgagcttcgccaggaagagccagattgtgtttgccccaccttgaaacaagctgccaaggccgttagact

SEQ ID NO: 143283 - DNA, 398 bp, Arabidopsis thaliana
agaaataacaaaatggctcgagtctcttctcttctttctttcttcttaacacttttgatccttttccatggctacgcggctcaacagggtcagcagggtcagcagtttccgaacgagtgccagctcgaccagctcaatgcgctcgagccgtcacacgtactgaagagcgaggctggtcgcatcgaggtgtgggaccaccacgctcctcagctccgttgctcaggtgtctcctttgcacgttacatcatcgagtctaagggtctctacttgccctctttctttaacaccgctaagctctctttcgtggctaaggtacgaggtcttatgggaaaagtgatccctggatgcgccgtaacattccatagactcattagagtttcaaccactcttcttaggtc

SEQ ID NO: 143284 - DNA, 403 bp, Arabidopsis thaliana
gttgagtggagtgccaacatgttggatgaagaagccaaaaagaaattgaaagctacagaacttcaatgcaagaaaaaccgggtgaaaatgtgggcaaactacgtccctccagctagcaactccaaggcaattcatgaccagaattttaccggaaaggtagtggaagttgtgagcggggactgcttagtagttgctgatgattctatcccattcgggagcccaatggcggagcgcagagtttgtctttccagtatcaggtctcctaaaatgggtaacccacgcagagaggagaaacctgccccttatgcgcgcgaagccaaggagtttctgagacaaaagcttatcggaatggaggttattgttcaaatggaatactcaaggaagattagcccaggagatggtg

SEQ ID NO: 143285 - DNA, 401 bp, Arabidopsis thaliana
cttgttactatcctaacttcagagcctgcagaagataaacatgaaaacaaaactacttaaaaaaaactctttaaaataattttaaattgtccttctcttttagaaaactaattaataaaattatatagaaatataacataagcaggagcgtgatcctcgacgatagacattgataatacctcatctctgtaaatataaaactatggaagaaaaacaattaagagaattgatatagattcatgcttaccttgattgatcacatgaactaacatagattctttaaactatgtaaacgcgtgatattggcacgggtcaatcaaataaaccggtctttaaaacaaaagagtacggttttctgattgaaccgcaccaatatctcgtatttgatgtccgatagtgcg

SEQ ID NO: 143286 - DNA, 321 bp, Arabidopsis thaliana
caacaaacaaaaagaaaatggttaagctcagcaatctcttcgttgcaaccttcggggttctcctcgtccttaacggctgccttgcgaggcagtcacttggggttcctcctcagctacagaacgagtgtaacctcgacaacctagatgttctccaagccaccgaaactatcaagagtgaagccggtcagatcgagtactgggaccacaaccaccctcagctccgatgtgttggtgtttccgttgctcgttatgtaattgaacaaggcggtctttacttgcccacctttttcactttctcaataatttcctacgtttttcaag

SEQ ID NO: 143287 - DNA, 403 bp, Arabidopsis thaliana
ttcgacatcgccaactaccaaaaccaactcgaccgcattcttagagtgttccatttggccggaaacaaccagcagggaggctttggcggttcacagcaacaacaagaacagaaaaacttgtggagcgggttcgacgcacaggtcatagctcaagcattgaaaattgacgttcagttggctcagcagcttcagaaccaacaagacagcagaggaaacatcgttcgtgttaagggacctttccaggtcgtgaggccacctctaagacagccctacgagagcgaggagtggagacacccacgtagcccacagggcaacggccttgaggagactatctgcagcatgaggtcccacgagaacattgacgaccctgctcgtgctgacgtgtacaagcccagcctaggtc

SEQ ID NO: 143288 - DNA, 365 bp, Arabidopsis thaliana
ccagaaggtggaacatgtgagacgcggagacgtctttttcaacactccaggctctgcccactggatctacaactcaggagaacagccacttgtcatcatcgctcttctcgacatcgccaactaccaaaaccaactcgaccgcaaccctagagtgttccatttggccggaaacaaccagcagggaggctttggcggttcacagcaacaacaagaacagaaaaacttgtggagcgggttcgacgcacaggtcatagctcaagcattgaaaattgacgttcagttggctcagcagcttctgaaccaacaagacagctgaggaaacatcgttctgggtaagggacctttccaggtcgtgtggccacttt

SEQ ID NO: 143289 - DNA, 398 bp, Arabidopsis thaliana
caaaaagaaaatggttaagctcagcaatctcctctttgcaaccttcggggttctcctcgtccttaacggctgccttgcgaggcagtcacttggggttcctcctcagctacagaacgagtgtaacctcgacaacctagatgttctccaagccaccgaaactatcaagagtgaagccggtcagatcgagtactgggaccacaaccaccctcagctccgatgtgttggtgtttccgttgctcgttatgtaattgaacaaggcggtctttacttgcccaccttcttcacttccccaaaaatttcctacgtcgttcaaggaacgggtatcagcggaagagtggtccctggatgtgccgagaccttcatggactcgcagccgatgcaaggacaacaacaaggcc

SEQ ID NO: 143290 - DNA, 403 bp, Arabidopsis thaliana
acatagcaaaaaatggcaaacaagttgttcctcgtctgcgcagctctcgctctctgcttcctcctcaccaacgcttccatctaccgcaccgtcgttgagttcgaagaagatgacgccactaaccccataggcccaaaaatgaggaaatgccgcaaggagtttcagaaagaacaacacctaagagcttgccagcaattgatgctccagcaagcaaggcaaggccgtagcgatgagtttgatttcgaagacgacatggagaacccacagggacaacagcaggaacaacagctattccagcagtgctgcaacgagcttcgccaggaagagccagattgtgtttgccccaccttgaaacaagctgccaaggccgttagacttcagggacagcaccaaccaatgcaag

SEQ ID NO: 143291 - DNA, 348 bp, Arabidopsis thaliana
cacaaggcttttcggtcatgaaacatgccatatgttaacagttcgagtggatcgaattcaagacaaacgaaaacgcacaggtcaacacactcgcgggccgtacctcagtcatgagaggtttgccgcttgaggttataaccaatgggtaccagatctctcccgaagaagctaaacgagtaaagtttagcacgattgagaccacactgacccatagcagtccaatgagctacggaaggcctagggcttgaggcttgatgagcgcgtggtggaatagcgtttgaatctaaagttcggtttggtacgacttgtaatatgaaataataatgtacaaagaagttctacgcttag

SEQ ID NO: 143292 - DNA, 403 bp, Arabidopsis thaliana
caaaaagaaaatggttaagctcagcaatctcctcgttgcaaccttcggggttctcctcgtccttaacggctgccttgcgaggcagtcacttggggttcctcctcagctacagaacgagtgtaacctcgacaacctagatgttctccaagccaccgaaactatcaagagtgaagccggtcagatcgagtactgggaccacaaccaccctcagctccgatgtgttggtgtttccgttgctcgttatgtaattgaacaaggcggtctttacttgcccaccttcttcacttccccaaaaatttcctacgtcgttcaaggaacgggtatcagcggaagagtggtccctggatgtgccgagaccttcatggactcgcagccgatgcaaggacaacaacaaggccaacca

SEQ ID NO: 143293 - DNA, 396 bp, Arabidopsis thaliana
gacagggacagcagggacaacaagggttccgtgacatgcaccagaaggtggaacatgtgagacgcggagacgtctttgccaacactccaggctctgcccactggatctacaactcaggagaacagccacttgtcatcatcgctcttctcgacatcgccaactaccaaaaccaactcgaccgcaaccctagagtgttccatttggccggaaacaaccagcagggaggctttggcggttcacagcaacaacaagaacagaaaaacttgtggagcgggttcgacgcacaggtcatagctcaagcattgaaaattgacgttcagttggctcagcagcttcagaaccaacaagacagcagaggaaacatcgttcgtgttaagggacctttccaggtcgtga

SEQ ID NO: 143294 - DNA, 401 bp, Arabidopsis thaliana
caaaaagggagaaaaagaagaccacccaactacaaagtctacaatatctgaaatttccaagaaaaaatctaatattaccgaaaaacaaaagaaagatttacaaaacctaaatctattgactaatcaagaagaaaaagtcaataagaatattgaactctgtgatctcggtctctaagaatcccattgtacagagccatccggttcgctggcatggtagagattctacacatagaaccggtctttcccggtttagtcactggcttcggtacgcttttccggttcaattccctcctccggtactcttccccgttacctttcgtatctttcacattatccgcgaaccgcactttctttatcttcttcccctgtttcttcgtttcctctgcatcccaagaaaacct

SEQ ID NO: 143295 - DNA, 402 bp, Arabidopsis thaliana
atttttgatagccggaaacaacccacaagggcaggaatggctacaaggccgaaagcaacagaagcaaaacaacatcttcaatggcttcgcacctgagatcttggctcaagccttcaagatcaatgtcgagacggctcagcagctccagaaccagcaagataaccgtggcaacatcgtcaaggtcaacggacctttcggcgtcattaggccacccttgagacgcggcgaaggcggccaacaaccacatgaaatagctaatggtttagaggagactttgtgcaccatgcgatgcactgaaaacctcgatgacccgtcggatgctgacgtgtacaagccatcactcggatacattagcacacttaacagctacaatcttcctatcctcagacttctccgccttag

SEQ ID NO: 143296 - DNA, 392 bp, Arabidopsis thaliana
atcgccaactaccaaaaccaactcgaccgcaaccttagtagtgttccatttggccggaaacaaccagcagggaggctttggcggttcacagcaacaacaagaacagaaaaacttgtggagcgggttcgacgcacaggtcatagctcaagcattgaaaattgacgttcagttggctcagcagcttcagaaccaacaagacagcagaggaaacatcgttcgtgttaagggaccttttcaggtcgtgaggccacctctaagacagccctacgagagcgaggagtggagacacccacgtagcccacagggcaacggccttgatgagactatctgcagcatgaggttccacgagaacattgacgaccctgctcgtgctgtcgtttacaatctcattc

SEQ ID NO: 143297 - DNA, 335 bp, Arabidopsis thaliana
gaaaatggttaagctcagcaatctcctcgttgcaaccttttgggttctcctagaccttaacggctgccttgcgatggtagatacttggggttcctccttagctacaaaacgagtgtaacctagacaacctagaagtacttcattccaccgaaactgttactagtccagaggcattgataataccccatctcttcaaatacaaaactatttaaataaacaatttatagaattgaattagattcatgctttacctctgattgactacatcaacttaacatagattctttaaactttttaaactcctcgatattggcacgggctcaattaaaattaac

SEQ ID NO: 143298 - DNA, 390 bp, Arabidopsis thaliana
cggacgcgtgggttagatcgaagcaaaaatgtccacagcgccgtctccaggcactactccatcaccatctccaccgtctcctcccacaaactcgacaaccaccactcctcctccagcagcctcttctcctcctcccaccacaactccttcttctcctcctccgtcgccgtcaactaattcaacctctcctcctccttcttctcctttacctgcttctcttcctcctccatctcctcctggatctttaactcctcctctcacacaaactttcccctccgctcccatcactactttttcaccgaagcctaccacaccctcaaacccttgaagccctccatcttctaaccaaggaccaccaaacactccctcaggatctactgcgagaactcc

SEQ ID NO: 143299 - DNA, 404 bp, Arabidopsis thaliana
ccaaagaaaatgggtaagctcagcaatctcctcgttgcaaccttcggggttctcctcgtccttaacggctgccttgcgaggcagtcacttggggttcctcctcagctacagaacgagtgtaacctcgacaacctagatgttctccaagccaccgaaactatcaagagtgaagccggtcagatcgagtactgggaccacaaccaccctcagctccgatgtgttggtgtttccgttgctcgttatgtaattgaacaaggcggtctttacttgcccaccttcttcacttccccaaaaatttcctacgtcgttcaaggaacgggtatcagcggaagagtggtccctggatgtgccgagaccttcatggactcgcagccgatgcaaggacaacaacaaggccaaccatg

SEQ ID NO: 143300 - DNA, 398 bp, Arabidopsis thaliana
ctcctcgttgcaaccttcggggttctcctcgtccttaacggctgccttgcgaggcagtcacttggggttcctcctcagctacagaacgagtgtaacctcgacaacctagatgttctccaagccaccgaaactatcaagagtgaagccggtcagatcgagtactgggaccacaaccaccctcagctccgatgtgttggtgtttccgttgctcgttatgtaattgaacaaggcggtctttacttgcccaccttcttcacttccccaaaaatttcctacgtcgttcaaggaacgggtatcagcggaagagtggtccctggatgtgccgagaccttcatggactcgcagtcgatgcaaggacaacaacaaggccaaccatggcaaggacgacagggacaaca

SEQ ID NO: 143301 - DNA, 400 bp, Arabidopsis thaliana
gataaaaatggctcgagtctcttctcttctttctttctccttaacacttttgatccttttccatggctacgcggctcaacagggtcagcagggtcagcagtttccgaacgagtgccagctcgaccagctcaatgcgctcgagccttcacacgtactgaagagcgaggctggtcgcatcgaggtgtgggaccaccacgctcctcagctccgttgctcaggtgtctcctttgcacgttacatcatcgagtctaagggtctctacttgccctctttctttaacaccgcgaagctctccttcgtggctaaaggacgaggtcttatgggaaaagtgatccctggatgcgccgaaacattccaagactcatcagagttccaaccacgcttcgaaggtcaaggtcaa

SEQ ID NO: 143302 - DNA, 397 bp, Arabidopsis thaliana
ataagaaataacaaaatggctcgagtctcttctcttctttctttcttcttaacacttttgatccttttccatggctacgcggctcaacagggtcagcagggtcagcagtttccgaacgagtgccagctcgaccagctcaatgcgctcgagccgtcacacgtactgaagagcgaggctggtcgcatcgaggtgtgggaccgccacgctcctcagctccgttgctcaggtgtctcctttgcacgttacatcatcgagtctaagggtctctacttgccctctttctttaacaccgcgaagctctctttcgtggctaagggacgaggtcttatgggaaaagtgatccctggatgcgccgaaacattccaagactcatcagagttccaaccacgcttcgaag

SEQ ID NO: 143303 - DNA, 386 bp, Arabidopsis thaliana
gtttcattgaaaatttcaagaaccctagttaataacgataatgggttcgagagttttggcttccttctttgttttcttaatcttcacggtcatcacattgcctcccacgatccaagcttgcactccttgtactcgtcctcatcctccggttccgaaacctccacaacacggcggtggtggaggtggtggtagcaagccgcctccacatcacggtggaaaaggtggtggtaaacccccaccccacggtggaaaaggtggaggaccgccgcatcatggtggaggaggaggaggaggagggaaatcaccgccggctgttagaccttcttccgtagtggtgaggccaccgccaatcattagacctccctcggccgtctattcaccaccaa

SEQ ID NO: 143304 - DNA, 399 bp, Arabidopsis thaliana
aagaaaatggttaagctcagcaatctcctcgttgcaaccttcggggttctcctcgtccttaacggctgccttgcgaggcagtcacttggggttcctcctcagctacagaacgagtgtaacctcgacaacctagatgttctccaagccaccgaaactatcaagagtgaagccggtcagatcgagtactgggatcacaaccaccctcagctccgatgtgttggtgtttccgttgctcgttatgtaattgaacaaggcggtctttacttgcccaccttcttcacttccccaaaaatttcctacgtcgttcaaggaacgggtatcagcggaagagtggtccctggatgtgccgagaccttcatggactcgcagccgatgcaaggacaacaacaaggccaacca

SEQ ID NO: 143305 - DNA, 342 bp, Arabidopsis thaliana
ccgatcaagacttaccctcatccgtcggtgcagtatcctccaccagaacagtgtccaccgccgattaagaagtatcctccaccagaacagtatccaccgccgattaagaagtatcctccaccagaacagtattcaccgcctttcaagaagtatcctccgccagaacagtatccaccaccgatcaagaagtattctccgccagaacattatccaccgccgattaaaaagtatcctccgcaagaacagtattcaccaccgattaaaagtatccttcgccagaaaagtatccacccccgatcaagaagtattcttcgccagaacagtattcaccgccgatcaaga

SEQ ID NO: 143306 - DNA, 408 bp, Arabidopsis thaliana
ctcgcagccgatgcaaggacaacaacaaggccaaccatgtcaaggacgacagggacaacaaggccaaccatgggaaggacagggacaacagggacaacaaggaagacaaggccaaccatgggaaggacagggacaacagggacaacaaggacgacagggacaacaaggccaaccatgggaaggacagggacagcagggacaacaagggttccgtgacatgcaccagaaggtggaacatgtgagacgcggagacgtctttgccaacactccaggctctgcccactggatctacaactcaggagaacagccacttgtcatcatcgctcttctcgacatcgccaactaccaaaaccaactcgaccgcaaccctagagtgttccatttggccggaaacaaccagcagggagg

SEQ ID NO: 143307 - DNA, 405 bp, Arabidopsis thaliana
accttcttcacttccccaaaaatttcctacgtcgttcatggaacgggtatcagcggaagagtggtccctggatgtgccgagaccttcatggactcgcagccgatgcaaggacaacaacaaggccaaccatggcaaggacgacagggacaacaaggccaaccatgggaaggacagggacaacagggacaacaaggaagacaaggccaaccatgggaaggacagggacaacagggacaacaaggacgacagggacaacaaggccaaccatgggaaggacagggacagcagggacaacaagggttccgtgacatgcaccagaaggtggaacatgtgagacgcggagacgtctttgccaacactccaggctctgcccactggatctacaactcaggagaacagccactt

SEQ ID NO: 143308 - DNA, 443 bp, Arabidopsis thaliana
caccgccgtaccgaaccggagggtcgagctcgacctacgcgtaaacatacacaaatagcaaaacatggctaacaagctcttcctcgtctgcgcaactctcgccctctgcttcctcctcaccaacgcttccatctaccgcaccgttgtcgaattcgaagaagatgacgccagcaaccccgtaggtccaagacagagatgccagaaggagtttcagcaatcacaacacctaagagcttgccagagatggatgagcaagcaaatgaggcaaggacgtggtggtggtccttccctcgacgatgagttcgatttcgagggcccccagcagggataccagctactccagcagtgctgcaacgagcttcgccaggaagagccagtttgcgtttgccccaccttgaaacaagctgccagggcagttagcctccagggacagcacggaccat

SEQ ID NO: 143309 - DNA, 395 bp, Arabidopsis thaliana
gaggaagaaaaaatgggtcgagtctcatctattatctctttctctttgacactcttgatcctcttcaatggctacactgcccaacagtggcccaacgagtgccagctcgatcaactcaatgcgctcgaaccatcccaaatcatcaagagcgagggtggtcgcatcgaggtctgggaccaccatgcaccccagctccgttgctccggctttgcctttgagcgtttcgtcattgagcctcagggtcttttcttgcccactttcttgaacgccggcaaactcacgtttgttgttcacggaaggggtctaatgggaagagttattccgggatgcgccgagacgttcatggagtcaccggtatttggagaaggtcaaggtcagggtcagagtcaagggtt

SEQ ID NO: 143310 - DNA, 423 bp, Arabidopsis thaliana
cggcagggtccggcccaggccacccgtcacgcaaatctcaacaaatgagcgagagagccacaaagtgggaacataaacaaacaaacctaaattcaaaacttgaagaagcgatcaaaaacctgaaacttgagcaggcgtgttgctctcaacaactctcaccggcattttcttccgtctcctcctttccgtctgataaaaatccgatctttggtgcgaccaaatcaaatcgtggagcctaatcaataaccacatctcatcatacccggttcggttttcttaaccgaatcaaattatacataaaacggattaggcttctccggttttcgactgcgttttgtataaaacctctcaaaaaccttttcttctctccccgtcagaccgatcttctctttcctcgccggcgccttcaagctttttttccac

SEQ ID NO: 143311 - DNA, 401 bp, Arabidopsis thaliana
aagaaaacatacacaaatagcaaaacatggctatttagctcttcctcgtctgcgcaactctcgccctctgcttcctcctcaccaacgcttccatctaccgcaccgttgtcgaattcgaagaagatgacgccagcaaccccgtaggtccaagacagagatgccagaaggagtttcagcaatcacaacacctaagagcttgccagagatggatgagcaagcaaatgaggcaaggacgtggtggtggtccttccctcgacgatgagttcgatttcgagggcccccagcagggataccagctactccagcagtgctgcaacgagcttcgccaggaagagccagtttgcgtttgccccaccttgaaacaagctgccagggcagttagcctccagggacagcacgga

SEQ ID NO: 143312 - DNA, 396 bp, Arabidopsis thaliana
aagaggaagaaaaatgggtcgagtctcatctattatctctttctctttgacactcttgatcctcttcaatggctacactgcccaacagtggcccaacgagtgccagctcgatcaactcaatgcgctcgaaccatcccaaatcatcaagagcgagggtggtcgcatcgaggtctgggaccaccatgcaccccagctccgttgctccggctttgcctttgagcgtttcgtcattgagcctcagggtcttttcttgcccactttcttgaacgccggcaaactcacgtttgttgttcacggaaggggtctaatgggaagagttattccgggatgcgccgagacgttcatggagtcaccggtatttggagaaggtcaaggtcagggtcagagtcaagggtt

SEQ ID NO: 143313 - DNA, 401 bp, Arabidopsis thaliana
cacatagcaaaaaatggcaaacaagttgttcctcgtctgcgcagctctcgctctctgcttcctcctcaccaacgcttccatctaccgcaccgtcgttgagttcgaagaagatgacgccactaaccccataggcccaaaaatgaggaaatgccgcaaggagtttcagaaagaacaacacctaagagcttgccagcaattgatgctccagcaagcaaggcaaggccgtagcgatgagtttgatttcgaagacgacatggagaacccacagggacaacagcaggaacaacagctattccagcagtgctgcaacgagcttcgccaggaagagccagattgtgtttgccccaccttgaaacatgctgccaaggccgttagactccagggacagcaccaaccaatgc

SEQ ID NO: 143314 - DNA, 405 bp, Arabidopsis thaliana
caagaaaacatacacaaatagcaaaacatggctaacaagctcttcctcgtctgcgcaactctcgccctctgcttcctcctcaccaacgcttccatctaccgcaccgttgtcgaattcgaagaagatgacgccagcaaccccgtaggtccaagacagagatgccagaaggagtttcagcaatcacaacacctaagagcttgccagagatggatgagcaagcaaatgaggcaaggacgtggtggtggtccttccctcgacgatgagttcgatttcgagggcccccagcagggataccagctactccagcagtgctgcaacgagcttcgccaggaagagccagtttgcgtttgccccaccttgaaacaagctgccagggcagttagccttcagggacagcacggacct

SEQ ID NO: 143315 - DNA, 402 bp, Arabidopsis thaliana
ctcagcaatctcctcgttgcaaccttcggggttctcctcgtccttaacggctgccttgcgaggcagtcacttggggttcctcctcagctacagaacgagtgtaacctcgacaacctagatgttctccaagccaccgaaactatcaagagtgaagccggtcagatcgagtactgggaccacaaccaccctcagctccgatgtgttggtgtttccgttgctcgttatgtaattgaacaaggcggtctttacttgcccaccttcttcacttccccaaaaatttcctacgtcgttcaaggaacgggtatcagcggaagagtggtccctggatgtgccgagaccttcatggactcgcagccgatgcaaggacaacaacaaggccaaccatggcaaggacgacaggga

SEQ ID NO: 143316 - DNA, 278 bp, Arabidopsis thaliana
taaaaatggctcgagtctcttctcttctttctttctccttaacacttttgatccttttgcggggcgacgcggctcaacagggtcagcagggtcagcagtttccgaacgagtgccagctcgaccagctcaatgcgctcgagccttcacacgtactgaagagcgaggctggtctcatcgaggtgtgggaccaccacgctcctcagttccgttgctcatgtgtcttcctttgcacgttacattatgcatgtctaagggttctctaacttgccccttttttt

SEQ ID NO: 143317 - DNA, 409 bp, Arabidopsis thaliana
ggtaaaaacaatttctcattagcttacaatggcttttactcaccgtgtcgaccgtactgatagacacgttcaatttcagtcgccctatgaaggcggccgaggtcaaagtcagtatgaaggtgaccgtggttacggtggtggcggttacaagagcatgatgcctgaaagtggcccatctagtacccaagtattgtccctgttgattggagtccctgtcgtcggttcgctacttgccttggctggattacttctagctggttcggtgatcggcttaatggttgctttaccactatttcttctcttcagcccggttatagtcccagcggctctaactatcgggcttgcaatgacaggctttttagcctcggggatgttcggtctaaccgggcttagctcaatctcatgggtc

SEQ ID NO: 143318 - DNA, 264 bp, Arabidopsis thaliana
aacaaacaaaaagaaaatggttaagctcagcaatcttcttgttgcaaccttcggggttctcctaggcgttaacggctgccttgcgaggcagtcacttggggttcctcctcagcttcagaacgagtgtaacctcgacaacctagatgttctccaagccaccgaaactatcaagagtgaagccggtcagatcgagtactgggtccacaaccaccctcagctccgatgtgttggtgtttccgttgtttgtcatttatctgtcaatgt

SEQ ID NO: 143319 - DNA, 406 bp, Arabidopsis thaliana
aaaacatacacacatagcaaaaaatggcaaacatgttgttcctcgtctgcgcagctctcgctctctgcttcctcctcaccaacgcttccatctaccgcaccgtcgttgagttcgaagaagatgacgccactaaccccataggcccaaaaatgaggaaatgccgcaaggagtttcagaaagaacaacacctaagagcttgccagcaattgatgctccagcaagcaaggcaaggccgtagcgatgagtttgatttcgaagacgacatggagaacccacagggacatcagcaggaacaacagctattccagcagtgctgcaacgagcttcgccaggaagagccagattgtgtttgccccaccttgaaacaagctgccaaggccgttagactccagggacagcaccaacc

SEQ ID NO: 143320 - DNA, 317 bp, Arabidopsis thaliana
caacaaacaaaaagaaaatggttaagctcagcaatctcctcgttgcaaccttcggggttctcctcgtccttaacggctgccttgcgaggcagtcacttggggttcctcctcagctacagaacgagtgtaacctcgacaacctagatgttctccaagccaccgaaactatcaagagtgaagccggtcacatcgagtactgggaccacaaccaccctcagctccgatgtgttggcgtgtccgttgcttgtgttcttatctgaacaaggtggtctttacttgggcaccctcttcagtttcccaattatctcctacgttgt

SEQ ID NO: 143321 - DNA, 325 bp, Arabidopsis thaliana
caataaagaggaagaaaaatgggtcgagtctcactaattatctctttctctttgacagtctggatcctcttcaatggctacactgcccaacagtggcccaacgagtgccagctcgatcaactcaatgcgctcgaaccatcccaaatcatcaagagcgagggtggtcgcttcgaagtctgggaccaccattcaccccagctcctttgttccggctttgcattttgaccgtttcatcattgagcctaagggtcttttcttgcccactttcttgtacgccggcaaactcacgtttgttgtttacggaaggggtcttaatgggaaagag

SEQ ID NO: 143322 - DNA, 318 bp, Arabidopsis thaliana
caaaaagaaaatggttaagctcagcaatcttctcgttgcaaccttcggggttctcctgggccttaacggctgccttgcgaggcagtcacttggggttcctcctcagctacagaacgagcgttacctcgacaacctagatgttctccaagccaccgaaactatcaagagtgaagccggtcagatcgagtactgggaccacaaccaccctcagctccgatgtgttggagtttccgttgctcgttttagtaattgatcaaggcggccttttcttgccaaccttattaacttccccaaaaatttcttacgtggtttaaggaa

SEQ ID NO: 143323 - DNA, 351 bp, Arabidopsis thaliana
gaaaatggttaagctcagcaatctcctcgttgcatccttcggggttctcctcgtccttaacggctgccttgcgaggcagtcacttggggttcctcctcagctacagaacgagtgtaacctcgacaacctatatgttctccaagccaccgaaactatcaagagtgatgccggtcagatcgagttctgggaccacaaccacccttagattcgatatacctgtgttgccatctctctttatgtatttgaacacggccggcgagaggcggcctgcgtattgagcgctcttacaatttcttactcactgactggatccgctctgacgttcagatggggccagcgatatcacctcac

SEQ ID NO: 143324 - DNA, 410 bp, Arabidopsis thaliana
aagaggaagaaaaatgggtcgagtctcatctattatctctttctctttgacactcttgatcctcttgaatggctacactgcccaacagtggcccaacgagtgccagctcgatcaactcaatgcgctcgaaccatcccaaatcatcaagagcgagggtggtcgcatcgaggtctgggaccaccatgcaccccagctccgttgctccggctttgcctttgagcgtttcgtcattgagcctcagggtcttttcttgcccactttcttgaacgccggcaaactcacgtttgttgttcacggaaggggtctaatgggaagagttattccgggatgcgccgagacgttcatggagtcaccggtatttggagaaagtcaaggtcagggtcagagtcaagggttccgtgacatgcacc

SEQ ID NO: 143325 - DNA, 405 bp, Arabidopsis thaliana
aacatacacacatagcaaaaaatggcaaactagttgttcctcgtctgcgcagctctcgctctctgcttcctcctcaccaacgcttccatctaccgcaccgtcgttgagttcgaagaagatgacgccactaaccccataggcccaaaaatgaggaaatgccgcaaggagtttcagaaagaacaacacctaagagcttgccagcaattgatgctccagcaagcaaggcaaggccgtagcgatgagtttgatttcgaagacgacatggagaacccacagggacaacagcaggaacaacagctattccagcagtgctgcaacgagcttcgccaggaagagccagtttgtgtttgccccaccttgaaacaagctgccaaggccgttagactccagggacagcaccaacca

SEQ ID NO: 143326 - DNA, 399 bp, Arabidopsis thaliana
agaaaatggttaagctcagcaatctcctcgttgctaccttcggggttctcctcgtccttaacggctgccttgcgaggcagtcacttggggttcctcctcagctacagaacgagtgtaacctcgacaacctagatgttctccaagccaccgaaactatcaagagtgaagccggtcagatcgagtactgggaccacaaccaccctcagctccgatgtgttggtgtttccgttgctcgttatgtaattgaacaaggcggtctttacttgcccaccttcttcacttccccaaaaatttcctacgtcgttcaaggaacgggtatcagcggaagagtggtccctggatgtgccgagaccttcatggactcgcagccgatgcaaggacaacaacaaggccaaccat

SEQ ID NO: 143327 - DNA, 405 bp, Arabidopsis thaliana
ggttattgctcaagctttgaagatcgatcttcatacagcgcagcaacttcagaaccaagatgacaaccgtggaaacattgtccgagtccaaggcccgttcggtgtcattaggccgcctttgaggggccagagacctcaggaggaggaagaagaagaagaaggacgacatggacgacacggtaatggcttagaggagaccatctgcagcgccaggtgcaccgataacctcgatgacccgtctcgtgctgacgtgtacaagccacagctcggttacatcagcactctcaacagttacgatctccccatccttcgcttcatccgtctctcagccctccgtggatctatccgtcaaaacgcaatggtgcttccacagtggaacgcaaacgcgaacgctattctttacgt

SEQ ID NO: 143328 - DNA, 414 bp, Arabidopsis thaliana
cgttcaagagaacgggtatcagcggaagagtggtccctgtttgtgccgagaccttcatggactcgcagccgatgcaaggacaacaacaaggccaaccatggcaaggacgacagggacaacatggccaaccatgggaaggacagggacaacagggacaacatggaagacaaggccaaccatgggaaggacagggacaacagggacaacaaggacgacagggacaacaaggccaaccatgggaaggacagggacagcagggacaacaagggttccgtgacatgcaccagaaggtggaacatgtgagacgcggagacgtctttgccaacactccaggctctgcccactggatctacaactcaggagaacagccacttgtcatcatcgctcttctcgacatcgccaactaccaaaacc

SEQ ID NO: 143329 - DNA, 369 bp, Arabidopsis thaliana
aagaaataacaaaatggctcgagtctcttctcttttttctttcttcttaacacttttgatccttttgcatggctacgcggctcaacagggtcagcagggtcagcagtttccgaacgagtgccagctcgaccagctcaatgcgctcgagccgtcacacgtactgaagagcgaggctggtcgcatcgaggtgtgggaccaccacgctcctcagctccgttgctcaggtgtctcctttgcacgttacatcatcgagtctaagggtctctacttgccctctttctttaacaccgcgaagctctttttcgtggctaatggacgaggtcttatgggaatagtgatccctggatgctccgtaacttttcatgactc

SEQ ID NO: 143330 - DNA, 381 bp, Arabidopsis thaliana
gagacgatgtatgtatatatatgaaaagagtatgtatagaatcggcggattggtagaggatgataaaccctaaatgaagtagaggggaacgagaaaagaggaaaaaaggcacagagagaaagattgaatttcgttggtttacaaaaacattttggtaaaatctaaattttaagattcgatacagagaccattaatttacttaagttgacttgtttattcattagtcttttcgcaccgactaatattaatttaaaataaaatacatttttttttggcaaaacttggttttgtgaaaaggatattatattcctttaagaaagtttagagtagaaaacttcgcatttgagtttggcgtgatgaagacgtgtgacaattcttata

SEQ ID NO: 143331 - DNA, 407 bp, Arabidopsis thaliana
caagaatgttccaacatggcaccgagatctttgcagggtttgtgaaaacatcccaattgttctttgtgggaataaagttgatgtgaagaacaggcaagtcaaggccaagcaggtaacattccacaggaagaagaacctccagtattacgagatatctgccaagagcaactacaacttcgagaagccattcttgtaccttgctagaaagctcgccggggacgctaatcttcactttgtggaatcacctgcccttgctcccccggaagttcaaatcgacttggctgctcagcagcagcatgaggcggagcttgcagcagcagcaagtcagccacttcctgatgacgatgatgacaccttcgagtagagaaagagagatgtgatctgtcactgattacccgttagggctt

SEQ ID NO: 143332 - DNA, 397 bp, Arabidopsis thaliana
catcatcacaaacgagtaagaatacaaatacaaattgcttaaaaaatggcaaacaagctcttcctcgtctgcgcaactttcgccctctgcttcctcctcaccaacgcttccatctaccgcactgttgtcgagttcgacgaagatgacgccagcaaccccatgggcccaagacagaaatgtcagaaggagtttcagcaatcacagcacctaagagcttgccagaaattgatgcgcatgcaaatgaggcaaggccgtggtggtggtccctccctcgacgatgagttcgatttggaagacgacatcgagaacccacaaggcccccatcagggacaccagatcctccagcagtgcttgcacgagcttcgtcaggatgagccagtttgtgttagtcccacct

SEQ ID NO: 143333 - DNA, 403 bp, Arabidopsis thaliana
aaaaatggctcgagtctcttctcttctttctttctccttaacacttttgatccttttccatggctacgcggctcaacagggtcagcagggtcagcagtttccgaacgagtgccagctcgaccagctcaatgcgctcgagccttcacacgtactgaagagcgaggctggtcgcatcgaggtgtgggaccaccacgctcctcagctccgttgctcaagtgtctcctttgcacgttacatcatcgagtctaagggtctctacttgccctctttctttaacaccgcgaagctctccttcgtggctaaaggacgaggtcttatgggaaaagtgatccctggatgcgccgaaacattccaagactcatcagagttccaaccacgcttcgaaggtcaaggtcaaagccag

SEQ ID NO: 143334 - DNA, 403 bp, Arabidopsis thaliana
aacaaacaaaaagaaaatggttaagctcatctatctcctcgttgcaaccttcgggggtgtccgcgtccttaacggctgccttgcgaggcagtcacttggggttcctcctcagctacagaacgagtgtaacctcgacaacctagatgttctccaagccaccgaaactatcaagagtgaagccggtcagatcgagtactgggaccacaaccaccctcagctccgatgtgttggtgtttccgttgctcgttatgtaattgaacaaggcggtctttacttgcccaccttcttcacttccccaaaaatttcctacgtcgttcaaggaacgggtatcagcggaagagtggtccctggatgtgccgagaccttcatggactcgcagccgatgcaaggtcatcaacaaggc

SEQ ID NO: 143335 - DNA, 409 bp, Arabidopsis thaliana
caaaaagaaaatggttaagctcagcaatctcctttttgcaaccttcggggttctcctcgtccttaacggctgccttgcgaggcagtcacttggggttcctcctcagctacagaacgagtgtaacctcgacaacctagatgttctccaagccaccgaaactatcaagagtgaagccggtcagatcgagtactgggaccacaaccaccctcagctccgatgtgttggtgtttccgttgctcgttatgtaattgaacaaggcggtctttacttgcccaccttcttcacttccccaaaaatttcctacgtcgttcaaggaacgggtatcagcggaagagtggtccctggatgtgccgagaccttcatggactcgcagccgatgcaaggacaacaacaaggccaaccatggcaa

SEQ ID NO: 143336 - DNA, 398 bp, Arabidopsis thaliana
cggacgcgtgggcaaaaagaaaatggttattctcttcaatctcctcgttgcaaccttgggggttctcctcgtccttaacggctgccttgcgaggcagtcacttggggttcctcctcagctacagaacgagtgtaacctcgacaacctagatgttctccatgccaccgaaactatcaagagtgaagccggtcagatcgagtactgggaccacaaccaccctcagctccgatgtgttggtgtttccgttgctcgttatgtaattgaacaaggcggtctttacttgcccaccttcttcacttccccaaaaatttcctacgtcgttcaaggaacgggtatcagcggaagagtggtccctggttgtgccgagtccttcatggacttgcagccgatgcaaggac

SEQ ID NO: 143337 - DNA, 394 bp, Arabidopsis thaliana
aagaaataacaaaatggctcgagtctcttctcttctttctttcttcttaacacttttgatccttttccatggctacgcggctcaacagggtcagcagggtcagcagtttccgaacgagtgccagctcgaccagctcaatgcgctcgagccgtcacacgtactgaagagcgaggctggtcgcatcgaggtgtgggaccaccacgctcctcagctccgttgctcaggtgtctcctttgcacgttacatcatcgagtctaagggtctctacttgccctctttctttaacaccgcgaagctctctttcgtggctaagggacgaggtcttatgggaaaagtgatccctggatgcgccgaaacattccaagactcatcagagttccaaccacgcttcgaa

SEQ ID NO: 143338 - DNA, 389 bp, Arabidopsis thaliana
caaaaagaaaatggttaagctcagcaatctcctcgttgcaaccttcggggttctcctcgtccttaacggctgccttgcgaggcagtcacttggggttcctcctcagctacagaacgagtgtaacctcgacaacctagatgttctccaagccaccgaaactatcaagagtgaagccggtcagatcgagtactgggaccacaaccaccctcagctccgatgtgttggtgtttccgttgctcgttatgtaattgaacaaggcggtctttacttgcccaccttcttcactttcccaaaaattttctacgtcgttcaaggaacgggtatcagcggaagagtggtccctggatgtgccgagaccttcatggactcgcagccgtttcatggacatc

SEQ ID NO: 143339 - DNA, 342 bp, Arabidopsis thaliana
acacatagcaaaaaatggcaaacaagttgttcctcgtttgcgcagctctcgctctctgctggctgcggaccaacgcttccatctaccgcaccgtcgttgagttcgaagaagaagacgccactaaccccataggcccaaaaatgaggaaatgccgcaaggagtttcagaaagaacaacacctaagagcttgccagcaattgatgctccagcaagcaaggcaaggccgtagcgatgagtttgatttcgaagacgacatggagaacccacagggacaacagcaggaacaacagctattccagcagtgctgcaacaagcttcgccaggaagagccaaattgtggtt

SEQ ID NO: 143340 - DNA, 276 bp, Arabidopsis thaliana
cacagatgaagaacaaaaagagcacaatctttggaacctcagcgaaagactcgctcttgcttatggagcgtgatgagtactcctgaaggttctacggttagaatctttaaaaaccttcgcatatgcagagattgtcactctgtttataagtgtgttagtagagtcatcgcacgtagaatcgtgttgagagatcagcatcggtttcaccattttgagagaggttagtgctcttgtaaggatttctggagaaagaagagaagtctgacagcatctagc

SEQ ID NO: 143341 - DNA, 405 bp, Arabidopsis thaliana
cgcgaagctctctttcgtggctaaaggacgaggtcttatgggaaaagtgatccctggatgcgccgaaacattccaagactcatcagagttccaaccacgcttcgaaggtcaaggtcaaagccagaggttccgtgacatgcaccagaaagtggagcacattaggagcggtgataccattgccacaacacccggtgtagcacagtggttctacaacgacggacaggaaccacttgtcatcgtcagcgtcttcgatctagccagtcaccagaaccagcttgaccgcaacccaaggccattttacttagccggaaacaacccacaaggtcaagtatggctacaaggccgagagcatcagccacagaagaacattttcaatggatttggacccgaggttattgctcaagc

SEQ ID NO: 143342 - DNA, 400 bp, Arabidopsis thaliana
caacaaacaaaaagaaaatggttaagctcagcaatctcctcgttgcaaccttcggggttctgctcggccttaacggctgccttgcgaggcagtcacttggggttcctcctcagctacagaacgagtgtaacctcgacaacctagatgttctccaagccaccgaaactatcaagagtgaagccggtcagatcgagtactgggaccacaaccaccctcagctccgatgtgttggtgtttccgttgctcgttatgtaattgaacaaggcggtctttacttgcccaccttcttcacttccccaaatatttcctacgtcgttcaaggaacgggtatcagcggaagagtggtccctggatgtgccgagaccttcatggactcgcagccgttgcaaggacatcatca

SEQ ID NO: 143343 - DNA, 400 bp, Arabidopsis thaliana
ctcgccaaaaaccttgaaacctttaaaaaatcgttactatggctaagctcattctcgttttggcaactcttgccctcttcatcctcctagccaacgcatccatctaccgcacagtggtggagttcgaggaagatgatgacgtgagcaacccacaacaaggtaagtgccagagggagtttatgaagcatcagcaactaagaggttgcaagcaatggatccgcaagagagctcaacaaggaagaatcggatacgaagctgatgactttgagctcactcttgatgtcgatcttgaggacgatgagaacccaatggggcctcaacaacagtcatctcttaaaatgtgttgtaatgaatcaaggcaagtggacaagatgtgtgtgtgtcctacactgaataaggc

SEQ ID NO: 143344 - DNA, 362 bp, Arabidopsis thaliana
caaaaagaaaatggttaagctcagcaatctcctctttgcaaccttcggggttctcctcgtaggtaacggctgccttgcgaggcagtcacttggggttcctcctcagctacagaacgagtgtaacctcgacaacctagatgttctccaagccaccgaaactatcaagagtgaagccggtcagatcgagtactgggaccacaaccaccctcagctccgatgtgttggtgtttccgttgctcgttatgtaattgaacaaggcggtctttacttgcccaccttcttcacttccccaaaaatttcctacgtcgttcaaggaacgggtatcagcggaagagtggtccctggatgtgccgagaccttta

SEQ ID NO: 143345 - DNA, 407 bp, Arabidopsis thaliana
caaggtttctcggtggtgaaacgcgcaacaagcttccgtttccagtgggttgagttcaaaacaaacgctaacgcgcaaatcaacactctggcgggacgaacctcagtcttgagaggtttaccacttgaagtcataaccaatgggttccaaatctcacccgaagaagcaaggagggtcaagttcaacacgctcgagaccactttgactcacagcagtggcccagctagctacggaaggccaagagtggctgcagcttaagagcttaaaaccgcggcttaacaatgaaccgctactgtaaaaggaagttaaatagtacgtagtaattataataatgtacgaaaatgtgacaagttttgttgaggtttacctgtaaaatgccactccttttctgaataaaatctttcttt

SEQ ID NO: 143346 - DNA, 393 bp, Arabidopsis thaliana
gtttttgattactggaactcgttgagggattgtttaaaaaaaaatcagaagagaaagatccatggctgataattgtatcagacttcttcactcagcctctgttttcttctgtttagggcttctaatttcatccttcaacttgttgcagggtattgcagctgaaaatctttccaagcagaaactgacctcatggattcttcagaatgagattgtaaaggaagtcaatgagaatccaaacgctggatggaaagcttctttcaatgatcggtttgcaaacgccactgttgcagagtttaagcgccttcttggtgttaaaccaacaccaaagacggaatttttgggtgtgcctattgttagccatgatttatctttgaagcttccaaaagaatttga

SEQ ID NO: 143347 - DNA, 398 bp, Arabidopsis thaliana
cttcgctacgactcttcacgacgccagagtgttcttccatggaaccgtgtctcgaatcaatgaagactgcttcgcttcctgatcttccgtatgcttatgatgcgctagagccagcaatcagtgaggagatcatgcggctacaccatcagaaacaccaccagacttatgtcactcagtacaacaaagccctcaacagccttcgttctgccatggctgacggtgatcactcctccgtcgtcaaactccaaagcctcatcaagttcaacggcggagggcacgttaaccatgcaatcttctggaaaaacctagccccggttcatgaaggaggtggcaaaccaccgcatgatcctttggcttcggcgatcgatgctcatttcggatcactagaaggattgatc

SEQ ID NO: 143348 - DNA, 398 bp, Arabidopsis thaliana
aggccaaccatgggaaggacagggacaactgggtctaacaaggacgacagggacaacaaggccaaccatgggaaggacagggacagcaaggacaacaatggttccgagacatgcaccagatagtggaacatgtgagacgcggagacgtctttgccaacactccaagctctgcccactggatctacaactcaagagaacagccacttgtcatcatcgctcttctggacattgacgactaccaaaaccaactggaccgcaaccctagagtgttccatttggccggaaacaaccagcaaggaggctttggcggttcacagcaacaacaagaacaaaaaaacttgtggagcgggttcgacgcacaggtcataactcaagcattgaaaattgacgttcagttg

SEQ ID NO: 143349 - DNA, 398 bp, Arabidopsis thaliana
caaacaaaaagaaaatggttaagctcagcaatcttctcgttgcaaccttcggggttctcctggtccttaacggctgccttgcgaggcagtcacttggggttcctcctcagctacagaacgagtgtaacctcgacaacctagatgttctccaagccaccgaaactatcaagagtgaagccggtcagatcgagtactgggaccacaaccaccctcagctccgatgtgttggtgtttccgctgctcgttatgtaattgaacaaggcggtctttacttgcccaccttcttcacttgcccaaaaatttcctacgtcgttcaaggaacgggtatcagcggaagagtggtccctggatgtgccgagaccttcatggactcgcagccgatgcaaggacaacaacat

SEQ ID NO: 143350 - DNA, 251 bp, Arabidopsis thaliana
caaatttctaacttgtagaaaaaggagtttccaccgcattaaattagcctcttatatatagggatagttatataaaagtgcgaacacttacaaagaccaacaaagcgattaaggaataatgttttcgcagattatgtacagttgatatagattggatgtattggaactaaccatcagaagctagaaatatcagaattagtttccaaacaaaaatgccactccttttctgaataaaatctttctttccgttc

SEQ ID NO: 143351 - DNA, 286 bp, Arabidopsis thaliana
agaaaatggttaagctcagcaatctcctcgttgcttccttcggggttctcctcgtccttaacggctgccttgcgaggcagtcacttggggttcctcctcagctacagaacgagtgtaacctcgacaacctatatgttctccaagccaccgaaactatcaagagtgaagccggtcagatcgagtactgtgaccacaaccaccctcatctccgatgtgttggtgtttccgaagctcggtatgtaattgaacaaggcggttttttcttgcccacctttttcacttttcc

SEQ ID NO: 143352 - DNA, 404 bp, Arabidopsis thaliana
acaagaaaacatacacaaatagcaaaacatggctttcatgctcttcctcgtctgcgcaactgtcgccctctgcttcctcctcaccaacgcttccatctaccgcaccgttgtcgaattcgaagaagatgacgccagcaaccccgtaggtccaagacagagatgccagaaggagtttcagcaatcacaacacctaagagcttgccagagatggatgagcatgcaaatgaggcaaggacgtggtggtggtccttccctcgacgatgagttcgatttcgagggcccccagcagggataccagctactccagcagtgctgcaacgagcttcgccaggaagagccagtttgcgtttgccccaccttgaaacaagctgccagggcagttagcctccagggacagcacggac

SEQ ID NO: 143353 - DNA, 402 bp, Arabidopsis thaliana
aacgagtaagaatacaaacacaaatagcaaaaattatggctaacaagctcttcctcgtctgcgcaactttcgccctctgcttcctcctcaccaacgcttccatctaccgcactgttgtcgagttcgacgaagatgacgccagcaaccccatgggcccaagacagaaatgtcagaaggagtttcagcaatcatagcacctaagagcttgccagaaattgatgcgcatgcaaatgaggcaaggccgtggtggtggtccctccctcgacgatgagttcgatttggaagacgacatcgagaacccacaaggcccccagcagggacaccagatcctccagcagtgctgcagcgagcttcgccaggaagagccagtttgtgtttgccccaccttgagacaagctgcca

SEQ ID NO: 143354 - DNA, 401 bp, Arabidopsis thaliana
caagaaaacatacacaaatagcaaaacatggctttcaagctcttcctcgtctgcgcaactgtggccctctgcttcctcctcaccaacgcttccatctaccgcaccgttgtcgaattcgaagaagatgacgccagcaaccccgttggtccaagacagagatgccagaaggagtttcagcaatcacaacacctaagagcttgccagagatggatgagcaagcaaatgaggcaaggacgtggtggtggtccttccctcgacgatgagttcgatttcgagggcccccagcagggataccagctactccagcagtgctgcaacgagcttcgccaggaagagccagtttgcgtttgccccaccttgaaacaagctgccagggcagttagccttcagggacagcacgg

SEQ ID NO: 143355 - DNA, 402 bp, Arabidopsis thaliana
gtctaatgggaagagttattccgggatgctccgagacgttcatggagtcaccggtagttggagaaggtcaaggtcagggtcagagtcaagggttccgtgacatgcaccagaaagtagagcacctacggtgcggtgacaccattgcaacaccatctggtgtagctcaatggttctacaacaatggaaatgagcctctcattcttgttgcagccgcggatctcgccagcaaccagaaccagcttgaccgcaaccttagaccatttttgatagccggaaacaacccacaagggctggaatggctacaaggccgaaagcaacagaagcaaaacaacatcttcaatggcttcgcacctgagatcttggctcaagccttcaagatcaatgtcgagacggctcatcagc

SEQ ID NO: 143356 - DNA, 400 bp, Arabidopsis thaliana
gataaaaatggctcgagtctcttctcttctttctttctccttaacacttttgatcctgttcgatggctacgcggctcaacagggtcagcagggtcagcagtttccgaacgagtgccagctcgaccagctcaatgcgctcgagccttcacacgtactgaagagcgaggctggtcgcatcgaggtgtgggaccaccacgctcctcagctccgttgctcaggtgtctcctttgcacgttacatcatcgagtctaagggtctctacttgccctctttctttaacaccgcgaagctctccttcgtggctaaaggacgaggtcttatgggaaaagtgatccctggatgcgccgaaacattccaagactcatcagagttccaaccacgcttcgaaggtcaaggtcaa

SEQ ID NO: 143357 - DNA, 362 bp, Arabidopsis thaliana
caacaaacaaaaagaaaatggttaagctcagcaatctcctcgttgcaaccttcggggttctgctcggccttaacggctgccttgcgaggcagtcacttggggttcctcctcagctacagaacgagtgtaacctcgacaacctagatgttctccaagccaccgaaactatcaagagtgaagccggtcagatcgagtactgggaccacaaccaccctcagctccgatgggttggtgtttcccgtgctcggtatgtaattgaacaaggcggtctttacttgcccacctttttcactttcccaaaaatttcctacgtcgttcaaagaacgggtatcagcggaagagtgggtcctggatgtgccgag

SEQ ID NO: 143358 - DNA, 223 bp, Arabidopsis thaliana
gaaaataggttaagctcagcaatctcctcgttgcatccttcggggttctcctcgtcctgaacggctgccttgcgaggcaggcacttggggttcctcctcagctacagaacgagtgtaacctcgtcaacctagatgttctccaagccaccgaaactatcatgagtgaagccgttcagatcgagtactgggaccacaaccacccttagctccgttgtgttggtgt

SEQ ID NO: 143359 - DNA, 398 bp, Arabidopsis thaliana
ataaaaatggctcgagtctcttctcttctttctttctccttaacacttttgatccttttccatggctacgcggctcaacagggtcagcagggtcagcagtttccgaacgagtgccagctcgaccagctcaatgcgctcgagccttcacacgtactgaagagcgaggctggtcgcatcgaggtgtgggaccaccacgctcctcagctccgttgctcaagtgtctcctttgcacgttacatcatcgagtctaagggtctctacttgccctctttctttaacaccgcgaagctctccttcgtggctaaaggacgaggtcttatgggaaaagagatccctggatgcgccgaaacattccaagactcatcagagttccaaccacgcttcgaaggtcaaggtca

SEQ ID NO: 143360 - DNA, 402 bp, Arabidopsis thaliana
gtcattgtttagaattaaaaaaaaagaaggtaaaagagtcagagccgcctagagaaatcgatcacaaattcagaagaaaagaacagagaaaacagaggaagaggttgagatggaggagcttgtagggcttctgagaatccgagtgaagagagggatcaatcttgctcagcgagacactctaagcagcgacccttttgttgtcataaccatgggatcacagaagctgaagactcgtgttgtggaaaataactgcaaccctgagtggaacgaggaattaacccttgcgttaagacatcccgatgaacctgtgaatctgatagtgtatgataaagatacattcacatcgcacgacaagatgggagatgcaaagatagatattaaaccatttctggaggttcacaa

SEQ ID NO: 143361 - DNA, 405 bp, Arabidopsis thaliana
cttctcttctttctttctccttaacacttttgatccttttccatggctacgcggctcaacaggggcagcagggtcagcagtttccgaacgagtgccagctcgaccagctcaatgcgctcgagccttcacacgtactgaagagcgaggctggtcgcatcgaggtgtgggaccaccacgctcctcagctccgatgctcaggagtctcctctgcacgttacatcatcgagtctaagggtctctacttgccctctttctttaacaccgcgaagctctccttcgtggctaaaggacgaggtcttatgggaaaagtgatccctggatgcgccgaaacattccaagactcatcagagttccaaccacgcttcgaaggtcaaggtcaaagccagaggtttcgtgacatgcacc

SEQ ID NO: 143362 - DNA, 404 bp, Arabidopsis thaliana
caaaaagaaaatggttaagctcagcaatctcctcgttgtttccttcggggttctcctcgtccttaacggctgccttgcgaggcagtcacttggggttcctcctcagctacagaacgagtgtaacctcgacaacctagatgttctccaagccaccgaaactatcaagagtgaagccggtcagatcgagtactgggaccacaaccaccctcagctccgatgtgttggtgtttccgttgctcgttatgtaattgaacaaggcggtctttacttgcccaccttcttcactttcccaaaaatttcctacgtcgttcaaggaacgggtttcagcggaagagtggtccctggatgtgccgagaccttcatggactcgcagccgatgcaaggacaacaacaaggccaaccat

SEQ ID NO: 143363 - DNA, 405 bp, Arabidopsis thaliana
cggacgcgtgggcaggaaccacttgtcatcgtcagcgttttcgatctagccagtcaccagaaccagcttgaccgcaacccaaggccattttacttagccggaaacaacccacaaggtcaagtatggctacaaggccgagagcaacagccacagaagaacattttcaatggatttggacccgaggttattgctcaagctttgaagatcgatcttcagacagcgcagcaacttcagaaccaagatgacaaccgtggaaacattgtccgagtccaaggcccgttcggtgtcattaggccgcctttgaggggccagagacctcaggaggaggaagaagaagaagaaggacgacatggacgacacggttatggcttagaggagaccatctgcagcgccaggtgcaccgat

SEQ ID NO: 143364 - DNA, 393 bp, Arabidopsis thaliana
caaaaagaaaatggttaagctcagcaatctcctcgttgctaccttcggggttctcctcgtccttaacggctgccttgcgaggcagtcacttggggttcctcctcagctacagaacgagtgtaacctcgacaacctagatgttctccaagccaccgaaactatcaagagtgaagccggtcagatcgagtactgggaccacaaccaccctcagctccgatgtgttggtgtttccgttgctcgttatgtaattgaacaaggcggtctttacttgcccaccttcttcacttccccaaaaatttcctacgtcgttcaaggaacgggtatcagcggaagagtggtccctggatgtgccgagaccttcatggactcgcagccgatgcaaggacaacaaca

SEQ ID NO: 143365 - DNA, 395 bp, Arabidopsis thaliana
atttgaaaatctcagctaaagagagaaagagaagctccatttttctttctcgtcgtgtcatcgttttctcagattcctgaataatcattcccttccgattccaaaatccccaaacctcatccactcctccatctcccggattcggattcccagaatcatgcccatggagaacgacaatggcccacacgttggcaacgtcgtcgtcaccgctgagcaagcgaccaagattaacgagactgagggacggttgccggagaatcggcagaccggtgttgtctctgacaccggaagtggtagcgagagaggagagcaaggggttggagagacggcagttgctgtggcggtgccggtggaggagagcggatcgatttcggtgggagagctacctgctcccc

SEQ ID NO: 143366 - DNA, 399 bp, Arabidopsis thaliana
ctcgaaagcctcttttcagaaccgaagctcttttctttcgtccaccgggaaatatgccaggggacgtagcctcaccggccggaaaaaccgtctgcgtcaccggagctggtggatacatcgcttcttggattgttaagatacttctcgagagaggttacacagtcaaaggaaccgtacggaatccagatgatccgaagaacacacatttgagagaactagaaggaggaaaggagagactgattctgtgcaaagcagatcttcaggactacgaggctcttaaggcggcgattgatggttgcgacggcgtctttcacacggcttctcctgtcaccgacgatccggaacaaatggtggagccggccgtgaatggagccaagtttgttattaatgctgcggctg

SEQ ID NO: 143367 - DNA, 383 bp, Arabidopsis thaliana
caaaaagaaaatggttaagctcagcaatctcctctttgcaaccttcggggttctcctcgtgcgttaacggctgccttgcgaggcagtcacttggggttcctcctcagctacagaacgagtgtaacctcgacaacctagatgttctccaagccaccgaaactatcaagagtgaagccggtcagatcgagtactgggaccacaaccaccctcagctccgatgtgttggtgtttccgttgctcgttatgtaattgaacaaggcggtctttacttgcccaccttcttcacttccccaaaaatttcctacgtcgttcaaggaacgggtatcagcggaagagtggtccctggatgtgccgagaccttcatggactcgcagccgttgcat

SEQ ID NO: 143368 - DNA, 372 bp, Arabidopsis thaliana
caaaaagaaaatggttaagctcagcaatctcctcgttgttaccttcggggttctcctcgtccttaacggctgccttgcgaggcagtcacttggggttcctcctcagctacagaacgagtgtaacctcgacaacctacatgttctccaagccaccgaaactatcatgagtgaagccggcctgatcgagtactgggaccacaaccaccctcagctccgatgtgttggtgtttccgttgctcggtatgtaatagaacaaggcggtctttacttgcccaccttcttcactttcccaaaaatttcctacgtcggtcaatgaacgggtatcagcggaagagtggtccctggatgtgccgagaccttcatggactcgca

SEQ ID NO: 143369 - DNA, 384 bp, Arabidopsis thaliana
caaaaagaaaaggttaagctcagcaatctcctctttgcaaccttcggggttctcctggtccttaacggctgccttgcgaggcagtcacttggggttcctcctcagctacagaacgagtgtaacctcgacaacctagatgttctccaagccaccgaaactatcaagagtgaagccggtcagatcgagtactgggaccacaaccaccctcagctccgatgtgttggtgtttccagtgctcgttatgtaattgaacaaggcggtctttacttgcccaccttcttcacttccccaaaaatttcctacgtcgttcaaggaacgggtttcagcggaagagtggtccctggatgtgccgagaccttcatggtctcgtagccgatgcatgga

SEQ ID NO: 143370 - DNA, 395 bp, Arabidopsis thaliana
gaggaaagagaaaagagtctatttctcatatttctaaaaaactacctactttgcaaattatttgtagaaaaagtgtatacttccaacttatctctattataaaagccccgatcaaagtgcagatatcaacaaaaataaaattgtggaatgggtgtatatatttttgttgcagtatcttttatgtaatgcatttgcaacatcttttacctatacttctcgtgtttgtgtgtttactctcttttatgtcaagaagtgaatgtgtcaatctcgtaacataagtctctatttatattcatcgacatcttattatatagctttttctcaagttcaaaattgcaaaagagaggagcatgagaaaaaaatgtcgcgttaacgacaccaatgtcgagaagttt

SEQ ID NO: 143371 - DNA, 399 bp, Arabidopsis thaliana
aaaatggttaagctcagcaatctcctcgttgcaaccttcggggttctcctcgtccttaacggctgccttgcgaggcagtcacttggggttcctcctcagctacagaacgagtgtaacctcgacaacctagatgttctccaagccaccgaaactatcaagagtgaagccggtcagatcgagtactgggaccacaaccaccctcagctccgatgtgttggtgtttccgttgctcgttatgtaattgaacaaggcggtctttacttgcccaccttcttcacttccccaaaaatttcctacgtcgttcaaggaacgggtatcagcggaagagtggtccctggatgtgccgagaccttcatggactcgcagccgatgcaaggacaacatcaaggccaaccatgg

SEQ ID NO: 143372 - DNA, 399 bp, Arabidopsis thaliana
gttttatatcatatcaatcgacatggcgaatgttgtaccgtgatcggcgtgtgcatgtagaccgtactgacaaacgtgttcatcagccaaactacgaagatgatgtcggttttggtggctatggcggttatggagctggttctgattataagagtcgcggtccctccactaaccaaatcttggcacttatagcaggagttcccattggtggcacactgctaaccctagctggactcactctagccggttcggtgatcggcttgctagtctccatacccctcttcctcctcttcagtccggtgatagtcccggcggctctcactattgggcttgctgtgacgggaatcttggcttctggttagtttgggttgacgggtctgagctcggtctcgtgggtcc

SEQ ID NO: 143373 - DNA, 318 bp, Arabidopsis thaliana
gagccgtagaacagatatacgaaaacaagaactaccgctgcaacgcaaaccaaagcaatcagtcgcttcttttgccctccatctgatcttcctttcattgccttcttatttgagataaagccaaacggagacccaacgttccgagttaaaggatgcagactactaagtgaagacttcagctttaaaaattgatgatttctcactagttacagatatttgaatctgttctatatatataaaaaaaaaagacaatgcttagtatctgtaagaatagtaacaaaaagaacacacgcacatataccaatcttaaccacacac

SEQ ID NO: 143374 - DNA, 380 bp, Arabidopsis thaliana
caagtaattaactaacaacaaatggcgaacaagctctttctcgtctgcgcagctctcgccctgtgtttcatcctcaccaacgcttccgtctatcgcacggttgtcgagttcgacgaagatgacgccagtaaccccataggcccaatacagaaatgtcagaaggagtttcagcaagaacagcacctaagagcttgccagagatggatgcgcaagcaaatgtggcaaggacgtggtggtggtccttccctcgacgatgagttcgatatggaagacgacatcgagaacccgcagagacgacagctactccagaagggctgcatctagctttgacaataagagccagtttgtgtttgccccaccttgagacaagctgccaaggc

SEQ ID NO: 143375 - DNA, 400 bp, Arabidopsis thaliana
ttcgaaaaaccctaattcagctaaaggttgatcgttgatctaaaagctcgagtgatgaagggaaattggtcgatcgtacgaaaggttcttcatcgccagttctccactctccgttcctcgacaccatcgtcgcgattatctacttccatccgaccgcttgttctgtccccaaactcgatatcgtcgctaatcgctagaaactcattgtttactgcctccaacattggtccatccatcgattttaacttctccaacacttcgcttcctcatcggagaagcctctgttcggaagctggaggtgaaaatggtgttgttctagtgaaatcagaggaagagttcatcaatgcaatgagcaaagctcaagatggatctttaccatcggtcttctatttcactgccg

SEQ ID NO: 143376 - DNA, 317 bp, Arabidopsis thaliana
caaaaagaaaatggttaagctcagcaatctcctctttgcaaccttcggggttctcctggtccttaacggctgccttgcgaggcagtcacttggggttcctcctcagctacagaacgagtgtaacctcgacaacctagatgttctccaagccaccttatctatcaagagtgaagccggtcagatcgagtactgggaccacaaccaccctcagctccgatgtgttggtgtttccgctgctcgttatgtaattgaacaaggcggtctttacttgcccaccttcttcacttccccaaaaattttctacgtctatcatggta

SEQ ID NO: 143377 - DNA, 400 bp, Arabidopsis thaliana
catatttctcacattttcgtagccgcaagtctcttttcagattcttacttgcagctatgggtgaaagagaagtttcacattaacattgtggtcattggtcatgttgattctggaaaatcgaccacaactggtcacttgatctataagcttggtggtattgacatgcgtgtcatcgagaggttcgagaaggaggctgctgagatgaacaagaggtccttcaagtacgcatgggtgttggacaaacttaaggccgagcgtgagcgtggtattaccatcgatattgctctatggaagttcgagaccaccaagtactactgcacagtcattgatgccccaggacatcgtgatttcatcaagaacatgattactggtacctcccatgctgtttgtgctgttctta

SEQ ID NO: 143378 - DNA, 397 bp, Arabidopsis thaliana
aaaaagagttagaaagaaaaaaaataacttaagatggttgatgtttatgagttctgggctgagatagtttcactcatagtggtgaagctgtgtcactggatctatcagtggaggaatccaaaaagtaatggagaacttcctccaggatctatgggttatccaatcattggagagactttcgagttcatgaagcctcatgacgctattcagttaccatcattcgtgaaggagaaagtactcagacatggaccagtttttaggacaagcttatttggaggaaaagttataatttcgactgatattggattgaacatggagatagcaaagacaaatcatattcctggtatgccgaagagcttagcgcggctatttgggtcaaacaacttgttcgtgaata

SEQ ID NO: 143379 - DNA, 382 bp, Arabidopsis thaliana
  unsure (1)..(382): unsure at all n locations
aacaaaaagaaaatggttaagctcagcaatctcctcgttgcaaccttcggggttctcctcgggcttaacggctgccttgcgaggcagtcacttggggttcctcctcagctacagaacgagtgtaacctcgacaacctagatgttctccaagccaccgaaactatcaagagtgaagccggtcagatcgagtactgggaccacaaccaccctcagctccgatgtgttggtgtttccgttgctcgttatgtaattgaacaaggcggnctttacttgcccaccttcttcacttccccaaaaatttcctacgtcgttcaaggaacgggtatcagcggaagagtggtccctggatgtgccgagaccttcatggactcgcagccgatgc

SEQ ID NO: 143380 - DNA, 399 bp, Arabidopsis thaliana
aaggaagttgatcatggattatccataaagttagaatagattcttcctgggtcgatgcccgagcggttaatggggacggactgtaaattcgttggcaatatgtctacgctggttcaaatccagctcggcccaataattagctgtctacataaccattttttttttttttgcataaatgacagagaaggggtaagaaaaaaaggtcaaatttcagggtatagggtatagttcgactttacttttttctttatttcttatgtttagttactttttttttccataaaaaattccgatcttgatcttgctaaggattccgatatggatcctttaaagagaaactttaatgaacagagtcgataaaataatctatttttttgtaaaaaatagattatcaattga

SEQ ID NO: 143381 - DNA, 404 bp, Arabidopsis thaliana
caacaaacaaaaagaaaatggttaagctcagcaatctcctcgttgcaaccttcggggttctcctcgtccttaacggctgccttgcgaggcagtcacttggggttcctcctcagctacagaacgagtgtaacctcgacaacctagatgttctccaagccaccgaaactatcaagagtgaagccggtcagatcgagtactgggaccacaaccaccctcagctccgatgtgttggtgtttccgttgctcgttatgtaattgaacaaggcggtctttacttgcccaccttcttcacttccccaaaaatttcctacgtcgttcaaggaacgggtatcagcggaagagtggtccctggatgtgccgagaccttcatggactcgcagccgatgcaaggacaacaacaaggg

SEQ ID NO: 143382 - DNA, 406 bp, Arabidopsis thaliana
ccggagccgataaggcccgagtcggagaaggtgcgacttggcgtcatagatcgggaggcgagtccggcggcggaagtaatcaatgaggaagcagaggtagagttagaacgaggaatgagacggttgctgagatgagaagaagaagtggaagaagcgggacttggaggtctactgcttctagttctcgatgaggatgaagccatccactaacctcgaaactcgagggtcaaactcggtcgcaggaatcggtgagaagaatcaaaccaaaacaaaacttccgaagatgcagagaatgtgtcagtgggagctcacatggctggagacataagaagaataaagcattgttgtgaccctctcttcttcttctcgtcttcttctttggctaggagatggtagacagagatgg

SEQ ID NO: 143383 - DNA, 400 bp, Arabidopsis thaliana
tataactccaatcttgaatcttgaggatctctggtttcttcattcaaagggggagactttttgggtttttagactttgcttgtctagttttgtcttgtgtgtggtgatgtcttatagtaattcaaacccggaaaattattcagctgcaacgaactcgccggagcttaaactttatcaagcatttatcttttctgttccaatttgtttcacatttattattctcttcttgttttacttgatctacctccgtcgtagtagctctgatttgtcttctcttggaatgcgaactactttcattcccgggaactctctctccacgattgaattaggattgagcaaagagctgagagagatgcttcccattgttgtctttaaagagagcttcaccataatggattca

SEQ ID NO: 143384 - DNA, 401 bp, Arabidopsis thaliana
aatttgtgtgctcttagcctttactctatagttttatatcatatcaatcgacatggcgaatgtggaccgtgatcggcgtgtgcatgtagaccgtactgacaaacgtgttcatcagccaaactacgaagatgatgtcggttttggtggctatggcggttatggagctggttctgattataagagtcgcggcccctccactaaccaaatcttggcacttatagcaggagttcccattggtggcacactgctaaccctagctggactcactctagccggttcggtgatcggcttgctagtctccatacccctcttcctcctcttcagtccggagatagtcccggcggctctcactattgggcttgctgtgacgggaatcttggcttctggtttgtttgggttga

SEQ ID NO: 143385 - DNA, 297 bp, Arabidopsis thaliana
  unsure (1)..(297): unsure at all n locations
atcacaaacacacacaaatctctgaagtaaaatgacgttcccttctctttctgtctcatttctcttgtttgccttcatattcgttacgcatgcattcgacctcagcatcatccagatgcaacagggaacatgtccgtacacggtggttgtcatgacaagctgtctttctccggagtcgacaagagatcagatcagcattgtttttggcgatgccgacggtaacaaggtgtatgcaccgaaactagggggtttggtaagaggaccagggggtttggggaagtgttnaactttctcttt

SEQ ID NO: 143386 - DNA, 371 bp, Arabidopsis thaliana
aacaaacaaaaagaaaatggttaagctcagcaatctcctctttgcaaccttcggggttctgcgtggtgcttaacggctgccttgcgaggcagtcacttggggttcctcctcagctacagaacgagtgtaacctcgacaacctagatgttctccaagccaccgaaactatcaagagtgaagccggtcagatcgagttctgggaccacaaccaccctcagctccgatgtgttggtgtttccgttgctcgttatgtaattgaacatggcggtctttacttgcccaccttctttacttccccaataattttcttcgtctgtcaatgtacgggtctcttcttgagagtggttcctggatgtgccgagaccttcatg

SEQ ID NO: 143387 - DNA, 402 bp, Arabidopsis thaliana
atttttcgtcaccctagccgctttactctcttgcttatatctctgagatttgtttgacgagtcgctaaccatgggtaaagagaagtttcacatcaacattgtggtcattggccacgtcgattctggaaagtcgaccaccactggacacttgatctacaagttgggtggtattgacaagcgtgtcattgagaggttcgagaaggaggctgctgagatgaacaagaggtccttcaagtacgcatgggttttggacaaacttaaggctgagcgtgagcgtggtatcaccattgacattgctctctggaagttcgagaccaccaagtactactgcactgtcattgatgctcctggccatcgtgatttcatcaagaacatgatcactggtacctcccatgctgattg

SEQ ID NO: 143388 - DNA, 394 bp, Arabidopsis thaliana
caacaaacaaaaagaaaatggttaagctcagcaatctcctcgttgcaaccttcgggggtctgggcgtccttaacggctgccttgcgaggcagtcacttggggttcctcctcagctacagaacgagtgtaacctcgacaacctagatgttctccaagccaccgaaactatcaagagtgaagccggtcagatcgagtactgggaccacaaccaccctcagctccgatgtgttggtgtttccgttgctcgttatgtaattgaacaaggcggtctttacttgcccaccttcttcacttccccaaaaatttcctacgtcgttcaaggaacgggtatcagcggaagagtggtccctggatgtgccgagaccttcatggactcgcagccgatgcaaggaca

SEQ ID NO: 143389 - DNA, 302 bp, Arabidopsis thaliana
aaaaaagtatacttctttttgcttttgttgttttttgttctgttcattgattctttcaagaagtagaaatcaacaagctcggatttgaaatcctccgttaacggtggcgttgttgatgtgtatggagaagattcagccaccattgagcacaacataactccttggtctctctctgtttctagtggatattcattgctgagagatcctctctacaacaaaggacttgctttcactgagaaagatcgtgacactcatttctctgtgtggtcttttcccttcatttatgcttgattaaaagcttt

SEQ ID NO: 143390 - DNA, 406 bp, Arabidopsis thaliana
aaacaaaaagaaaatggttaagctcagcaatctcctcgttgcaaccttcggggttctcctcgtcctgaacggctgccttgcgaggcagtcacttggggttcctcctcagctacagaacgagtgtaacctcgacaacctagatgttctccaagccaccgaaactatcaagagtgaagccggtcagatcgagtactgggaccacaaccaccctcagctccgatgtgttggtgtttccgttgctcgttatgtaattgaacaaggcggtctttacttgcccaccttcttcacttccccaaaaatttcctacgtcgttcaaggaacgggtatcagcggaagagtggtccctggatgtgccgagaccttcatggactcgcagccgatgcaaggacaacaacaaggccaacct

SEQ ID NO: 143391 - DNA, 250 bp, Arabidopsis thaliana
accagagctcgtttcgaggagcttaacaatgatttgttcaggaagaccatgggacctgtgaagaaggccatggatgatgccggtctacagaagagccagatcgatgagattgtccttgttggtggaagcaccaggatcccaaaggttcagcaactgttgaaggacttctttgtaggtaaagagcctaacaagggtgtgaaccccgactaggctgttgcctatggtgctgctgctcagggtggtattttga

SEQ ID NO: 143392 - DNA, 405 bp, Arabidopsis thaliana
aaacaatttctcattagcttacaatggcggatacacaccgtgtcgaccgtactgatagacactttcaatttcagtcgccctatgaaggcggccgaggtcaaggtcagtatgaaggtgaccgtggttacggtggtggcggttacaagagcatgatgcctgaaagtggcccatctagtacccaagtaatgtctttgtctttatatttatacattctcttaatctttatacatacaaagttaagaaatgattctttacggatcaatggagtctatgttcatggaatcttgaaatatatgttcaaataaattatgaataattttgacactgttcgatttatatggttacatgcataaaacttcttcttgatcttctttttgttattgcgagttaaatatgaccttcaaa

SEQ ID NO: 143393 - DNA, 407 bp, Arabidopsis thaliana
ggaacgggtatcagcggaagagtggtccctggatgtgcttagaccttcatggactcgcagccgatgcaaggacaacaacaaggccaaccatggcaaggacgacagggacaacaaggccaaccatgggaaggacagggacaacagggacaacaaggaagacaaggccaaccatgggaaggacagggacaacagggacaacaaggacgacagggacaacaaggccaaccatgggaaggacagggacagcagggacaacaagggttccgtgacatgcaccagaaggtggaacatgtgagacgcggagacgtctttgccaacactccaggctctgcccactggatctacaactcatgagaacagccacttgtcatcatcgctcttctcgacatcgccaactaccaaaacca

SEQ ID NO: 143394 - DNA, 399 bp, Arabidopsis thaliana
aagaaaatggttaagctcagcaatctcctcgttgcaaccttcggggttctcctcgtccttaacgggtgccttgcgaggcagtcacttggggttcctcctcagctacagaacgagtgtaacctcgacaacctagatgttctccaagccaccgaaactatcaagagtgaagccggtcagatcgagtactgggaccacaaccaccctcagctccgatgtgttggtgtttccgttgctcgttatgtaattgaacaaggcggtctttacttgcccaccttcttcacttccccaaaaatttcctacgtcgttcaaggaacgggtatcagcggaagagtggtccctggatgtgccgagaccttcatggacttgcaaccgatgcatggacaacaacaaggccaacca

SEQ ID NO: 143395 - DNA, 401 bp, Arabidopsis thaliana
atcactcgccaaaaaccttgaaacctttaaaaaatcgttactatggctaagctcattctcgttttggcaactcttgccctcttcatcctcctagccaacgcatccatctaccgcacagtggtggagttcgaggaagatgatgacgtgagcaacccacaacaaggtaagtgccagagggagtttatgaagcatcagcaactaagaggttgcaagcaatggatccgcaagagagctcaacaaggaagaatcggatacgaagctgatgactttgagctcactcttgatgtcgatcttgaggacgatgagaacccaatggggcctcaacaacagtcatctcttaaaatgtgttgtaatgaattaaggcaagtggacaagatgtgtgtgtgtcctacactgaaaaa

SEQ ID NO: 143396 - DNA, 323 bp, Arabidopsis thaliana
ccatcacaaagaaaatggttaagctcagcaatctcctcgttgcaaccttcggggttctcctcgtccttaacggctgccttgcgaggcagtcacttggggttcctcctcagctacagaacgagtgtaacctcgacaacctagatgttctccaagccaccgaaactatcaagagtgaagccggtcagatcgagtactgggaccacaaccaccctcagctccgatgtgttggtgtttccgttgctcgttatgtaattgaacaaggcggtctttacttgcccaccttcttcacttccccaaaaattttctacgtcgttcaaggaacg

SEQ ID NO: 143397 - DNA, 404 bp, Arabidopsis thaliana
caggaacagctagaagactcttcagggcacagatttaacacccaccacaccgtcttcttcaacgaaaatttaccaccagagatcgcagatatttcttcaatctctctcttttagatccgattcgatgccgtcccgtagacgtaccctcctcaaggtcatcatcctcggtgatagcggggtgggaaaaacctctttgatgaatcagtatgttaataaaaagttcagcaaccagtacaaggcaaccattggagccgacttcttgaccaaggaagtacagtttgaagatcgacttttcactttacagatctgggatacagctggacaggaaaggtttcagagccttggtgtagccttttaccggggtgctgattgctgtgttcttgtatatgatggcaattccatgg

SEQ ID NO: 143398 - DNA, 391 bp, Arabidopsis thaliana
aattaatggttttgatcttccaaccagatcttcttctctatctcttcgacaaacccttttttctgggttcttcggagaggtgatttatcaccaaaaaaaagattttaaaagtctaaatccttttttctttctttccttcaacatgcctttaccttggaagaaatctaaatctagtcggatctctagattcgtatcagactttcaacaatctcctaaacatggtggatctctcgttgttgaaactggtttcccaacttctttaatcgatctctttgttaagaatcgcgatcgtctcaaataaaaaaaatatatcagaatttattaattaaattaatataataatttattaaactatataattattactttattttatttttctttgggcggc

SEQ ID NO: 143399 - DNA, 402 bp, Arabidopsis thaliana
agaaaatggttaagctcagcaatctcctcgttgcttccttcggggttctcctcgtccttaacggctgccttgcgaggcagtcacttggggttcctcctcagctacagaacgagtgtaacctcgacaacctagatgttctccaagccaccgaaactatcaagagtgaagccggtcagatcgagtactgggaccacaaccaccctcagctccgatgtgttggtgtttccgttgctcgttatgtaattgaacaaggcggtctttacttgcccaccttcttcacttccccaaaaatttcctacgtcgttcaaggaacgggtatcagcggatagagtggtccctggatgtgccgagaccttcatggactctcagccgatgcatggacaacaacaaggccaaccttgg

SEQ ID NO: 143400 - DNA, 426 bp, Arabidopsis thaliana
  unsure (1)..(426): unsure at all n locations
aagaaataacaaaatggctcgagtctcttctcttctttctttcttcttaacacttttgatccttttccatggctacgcggctcaacagggtcagcagggtcagcagtttccgaacgagtgccagctcgaccagctcaatgcgctcgagccgtcacacgtactgaagagcgaggctggtcgcatcgaggtgtgggaccaccacgctcctcagctccgntgctcaagtgtctnctttgcacgttacatcatcgagtctaagggtctctacttgccctcttttttaacaccgcgaaactttctttcgtggctaagggacgaggtcttatgggaaaagtgatccctggatgcgccgaaacattccaagactcatcagagttccaaccacgcttcgaaggtcaaggcaaagccagaggttccgtgacatgc

SEQ ID NO: 143401 - DNA, 458 bp, Arabidopsis thaliana
caaaaagaaaatggttaagctcagcaatctcctcgttgcaaccttcggggttctcctcgtccttaacggctgccttgcgaggcagtcacttggggttcctcctcagctacagaacgagtgtaacctcgacaacctagatgttctccaagccaccgaaactatcaagagtgaagccggtcagatcgagtactgggaccacaaccaccctcagctccgatgtgttggtgtttccgttgctcgttatgtaattgaacaaggcggtctttacttgcccaccttcttcacttccccaaaaatttcctacgtcgttcaaggaacgggtatcagcggaagagtggtccctggatgtgccgagaccttcatggactcgcagccgatgcaaggacaacaacaaggccaaccatggcaaggacgacagggacaacaaggccaaccatgggaaggacagggacaacagg

SEQ ID NO: 143402 - DNA, 475 bp, Arabidopsis thaliana
  unsure (1)..(475): unsure at all n locations
cttgaatctactgttngaagttggtactgtctcctgtatgcgattatccacatntttcaacgtctcaccactttagnctccatcgttcctcttcccttgctcacaaagaggnttcaattagtattcacacacacgaaacatcgtaccgacanaactaattatgcantgccatgttttttagaataaatatattcgttaatgaatcatgatcagaaaatganagttctttgtgtaaacgtcctaataatggttgcgtttcaattanttatacggtttatctgttcttaatcggatgtgcctctaaacggacaccaaaaattattacctataggctatgaggttgagatgtagacgttattgcatgatctatgcagcagattggccggtcattaattagtaatttgacacaaaaaaaacagctctttcttgtttccaaaaggtttcaatcaaaacgctaaagtcaaacaactctcct

SEQ ID NO: 143403 - DNA, 451 bp, Arabidopsis thaliana
caaatagttactgggaagcagagctacccccaaactatgatagagttggaattgagaattttgtacgtgcaaagtatgaagagaagagatgggtttctagaggggaaaaggctagatcacctcctagagtcgagcaggaacggcggaaatctgtggagagaagtgggccgggatatgagcatggacatagtagtagtcctgtaaatttgtttgaggagaggaaaactattccagcatctagaacaagaaataatgttgctgcaacgagaataaatcttcccgtgcctccccaaggacccagtcaggttataaagccacagcagaaaatggagtctgcagctactccagtagagagggagaaacaagcagtaaatgttgcaccagcatcagatccttcaaaggtggattttgctactgatctgtttaacatgctatcaatggatgattcgac

SEQ ID NO: 143404 - DNA, 451 bp, Arabidopsis thaliana
accaaacaaaaaaaaaatggttacgctcagcaatcttttcgttgcaacctccggggttctcctcgtccttaacggctgccttgcgaggcagacacttggggttcctcctcagctacagaacgagtgtaacctcgacaacctagatgttctccaagccaccgaaactatcaagagtgaagccggtcagatcgagtactgggaccacaaccaccctcagctccgatgtgttggtttccgttgctcgttatgtaattgaacaaggcggtctttacttgcccaccttcttcacttccccaaaaatttcctacgtcgttcaaggaacgggtatcagcggaagagtggtccctggatgtgccgagaccttcatggactcgcagccgatgcaaggacaacaacaaggccaaccatggcaaggacgacagggacaacaaggccaaccatgggaaggaca

SEQ ID NO: 143405 - DNA, 457 bp, Arabidopsis thaliana
aagaaaaatgggtcgagtctcatctattatctctttctttttgacactcttgatcctcttcaatggctacactgcccaacagtggcccaacgagtgccagctcgatcaactcaatgcgctcgaaccatcccaaatcatcaagagcgagggtggtcgcatcgaggtctgggaccaccatgcaccccagctccgttgctccggctttgcctttgagcgtttcgtcattgagcctcagggtcttttcttgcccactttcttgaacgccggcaaactcacgtttgttgttcacggaaggggtctaatgggaagagttattccgggatgcgccgagacgttcatggagtcaccggtatttggagaaggtcaaggtcagggtcagagtcaagggttccgtgacatgcaccagaaagtagagcacctacggggcggtgacaccattgcaacaccatctggtgta

SEQ ID NO: 143406 - DNA, 458 bp, Arabidopsis thaliana
atctctatatacccccttttaatttgtgtgctcttagcctttactctatagttttatatcatatcaatcgacatggcgaatgtggaccgtgatcggcgtgtgcatgtagaccgtactgacaaacgtgttcatcagccaaactacgaagatgatgtcggttttggtggctatggcggttatggtgctggttctgattataagagtcgcggcccctccactaaccaaatcttggcacttatagcaggagttcccattggtggcacactgctaaccctagctggactcactctagccggttcggtgatcggcttgctagtctccatacccctcttcctcctcttcagtccggtgatagtcccggcggctctcactattgggcttgctgtgacgggaatcttggcttctggtttgtttgggttgacgggtctgagctcggtctcgtgggtcctcaactacct

SEQ ID NO: 143407 - DNA, 460 bp, Arabidopsis thaliana
gtctaaagaagaatggcattgatcactctttgtgtgaactttttttacgtatgcaaggtttcttttctagcatgattcattgattttactaacacaacttcaacacataccaatctgattatattctagctaggcaaaaagattacgttaatgtgtatctcacgtgtttagtctagtgtagaataagatatcaaaactctgttgattttattgattcacaaactattggaatttatacacaatgatctctatcaagagataaacataaatccctaaaatataggttataaactctatcaccaaagatattgtacgaatcctaagatattaatatctcaagaattaccaacagctaaacgaaataatattgtttacatcgcttggacaggtctatattattcaaaagaaattagcactaatcagaagaaaaaaagtttcaaacaacactgatttgaataat

SEQ ID NO: 143408 - DNA, 114 bp, Arabidopsis thaliana
  unsure (1)..(114): unsure at all n locations
ggccgacccatgtcggacgagtaggcatgtnctttttcaagtttggaactgttcacatgccacgtgcactttagctgtctccttttccttntatcttcttttaatgcaagaaaa

SEQ ID NO: 143409 - DNA, 401 bp, Arabidopsis thaliana
aacaaacaaaaagaaaatggttaagctcatatctcctcgttgcaaccttcggggttctcctcgtccttaacggctgccttgcgaggcagtcacttggggttcctcctcagctacagaacgagtgtaacctcgacaacctagatgttctccaagccaccgaaactatcaagagtgaagccggtcagatcgagtactgggaccacaaccaccctcagctccgatgtgttggtgtttccgttgctcgttatgtaattgaacaaggcggtctttacttgcccaccttcttcacttccccaaaaatttcctacgtcgttcaaggaacgggtatcagcggaagagtggtccctggatgtgccgagacctttatggactcgcagccgatgcaaggacaacaacaaggc

SEQ ID NO: 143410 - DNA, 318 bp, Arabidopsis thaliana
accggaacgacgggccgcccacgcgtccgtgaagtttttgattccgcaaatgactacgttaaattaatgaagtcaatcttcgattttgaagccatccggaaattgctatcatctccaaagtttacattctgctatgatgcattgcatggagttgctggagcctatgcacatcgcatctttgtcgaagaactcggtgcgcaagaaagcgcattattgaactgcactcccaaggaggactttggaggagggcatccggatcccaatttgacctatgctaaagagcttgtggcacgaatgggattaggtaaatccgacact

SEQ ID NO: 143411 - DNA, 458 bp, Arabidopsis thaliana
caagtaattaactaacaacaaatggcgaacaagctcttcctcgtctgcgcagctctcgccctgtgtttcatcctcaccaacgcttccgtctatcgcacggttgtcgagttcgacgaagatgacgccagtaaccccataggcccaatacagaaatgtcagaaggagtttcagcaagaacagcacctaagagcttgccagagatggatgcgcaagcaaatgtggcaaggacgtggtggtggtccttccctcgacgatgagttcgatatggaagacgacatcgagaacccgcagagacgacagctactccagaagtgctgcagcgagcttcgccaagaagagccagtttgcgtttgccccaccttgagacaagctgccaaggccgttagattccaaggacagcaacaccaaccagagcaagtcaggaaaaattaccaggcagctaaatacttggctaacat

SEQ ID NO: 143412 - DNA, 319 bp, Arabidopsis thaliana
aacaaacaaaaagaaaatggggtaagctcattaattttctcggtgcaaccttcgggggtcttcgtggttcttaaccgctgtcttgcgaggcagacacattgggtgtctcctcagatacacaacgcgtgtgacctctacaacctatatgttttccaaaccaccccaactctctaaagtgaaacccgtcacatctcgtactcggaccacaaacaccctcaaatccgatgtgttggggtttccgccgctcgttatgtaatagaacaacgcggcgtttactattccaccttcttcacttctccaaaaaaattctacttcgttc

SEQ ID NO: 143413 - DNA, 349 bp, Arabidopsis thaliana
  unsure (1)..(349): unsure at all n locations
ccggaacggagggncgggccaggcgtccgggaaaacatacacaaatagcaaaacatggctaacatgcttttcctcgtctgcgcaactctcgccctctgcttcctcctcaccaacgcttccatctaccgcaccgttgtcgaattcgaagaagatgacgccagcaaccccgtaggtccaagacagagatgccagaaggagtttcagcaatcacaacacctaagagcttgccagagatggatgagcaagcaaatgaggcaaggacgtggtggtggtccttccctcgacgatgagttcgatttcgagggcccncagcagggataccagctactccagcaatgctgcaacgagc

SEQ ID NO: 143414 - DNA, 293 bp, Arabidopsis thaliana
cgcatgcattcgacctgaacatgatccagatgcaacaggtaacatgtccgacacggaggcggtcatgacagggtggctgtttccggagtcgacaagagatcccatcaccattggttctggcgatgccgacggtaacaaggaggatgcaccgaaactaggcggggtgtttagatgacctgtgggtttaacaccgcgaagctctttttcgtggctaagggacgaggtcttattggaaaagtgatccctggatgcgccgaaacatttcaagactcattaaatttctaaccacgctt

SEQ ID NO: 143415 - DNA, 425 bp, Arabidopsis thaliana
aaaaaggaaaatggttaagctcagcaatctcctcgttgcaaccttcggggttctcctcgtccttaacggctgccttgcgaggcagtcacttggggttcctcctcagctacagaacgagtgtaacctcgacaacctagatgttctccaagccaccgaaactatcaagagtgaagccggtcagatcgagtactgggaccacaaccaccctcagctccgatgtgttggtgtttccgttgctcgttatgtaattgaacaaggcggtctttacttgcccaccttcttcacttccccaaaaatttcctacgtcgttcaaggaacgggtatcagcggaagagtggtccctggatgtgccgagaccttcatggactcgcagccgatgcatggacaacaacaaggccaaccatggctaggacgacagggacaac

SEQ ID NO: 143416 - DNA, 459 bp, Arabidopsis thaliana
accacgcgtccgcaaaaagaaaatggttaagctcagcaatcttctctttgttaccttcggggttcttctcgtccttaacggctgccttgcgaggcagtcacttggggttcctcctcagctacagaacgagtgtaacctcgacaacctagatgttctccaagccaccgaaactatcaagagtgaagccggtcagatcgagtactgggaccacaaccaccctcagctccgatgtgttggtgtttccgttgctcgttatgtaattgaacaaggcggtctttacttgcccaccttcttcacttccccaaaaatttcctacgtcgttcaaggaacgggtatcagcggaagagtggtccctggatgtgccgagaccttcatggactcgcagccgatgcaaggacaacaacaaggccaaccatggcaaggacgacagggacaacaaggcccaccatgggaaggaca

SEQ ID NO: 143417 - DNA, 166 bp, Arabidopsis thaliana
ctttaattaaatattttcaacttgataacttaatttatatttttcaaaaaattaactcttatgtaatcgatgaaaacggaataattttaaatctcgacccatatagtaacgttgttttgaatccattcaaattgaattggtattttcttcatcaaaattatcatca

SEQ ID NO: 143418 - DNA, 461 bp, Arabidopsis thaliana
aacaaacaaaaagaaaatggttaagctcagcaatttcctcgttgcaaccttcggggttctcctcgtccttaacggctgccttgcgaggcagtcacttggggttcctcctcagctacagaacgagtgtaacctcgacaacctagatgttctccaagccaccgaaactatcaagagtgaagccggtcagatcgagtactgggaccacaaccaccctcagctccgatgtgttggtgtttccgttgctcgttatgtaattgaacaaggcggtctttacttgcccaccttcttcacttccccaaaaatttcctacgtcgttcaaggaacgggtatcagcggaagagtggtccctggatgtgccgagaccttcatggactcgcagccgatgcaaggacaacaacaaggccaaccatggcaaggacgacagggacaacaaggccaaccatgggaaggacagggacaac

SEQ ID NO: 143419 - DNA, 465 bp, Arabidopsis thaliana
caaaaagaaaatggttaagctcagcaatctcctcgttgtttccttcggggttctcctcgtccttaacggctgccttgcgaggcagtcacttggggttcctcctcagctacagaacgagtgtaacctcgacaacctagatgttctccaagccaccgaaactatcaagagtgaagccggtcagatcgagtactgggaccacaaccaccctcagctccgatgtgttggtgtttccgttgctcgttatgtaattgaacaaggcggtctttacttgcccaccttcttcacttccccaaaaatttcctacgtcgttcaaggaacgggtatcagcggaagagtggtccctggatgtgccgagaccttcatggactcgcagccgatgcaaggacaacaacaaggccaaccatggcaaggacgacagggacaacaaggccaaccatgggaaggacagggacaacagggacaaca

SEQ ID NO: 143420 - DNA, 408 bp, Arabidopsis thaliana
cagggacaacagcaggaacaacagctattccagcagtgctgcaacgagcttcgccaggaagagccagattgtgtttgccccaccttgaaacaagctgccaaggccgttagactccagggacagcaccaaccaatgcaagtcaggaaaatttaccagacagccaagcacttgcccaacgtttgcgacatcccgcaagttgatgtttgtcccttcaacatcccttcattcccttctttctactaaatctcaaacaaaccctcaaagcgtatgagagtgtggttgttgatatatacatgttgacacttgacacataccacacctcatcgtgtgttttatgataaatgtaagcttttggatgtttgagggtaatgtaagcactacttaataaataagagttttgtttatttt

SEQ ID NO: 143421 - DNA, 451 bp, Arabidopsis thaliana
gggagaggaagagagaagatggaagagaattgcgaggattgcatgaaatgggaagaagaactctactggactcattttcaaactctccatttcactcagctcctccttcctggtttccacaatcgcctcgtcatacctcgaaagttttcaacacactgcaaaaggaagctgcctcagattgtgactctcaaaagtccaagtggcgttacatataatgtgggagtagaggaagatgatgaaaagacaatggcttttcgttttgggtgggacaagtttgtgaaagatcattcgctagaggagaatgatctattggtcttcaagttccatggagtgtctgagtttgaagtgcttgttttcgatggacagactttatgtgagaaacctacttcttatttcgtcaggaaatgtgggcatgcagagaagaccaaagcatctcacaccggttatgagc

SEQ ID NO: 143422 - DNA, 452 bp, Arabidopsis thaliana
aagaaaaatgggtcgagtctcatctattatctctttctctttgacactcttgatcctcttcaatggctacactgcccaacagtggcccaacgagtgccagctcgatcaactcaatgcgctcgaaccatcccaaatcatcaagagcgagggtggtcgcatcgaggtctgggaccaccatgcaccccagctccgttgctccggctttgcctttgagcgtttcgtcattgagcctcagggtcttttcttgcccactttcttgaacgccggcaaactcacgtttgttgttcacggaaggggtctaatgggaagagttattccgggatgcgccgagacgttcatggagtcaccggtatttggagaaggtcaaggtcagggtcagagtcaagggttccgtgacatgcaccagaaagtagagcacctacggtgcggtgacaccattgcaacaccatctg

SEQ ID NO: 143423 - DNA, 464 bp, Arabidopsis thaliana
aagaaaatggttaagctcagcaatctcctcgttgcaaccttcggggttctcctcgtccttaacggctgccttgcgaggcagtcacttggggttcctcctcagctacagaacgagtgtaacctcgacaacctagatgttctccaagccaccgaaactatcaagagtgaagccggtcagatcgagtactgggaccacaaccaccctcagctccgatgtgttggtgtttccgttgctcgttatgtaattgaacaaggcggtctttacttgcccaccttcttcacttccccaaaaatttcctacgtcgttcaaggaacgggtatcagcggaagagtggtccctggatgtgccgagaccttcatggactcgcagccgatgcaaggacaacaacaaggccaaccatggcaaggacgacagggacaacaaggccaaccatgggaaggacagggacaacagggacaacaagg

SEQ ID NO: 143424 - DNA, 456 bp, Arabidopsis thaliana
  unsure (1)..(456): unsure at all n locations
gtgaagagaaaaatggtggatctattgaactcggtgatgaacctggtggcgcctccagcgaccatggtggtgatggcctttgcatggccattactgtctttcattagcttctccgaacgggcttacaactcttatttcgccaccgaaaatatggaagataaagtagttgtcatcaccggagcttcatcggccattggagagcaaatagcatatgaatatgcaaaaagaggagcgaatttggtgttggtggcgaggagagagcagagactgagagttgtgagtaataaggctaaacagattggagccaaccatgtgatcatcatcgctgctgatgtcatcaaagaagatgactgccgcctgtttatcacccaagccgtcaactattacggccgcgtggatcatctagtgaatacagcgagtcttggacacactntttactttgaggaagtgagtgac

SEQ ID NO: 143425 - DNA, 479 bp, Arabidopsis thaliana
  unsure (1)..(479): unsure at all n locations
gtccgtaagaaaagcagcancgaacacccaacttcttaagggaaatacatttaagttatgggttacagtaaattgcatgcaggtttaaatgctaccgtgtcccagcgttaagacannctcacagtctcacatctgtcccntttttaccttacgacttcgcttctttntgggcttcttttaaacctctctctatctctctctttcttcttcacactttgttgttaatttcaagtgtttgatcataatggcaacatcagctcgtagagcatacggtttcggtagagccgatgaggctacacaccctgactccattagagcaactttagctgagtttctctccacttttgtcttcgtctttgcagctgaaggctctatcctctctctcgataagttgtattgggaacatgcggctcatgcggngacaaacacaccaggagggctgattntagtagcgttggctcatgcgtttgcttctgttg

SEQ ID NO: 143426 - DNA, 460 bp, Arabidopsis thaliana
ggagtggagacacccacgtagcccacagggcaacttccttgaggagactatctgcagcatgaggtcccacgagaacattgacgaccctgctcgtgctgacgtgtacaagcccagcctaggtcgcgtgaccagcgtcaacagctataccttgcccatcttggagtatgtcaggctcagtgccactcgtggcgttctccagggtaatgcgatggtgcttcctaaatacaacatgaacgctaacgagatcttgtactgcactggaggacaaggaaggatccaagtggtcaacgacaacggacagaacgtgttggaccaacaggtgcagaagggacagctcgtggtcatcccacaagggttcgcatacgttgtccagtcccacggaaacaagttcgagtggatctctttcaaaactaatgaaaacgcaatgatcagcactttggcgggtagaacctcgctcttg

SEQ ID NO: 143427 - DNA, 462 bp, Arabidopsis thaliana
ggacaacagggacaacaaggaagacaaggttaactatgggaaggacagggacaacagggacaacaaggacgacagggacaacaaggccaaccatgggaaggacagggacagcagggacaacaagggttccgtgacatgcaccagaaggtggaacatgtgagacgcggagacgtctttgccaacactccaggctctgcccactggatctacaactcaggagaacagccacttgtcatcatcgctcttctcgacatcgccaactaccaaaaccaactcgaccgcaaccctagagtgttccatttggccggaaacaaccagcagggaggctttggcggttcacagcaacaacaagaacagaaaaacttgtggagcgggttcgacgcacaggtcatagcttaagcattgaaaattgacgttcagttggctcagcagcttcagaaccaacaagacagcagaggaaac

SEQ ID NO: 143428 - DNA, 454 bp, Arabidopsis thaliana
agaaataacaaaatggctcgagtctcttctcttttttctttcttcttaacacttttgatccttttccatggctacgcggctcaacagggtcagcagggtcagcagtttccgaacgagtgccagctcgaccagctcaatgcgctcgagccgtcacacgtactgaagagcgaggctggtcgcatcgaggtgtgggaccaccacgctcctcagctccgttgctcaggtgtctcctttgcacgttacatcatcgagtctaagggtctctacttgccctctttctttaacaccgcgaagctctctttcgtggctaaaggacgaggtcttatgggaaaagtgatccctggatgcgccgaaacattccaagactcatcagagttccaaccacgcttcgaaggtcaaggtcaaagccagaggttccgtgacatgcaccagaaagtggagcacattaggagcg

SEQ ID NO: 143429 - DNA, 454 bp, Arabidopsis thaliana
atctgaagaaaaaaaaaagagtcaacaaattaaataaaccaatggaagaagaagatcctacagcaagcaatgtgataacgaattcgaattcttcatctatgagaaacctatcgccggcgatgaatactccggtggtttcacttgagtcacgaatcaatcgattaatcaatgctaatcaatctcaatcaccatcaccatcatcactatcaaggtctatatactctgatagatttatccccagtagatccggatccaatttcgctcttttcgatctatctccttctcctagtaaagatggtaaggaagatggagctggctcttacgctactctgttgcgtgcggcgatgtttggtcctgagacgccggagaagagagatattactgggttttcttcttccaggaatatttttaggtttaagacggagactcatcggtctttgaattcgttttctcc

SEQ ID NO: 143430 - DNA, 447 bp, Arabidopsis thaliana
atgggaaggacagggacaacagggacaacatggactacagggacaacaaggccaaccatgggaaggacagggacagcagggacaacaagggttccgtgacatgcaccagaaggtggaacatgtgagacgcggagacgtctttgccaacactccaggctctgcccactggatctacaactcaggagaacagccacttgtcatcatcgctcttctcgacatcgccaactaccaaaaccaactcgaccgcaaccctagagtgttccatttggccggaaacaaccagcagggaggctttggcggttcacagcaacaacaagaacagaaaaacttgtggagcgggttcgacgcacaggtcatagctcaagcattgaaaattgacgttcagttggctcagcagcttcagaaccaacaagacagcagaggaaacatcgttcgtgttaagggacc

SEQ ID NO: 143431 - DNA, 453 bp, Arabidopsis thaliana
caaaaagaaaatggttaagctcagcaatctcctcgttgcaaccttcggggttctcctcgtccttaacggctgccttgcgaggcagtcacttggggttcctcctcagctacagaacgagtgtaacctcgacaacctagatgttctccaagccaccgaaactatcaagagtgaagccggtcagatcgagtactgggaccacaaccaccctcagctccgatgtgttggtgtttccgttgctcgttatgtaattgaacaaggcggtctttacttgcccaccttcttcacttccccaaaaatttcctacgtcgttcaaggaacgggtatcagcggaagagtggtccctggatgtgccgagaccttcatggactcgcagccgatgcaaggacaacaacaaggccaaccatggcaaggacgacagggacaacaaggccaaccatgggaaggacagggaca

SEQ ID NO: 143432 - DNA, 325 bp, Arabidopsis thaliana
gcggaagagtggtccctggatgtgccgagacctttatttttcttcaaccgatgcaaggacaacaacagggccaaccatggcaaggacgacagggacaacaaggccaaccatgggaaggacagggacaacagggacaacaaggaatacaaggccaaccatgggaaggacagggacaacagggacaacaaggatgacagggacaacaaggtcaaccatggtaaggacagggacagcaggtacaacaagttttccgtgtcatgcatcataaggtggtacatgttagatacatagacatcttttttaactctttcttttttgtttttat

SEQ ID NO: 143433 - DNA, 483 bp, Arabidopsis thaliana
  unsure (1)..(483): unsure at all n locations
gaaggggcgccaccaacgcgtccgaaaaatggctcgagtctctnctcttatatctttctttttaacactttagatccttttccatggttacgcggttcaacagggtcagcagggtcagcagtttccgaacgagtgccagctcgaccagctcaatgcgctcgagccttcacacgtactgaagagcgaggctggtcgcatcgaggtgtgggaccaccacgctcctcagctccgttgctcaggtgtctcctttgcacgttacatcatcgagtctaagggtctctacttgccctctttctttaacaccgcgaagctctccttcgtggctaaaggacgaggtcttatgggaaaagtgatccctggatgcgccgaaacattccaagactcatcagagttccaaccacgcttcgaaggtcaaggtcaaagccagaggttccgtgacatgcaccagaaagtggagcacattaggagcggtgataccattgc

SEQ ID NO: 143434 - DNA, 458 bp, Arabidopsis thaliana
ctcttctcttctttctttctccttaacacttttgttccttttccatggctacgcggctcaacagggtcagcagggtcagcagtttccgaacgagtgccagctcgaccagctcaatgcgctcgagccttcacacgtactgaagagcgaggctggtcgcatcgaggtgtgggaccaccacgctcctcagctccgttgctcaggtgtctcctttgcacgttacatcatcgagtctaagggtctctacttgccctctttctttaacaccgcgaagctctccttcgtggctaaaggacgaggtcttatgggaaaagtgatccctggatgcgccgaaacattccaagactcatcagagttccaaccacgcttcgaaggtcaaggtcaaagccagaggttccgtgacatgcaccagaaagtggagcacattaggagcggtgataccattgccacaacacccggtg

SEQ ID NO: 143435 - DNA, 454 bp, Arabidopsis thaliana
acaaaacaaaacacacccaaatatgcataagcttttgttttctcttctctccgtcgtctcactctcatttctcctcttcttccatggcgccgaggcacgccagcgagaggcgccgtttccaaacgcctgccatttcagccaaatcaacagcctcgcgcccgctcaggcgacgaagttcgaagccggtcagatggaagtatgggaccacatgagccctgagctccgatgcgccggtgtaacggtggctcgcatcacccttcagcccaattccattttcttgcccgctttctttagcccacctgcccttgcttacgttgtccaaggagaaggagttatggggacgattgcttctggttgtcctgagacttttgcagaagttgaaggatcatcaggaagaggaggaggaggagacccgggtcgacgttttgaggacatgcaccagaagatggagaat

SEQ ID NO: 143436 - DNA, 459 bp, Arabidopsis thaliana
aagaaaatggttaagctcagcaatctcctcgttgttaccttcggggttctcctcgtccttaacggctgccttgcgaggcagtcacttggggttcctcctcagctacagaacgagtgtaacctcgacaacctagatgttctccaagccaccgaaactatcaagagtgaagccggtcagatcgagtactgggaccacaaccaccctcagctccgatgtgttggtgtttccgttgctcgttatgtaattgaacaaggcggtctttacttgcccaccttcttcacttccccaaaaatttcctacgtcgttcaaggaacgggtatcagcggaagagtggtccctggatgtgccgagaccttcatggactcgcagccgatgcaaggacaacaacaaggccaaccatggcaaggacgacagggacaacaaggccaaccatgggaaggacagggacaacagggacaa

SEQ ID NO: 143437 - DNA, 453 bp, Arabidopsis thaliana
ctcttcgttcctttctctctctagatcttaagcccaaatgttgcacaaggcttctcccgctctctctctcttgagctccggctacaccggcggtggaaatctgtttcctccgtcgagaaattcgtcgaatcttctgttttctccgagtggatccaggttttctgttcaggcggcgaaaggaacgaacacgaagtcgttaaccggagttgtattcgaaccttttgaggaggtgaagaaagaaatggagctcgttcccactaccccttttgtttctctcgctcgccacaagttctccgacgattctgaatctgccatcaacgatcagatcaacgtggagtacaacgtctcgtatgtctaccatgccctgtatgcctactttgacagagacaatggccgcttgaaagggttcgccaagtttttaacgattcgagtcttgaagaacgaggtcatgct

SEQ ID NO: 143438 - DNA, 455 bp, Arabidopsis thaliana
gttcgctaataacagagcgatattactcgactatgttaagaacacggtggtgaaaacttttccggcgattcccggtggtgatccgagaaactatccgagcactggctcagccgtgttattaccgttaaagaatcttgaagcggataatgtcgagacggaggttctagtgtgtggaggtgcaccaaaaggatcatacaacctcgctagaaagaaaactttcgtgaaagcgcttgacacgtgtgcaaggatcaagattaacgatgccaaacctgaatgggcggttgagaagatgccacatgctagagttatgggagatatgattcctttgccaaacggagatgttttgctaatcaacggtggatcttttggtactgctgcatgggagcttggtcgtacaccggttttagcaccggacctataccatcccgagaatccggttggctctaggtttgaat

SEQ ID NO: 143439 - DNA, 454 bp, Arabidopsis thaliana
cactaatctttttttggtgtttattaatacaagtttaatggaaatctatgctaatacagttacaacatgccaagctcccactcaatggaagatggctacagaatcagattcacaggtctgatcctgttttaacggtctgattctgtccctctagcaaacttatttgtcgcctcagtttcgcaatatgagcttgaacctatccaacaaagaaccaatccaaattcatcaaaacatagaccaacaaaaatagtctaaacttaatatcaaaaatttagaaaagaaagttaaaatgttttcaagctacaatttagaaaacaacaatttcttttagtttcaagttacctgttgacgagcagctgcgagctgtaacaactcatccgcttcagagaaactcatgaaccattgtcccaaactatgatctttcgtatcacctctcttctttttcccggtatct

SEQ ID NO: 143440 - DNA, 451 bp, Arabidopsis thaliana
aacaaaaagaaaatggttaagctcagcaatctcctcgttgcaaccttcggggttctcctcgtccttaacggctgccttgcgaggcagtcacttggggttcctcctcagctacagaacgagtgtaacctcgacaacctagatgttctccaagccaccgaaactatcaagagtgaagccggtcagatcgagtactgggaccacaaccaccctcagctccgatgtgttggtgtttccgttgctcgttatgtaattgaacaaggcggtctttacttgcccaccttcttcacttccccaaaaatttcctacgtcgttcaaggaacgggtatcagcggaagagtggtccctggatgtgccgagaccttcatggactcgcagccgatgcaaggacaacaacaaggccaaccatggcaaggacgacagggacaacaaggccaaccatgggaaggacagg

SEQ ID NO: 143441 - DNA, 460 bp, Arabidopsis thaliana
aacaaaatggctcgagtctcttctcttctttctttctttttaacacttttgatccttttccatggctacgcggctcaacagggtcagcagggtcagcagtttccgaacgagtgccagctcgaccagctcaatgcgctcgagccgtcacacgtactgaagagcgaggctggtcgcatcgaggtgtgggaccaccacgctcctcagctccgttgctcaggtgtctcctttgcacgttacatcatcgagtctaagggtctctacttgccctctttctttaacaccgcgaagctctctttcgtggctaagggacgaggtcttatgggaaaagtgatccctggatgcgccgaaacattccaagactcatcagagttccaaccacgcttcgaaggtcaaggtcaaagccagaggttccgtgacatgcaccagaaagtggagcacattaggagcggtgataccattg

SEQ ID NO: 143442 - DNA, 455 bp, Arabidopsis thaliana
aacaaaaagaaaatggttaagctcagcaatctcctcgttgcaaccttcggggttctcctcgtccttaacggctgccttgcgaggcagtcacttggggttcctcctcagctacagaacgagtgtaacctcgacaacctagatgttctccaagccaccgaaactatcaagagtgaagccggtcagatcgagtactgggaccacaaccaccctcagctccgatgtgttggtgtttccgttgctcgttatgtaattgaacaaggcggtctttacttgcccaccttcttcacttccccaaaaatttcctacgtcgttcaaggaacgggtatcagcggaagagtggtccctggatgtgccgagaccttcatggactcgcagccgatgcaaggacaacaacaaggccaaccatggcaaggacgacagggacaacaaggccaaccatgggaaggacagggaca

SEQ ID NO: 143443 - DNA, 457 bp, Arabidopsis thaliana
caccacattattttcactgagcgcataacatttttgagacaagagactctctctctctctcttctctctttctctccccctctctccggcgatggttgttgctatggaccaacgcaccaatgtgaacggagatcccggcgccggagaccggaagaaagaagaaaggtttgatccgagtgcacaaccaccgttcaagatcggagatataagggcggcgattcctaagcactgttgggttaagagtcctttgagatcaatgagttacgtcgtcagagacattatcgccgtcgcggctttggccatcgctgccgtgtatgttgatagctggttcctttggcctctttattgggccgcccaaggaacacttttctgggccatctttgttctcggccacgactgtggacatgggagtttctcagacattcctctactgaatagtgtggttggtcacattctt

SEQ ID NO: 143444 - DNA, 457 bp, Arabidopsis thaliana
caaaaagaaaatggttaagctcagcaatctccttgttgctaccttcggggttctcctcgtccttaacggctgccttgcgaggcagtcacttggggttcctcctcagctacagaacgagtgtaacctcgacaacctagatgttctccaagccaccgaaactatcaagagtgaagccggtcagatcgagtactgggaccacaaccaccctcagctccgatgtgttggtgtttccgttgctcgttatgtaattgaacaaggcggtctttacttgcccaccttcttcacttccccaaaaatttcctacgtcgttcaaggaacgggtatcagcggaagagtggtccctggatgtgccgagaccttcatggactcgcagccgatgcaaggacaacaacaaggccaaccatggcaaggacgacagggacaacaaggccaaccatgggaaggacagggacaacag

SEQ ID NO: 143445 - DNA, 448 bp, Arabidopsis thaliana
gccagtcaccagaaccagcttgaccgcaacccatggccattttacttagccggaaacaacccacaaggtcaagtatggctacaaggacgagagcaacagccacagaagaacatcttcaatggatttggacccgaggttattgctcaagctttgaagattgatcttcagacagcgcagcaacttcagaaccaagatgacaaccgtggaaacattgtccgagtccaaggcccgttcggtgtcattaggccgcctttgaggggccagagacctcaggaggaggaagaagaagaagaaggacgacacggacgacacggtaatggcttagaggagaccatctgcagcgccaggtgcaccgataacctcgatgatccgtctcgtgctgacgtgtacaagccacagctcggttacatcagcactctcaacagttacgatctccccatccttcgct

SEQ ID NO: 143446 - DNA, 455 bp, Arabidopsis thaliana
aagaaataacaaaatggctcgagtctcttctcttttttctttcttcttaacacttttgatccttttccatggctacgcggctcaacagggtcagcagggtcagcagtttccgaacgagtgccagctcgaccagctcaatgcgctcgagccgtcacacgtactgaagagcgaggctggtcgcatcgaggtgtgggaccaccacgctcctcagctccgttgctcaggtgtctcctttgcacgttacatcatcgagtctaagggtctctacttgccctctttctttaacaccgcgaagctctctttcgtggctaagggacgaggtcttatgggaaaagtgatccctggatgcgccgaaacattccaagactcatcagagttccaaccacgcttcgaaggtcaaggtcaaagccagaggttccgtgacatgcaccagaaagtggagcacattaggagcg

SEQ ID NO: 143447 - DNA, 122 bp, Arabidopsis thaliana
gaggaaataatgaacccaaaagattaaaatttattatataaaatatttatttttggtcaaaaatttatctctttgtataaattattttagttacgaaacttcgttgcccaaaatataaaatt

SEQ ID NO: 143448 - DNA, 454 bp, Arabidopsis thaliana
cacacatagcaaaaaatggcaaacaagttgttccttgtctgcgcagctctcgctctctgcttgctcctcaccaacgcttccatctaccgcaccgtcgttgagttcgaagaagatgacgccactaaccccataggcccaaaaatgaggaaatgccgcaaggagtttcagaaagaacaacacctaagagcttgccagcaattgatgctccagcaagcaaggcaaggccgtagcgatgagtttgatttcgaagacgacatggagaacccacagggacaacagcaggaacaacagctattccagcagtgctgcaacgagcttcgccaggaagagccagattgtgtttgccccaccttgaaacaagctgccaaggccgttagactccagggacagcaccaaccaatgcaagtcaggaaaatttaccagacagccaagcacttgcccaacgtttgcgaca

SEQ ID NO: 143449 - DNA, 449 bp, Arabidopsis thaliana
aatagatcgagttcctacaatcgaacctgttgattcctcggctcttagtccgcctaacgtgtatggaagcattgaactgaaaaacatcgacttctgctacccaacccgcccggaagtgttagtactaagcaacttcagtctcaaagtcaatggcggacaaacagtagctgtggttggtgtttctggttctggaaagagcacaataatatcgttgatcgagagatactacgacccagttgctggtcaggtcttattagatgggcgagacttgaagtcatataatttgagatggttaagaagccatatgggtctgattcaacaggaacccataatcttttccacaacgatcagagaaaacattatatacgcaaggcacaatgcaagtgaagctgagatgaaggaagcagcaaggattgcaaatgcccaccatttcatcagcagcttacctc

SEQ ID NO: 143450 - DNA, 461 bp, Arabidopsis thaliana
aacaaaaagaaaatggttaagctcagcaatctccttgttgcaaccttcggggttctcctcgtccttaacggctgccttgcgaggcagtcacttggggttcctcctcagctacagaacgagtgtaacctcgacaacctagatgttctccaagccaccgaaactatcaagagtgaagccggtcagatcgagtactgggaccacaaccaccctcagctccgatgtgttggtgtttccgttgctcgttatgtaattgaacaaggcggtctttacttgcccaccttcttcacttccccaaaaatttcctacgtcgttcaaggaacgggtatcagcggaagagtggtccctggatgtgccgagaccttcatggactcgcagccgatgcaaggacaacaacaaggccaaccatggcaaggacgacagggacaacaaggccaaccatgggaaggacagggacaacaggg

SEQ ID NO: 143451 - DNA, 461 bp, Arabidopsis thaliana
ataaatatttctctgcttttaatttccaatttgttttgtttcattcacaaataacaatcctctcttcgtttttgtttttcttttggatccaaagctctcttaaatctgtaaatcaacaatggccgccaccactgagaatctccctcaactcaaatccgccgtcgatggccttactgagatgagtgagagtgagaagagcggattcatcagcctggtttcacgttacctgagcggtgaggcacaacacattgagtggagtaagatccagactcctaccgatgaaatcgttgttccctacgagaaaatgacccctgtctcccaagatgttgccgagaccaagaatctgttggacaaacttgttgtgttgaagcttaatggaggtcttggaacaacaatgggatgcactggcccgaagtccgttatcgaagttcgtgatggtttgacatttcttgatctgattg

SEQ ID NO: 143452 - DNA, 455 bp, Arabidopsis thaliana
gtttgttaaaacttgacatttattgtgttataaataaatttatagaagagaagagacagagaaagaaagactaatcataattgttctttgtttagattcatagctaaaattagtaaattagtcttgatttaataatttggtcgatttgaattgacattgcatataccaaagctttttcttggctccaaatgtataaatcatcttttcatttttcctatttcatttatgaatttatctgtattactaaactagtgatactttaaataccaaaaagcaacaaattttgtcaaaccctctatttttagtgttgtaaaggtcaatacgggttgacaaaagaaaaataaatagaggctaattctgaaacgaattaaagagttaagctaatttaatgtgcctagttaaaaaaaaagttggcagcgagaaccatgctaaaaaaatcgtatcgtattattcac

SEQ ID NO: 143453 - DNA, 455 bp, Arabidopsis thaliana
aacaaaaagaaaatggttaagctcagcaatctcctttttgtaaccttcggggttctcctcgtccttaacggctgccttgcgaggcagtcacttggggttcctcctcagctacagaacgagtgtaacctcgacaacctagatgttctccaagccaccgaaactatcaagagtgaagccggtcagatcgagtactgggaccacaaccaccctcagctccgatgtgttggtgtttccgttgctcgttatgtaattgaacaaggcggtctttacttgcccaccttcttcacttccccaaaaatttcctacgtcgttcaaggaacgggtatcagcggaagagtggtccctggatgtgccgagaccttcatggactcgcagccgatgcaaggacaacaacaaggccaaccatggcaaggacgacagggacaacaaggccaaccatgggaaggacagggaca

SEQ ID NO: 143454 - DNA, 452 bp, Arabidopsis thaliana
cacaacacgtctaagcttgctgtgcttttggagatttttattaagaagtttgttcagtgttatggatgtggtaacccggagactgagattattattacgaagacgcagatggtgaatctcaagtgtgctgcttgtgggtttatctctgaggtcgacatgagggataagttgactaatttcattctcaagaacccacctgagcagaagaaggtgtcaaaggataagaaagcaatgaggaaagctgagaaggagaggcttaaagaaggcgagctagctgatgaggagcagagaaagctgaaagctaagaagaaagcattgtctaacggcaaggattctaagacgtctaagaaccattcttctgatgaggatataagcccgaagcatgatgagaatgctctagaggtggatgaggatgaagatgatgatgatggtgtcgagtggcaaactgatac

SEQ ID NO: 143455 - DNA, 456 bp, Arabidopsis thaliana
attgaacaaggcggtctttacttgcccactttctttacttccccaaaaatttcctacgtcgttcaaggaacgggtatcagcggaagagtggtccctggatgtgccgagaccttcatggactcgcagccgatgcaaggacaacaacaaggccaaccatggcaaggacgacagggacaacaaggccaaccatgggaaggacagggacaacagggacaacaaggaagacaaggccaaccatgggaaggacagggacaacagggacaacaaggacgacagggacaacaaggccaaccatgggaaggacagggacagcagggacaacaagggttccgtgacatgcaccagaaggtggaacatgtgagacgcggagacgtctttgccaacactccaggctctgcccactggatctacaactcaggagaacagccacttgtcatcatcgctcttctcgacatc

SEQ ID NO: 143456 - DNA, 454 bp, Arabidopsis thaliana
cacacatagcaaaaaatggcaaacaagttgttcctcgtctgcgcagctctcgctctctgcttgctcctcaccaacgcttccatctaccgcaccgtcgttgagttcgaagaagatgacgccactaaccccataggcccaaaaatgaggaaatgccgcaaggagtttcagaaagaacaacacctaagagcttgccagcaattgatgctccagcaagcaaggcaaggccgtagcgatgagtttgatttcgaagacgacatggagaacccacagggacaacagcaggaacaacagctattccagcagtgctgcaacgagcttcgccaggaagagccagattgtgtttgccccaccttgaaacaagctgccaaggccgttagactccagggacagcaccaaccaatgcaagtcaggaaaatttaccagacagccaagcacttgcccaacgtttgcgaca

SEQ ID NO: 143457 - DNA, 455 bp, Arabidopsis thaliana
cccacgcgtccgcacagggcaacggccttgaggatactatctgcagcatgaggtcccacgagaacattgacgaccctgctcgtgctgacgtgtacaagcccagcctaggtcgcgtgaccagcgtcaacagctataccttgcccatcttggagtatgtcaggctcagtgccactcgtggcgttctccagggtaatgcgatggtgcttcctaaatacaacatgaacgctaacgagatcttgtactgcactggaggacaaggaaggatccaagtggtcaacgacaacggacagaacgtgttggaccaacaggtgcagaagggacagctcgtggtcatcccacaagggttcgcatacgttgtccagtcccacggaaacaagttcgagtggatctctttcaaaactaatgaaaacgcaatggtcagcactttggcgggtagaacctcgctcttgagggca

SEQ ID NO: 143458 - DNA, 447 bp, Arabidopsis thaliana
gaaataacaaaatggctcgagtctcttctcttctttctttcttcttaacacttttgatccttttccatggctacgcggctcaacagggtcagcagggtcagcagtttccgaacgagtgccagctcgaccagctcaatgcgctcgagccgtcacacgtactgaagagcgaggctggtcgcatcgaggtgtgggaccaccacgctcctcagctccgttgctcaggtgtctcctttgcacgttacatcatcgagtctaagggtctctacttgccctctttctttaacaccgcgaagctctctttcgtggctaagggacgaggtcttatgggaaaagtgatccctggatgcgccgaaacattccaagactcatcagagttccaaccacgcttcgaaggtcaaggtcaaagccagaggttccgtgacatgcaccagaaagtggagcacatta

SEQ ID NO: 143459 - DNA, 449 bp, Arabidopsis thaliana
aagaaaaatgggtcgagtctcatctattttttctttctctttgacactcttgatcctcttcaatggctacactgcccaacagtggcccaacgagtgccagctcgatcaactcaatgcgctcgaaccatcccaaatcatcaagagcgagggtggtcgcatcgaggtctgggaccaccatgcaccccagctccgttgctccggctttgcctttgagcgtttcgtcattgagcctcagggtcttttcttgcccactttcttgaacgccggcaaactcacgtttgttgttcacggaaggggtctaatgggaagagttattccgggatgcgccgagacgttcatggagtcaccggtatttggagaaggtcaaggtcagggtcagagtcaagggttccgtgacatgcaccagaaagtagagcacctacggtgcggtgacaccattgcaacaccat

SEQ ID NO: 143460 - DNA, 463 bp, Arabidopsis thaliana
ccacaaacagacaatttaattccaaaaaataaaacacaaaatcaaaagatatgaatgccacaaagtttgctgtgcttctcgtgattagcgttttgtgtgccattgtcaccgcaaggcatgtcgaagaagtgtctaaaaagaccaaattaggcacctctcttccaaaaactactaccaaaggcattggagctcagctttctgctgctggtattacttccagcagtagtgatgtctatagctctgctactggtttcaacaatcccaaaggtccagacgctaatggatacgaaagtggctacacaagtaccatcggacaagtcattgcaaagggtcgcaaggcaagagtttcttctgcaagtgcttctaccgccaaaggtgacgctgcagctgcagtgactcgcaaagctgctgctgcacgtgcaaacggtaaggtagcttcggcatcaaggggtgagggttcctc

SEQ ID NO: 143461 - DNA, 465 bp, Arabidopsis thaliana
accaactttatcaccaacactaaccagacggttcctcttcgcctcgcccagatcaccgtccctgtcaacaatcccggcaactacaaggattacttccctgctgcatcccaatttcagcaatcctacttcaatgggtttaccaaagaagtcctctctaccagtttcaacgtgccggaagaattgctagggagattggttacgagatcaaaagaaattggtcaagggattatccgaagaatttctccagaccaaatcaaggaacttgctgagcacgctacatctccttcaaacaaacacaaagccaaaaaagaaaaggaggaagacaaagacctaagaacgttgtggactcctttcaatctctttgcaatagatccaatctactccaacgactttggtcatttccacgaggcacatcctaagaattataatcaactgcaagaccttcacatagccgccgcttgggct

SEQ ID NO: 143462 - DNA, 455 bp, Arabidopsis thaliana
gttcgacgcacaggtcatagctcaagcattgaattttgttgttcagttggctcagcagcttcagaaccaacaagacagcagaggaaacatcgttcgtgttaagggacctttccaggtcgtgaggccacctctaagacagccctacgagagcgaggagtggagacacccacgtagcccacagggcaacggccttgaggagactatctgcagcatgaggtcccacgagaacattgacgaccctgctcgtgctgacgtgtacaagcccagcctaggtcgcgtgaccagcgtcaacagctataccttgcccatcttggagtatgtcaggctcagtgccactcgtggcgttctccagggtaatgcgatggtgcttcctaaatacaacatgaacgctaacgagatcttgtactgcactggaggacaaggaaggatccaagtggtcaacgacaacggacaga

SEQ ID NO: 143463 - DNA, 456 bp, Arabidopsis thaliana
aaaacatgacctttctaaaaatgaaaagcctttctttcttcttcaccatcctcctctctctgtcgaccctcttcaccatctccaacgcacggaagtttaatgtcggaggcagtggcgcgtgggttacaaacccacctgaaaactacgaatcttggtctggcaaaaaccgtttccttgttcacgacactctctattttagctacgctaagggagctgactcggtgctagaggtgaacaaggctgattacgacgcttgtaatacaaagaatccgatcaaaagagtggacgatggagattctgagatctctcttgatcgttatggtccgttttacttcatcagtggcaatgaagataactgtaagaagggtcaaaagcttaatgtcgttgtcatatctgctaggattccatcaacggctcagtctcctcacgccgctgcaccgggaagctctacgccgg

SEQ ID NO: 143464 - DNA, 315 bp, Arabidopsis thaliana
  unsure (1)..(315): unsure at all n locations
acgcgtccgacacacatagcanaaatggcaaacaagttgtttctcgtctgcgcagctctcgctctctgcgtcctgctcaccaacgcttgcatctaccggaccggtcgtgagttcgaagaagatgacgccactaaccccataggcccaaaaatgaggaaatgccgcaaggagtttcagaaagaacaacacctaagagcttggcagcaattgatgcttcagcaagcaaggcaaggccgtagcgatgagtttgatttcgaagacgacatggagaacccacaaggacaacagcaggaacaacagctatttcagcagtgc

SEQ ID NO: 143465 - DNA, 454 bp, Arabidopsis thaliana
caacaaacaaaaagaaaatggttaagctcagcaatctcctcgttgcaaccttcggggttctcctcgtccttaacggctgccttgcgaggcagtcacttggggttcctcctcagctacagaacgagtgtaacctcgacaacctagatgttctccaagccaccgaaactatcaagagtgaagccggtcagatcgagtactgggaccacaaccaccctcagctccgatgtgttggtgtttccgttgctcgttatgtaattgaacaaggcggtctttacttgcccaccttcttcacttccccaaaaatttcctacgtcgttcaaggaacgggtatcagcggaagagtggtccctggatgtgccgagaccttcatggactcgcagccgatgcaaggacaacaacaaggccaaccatggcaaggacgacagggacaacaaggccaaccatgggaaggaca

SEQ ID NO: 143466 - DNA, 444 bp, Arabidopsis thaliana
ggacgacacggtaatggcttagaggagaccatctgcagcgccaggtgcaccgataacctcgatgatccgtctcgtgctgacgtgtacaagccacagctcggttacatcagcactctcaacagttacgatctccccatccttcgcttcatccgtctctcagccctccgtggatctatccgtcaaaacgcaatggtgcttccacagtggaacgcaaacgcgaacgccattctttacgtgacagacggggaagcccaaatccagatcgtaaacgacaatggtaacagagtgtttgacggacaagtctctcaaggacagctcatagccgtaccacaaggtttctcggtggtgaaacgcgcaacaagcaaccgattccagtgggttgagttcaaaacaaacgcaaacgcgcaaatcaacactcttgcgggacgaacctcagtcttgaga

SEQ ID NO: 143467 - DNA, 460 bp, Arabidopsis thaliana
caacaaacaaaaagaaaatggttaagctcagcaatctcctcgttgcaaccttcggggttctcctcgtccttaacggctgccttgcgaggcagtcacttggggttcctcctcagctacagaacgagtgtaacctcgacaacctagatgttctccaagccaccgaaactatcaagagtgaagccggtcagatcgagtactgggaccacaaccaccctcagctccgatgtgttggtgtttccgttgctcgttatgtaattgaacaaggcggtctttacttgcccaccttcttcacttccccaaaaatttcctacgtcgttcaaggaacgggtatcagcggaagagtggtccctggatgtgccgagaccttcatggactcgcagccgatgcaaggacaacaacaaggccaaccatggcaaggacgacagggacaacaaggccaaccatgggaaggacagggaca

SEQ ID NO: 143468 - DNA, 419 bp, Arabidopsis thaliana
cttcaagtcttcttctcttgccttttctttcttcttctttatccattaaggtttgatcctctcacttaaattaggattatatatggctacatctgctagaagagcatatggattcgggagagctgacgaggcgactcacccggactccattagagccactttggctgagtttctttccacgttcgtcttcgtctttgctggagaaggctcaatcctcgctctagacaagttgtattgggacacggcggctcacacggggacaaacacgcctggagggttagttctggtggcgttagctcatgcattggccttgttcgcggctgtttctgcagccatcaatgtctctggtggccacgtcaaccccgctgtcacttttgctgctctaatcggaggcaggatctcggtcattcgagctatct

SEQ ID NO: 143469 - DNA, 426 bp, Arabidopsis thaliana
acaaaaagaaaatggttaagctcagcaatctccttgttgcaaccttcggggttctcctcgtccttaacggctgccttgcgaggcagtcacttggggttcctcctcagctacagaacgagtgtaacctcgacaacctagatgttctccaagccaccgaaactatcaagagtgaagccggtcagatcgagtactgggaccacaaccaccctcagctccgatgtgttggtgtttccgttgctcgttatgtaattgaacaaggcggtctttacttgcccaccttcttcacttccccaaaaatttcctacgtcgttcaaggaacgggtatcagcggaagagtggtccctggatgtgccgagaccttcatggactcgcagtcgatgcaaggacaacaacaaggccaaccatggcaaggacgacagggacaac

SEQ ID NO: 143470 - DNA, 414 bp, Arabidopsis thaliana
caccttattatcgattgtggagcgcacactaaaagcaactggcgcagctagtttaacaccgcagaggcgaagaacaacatcagcatccctttttggaaggatgtcacaaggattaaggggatctcctcaaagtgctggactctcttttctgaatagacaagggctcaccaagcttgacgacttgaggcaagttgaagcaaagtaccccgcactacttttcaagcagcagcttactgcattcctcgagaagatatatggaatgagcagagataacctaaagaaagagatctctgctcttcttggcttatgtatacaggcaccaaggacatcaagggcaagtttggtgaaaggaagagcacaagcaaatgctgttgctcaacatgctctgattgcacattggcaaagtatcagaaa

SEQ ID NO: 143471 - DNA, 456 bp, Arabidopsis thaliana
caaaaagaaaatggttaagctcagcaatctcctctttgcaaccttcggggttctcctcgtccttaacggctgccttgcgaggcagtcacttggggttcctcctcagctacagaacgagtgtaacctcgacaacctagatgttctccaagccaccgaaactatcaagagtgaagccggtcagatcgagtactgggaccacaaccaccctcagctccgatgtgttggtgtttccgttgctcgttatgtaattgaacaaggcggtctttacttgcccaccttcttcacttccccaaaaatttcctacgtcgttcaaggaacgggtatcagcggaagagtggtccctggatgtgccgagaccttcatggactcgcagccgatgcaaggacaacaacaaggccaaccatggcaaggacgacagggacaacaaggccaaccatgggaaggacagggacaaca

SEQ ID NO: 143472 - DNA, 438 bp, Arabidopsis thaliana
  unsure (1)..(438): unsure at all n locations
gccacgctacgactattttcacattctattctgtctcagttttttataaacagccttatttaatggatctctgtctctgtgtttcagatgtgatattcttgatatacttataccaaaggtgggtttacccagtggataagacacgtgtgaacgagttcggttttggaggtgaggatgaaactgcagagaagaagttgatcactgagaaagaagaagaagacatgaaaacaaactaatctcttctcttgttcaaattttattacagntcaagtatagtgttttaatttatttttgttctcactgtnggaaattgtgtggttcaagtttaatgtcaaccgtcaagacacattataaagcaactgctttggttttttgtgaaaaaggaaaaaaacaacattttctctaaagctctgagattgctaaaatccatgggaaaat

SEQ ID NO: 143473 - DNA, 458 bp, Arabidopsis thaliana
tcctaatccaaaaagtaacacaactagagtgaatttaactatctacattagatatattttaagagcatcctcattggacaaataatgaggatatctttaattataataagaataaaaataaaataaaagtaaagtctattggagaaagaggagagagggtgtcttcccaccgacactaaagacatttttatagacacatgtttacatttggcactcattgattggttaatatttttttaataactaaataattaattaaatgataaaactgtatgaaaattaatatttttattggctaggctcttaagtgtgtatgtcaccaataaaactcagtcactccttaagagagtgtcttaaaatataactaaaaagaaatatcaataatgttagataattttctaggagaatgtgagccaccatctcttcacttttatcaagtttggtatgttttaagacac

SEQ ID NO: 143474 - DNA, 428 bp, Arabidopsis thaliana
tcgagcttgccttagagtttgtctcaagcttctccttttttggtattttgtcttaagcttccttgcttctctttcttcttcttctctactctttctctctatttcaaaccttcgttttctttccttttttgtaaaatcttaaaatcaaccaagacaatggaaatgaaattgctctttacatcggctttcacccaaatgttcggttactcgaaccatatggatcaagccagcaactgccaaagcacccgcaacaaaattataaagatgatgaagaaagaagaattcccaagtggattccaagtccctcttcactaccctaaatactccaagtctgattacgaagttatggatgatctccgccttgacttgctcctcaaacaatatgggttctccttcgaaggatctcttgaagacaagaaggtttttgc

SEQ ID NO: 143475 - DNA, 422 bp, Arabidopsis thaliana
cccaaaacacattttgttttttgtttcccatctaaaatgcgtatgagttgtaacggatgtcgagttctacgaaaaggctgcagtgaaaactgtagcataagaccttgtcttcaatggatcaaatccgctgaatctcaagccaacgccaccgtcttcctcgccaagttttatggccgtgcggggctcatgaacctcctcaacaccggtcctgaccacctccgtcctgcgatatttagatcattgttgtacgaagcatgcgggaggattgtgaatccgatatacggatccgtggggttattgtggtcaggaaactggcatctttgtcaagcggccgttgaggcagtaatgagaggctcacccgtgactccgatcgcatgcgaaacagcggttactggtcaagcacctccttttaacaacaagct

SEQ ID NO: 143476 - DNA, 426 bp, Arabidopsis thaliana
gttccatttggccggaaacaaccagcagggaggctttggcggttcacagcaacaacaagaacagaaaaacttgtggagcgggttcgacgcacaggtcatagctcaagcattgaaaattgacgttcagttggctcagcagcttcagaaccaacaagacagcagaggaaacatcgttcgtgttaagggacctttccaggtcgtgaggccacctctaagacagccctacgagagcgaggagtggagacacccacgtagcccacagggcaacggccttgaggagactatctgcagcatgaggtcccacgagaacattgacgaccctgctcgtgctgacgtgtacaagcccagcctaggtcgcgtgaccagcgtcaacagctataccttgcccatcttggagtatgtcaggctcagtgccactcgtggcgt

SEQ ID NO: 143477 - DNA, 425 bp, Arabidopsis thaliana
atcatcacaaacgagtaagaatacaaatacaaattgcattaaaaatggcaaacaagctcttcctcgtctgcgcaactttcgccctctgcttcctcctcaccaacgcttccatctaccgcactgttgtcgagttcgacgaagatgacgccagcaaccccatgggcccaagacagaaatgtcagaaggagtttcagcaatcacagcacctaagagcttgccagaaattgatgcgcatgcaaatgaggcaaggccgtggtggtggtccctccctcgacgatgagttctatttggaagacgacatcgagaacccacaaggcccccagcagggacaccagatcctccagcagtgctgcagcgagctttgccaggaagagccagtttgtgtttgccccaccttgagacaagctgtcagggccgttagcctt

SEQ ID NO: 143478 - DNA, 425 bp, Arabidopsis thaliana
cggacgcgtggggagatttgtaataatcaaatcatggtgaagagaagaggtgtctccgccgtgaacgttgttttcgggtggctgcgacaacaatcgaacaaggttaaaatagctttaggaattatcatctctttgatcctcgtcgttcttctgaaattcaccgttaggaatcacaatcactttttcatcgcctccgagctcatccacgccgccggaatcttgatcctcatctacaaacctactcgccaaaagacttgctccggtctttctttaaaatctcaagaagtgacagcaatatttctagcggagagattgatatgcagcataaacattgaaggtgatatccatacagttctcgatttcgccaccttggtttcgactctttgggtcatttatatgattcgatacaagctgaaagcatctta

SEQ ID NO: 143479 - DNA, 422 bp, Arabidopsis thaliana
catttcttcgatacttcccaagttcaccgcaatggcctccgcttcaatcttccccgccgccgtgaccgtcaccagagatgtgacatctcttcttaatccatcttctctgatcatcggaaaatcattatctccttcaaagttcagctcaatcaaatcctccgtttcattttcccgcaaaaccctaactccaattcgatactcttcatctcccgccgatcactcacccgccaccgccgtggaagcgatcacgaatcgatccaaaacctccttgaaatctcgtctccgtggaggagaaactctctacggtctctttttactctccttctcgccgacattagccgagatcgctgctcacgccggttacgattacgtcgtcgttgatatggaacatggtcccggaggtataccggaagctttggatt

SEQ ID NO: 143480 - DNA, 421 bp, Arabidopsis thaliana
aaataattgaacgagtaatttttgtttactttttgtgttctttttattcatttttttcgtttctgcgtcaacgaggctttctttttagtatttgaccaagttggtctattctattttattagtattccgttataccatgccttcgacaacgtgaacaagcaaacaacaatatttcgtaatcgaatcaatataaattgtgaaattgaattttttcatagaaaataatttaaaaatccatttttgcttttgctgttgtgtctggtcaaatcctatcatgtaactccataatgcaataactgattttttcaagtggctctactctcttacaattacaacttgcaatgttatagttatgtagataatgttattgctgtaaatggtttgagtaactccctaaggcaagtggcccttgtctcgaatc

SEQ ID NO: 143481 - DNA, 424 bp, Arabidopsis thaliana
agaggaagaaaaatgggtcgagtctcatctattatctctttctctttgacactcttgatcctcttcaatggctacactgcccaacagtggcccaacgagtgccagctcgatcaactcaatgcgctcgaaccatcccaaatcatcaagagcgagggtggtcgcatcgaggtctgggaccaccatgcaccccagctccgttgctccggctttgcctttgagcgtttcgtcattgagcctcagggtcttttcttgcccactttcttgaacgccggcaaactcacgtttgttgttcacggaaggggtctaatgggaagagttattccgggatgcgccgagacgttcatggagtcaccggtatttggagaaggtcaaggtcagggtcagagtcaagggttccgtgacatgcaccagaaagttgagcacc

SEQ ID NO: 143482 - DNA, 417 bp, Arabidopsis thaliana
ggttaagctcagcaatctcctcgttgcaaccttcggggttctcctcgtccttaacggctgccttgcgaggcagtcacttggggttcctcctcagctacagaacgagtgtaacctcgacaacctagatgttctccaagccaccgaaactatcaagagtgaagccggtcagatcgagtactgggaccacaaccaccctcagctccgatgtgttggtgtttccgttgctcgttatgtaattgaacaaggcggtcttttcttgcccacctttttcacttccccaaaaatttcctacgtcgttcaaggaacgggtatcagcggaagagtggtccctggatgtgccgagaccttcatggactcgcagccgatgcatggacaacaacattgtcaaccatggcaaggactacagggtcaacaagg

SEQ ID NO: 143483 - DNA, 340 bp, Arabidopsis thaliana
ggtacattggtgtgggtgaggcagaggaatatcatatgttctactacttcatcaaatctgagagtaatccagagaaagaccctcttcttctctggttaagaggaggtcctttctgttcttcgttcactgctcttatttatgagaatgggccaattgctttcaaggctgaggaatacactggtagcatcccctctctggtctctaccacatatgcatggactaaggtggcgagcattttctatttggatcaggctgttgggactggcttcttctactccagaaatccacttgctgatttaccaagcgacacatttgtagctaagccgttctacgagtttct

SEQ ID NO: 143484 - DNA, 428 bp, Arabidopsis thaliana
ataagaaataacaaaatggctcgagtctcttctcttctttctttcttcttaacacttttgatccttttccatggctacgcggctcaacagggtcagcagggtcagcagtttccgaacgagtgccagctcgaccagctcaatgcgctcgagccgtcacacgtactgaagagcgaggctggtcgcatcgaggtgtgggaccaccacgctcctcagctccgttgctcaggtgtctcctttgcaccgttacatcatcgagtctaagggtctctacttgccctctttctttaacaccgcgaagctctctttcgtggcttagggacgaggtcttatgggaaaagtgatccctggatgcgccgaaacatttcaagactcatcagagttccaaccacgctttcgaagtcaaggtcaaagccagaggttccgtgaca

SEQ ID NO: 143485 - DNA, 425 bp, Arabidopsis thaliana
caaaaagaaaatggttaagctcagcaatctcctcgttgctaccttcggggttctcctcgtccttaacggctgccttgcgaggcagtcacttggggttcctcctcagctacagaacgagtgtaacctcgacaacctagatgttctccaagccaccgaaactatcaagagtgaagccggtcagatcgagtactgggaccacaaccaccctcagctccgatgtgttggtgtttccgatgctcgttatgtaattgaacaaggcggtctttacttgcccaccttcttcacttccccaaaaatttcctacgtcgttcaaggaacgggcattagcggaagagtggtccctggatgtgccgagacctttatggactcgcagccgatgcaaggacaacaacaaggccaaccatggcaaggacgacagggacaac

SEQ ID NO: 143486 - DNA, 422 bp, Arabidopsis thaliana
aatgtttcttatctccgtccccaaaacaatctgcttcaccgtgaatctctcaccactctctggacccaatccatctcctagcgcgtcaaacaacgcgctataataatgcaaagcctccacgaatcttcctaaaaagcttcctccatcgtcgtagctcaattcttgctccaccaccgtgatcagattcggtttcagcctccgtagaatctccaacgtttcgagattgttccctgtaacatcatataaccggtgttgcatccaatgaaccaccacagcttctccttgtctcgttgcgagttggctcggatcgattaggtttccgattatgccttcaattggatgaaattcgaaagggaggtttaacgatgatgcgaaatcggcgagcctccggccagttgaagcgagtagatcggaggaggaac

SEQ ID NO: 143487 - DNA, 424 bp, Arabidopsis thaliana
ctgatccatcatcgtcactttctcccggcgaattccgttttatcgatttaagtaacgagatttgtgcaaagatgactcaggacgtggagatgaaagataataacaccccttctcaatcgattatctcttcttcgacctctactatgcagaatttgaaggagattgcagcactcatcgatactgggtcttacacgaaggaggttcgtcgtattgctcgtgctgtgcgtctcactataggccttaggcagaaactcaccggctctgtgctctcttccttcctggattttgctttggttccaggatccgaagctcactctcgcctctcttcctttgttcctaagggtgatgaacatgacatggaagttgttactgccttatcggtttcacaagctgctccatctaagcatttacctgcagagctcga

SEQ ID NO: 143488 - DNA, 429 bp, Arabidopsis thaliana
ggactcgcagccgatgcaaggacaacaacaaggtcttttatggcaaggacgacagggacaacaaggccaaccatgggaaggacagggacaacagggacaacaaggaagacaaggccaaccatgggaaggacagggacaacagggacaacaaggacgacagggacaacaaggccaaccatgggaaggacagggacagcagggacaacaagggttccgtgacatgcaccagaaggtggaacatgtgagacgcggagacgtctttgccaacactccaggctctgcccactggatctacaactcaggagaacagccacttgtcatcatcgttcttctcgacatcgccaactaccaaaaccaactcgaccgcaaccctagagtgtttcatttggccggaaacaaccagcagggaggctttggcggttcacagaa

SEQ ID NO: 143489 - DNA, 369 bp, Arabidopsis thaliana
  unsure (1)..(369): unsure at all n locations
agaaaacccgaaaggagaagagcgagaaagcccgaacacaagcagaaacacacaaacgagcgggcacacccaaccacaagggccagaaaccggacaccacgnccagnggancgcagcaggcagaaccacgaccaaacccaggccagcccaaaagcgcggccaacggnccacgaccaaaganncaaagaaacgagcaggccacacgacgacgaaggcgaggcgaaggacgccggagaaaccggaaccaccgcnnacgacggcggcggcgagggagnnagcnccaccggggaagaagaancgnnaaacggcgccgcangnggcnggcaccgnaacccccaccgagaagagggaaacccggagaacggcggc

SEQ ID NO: 143490 - DNA, 410 bp, Arabidopsis thaliana
tactagtcgtgccacaaggcttttcggtcatgaatcattccataggcgaacagttcgagtggatcgaattcaagacaaacgaaaacgcacaggtcaacacactcgcgggccgtacctcagtcattgagaggtttgccgcttgaggttataaccaatgggtaccagatctctcccgaagaagctaaacgagtaaagtttagcacgattgagaccacactgacccatagcagtccaatgagctacggaaggcctagggcttgaggcttgatgagcgcgtggtggaatagcgtttgaatctaaagttcggtttggtacgacttgtaatatgaaataataatgtacaaagaagttctacgcttaagggaactgttttgttttgagctttttattatgacgtctagtgtacaaca

SEQ ID NO: 143491 - DNA, 179 bp, Arabidopsis thaliana
  unsure (1)..(179): unsure at all n locations
tatatatatatatatgataaaattagtgattatttatttgattcncaattatgattagaagcgccataattctactttagccaaaaaaaaaaaaaaaatgatagaaccatatttctttcattaacaacaatgcattacaataacgttttttttttctattagtattctttttttttata

SEQ ID NO: 143492 - DNA, 424 bp, Arabidopsis thaliana
  unsure (1)..(424): unsure at all n locations
atgaacgctaacgagatcttgtactgcactggagtacaaggaaggatccaagtggtcaacgacaacggacagaacgtgttggaccaacaggtgcagaagggacagctcgtggtcatcccacaagggttcgcatacgttgtccagtcccacggaaacaagttcgagtggatctctttcaaaactaatgaaaacgcaatgatcagcactttggcgggtagaatctcgctcttgagggcattgccattggaggtcatatcaaatggtttccagatctctcccgaggaagctaggaagatcaagttcaacacacttgagaccactttgacccgcgctgccggtaggcaacaacaacagttgatcgaggagattgtcgaggcttaaatcaaaacgttttntctttttttaataaagtatggtcagtttg

SEQ ID NO: 143493 - DNA, 442 bp, Arabidopsis thaliana
gggccggatctgtcgaaacaatcgttttagagccgaggatattcgtccggaataatgaaccaccgtgcctgaagcaaaaaccagagaaagattagagaagaaagaagagaaatcagacagattcttgaaacctgcagatttaatgaaaaccaacttgaacattcttttcttgacaaatggatggatttcgttgaaactgtaaggtttgaagaactcaacggtttctccgatcaccggaaaccccattgaacctggaggtagtttgccggagcagttagggttagcccatctatagagccagagactgatcttgacgaccactaaagctataacaaaacttagtgcaacaccccacatttctttcataatatctaaactaatgagattgttcatatttataaaaagctacatattttgaggaagcaatatgcaagaaaaccaa

SEQ ID NO: 143494 - DNA, 249 bp, Arabidopsis thaliana
ttcccgaaacctttgtttttcgttaatccccttttttcgtagagggaaaacattcattaggcgaccattttgtgtcccaagaccttctaaccggtgatgagctcctgtctgactctttcccttacaaggagattgagaatggaatcctctgggaagtataaggaaagtgggttactgtgggagctgaagatgttaacatctggtgccaatccatttgctgaagaaggtggttatgctcaagacccatct

SEQ ID NO: 143495 - DNA, 426 bp, Arabidopsis thaliana
acttatctttatatacccccttttattttgtgtgctcttagcctttactctatagttttatatcatatcaatcgacatggcgaatgtggaccgtgatcggcgtgtgcatgtagaccgtactgacaaacgtgttcatcagccaaactacgaagatgatgtcggttttggtggctatggcggttatggtgctggttctgattataagagtcgcggcccctccactaaccaaatcttggcacttatagcaggagttcccattggtggcacactgctaaccctagctggactcactctagccggttcggtgatcggcttgctagtctccatacccctcttcctcctcttcagtccggtgatagtcccggcggctctcactattgggcttgctgtgacgggaatcttggcttctggtttgtttgggttgac

SEQ ID NO: 143496 - DNA, 429 bp, Arabidopsis thaliana
gcggaagagtggtccttggatgtgccgagacctttatttactcgcagccgatgcaaggacagcagcaaggccaaccatggcaaggacgacagggacaacaaggccaaccatgggaaggacagggacaacagggacaacaaggaagacaaggccaaccatgggaaggacagggacaacagggacaacaaggacgacagggacaacaaggccaaccatgggaaggacagggacagcagggacaacaagggttccgtgacatgcaccagaaggtggaacatgtgagacgcggagacgtctttgccaacactccaggctctgcccactggatctacaactcaggagaacagccacttgtcaacatcgctcttctcgacatcgccaactactaaaaccaactcgaccgcaaccctagagtgttccatttggccg

SEQ ID NO: 143497 - DNA, 369 bp, Arabidopsis thaliana
caaaaagaaaatggttaagctcagcaatctctctttttgcaaccttcggggttctcctcgtccttaacggctgccttgcgaggcagtcacttggggttcctcctcagctacagaacgagtgtaacctcgacaacctagatgttctccaagccaccgaaactatcaagagtgaagccggtcagatcgagtactgggaccacaaccaccctcagctccgttgtgttggtgtttccgttgctcgttatgtaattgaacaaggcggtctttacttgcccaccttcttcactttcccaaaaatttcctacgtcgttcaaggaacgggtatcagcggaagagtggtccctggatgtgccgagaccttcatggact

SEQ ID NO: 143498 - DNA, 420 bp, Arabidopsis thaliana
ggaggagattggttgttgttgacgacgcgttttcgctcactaattttttttaacctttgtgtgtctccgtcgtcttttgatcttcaatctcagttttgagctgaagattatcgtatcgacctgcgattctcttcagatcgataatccatggctgcagctggaaacaagagcattaacgccaaattggtgttgcttggagatgttggtgctggaaaatcaagtcttgtgttacggtttgtcaaagatcagtttgttgaattccaggaatcaaccattggtgctgcttttttctcacaaacgttagctgtgaacgatgccactgtgaagtttgagatttgggatacagcgggtcaggaacggtaccatagtttggcttcactgtactacagaggtgctgctgctgcaatcattgtttttgat

SEQ ID NO: 143499 - DNA, 392 bp, Arabidopsis thaliana
cgcctgatgatgaaccgacgcctgaactgaatactttttttaaaattcaacgaatattacctgctgatgatttacctacgcttgaactgaagacaaaaaccaaagttcaacgaacttttcctcctgatgatgaactgtcgccccaactgaagtcaagaaccaaagttcaacgaatatttcctcctgatgatgaactgacacctgaattttaaacgagaaccaaagttcaacaaagaataccttctgatgatggcagagcccgtaagtgcaagcaacctgtgaattatgtttctaccagcggatcaaaaaagacggaaataccgctttacaaggaagtagccccaagctgttatgaacaatttctattataaaacacatgctgttttttttaa

SEQ ID NO: 143500 - DNA, 428 bp, Arabidopsis thaliana
  unsure (1)..(428): unsure at all n locations
tccaagacagagatgccagaaggagtttcagcaatcacaacacctaagagcttgccagagatggatgagcaagcaaatgaggcaaggacgtggtggtggtccttccctcgacgatgagttcgatttcgagggcccccagcagggataccagctactccagcagtgctgcaacgagcttcgccaggaagagccagtttgcgtttgccccaccttgaaacaagctgccagggcagttagcctccagggacagcacggaccattccaatccaggaaaanttaccagtcagctaagtacttgcctaacatttgcaagatccagcaagttggtgaatgttccttccagaccaccatccctttcttccctccttactactagagtccaagcccggcctagcacgatgatcatgagtgttgctattgatgtatgt

SEQ ID NO: 143501 - DNA, 422 bp, Arabidopsis thaliana
ctaaaactcttccaaaatgtcacattccttcttttatttattcctaatctctcttttcctctacaacaattgcattgcgcatcactatacattcacggttagggaagttccatatacgaaactgtgtagcacgaaggcgattttaaccgttaatagtcagtttcctggaccgattataaaggttcacaaaggagacactatttatgttaacgttcaaaaccgagctagtgaaaaacatcacaatgcattggcatggtgtagagcagccgagaaatccgtggtcagatggtcctgaatacatcacacaatgcccgattcgacccgggtcagattttttgtacaaagtcatattttccatcgaagacacgactgtttggtggcacttgcatagctcttggacacgtgcaactgtacacggtctt

SEQ ID NO: 143502 - DNA, 426 bp, Arabidopsis thaliana
atttcctttaaggaaactctatggctttccccttaccacattttccggtacgtctttaaatcatcttcgtttaaaggccactaatactttaaagggtgatgatcaagagagtattcgcaagttcaagaagttaccaacttccgaatggactcactacttccactcgtttgtcgtcgatgtctcggtgagtccatatatatatttggtgtttgtagatgtatagaagcttaagtgtgtttacatatcttactttgaatttaggaaatggatgcgcttaggaatgagatcgatgcactaaagccgaaagtgaaaaacacaatcatgtcttcccaaggcattgactcgacaaagaagagaatccttatgatatatattgtggtgattcttggccttgcacatcattttgaggatgagatctatgagact

SEQ ID NO: 143503 - DNA, 423 bp, Arabidopsis thaliana
cggacgcgtgggataaagaggaagaaaaatgggttgagtctcatctattatctctttgtctgggacactcttgatcctcttcaatggctacactgcccaacagtggcccaacgagtgccagctcgatcaactcaatgcgctcgaaccatcccaaatcatcaagagcgagggtggtcgcatcgaggtctgggaccaccatgcaccccagctccgttgctccggctttgcctttgagcgtttcgtcattgagcctcagggtcttttcttgcccactttcttgaacgccggcaaactcacgtttgttggtcacggaaggggtctaatgggaagagttattccgggatgcgccgagacgttcatggagtcaccggtatttggagaaggtcaaggtcagggtcagagtcaagggttccgtgacatgca

SEQ ID NO: 143504 - DNA, 286 bp, Arabidopsis thaliana
tcctcgtctgcgcagctctcgctctctgcttcctcctcaccaacgcttccatctaccgcagcggcgttgagttcgaagaagatgacgccactaaccccataggcccaaaaatgaggaaaagccgtaaggagtttcagaaagaacaacacctaatagcttgccagccattgatgcttcagctagcaatgcatggctcatcatgatttttttgttcgctttttcgacattttttttttcatgttttcttattttaatctcattctttcttttttttgccctacctttt

SEQ ID NO: 143505 - DNA, 267 bp, Arabidopsis thaliana
  unsure (1)..(267): unsure at all n locations
gaangaccgggccgaccgacccacgcgtcctcaggaattattagacgacagccacaatagttcctacctagagtctgacgtagctaacggcggggatgatccgccgcaagcactcatgaccatatcgcgggattatcgcccattcccctcctctgatgtactgtcacacgaactgaagtcaagaaccataagccaacgaatagtacctactgatgatgaactaacacccgaattgaatacatgaactcaaagtcatcttataatacc

SEQ ID NO: 143506 - DNA, 377 bp, Arabidopsis thaliana
gacgcagttcttattggtcgagagcaacgatgggtcctaccttgagtctgacggagctaacggcgtcgagtgtaaccagaaagtttacactcgttttcttgccgttaatcgaaggatctttccgttcgtgtctccaaggaaacgttaacgatgaggttgagctctgtttggagagtggtgacgtggacactaaacggtcgtcgttttactcactctctgtatattcacgccggtacagatccgtttcagacaataacttacgctatacgcacctgttagtagcatctgaatagtttccgtcaacgttacgaatagaagcttcctgggatcgttgactacattatatggtgcacttgggactcgttttatcaagaagt

SEQ ID NO: 143507 - DNA, 421 bp, Arabidopsis thaliana
cccacgcgtccgattgcaagcaccagacagagaacacccgtacggaactccaggccataagaattacggacttagtgttcttcaacagcatgtctccttcttcgatatcgatgataatggcatcatttacccttgggagacctactctggactgcgaatgcttggtttcaatatcattgggtcgcttataatagccgctgttatcaacctgacccttagctatgccactcttccggggtggttaccttcacctttcttccctatatacatacacaacatacacaagtcaaagcatggaagtgattcaaaaacatatgacaatgaaggaaggtttatgccggtgaatcttgagttgatatttagcaaatatgcgaaaaccctgccagacaagttgagtcttggagaactatgggagatgaca

SEQ ID NO: 143508 - DNA, 409 bp, Arabidopsis thaliana
gggtttttcgcctctttctcaactctcttctcgttaactaagcagtcgtctctttctcagtggtgcatgggtaagtctaaatccgccaccaaagttgttgcagagattaaggccactaagcctttgaagaaaggcaagagagagcctgaagatgatattgacaccaaagtgagtcttaagaagcagaagaaagacgtgattgctgctgtccagaaggaaaaagctgtgaagaaggttcctaagaaggttgagagctctgatgattcagattctgaatctgaggaagaggagaaggctaagaaagtcccagccaagaaggctgcttcaagcagtgatgagtcatctgatgactcttcttcagatgatgaacctgcacccaagaagggcgttgctgctactaacggaactg

SEQ ID NO: 143509 - DNA, 427 bp, Arabidopsis thaliana
aacaaaaagaaaatggttaagctcagcaatctcctcgttgcaaccttcggggttctcctcgggcttaacggctgccttgcgaggcagtcacttggggttcctcctcagctacagaacgagtgtaacctcgacaacctagatgttcttcaagccaccgaaactatcaagagtgaagccggtcagatcgagtactgggaccacaaccaccctcagctccgatgtgttggtgtttccgttgctcgttatgtaattgaacaaggcggtctttacttgcccaccttcttcacttccccaaaaatatttctacgtcgttcaaggaacgggtatcagcggaagagttggccctggatgtgccgagaccttcatggactcgcagccgatgcatggacaacaacaaggccaaccatggcaaggacgacagggtcaa

SEQ ID NO: 143510 - DNA, 240 bp, Arabidopsis thaliana
aaaagcttcccggtggtggccgttaagcttcgaacaatcgtgtatacatattaaataaaaataatgagggtttctaacgcagtcgcattcggtcgttgtatgtgtgctttttatgtatgtacgtcctgcgatgtgtgttgtttacttacatgagtgtgtaatgagcatctggctctttttatgttctgagatgtttgtgttatgtaatttcatatctatataaatctactttcttctgaa

SEQ ID NO: 143511 - DNA, 293 bp, Arabidopsis thaliana
ggttaagctcagcaatctcctcgttgcaaccttctttgttctcctcgtccttaacggctgccttgcgaggcagtcacttggggttcctcctcagctacagaacgagtgtaacctcgacaacctagatgttctccaagccaccgaaactatcaagagtgaagccggtcagatcgagtactgggaccacaaccactctcagcttcgatgtgttggtgtttccgttgctcgttatgtaatttaacaaggcggtctttacttgcccaccttcttcacttccccaaaaatttcctacg

SEQ ID NO: 143512 - DNA, 368 bp, Arabidopsis thaliana
ctcttctctctcgatatcatctaaatctctctctttctcaatttcgcaaaatggctgacaagaagatcagaatcggaatcaacggtttcggaagaatcggtcgtttggttgctagagttgttcttcagagggatgatgttgagctcgtcgctgttaacgatcctttcatcaccaccgagtacatgacatacatgtttaagtatgacagtgttcacggtcagtggtagcaccatgagcttaaggtgaaggatgacaaaactcttctcttcggtgtgaagccagtcactgttttcggcattaggaaccctgaggacatcccatggggtgtggctggagctgactttgttgtttattctactggtgttttt

SEQ ID NO: 143513 - DNA, 426 bp, Arabidopsis thaliana
cgcatttccattaaccctccaattttcccgcctttgtctcactctcttcccgccttgcactggccggggactccatggttcagaagcagcaagcctccgccggtccgggtaccgagcctaagaagcgtcgccgtgtcggattttctcccgccgatactggtgtcgaggctaacgagtgcatcaaaatttatctcgtttcaagcaaagaggaagttgattcctctgatatttccagcgtgaagccagttgacttgaatgatttctttgatggagatggcaagatttatggttaccaaggtttgaagataaatgtatggatcaatagcatctcattacattcatatgctgatatcacataccagagcaccattaacggagacaaaggcatcacggacctcaaatctgctttacagaacatatttgctg

SEQ ID NO: 143514 - DNA, 422 bp, Arabidopsis thaliana
gatctagtgatgaactttttttgctgtttttgtgtgttttgtgtttctcaaactttttgtgatgaactaatagaatgcatgcattctttatataaacaaaatcttttttttttaatttcctttttatgattaataaaataatatataagcacatccactggttataaacatacctcataactatcttctgcgtttctagaggtttttgaaatacgcaccctgtcttttagctattagtaagccacaatattattttaataatattttaaagtaaaaaatatttatattaacaaaagttgagaaaaatatgactgaatataaacaaaatatctggaccacatggcgttttaggaatacgcgctatccattcatagccttcgaatgttgacgtagaaagcacctttgtaagcaagtttgttacg

SEQ ID NO: 143515 - DNA, 426 bp, Arabidopsis thaliana
agaaaacatacacaaatagcaaaacatggctaactagctcttcctcgtctgcgcaactctcgccctctgcttcctcctcaccaacgcttccatctaccgcaccgttgtcgaattcgaagaagatgacgccagcaaccccgtaggtccaagacagagatgccagaaggagtttcagcaatcacaacacctaagagcttgccagagatggatgagcaagcaaatgaggcaaggacgtggtggtggtccttccctcgacgatgagttcgatttcgagggcccccagcagggataccagctactccagcagtgctgcaacgagcttcgccaggaagagccagtttgcgtttgccccaccttgaaacaagctgccagggcagttagcctccagggtcagcacggaccattccaatccaagaaaatttacca

SEQ ID NO: 143516 - DNA, 427 bp, Arabidopsis thaliana
  unsure (1)..(427): unsure at all n locations
cacacanagcaaaaaagggcaaacaaggggnnccncgncngcgcagcncncgcncncggcgngccnccncaccaacgcnnccagcgaccgcaccgncgnngagnncgaagaagangacgccacnaaccccanaggcccaaaaangaggaaaggccgcaaggagnnncagaaagaacaacaccnaagagcccgccagcaanngangcnccagcaagcaaggcaaggccgnagcgangagnnngannncgaagacgacanggagaacccacagggacaacagcaggaacaacagcnannccagcagngcngcaacgagccccgccaggaagagccaganggggnnngccccaccnngaaacaagcngccaaggccgnnagacnccngggacagcaccaaccaaggcaaggcaggaaaannnaccagaca

SEQ ID NO: 143517 - DNA, 427 bp, Arabidopsis thaliana
gggagatttctgttcaagaatcagccttgaaggtttcatctaggctatgtagtttacaagaagaggttaagaggataatgggagacgcgggttttatgcccgagctagttaaatttctcgacgccaaatcgatagatgtacgagaaatggcgagcgtggcactgtactgtttgatctcggttccaaggaacaggaagaagtttgcacaagacgactttaacattagctacattctccagttgctagaccatgaagatgggagcaatgtgagcagcgattcaggtaacacaaagtttttgatatcgatattgatgtctttaacgagctgtaatagcgcgagaagaaagattgcgagttcagggtatttgaaaagcatagagaagcttgcagaaactgaaggttcagatgctaagaaacttgtgaagaa

SEQ ID NO: 143518 - DNA, 429 bp, Arabidopsis thaliana
acaaggccaaccatgggaaggacagggacagtagggacaacaagggttccgtgacatgcacgagaaggtggaacatgtgagacgcggagacgtctttgccaacactccaggctctgcccactggatctacaactcaggagaacagccacttgtcatcatcgctcttctcgacatcgccaactaccaaaaccaactcgaccgcaaccctagagtgttccatttggccggaaacaaccagcagggaggctttggcggttcacagcaacaacaagaacagaaaaacttgtggagcgggttcgacgcacaggtcatagctcaagcattgaaaattgacgttcagttggctcagcagcttcagaaccaacaagacagcagaggaaacattgttcgtgttaagggacctttccaggtcgtgaggccacctctaag

SEQ ID NO: 143519 - DNA, 332 bp, Arabidopsis thaliana
atccgatcaaacgggcgatgagattaagagctgcattgtttttagcacaggcattggaatattgtggttattaagggagagctctggatcatgatctcaatgcttacagggttttgatcgacaaggacggtaatgcgaggttgccttgatatggactcctgaaacctcgcccacactgaaatagttatagcacaaacttgccatgctctcctgcagattgttcgcgaacgggttgagtttacaccagtgagtgctgtattcagattttggcaccgttttgctagatctcatgagtggaaaacagtatgcaccgagtcatgcgcttgacctaa

SEQ ID NO: 143520 - DNA, 428 bp, Arabidopsis thaliana
agaaaacatacacaaatagcaaaacatggctaacatgctcttcctcgtctgcgcaactctcgccctctgctttctcctcaccaacgcttccatctaccgcaccgttgtcgaattcgaagaagatgacgccagcaaccccgtaggtccaagacagagatgccagaaggagtttcagcaatcacaacacctaagagcttgccagagatggatgagcaagcaaatgaggcaaggacgtggtggtggtccttccctcgacgatgagttcgatttcgagggcccccagcagggataccagctactccagcagtgctgcaacgagcttcgccaggaagagccagtttgcgtttgccccaccttgaaacaagctgccagggcagttagcctccagggacagcacggaccattccaatccaggaaaatgtaccagt

SEQ ID NO: 143521 - DNA, 305 bp, Arabidopsis thaliana
cacaaacgagtaagaatacaaatacaaatagcatttaaaaatggcaaacaagctcttgcgggggtgcgcaactttcgccctctgcttcctcctcaccaacgcttccatctaccgcactgttgtcgagttcgacgaagatgacgccagcaaccccatgggcccaagacagaaatgtcagaaggagtttcagcaatcacagcacctaagagcttgccagaaattgatgcgcatgcaaatgtggcaaggccgaggtggtggtccctcccttgactatgagtccgatttggaagacgacatcgagaacc

SEQ ID NO: 143522 - DNA, 424 bp, Arabidopsis thaliana
gccagaggttccgtgacatgcaccagaaagtggttcacattaggagcggtgataccattggcacaacacccggtgtagcccagtggttctacaacgacggacagcaaccacttgtcatcgtcagcatcttcgatctagccagtcaccagaaccagcttgaccgcaacccaaggccattttacttagccggaaacaacccacaaggtcaagtatggctacaaggacgagagcaacagccacagaagaacatcttcaatggatttggacccgaggttattgctcaagctttgaagattgatcttcagacagtgcagcaacttcagaaccaagatgacaaccgtggaaacattgtacgagtccaaggcccgttcggtgtcatttggccgcctttgaggggccagagaccttaggaggaggaagaaga

SEQ ID NO: 143523 - DNA, 415 bp, Arabidopsis thaliana
gccggaaacaaccagcagggaggctttggcggttcacatcaacaacaagaacagaaaaacttgtggagcgggttcgacgcacaggtcatagctcaagcattgaaaattgacgttcagttggctcagcagcttcagaaccaacaagacagcagaggaaacatcgttcgtgttaagggacctttccaggtcgtgaggtcacctctaagacagccctacgagagcgaggagtggagacacccacgtagcccacagggcaacggccttgaggagactatctgcagcatgaggtcccacgagaacattgacgaccctgctcgtgctgacgtgtacaagcccagcctaggtcgcgtgaccagtgtcaacagctataccttgcccatcttggtgtatgtcaggctcagtgccactcgtggcg

SEQ ID NO: 143524 - DNA, 372 bp, Arabidopsis thaliana
aacaaaacaacaagaaaaaatggcattaacttactaattaatcataacacttcttctgggtagcttcatatctgtcgtccactgcttatccttccgtgtggagttctacgagtccaatccatttttttctaatataattttttttttcttagctatttttctttccatacaattttttttttcttctattaaatttttttttttttactcaatttttttttttttgttaaaattttttttttttttcttttcttctttttttttttttatatatttttattatttcttatctttttatattttctctttcttaattatatttaatattttttttttcctctttttttcttttttactttttctcttattttt

SEQ ID NO: 143525 - DNA, 427 bp, Arabidopsis thaliana
cacttgtcatcatcgctcttctcgacatcgtcaactaccaaaaccaactcgaccgcaaccctagagtgttccatttggccggaaacaaccagcagggaggctttggcggttcacagcaacaacaagaacagaaaaacttgtggagcgggttcgacgcacaggtcatagctcaagcattgaaaattgacgttcagttggctcagcagcttcagaaccaacaagacagcagaggaaacatcgttcgtgttaagggacctttccaggtcgtgaggccacctctaagacagccctacgagagcgaggagtggagacacccacgtagcccacagggcaacggtcttgaggagactatctgcagcatgaggtcccacgagaacattgacgaccctgctcgtgctgacgtgtacaagcccagcctaggtcgcgt

SEQ ID NO: 143526 - DNA, 423 bp, Arabidopsis thaliana
ctctgtggctatggaagcagttgccgttacaatcatcctactcatcttccacaggatgttgcttagtacaaggaggagctccctgagagaattggacagccggattgtgagtattttctgaagacaggagcttgtaagtacggcccaacttgtaaatatcatcatccaaaggacaggaacggtgcacaacctgtaatgttcaatgttatcggtttacctatgcgtctgggtgagaagccatgtccatattacctgcgaacgggaacttgcagattcggagttgcttgcaaattccaccattctcaacctgataatggacattctactgcatatggaatgtctagctttcctgctgcagatttacgatatgctagtggtttaacaatgatgtctacatatggaactttgcctcgtccgcaagtt

SEQ ID NO: 143527 - DNA, 428 bp, Arabidopsis thaliana
cttcaagagattacttatggcggaagaggcgatactagtgttccttcagaacaatgaacagatcactgattcgggtcaattctctgccgagttcaacatcgaccacaacgaactcgtcaatgtcatcaaaagtctccatggttttcgttacatcgatgttcaggacattaaaaaggagacatggattctgactgatgaagggaagaaatatgcggcagaagggtcaccagaggttcaacttttcttagctgttcctgaagaaggcagcatatcaaaagatgagctccagaaaaagttagctcctgcagtcttcaagatcggctgttctcaagctggaaaaaacaagtgggtggaaatgggaaagcaagtctcgaggaaggttaaagatgttgaagataaagtgaaaggccagctttacaaatacaaca

SEQ ID NO: 143528 - DNA, 424 bp, Arabidopsis thaliana
aacaaacaaaaagaaaatggttaagctcagcaatctcctcgttgcaaccttcggggttctgctcggccttaacggctgccttgcgaggcagtcacttggggttcctcctcagctacagaacgagtgtaacctcgacaacctagatgttctccaagccaccgaaactatcaagagtgaagccggtcagatcgagtactgggaccacaaccaccctcagctccgatgtgttggtgtttccgttgctcgttatgtaaatgaacaaggcggtctttacttgcccaccttcttcacttccccaaaaatttccttcgtcgttcaaggaacgggtatcagcggaagagtggtccctggatgtgccgagaccttcatggactcgctgctcgttctaggtcaacaacaaggccaaccatggcaaggacgacag

SEQ ID NO: 143529 - DNA, 368 bp, Arabidopsis thaliana
gaaaatggttaagctcagcaatctcctcgttgcatccttcggggttctcctcgtccttaacggctgccttgctaggcagtcacttggggttcctcctcagctacagaacgagtgtaacctcgacaacctagatgttctccaagccaccgaaactatcaagagtgaagccggtcagatcgagtactgggaccacaaccaccctcagctccgatgtgttggtgtttccgttgctcgttatttaattgaacaaggcggtctttacttgcccacctttttcacttccccaaaaatttcctacgtcgttcaaggaacgggtatcagcggcagagtggtccctggatgtgccgagacctttatggactcgcagt

SEQ ID NO: 143530 - DNA, 339 bp, Arabidopsis thaliana
atcaaccatggctgctgctataagcgctgctgtttctttacctgtctgcaagacatgggtgtggccccaccaaaatctcctctgtatcccctcaaaggatcttcctcaagaagagcacagtgtgttacagatgtgttgtgtcagtgtaggctcaggttacaactgatactaccgaggcaccaccagttaaagtagtcaaggagtctatgaaacaggaagaaggaattgttgtcaacattttcaaacctaataacccttacactggtcgctgtcttttgaacaccaatatcaccgttgatgacgcttcctgtgagacttggcacattgtctctaccacct

SEQ ID NO: 143531 - DNA, 425 bp, Arabidopsis thaliana
aagaggaagaaaaatgggtcgagtctcatctattatctctttctctttgacactcttgatcctcttcaatggctacactgcccaacagtggcccaacgagtgccagctcgatcaactcaatgcgctcgaaccatcccaaatcatcaagagcgagggtggtcgcatcgaggtctgggaccaccatgcaccccagctccgttgctccggctttgcctttgagcgtttcgtcattgagcctcagggtcttttcttgcccactttcttgaacgccggcaaactcacgtttgttgttcacggaaggggtctaatgggaagagttattccgggatgcgccgagacgttcatggagtcaccggtatttggagaaggtcaaggtcagggtcagagtcaagggttccgtgacatgcaccagaaagtttagcacc

SEQ ID NO: 143532 - DNA, 422 bp, Arabidopsis thaliana
aaaaagaaaatggttaagctcagcaatctcctcgttgtaaccttcggggttctcctcgtccttaacggctgccttgcgaggcagtcacttggggttcctcctcagctacagaacgagtgtaacctcgacaacctagatgttctccaagccaccgaaactatcaagagtgaagccggtcagatcgagtactgggaccacaaccaccctcagctccgatgtgttggtgtttccgttgctcggtatgtaattgaacaaggcggtctttacttgcccaccttcttcacttccccaaaaatttcctacgtcgttcaaggaacgggtatcagcggaagagtggttcctggatgtgccgagaccttcatggactcgcagccgatgcaaggtcaacaacaaggccaaccatggcaaggacgacagggaca

SEQ ID NO: 143533 - DNA, 422 bp, Arabidopsis thaliana
cttgatcctcttcaatggctacactgcccatcagtggcccaacgagtgccagctcgatcaactcaatgcgctcgaaccatcccaaatcatcaagagcgagggtggtcgcatcgaggtctgggaccaccatgcaccccagcttcgttgctccggctttgcctttgagcgtttcgtcattgagcctcagggtcttttcttgcccactttcttgaacgccggcaaactcacgtttgttgttcacggaaggggtctaatgggaagagttattccgggatgcgccgagacgttcatggagttaccggtatttggagaaggtcaaggtcagggtcagagtcaagggttccgtgacatgcaccagaaagtagagcacctacggtgcggggacaccattgcaacaccatctggtgtggctcaatggttct

SEQ ID NO: 143534 - DNA, 445 bp, Arabidopsis thaliana
  unsure (1)..(445): unsure at all n locations
cgaagaaaatggnttaagctcagcaanctctcctcgttgtcaactcttcggggnttcttcctcgtggcttaacaggctgtccttgtcgatggcagtgcacttggtggttcctcctcagnctaccagaacnngagtgtaacctcgacaaccctagattgttctccaagnccaccgaaactatcaagagtgaagccggtcagatcgagtactgggaccacaaccaccctcagctccgatgtgttggtgtttccgttgctcggtatgtaattgaacaaggcggtctttacttgcccaccttcttcacttccccaaaaatttcctacgtcgttcaaggaacgggtatcagcggaagagtggtccctggatgtgccgagaccttcatggactcgcagccgatgcaaggacaacaacaaggccaaccatggcaaggacgacagggacaaca

SEQ ID NO: 143535 - DNA, 425 bp, Arabidopsis thaliana
aaaatgggtcgagtctcatctattatctctttctctttgacactcttgatcctcttcaatggctgcactgcccaacagtggcccaacgagtgccagctcgatcaactcaatgcgctcgaaccatcccaaatcatcaagagcgagggtggtcgcatcgaggtctgggaccaccatgcaccccagctccgttgctccggctttgcctttgagcgtttcgtcattgagcctcagggtcttttcttgcccactttcttgaacgccggcaaactcacgtttgttgttcacggaaggggtctaatgggaagagttattccgggatgcgccgagacgttcatggagtcaccggtatttggagaaggtcaaggtcagggtcagagtcaaggggtctgtgacatgcaccagaaagtagagcacctacggtgcgg

SEQ ID NO: 143536 - DNA, 413 bp, Arabidopsis thaliana
gaagaaagatagagaaaaaaaatgggaggcaaaggtgttttgatggtggcgatactttgcctttgggcactctctgcaacatctgaagcagtaacagaggctgagccaggtttgatgatgaacttctacaaggacacgtgtcctcaggccgaagacatcgtccgtgaacaagtcaaactcctctacaaacgccacaagaacaccgctttctcttggctccgtaacatcttccatgactgcgccgttgagtcatgtgatgcgtcccttttgctggattcgacaagaagagagctaggagagaaagaacacgacaggagcttcggacttagaaactttaagtacatcgaggagatcaaggaagctcttcagagggagtgtcctggggttgtctcatgttctgacattctcgtctt

SEQ ID NO: 143537 - DNA, 453 bp, Arabidopsis thaliana
  unsure (1)..(453): unsure at all n locations
cggaangggnggaccgacgcgtccgaacaaaaagaaaatggttaagctcagcaatctcctcgttgcaaccttcggggttctcctcgtcctgaacggctgccttgcgaggcagtcacttggggttcctcctcagctacagaacgagtgtaacctcgacaacctagatgttctccaagccaccgaaactatcaagagtgaagccggtcagatcgagtactgggaccacaaccaccctcagctccgatgtgttggtgtttccggtgctcgttatgtaatagaacaaggcggtctttacttgcccaccttcttcacttccccaaaaatttcctacgtcgttcaaggaacgggtattagcggaagagtggtccctggatgtgccgagaccttcatggactcgcagccgatgcaaggacaacaacaaggccaaccatggcaaggacgacagggacaaca

SEQ ID NO: 143538 - DNA, 462 bp, Arabidopsis thaliana
gaccggaacggaagggccggcccgcgcgtccgctcctatgtaatcgtgtatctctttgacactcttgtatcgtattcaatggctacactgcccaacgagtggcccaacgagtgccagctcgatcaactcaatgcgctcgaaccatcccaaatcatcaagagcgagggtggtcgcatcgtggtctgggaccaccatgcaccccatgtccgctgctccggctttgcctttgagcgtttcgtcattgagcctcagggtcttttcttgcccactttcttgaacgccggcaaactcacgtttgttgttcacggaaggggtctaatgggaagagttattcttggatgcgccgagacgttcatggagtcaccggtatttggagaaggtcaaggtcagggtcagagtcaagggttccgtgacatgcaccagaaagtagagcacctactgtgcggtgacaccattgcaaca

SEQ ID NO: 143539 - DNA, 303 bp, Arabidopsis thaliana
aaaagaaaatggtgtaagctcagcaatctcctttttgtataccttcggggttctcctcgtgcgtaacggctgccttgcgaggcagtcacttggggttcctcctcagctacagaacgagtgtaacctcgacaacctagatgttctccaagccaccgaaactatcaagagtgaagccggtcagatcgagtactgggaccacaaccaccctcagctccgatgtgttggtgtttccgccgctcgttatgtaattgaacaaggcggtctttacttgaccacctttttcaacttcccaaaaatttccta

SEQ ID NO: 143540 - DNA, 421 bp, Arabidopsis thaliana
  unsure (1)..(421): unsure at all n locations
aaacanacacacanagcaaaaaagggcaaacaaggggnnccncgncngcgcagcncncgcggggggcnnccnccacaccaacgcgnccancnaccgcaccgncgnngagnncgaagaagangacgccacnaaccccanaggcccaaaaangaggaaangccgcaaggagnnncagaaagaacaacaccnaagagcnngccagcaanngangcnccagcaagcaaggcaaggccgnagcgangaganggannncgaagacgacanggagaacccacagggacaacagcaggaacaacagcnannccagcagngcngcaacgagcnncgccaggaagagccaganggggnnngccccaccnngaaacaagcngccaaggccgnnagaccccagggacagcaccaaccaaggcaaggcaggaaa

SEQ ID NO: 143541 - DNA, 424 bp, Arabidopsis thaliana
cacatagcaaaaaatggcaaacaagttgttccttgtctgcgcagctctcgctctctgcttcctgctcaccaacgcttccatctaccgcaccgtcgttgagttcgaagaagatgacgccactaaccccataggcccaaaaatgaggaaatgccgcaaggagtttcagaaagaacaacacctaagagcttgccagcaattgatgctccagcaagcaaggcaaggccgtagcgatgagtttgatttcgaagacgacatggagaacccacagggacaacagcaggaacaacagctattccagcagtgctgcaacgagcttcgccaggaagagccagattgtgtttgccccaccttgaaacaagctgccaaggccgttagactccagggacagcaccaaccaatgcaagtcaggaaaatttaccagaca

SEQ ID NO: 143542 - DNA, 291 bp, Arabidopsis thaliana
cttaattttatagtctcccgtttacgcaaaattaaattaataataatataacaaaatatgggtaaatttctcagataaattcatcaaggagtattttgtaattaatgtgtagttggacaatataatactaaaaaaaaaaaaaaaaaaaaaaaaaaaaaaaaaaaaaaaaaaaaaaaaaaaaaaaaaaaaaaaaaaaaaaaaaaaaaagggggggccggttttaaggaaccaagcttacctacccgggcatgccaaggaataacttttttattggggcacctaaattcaatt

SEQ ID NO: 143543 - DNA, 470 bp, Arabidopsis thaliana
aaccaacaagacagcagaggaaacatcgttcgtgttaagggacctttccaggtcgtgaggccacctctaagacagccctacgagagcgaggagtggagacacccacgtagcccacagggcaacggccttgaggagactatctgcagcatgaggtcccacgagaacattgacgaccctgctcgtgctgacgtgtacaagcccagcctaggtcgcgtgaccagcgtcaacagctataccttgcccatcttggagtatgtcaggctcagtgccactcgtggcgttctccagggtaatgcgatggtgcttcctaaatacaacatgaacgctaacgagatcttgtactgcactggaggacaaggaaggatccaagtggtcaacgacaacggacagaacgtgttggaccaacaggtgcagaagggacagctcgtggtcatcccacaagggttcgcatacgttgtccagtcccacgg

SEQ ID NO: 143544 - DNA, 462 bp, Arabidopsis thaliana
aaaaatgggtcgagtctcatctattatctctttctctttgacactcttgatcctcttcaatggctacactgcccaacagtggcccaacgagtgccagctcgatcaactcaatgcgctcgaaccatcccaaatcatcaagagcgagggtggtcgcatcgaggtctgggaccaccatgcaccccagctccgttgctccggctttgcctttgagcgtttcgtcattgagcctcagggtcttttcttgcccactttcttgaacgccggcaaactcacgtttgttgttcacggaaggggtctaatgggaagagttattccgggatgcgccgagacgttcatggagtcaccggtatttggagaaggtcaaggtcagggtcagagtcaagggttccgtgacatgcaccagaaagtagagcacctacggtgcggtgacaccattgcaacaccatctggtgtagctcaatg

SEQ ID NO: 143545 - DNA, 457 bp, Arabidopsis thaliana
cgcgctacgcaaacagaaaatggttaacctcagcaactctcctcgttgcaaccttcggggatctcctcgttcttaacggctgccttgcgaggcagtcacttggggttcctcctcagctacagaacgagtgtaacctcgacaacctagatgttctccaagccaccgaaactatcaagagtgaagccggtcagatcgagtactgggaccacaaccaccctcagattcgatgtgttggtgttttcgatgctcgatatgtaattgaacaaggcgggctttacttgcccaccttcttcacttacccaaaaattcactacgtcgatcaacgaacgggtatcaacggaagagtggtgcctggatgtgccgagaccttcatggactcgcaaccgatgcacggacaacaacagggccaaccatggcaaggacgacagggacaacacgggcaaccatgggaaggaca

SEQ ID NO: 143546 - DNA, 458 bp, Arabidopsis thaliana
gataaaaatggctcgagtctcttctcttctttctttctccttaacacttttgatccttttccatggctacgcggctcaacagggtcagcagggtcagcagtttccgaacgagtgccagctcgaccagctcaatgcgctcgagccttcacacgtactgaagagcgaggctggtcgcatcgaggtgtgggaccaccacgctcctcagctccgttgctcaggtgtctcctttgcacgttacatcatcgagtctaagggtctctacttgccctctttctttaacaccgcgaagctctccttcgtggctaaaggacgaggtcttatgggaaaagtgatccctggatgcgccgaaacattccaagactcatcagagttccaaccacgcttcgaaggtcaaggtcaaagccagaggttccgtgacatgcaccagaaagtggagcacattatgagcggtgatacca

SEQ ID NO: 143547 - DNA, 475 bp, Arabidopsis thaliana
aacaattggcatttgcataaacactttcaaaaacatgtaatcaaaagtattttagaagcttgatcatggcgacgtcaggtacatacgtgacagaagttcctctgaaagggtcagcgaagaaccactacaagaggtggaagagcgaaaaccaactcttccctgacgccattggccatcatatccaaggtgtcaccgttcacgagggcgactgggactcccacggggccatcaagtcctggaactacacatgcgatgggaagcaagaggtgttcaaggagaagagggagttagacgaccagaagatggcggtgacgtttagagggctggatggtcatgtgatggagcagcttaaggtgtatgacgtcatcttccagttcgtccctaagtctcaggaaggttgcgtctgcaaagtcactatgttttgggagaagcgctacgaagactctccagagcccatcaagtacatgaagttcgt

SEQ ID NO: 143548 - DNA, 340 bp, Arabidopsis thaliana
gttataaccaatgggtaccagatctctcccgaagaagctaaacgagtaaagtttagcacgattgagaccacactgacccatagcagtccaatgagctacggaaggcctagggcttgaggcttgatgagcgcgtggtggaatagcgtttgaatctaaagttcggtttggtacgacttgtaatatgaaataataatgtacaaagaagttctacgcttaagggaactgttttgttttgagctttgtattaggacgtctagtgtacaacaacgaacgtcgtgtataagcgatcgttgactctgcacatgtaactctttcctgaataaaaaatctttaagtcttt

SEQ ID NO: 143549 - DNA, 471 bp, Arabidopsis thaliana
caagtacgtagacgttgaacatttctcagtcccacagggtcgcagagctattgagcttgtagcgggtaaagagagtgccatcgctcaagtggttcggactgtcattgggaagacttacgtgctgtcttttgcggttggagacgccaacaatgcttgcaaaggatcaatggtggttgaggcttttgcaggaaaagatacacttaaggtcccttacgagtcgaaaggcacaggagggtttaaacgagcttctattcgatttgtggcggtttcgacccgatcaagaattatgttctacagcactttctatgccatgaggagcgatgatttctcgtcattgtgtgggcctgtgatcgatgatgtcaagcttataagcgttcgtaaaccatagatgaatcaccaatcctattacaagaaaatgcatcgtgtggtcttcttttattttccttaaaccgtctttggtgtgtgttggat

SEQ ID NO: 143550 - DNA, 487 bp, Arabidopsis thaliana
cccacgccatcgcaaaaaatggcaaacaagttgttcctcgtctgcgcagctctcgctctctgcttcctcctcaccaacgcttccatctaccgcaccgtcgttgagttcgaagaagatgacgccactaaccccataggcccaaaaatgaggaaatgccgcaaggagtttcagaaagaacaacacctaagagcttgccagcaattgatgctccagcaagcaaggcaaggccgtagcgatgagtttgatttcgaagacgacatggagaacccacagggacaacagcaggaacaacagctattccagcagtgctgcaacgagcttcgccaggaagagccagattgtgtttgccccaccttgaaacaagctgccaaggccgttagactccagggacagcaccaaccaatgcaagtcaggaaaatttaccagacagccaagcacttgcccaacgtttgcgacatcccgcaagttgatgtttgtcccttcaaca

SEQ ID NO: 143551 - DNA, 468 bp, Arabidopsis thaliana
aacaaaaagaaaatggttaagctcagcaatctcctcgttgcaaccttcggggttctcctcgggcttaacggctgccttgcgaggcagtcacttggggttcctcctcagctacagaacgagtgtaacctcgacaacctagatgttctccaagccaccgaaactatcaagagtgaagccggtcagatcgagtactgggaccacaaccaccctcagctccgatgtgttggtgtttccgttgctcgttatgtaattgaacaaggcggtctttacttgcccaccttcttcacttccccaaaaatttcctacgtcgttcaaggaacgggtatcagcggaagagtggtccctggatgtgccgagaccttcatggactcgcagccgatgcaaggacaacaacaaggccaaccatggcaaggacgacagggacaacaaggccaaccatgggaaggacagggacaacagggacaacat

SEQ ID NO: 143552 - DNA, 357 bp, Arabidopsis thaliana
tcctaactcaccaaccccctcaaaattgccaccaacttcaaatttctctcctttaaacctttctcaatcatctttcttctgccttggaatcctgatcatggcgtcttctctcacttccaaatccattctcggatccaccaaacccggttcttcttctcttccctcggagctccgtcgtctttcttctcccgccgttcagatctctctccgtacccaaaccaggaagaacttccagatacaagctactggaagttcatatgggactcattttcgagtttcaacttttggagaatcacatggaggaggagttggttgtatcattgatggttgtcctcctcgtattccacttactgaatc

SEQ ID NO: 143553 - DNA, 483 bp, Arabidopsis thaliana
  unsure (1)..(483): unsure at all n locations
cactttttgtcgcctcgacactcgcctttctctcctcggttccgttttgtctcttcttggctaattatgcttgtacacaaaaggtcatgagtactctgcttcctgatactgaagaaactggtggagttggcaaggaggatgatgacgaatctagatttgatgagtacagcaagattggtcacggtgaacgcgcggctggagttggtgaggctgcacttttcaggggtaaagaagaacccattcccattcaggttaaggaagatgaggagatggcgaaagagtcaacgagcttgctagagaaaattagggatgagggtagaactgacaaagaaacctctgagagaactttacaagatgataaaaagtccggaaatgctaagtcagaggaggttcaagaacagcctgaaaagcgggaagcgcctgagactagacgtgaaggggaaactggggctacaaaaactgaaacttntacgggcaaggacg

SEQ ID NO: 143554 - DNA, 372 bp, Arabidopsis thaliana
aaacaaaacacacccaaatatgcataagcttttgttttctcttctctccgccgtctcactctcatttctcctcttcttccatggcgccgaggcacgccagcgagaggcgccgtttccaaacgcctgccatttcagccaaatcaacagcctcgcgcccgctcaggcgacgaagttcgaagccggtcagatggaagtatgggaccacatgagccctgagctccgatgcgccggtgtaacggtggctcgcatcacccttcagcccaattccattttcttgcccgctttttttagcccacctgcccttgcttacgttgtccaaggagaaggagttatggggacgattgcttctggttgtcctgagactttttgcag

SEQ ID NO: 143555 - DNA, 466 bp, Arabidopsis thaliana
gaaaaaagggggatcagttccgtcgccgcttcttcgatttttgaggccgccgcttcttcttcttcctcgcagcaggtaagtcacacaggtaactgaaagatggggcgtgttagaaccaagaccgtgaagaaatcttctcgtcaagtcatcgagaagtactactctcgcatgactcttgacttccacactaacaagaaaatccttgaagaggttgccatcatcccttcaaagagactccgcaacaagattgctggattctccacccacttgatgaaacgtatccagaagggaccagtccgtggaatctcactcaagcttcaggaagaggagcgtgaacgccgcatggactttgttcccgatgagtctgccatcaagactgatgagatcaaggtggacaaagagactcttgagatgcttgcttctctaggaatgtctgacactcccggcatctctgcagtcgagccac

SEQ ID NO: 143556 - DNA, 476 bp, Arabidopsis thaliana
ctctcaactccgaaagtacaaaaccccaaattaacaaaacatgttgcgtttcgtggtactctctctaactctcatggttttcatcaactcatcaaactttccaaagacagcagccaccccaccaggcacgtaccaaaaccacacaacgtacgtaaaaacggcatgcaactcaacaacataccctacaatgtgctacaactgtctgtcctcctattcctccaccatcaagtccgacccaatcaaactatgcacaacatcgctaaatctcaacgtcaaatccgctaaaaacgccacattagtcgtctctaaccttctccaaaaggccaaagccgcgaaaagccatgaggtctcgatccttaaggactgcgtggacgagatgaaggacactatcgacgagcttaagcaagcggtcgccgagatgaagtatgtcagaggcggagggaaaactacggaggagcatttaaagaacgtgaaga

SEQ ID NO: 143557 - DNA, 389 bp, Arabidopsis thaliana
attgcttataaaaggggctcgagtctcttctcttctttctttcttcttaacacttttgatccttttccatggctacgcggctcaacagggtcagcagggtcagcagtttccgaacgagtgccagctcgaccagctcaatgcgctcgagccgtcacacgtactgaagagcgaggctggtcgcatcgaggtgtgggaccaccacgctcctcagctccgttgctcaggtgtctcctttgcacgttacatcatcgagtctaagggtctctacttgccctctttctttaacaccgcgaagctctctttcgtggctaagggacgaggacttatgggaaaagtgatccctggatgcgccgaaacattccaagactcatcagaattccaaccacgct

SEQ ID NO: 143558 - DNA, 473 bp, Arabidopsis thaliana
caaaaagaaaatggttaagctcagcaatctcctcgttgcaaccttcggggttctcctcgtccttaacggctgccttgcgaggcagtcacttggggttcctcctcagctacagaacgagtgtaacctcgacaacctagatgttctccaagccaccgaaactatcaagagtgaagccggtcagatcgagtactgggaccacaaccaccctcagctccgatgtgttggtgtttccgttgctcgttatgtaattgaacaaggcggtctttacttgcccaccttcttcacttccccaaaaatttcctacgtcgttcaaggaacgggtatcagcggaagagtggtccctggatgtgccgagaccttcatggactcgcagccgatgcaaggacaacaacaaggccaaccatggcaaggacgacagggacaacaaggccaaccatgggaaggacagggacaacagggacaacaaggaagac

SEQ ID NO: 143559 - DNA, 228 bp, Arabidopsis thaliana
aaaggatacacaagtcagttctatgttttgagaattgaagatttagaggttatcgtgttttaagtgaaaggcacaagtcagttctgtgttttgtgtaatcggatcccatttgtttcaatgtttttttggttcttctttttcgttcacaactgaaaaatcggacgtgttttgaatgtagagcaaactaatttaaaaagctgtggatttcgtagtccagcttggtctgtt

SEQ ID NO: 143560 - DNA, 477 bp, Arabidopsis thaliana
aacaaacaaaaagaaaatggttaagctcagcaatctcctcgttgcaaccttcggggttctcctcgtccttaacggctgccttgcgaggcagtcacttggggttcctcctcagctacagaacgagtgtaacctcgacaacctagatgttctccaagccaccgaaactatcaagagtgaagccggtcagatcgagtactgggaccacaaccaccctcagctccgatgtgttggtgtttccgctgctcgttatgtaattgaacaaggcggtctttacttgcccaccttcttcacttccccaaaaatttcctacgtcgttcaaggaacgggtatcagcggaagagtggtccctggatgtgccgagaccttcatggactcgcagccgatgcaaggacaacaacaaggccaaccatggcaaggacgacagggacaacaaggccaaccatgggaaggacagggacaacaaggacaacaaggaag

SEQ ID NO: 143561 - DNA, 472 bp, Arabidopsis thaliana
ctggtcgtcgctcacaggagaaacgtaatggaaaacaaagagaccaagcaagaaccagcagcagcagctgagcaaaagaccgttccgttgatcgaagatgagatcgagaggagcaaagtcgggatcatgagagctctctgcgaccgacaagatcctgaaactaaggaggtggatgatctgatgataaggaggtttctgagagcgcgtgacctggacattgaaaaggcttcaacgatgtttctaaattacctgacttggaagagaagcatgctcccaaaggggcacataccagaagcagagattgcaaatgatctatcgcataacaagatgtgtatgcaaggtcatgacaagatgggtcgacctatcgctgttgccattgggaacagacataacccttccaaaggcaaccctgacgagttcaagcgttttgttgtctacacgctcgagaagatttgtgctagaatgccgagag

SEQ ID NO: 143562 - DNA, 401 bp, Arabidopsis thaliana
gaagaataacgcatatatatggatcgagattatcgatacggttgtacgatctggttcagattccgatgaagaattgaagggattgagtcacgaagagtataggaggcagaaacggcttaagatgaggaaatcagccaagttctgcttttgggagaacacaccgagtccacctagagatcagaacgaggattccgatgagaacgccgacgagattcaggacaagaacggcggcgaaagagatgataattcgaaagggaaagaaaggaaaggtaaatctgactcggaatctgaatctgatggtttgagatctaggaagaggaagagtaagagctcgaggtctaagcgcatgagaaagagatcttatgacagcgattgtgaatccgaagggagtgagagtgatt

SEQ ID NO: 143563 - DNA, 469 bp, Arabidopsis thaliana
aagaaaatggttaagctcagcaatctcctcgttgcaaccttcggggttctcctcgtgcttaacggctgccttgcgaggcagtcacttggggttcctcctcagctacagaacgagtgtaacctcgacaacctagatgttctccaagccaccgaaactatcaagagtgaagccggtcagatcgagtactgggaccacaaccaccctcagctccgatgtgttggtgtttccgttgctcgttatgtaattgaacaaggcggtctttacttgcccaccttcttcacttccccaaaaatttcctacgtcgttcaaggaacgggtatcagcggaagagtggtccctggatgtgccgagaccttcatggactcgcagccgatgcaaggacaacaacaaggccaaccatggcaaggacgacagggacaacaaggccaaccatgggaaggacagggacaacagggacaacaaggaagac

SEQ ID NO: 143564 - DNA, 463 bp, Arabidopsis thaliana
  unsure (1)..(463): unsure at all n locations
aagcattctctttctgtggacgaaactaaacctgttagaaaaagccagaagaaccaaactcagaccgagagatagagattgagggagagctctagctctgtagaaaagaaggattcattcatcatatccagaaatggctctaaagtttaaccctttggtggcatctcagccttacaaattcccttcctcgactcgtccgccaacttcttctttcagatctcccaagttcctctgcctcgcttcttcttctccggctctcagctccggccccaaggaggttgagagtttgaagaaaccatttacgccacccagggaagtgcatgttcaagtcttgcactccatgccacctcaaaagatcgagatcttcaaatctatggaaaactgggccgaggagaaccttctgattcacctcaaggatgtgnagaagtcttggcaaccccaggatttcttgcctgaccctgca

SEQ ID NO: 143565 - DNA, 463 bp, Arabidopsis thaliana
cgttaatccacttcttcgtcttggtaagctcttagcttcaaagggtttgctcataaccttcgtcaccactgagtcatggggcaaaaagatgcgaatctccaacaaaatccaagaccgtgtcctcaaaccggttggtaaaggctatctccggtatgatttcttcgacgacgggcttcctgaagacgacgaagctagcagaaccaacttaaccatcctccgaccacatctagagctggtcggcaaaagagagatcaagaaccttgtgaaacgttacaaggaagtaacgaaacagcccgtgacatgtcttatcaacaaccctttcgtctcttgggtctgtgacgtggcagaagatcttcaaatcccttgtgctgttctttgggttcaatcttgtgcctgcttagctgcttattactattaccaccacaacctagttgacttcccgaccaaaacagaacccgagatc

SEQ ID NO: 143566 - DNA, 464 bp, Arabidopsis thaliana
agattcactattttagatgctccggggcacaagagttacgtacccaatatgattagtggagcatctcaagcggacattggtgtgctggtgatttcagctcgaaaaggtgaatttgaaacaggatatgagaggggtgggcagacacgtgaacatgttcaacttgccaaaacattgggtgtctctaaactgattgttgttgtgaacaagatggatgacccaactgtgaactggtcgaaagaaaggtacgatgaaatagaacaaaaaatggtaccgttcctgaaagcctctggctacaacacaaagaaagatgttgtcttcttgcctatatctggtctaatgggcaaaaatatggaccagaggatgggtcaagaaatttgtccttggtggagtggccctagcttttttgaagtacttgattctattgaaattccgccacgcgatcctaatggtccattcaggatgcc

SEQ ID NO: 143567 - DNA, 451 bp, Arabidopsis thaliana
agcacaatgactagatttgcggtattgccactctctgttctccttctcgttctcttgttcctctgcactgagtcgttggctaagtcggaggagtctgaagaatacgacgtcgctgtgccttcatgttgcgggttttcgtctcctcttctgattaagaaagatcaatggaaaccaatcttcgagacgaagtttggacagatttcaaccgttcaaatcggcaatggatgcggtggaatgggaccttacaagatacattccataacgttggagccaaacacaattttgctccctcttcttcttcattccgacatggtcttcttcgttgactctggaagtgggattctgaattgggttgacgaggaagcgaagagtactgagattagactaggggacgtttacaggctacgttccgggtcggttttctacttacagagcaaaccggtggatatct

SEQ ID NO: 143568 - DNA, 474 bp, Arabidopsis thaliana
gttgtagcttccgtagaagacctcaccatacgccaagtcacggccgacaatcggcgaattcgcccgaatcttctcgggactcacacagagagtaaattccggcttttcatgtccgattacggcaagaactactccacgagggaggagtacatccaccgcctcggaatatttgccaaaaacgtccttaaggccgcagagcaccagatgatggacccctccgccgtccacggagtcacacagttctctgacctcacggaagaggagttcaagcggatgtacactggagtagccgatgttggcggcagccgtggcggtacggttggagcggaggcacctatggttgaggttgatggattgcctgaagattttgactggagggagaaggggtgggttactgaggttaagaatcaaagtgcatgtggatcgtgctgggcttttagcacaacgggagcagctgaaggagcccatttcgtc

SEQ ID NO: 143569 - DNA, 473 bp, Arabidopsis thaliana
atccaagtgccccaccaaatgcttcaatcctcttccactacacaaaaaaacaacttaatccctttatacccttttagccaaaaccctcgctaaaagccaatccctcaatataaaataacaagtagaattgatctgcctatatataagattttgagacgaaataagatctaaaccacaagaaagaaagtaaacataaaagtatgggaaggtcaccgtgctgtgagaaagctcacacaaacaaaggagcatggacgaaagaagaggacgagaggctcatcgcttacattaaagctcatggagaaggctgctggagatctctccccaaagccgccggacttcttcgctgtggcaagagctgccgtctccggtggatcaactatctccggcctgaccttaagcgtggaaacttcaccgaggaagaagacgagctcatcatcaagctccatagccttcttggcaacaaatggtcgctt

SEQ ID NO: 143570 - DNA, 470 bp, Arabidopsis thaliana
aacaaacaaaaagaaaatggttaagctcagcaatctcctcgttgcaaccttcggggttctcctcgtccttaacggctgccttgcgaggcagtcacttggggttcctcctcagctacagaacgagtgtaacctcgacaacctagatgttctccaagccaccgaaactatcaagagtgaagccggtcagatcgagtactgggaccacaaccaccctcagctccgatgtgttggtgtttccgttgctcgttatgtaattgaacaaggcggtctttacttgcccaccttcttcacttccccaaaaatttcctacgtcgttcaaggaacgggtatcagcggaagagtggtccctggatgtgccgagaccttcatggactcgcagccgatgcaaggacaacaacaaggccaaccatggcaaggacgacagggacaacaaggccaaccatgggaaggacagggacaacagggacaac

SEQ ID NO: 143571 - DNA, 251 bp, Arabidopsis thaliana; identical to SEQ ID NO: 130091

SEQ ID NO: 143572 - DNA, 444 bp, Arabidopsis thaliana
acaagccaccgaaactatcaagagtgaagccggtcagatcgagtactgggaccacaaccaccctcagcttcgatgtgttggtgtttccgttgctcgttatgtaattgaacaaggcggtctttacttgcccaccttcttcacttccccaaaaattttctacgtcggtcaaggaacgggtatcagcggaagagtggtccctggatgtgccgagaccttcatggactcgcagccgatgcaaggacaacaacaaggtcaaccatggcaaggacgacagggacaacaaggccaaccatgggaaggacagggacaacagggacaacaaggaagacaaggccaaccatgggaaggacagggacaacagggacaacaaggacgacagggacaacaaggccaaccatgggaaggacagggacagcaaggacaaccagggtttcgtgacatgca

SEQ ID NO: 143573 - DNA, 457 bp, Arabidopsis thaliana
ataaaaatggctcgagtctcttctcttctttctttctccttaacacttttgatccttttccatggctacgcggctcaacagggtcagcagggtcagcagtttccgaacgagtgccagctcgaccagctcaatgcgctcgagccttcacacgtactgaagagcgaggctggtcgcatcgaggtgtgggaccaccacgctcctcagctccgttgctcaggtgtctcctttgcacgttacatcatcgagtctaagggtctctacttgccctctttctttaacaccgcgaagctctccttcgtggctaaaggacgaggtcttatgggaaaagtgatccctggatgcgccgaaacattccaagactcatcagagttccaaccacgcttcgaaggtcaaggtcaaagccagaggttccgtgacatgcaccagaaagtggagcacattaggagcggtgatacca

SEQ ID NO: 143574 - DNA, 144 bp, Arabidopsis thaliana
caccggtacatgtactggtggtggttttacgggagggctataagttggggtaggaggcacgggtactgttggtgttagtacgggccggatatatatcatttaataatctattatcaacataaattattttaaattttttttgat

SEQ ID NO: 143575 - DNA, 459 bp, Arabidopsis thaliana
gcaatcgggagattcacagtacattaaatataagtcatcccagcaatcttctgccttcaattctggtgctaaagagaggatcattaggatggtggagatgcctgtagatccacttgatccaccaaagttcaagcacaagagagtcccaagggcttctggttctccgcctgttccggtcatgcattcaccgcccaggcctgttaccgtcaaggaccagcaagactggaaaatccctccttgtatctccaattggaagaatccgaaaggttacacaatccctcttgacaaacgtctagctgctgatggaaggggcctacaagacgttcagatcaatgataactttgccaagttatcagaggccctctatgtagctgagcagaaagctagagaggctgtttcaatgcgttccaaggtgcaaaaagagatggtgatgaaggacaaggaaaggaaagagcagga

SEQ ID NO: 143576 - DNA, 464 bp, Arabidopsis thaliana
cttctctgagaaaaaacaacagatccgaattttatttttaatcagccggaaaaaatggagaaagcgatcgagagacaacgcgttcttcttgagcatctccgaccttcttcttcttcttcgcacaattacgaggcttctctatctgcttctgcttgcttggctggggacagtgctgcatatcagaggacctctctctatggagatgatgtggtcattgtcgcggcacataggactccactatgcaagtccaaacgtggcaatttcaaggatacatatcccgatgatttgctcgcacctgttttgagggcattgatagagaagacgaatctaaacccaagtgaagtaggtgacattgttgtgggtactgttttggcacctggatctcagagagccagtgaatgcaggatggctgcgttctatgctggtttccctgaaaccgtggctgtcagaactgtgaatagaca

SEQ ID NO: 143577 - DNA, 242 bp, Arabidopsis thaliana
cagaaaggtcttaaccttatactcgttgctcgtttcccagacaagctcaaagatgtctctgattccatcagatctaagtataggcaaactcagatcttgaccgttgtgatggatttctctggagatattgatgaaggtgtgaaacggattaaggagagtattgaaggattagatgttgggattttgattaattatgctggcctgtcttattcttatgcttagttttttcatgaggtctgtta

SEQ ID NO: 143578 - DNA, 469 bp, Arabidopsis thaliana
  unsure (1)..(469): unsure at all n locations
aacaaacaaaaagaaaatggttaagctcagcaatctccttgttgcaaccttcggggttctcctcgtccttaacggctgccttgcgaggcagtcacttggggttcctcctcagctacagaacgagtgtaacctcgacaacctagatgttctccaagccaccgaaactatcaagagtgaagccggtcagatcgagtactgggaccacaaccaccctcagctccgatgtgttggtgtttccgttgctcgttatgtaattgaacaaggcggtctttacttgcccaccttcttcacttccccaaaaatttcctacgtcgttcaaggaacgggtatcagcggaagagtggtccctggatgtgccgagaccttcatggactcgcagncgatgcaaggacaacaacaagggccaaccatggcaaggacgacagggacaacaaggccaaccatgggaaggacagggacaacagggaca

SEQ ID NO: 143579 - DNA, 466 bp, Arabidopsis thaliana
cttctcgtcagtcacgctgaagcagttgacgttttcagattgtgcgagaagtgcaaaggtggtaaaatcgggattgctcatagcccggcttggtttgaaccagaagatgtggagggaggtcaacgtaccgtagaccgtgtgcttgacttcatcatgggctggcatttggatcctacgacgtacggagattatcctcaaagtatgaaagatgcggtcggagctagattgcccaaatttacaaaagcccaaaaggcaaaactgaaagggtcagctgacttcgtgggaataaactattacagttccttctatgcaaaggcaagcgaaaagcctgattatcggcaaccatcttgggctacagattctctagtcgagtttgaacccaagactgttgatggatccgttaagattggtagccagcccagcactgctaagatggctgtatacgcggcgggtttgaggaagcttg

SEQ ID NO: 143580 - DNA, 467 bp, Arabidopsis thaliana
ggagcgtctctattatgggtcctcctgatactttgtatgaaggtggcttttttaatgcaattatgtcgtttccggagaattatccagtttcaccaccaactgtgacgtttacctcggagatgtggcatcctaatgtttattctgatggaaaagtttgcatttctattcttcatcctcctggtgatgatcctcatggatacgagcttgcctctgaacgttggacccctgtccatacggtagaaagcattgtgttgagtatcatatcgatgctctcaggtcccaacgatgagtcaccagcgaatgtggaagctgcaaaggaatggagagacaacagagcagagtttaggaagaaagtgagtcgctgtgtgagaagatcgcaagagatgctatgaacatctctccagcgtttttttcgtgttgtagaaatatcgattctaatcttatgagaaagcctaagcagaaccaac

SEQ ID NO: 143581 - DNA, 431 bp, Arabidopsis thaliana
  unsure (1)..(431): unsure at all n locations
ccacaaacaaaaagagagagaagagaacgagagaatcattgagaaacgaaacaacaatggccgtctctcattccagtgccctaccatcttctcctcctcctcaatctccggctttcaatgccgttctgatccagatctcgtcggttctcccgtcggtggatcatctcgccgtcgtgtccatgcctccgccgggatttcttcctcattcaccggggacgctggattatcctccaggatcttaagatttcctcctaatttcgtccgtcagctgagcattaaagcccgtagaaactgtagcaacatcggtgttgcacagatcgtggcggctaagtggtccaacaacccatcctccgcgttacctttcgcggcggnggntgctgctacctcgtctgcatctgcggtttcttccggcgtatctgctgtctcattct

SEQ ID NO: 143582 - DNA, 434 bp, Arabidopsis thaliana
gtgtgctcttagcctttactctatagttttatattatatcaatcgacatggcgaatgtggaccgtgatcggcgtgtgcatgtagaccgtactgacaaacgtgttcatcagccaaactacgaagatgatgtcggttttggtggctatggcggttatggtgctggttctgattataagagtcgcggcccctccactaaccaaatcttggcacttatagcaggagttcccattggtggcacactgctaaccctagctggactcactctagccggttcggtgatcggtttgctagtctccatacccctcttccttctcttcagtccggtgatagtcccggcggctctcactattgggcttgctgtgacgggaatcttggcttctggtttgtttgggttgactggtctgagctcggtcttgtgggtccttaactacctc

SEQ ID NO: 143583 - DNA, 470 bp, Arabidopsis thaliana
atttctcacattttcgtagccgcaagactccttttatgattcttacttgcagctatgggtaaagagaagtttcacattaacattgtggtcattggtcatgttgattctggaaaatcgaccacaactggtcacttgatctataagcttggtggtattgacaagcgtgtcatcgagaggttcgagaaggaggctgctgagatgaacaagaggtccttcaagtacgcatgggtgttggacaaacttaaggccgagcgtgagcgtggtattaccatcgatattgctctatggaagttcgagaccaccaagtactactgcacagtcattgatgccccaggacatcgtgatttcatcaagaacatgattactggtacctcccaagctgattgtgctgttcttatcattgactccaccactggaggttttgaggctggtatctttaaggatggtcagacccgtgagcacgctctttt

SEQ ID NO: 143584 - DNA, 465 bp, Arabidopsis thaliana
aaagaaaatggttaagctcagcaatctcctcgtttcaaccttcggggttctcctcgtccttaacggctgccttgcgaggcagtcacttggggttcctcctcagctacagaacgagtgtaacctcgacaacctagatgttctccaagccaccgaaactatcaagagtgaagccggtcagatcgagtactgggaccacaaccaccctcagctccgatgtgttggtgtttccgttgctcgttatgtaattgaacaaggcggtctttacttgcccaccttcttcacttccccaaaaatttcctacgtcgttcaaggaacgggtatcagcggaagagtggtccctggatgtgccgagaccttcatggactcgcagccgatgcaaggacaacaacaaggccaaccatggcaaggacgacagggacaacaaggtcaaccatggtaaggcagggacaacagggacaacaagga

SEQ ID NO: 143585 - DNA, 471 bp, Arabidopsis thaliana
aaaaatgatttgatctctcaagaacacacttcccacaaactcaagacttctctgtctgaaaccctgaccaagttctaccctcttgccggaagaatcaccggagtaaccgtcgattgtaccgatgaaggagctatctttgtcgatgctcgtgtcaataactgtcctctcactgaatttctccagtgccctgatttcgacgccctccaacagttgcttcctctggacgttgtggacaacccatacttggctgctgccacgtggcctttgctgctcgtgaaggcaacttacttcccatgcggaggcatggccataggaatctgcatcactcacaaaatcgcggacgcagcctccatctcgactttcattcggtcctgggcagccacggctcgaggagagaacgatgccgcagcgatggaaagtcctgtatttgctggagcgaatttctacccaccagccaatgaggcttttaag

SEQ ID NO: 143586 - DNA, 456 bp, Arabidopsis thaliana
agaaatataagaaataacaaaatggctcgagtctcttctcttctttctttcttcttaacacttttgatccttttccatggctacgcggctcaacagggtcagcagggtcagcagtttccgaacgagtgccagctcgaccagctcaatgcgctcgagccgtcacacgtactgaagagcgaggctggtcgcatcgaggtgtgggaccaccacgctcctcagctccgttgctcaggtgtctcctttgcacgttacatcatcgagtctaagggtctctacttgccctctttctttaacaccgcgaagctctctttcgtggctaagggacgaggtcttatgggaaaagtgatccctggatgcgccgaaacattccaagactcatcagagttccaaccacgcttcgaaggtcaaggtcaaagccagaggttccgtgacatgcaccaaaaagtggagcacatt

SEQ ID NO: 143587 - DNA, 465 bp, Arabidopsis thaliana
caaaaagaaaatggttaagctcagcaatctcctttttgcaaccttcggggttctcctcgtccttaacggctgccttgcgaggcagtcacttggggttcctcctcagctacagaacgagtgtaacctcgacaacctagatgttctccaagccaccgaaactatcaagagtgaagccggtcagatcgagtactgggaccacaaccaccctcagctccgatgtgttggtgtttccgttgctcgttatgtaattgaacaaggcggtctttacttgcccaccttcttcacttccccaaaaatttcctacgtcgttcaaggaacgggtatcagcggaagagtggtccctggatgtgccgagaccttcatggactcgcagccgatgcaaggacaacaacaaggccaaccatggcaaggacgacagggacaacaaggccaaccatgggaaggacagggacaacaaggacaaca

SEQ ID NO: 143588 - DNA, 467 bp, Arabidopsis thaliana
caccgctttgcttctcgcagcattgcatctttgtctactctacccagaagaagaaatatcgtccggatacataacccttcgttttctagccctttcccgccgattctctttagacccatttcctcaggcaaggtcttagccatggcggaagagtcttcttcttcttcgacctcgtcaacatctcagaaacataccaaccgtttagccgctgaacacagtccttatcttcttcaacacgcgcataatccggttgattggtacccatggggagaagaagcttttgaagaagcaaggaagagagacgtgcccatcttcttatcaattggatacagtacctgtcactggtgccatgtcaatgaagttgagtcatttgaagatgaagaagtggcaaaactcttgaacaattcattcgttagtatcaaggttgatcgagaagagcggcctgatgtcgacaaggtttatatgtc

SEQ ID NO: 143589 - DNA, 472 bp, Arabidopsis thaliana
ccaccatcatcacacaccttcttcttcttcttcttctctctctatcacaagagagtcaaatccatggcttctacttcttccctcgctctctctcaagctctcctagctcgtgcaatctctcaccatggttctgaccaacgtggatctttaccagctttctctggactcaaatccaccggttcacgcgcctcagcttcgtctcgtcgacgtatcgctcaatccatgaccaaaaaccgatctctccgtcctcttgttcgcgctgcagctgttgagactgttgagccaaccactgattcgtcgattgtggacaaatcggtcaactcgattaggtttttggctatcgatgcggtggagaaggccaaatcaggtcatcctggtcttcctatgggttgtgctccgatggctcacattttgtatgatgaggtcatgaggtataaccccaagaacccttattggttcaaccgtgaccgat

SEQ ID NO: 143590 - DNA, 461 bp, Arabidopsis thaliana
ctcccgcaaccttcgattttcgtttattcgcatccatcggagagagaaaacaatcaataagcgaccatgttggtgtaccaagatcttctcaccggtgatgagcttctgtctgactctttcccttacaaggagattgagaatggaatcctctgggaagtagaaggaaagtgggttactgtgggagctgtagatgttaacattggtgccaatccatctgctgaagaaggtggtgaggatgaaggtgttgatgactctgctcaaaaggttgttgacattgtcgacaccttcagacttcatgagcaaccaacttatgacaagaagggattcatcgcttacattaagaaatacattaagcttttgacacccaagcctagcgaagaagatcaagctgtcttcaagaagggtattgagggagctaccaagtttttgctcccaagctcattgacttccaattctttgtt

SEQ ID NO: 143591 - DNA, 469 bp, Arabidopsis thaliana
gggaaggacagggacaacagggacaacaaggaagacaaggtcaaccatgggaaggacagggacaacagggacaacaaggacgacagggacaacaaggccaaccatgggaaggacagggacagcagggacaacaagggttccgtgacatgcaccagaaggtggaacatgtgagacgcggagacgtctttgccaacactccaggctctgcccactggatctacaactcaggagaacagccacttgtcatcatcgctcttctcgacatcgccaactaccaaaaccaactcgaccgcaaccctagagtgttccatttggccggaaacaaccagcagggaggctttggcggttcacagcaacaacaagaacagaaaaacttgtggagcgggttcgacgcacaggtcatagctcaagcattgaaaattgacgttcagttggctcagcagcttcagaaccaacaagacagcagagg

SEQ ID NO: 143592 - DNA, 465 bp, Arabidopsis thaliana
tcatcattcatcattctcatatctctcttcttttactggggatcacaatatctatctagttgtaaattgtgaatgatagatcctgagccttcttgccgccacctcttgaacttaatgtacttgaaaccagtctccacatagcgatagagagagagatctgttatgtgtgtattcatcaagttctctttttttgggctcaaagtgtaaaaggagacattttcaattctgagttcttttgttttcttataataaaatctgggttttctgagattttcttcacatcgtccgaaacgtggacacattttgatcttttgggtgtcactgtgtcaataaaggttgaaactttgattacatttctctcaaaaggattaatttttatttctctatctgggtgagatttggattaattggtgaggaatcggaagaaactggcgagattacaagcgattgtgaaatatcagaatc

SEQ ID NO: 143593 - DNA, 465 bp, Arabidopsis thaliana
gggaaaagtgatccctggatgcgccgaaacattttatgactcatcagagttccaaccacgcttcgaaggtcaaggtcaaagccagaggttccgtgacatgcaccagaaagtggagcacattaggagcggtgataccattgccacaacacccggtgtagcacagtggttctacaacgacggacaggaaccacttgtcatcgtcagcgtcttcgatctagccagtcaccagaaccagcttgaccgcaacccaaggccattttacttagccggaaacaacccacaaggtcaagtatggctacaaggccgagagcaacagccacagaagaacattttcaatggatttggacccgaggttattgctcaagctttgaagatcgatcttcagacagcgcagcaacttcagaaccaagatgacaaccgtggaaacattgtccgagtccaaggcccgttcggtgtcattaggcc

SEQ ID NO: 143594 - DNA, 468 bp, Arabidopsis thaliana
caaaatccgtctcggtggaggaaaaatggctgatgaagctcaagtagatcgttctaatggctctgattcatcatctcctcccataaagttacctcctttcatcaccaacctattcgcctttcttcaacctaagcctcctcctgctactattgatgccaatgctcctaaacctaccggcgagaaggaacctctgaaatcgacctacgagactgtcactttcccttacaatccacccaaaagcgcagagccaatcaagtttgaggctgagcccagctctggcaggacttccaactctgtcatcctttggcaggtatatgcacttggagggtttcttgtcctgaagtgggcctgggcaagatggaatgaaaggaacgagagaagtgacaaaaaggaggcgacgggtgatgatgatcagaaagatgatgatgaggatgatcaatcatctgatgggcatgaagactagtcata

SEQ ID NO: 143595 - DNA, 464 bp, Arabidopsis thaliana
caaaaagaaaatggttaagctcagcaatctcctcgttgcaaccttcggggttctccgcgtccttaacggctgccttgcgaggcagtcacttggggttcctcctcagctacagaacgagtgtaacctcgacaacctagatgttctccaagccaccgaaactatcaagagtgaagccggtcagatcgagtactgggaccacaaccaccctcagctccgatgtgttggtgtttccgttgctcgttatgtaattgaacaaggcggtctttacttgcccaccttcttcacttccccaaaaatttcctacgtcgttcaaggaacgggtatcagcggaagagtggtccctggatgtgccgagaccttcatggactcgcagccgatgcaaggacaacaacaaggccaaccatggcaaggacgacagggacaacaaggccaaccatgggaaggacagggacaacatggacaac

SEQ ID NO: 143596 - DNA, 402 bp, Arabidopsis thaliana
cttccatataattaaaacacagtgagacgaagaatatcgagatctcgaataatgcgaatctgaaggatctttacgaattccataatcttcagatcgaaaggtttctatcgattcgttggtcaagaggagattgtgcgtgtgattcgtgagcatgggctgttcgttttcaggattgaacgcactttacgacgccgtcaacggtggaggcgacgtatggatcaatgagaatcgattcaggatcgtgaggcagctcggcgaaggaggtttcgcattcgtctttttggtcaaggaaattgtcgccgacgcttcctccgccgcatccggtggtggtctagctaagaaagtcaaggatccggctcatctctccgctgacggaacttatgctatgaaaaaagttttgat

SEQ ID NO: 143597 - DNA, 471 bp, Arabidopsis thaliana
ttcagatttggcgagcatccggaataactagtgatttacaactttattgtaccgcaattggcgcattggtcttcgcagccttaatgctttttgctggttggttccattatcacaaagcagctccaaaattggcttggttccaagatgtagaatctatgttgaatcaccatttagcagggctactaggacttgggtccctttcttgggcaggacatcaagtacatgtatctttaccgattaaccaatttctaaacgctggagtagatcctaaagaaataccgcttcctcatgaatttatcttgaatcgggatcttttggctcaactttatccaagttttgctgaaggagcaactcccttttttaccttaaattggtcaaaatactcggaatttcttacttttcgtggcggattagatccagtgactgggggtctatggttaaccgatatagcacatcatcatttagctatcg

SEQ ID NO: 143598 - DNA, 470 bp, Arabidopsis thaliana
ctactcaccaccactctctctctctctccctccatctctcttggattctctctcagattccatggaagctccaaaaagctgattcgttcagccaatttttcttcactctctctcagattcggatccgtggtcagatcaaccaccgtgtgttttccgatccgattcgattctttttgtcagaaaaaatactaggattccgtttccaccacagatccttgatttgatttggatttatttcttcttctttctctcttcgagtttgattccagaagataccttctcctgcattggagaaactaatttaaggtaagatttggctacttagatggtatgcagcagtttcataaggagtttcattgttcaagctggttgttgtattggggtgttggctcaaggaagacatcagtttattcatattaagaagactttgagtgtgggttttggatttagaactagtgtgattggattta

SEQ ID NO: 143599 - DNA, 67 bp, Arabidopsis thaliana
  unsure (1)..(67): unsure at all n locations
cgcgtcctgcgggatccaaaatccggttagatttcacaacgntttatttatttaaaatttatnaaag

SEQ ID NO: 143600 - DNA, 460 bp, Arabidopsis thaliana
gacgatctctctctctctctctctctcgatcggataatatttgagctttgtggttggaggagctgagttagtcatgttcatgatcgattggttctatggcgttctcgcttcgttagggttatggcagaaagaggctaagatcttgtttctgggactcgataatgctggtaaaaccactctgcttcacatgttgaaagacgagagattggtacagcatcagcctacgcagcatccaacttctgaagaactcagcattgggaaaatcaagtttaaggcttttgatttgggtggtcaccagattgctcgcagggtctggaaggattactatgctaaggtggacgctgtggtctacctagttgatgcttacgacaaagagagatttgcagaatcaaaaaaggaacttgatgcacttctctcagacgaatccctagccagcgttccattcctcattctaggaaac

SEQ ID NO: 143601 - DNA, 387 bp, Arabidopsis thaliana
gtcccacggaaacaagttcgagtggatctctttcaaaacttatgaaaacgcaatgatcagcactttggcgggtagaacctcgctcttgagggcattgccattggaggtcatatcaaatggtttccagatctctcccgaggaagctaggaagatcaagttcaacacacttgagaccactttgacccgcgctgccggtaggcaacaacaacagttgatcgaggagattgtcgaggcttaaatcaaaacgtttttctttttcttaataaagtatggtcagtttgtaatcacgtccctttacctttaacgtacgtgtaaaatatgtgtctgcggcacctcacttgtaataacactttcttctcataaataaaagggaagtttcgagttaaa

SEQ ID NO: 143602 - DNA, 456 bp, Arabidopsis thaliana
gtccaacacgttctgtccgttgtcgttgaccaacatgtgcagaagggacagctcgtggtcatcccacaagggttcgcatacgttgtccagtcccacggaaacaagttcgagtggatctctttcaaaactaatgaaaacgcaatgatcagcactttggcgggtagaacctcgctcttgagggcattgccattggaggtcatatcaaatggtttccagatctctcccgaggaagctaggaagatcaagttcaacacacttgagaccactttgacccgcgctgccggtaggcaacaacaacagttgatcgaggagattgtcgaggcttaaatcaaaacgtttttctttttcttaataaagtatggtcagtttgtaatcacgtccctttacctttaacgtacgtgtaaaatatgtgtctgcggcacctcacttgtaataacactttcttctcataaataa

SEQ ID NO: 143603 - DNA, 451 bp, Arabidopsis thaliana
cttccaagagtgctttcatatcagaggagctgtgtatcggatgtggtatatgtgttaagaaatgcccgtttgaagctattcagattatcaatcttcctaaggacttagccaaagatacaacccatcgatatggggctaatggttttaagttgcacaggcttccaattccacggccggggcaagtccttgggttggttggaacaaatggtattggaaaatctactgctctcaaaatcttggctggaaaactcaaaccaaatcttggcagatttaatactcctcctgactgggaagaaattttgactcacttccgcgggtcagaacttcaaagctatttcatccgagtagtagaggaaaatctaaagactgctataaagccacaacatgttgactacataaaagaagttgttcgtggtaatcttgggaagatgcttgagaagctggacgagag

SEQ ID NO: 143604 - DNA, 446 bp, Arabidopsis thaliana
aaggaatctactggacaacaacatgttcttgctcaggtttgggcgcctgtcaaaaaccgtggacgatatgttcttacaacttcaggacagccatttgttcttggtcccaatagtaatggccttaatcaatacaggatggtttcattgacgtatatgttttcccttgatggtgaacgggacggagagctcgggcttcctggtcgcgttttcaggaaaaagttacctgagtggactcctaatgtgcagtattactccagcaaagagttttcaaggcttggtcacgccttgcactataatgttcagggaactttggctttgcctgtttttgaaccatccaggcaactctgtgtaggagttgtcgagcttattatgactgctccgaagattaactatgctcctgaggttgaaaaagtttgtaaagcgcttgaggctcggaatttgaaaac

SEQ ID NO: 143605 - DNA, 450 bp, Arabidopsis thaliana
cgacctgctggtttgagttcatcgttaaggcccttgaagcctgcagcagctccacgtgcaaaccgttccaacatcttttccaattctaatgtcacaatggcagatgagactgagattaacttgagcgaggaagagaaacagaaattagaaaagttgcaaagcctccgtgtgaagtttttgcggcttttgcaaaggttgggtcattcggcagaagattcaattgcagcgcaggttctttaccgtcttgcactacttgctgggagacaaacagggcagttattcagtcttgatgctgcaaagaagaaggctgtggagtctgaggctgagggcaacgaagaattgatcttctccctaaacatactggtccttggaaaagccggggtgggaaaaagtgctactataaattccattttgggaaaccagattgcgtccattgatgcttttgggctc

SEQ ID NO: 143606 - DNA, 462 bp, Arabidopsis thaliana
aatttggtgaagtcacgagaatcaacgtttacggcgacgaacaagcaagtcatattgaaagactacgtgagtggtttccctacggaatccgatttcgatttcactaccaccaccgtcgaacttagggttccggaaggtactaactctgttctagtgaagaatctctacttgtcatgcgatccttacatgagaattcgcatggggaaacctgatccttccactgctgctcttgctcaagcttacactcccggccagccaatccaagggtatggagtgtctagaataatagaatctggacatccagattacaagaaaggagacttactctggggtatagttgcatgggaggagtacagtgttatcactccaatgactcacgcgcatttcaagatccaacatactgatgttccattatcttattacactggacttttaagtatgcctggtatgactgcctatgct

SEQ ID NO: 143607 - DNA, 309 bp, Arabidopsis thaliana
agataatagtataatattatgaactgtttttgtgtcactgacaaggccctagacaggctggtgcactgaaatatattggtatactctggcctaaacaacctggaagcaggctttgtcggttcaaagtaacaacaagaacaaaacaacttgtggagcgggatcgactcacaggtcataggtgaagcatcggggtgttcgcctttaagactgtcatcagtttcctttagcaccaacacgacagataggaacatctggggagcagggacaattccagggccggaggttaccaataatacagccgtacaaaag

SEQ ID NO: 143608 - DNA, 473 bp, Arabidopsis thaliana
aagaggaagaaaaatgggtcgagtctcatctattatctctttctctttgacactcttgatcctcttcaatggctacactgcccaacagtggcccaacgagtgccagctcgatcaactcaatgcgctcgaaccatcccaaatcatcaagagcgagggtggtcgcatcgaggtctgggaccaccatgcaccccagctccgttgctccggctttgcctttgagcgtttcgtcattgagcctcagggtcttttcttgcccactttcttgaacgccggcaaactcacgtttgttgttcacggaaggggtctaatgggaagagttattccgggatgcgccgagacgttcatggagtcaccggtatttggagaaggtcaaggtcagggtcagagtcaagggttccgtgacatgcaccagaaagtagagcacctacggtgcggtgacaccattgcaacaccatctggtgtagctcaatggt

SEQ ID NO: 143609 - DNA, 469 bp, Arabidopsis thaliana
caaaaagaaaatggttaagctcagcaatctcctcgttgcaaccttcggggttctcctcgtccgtaacggctgccttgcgaggcagtcacttggggttcctcctcagctacagaacgagtgtaacctcgacaacctagatgttctccaagccaccgaaactatcaagagtgaagccggtcagatcgagtactgggaccacaaccaccctcagctccgatgtgttggtgtttccgttgctcgttatgtaattgaacaaggcggtctttacttgcccaccttcttcacttccccaaaaatttcctacgtcgttcaaggaacgggtatcagcggaagagtggtccctggatgtgccgagaccttcatggactcgcagccgatgcaaggacaacaacaaggccaaccatggcaaggacgacagggacaacaaggccaaccatgggaaggacagggacaacagggacaacaagga

SEQ ID NO: 143610 - DNA, 434 bp, Arabidopsis thaliana
tcgagagatcttagcctttactctatagttttatatcatatcaatcgacatggcgaatgtggaccgtgatcggcgtgtgcatgtagaccgtactgacaaacgtgttcatcagccaaactacgaagatgatgtcggttttggtggctatggcggttatggtgctggttctgattataagagtcgcggcccctccactaaccaaatcttggcacttatagcaggagttcccattggtggcacactgctaaccctagctggactcactctagccggttcggtgatcggcttgctagtctccatacccctcttcctcctcttcagtccggtgatagtcccggcggctctcactattgggcttgctgtgacgggaatcttggcttctggtttgtttgggttgacgggtctgagctcggtctcgtgggtcctcaactacc

SEQ ID NO: 143611 - DNA, 453 bp, Arabidopsis thaliana
ggaagaaaaatgggtcgagtctcatctattatctctttctctttgacactcttgatcctcttcaatggctacactgcccaacagtggcccaacgagtgccagctcgatcaactcaatgcgctcgaaccatcccaaatcatcaagagcgagggtggtcgcatcgaggtctgggaccaccatgcaccccagctccgttgctccggctttgcctttgagcgtttcgtcattgagcctcacggtcttttcttgcccactttcttgaacgccggcaaactcacgtttgttgttcacggaaggggtctaatgggaagagttattccgggatgcgccgagacgttcatggagtcaccggtatttggagaaggtcaaggtcagggtcagagtcaagggttccgtgacatgcaccaaaaagtagagcacctacggtgcggtgacaccattgcaacaccatct

SEQ ID NO: 143612 - DNA, 464 bp, Arabidopsis thaliana
tttagatatcgatcgatagaaacgccgcccaattaccaaacatcgaaaccatcatgagggttatctcaaaactgttcgattccgacagaagacgaataccgaaatcgccgaagcatttggattccggcgaaagcgccacgtcatcttcctcactcagcgacgtaaccaccggctcaagcagccttcatagcagtctctctctccaaacgcttccttcagttccctctcttcagaaaataccatccaccaccgtcaccgtctctcactccgttacctcctcgtttaaactccgtgaacggagtcttcctgtaacttgtctcgccgtcaacggtggctatctcttcgccgtttctggacacgaagtaagtatctacgatcgcgacatgtgtgctcatctcgacacattcaacggccaagatcctttcttaagaaccgtggaagccgacggcttctccggtgagaaa

SEQ ID NO: 143613 - DNA, 461 bp, Arabidopsis thaliana
caaaaagaaaatggttaagctcagcaatctcctcgttgcaaccttcggggttctcctggtccttaacggctgccttgcgaggcagtcacttggggttcctcctcagctacagaacgagtgtaacctcgacaacctagatgttctccaagccaccgaaactatcaagagtgaagccggtcagatcgagtactgggaccacaaccaccctcagctccgatgtgttggtgtttccgttgctcgttatgtaattgaacaaggcggtctttacttgcccaccttcttcacttccccaaaaatttcctacgtcgttcaaggaacgggtatcagcggaagagtggtccctggatgtgccgagaccttcatggactcgcagccgatgcatggacaacaacaaggccaaccatggcaaggacgacagggacaacaaggccaaccatgggaaggacagggacaacagggac

SEQ ID NO: 143614 - DNA, 406 bp, Arabidopsis thaliana
cggacgcgttgggaaaagaaaatggttaagctcagtaatctcctcgttgcaaccttcggggttctcctcgtccttaacggctgccttgcgaggcagtcacttggggttcctcctcagctacagaacgagtgtaacctcgacaacctagatgttctccaagccaccgaaactatcaagagtgaagccggtcagatcgagtactgggaccacaaccaccctcagcttcgatgtgttggtgtttccgttgctcgttatgtaattgaacaaggcggtctttacttgcccaccttcttcactatcccaaaaatttcctacgtcgttcaaggaacgggtatcagcggaagagtggtccctggatgtgccgagacctttatggactcgcagccgatgcaaggacaacaacaag

SEQ ID NO: 143615 - DNA, 407 bp, Arabidopsis thaliana
ctcttgtctcttcaaacttcggttactccgttttagtcgacaacaatggcctctgcttcaaggaggttactgaggagagagacgatctcctgtttcagccacaccgtgaggaaactcttctccaccgttggatctccttcttttgctcagagactcagagatctccccaaagacttcccctctaccaacgccaaacgtgacgcctctctgcttattgggaaaacgcctcttgtgttcctcaacaaagtcactgaaggttgtgaagcgtatgttgcagccaaacaagaacatttccagccaacttgtagcattaaagacagaccagctatagccatgattgcagatgcagagaagaaaaaactaatcatccctggaaaaacaacactgatagagcctacttcaggaaa

SEQ ID NO: 143616 - DNA, 402 bp, Arabidopsis thaliana
cacaaacgagtaagaatacaaatacaaatagcaaaaaaaatggcaaacaagctcttcctcgtctgcgcaactttcgccctctgcttcctcctcaccaacgcttccatctaccgcactgttgtcgagttcgacgaagatgacgccagcaaccccatgggcccaagacagaaatgtcagaaggagtttcagcaatcacagcacctaagagcttgccagaaattgatgcgcatgcaaatgaggcaaggccgtggtggtggtccctccctcgacgatgagttcgatttggaagacgacatcgagaacccacaaggcccccagcagggacaccagatcctccagcagtgctgcagcgagcttcgccaggaagagccagtttgtgtttgccccaccttgagacaagct

SEQ ID NO: 143617 - DNA, 404 bp, Arabidopsis thaliana; identical to SEQ ID NO: 119254

SEQ ID NO: 143618 - DNA, 407 bp, Arabidopsis thaliana
caaaaagaaaatggttaagctcagcaatctcctcgttgcaaccttcggggttctcctcgtccttaacggctgccttgcgaggcagtcacttggggttcctcctcagctacagaacgagtgtaacctcgacaacctagatgttctccaagccaccgaaactatcaagagtgaagccggtcagatcgagtactgggaccacaaccaccctcagctccgatgtgttggtgtttccgttgctcgttatgtaattgaacaaggcggtctttacttgcccaccttcttcacttccccaaaaatttcctacgtcgttcaaggaacgggtatcagcggaagagtggtccctggatgtgccgagaccttcatggactcgcagccgatgcaaggacaacaacaaggccaaccatggc

SEQ ID NO: 143619 - DNA, 411 bp, Arabidopsis thaliana
ggagaacagccacttgtcatcatcgctcttctcgacatcgccaactaccaaaaccaactcgaccgcaaccctagagtgttccatttggccggaaacaaccagcagggaggctttggcggttcacagcaacaacaagaacagaaaaacttgtggagcgggttcgacgcacaggtcatagctcaagcattgaaaattgacgttcagttggctcagcagcttcagaaccaacaagacagcagaggaaacatcgttcgtgttaagggacctttccaggtcgtgaggccacctctaagacagccctacgagagcgaggagtggagacacccacgtagcccacagggcaacggccttgaggagactatctgcagcatgaggtcccacgagaacattgacgaccctgctcgtgctgac

SEQ ID NO: 143620 - DNA, 384 bp, Arabidopsis thaliana
agaaaaatgggtcgagtctcatctattatctctttctctttgacactcttgatcctcttcaatggctacactgcccaacagtggcccaacgagtgccagctcgatcaactcaatgcgctcgaaccatcccaaatcatcaagagcgagggtggtcgcatcgaggtctgggaccaccatgcaccccagctccgttgctccggctttgcctttgagcgtttcgtcattgagcctcagggtcttttcttgcccactttcttgaacgccggcaaactcacgtttgttgttcacggaaggggtctaatgggaagagttattccgggatgcgccgagacgttcatggagtcaccggtatttggagaaggcaaggtcagggtcagagtcaag

SEQ ID NO: 143621 - DNA, 394 bp, Arabidopsis thaliana
caaaaagaaaatggttaagctcagcaatcttctcgttgcaaccttcggggttctcctcgtccttaacggctgccttgcgaggcagtcacttggggttcctcctcagctacagaacgagtgtaacctcgacaacctagatgttctccaagccaccgaaactatcaagagtgaagccggtcagatcgagtactgggaccacaaccaccctcagctccgatgtgttggtgtttccgttgctcgttatgtaattgaacaaggcggtctttacttgcccaccttcttcacttccccaaaaatttcctacgtcgttcaaggaacgggtatcagcggaagagtggtccctggatgtgcccagaccttcatggactcgcagccgatgcaaggacaacaacaa

SEQ ID NO: 143622 - DNA, 406 bp, Arabidopsis thaliana
gattgagggagagctctagctctgtagaaaagaaggattcattcatcatatccagaaatggctctaaagtttaaccctttggtggcatctcagccttacaaattcccttcctcgactcgtccgccaacttcttctttcagatctcccaagttcctctgcctcgcttcttcttctccggctctcagctccggccccaaggaggttgagagtttgaagaaaccatttacgccacccagggaagtgcatgttcaagtcttgcactccatgccacctcaaaagatcgagatcttcaaatctatggaaaactgggccgaggagaaccttctgattcacctcaaggatgtggagaagtcttggcaaccccaggatttcttgcctgaccctgcatcagatgggtttgaagatc

SEQ ID NO: 143623 - DNA, 273 bp, Arabidopsis thaliana
gaaaatggtaaagctcagcaaacttctcgctgcattcttctgggctcttctcgagcttaacggctgccttgcgaggcaatcacttggcgttcctcctcaggtacagtacgagtgtaaccttggcagcctaaatgttcttcaagtcaccgtatctattaagagtgacacctgtcttaatgagtgctggtaccacaaccacccttagatcatgtgtggagcaggcaccggtgatcccaatgtaagtgaacaagcgtggtgtacacttgcctacct

SEQ ID NO: 143624 - DNA, 408 bp, Arabidopsis thaliana
gccgaaagcaacagaagcaaaacaacatcttcaatggcttcgcacctgagatcttggctcaagccttcaagatcaatgtcgagacggctcagcagctccagaaccagcaagataaccgtggcaacatcgtcaaggtcaacggacctttcggcgtcattaggccacccttgagacgcggcgaaggcggccaacaaccacatgaaatagctaatggtttagaggagactttgtgcaccatgcgatgcactgaaaacctcgatgacccgtcggatgctgacgtgtacaagccatcactcggatacattagcacacttaacagctacaatcttcctatcctcagacttctccgccttagcgctcttcgtggctccatccgtaaaaacgccttggtgctaccgcaatggaacg

SEQ ID NO: 143625 - DNA, 361 bp, Arabidopsis thaliana
aaagaaaatggttaagctcagcaatctcctcgttgcaaccttcggggttctcctcgtccttaacggctgccttgcgaggcagtcacttggggttcctcctcagctacagaacgagtgtaacctcgacaacctaaatggtctccaagccaccgaaactatcaagagtgaagccggtcagatcgagtactgggaccacaaccaccctcagctccgatgtggtggtggttccggtgctcggtatgtaaatgaacaaggggggctttacttggccaacttctttactttcccaaaaaatttctaccgcggtccagggaccggtgttcagcggaagagtggtccctggatgtgccgagacctttat

SEQ ID NO: 143626 - DNA, 244 bp, Arabidopsis thaliana
aggaagatcaagttcaacacacttgagaccactttgacccgcgctgcctgtaggcaacaacaacagttgatcgaggagattgtcgaggcttaaatcaaaacgtttttctttttcttaataaagtatggtcagtttgtaatcacgtccctttacctttaacgtacgtgtaaaatatgtgtctgcggcacctcacttgtaataacactttcttctcataaataaaagggaagtttcgagttaaaaa

SEQ ID NO: 143627 - DNA, 412 bp, Arabidopsis thaliana
ggagaagttgcggataacgttcgatgcagcaatagcacacatttgtttctctgatctcccttcatcgtctagattaaacaaaccatcctcttccatccaccactgagatgactgatgtttaccagtgctcttttttcctaatgcctcagcagctgaagaaccaatcccggatctgctaggccaaatattaacaacacttaggttctaattctaaatataagcaacaatcatttaaaactgtaatcaaagcagtatcgaaattagctcacccagggggttgaatagaggctagagcatcatactcattgccaaatcccgtaactgaagcatttgtacctaaagttctaactctagttcctcttgtcaggtcctttgggagagctatgtcacgccaatcatctatctgccaaag

SEQ ID NO: 143628 - DNA, 409 bp, Arabidopsis thaliana
ctcttgtggagccattcggattagcaccttacattctcaagcgccgtagatctctcgcttcagtttttgaaataatagatcgagttcctacaatcgaacctgatgatacctcggctcttagtccgcctaacgtgtatggaagcattgaactgaaaaacatcgacttctgctacccaacccgcccggaagtgttagtactaagcaacttcagtctcaaagtcaatggcggacaaacagtagctgtggttggtgtttctggttctggaaagagcacaataatatcgttgatcgagagatactacgacccagttgctggtcaggtcttattagatgggcgagacttgaagtcatataatttgagatggttaagaagccatatgggtctgattcaacaggaacccataatctt

SEQ ID NO: 143629 - DNA, 381 bp, Arabidopsis thaliana
agaaaaatgggtcgagtctcatctattatctctttctctttgacactcttgatcctcttcaatggctacactgcccaacagtggcccaacgagtgccagctcgatcaactcaatgcgctcgaaccatcccaaatcatcaagagcgagggtggtcgcatcgaggtctgggaccaccatgcaccccagctccgttgctccggctttgcctttgagcgtttcgtcattgagcctcagggtcttttcttgcccactttcttgaacgccggcaaactcacgtttgttgttcacggaaggggtctaatgggaagagttattccgggatgcgccgagacgttcatggagtcaccggtatttggagaaggtcaaggtcagggtcagagt

SEQ ID NO: 143630 - DNA, 412 bp, Arabidopsis thaliana
gccacttgtcatcatcgctcttctcgacatcgccaactaccaaaaccaactcgaccgcaaccctagagtgttccatttggccggaaacaaccagcagggaggctttggcggttcacagcaacaacaagaacagaaaaacttgtggagcgggttcgacgcacaggtcatagctcaagcattgaaaaattgacgttaagttggctcagcagcttcagaaccaacaagacagcagaggaaacatcgttcgtgttaagggacctttccaggtcgtgaggccacctctaagacagccctacgagagccgggagtggagacacccacgtagcccacaaggcaaccggcttgaagagacatattggaagatgagggtccaccagaacattgacgaccctgctcgtgctgacgtgtacaa

SEQ ID NO: 143631 - DNA, 381 bp, Arabidopsis thaliana
aaaaaaaatagtgaagacgacgaacctttgaggacactcttcggtttctccaatccttcatatgatgtcggacggaggagcaccgtcgagatacgtgaagttgacgaaggaacaagctccggtcgatgagattcatcccggtgaactcaatcagcccattgaagtttctcatctagctgttcacaaatgcaatgtgtgtggccaacctttgcctgagaattttgaagctcctgctgatgagccctggactaccggaatattcggctgcactgaggacatgaatagtttttggctgggacttttctgcccaagtgttctatttggacgtgtctatgaaactctgagtgatgaggaaaccttgtggtagaaagcatgtatttg

SEQ ID NO: 143632 - DNA, 409 bp, Arabidopsis thaliana
ggaagaaaaatgggtcgagtctcatctattatctctttctctttgacactcttgatcctcttcaatggctacactgcccaacagtggcccaacgagtgccagctcgatcaactcaatgcgctcgaaccatcccaaatcatcaagagcgagggtggtcgcatcgaggtctgggaccaccatgcaccccagctccgttgctccggctttgcctttgagcgtttcgtcattgagcctcagggtcttttcttgcccactttcttgaacgccggcaaactcacgtttgttgttcacggaaggggtctaatgggaagagttattccgggatgcgccgagacgttcatggagtcaccggtatttggagaaggtcaaggtcagggtcagagtcaagggttccgtgacatgcaccaga

SEQ ID NO: 143633 - DNA, 410 bp, Arabidopsis thaliana
aagaaataacaaaatggctcgagtctcttctcttctttctttcttcttaacacttttgatccttttccatggctacgcggctcaacagggtcagcagggtcagcagtttccgaacgagtgccagctcgaccagctcaatgcgctcgagccgtcacacgtactgaagagcgaggctggtcgcatcgaggtgtgggaccaccacgctcctcagctccgttgctcaggtgtctcctttgcacgttacatcatcgagtctaagggtctctacttgccctctttctttaacaccgcgaagctctctttcgtggctaagggacgaggtcttatgggaaaagtgatccctggatgcgccgaaacattccaagactcatcagagttccaaccacgcttcgaaggtcaaggtcaaagcc

SEQ ID NO: 143634 - DNA, 397 bp, Arabidopsis thaliana
attctctctcttcttctctatgccaacgaagcaatagctatgaaaagctaaaccctttccttcttcttcttcttcttcttcttcttcttcttcgattgtttagattacttgggtttgacccaagtttgcttctttctatgattcatcaatctagatcttgctatctgggtccagaaacgattcacgcgcttcattcatgatataaagttactaccttttttttattttaccttctgggtcatggttttgtctgcttttcgtcttttgcttttgtctggatgattcataatctctcgagatctattatgttcacaagagttgttcttatgcgtggtgagatgatcttaggagtgtttcactatctttcttcaattcgggtttttagtttctgagatct

SEQ ID NO: 143635 - DNA, 406 bp, Arabidopsis thaliana
cagtaagcaagcatgttaccaaagttcgatccaacaaaccaaaaagcttgtctgtctcgtcttgaggatttgaccaccaacgtaaagcagattcaagattccgtattggaagcaatactttcacgtaatgctcaaactgagtatcttagaggtttcctcaaaggtcaagtcgataagcagaacttcaagaaaaacgtacccgttgtgacctacgaagatattaggtcttatatcgaccgtatcgctaatggagagccgtctgatctcatctgtgatcgacccatcagtgtactcttgaccagctcgggtacttcaagaggagttccaaagttgattcctttgacaacagaggatttggaacagaggattacgttttcttctctctatgcacctctactctacaagc

SEQ ID NO: 143636 - DNA, 404 bp, Arabidopsis thaliana
gagctattacagagatgaatggaaaaatgatcgttaccaaacctctatatgttgctcttgcgcagcggaaagaagaccgcaaagctaggttacaggctcaattttcacagatgaggccggtcaatatgccacctgcggttggtcctaggatgcaaatgtatccaccaggtggtccaccaatgggtcagcaactcttctatggtcaagggcctcctgctatgattcctcagcctggattcggatatcaacaacagcttgtaccgggtatgagacctggtgggtctccaatgccaaacttcttcatgcctatgatgcaacaaggccagcaacagcaacagcagcaacagcagcagcagcgacctggtggtggtagaagaggagctcttccacaaccacaacaacct

SEQ ID NO: 143637 - DNA, 414 bp, Arabidopsis thaliana
agaaaatggttaagctcagcaatctcctcgttgcaaccttcggggttctcctcgtccttaacggctgccttgcgaggcagtcacttggggttcctcctcagctacagaacgagtgtaacctcgacaacctagatgttctccaagccaccgaaactatcaagagtgaagccggtcagatcgagtactgggaccacaaccaccctcagctccgatgtgttggtgtttccgttgctcgttatgtaattgaacaaggcggtctttacttgcccaccttcttcacttccccaaaaatttcctacgtcgttcaaggaacgggtatcagcggaagagtggtccctggatgtgccgagaccttcatggactcgcagccgatgcaaggacaacaacaaggccaaccatggcaaggacgacagg

SEQ ID NO: 143638 - DNA, 413 bp, Arabidopsis thaliana
gcctctcgttgctagaggaatcaaacaatggtgtttgtgaagtccaccaagtcgaatgcttacttcaagaggtaccaagtgaagttcaggagaagaagagatggaaagactgactacagggcaaggatccgtcttatcaaccaagacaagaacaagtacaatacacctaagtatcgttttgttgtccggtttaccaacaaagacatagtggcacagattgtatctgcaagcattgctggtgacattgttaaagcttctgcttacgcacatgaactgcctcagtatggtctcactgttggtcttacaaactatgctgcagcttactgtactggccttcttttggctcgccgtgttttaaagatgttggaaatggatgacgagtatgagggaaacgttgaggccactggagagga

SEQ ID NO: 143639 - DNA, 410 bp, Arabidopsis thaliana
aagaacatcttcaatggatttggacccgaggttattgctcaagctttgaagattgatcttcagacagcgcagcaacttcagaaccaagatgacaaccgtggaaacattgtccgagtccaaggcccgttcggtgtcattaggccgcctttgaggggccagagacctcaggaggaggaagaagaagaagaaggacgacacggacgacacggtaatggcttagaggagaccatctgcagcgccaggtgcaccgataacctcgatgatccgtctcgtgctgacgtgtacaagccacagctcggttacatcagcactctcaacagttacgatctccccatccttcgcttcatccgtctctcagccctccgtggatctatccgtcaaaacgccatggtgctttcacagtggaacgc

SEQ ID NO: 143640 - DNA, 411 bp, Arabidopsis thaliana
aacaaacaaaaagaaaatggttaagctcagcaatctcctcgttgcaaccttcggggttctcctcgtccttaacggctgccttgcgaggcagtcacttggggttcctcctcagctacagaacgagtgtaacctcgacaacctagatgttctccaagccaccgaaactatcaagagtgaagccggtcagatcgagtactgggaccacaaccaccctcagctgcgatgtgttggtgtttccgttgctcgttatgtaattgaacaaggcggtctttacttgcccaccttcttcacttccccaaaaatttcctacgtcgctcaaggaacgggtatcagcggaagagtggtccctcgatgtgccgagaccttcatggactcgcagccgatgcaaggacaacatcaaggccaaccatg

SEQ ID NO: 143641 - DNA, 413 bp, Arabidopsis thaliana
cttcacttccccaaaaatttcctacgtcgttcaattaacgggtatcagcggaagagtgggccctggatgtgccgagaccttcatggactcgcagccgatgcaaggacaacaacaaggccaaccatggcaaggacgacagggacaacaaggccaaccatgggaaggacagggacaacagggacaacaaggaagacaaggccaaccatgggaaggacagggacaacagggacaacaaggacgacagggacaacaaggccaaccatgggaaggacagggacagcagggacaacaagggttccgtgacatgcaccagaaggtggaacatgtgagacgcggagacgtctttgccaacactccaagctctgcccactggatctacaactcaggagaacagccacttgtcatcatcgctc

SEQ ID NO: 143642 - DNA, 299 bp, Arabidopsis thaliana
  unsure (1)..(299): unsure at all n locations
caaaagcatttctgtttctcgtcgtcggagcccgttgacagatctctgaatcgctggagaaacaggtatatgctccggctgtatctactttatattctgccaggaagattgtgagcatagaagtgccttgggctctggctgaagatntgagcagattaaatgggtcggctaaagttgcattcttgaatcaagggcattgggggagaacctcgggactttgagtggactgattcaagtgatacaaccactttagcatgcatgattggtaccggaaatggtggtggtttagccggtattag

SEQ ID NO: 143643 - DNA, 407 bp, Arabidopsis thaliana
cacatagcaaaaaatggcaaacaagttgttccttgtctgcgcagctctcgctctctgcttcctcctcaccaacgcttccatctaccgcaccgtcgttgagttcgaagaagatgacgccactaaccccataggcccaaaaatgaggaaatgccgcaaggagtttcagaaagaacaacacctaagagcttgccagcaattgatgctccagcaagcaaggcaaggccgtagcgatgagtttgatttcgaagacgacatggagaacccacagggacaacagcaggaacaacagctattccagcagtgctgcaacgagcttcgccaggaagagccagattgtgtttgccccaccttgaaacaagctgccaaggccgttagactccagggacagcaccaaccaatgcaagtca

SEQ ID NO: 143644 - DNA, 406 bp, Arabidopsis thaliana
ctgcgttatagatacttacgcatattccatgccatgagcgttaacatggataggaacatttgtatccaaccactctatttgtagaccactttgctgcgtgtgcaactctcgatgcaagctccctttcgttcgtacgcttcccgaggacggagctgatctatacttttgttctttagaatgtgagaagaaaattgatcaggaacgtttcgaattttaaaattatgttctttactatgtttagaaaactatttatttatagatgataatgtttgctagcttgaatgactcgcaaatttggtaaaatttgtgaggaatctgggtctgttaaattattacaagtccctacaataacatttggttgtgtacttgtgttagtgtaatatatatatatatctcattgaacccc

SEQ ID NO: 143645 - DNA, 406 bp, Arabidopsis thaliana
cagaaagtgaaaaagagagcgagcgatgaacagtatcttctccattgacgatttctccgatcctttctgggaaactcctccgattcctctcaatcctgactcttctaagcctgttacggcggatgaagttagccagagtcaaccggaatggactttcgagatgtttctcgaagagatttcttcgtcggcggtgagctctgagccacttggtaacaacaacaacgcgatcgtcggtgtttcttcggcgcaatctcttccttctgtttccggacagaatgatttcgaggatgatagtcgatttcgtgatcgcgatttgggaaatttggattgtgctgctcccatgacgacgaagacggtgattgttgattccgatgattatcgtcgtgttcttaagaacaagcttgag

SEQ ID NO: 143646 - DNA, 413 bp, Arabidopsis thaliana
caagaaaacatacacaaatagcaaaacatggctaacaagctcttcctcgtctgcgcaactctcgccctctgcttcctcctcaccaacgcttccatctaccgcaccgttgtcgaattcgaagaagatgacgccagcaaccccgtaggtccaagacagagatgccagaaggagtttcagcaatcacaacacctaagagcttgccagagatggatgagcaagcaaatgaggcaaggacgtggtggtggtccttccctcgacgatgagttcgatttcgagggcccccagcagggataccagctactccagcagtgctgcaacgagcttcgccaggaagagccagtttgcgtttgccccaccttgaaacaagctgccagggcagttagcctccagggacagcacggaccattccaatc

SEQ ID NO: 143647 - DNA, 411 bp, Arabidopsis thaliana
caacaaacaaaaagaaaatggttaagctcagcaattttctcgttgcaaccttcggggttctcctcgtccttaacggctgccttgcgaggcagtcacttggggttcctcctcagctacagaacgagtgtaacctcgacaacctagatgttctccaagccaccgaaactatcaagagtgaagccggtcagatcgagtactgggaccacaaccaccctcagctccgatgtgttggtgtttccgttgctcgttatgtaattgaacaaggcggtctttacttgcccaccttcttcacttccccaaaaatttcctacgtcgttcaaggaacgggtatcagcggaagagtggtccctggatgtgccgagaccttcatggactcgcagccgatgcaaggacaacaacaaggtcaaccat

SEQ ID NO: 143648 - DNA, 407 bp, Arabidopsis thaliana
catggaagggacaacagggacaacaaggccatttatgggaaggacagggacaacagggacagcaaggaagacaaggccaaccatgggaaggacagggacaacagggacaacaaggacgacagggacaacaaggccaaccatgggaaggacagggacagcagggacaacaagggttccgtgacatgcaccagaaggtggaacatgtgagacgcggagacgtctttgccaacactccaggctctgcccactggatctacaactcaggagaacagtcacttgtcatcatcgctcttctcgacatcgccaactaccaaaaccaactcgaccgcaaccctagagtgttccatttggccggaaacaaccagcagggaggctttggcggttcacagcaacaacaagaacagaaa

SEQ ID NO: 143649 - DNA, 412 bp, Arabidopsis thaliana
caaacggaaaggctcatatacaaatggtgaacgacatctgagaaagagtgttcgaccaagagatctccagcggacagttactagtcgtgccacaaggcttttcggtcatgaaacatgccataggcgaacagttcgagtggatcgaattcaagacaaacgaaaacgcacaggtcaacacactcgcgggccgtacctcagtcatgagaggtttgccgcttgaggttataaccaatgggtaccagatctctcccgaagaagctaaacgagtaaagtttagcacgattgagaccacactgacccatagcagtccaatgagctacggaaggcctagggcttgaggcttgatgagcgcgtggtggaatagcgtttgaatctaaagttcggtttggtacgacttgtaatatgaaataat

SEQ ID NO: 143650 - DNA, 411 bp, Arabidopsis thaliana
ggaacgggtatcagcggaagagtggtccctggatgtgccgagaccttcatggactcgcagccgatgcaaggacaacaacaaggccaaccatggcaaggacgacagggacaacaaggccaaccatgggaaggacagggacaacagggacaacaaggaagacaaggccaaccatgggaaggacagggacaacagggacaacaaggacgacagggacaacaaggccaaccatgggaaggacagggacagcagggacaacaagggttccgtgacatgcaccagaaggtggaacatgtgagacgcggagacgtctttgccaacactccaggctctgcccactggatctacaactcaggagaacagccacttgtcatcatcgctcttctcgacatcgccaactaccaaaaccaactc

SEQ ID NO: 143651 - DNA, 411 bp, Arabidopsis thaliana
gaacagccacttgtcatcatcgctcttctcgacatcgccaactaccaaaaccaactcgaccgcaaccctagagtgttccatttggccggaaacaaccagcagggaggctttggcggttcacagcaacaacaagaacagaaaaacttgtggagcgggttcgacgcacaggtcatagctcaagcattgaaaattgacgttcagttggctcagcagcttcagaaccaacaagacagcagaggaaacatcgttcgtgttaagggacctttccaggtcgtgaggccacctctaagacagccctacgagagcgaggagtggagacacccacgtagcccacagggcaacggccttgaggagactatctgcagcatgaggtcccacgagaacattgacgaccctgctcgtgctgacgtg

SEQ ID NO: 143652 - DNA, 409 bp, Arabidopsis thaliana
cctggttttcttgccaaggttttggtagagaaaatactaaggttgcaaccaaatgtgaagaagatataccttctgttgagagctcccgacgaaaaatcagccatgcaacgcctacgtagtgaggttatggagatcgacctttttaaagtgttgaggaacaatctaggagaagacaatttgaatgccttgatgcgggaaaaaattgtgccggttccaggtgatatatcgatcgataatttgggattgaaagacactgatctcatacaacgtatgtggagtgagattgatatcataatcaacatagcagccacaacaaatttcgatgaaagatatgatattggtcttggcatcaacacatttggagccctgaatgttctcaacttcgccaaaaagtgtgttaaaggacaat

SEQ ID NO: 143653 - DNA, 409 bp, Arabidopsis thaliana
cactcacaaattaaaaagagagagagagagagagacagagagagagagagattctgcggaggagcttcttcttcgtagggtgttcatcgttattaacgttatcgcccctacgtcagctccatctccagaaacatgggtgcaggtggaagaatgccggttcctacttcttccaagaaatcggaaaccgacaccacaaagcgtgtgccgtgcgagaaaccgcctttctcggtgggagatctgaagaaagcaatcccgccgcattgtttcaaacgctcaatccctcgctctttctcctaccttatcagtgacatcattatagcctcatgcttctactacgtcgccaccaattacttctctctcctccctcagcctctctcttacttggcttggccactctattgggcctctc

SEQ ID NO: 143654 - DNA, 409 bp, Arabidopsis thaliana
gggacaacaaggccaaccatgggaaggacagggacaacagggacaacaaggaagacaaggccaaccatgggaaggacagggacaacagggacaacaaggacgacagggacaacaaggccaaccatgggaaggacagggacagcagggacaacaagggttccgtgacatgcaccagaaggtggaacatgtgagacgcggagacgtctttgccaacactccaggctctgcccactggatctacaactcaggagaacagccacttgtcatcatcgctcttctcgacatcgccaactaccaaaaccaactcgaccgcaaccctagagtgttccatttggccggaaacaaccagcagggaggctttggcggttcacagcaacaacaagaacagaaaaacttgtggagcgggttc

SEQ ID NO: 143655 - DNA, 415 bp, Arabidopsis thaliana
ggtccctggatgtgccgagaccttcatggactcgtagccgatgcaaggacaacaacaaggcgggccatggcaaggacgacagggacaacaaggccaaccatgggaaggacagggacaacagggacaacaaggaagacaaggccaaccatgggaaggacagggacaacagggacaacaaggacgacagggacaacaaggccaaccatgggaaggacagggacagcagggacaacaagggttccgtgacatgcaccagaaggtggaacatgtgagacgcggagacgtctttgccaacactccaggctctgcccactggatctacaactcaggagaacagccacttgtcatcatcgctcttctcgacatcgccaactaccaaaaccaactcgaccgcaaccctagagtgttccatttg

SEQ ID NO: 143656 - DNA, 409 bp, Arabidopsis thaliana
aagaaaatggttaagctcagcaatctcctcgttgcaaccttcggggttctcctcgtccttagcggctgccttgcgaggcagtcacttggggttcctcctcagctacagaacgagtgtaacctcgacaacctagatgttctccaagccaccgaaactatcaagagtgaagccggtcagatcgagtactgggaccacaaccaccctcagctccgatgtgttggtgtttccgttgctcgttatgtaattgaacaaggcgggctttacttgcccaccttcttcacttccccaaaaatttcctacgtcgttcaaggaacgggtatcagcggaagagtggtccctggatgtgccgagaccttcatggactcgcagccgatgcaaggacaacaacaaggccaaccatggcaaggac

SEQ ID NO: 143657 - DNA, 410 bp, Arabidopsis thaliana
ggatccttgtaacccaagacatatctttagtagttatgtccattcttattatcaggatgtcttagatagtgttctgtttcttctacatatcatgttgttatcttgtaactcaagaaattaaattaaaaagctatctttgtttagacttgtatcatgtcacttggattgtactcgtagaaaatgggaaaaactcgatgtgtttattcatctccagcagtttcttcaagcactacgtcgagctcttgcaaattttggtaatgaacactagttcgatccttcactctcgaaactcgacaaaaaagtctatcaacttcgtctcttgactctattcgagtgatattttcatcatctagaaggacgttgatcccactccttcgtaacgcggctctaagaaggctggagaacttgtt

SEQ ID NO: 143658 - DNA, 409 bp, Arabidopsis thaliana
caaaaagaaaatggttaagctcagcaatctcctcgttgcaaccttcggggttctcctcgtccttaacggctgccttgcgaggcagtcacttggggttcctcctcagctacagaacgagtgtaacctcgacaacctagatgttctccaagccaccgaaactatcaagagtgaagccggtcagatccagtactgggaccacaaccaccctcagctccgatgtgttggtgtttccgttgctcgttatgtaattgaacaaggcggtctttacttgcccaccttcttcactttcccaaaaatttcctacgtcgttcaaggaacgggtatcagcggaagagtggtccctggatgtgccgagacctttatggactctcagccgatgcaaggacaacaacaaggcctaccatggcaa

SEQ ID NO: 143659 - DNA, 406 bp, Arabidopsis thaliana
cttctttactttttcttcttcttttagatcaaagaaatcgttttgtgcagatttgatcttgcgttaattttctaagcaaaatatggcgggagaagatagccgtgaagctcaacgaggcgacgaatatgaggaatcgagtcctctcttgaaggtgaacgagaatgacggcaagatctgctcgaaaagagatgccaaggcggcgcctcttgtgcctcctcccgcggcggaggaatacggctggacggcggatggattgcctgtgagccatggtagcgtgattggcgagccgatcaggagaaaccagtggaattctggtctttttacctgtcttggtcgcaatgatgaattttgcagcagcggatctcgaagtttgccttattggaagtgtgggttccttgtgtgttga

SEQ ID NO: 143660 - DNA, 64 bp, Arabidopsis thaliana
acctaaaagcttgccagagatggatgcgcaagcatttgtggcaaggacgtggtggtggtccttc

SEQ ID NO: 143661 - DNA, 407 bp, Arabidopsis thaliana
ccagcgtcaacagctataccttgcccatcttggagtatgtcaggctcagtgccactcgtggcgttctccagggtaatgcgatggtgcttcctaaatacaacatgaacgctaacgagatcttgtactgcactggaggacaaggaaggatccaagtggtcaacgacaacggacagaacgtgttggaccaacaggtgcagaagggacagctcgtggtcatcccacaagggttcgcatacgttgtccagtcccacggaaacaagttcgagtggatctctttcaaaactaatgaaaacgcaatgatcagcactttggcgggtagaacctcgctcttgagggcattgccattggaggtcatatcaaatggtttccagatctctcccgaggaagctaggaagatcaagttcaac

SEQ ID NO: 143662 - DNA, 408 bp, Arabidopsis thaliana
caaaaagaaaatggttaagctcatcaatctcctcgttgcaaccttcggggttctcctcgtccttaacggctgccttgcgaggcagtcacttggggttcctcctcagctacagaacgagtgtaacctcgacaacctagatgttctccaagccaccgaaactatcaagagtgaagccggtcagatcgagtactgggaccacaaccaccctcagctccgatgtgttggtgtttccgttgctcgttatgtaattgaacaaggcggtctttacttgcccaccttcttcacttccccaaaaatttcctacgtcgttcaaggaacgggtatcagcggaagagtggtccctggatgtgccgagaccttcatggactcgcagccgatgcaaggacaacaacaaggccaaccatggca

SEQ ID NO: 143663 - DNA, 418 bp, Arabidopsis thaliana
cttccggaaaaaagttgaagcaaacatgttgaacaagcaagttgcaacaatgagaagagaaaaagcgcttgcatatgcattcagtcaccagaatacatggaaaaactcaactaaaatgggttctcaaacattcatggaccctaacaatccgcattggggttggagttggctagaacgttggatggctgctcgaccaaacgaaaaccactcactcacaccagaaaatgctgaaaaagactcttctgctaggagtgtagcaagccgtgccatgtctgagatgattccacgaggcaaaaacctttcaccaagaggaaagacaccaaacagtcgaagagggtcaagcccgagagtgaggcaagtcccaagtgaagactcaaacagcattgtgagtttccaatcagaacaaccttgcaatcgt

SEQ ID NO: 143664 - DNA, 413 bp, Arabidopsis thaliana
tcggagaaaaaaggggccgagcctaatttattatctctttttttttgacactcttgatcctcttcaatggctacactgcccaacagtggcccaacgagtgccagctcgatcaactcaatgcgctcgaaccatcccaaatcatcaagagcgagggtggtcgcatcgaggtctgggaccaccatgcactccagctccgttgctccggctttgcctttgagcgtttcgtcattgagcctcagggtcttttcttgcccactttcttgaacgccggcaaactcacgtttgttgttcacggaaggggtctaatgggaagagttattccgggatgcgccgagacgttcatggagtcaccggtatttggagaaggtcaaggtcagggtcagagtcaagggttccgtgacatgcaccagaaa

SEQ ID NO: 143665 - DNA, 409 bp, Arabidopsis thaliana
gcagaggaaacatcgttcgtgttaagggaccttttcaggtcgtgaggccacctctaagacagccctacgagagcgaggagtggagacacccacgtagcccacagggcaacggccttgaggagactatctgcagcatgaggtcccacgagaacattgacgaccctgctcgtgctgacgtgtacaagcccagcctaggtcgcgtgaccagcgtcaacagctataccttgcccatcttggagtatgtcaggctcagtgccactcgtggcgttctacaaggtaatgcgatggtgcttcctaaatacaacatgaacgctaacgagatcttgtactgcactggaggacaaggaaggatccaagtggtcaacgacaacggacagaacgtgttggaccaacaggtgcagaagggaca

SEQ ID NO: 143666 - DNA, 412 bp, Arabidopsis thaliana
agaaaaatgggtcgagtctcatctattatctctttctctttgacactcttgatcctcttcaatggctacactgcccaacagtggcccaacgagtgccagctcgatcaactcaatgcgctcgaaccatcccaaatcatcaagagcgagggtggtcgcatcgaggtctgggaccaccatgcaccccagctccgttgctccggctttgcctttgagcgtttcgtcattgagcctcagggtcttttcttgcccactttcttgaacgccggcaaactcacgtttgttgttcacggaaggggtctaatgggaagagttattccgggatgcgccgagacgttcatggagtcaccggtatttggagaaggtcaaggtcagggtcagagtcaagggttccgtgacatgcaccagaaagtag

SEQ ID NO: 143667 - DNA, 411 bp, Arabidopsis thaliana
atgagttctctcatcatcatcttcaacattctccttgttttcacaactcaaacccacgcgcacaacgtcacgcgcctcctagcaaaccacccatcattctcttccttcagccatttcctaacacaaacacacctcgccgacgaaatcaaccggagaagaaccataaccgtttgcgccgtcgataacgccgccatgtcagcattaacctcaaaaggctacacaatctcaactctcaaaaacattctctccctccacgtccttttagattacttcggaaccaaaaaactccaccagatccgtgacggctctgctctcgccgctactctgtttcaagccaccggagctgctcctggaacctcaggattcgttaacataacggatctgagaggtggtaaagttgggtttggtcct

SEQ ID NO: 143668 - DNA, 406 bp, Arabidopsis thaliana
caaattttcaaaggtgaatttgtttgatagaatctagaacaaacctttaaaatggcgcatctactttcagcttcatgcccttcagttatctcacttagcagcagcagcaagaattcagttaagccgtttgtttcagggcagaccttcttcaatgctcagcttctttcaagatcttctctcaaaggacttctcttccaagagaagaaaccgagaaaaagctgcgttttcagagcaactgctgtacctataacccaacaagcaccacccgaaacatctaccaataactcatcctctaaaccaaagcgtgttatggtcattggtggagatggttattgcggttgggctactgctctccacttgtccaagaagaattacgaagtttgcattgttgacaaccttgtaagac

SEQ ID NO: 143669 - DNA, 397 bp, Arabidopsis thaliana
ctcttagcctttactctatagttttatatcatattaatcgacatggcgaatgtggaccgtgatcggcgtgtgcatgtagaccgtactgacaaacgtgttcatcagccaaactacgaagatgatgtcggttttggtggctatggcggttatggtgctggttctgattataagagtcgcggcccctccactaaccaaatcttggcacttatagcaggagttcccattggtggcacactgctaaccctagctggactcactctagccggttcggtgatcggcttgctagtctccatacccctcttcctcctcttcagtccggtgatagtcccggcggctctcactattgggcttgctgtgacgggaatcttggcttttggtttggttgggttgacgggtc

SEQ ID NO: 143670 - DNA, 407 bp, Arabidopsis thaliana
taactactacatgtatcatggaggaactaactttggaagaacagccggaggtccatttgtcaccaccagctatgattatgatgctccgatcgacgaatatggtttaatcagacaacctaaatatggtcacctaaaggaactccacagagctatcaagatgtgtgagaaggctctggtgtcagctgatcccgttgttacatcaataggaaacaagcaacaagctcatgtatactctgcagaatcaggagattgttcggctttcctagctaactatgatacagaatcggcagcaagagttttgtttaacaacgttcattataacttacctccttggtcaatcagtattcttccagactgtagaaatgcagtcttcaatactgcaaaggttggagttcaaacatcccaga

SEQ ID NO: 143671 - DNA, 408 bp, Arabidopsis thaliana
gcgccgaaacattccaagactcatcagagttccaaccacgcttcgaaggtcaaggtcaaagccagaggttccgtgacatgcaccagaaagtggagcacattaggagcggtgataccattgccacaacacccggtgtagcccagtggttctacaacgacggacagcaaccacttgtcatcgtgagcatcttctatctagccagtcaccagaaccagcttgaccgcaacccaaggccattttacttagccggaaacaacccacaaggtcaagtatggctacaaggacgagagcaacagccacagaagaacatcttcaatggatttggacccgaagttattgctcaagctttgaagattgatcttcagacagcgcagcaacttcagaaccaagatgacaaccgtggaaaca

SEQ ID NO: 143672 - DNA, 402 bp, Arabidopsis thaliana
aaatggttaagctcagcaatctcctcgttgcaaccttcggggttctcctcgtccttaacggctgccttgcgaggcagtcacttggggttcctcctcagctacagaacgagtgtaacctcgacaacctagatgttctccaagccaccgaaactatcaagagtgaagccggtcagatcgagtactgggaccacaaccaccctcagctccgatgtgttggtgttttcgttgctcgttatgtaattgaacaaggcggtctttacttgcccaccttcttcacttccccaaaaatttcctacgtcgttcaaggaacgggtattagcggaagaggggtccctggatgtgccgagaccttaatggactcgcagcctatgcaaggacaacaacaaggccaaccatggcaag

SEQ ID NO: 143673 - DNA, 407 bp, Arabidopsis thaliana
caagaaaacatacacaaatagcaaaacatggctaacaagctcttcctcgtctgcgcaactctcgccctctgcttcctcctcaccaacgcttccatctaccgcaccgttgtcgaattcgaagaagatgacgccagcaaccccgtaggtccaagacagagatgccagaaggagtttcagcaatcacaacacctaagagcttgccagagatggatgagcaagcaaatgaggcaaggacgtggtggtggtccttccctcgacgatgagttcgatttcgagggcccccagcagggataccagctactccagcagtgctgcaacgagcttcgccaggaagagccagtttgcgtttgccccaccttgaaacaagctgccagggcagttagcctccagggacagcacggaccatt

SEQ ID NO: 143674 - DNA, 389 bp, Arabidopsis thaliana
aaacaacaagaaaaaatggcaataaccaacaaattaattataacacttcttctccttatctccatagctgtcgtccactgcttatccttccgtgtggagatcgacgagttcgagccaccacagcaaggagaacaagaaggtccccgtcgccgtcctggtggaggctctggcaagggatgggaggaagagatcccgaatcatccataccacgtaacgaagcgcaggctcatggatacgttgcagaataaggagagtgttggggtttcctagctaactatgatacagaatcggcagcaagagttttgtgtaacaacgatcattataacttacctccttggtcaatcagtattcttccagactgtagaaatgcagtgtttaatactgcaaag

SEQ ID NO: 143675 - DNA, 408 bp, Arabidopsis thaliana
catttcttgttctttggacgaccatcggcgacagtgttaagtctagagtcttcttcttcttcggcgtagttttttccccggcttgaaaaatgggtctatccttcggaaagttgttcagcaagctctttgcaaagaaagagatgcgtatcctcatggagggtctcgatgcaagtggtaagactacgatcttgtacaagctcaagcttggagagatcgtgactacgattccaaccattggtttcaatgtggagactgtggaatacaagaacattagctttaccgtgtgggatgtcgggggtcaagacaagattcgtccattgtggaggcactacttccagaacactcagggacttatctttgtggtggacagcaatgatcgtgaccgtgttgtggaagccagagatgagc

SEQ ID NO: 143676 - DNA, 407 bp, Arabidopsis thaliana
ctttatacgtaatctcatcaaaaataatttccatacaaagtacttctgaatccatttcctttttattgggtacatcagaaattcatgaaagaacaccaattttatcagagtgaagagctcaaattcaaaacttttgatccgagttcaaaatatgtcaagtttcctaagaagaaaaaaggtctataaagccaaaaaaatagtggatgcagaataatatgtacacaaaagttttggatataatccaaagttataaaaagattcaactgtttcttattggatataaagttcataaagattgaaaaaattacatctcaaatttgtttggaaattaaagaaattaccttataataagtactgtaattatataaactgaatttagttaataagtaaaagtgttaaaacaaaac

SEQ ID NO: 143677 - DNA, 313 bp, Arabidopsis thaliana
cctcgttgcaaccttcggggttctcctcgtccttaacggctgccttgcgaggcagtcacttggggttcctcctcagctacagaacgagtgtaacctcgacaacctagatgttctccaagccaccgaaactatcaagagtgaagccggtcagatcgagtactgggaccacaaccaccctcagctccgatgtgttggtgtttccgttgctcgttatgtaaatgaacaaggcggtctttacttgcccaccttcttcactttcccaaaaatttcctacgtcgttcaaggaacggttatcagtcgaagagtggtccct

SEQ ID NO: 143678 - DNA, 382 bp, Arabidopsis thaliana
ctcattcctttgattcttctcagatgaatatgtcacatgttgttaaccatctatcctttgggcggaggattatgcctcagaaattttcggagtttaagcgcttgtcaccttatgagttatgagttacttgttgcaaaaggagatgtcggtgtactccatggtgctatgagttacttgttgcaagatgatgatggccaaatcattgaaccacactccatcagtgccggattggactaccctggagtcggacctgagcatagttttcttaaagacgtgggaagggctgaatacctttagcgtactgatgaagaagcattagaagctttcaagagagtgtctcggttggagggaataatcccggcattggagacattgcacgcat

SEQ ID NO: 143679 - DNA, 425 bp, Arabidopsis thaliana
cggggccgaccaacgcgtccggtgagacgcggagacgtctttgccaacactccatgctctgcccactggatctacaactcaggagaacagccacttgtcatcatcgctcttctcgacatcgccaactaccaaaaccaactcgaccgcaaccctagagtgttccatttggccggaaacaaccagcagggaggctttggcggttcacagcaacaacaagaacagaaaaacttgtggagcgggttcgacgcacaggtcatagctcaagcattgaaaattgacgttcagttggctcagcagcttcagaaccaacaagacagcagaggaaacatcgttcgtgttaagggacctttccaggtcgtgaggccacctctaagacagccctacgagagcgaggagtggagacacccacgtagcccacagggcaa

SEQ ID NO: 143680 - DNA, 423 bp, Arabidopsis thaliana
gcacaggtcatagctcaagcattgaaaattgacgttcagttggctcagcatcttcagaaccaacaagacagcagaggaaacatcgttcgtgttaagggacctttccaggtcgtgaggccacctctaagacagccctacgagagcgaggagtggagacacccacgtagcccacagggcaacggccttgaggagactatctgcagcatgaggtcccacgagaacattgacgaccctgctcgtgctgacgtgtacaagcccagcctaggtcgcgtgaccagcgtcaacagctataccttgcccatcttggagtatgtcaggctcagtgccactcgtggcgttctccagggtaatgcgatggtgcttcctaaatacaacatgaacgctaacgagatcttgtactgcactggaggacaaggaaggatc

SEQ ID NO: 143681 - DNA, 391 bp, Arabidopsis thaliana
ccgtccgagaaaatggttaacctcagcaatctcctcgttgcatccttcggggttctcctcgtccttaacggctgccttgcgaggcagacacttggggttcctcctcagctacagaacgagtgtaacctcgacaacctagatgttctccaagccaccgaaactatcaagagtgaagccggtcagatcgagtactgggaccacaaccaccctcagctccgatgtgttggtgtttccgttgctcgttatgtaattgaacaaggcggtctttacttgcccaccttcttcacttacccaaaaatttcctacgtcgttcaaggaacgggtatcagcggaagagtggtccctggatgtgccgagacctttatggacttcgcagcgatgcaaggacaac

SEQ ID NO: 143682 - DNA, 397 bp, Arabidopsis thaliana
  unsure (1)..(397): unsure at all n locations
cgtncgggnccaacttcccaagtttacgaaacttatcaaaggttcttccacactttgtaggctaagctgccggaagctagtcaacaaaagttgagattgcatatcaacacactgccaaatctgctccgcatcaaacccatcataagagagctgatcaaatggacatttagggttatgcggcttcaacttcatgaatagatactgagatgcagagcgagcatactcagatattgaacttggcgctagaaaaactggtggctctgttgccttaagcttctcaagggcttcaaaccccgaatcctttaccgtagccattgattgagccttctcagtgccctccaaattagggttccttcgatttgacgaaaacagtagagtatatcaatggcggtgccca

SEQ ID NO: 143683 - DNA, 440 bp, Arabidopsis thaliana
  unsure (1)..(440): unsure at all n locations
ccggaanggaaggcccgggccagaccgacccacggacattgcaatttttctaaatccggcgattaaatatttgtttcatagtcggcgttgtaatcggactcctcgtcggaatcgcaatcatcatcggctttgtcaagttggagaattctcgatccaagcttcggtctgaacttgcgaatacggtggctgatgcagcgaggatgacggtggaggattccaggaagcttttgcctcctgagctttatccttcctgggttgtcttctccgagcgtcagaagttgacttggctcaaccatcacttgacaaagatctggccttatgttgatgaggcagcctctgagcttataaaggcatccgtggagcctgttcttgagcaatatagacctgccattgtggcctgcttaacatcttctaagcttactctgggtacagtggcacct

SEQ ID NO: 143684 - DNA, 406 bp, Arabidopsis thaliana
ctttctttcttttctcggttgaaataaaaattctttctactgaatctgaaatagagacgaggcctaatcttttgatgccgttgcatgaacatcctttatcatgtacagaagaatttatctattcttgcgatttttgtaatagtcgaaatggcattgcctatcagtgcacggagtgcggctatcggctgcacaaagactgtatccagggctttctcagctatccatctccgtgcggtcactctctcaagatctccatgcccaacaaatcacctcaatatgcaaatgaccgatgccatttttgtctgtgcaagcttaagactccgtttgctcgttgcacggtgtgcaacataaacattagtccactttgtatggtaaagcaaccaccactcactatttgtaaaccaaa

SEQ ID NO: 143685 - DNA, 405 bp, Arabidopsis thaliana
cacttttgatccttttccatggctacgcggctcatcagggtcagcagggtcagcagttgccgaacgagtgccagctcgaccagctcaatgcgctcgagccttcacacgtactgaagagcgaggctggtcgcatcgaggtgtgggaccaccacgctcctcagctccgttgctcaggtgtctcctttgcacgttacatcatcgagtctaagggtctctacttgccctctttctttaacaccgcgaagctctccttcgtggctaaaggacgaggtcttatgggaaaagtgatccctggatgcgccgaaacattccaagactcatcagagttccaaccacgcttcgaaggtcaaggtcaaagccagaggttccgtgacatgcaccagaaagtggagcacattaggagcg

SEQ ID NO: 143686 - DNA, 407 bp, Arabidopsis thaliana
caatgcgctcgaaccatcccaaatcatcaagagcgagggtggtcgcatcgaggtctgggaccaccatgcaccccagctccgttgctccggctttgcctttgagcgtttcgtcattgagcctcagggtcttttcttgcccactttcttgaacgccggcaaactcacgtttgttgttcacggaaggggtctaatgggaagagttattccgggatgcgccgagacgttcatggagtcaccggtatttggagaaggtcaaggtcagggtcagagtcaagggttccgtgacatgcaccagaaagtagagcacctacggtgcggtgacaccattgcaacaccatctggtgtagctcaatggttctacaacaatggaaatgagcctctcattcttgttgcagccgcggatctcg

SEQ ID NO: 143687 - DNA, 412 bp, Arabidopsis thaliana
agaaaacatacacaaatagcaaaacatggctaacttgctcttcctcgtctgcgcaactctcgccctctgcttcctcctcaccaacgcttccatctaccgcaccgttgtcgaattcgaagaagatgacgccagcaaccccgtaggtccaagacagagatgccagaaggagtttcagcaatcacaacacctaagagcttgccagagatggatgagcaagcaaatgaggcaaggacgtgggagtggtccttccctcgacgatgagttcgatttcgagggcccccagcagggataccagcttctccagcagtgctgcaacgagcttcgccaggaagagccagtttgcgtttggcccaccttgaaacaagctgccagggcagttagccttcagggacagcacggaccattccaattc

SEQ ID NO: 143688 - DNA, 407 bp, Arabidopsis thaliana
tgaccctagccgctacacacttttctgcgatatctctgagatttgttgacagtctctaaccatgggtaaagagaagtttcacatcaacattgtggtcattggccacgtcgattctggaaagtcgaccaccactgggcacttgatctacaagttgggtggtattgacaagcgtgtcattgagaggttcgagaaggaggctgctgagatgaacatgaggtccttcaatgtacgcttgggttttggacaaacttaatgctgagcgtgagcgtgttatcaccattgacattgctctctggatagttgagtccacctagttctactgcactttcattgatgctcctggtcatcgtgatatcttcatgatcttgatcactgttacctcccttgcttatttgtgctgtccttat

SEQ ID NO: 143689 - DNA, 359 bp, Arabidopsis thaliana
gaaaatggttaagctcagcaatctcctcgttgcatccttcggggttctcctcgtccttaacggctgccttgcgaggcagtcacttggggttcctcctcagctacagaacgagtgtaacctcgacatcctagatgttctccaagccaccgaaactatcaagagtgaagccggtcagatcgagtactgggaccacaaccaccctcagctccgatgtgttggtgtttccgttgctcgttatgtaattgaacaaggcggtctttacttgcccaccttcttcacttccccaaaaatttcctacgtcgttcaaggaacgggtttcagcggaagaaggtccctggatgtgccgatacctttatgga

SEQ ID NO: 143690 - DNA, 425 bp, Arabidopsis thaliana
tgagatttttaccgaaaatgagttcagcgaggagtagaagaaaaagggacccagaaatcgtcatcgctagagatacagattccgagttaagttcgtcagaagaagaagaagaagaggaagataattaccctttctcggagtcggaggaggaagatgaagcggttaaaaatggagggaaaattgaattggagaagaataaagccaaagggaaagcacccattaccgttaagcttattaagaaagtttgcaaagtttgtaaacagcctggccatgaagctggatttaaaggagcaacgtatatcgattgtcctatgaagccttgcttcttgtgtaaaatgcctggccacaccacaatgtcctgtcctcatagagtggttactgaccacggaatactcccaacttctcataggaatacaaagaaccct

SEQ ID NO: 143691 - DNA, 234 bp, Arabidopsis thaliana
  unsure (1)..(234): unsure at all n locations
tttgtnntttcttatatcgttcacagagtcattcatcattagcccctcccactgagtccataagcttgcaccttccttgtacctcgtccctcatccctccggtgtccgaaaccctccacaacatcggcggtggtggaggtggtggtagctagccgtctccacatcacggtggaaaaggtggtggtaaaccctcaccccacgtcgggaaaggtgttcgttccttcgctctttgtt

SEQ ID NO: 143692 - DNA, 428 bp, Arabidopsis thaliana
attgaacaaggcggcctttacttgcccaccttctttatttccccaaaaatttcctacgtcgttcaaggaacggttatcagcggaagagtggtccctggatgtgccgagaccttcatggactcgcagccgatgcaaggacaacaacaaggccaaccatggcaaggacgacagggacaacaaggccaaccatgggaaggacagggacaacagggacaacaaggaagacatggccaaccatgggaaggacagggacaacagggacaacatggacgacagggacaacaaggccaaccatgggaaggacagggacagcagggacaacaagggttccgtgacatgcaccagaaggtggaacattgtgagacgcggagacgtttttgccaacactccaggctctgcccactggatctacaactcaagagaacagc

SEQ ID NO: 143693 - DNA, 416 bp, Arabidopsis thaliana
taataatatataattcactttttattgttaatttttactcgataacaaaatgctcatggttaatattttcattaatgatttccacacctattttctgtttaaaactttttttttgttcatccgaaaacgattttctcatgattaaattcattatttttaccattgtttgacccaacaaaccatagttatatttgtaaataaaataccataagatattatgtgtatttcctattaaattagtatgttaaagtgtgtagaaaatggtcttaagcctaataaatagtcaagtcctaatgtctgcagaaattaacctcaagaacccatctcactctctggaactataacataaaaatatttctgcagaaaatataataaaatataaatcaatttgatgtttgtcggtttatgcatgtaat

SEQ ID NO: 143694 - DNA, 395 bp, Arabidopsis thaliana
gggacaacaaggacgacagggccatcaaggccatctattgttaaggacagggacagcagggacatcaagggttccgtgacatgcaccagaaggtggaacatgtgagacgcggagacgtctttgccaacactccaggctctgcccactggatctacaactcaggagaacagccacttgtcatcatcgctcttctcgacatcgccaactaccaaaaccaactcgacctgaaccctagagtgttccatttggccggaaacaaccagcagggaggctttggcggttcacagcaacaacaagaacagaaaaacttgtggagcgggttcgacgcacaggtcatagctcaagcattgaaaattgacgttcagttggctcagcagcttcagaaccaacatgac

SEQ ID NO: 143695 - DNA, 393 bp, Arabidopsis thaliana
gaaaacatacacaaatagcaaaacatggcttacatgctcttcctcgtctgcgcaactgtcgccctctgcttcctcctcaccaacgcttccatctaccgcaccgttgtcgaattcgaagaagatgacgccagcaaccccgtaggtccaagacagagatgccagaaggagtttcagcaatcacaacacctaagagcttgccagagatggatgagcaagcaaatgaggcaaggacgtggtggtggtccttccctcgacgatgagttcgatttcgagggcccccagcagggattccagctactccagcagtgctggaacgagcttcgccaggaagagccaagttgcgtttgccccaccttggaacaagcttgccagggcagttagcctccagggaca

SEQ ID NO: 143696 - DNA, 408 bp, Arabidopsis thaliana
tgcgccgagacgttcatggagtcaccggtttttgtagaaggtcaaggtcagggtcagagtcaagggttccgtgacatgcaccagaaagtagagcacctacggtgcggtgacaccattgcaacaccatctggtgtagctcaatggttctacaacaatggaaatgagcctctcattcttgttgcagccgcggatctcgccagcaaccagaaccagcttgtcctgaaccttagaccatttttgatagccagaaacaaccctcatgggcaagaatggcttcatggccgaaagcaacagaatcaaaacaacatcttcaatggttttgcacctgagatcttggcttaaagccttcaagatcaatgtcgagacgggtcagcagttttagaaccagcaatgattaccgtggtaaca

SEQ ID NO: 143697 - DNA, 422 bp, Arabidopsis thaliana
atcacaaacgagtaagaatacaaatacaaattgctaaaaaaatggcaaacaagctcttcctcgtctgcgcaactttcgccctctgcttcctcctcaccaacgcttccatctaccgcactgttgtcgagttcgacgaagatgacgccagcaaccccatgggcccaagacagaaatgtcagaaggagtttcagcaatcacagcacctaagagcttgccagaaattgatgcgcatgcaaatgaggcaaggccgtggtggtggtccctccctcgacgatgagttcgatttggaagacgacatcgagaacccacaaggcccccagcagggacaccagatcctccagcagtgctgcagcgagcttcgccaggaagagccagtttgtgtttgccccaccttgagacaagctgccagggccgttagcctc

SEQ ID NO: 143698 - DNA, 424 bp, Arabidopsis thaliana
ataaaaatggctcgagtctcttctcttctttctttctccttaacacttttgatccttttccatggctacgcggctcaacagggtcagcagggtcagcagtttccgaacgagtgccagctcgaccagctcaatgcgctcgagccttcacacgtactgaagagcgaggctggtcgcatcgaggtgtgggaccaccacgctcctcagctccgttgctcaggtgtctcctttgcacgttacatcatcgagtctaagggtctctacttgccctctttctttaacaccgcgaagctctccttcgtggctaaaggacgaggtcttatgggaaaagtgatccctggatgcgccgaaacattccaagactcatcagagttccaaccacgcttcgaaggtcaaggtcaaagccagagtgtccgtgacatgcacc

SEQ ID NO: 143699 - DNA, 405 bp, Arabidopsis thaliana
ggaacgggtatcagcggaagagtggtccctggatgtgccgagaccttcatggactcgcagccgatgcaaggacaacaacaaggccaaccatggcaaggacgacagggacaacaaggccaaccatgggaaggacagggacaacagggacaacaaggaagacaaggccaaccatgggaaggacagggacaacagggacaacaaggacgacagggacaacaaggccaaccatgggaaggacagggacagcagggacaacaagggttccgtgacatgcaccagaaggaggaacatgtgagacgcggggactgtcttggcaacacttcaggctctgtccactggatctacaacttaagagaacaggcactttgcaatatcagtcttttcgaacatggcaaattccaaaaa

SEQ ID NO: 143700 - DNA, 413 bp, Arabidopsis thaliana
tacatttgcactcagtctagagacaaagagagagtgagatggggtcaaagacggagatgatggagagagacgcaatggctacggtggctccctatgcgccggtcacttaccatcgccgtgctcgtgttgacttggatgatagacttcctaaaccttatatgccaagagcattgcaagcaccagacagagaacacccgtacggaactccaggccataagaattacggacttagtgttcttcaacagcatgtctccttcttcgatatcgatgataatggcatcatttacccttgggagacctactctggactgcgaatgcttggtttcaatatcattgggtcgcttataatagccgctgttatcaacctgacccttagctatgccactctttccggggtggtaccttcacctttc

SEQ ID NO: 143701 - DNA, 423 bp, Arabidopsis thaliana
aacaaacaaaaagaaaatggttaagctcagcaatctcctcgttgcaaccttcggggttctcctcgtccttaacggctgccttgcgaggcagtcacttggggttcctcctcagctacagaacgagtgtaacctcgacaacctagatgttctccaagccaccgaaactatcaagagtgaagccggtcagatcgagtactgggaccacaaccaccctcagctccgatgtgttggtgtttccgttgctcgttatgtaattgaacaaggcggtctttacttgcccaccttcttcactttcccaaaaatttcctacgtcgttcaaggaacgggtatcagcggaagagtggtccctggatgtgccgagaccttcatggactcgcagccgatgcaaggacaacaacatggcctaccatggcaaggacgaca

SEQ ID NO: 143702 - DNA, 421 bp, Arabidopsis thaliana
tacacacatagcaaaaaagggcaaacaagttgttcctcgtttgcgcagctctcgctctctgcttcctcctcaccaacgcttccatctaccgcaccgtcgttgagttcgaagaagatgacgccactaaccccataggcccaaaaatgaggaaatgccgcaaggagtttcagaaagaacaacacctaagagcttgccagcaattgatgctccagcaagcaaggcaaggccgtagcgatgagtttgatttcgaagacgacatggagaacccacagggacaacagcaggaacaacagctattccagcagtgctgcaacgagcttcgccaggaagagccagattgtgtttgccccaccttgatacaagctgccaaggccgttagactccagggacagcaccaaccaatgcaagtcaggaaaattta

SEQ ID NO: 143703 - DNA, 411 bp, Arabidopsis thaliana
aaataacaaaatggctcgagtctcttctcttctttcttttttcttaacacttttgatccttttccatggctacgcggctcaacagggtcagcagggtcagcagtttccgaacgagtgccagctcgaccagctcaatgcgctcgagccgtcacacgtactgaagagcgaggctggtcgcatcgaggtgtgggaccaccacgctcctcagctccgttgctcaggtgtctcctttgcacgttacatcatcgagtctaagggtctctacttgccctctttctttaacaccgcgaagctctctttcgtggctaagggacgaggtcttatgggaaaagtgatccctggatgcgccgaaacattccatgactcattagagttccaaccacgcttcgaaggtcaaggtctaagccagag

SEQ ID NO: 143704 - DNA, 391 bp, Arabidopsis thaliana
cttttctaaacccattgactatgtcttgtcagtttaatttttcattagttgcacaactgggtgttttaataccaagttagtagtactcggtttccacttgtgatcttggaattgatcttcattgttttggtttaagcaggaagttgccgcgagctcaatgaacatgaaaatgattgagcatttggagagggaacagtgtgtggagatggagacatcaagatataatctgcagagtgtttggggtaatgatgtatgccaagtggatccgtttgtccgagcttggagcttactccaaggtttgcttaatagctgaacatgttttactcaaaatcatacttgctccacttcgcgattttacatgttcatgcattatgtgagatcgacattttgt

SEQ ID NO: 143705 - DNA, 393 bp, Arabidopsis thaliana
gctcgagtctcttctcttctttctttcttcttatcacttttgatccttttccatggctacgcggctcaacagggtcagcagggtcagcagtttccgaacgagtgccagctcgaccagctcaatgcgctcgagccttcacacgtactgaagagcgaggctggtcgcatcgaggtgtgggaccaccacgctcctcagctccgatgctcaggtgtctcctttgcacgttacatcatcgagtctaagggtctctacttgccctctttctttaacaccgcgaagctctccttcgtggctaaaggacgaggtcttatgggaaaagggatccctggatgcccctgaacaatccaagactcattagagttccaaccactctttgtaagtcaaggacaaagc

SEQ ID NO: 143706 - DNA, 408 bp, Arabidopsis thaliana
agaaaaatgggtcgagtctcatctattatctctttctctttgacactcttgatcctcttcaatggctacactgcccaacagtggcccaacgagtgccagctcgatcaactcaatgcgctcgaaccatcccaaatcatcaagagcgagggtggtcgcatcgaggtctgggaccaccatgcaccccagctccgttgctccggctttgcctttgagcgtttcgtcattgagcctcagggtcttttcttgcccactttcttgaacgccggcaaactcacgtttgttgttcacggaaggggtctaatgggaagagttattccgggatgcgccgagacgttcatggagtcaccggtatttggagaaggtcaagggctgggtcagagtcaagggttccgggacatgcaccagaat

SEQ ID NO: 143707 - DNA, 404 bp, Arabidopsis thaliana
caaaaagaaaatggttaagctcagcaatcttctttttgcaaccttcggggttctcctcgtccttaacggctgccttgcgaggcagtcacttggggttcctcctcagctacagaacgagtgtaacctcgacaacctagatgttctccaagccaccgaaactatcaagagtgaagccggtcagatcgagtactgggaccacaaccaccctcagctccgatgtgttggtgtttccgttgctcgttatgtaattgaacaaggcggtctttacttgcccaccttcttcacttccccaaaaatttcctacgtcattcaaggaacgggtatcagcggaagagtggtccctggatgtgccgagaccttcatggactagcattcgatgctaggacaacaacaaggccaaccat

SEQ ID NO: 143708 - DNA, 413 bp, Arabidopsis thaliana
gaatgatgaatctaggatctctttcgttgagtactagcttgtcgagtaagccaatggttagcatcagcttttggataccgtatttcactcactggggagagagcctgctggtctgtggctcggctcctggacttggttccgggaatgtgaaaaaaggtttgctgctaaagccatcccagcaagatgatcagctcatctggagtggctctgtctcggttccacctgggtttagctctgactattgttactatgtggtggatgactcgaagagtgtgttaaggtcggagtttgggatgaaacgaaaacttgtggtgcctgagacattgaccggtggagagtctgttcatcttcgtgatctctggcagagttgggatcaagctctttcatttagaagggcatataaagatgtcatc

SEQ ID NO: 143709 - DNA, 412 bp, Arabidopsis thaliana
ccacagtggaacgcaaacgcgaacgctattctttacgtgacagacggggaagcccaaatccagatcgtaaacgacaatggtaacagagtgtttgacggacaagtctctcaaggacagctcatagccgtaccacaaggtttctcggaggtgaaacgcgcaacaagcaaccgattccagtgggttgagttcaaaacaaacgctaacgcgcaaatcaacactctggcgggacgaacctcagtcttgagaggtttaccacttgaagtcataaccaatgggttccaaatctcacccgaagaagcaaggagggtcaagttcaacacgctcgagaccactttgactcacagcagtggcccagcttgctacggatggccaagattggctgcagcttaagagcttaaaaccgcggcttaac

SEQ ID NO: 143710 - DNA, 422 bp, Arabidopsis thaliana
ggtcaaagccagaggttccgtgacatgcaccagttagtggagcacattaggagcggtgataccattgccacaacacccggtgtagcacagtggttctacaacgacggacaggaaccacttgtcatcgtcagcgtcttcgatctagccagtcaccagaaccagcttgaccgcaacccaaggccattttacttagccggaaacaacccacaaggtcaagtatggctacaaggccgagagcaacagccacagaagaacattttcaatggatttggacccgaggttattgctcaagctttgaagatcgatcttcagacagcgcagcaacttcagaaccaagatgacaaccgtggaaacattgtccgagtccaaagcccgttcggtgtcattaaggccgctttgaggggccagagaccttaggagga

SEQ ID NO: 143711 - DNA, 425 bp, Arabidopsis thaliana
gaaaacatacacaaatagcaaaacatggctaacatgctcttcctcgtctgcgcaactctcgccctctgcttcctcctcaccaacgcttccatctaccgcaccgttgtcgaattcgaagaagatgacgccagcaaccccgtaggtccaagacagagatgccagaaggagtttcagcaatcacaacacctaagagcttgccagagatggatgagcaagcaaatgaggcaaggacgtggtggtggtccttccctcgacgatgagttcgatttcgagggcccccagcagggataccagctactccagcagtgctgcaacgagcttcgccaggaagagccagtttgcgtttgccccaccttgaaacaagctgccagggcagttagcctccagggacagcacggaccattccaatccaggaaaatttacca

SEQ ID NO: 143712 - DNA, 418 bp, Arabidopsis thaliana
agaaataacaaaatggctcgagtctcttctcttctttctttcttcttaacacttttgatccttttccatggctacgcggctcaacagggtcagcagggtcagcagtttccgaacgagtgccagctcgaccagctcaatgcgctcgagccgtcacacgtactgaagagcgaggctggtcgcatcgaggtgtgggaccaccacgctcctcagctccgttgctcaggtgtctcctttgcacgttacatcatcgagtctaagggtctctacttgccctctttctttaacaccgcgaagctctctttcgtggctaagggacgaggtcttatgggaaaagtgatccctggatgcgccgaaacattccaagactcatcagagttccaaccacgcttcgaaggtcaaggtcaaagccagaggttcc

SEQ ID NO: 143713 - DNA, 418 bp, Arabidopsis thaliana
gaagggggaacatgtgagacgcggagacgtctttgccatcactccaggctctgcccactggatctacaactcaggagaacagccacttgtcatcatcgctcttctcgacatcgccaactaccaaaaccaactcgaccgcaaccctagagtgttccatttggccggaaacaaccagcagggaggctttggcggttcacagcaacaacaagaacagaaaaacttgtggagcgggttcgacgcacaggtcatagctcaagcattgaaaattgacgttcagttggctcagcagcttcagaaccaacaagacagcagaggaaacatcggtcgtgttaagggacctttccaggtcgtgaggccacctctaagacagccctactagagcgaggagtggagacacccacgtagcccacagggcaac

SEQ ID NO: 143714 - DNA, 224 bp, Arabidopsis thaliana
gagatatttctgagatttgttgacagtctctaaccatgggtaaagagaagtttcacatcatcattgaggtgattggccacgacgatactggtaagtccaccaccactgcgcacttgatctacaagttgcgtggtatttacaagcgaagcattgagaggttcgagaaggatgctgcttgaatgaacaagatgtgctccaagcacccatgggctttggacaaactt

SEQ ID NO: 143715 - DNA, 326 bp, Arabidopsis thaliana
aacaaaaagaaaatggttaagctcagcactctccttgtttcaaccttcggggttctcctcgtacttaacggctgccttgcgaggcagtcacttggggttcctcctcagctacagaacgagtgtaacctcgacaacctagatgttctccaagccaccgaatctatcaagtgtgaagccggtcagatcgagttctgggaccacaaccaccctcagctccgatgtgttggtgtttccgttgctcgttattgtaattgaacaaggcgtgctatacttgcccacctttttcatctccccaaaaatttcctacatcgttcaaggcacgggtt

SEQ ID NO: 143716 - DNA, 418 bp, Arabidopsis thaliana
gccggaaacaaccagcagggaggctttgtctgtttacagcaacaacaagaacagaaaaacttgtggagcgggttcgacgcacaggtcatagctcaagcattgaaaattgacgttcagttggctcagcagcttcagaaccaacaagacagcagaggaaacatcgttcgtgttaagggacctttccaggtcgtgaggtcacctctaagacagtcctacgagagcgaggagtggagacacccacttagcccacagggcaacggccttgaggagactatctgcagcatgaggtcccacgagaacattgactaccctgctcgtgctgacgtgttcaagcccagcctagggcgggtgaccagcgtcaacagcttttccttgcccattttggagtatgtcaggctcagtgccacttgtggagttc

SEQ ID NO: 143717 - DNA, 405 bp, Arabidopsis thaliana
caaaatggctcgagtctcttctcttctttctttcttcttaacacttttgatccttttccatggctacgcggctcaacagggtcagcagggtcagcagtttccgaacgagtgccagctcgaccagctcaatgcgctcgagccgtcacacgtactgaagagcgaggctggtcgcatcgaggtgtgggaccaccacgctcctcagctccgttgctcatgtgtctcctttgcacgttacatcatcgagtctaagggtctctacttgccctctttctttaacaccgcgaagctctctttcgtggctaatggacgaggtcttatgggaaaagtgatccctggatgcgccgaatcattccaagacttatcagagttccaaccactctttgaaagtcaatgtcaaagccagag

SEQ ID NO: 143718 - DNA, 392 bp, Arabidopsis thaliana
gggccgccaaggcgtccgaacaaccaaaagaaaatggttaagctcagcaatttcttttttgcaaccttcggggttctcctggtccttaacggctgccttgcgaggcagtcacttggggttcctcctcagctacagaacgagtgtaacctcgacaacctagatgttctccaagccaccgaaactatcaagagtgaagccggtcagatcgagtactgggaccacaaccaccctcagctccgatgtgttggtgtttccgttgctcgttatgtaattgaacaaggcggactttacttgcccaccttcttcacttccccaaaaattttctacgtacgttcaaggaacgtgtatcagcggaagagtggtccctggatgtgccgagaccttcatggact

SEQ ID NO: 143719 - DNA, 393 bp, Arabidopsis thaliana
aacaaaaagaaaatggttaagctcagcaatctcctcgttgcaaccttcggggatctcctcggccttaacggctgccttgcgaggcagtcacttggggttcctcctcagctacagaacgagtgtaacctcgacaacctagatgttctccaagccaccgaaactatcaagagtgaagccggtcagatcgagctctgggaccacaaccaccctcagctgcgatgtgtaggagttgccgtcgctcgtcatgtaattgaacaaggcggtctttacttgcccacctatttcacttccccaaaaaaaaactacctccgtcaaggaacgggtatcaccggaaggaggggtccctgaatgagccgagacctttaatggactcgcttccgatgcaaggacaac

SEQ ID NO: 143720 - DNA, 407 bp, Arabidopsis thaliana
  unsure (1)..(407): unsure at all n locations
cccaaatatgcataagcttttgttttctcttctttccgtcgtctcactctcatttctcctcttcttccatggcgccgaggcacgccagcgagaggcgccgtttccaaacgcctgccatttcagccaaatcaacagcctcgcgcccgctcaggcgacgaagttcgaagccggtcagatggaagtatgggaccacatgagccctgagctccgatgcgccggtgtaacggtggctcgcatcacccttcagcccaattccattttcttgcccgctttctttagcccacctgcccttgcttacgttgtccaaggagaaggagttatggggacgattgcttctggttgtcctgagacttttgcagaagttgaaggatcatcangaagaggaggaggaggagacccgggtcgac

SEQ ID NO: 143721 - DNA, 426 bp, Arabidopsis thaliana
caaaaaatggcaaacaagttgttcctcgtctgcgcagctctcgctctctgcttcctcctcaccaacgcttccatctaccgcaccgtcgttgagttcgaagaagatgacgccactaaccccataggcccaaaaatgaggaaatgccgcaaggagtttcagaaagaacaacacctaagagcttgccagcaattgatgctccagcaagcaaggcaaggccgtagcgatgagtttgatttcgaagacgacatggagaacccacagggacaacagcaggaacaacagctattccagcagtgctgcaacgagcttcgccaggaagagccagattgtgtttgccccaccttgaaacaagctgccaaggccgttagactccagggacagcaccaaccaatgcaagtcaggaaaatttaccagacagccaagcac

SEQ ID NO: 143722 - DNA, 401 bp, Arabidopsis thaliana
ccctcagctccgatgtgttggtgtttccgttgctcgttatgtaattgaacaaggcggtctttacttgcccaccttcttcacttccccaaaaatttcctacgtcgttcaaggaacgggtatcagcggaagagtggtccctggatgtgccgagaccttcatggactcgcagccgatgcaaggacaacaacatggccaaccatggctaggacgactgggacatcaaggccaaccatgggaaggacagggacaacagggacaacaaggaagacaaggcctaccatgggaaggacagggacaacagggacaacaaggacgacagggacaacaaggccaaccatgggaaggacagggactgcagggacaacaagggttccgtgacatgcaccataaggtgggacatg

SEQ ID NO: 143723 - DNA, 420 bp, Arabidopsis thaliana
cacaaacgagtaagaatacaaatacaaatatcttttaaaatggcaaacaagctcttcctcgtctgcgcaactttcgccctctgcttcctcctcaccaacgcttccatctaccgcactgttgtcgagttcgacgaagatgacgccagcaaccccatgggcccaagacagaaatgtcagaaggagtttcagcaatcacagcacctaagagcttgccagaaattgatgcgcatgcaaatgaggcaaggccgtggtggtggtccctccctcgacgatgagttcgatttggaagacgacatcgagaacccacaaggcccccagcagggacaccagatcctccagcagtgcttcagcgagcttcgccaggaagagccagtttgggtttgccccaccttgagacaagctgccctggccgttagcctt

SEQ ID NO: 143724 - DNA, 298 bp, Arabidopsis thaliana
agctcagcaatctcctcgttgcaaccttcggtgttctcctcgtccttaacggctgccttgcgaggcagtcacttggggttcctcctcagctacagaacgagtgttacctcgacaaccttgatgttctccaagccaccgaaactatcaagagtgaagccggtcagatcgagtactgggaccacaaccaccctcagctccgatgtgttggtgtttccgatgctcgttatgtaattgaacaaggcggtctttacttgcccaccttcttcactttcccataaatttcctacttcgttcaagg

SEQ ID NO: 143725 - DNA, 424 bp, Arabidopsis thaliana
acaagagcacaggggaagcattctgccgtgaaattgttttatttgaagcagatgaagatatctcctcgagaagcttgacaggaaaagaatttatggatgttaaagatcagaagaatcatctaagacagacaggagggctcctgttctcaagggctgaaccaatacacaaacaagagattgtcaggttactgaaagaagatggagaagtggttgccatgactggagatggagtcaatgatgctcctgccctgaagttggctgatattggtgtggctatgggcatttccgggacagaggtagcaaaggaggcatctgacatggtgttggcagatgattatttcagcaccattgttgcagctgttggtgtaggcaggtccatctataacaacatgaaggccttcatcaagtacatgaactctttcaa

SEQ ID NO: 143726 - DNA, 384 bp, Arabidopsis thaliana
cagcaatctcctcgttgcaaccttcggggttctcctcgtccttaacggctgccttgcgaggcagtcacttggggttcctcctcagctacagaacgagtgtaacctcgacaacctagatgttctccaagccaccgaaactatcaagagtgaagccggtcagatcgagtactgggaccacaaccaccctcagctccgatgtgttggtgtttccgttgctcagtatgtaattgaacaaggcggtctttacttgcccaccttcttcactttcccaaaaatttcctacgtcgttcaaggaacgggttttagcggaagagtgggcccctggtgtgccgagacctttatggaccttcagccgattgcaaggccaccaccatggccaccctt

SEQ ID NO: 143727 - DNA, 403 bp, Arabidopsis thaliana
aagaagacctttgtttacggtggcaaaggtgcgatcggtcttgtttgccaggtcattggtgccattgtcgatgtgagatttgaggatcaggaaggattgccaccaatcatgacatctctcgaggtgcaggatcaccccacaaggctagtgcttgaggtgtctcatcacttgggtcagaatgtcgtcaggaccattgctatggatggtactgagggtctcgttcgtggaaggaaagtcctcaacactggcgctccaatcactgtacctgtcggaagggctactcttggacgtatcatgaatgttcttggagaacctattgacgaatgaggcgaaatttagaccgaacattacttacctattcacagtgatgcaccggctttggttgatctagcttctgggcaag

SEQ ID NO: 143728 - DNA, 262 bp, Arabidopsis thaliana
aaaatggttaagctcagcaatctcctcgttgcatctcttttgggttctcctcgtccttaacggctggcttgcgaggcagtcacttggggttcctcctcagctacagaacgagtgtaacctcgacaacctagatgttctccaagccaccgaaactatcaagagtgaagccggtcagatcgagtactgggaccacatccaccctcagctccgatgtgttgatgtttccgttgctcgttatgtaattgaacaaggcgttctttac

SEQ ID NO: 143729 - DNA, 340 bp, Arabidopsis thaliana
gaaaacgcaatgatcagcactttggcgggtagaacctcgctcttgagggcattgtcattggaggtcatatcaaatggtgtccagatctctcccgaggaagctaggaagatcaagttcaacacacttgagaccactttgacccgcgctgccggtaggcaacaacaacagttgatcgaggagattgtcgaggcttaaatcaaaacgtttttctttttcttaataaagtatggtcagtttgtaatcacgtccctttacctttaacgtacgtgtaaaatatgtgtctgcggcacctcacttgtaataacactttcttctcataaattaaagggaagttttcgtg

SEQ ID NO: 143730 - DNA, 364 bp, Arabidopsis thaliana
gaaaacgcaatgatcagcactttggcgggtagaacctatctcttgtgggcattggcctctctggagcctctcgaagggctacactgcccaacagtggccctacgagagccaggtcgaccaactcactgcgctcgaaccatcccaaatcatccagagcgagggtggtcccatcgaggcctgggaccaccacgcaccccagctccgttgctacggctttgcctttgagcggctcgtcattgagcctcacgggcttttcttgcccactttcttgaacgccggcaaactcacgtttgttggtcacggaaggggcctaattggaagagtgattccggcctgcgccgagacgttcatggatggaccggga

SEQ ID NO: 143731 - DNA, 357 bp, Arabidopsis thaliana
cttttgatccttttccatggctacgcggctcaacagggtcagcagggtcagcagtttccgaacgagtgccagctcgaccagctcaatgcgctcgagccgtcacacgtactgaagagcgaggctggtcgcatcgaggtgtgggaccaccacgctcctcagcttcgttgctcaggtgtctcctttgcacgttacatcatcgagtctaagggtctctacttgccctctttctttaacaccgcgaagctctcttttgtggcttagggacgaggtcttatgggaaaagtgatccctggatgcgccgtaacattccaagactcattagagttccaaccacgcttcgaaggtcaaggtcaaagc

SEQ ID NO: 143732 - DNA, 368 bp, Arabidopsis thaliana
aagaggaagaaaaaagggtcgagtctcatctattttctctttctctttgacactcttgatcctcttcaatggctacactgcccaacagtggcccaacgagtgccagctcgatcaactcaatgcgctcgaaccatcccaaatcatcaagagcgagggtggtcgcatcgaggtctgggaccaccatgcaccccaactccgttgctccggctttgccttgagcgtttcgtcattgagcctaagggtcttttcttgcccactttcttgaacgccggcaaactcacgtttgttgttcacggaaggggtctaatagggaagagttattccgggatgcgccgagacattcatggagttcaccgtattttggagaa

SEQ ID NO: 143733 - DNA, 403 bp, Arabidopsis thaliana
aaaaatgtcgacaaaaaaagtgggagaaaatgacttaagctaaaaccacaccaaccccttcctcctccattttttagtagttgaagcttccttcttcttcttcacctaatacttcttctctatctctctcgccaaagaatcgtacttcttctctcaggttttaaggagatgggatctggtcaatggcacgttgagaaaaggtctacgtttaggaatgattcgtctgtgagagaatatggtatagctccagaaactggttgtctttcaatcatagtacttggagcttctggtgatcttgctaagaagaagactgttcctgctctttttaacttataccgtcagggatttctcaatccagatgaagttcattttttttgtattgcgaggactaagatttctgatg

SEQ ID NO: 143734 - DNA, 361 bp, Arabidopsis thaliana
cggggggaaaccacagggacgaacacttgggaggctagaccctcgctctggagggttttgccatgggaggccattccaaatgggttccagatctatcccgaggaagctaggaagaccaagttcaccacactggagaccactttgacccgtgctggcggtaggcaacaccaacagtttatcgaggagatcgtcgaggcttaaatcaaaacgctactctttctcttaataaacgatggtcagtgtgtaatcacgtccctttacctttaacgaacgtgtaaaatatgtgtctgcggcacctaacttgcaataacactcttttctcataaataaaacggaagtttcgagttgcatggtccctgga

SEQ ID NO: 143735 - DNA, 406 bp, Arabidopsis thaliana
aacaaaaagaaaatggttaagctcagcaatctcctcgttgcaaccttcggggttctcctcgtccttaacggctgccttgcgaggcagtcacttggggttcctcctcagctacagaacgagtgtaacctcgacaacctagatgttctccaagccaccgaaactatcaagagtgaagccggtcagatcgagtactgggaccacaaccaccctcagctccgatgtgttggtgtttccgttgctcgttatgtaattgaacaaggcggtctttactagcccaccttcttcacttccccaaaaatatcctacgtcgttcaaggaacgggtattagcggaagagtggtccctggatgtgccgagacctttatggactcgtagccgatgcaaggacatcaacaaagccaaccat

SEQ ID NO: 143736 - DNA, 424 bp, Arabidopsis thaliana
aagaaaacatacacaaatagcaaaacatggctaacaagctcttcctcgtctgcgcaactctcgccctctgcttcctcctcaccaacgcttccatctaccgcaccgttgtcgaattcgaagaagatgacgccagcaaccccgtaggtccaagacagagatgccagaaggagtttcagcaatcacaacacctaagagcttgccagagatggatgagcaagcaaatgaggcaaggacgtggtggtggtccttccctcgacgatgagttcgatttcgagggcccccagcagggataccagctactccagcagtgctgcaacgagcttcgccaggaagagccagtttgcgtttgccccaccttgaaacatgctgccagggcagtttgccttcaaggacagcacggaccattccaatccaggaaaattta

SEQ ID NO: 143737 - DNA, 426 bp, Arabidopsis thaliana
caaaaagaaaatggttaagctcagcaatctcctcgttgcaaccttcggggttctcctcgtccttaacggctgccttgcgaggcagtcacttggggttcctcctcagctacagaacgagtgtaacctcgacaacctagatgttctccaagccaccgaaactatcaagagtgaagccggtcagatcgagtactgggaccacaaccaccctcagctccgatgtgttggtgtttccgttgctcgttatgtaattgaacaaggcggtctttacttgcccaccttcttcacttccccaaaaatttcctacgtcgttcaaggaacgggtatcagcggaagagtggtccctggatgtgccgagaccttcatggactcgcagccgatgcaaggacaacaacaaggccaaccatggcaaggacgacagggacaaca

SEQ ID NO: 143738 - DNA, 391 bp, Arabidopsis thaliana
  unsure (1)..(391): unsure at all n locations
nggacgcgtggccggccccgtggggaaaatggttatgttcagcaatctcctcgttgcaacctgcggggttctcctcgtccttaacggctgccttgcgaggcagtcacttggggttcctcctcagctacagaacgagtgtaacctcgacaacctagatgttctccaagccaccgaaactatcaagagtgaagccggtcagatcgagtactgggaccacaaccaccctcagctccgatgtgttggtgtttccgttgctcgttatgtaattgaacaaggcggtctttacttgcccaccttcttcacttacccaaaaatttcctacgtcggtcaaggaacgggtattagcggaagagtgggccctggttgtcccggacctttttggactcgcatc

SEQ ID NO: 143739 - DNA, 326 bp, Arabidopsis thaliana
gcgtccgaccaaaaagaaatggttaagctcagcaacctccttttttcaaccttcggggttctcctcgtccttaacggttgccttgcgaggcagtcacttggggttcctcctcagttacagaacgagtgtaacctcgacaacctagatgttctccaagccaccgaaactttcaagagtgaagccggtcagatcgagtactgggaccacaaccaccctcagctccgatgtgttggtgtttccagtgctcgttatgtaattgaacaaggcgggctttacttgcccaccttcttcacttccccaaaaatttcctacgtcgttcaaggaac

SEQ ID NO: 143740 - DNA, 411 bp, Arabidopsis thaliana
ataagaaataacaaaatggctcgagtctcttctcttctttctttcttcttaacacttttgatccttttccatggctacgcggctcaacagggtcagcagggtcagcagtttccgaacgagtgccagctcgaccagctcaatgcgctcgagccgtcacacgtactgaagagcgaggctggtcgcatcgaggtgtgggaccaccacgctcctcagctccgttgctcaggtgtctcctttgcacgttacatcatcgagtctaagggtctctacttgccctctttctttaacaccgcgaagctctctttcgtggctaagggacgaggtcttatgggaaaagtgatccctggatgcgccgaaacattccaagactcatcagagttccaaccacgcttcgaaggtcaaggtcaaagc

SEQ ID NO: 143741 - DNA, 291 bp, Arabidopsis thaliana
atgaggtataattatgtgtcgtgacgcatctactttctttggctcttcaacaccacggacgccgtgaattggggaaactgacaaaaagaggaagaacaagagccaaagccttcagagatatggactggtactggccctaaggtgatgaggcacgaggggagacatgagcatctgaggatcacatacggcctactgtcgcaactaaggtagctgcgcaaactagaatgaaaggggagaggatggacaatcttggtctattcaaaggatacactgagatctgaccaagtgaga

SEQ ID NO: 143742 - DNA, 432 bp, Arabidopsis thaliana
gacagggacagcagggacaacatgggttccgtgttttgcaccagaaggtggaacatgtgagacgcggagacgtctttgccaacactccaggctctgcccactggatctacaactcaggagaacagccacttgtcatcatcgctcttctcgacatcgccaactaccaaaaccaactcgaccgcaaccctagagtgttccatttggccggaaacaaccagcagggaggctttggcggttcacagcaacaacaagaacagaaaaacttgtggagcgggttcgacgcacaggtcatagctcaagcattgaaaattgacgttcagttggctcagcagcttcagaaccaacaagacagcagaggaaacatcgttcgtgttaagggacctttccaggtcgtgaggccacctctaagacagccctacgagagcgaggagt

SEQ ID NO: 143743 - DNA, 412 bp, Arabidopsis thaliana
aaaaatgtcgacaaaaaaagtgggagaaaatgacttaagctaaaaccacaccaaccccttcctcctccattttttagtagttgaagcttccttcttcttcttcacctaatacttcttctctatctctctcgccaaagaatcgtacttcttctctcaggttttaaggagatgggatctggtcaatggcacgttgagaaaaggtctacgtttaggaatgattcgtttgtgagagaatatggtatagttccagaaactggttgtctttcaatcatagttcttggtgcttctggtgatcttgctaagaagaagacttttcctgctctttttaactgataccggcagggatttctcaatccagatgaagttcatattttcgggtatgcgaggactaatattgcttatgaagagctga

SEQ ID NO: 143744 - DNA, 364 bp, Arabidopsis thaliana
tgaaggccgaagaggggaaaggttccatgtgtacttcacttgcacatgggttagtcgatcctaagagtcgggggaaacccgtctgatagcgcttaagcgcgaacttcgaaaggggatccggttaaaattccggaaccgggacgtggcggttgacggcaacgttagggagtccggagacgtcgtcgggggccttgggaagagttatctttactgtttaacagcctgcccaccctggaaactgctcagtcagaggtagggaccagcgcatggaagagcaccgtacgtactgtggagtccggtgcgccctcggcggtccttgaaaatccggaggacctagtgccgctcacgcccagtcgtactgatt

SEQ ID NO: 143745 - DNA, 298 bp, Arabidopsis thaliana
gtttcgtcgccatggttctcaaagacgatttcttttagaaatctattgagctcttcattagtattggtttggacgagaaaacagctcgtaataccatcaataataacaaggtcaccgccaatctcaccgccgttatccacgaggctgctgttactgatgggtgcgatcgaaatactggcaatctgttatactcggtcgctactaagttccctacaaatgctctagtgcatcgccctacattgttcaagtacattgttaactctatgatttaaactccagcccaattggaagcaggatt

SEQ ID NO: 143746 - DNA, 429 bp, Arabidopsis thaliana
cgccgacattggccgacagagttttggcttctcacgctttagaaagaagatgaaggagacgagaaagctgaagaagagtaatctccctaaagaagaaactgtggggaaaaaatttcagaggaagaagaatgagaaagtgagcgatgtcgaattaagcgaggatcctcaggctgcacagcttcaagctaaatcaagtgagaaacccattagaaagaagattcagaagggtatggatataaaaagctctccagctgatggtaagctgagtgggaagatgaagaagagaaaagagaaagttggcaatgttgatataagcgaaccgattctggaagctatttcaactgtgaaagttaaagaaaagaagggcaatatgaacaagacttagtagaaaaggaaggccgaggaaataactagatcttcagtcgaaga

SEQ ID NO: 143747 - DNA, 358 bp, Arabidopsis thaliana
ataaaaatggctcgagtctcttctcttctttctttctccttaacacttttgatccttttccatggctacgcggctcaacagggtcagcagggtcagcagtttccgaacgagtgccagctcgaccagctcaatgcgctcgagccttcacacgtactgaagagcgaggctggtcgcatcgaggtgtgggaccaccacgctcctcagctccgttgctcaggtgtctcctttgcacgttacatcatcgagtctaagggtctctacttgccctctttctttaacaccgcgaagctcttcttcgtggctaaaggacgaggtctcatggtaaaagtgatccctggatgcgccgaatcattccaaa

SEQ ID NO: 143748 - DNA, 146 bp, Arabidopsis thaliana
caacactcacaaattctcttaaagctcacagactaattctttctatttttaatctttccggcgaacaattctgatctctaataatggcgggtaaaggtgaaggtccagctatcggtatcgatctcggtacaacctactcttgcgtc

SEQ ID NO: 143749 - DNA, 423 bp, Arabidopsis thaliana
ggaatatcactatcacacattgatcaatcaaagtgagattcaacaactaaaagaaagatcgattcttttggatccttcctttattcaaacggaaggaagagagatagaatcagaccgattccctaaatacctttctggctattcctcaatgccccggctattcacggaacgtgagaagcgaatgaataatcatctgcttccggaagaaagcgaagaatttcttgggaatcctacaagagccattcgttcttttttctctgacagatggtcagaacttcatctgggttcgaatcctactgagaggtccactagggatcagaaattgttgaagaaagaacaagatgtttcttttgtcccttccaggcgatcggaaaataaagaaatagttaatatattcaagataattacgtatttacaaaatac

SEQ ID NO: 143750 - DNA, 416 bp, Arabidopsis thaliana
  unsure (1)..(416): unsure at all n locations
gttntatatcatatcaatcgacatggcgaatgtggaccgtgatcggcgtgtgcatgtagaccgtactgacaaacgtgttcatcagccaaactacgaagatgatgtcggttttggtggctatggcggttatggtgctggttctgattataagagtcgcggcccctccactaaccaaatcttggcacttatagcaggagttcccattggtggcacactgctaaccctagctggactcactctagccggttcggagatcggtttgctagtctccataccccttttccttcttttcagtccggagataggcccggcggctctcactattgggcttgctgtgacgggaatcttggcttctggtttggttgggttgacaggtctgagctcggtctcgtgggtcctcaactaccttcgtggga

SEQ ID NO: 143751 - DNA, 424 bp, Arabidopsis thaliana
cacatagcaaaaaatggcaaacaagttgttcctcgtctgtgcagctctcgctctctgcttcctcctcaccaacgcttccatctaccgcaccgttgttgagttcgaagaagatgacgccactaaccccataggcccaaaaatgaggaaatgccgcaaggagtttcagaaagaacaacacctaagagcttgccagcaattgatgctccagcaagcaaggcaaggccgtagcgatgagtttgatttcgaagacgacatggagaacccacagggacaacagcaggaacaacagctattccagcagtgctgcaacgagcttcgccaggaagagccagattgtgtttgccccaccttgaaacaagctgcctaggcctgtagactccagggacagcaccaaccaatgcaagtcaggaaaaattaccagaca

SEQ ID NO: 143752 - DNA, 315 bp, Arabidopsis thaliana
acccacgcgtccggaaataacaaaatggctcgagtctctcctctactttctttcttcttaacacttttgatcctttccatggctacgcggctcaacagggtcagcagggtcagcagcttccgaacgagagccagctcgaccagctcaatgcgctcgagccgccacacgtactgaagagcgaggctggtctcatcgaggtgggggaccaccacgctcctcagctccgttgctcaggtgtctcctttagcacgttacatcatcgagtctaagggtctctacttgccctttttctttaacaccagggacgctcttctt

SEQ ID NO: 143753 - DNA, 423 bp, Arabidopsis thaliana
cttggtttatttaataatcagggactcccaagcgcacaaattctctaagtagataattgagagcttgttatgaaacagtataacatgacttatatagccatgtcaaccaatgtaaaatggataagatccttttagtttagattcataaaaaattttttgtaatcgatgaaataaattagaagcgaatccacatacatagaaatagaattgctctaggaatattttttccaaatcatatgaatacgatggaatacgatccgtagtgggttgcccgggactcgaacccggaactagtctgttggagtagataatcttcttgttaaaatgaaaaaaaaaaaggtaaaaaacccctccccaaaccgtgcttgcattattcattagacacagctttctctatgtgtacatagtaaactcaatttcttt

SEQ ID NO: 143754 - DNA, 204 bp, Arabidopsis thaliana
taagaagataaaaatggctcgagtctcttctcttttttctttctccttaacacttttgatccgtttccatggctacgcggctcaacagggtcagcagggtcagcagtttccgaacgagtgccagctcgaccagctcaatgcgctcgagccttcacacgtactgaagagcgaggctggtcgcatcgaggtgtgggaccaccacgc

SEQ ID NO: 143755 - DNA, 412 bp, Arabidopsis thaliana
taagaagataacaaccaccagtgggccaactgttttttcctggtgtgcacagctctcgccctgtgtttcatcctcaccaacgcttccgtgtatcgcacggttgccgagttcgacgaagatgacgcctgtaaccccataggcccaatacagaaatgtcagaaggagtttcagcaagaacagcacctaagagcttgccagagatggatgcgcaagcaaatgtggcaaggacgtggtggtggtccttccctcgacgatgagttcgatatggaagacgacatcgagaacccgcagagacgacagctactccagaagtgctgcagcgagcttcgccaagaagagccagtttgcgtttgccccaccttgagacaagctgccaaggccgttagattccagggacagcaacaccaaccag

SEQ ID NO: 143756 - DNA, 415 bp, Arabidopsis thaliana
gagagagagtgttatgttatgtctttattgtcaattagtaattttcttcgaattagatgttgtttctccgtcgaatcgccgtcgtcttctttgtcttcacctctttctccgccgctcagaactccacgtgtcctctggacttttccgtccttgaaccgttccggcgtccgaaacccgatggcgccaccacctgccagtacctcctccaagggctacgcctcctctactctcaccatctccgtcagacgggttcctttctcccgccacctgagtctgctgcttcttgctgggctgctctccagtcttccgtcgccggtttcctccctcgctatgacgtccgatccacctgcggtttccagacgccgtggatttcgcaggggtgcatggacatcaccaccaggtctcaatttgaatc

SEQ ID NO: 143757 - DNA, 427 bp, Arabidopsis thaliana
agaaaacatacacaaatagcaaaacatggctaacatgctcttcctcgtctgcgcaactctcgccctctgcttcctcctcaccaacgcttccatctaccgcaccgttgtcgaattcgaagaagatgacgccagcaaccccgtaggtccaagacagagatgccagaaggagtttcagcaatcacaacacctaagagcttgccagagatggatgagcaagcaaatgaggcaaggacgtggtggtggtccttccctcgacgatgagttcgatttcgagggccctcagcagggataccagctactccagcagtgctgcaacgaggctcgccagaaagagccagtttgcgtttgccccaccttgaaacaagctgccaaggcaagtagcctccagggacagcacggaccattccaatccaggaaaatttaccag

SEQ ID NO: 143758 - DNA, 88 bp, Arabidopsis thaliana
cgccccaggcgtccgaacaaacaaaaagaaattggttaagctcagcattctcctcgttgcaaccttcggggttctcctcgtccttaac

SEQ ID NO: 143759 - DNA, 376 bp, Arabidopsis thaliana
taaacaaaacacacccaattttgcttagcctttggttttttttcatctccgccggctaactctcattcctcctcttcttccatggcgccgaggcacgccagcgagaggcgccgtttccaaacgcctgccatttcagccaaatcaacagccttgcgcccgctcaggcgacgaagttcgtagccagtcagatggaagtttgggaccacattgagccctgagctccgatgcgctcgggtaacggtggctcgcatcaccctttagcccaattccattttcttgcccgttttctttagcccacctgcccttgcttacgttggccaaggagatggagttttggggaccattggcttttggtcgttctgtgactttttgcaga

SEQ ID NO: 143760 - DNA, 287 bp, Arabidopsis thaliana
atcaaacaaaaagaaaagggttatgctcaccaatttcttttttgcaacctacggggttcgcctagtccttaacggctgccttgcgaggcagctactggggttcctcctaaactacagaacgagtgtaccctcgactacctagatgttttccaagccaccgaaactttcaagagtgaagccgctctgctcgagtactgggaccacatccaccctcagcttcgatgtgtggatgtttccgttgcttccttagtgattgaacaatgctgtcttttcttgccctccttctt

SEQ ID NO: 143761 - DNA, 352 bp, Arabidopsis thaliana
ggtacacacattgcatttaatggcaaacaagttgttcctcgtctgcgcagctctcgctctctgcttcctcctcaccaacgcttccatctaccgcaccgtcgttgagttcgaagaagatgacgccactatccccataggcccaaaaatgaggaaatgccgcaaggagtttcagaaagaacaacacctaagagcttgccagcaattgatgctccagcaagcatggcaaggccggagcgatgagtttgatttcgaagacgacatgtgaaacccacagggacaacagcaggaacaacagcttttccagcagagctgcaacgagcttcgccaggaagagccagattgtgattgcccc

SEQ ID NO: 143762 - DNA, 295 bp, Arabidopsis thaliana
aaaaagggtcgagtctcatctattatctctttctctttgacactcttgatcctcttcaatggctacactgcccaacagtggcccaacgagtgccagctcgatcaactcaatgcgctcgaaccatcccaaatcatcaagagcgagggtggtcgcatcgaggtctgggaccaccatgcaccccacctccgttgctacggctttgcctttgagcgtttcgtcattgatccttaagtgcttttcttgcccactttcttagaacgccggtatactcaccgtttgttgttcacagaagggg

SEQ ID NO: 143763 - DNA, 302 bp, Arabidopsis thaliana
gaaaatggttaatctcagcaatctcctcgctgcttccttcggggttctcctcgtccttaacgggtgccttgccaggcattcacttggggttccttctcagctacagaacgagtgtaacctcgacaacctagatgttctccaagccacctaaactatcaagagtgaatccgagcagatcgaatactgggaccacaaccacccttagctccgatgtgttggtgttaccgttgctcgttatgtaaatagaacatggcggtttataccttgcccaccttttttcacttccctcaaaaatttcctac

SEQ ID NO: 143764 - DNA, 313 bp, Arabidopsis thaliana
aatgggtcgagtctcatctattatctctttctctttgacactcttgatcctcttcaatggctacactgcccaacagtggcccaacgagtgccagctcgatcaactcaatgcgctcgaaccatcccaaatcatcaagagcgagggtggtcgcatcgaggtctgggaccaccatgcaccccagctccgttgctccggctttgcctttgagcgtttcgtcattgtgcctcatggtctgttcttgcccactttcttgaacgccggcaaactcacgtttgtcgttcacggaaggggtctaattgggaagagttattcc

SEQ ID NO: 143765 - DNA, 389 bp, Arabidopsis thaliana
aggagataaaccaattccaagaaagatacataaccgggctttgttatccggtttagcttattgcatttcttcatgcagtatgatacttgtcaacaagtttgtcctctccagctacaacttcaatgctgggatcttcctaatgttataccagaactttgtctcggtgatcattgtggttggtttgagtttaatgggtctaataactactgaaccacttactttgaggttgatgaaggtctggtttccagtgaatgtcatctttgttggtatgcttatcactagcatgtttagtttgaaatacatcaatgtagcaatggtcactgtcctgaagaatgtcactaatgtgataactgcagttggtgagatgtatctgttcacaagcaacatga

SEQ ID NO: 143766 - DNA, 427 bp, Arabidopsis thaliana
gtggtccctggatgtgccgagaccttcatggactcgcagccgatgcaaggacaacaacaaggccaaccatggcaaggacgacagggacaacaaggccaaccatgggaaggacagggacaacagggacaacaaggaagacaaggccaaccatgggaaggacagggacaacagggacaacaaggacgacagggacaacaaggccaaccatgggaaggacagggacagcagggacaacaagggttccgtgacatgcaccagaaggtggaacatgtgagacgcggagacgtctttgccaacactccaggctctgcccactggatctacaactcaggagaacagccacttgtcatcatcgctcttctcgacatcgccaactaccaaaaccaactcgaccgcaaccctagagtgttccatttggccggaaaca

SEQ ID NO: 143767 - DNA, 388 bp, Arabidopsis thaliana
aacaaaaagaaaatggttaagctcagcaatctcctcgttgcaaccttcggggttctcctcgtccttaacggctgccttgcgaggcagtcacttggggttcctcctcagctacagaacgagtgtaacctcgacaacctagatgttctccaagccaccgaaactatcaagagtgaagccggtcagatcgagtactgggaccacaaccaccctcagctccgatgtgttggtgtttccgttgctcgttatgtaattgaacaaggcggtctttacttgcccaccctctttacttccccaaaaatttcctacgtcgttcaaggaacgggtatcagcggaagagtggtccctggatgtgccgagacctttatggactttcaggcgatgcaaggac

SEQ ID NO: 143768 - DNA, 391 bp, Arabidopsis thaliana
  unsure (1)..(391): unsure at all n locations
cgaattaatggtaaacaagaggttatgatcggttattcttattcagggaaagatgctggacgtttatccgctgcttggcagttatacaaagctcaagaagaacttgtgaaggtggcgaaagagtatggtgtgaagctaacaatgtttcacggtcgtggtggcacggtcggaagaggaggtggaccaacccatcttgctatattatctcagcctccggatactatcaacggttcgctccgtgtcacagttcaaggtgaagncatcgagcaatcgtttggtgaagagcatttatgctttagaacacttcaacgtttcaccgctgctacactagagcacggtatgcgacctccgatttcgcctaaaccagaatggcgtgctttgctcgatgaaa

SEQ ID NO: 143769 - DNA, 415 bp, Arabidopsis thaliana
  unsure (1)..(415): unsure at all n locations
tntcgattaagcttgaacttggaggatcaatggccgacgttcgcacacactcgcaccagctgcaagtgcaccctcaacgccagcatgaaggaggcatcaaagtcctttatcctcagagtggcccttcttccactcaggtgctagccgtgtttgtcggtgtaccgataggaggaacgctgctgactatagccggtttgacattagccggttcggttataggactaatgctagcattcccgttgtttctcatctttagtccggttattgtaccagcagcctttgtcatcggtctagctatgactggattcctggcttcaggggccataggtctgaccggactatcatccatgtcgtgggtagctaaactacatccgccggggccgggcagcatattcccggaggagctttgaggaag

SEQ ID NO: 143770 - DNA, 398 bp, Arabidopsis thaliana
  unsure (1)..(398): unsure at all n locations
aagatgacaaccgtggaaacattgtccgagtccaatgcccgttcggtgtcattaggccgcctttgaggggccagagacctcaggaggaggaagaagaagaagaaggacgacacggacgacacggtaatggcttagaggagaccatctgcagcgccaggtgcaccgataacctcgatgatccgtctcgtgctgacgtgtacaagccacagctcggttacatcagcactctcaacagttacgatctccccatccttcgcttcatccgtctctcagccctccgtggatctatccgtcaaaacgcaatggtgctttcacagtggaacgcanacgcgaacgccattctttacgtgacagacggggaagcccatatccagattcgtaacgacaatggtaacaga

SEQ ID NO: 143771 - DNA, 407 bp, Arabidopsis thaliana
aaaaatacttcaatgcgttcttaattttgttctgattcttcccacttgaccaaccccgtgaggataaactgttgccgacgcttctcgccgataacaccggttttgttgtgacggaaaggaaaaatgggtttgatttctgggattctgttcgggattatcttcggcgtagctctaatggctggctggagtcgtatgatgactcaccgatcgtccaagcgagtcgccaaggcagttgatatgaaactactaggctctcttagcagagacgatttgaagaaaatttgtggtgataatttccctcaatggatatcggttccagcatttgaacaggtcaaatggctgaataaactactgagcaagatgtggccatatattgcagaggcagcaacaatggtaataagagattc

SEQ ID NO: 143772 - DNA, 421 bp, Arabidopsis thaliana
ctcctttcagattcttacttgcagctatgggtaaagagaagtttcacattaacattgtggtcattggtcatgttgattctggaaaatcgaccacaactggtcacttgatctataagcttggtggtattgacaagcgtgtcatcgagaggttcgagaaggaggctgctgagatgaacaagaggtccttcaagtacgcatgggtgttggacaaacttaaggccgagcgtgagcgtggtattaccatcgatattgctctatggaagttcgagaccaccaagtactactgcacagtcattgatgccccaggacatcgtgatttcatcaagaacatgattactggtaccttccatgctgattgtgctgttcttattaattgactccaccactggaggttttgaggctggtatctctaaagatggtc

SEQ ID NO: 143773 - DNA, 412 bp, Arabidopsis thaliana
taaagaggaagaaaaatgggtcgagtctcatctattatctctttctctttgacactcttgatcctcttcaatggctacactgcccaacagtggcccaacgagtgccagctcgatcaactcaatgcgctcgaaccatcccaaatcatcaagagcgagggtggtcgcatcgaggtctgggaccaccatgcaccccagctccgttgctccggctttgcctttgagcgtttcgtcattgagcctcagggtcttttcttgcccactttcttgaacgccggcaaactcacgtttgttgttcacggaaggggtctaatgggaagagttattccgggatgcgccgagacgttcatggagtcaccggtatttggagaaggtcaaggtcagggtcagagtcaagggttccgtgacatgcacc

SEQ ID NO: 143774 - DNA, 423 bp, Arabidopsis thaliana
aaagaaaatggttaagctcagcaatctcctcgttgcaactcttcggggttctcctcgtccttaacggctgccttgcgaggcagtcacttggggttcctcctcagctacagaacgagtgtaacctcgacaacctagatgttctccaagccaccgaaactatcaagagtgaagccggtcagatcgagtactgggaccacaaccaccctcagctccgatgtgttggtgtttccgttgctcgttatgtaattgaacaaggcggtctttacttgcccaccttcttcactttcccaaatatttcctacgtcgttcaaggaacgggtatcagcggaagagtggtccctggatgtgccgagaccttcatggactcgcagtcgatgcaaggacaacaacatggccaaccatggcaaggacgacagggacaac

SEQ ID NO: 143775 - DNA, 431 bp, Arabidopsis thaliana
caccattgcaacaccatctggtgtagctcaatggttctacaacaatggaaatgagcctctcattcttgttgcagccgcggatctcgccagcaaccagaaccagcttgaccgcaaccttagaccatttttgatagccggaaacaacccacaagggcaggaatggctacaaggccgaaagcaacagaagcaaaacaacatcttcaatggcttcgcacctgagatcttggctcaagccttcaagatcaatgtcgagacggctcagcagctccagaaccagcaagataaccgtggcaacatcgtcaaggtcaacggacctttcggcgtcattaggccacccttgagacgcggcgaaggcggccaacaaccacatgaaatagctaatggtttagaggagactttgtgcaccatgcgatgcactgaaaacctcgatg

SEQ ID NO: 143776 - DNA, 414 bp, Arabidopsis thaliana
atgagctgaggaaaagagccactctttctgatttgattgattcatcattcatcgacaatggcttcttcttcttcttcttcgtcttcgagtacggtgtcgttcgtagtctttgcatttacagtcttcttctgtttggttactccggcgagatctagcgacgtcgaagctttactaagcttgaaatcttcaatcgatccatctaattcgatttcttggagaggaacagatctctgcaactggcaaggtgttagagaatgtatgaatggaagagtctccaagcttgttcttgagtacttgaatctcaccggctcacttaacgagaagagtttgaaccagttggatcaacttagggttcttagtttcaaagctaactctctctccggttcaatccctaacctctccggtttggttaac

SEQ ID NO: 143777 - DNA, 425 bp, Arabidopsis thaliana
aatataagaaataacaaaatggctcgagtctcttttcttctttctttcttcttaacacttttgatccttttccatggctacgcggctcaacagggtcagcagggtcagcagtttccgaacgagtgccagctcgaccagctcaatgcgctcgagccgtcacacgtactgaagagcgaggctggtcgcatcgaggtgtgggaccaccacgctcctcagctccgttgctcaggtgtctcctttgcacgttacatcatcgagtctaagggtctctacttgccctctttctttaacaccgcgaagctctctttcgtggctaagggacgaggtcttatgggaaaagtgatccctggatgcgccgaaacattccaagactcatcagagttccaaccacgcttcgaaggtcaaggtcaaagccagaggttccg

SEQ ID NO: 143778 - DNA, 319 bp, Arabidopsis thaliana
  unsure (1)..(319): unsure at all n locations
aagggatcggattcaggagttgctttcttccttcgtttctcagttcacaatgcagagacagagaaacaagatacgaggattctaccagtacactactcagacaactatttctcactagttccaggtgaatcaatgtcttttaagatctcatttgcagctcctacaggcatgaagaagtctcctcgtgttatgcttcagggctggaactaccctgataggtttagtgtttttggttgagactattcatgtttcatgtttgtaacataacttgctgtnatctcgaacctttcaataaatgaaacttgcacaggttttaagc

SEQ ID NO: 143779 - DNA, 431 bp, Arabidopsis thaliana
  unsure (1)..(431): unsure at all n locations
aagaaataacaaaatggctcgagtctctnctcttctttctttcttcttaacacttttgatcctttnccatggctacgcggctcaacagggtcagcagggtcagcagtttccgaacgagtgccagctcgaccagctcaatgcgctcgagccgtcacacgtactgaagagcgaggctggtcgcatcgaggtgtgggaccaccacgctcctcagctccgttgctcaggtgtctcctttgcacgttacatcatcgagtctaaagggtctctacttgccctctttctttaacaccgcgaagctctctttcgtggctaagggacgaggtcttatgggaaaagtgatccctggatgcgccgaaacattccaagactcatcagagttccaaccacgcttcgaaggtcaaggtcaaagccagaggttccgtgacatgcac

SEQ ID NO: 143780 - DNA, 419 bp, Arabidopsis thaliana
aacccggttaacaagaaaattccggttctcatccacaacggtaaaccggtatgcgagtccaatatcatagtcgaatacatcgatgaggtctggaaagacgataagactctccgtctactaccttctgatccttatcagaagtcacagtgtagattttgggctgatttgattgacaaaaaggtactactagactttcttaaaacgttacatttttggacgatacttaagaataacaaatacaatctactaaatacttcataatattaaatgttatggtgtgtatataaaaagttcaacgaaaggagactaaaagttcaatttcattgtgattcatatacaaaaatataaacaggtttttgacgctggaagaagaacgtggacaaagaggggcaaagaacaagaagaagcgaaacaagagt

SEQ ID NO: 143781 - DNA, 422 bp, Arabidopsis thaliana
caaaattgttgccttccttcgtctccgatcattttcgtggtgtctgtaaccccaattacaattcgaatccattagcgaaagaaagagacttcctttgaaagagaagagtctcgttggctcggttttctgttcaaatcagcggatttcctcacatttaattgttcaatcatggcggctaccaatgtcatgcggcgagacgagagccttcttattgatccccaaagaggagatacaagtgtttctcgtggcctctcgcttgagaagaaaattgaggcccttgagagcctggccggacaagttagtaacaggcgatctcggagatggttaaatgatcgtattctgatggaacttgttcctcgtttggatgcccaagaaatcagaggcttgtttgctccaccaccgtgggggggtgatgtcccacc

SEQ ID NO: 143782 - DNA, 418 bp, Arabidopsis thaliana
cgatctctctccgacggccaatggacgccgacctttactctgttccactctccttcactcccctacgcgaatcatcctctccttcctcgccgtatcttcttctgccgaggtttctctccgttcagccatgtcacaaattcaccttctctcgaagcttcccttccaaatcccggattccctcagcttcttccgccgccggttccacgttgatgacgaattcctcttcgccaagaagtggagtgtacactgttggtgagttcatgacaaagaaagaggacttgcacgtggtgaaacctacgactactgtggatgaagctctggaactccttgtggagaatagaatcactggatttcctgtaattgacgaagactggaaatcggttgggcttgtttcagattatgacttgttggctttgga

SEQ ID NO: 143783 - DNA, 421 bp, Arabidopsis thaliana
tttgaatatcttccacgggggagtccttcggaagcatgcttgatgaaaatatttgttgccactgtggaaacaatactcagtagaacttttccgcctgaatcttccagggaactaaccagaaaagctagatcgagttttaccacaagatcagcgaccaaaaatcttgctatgtctgagcttcgtgctatggtccatgctctctttttagaatcatgcgctggtgtggaattagcttcacgcctactttttgttgtgttgactgtatgtgttagccatgaagcacagtctagtggtagcaagagaccgagaagtgaatatgctagtactactgaaaatattgaggcgaatcaacctgtatctaacaatcaaactgctaaccgtaaaagtaggaatgtcaaaggacagggacctgtggcagcat

SEQ ID NO: 143784 - DNA, 424 bp, Arabidopsis thaliana
catcacttcacatcaaccaaacctacttctgtctctctctctcgctctctatctctcacgctctcacagtagaagaaaaaattagaaaggttgtgagaatggcggctacagcagcttcaagcttacaaattgctacacgaaggccgagcatgtcttcgcctagcaaaattcttaaagcaggaaccttcattgttggtgccaatcctggaaacgcttcatgggataaactttcatgcactcccccaattatcaaaccttggatgtttgagaaaccacagtgctgttccaacttgtaagagacccttttctttttccacaagggcaatgtctgaatccagtgaaaacaaggctccttcagggcttccaattgatttgagagggaaaagagctttcattgctggtatagctgatgataatggctatg

SEQ ID NO: 143785 - DNA, 416 bp, Arabidopsis thaliana
tatttttatttttaaaagaactctttacaacaagtctcctataaatacataaactccataacccacaaagtaagaaagtaaatcaataaagaggaagaaaaatgggtcgagtctcatctattatctctttctctttgacactcttgatcctcttcaatggctacactgcccaacagtggcccaacgagtgccagctcgatcaactcaatgcgctcgaaccatcccaaatcatcaagagcgagggtggtcgcatcgaggtctgggaccaccatgcaccccagctccgttgctccggctttgcctttgagcgtttcgtcattgagcctcagggtcttttcttgcccactttcttgaacgccggcaaactcacgtttgttgttcacggaaggggtctaatgggaagagttatttccgga

SEQ ID NO: 143786 - DNA, 456 bp, Arabidopsis thaliana
gggaaggaccggccggaccgacccacccggtgtttgatcataatggcaacatcaggtctaagagtttacggtttcggtagagccgatgaggctacacaccctgactccattagagcaactttagctgagtttctctccacttttgtcttcgtctttgcagctgaaggctctatcctctctctcgataagttgtattgggaacatgcggctcatgcggggacaaacacaccaggagggctgattttagtagcgttggctcatgcgtttgctctgtttgctgctgtttcagcagccattaatgtctccggcggacacgttaacccggcagtcacttttggtgctcttgttggaggcagagttacagcgatccgcgccatctactactggatcgctcagcttcttggagccatcctcgcttgtctcttgttaaggctcacatcaaacggcatgagacca

SEQ ID NO: 143787 - DNA, 421 bp, Arabidopsis thaliana
tttctctgctaatttctactatttgtgttgtagggatatattataataaaaagaaccaatggcggaccaaacaagaacccatcacgagatgataagccgagacagtacccaagaggcccatccgaaggccaggcagatggtgaaggcagcaaccgctgtcacagccggtggatccctccttgtcctctccggcttaacactcgctggaacagtcatcgcactcacggtggctactcctctcctcgtcatcttcagccccgtcttggttccagcagtggtaaccgttgctctcatcattaccggattccttgcatccggtggctttggaatagccgccattaccgccttctcttggctctacaggcacatgacgggatctggatcggataagatagagaatgctcggatgaaggttggaagc

SEQ ID NO: 143788 - DNA, 427 bp, Arabidopsis thaliana
atcaatggccgacgttcgcacacactcgcaccatcttcaagtgcaccctcaacgccagcatgaaggaggcatcaaagtcctttatcctcagagtggcccttcttccactcaggtgctagccgtgtttgtcggtgtaccgataggaggaacgctgctgactatagccggtttgacattagccggttcggttataggactaatgctagcattcccgttgtttctcatctttagtccggttattgtaccagcagcctttgtcatcggtctagctatgactggattcctggcttcaggggccataggtctcaccggactatcatccatgtcgtgggtactcaactacatccgccgggccgggcagcatatcccggaggagcttgaggaagcgaagcatcgtttggctgacatggccgagtatgtgggacag

SEQ ID NO: 143789 - DNA, 447 bp, Arabidopsis thaliana
cggggtgagactagtggatgtgagggatcacacttcctccaataattgttcctttgatgagtgtgtcaagctcttcatctcctctgatcgccaactgcaaatgccttggagttatcctcttcacttttaaatctttgctagtgttttcggccaactgaagaacctctgtagttaggtattcaaggattgaagtcatgtagacaacatcagtcgcaccaacactactatgtgcagaaactctgttcttaagttgcttgtgaatacgagccacttgaaactgaaagaaacaaagaaacaatatcagtataaaattttatcaaattatactacaaaaaatgaaatttctttgtttatttcaatttctagtgggtcgtattcacatgcaactcaagactagagtatctacaacatggccgacttggtgctattgttgttgactacacggct

SEQ ID NO: 143790 - DNA, 385 bp, Arabidopsis thaliana
  unsure (1)..(385): unsure at all n locations
cttgagatggagaagctcgcgaccgctggagattcatctgattaagcatcaccgttggatctccggttgcttgatttggtatgtccttattctccgggagttgaggagtttttttaccgtttaatgatgatgataacgaagactggagagttagggtttcgtttggcccttgaactttgtttcaattctcctttgttttgtcgataatgatgatgttcatgaaataagtgttcttttaactgtttagacgcaattgccttcactctctacttcttattacaantctcaaatttggtcaaaaaaaaaggcgaatgtggaccgtgatcggcgtgtgcatgtataccgtactgacaaacgtgttcattagccaaactacgaagatgat

SEQ ID NO: 143791 - DNA, 423 bp, Arabidopsis thaliana
aacaaacaaaaagaaaatggttaagctcagcaatctcctcgttgcaaccttcggggttctcctcgtccttaacggctgccttgcgaggcagtcacttggggttcctcctcagctacagaacgagtgtaacctcgacaacctagatgttctccaagccaccgaaactatcaagagtgaagccggtcagatcgagtactgggaccacaaccaccctcagctccgatgtgttggtgtttccgttgctcgttatgtaattgaacaaggcggtctttacttgcccaccttcttcacttccccaaaaatttcctacgtcgttcaaggaacgggtatcagcggaagagtggtccctggatgtgccgagaccttcatggactcgcagccgatgcaaggacaacaacaaggccaaccatggcaaggacgaca

SEQ ID NO: 143792 - DNA, 417 bp, Arabidopsis thaliana
tttttgtatgttcatcattcaagtctaagctcatggtctgcaaggttaatcaccgcggggaaatcggtttcgcgtacttctaagccggttagagggttaaccgactatagtaccggggtctatttcgttagccaaaccggtccaccagaaatccagtttcccggtggatctccttcggaggaagagttaccttcacgaccaagtagaggaccagagttggctccattagaagttccggagcttcctaatttaccagagataagtccgtcggaaactccaccggaagttacaacggttccaagtgatccacccccgtttggaccaccgcagactccgggcccggagtttccggtttcaccatctccatctccaccgatgccagatactccaaattctcctacaccaaaatcaccacct

SEQ ID NO: 143793 - DNA, 391 bp, Arabidopsis thaliana
cggacgcgtgggacaaagacgacagtgactgttcttagtagcaccgctaaaacagtaagagataatgtcggaagtagagggcgaaaaccgggctatcgtgtgtgacaatggaactggaatgatcaaggcaggatatgctggagaagatgcaccaagtgttgtgtttccaagcactgtgggtcgtccaccacatacgggagggatggtaggaatgaatgagaacgatttatttgtgggagacgacgctgaagccaggagcggtatacttacacttgactacccaatggagcacggggttgttagcaattgggatgacatggagaagatttggtaccattactttttacagggagcttcgtgtggctcctgaagaacaccctgtgctttttac

SEQ ID NO: 143794 - DNA, 420 bp, Arabidopsis thaliana
cacacatagcaaaaaatggcaaacaagttgttcctcgtctgcgcagctctcgctctctgcttcctcctcaccaacgcttccatctaccgcaccgtcgttgagttcgaagaagatgacgccactaaccccataggcccaaaaatgaggaaatgccgcaaggagtttcagaaagaacaacacctaagagcttgccagcaattgatgctccagcaagcaaggcaaggccgtagcgatgagtttgatttcgaagacgacatggagaacccacagggacaacagcaggaacaacagctattccagcagtgctgcaacgagcttcgccaggaagagccagattgtgtttgccccaccttgaaacaagctgccaaggccgttagactccagggacagcaccaaccaatgcaagtcaggaaaatttac

SEQ ID NO: 143795 - DNA, 456 bp, Arabidopsis thaliana
  unsure (1)..(456): unsure at all n locations
gacccacgcgntccgcacatatgcaaaaaatggcaaacacagttgttcgcatgtcttgagcagactctcagctctctggttacgtgctgaccaacagctgtccagtctagccgcagccgaccgttgagtatcgaagacagatgagcgccactacaccccataggcccaaaaatgaggaaatgccgcaaggagtttcagaaagaacaacacctaagagcttgccagcaattgatgctccagcaagcaaggcaaggccgtagcgatgagtttgatttcgaagacgacatggagaacccacagggacaacagcgggaacaacagctattccagcagtgctgcaacgagcttcgccaggaagagccagattgtgtttgccccaccttgaaacaagctgccaaggccgttagactccatggacagcaccaaccaatgcaagtcaggaaaatttaccagaca

SEQ ID NO: 143796 - DNA, 428 bp, Arabidopsis thaliana
ctttcttctttctctaaaatcttctaagaataaccattttctaaagatatcttttaacgagacaacaaacaacagaaaaacacacaaaaacacaaaacttctgtttccctgtttctccggattctctccggctctgagctttcggcttctcctctccggagatgttactctgcttccctcttttgtgttctttttgttttctgggtgaatattgtatgaacctttgactgggatttttccgaagaagaatcccagacgacgtaatttttctccaagctatggctgttgaagagatggagaagaagatcaaaggaagccaagagacggagctacataaaaacgacttatcaatcgaagacccatctccaagatgcgtgcttgaaattccggtaatgagttcagattccgataacagcagcagtagtagg

SEQ ID NO: 143797 - DNA, 427 bp, Arabidopsis thaliana
gttttctctgccgtctctctcattcgcgcgacgctaactatcttcagccatggccaccgccgcagatgttgacgctgagattcagcaggcgctcactaacgaagtcaagctcttcaaccgctggacctatgacgacgttacggtcacagacatcagtcttgttgactacattggagttcaggcagctaaacatgctacctttgttccccacaccgctggaagatactctgtgaagagattcaggaaggctcagtgccccattgttgagaggctcaccaactctctcatgatgcacgggaggaacaacggtaagaaattgatggctgtcaggatcgtcaagcacgccatggagattatccacctcttgtctgacttgaacccaattcaggtcatcattgacgccattgtcaacagtggtccacgtgaa

SEQ ID NO: 143798 - DNA, 428 bp, Arabidopsis thaliana
gtcttatcatcaaacgttacgttctcgttttctcaaattccaaacaataccaagaaacctgtacttgaaaagagaagattatcgccgcgtgtgtgcctaagagcgatggcgtctgagaaacaaaaacaacatgcacaacctggcaaagaacatgtcatggaatcaagcccacaattctctagctcagattaccaaccttccaacaagcttcgtggtaaggtggcgttgataactggtggagactctgggattggtcgagccgtgggatactgttttgcatccgaaggagctactgtggctttcacttacgtgaagggtcaagaagaaaaagatgcacaagagaccctacaaatgttgaaggaggtcaaaacctcggactccaaggaacctatcgccattccaacggatttaggatttgacgaaaactg

SEQ ID NO: 143799 - DNA, 416 bp, Arabidopsis thaliana
aaaacaatatctgtctccagaatataccagaagaaaaataaaaagttctcacagagacgtgtcttctcagcaatctttagtcgccagcgaagtttcgctttctttctcaggaaaaattagcttcacgagaaaatttataatcgaaaaaaaaaagtttaaaggaaagagaaaaaggcctcaaggttagacatttctggacaggaaactgttttctttttcgttaagtgatcttgaccgtccattttggatttggaattttaagatctaacggtggattagtgattatcaggtttagtcggtcagaagaaaactaataaatggataaggttcatgacttctcgcagatataaaggaacaagtataggaaattttctcatgacttttgatacattttaatggatttgtttgggttttta

SEQ ID NO: 143800 - DNA, 422 bp, Arabidopsis thaliana
tagatttgcggtattgccactctctgttctccttctcgttctcttgttcctctgcactgagtcgttggctaagtcggaggagtctgaagaatacgacgtcgctgtgccttcatgttgcgggttttcgtctcctcttctgattaagaaagatcaatggaaaccaatcttcgagacgaagtttggacagatttcaaccgttcaaatcggcaatggatgcggtggaatgggaccttacaagatacattccataacgttggagccaaacacaattttgctccctcttcttcttcattccgacatggtcttcttcgttgactctggaagtgggattctgaattgggttgacgaggaagcgaagagtactgagattagactaggggacgtttacagcctacgtcccggttcggttttctacttacaga

SEQ ID NO: 143801 - DNA, 402 bp, Arabidopsis thaliana
aaaatggttaagctcagcaatctcctcgttgcaactcttcggggttctcctcgtccttaacggctgccttgcgaggcagtcacttggggttcctcctcagctacagaacgagtgtaaccttgacaacctagatgttctccaagccaccgaaactatcaagagtgaagccggtcagatcgagtactgggaccacaaccaccctcagctccgatgtgttggtgtttccgttgctcgttatgtaattgaacaaggcgggctttacttgcccacctttctcacttccccaaaaattttctacgtcgttcaaagaacgggtatcaacggaagagtggtccctggatgtgccgagacctttatggactcgcagtcgatgcaaggacaacaactaggcctaccatggca

SEQ ID NO: 143802 - DNA, 410 bp, Arabidopsis thaliana
caaaatgctccacccggaagtggctgagaggagtctatctgcagcgccaggtgcaccgatagcctcgatgacccgtctcgtgctgacgtgtacaagccacagctcggttacatcagcactctcaacagttacgatctccccatccttcgcttcatccgtctctcagccctccgtggatctatccgtcaaaacgcaatggtgcttccacagtggaacgcacacgcgaacgctattctttacgtgacagacggggaagcccaaatccagatctgaaacgacaatggtaacagagtgtttgacggacaagtttttcaaggacagcttatagtcgtaccacatggtttctcggtggtgaaacgcgcaacaagcaaccgatttcagtgggttgagttcaaaaaaaacgctaacgc

SEQ ID NO: 143803 - DNA, 289 bp, Arabidopsis thaliana
gggcgaccacgcgtccgaaaaagaaaatggttaagctcagcaatctcctttttgtataccttcggggttctcctcgtccttaacggctgccttgcgaggcagtcacttggggttcctcctcagctacagaacgagtgtaacctcgacaacctagatgttctccaagccaccgaaactatcaagagtgaagccggtcagatcgagtactgggaccacaaccaccctcagctccgatgtgttggtgtttccgtagctcgtttgtaattgaacaaggtggtctttacttgtc

SEQ ID NO: 143804 - DNA, 426 bp, Arabidopsis thaliana
aaacaacaagaaaaaatggcaataaccaacaaattaatcataacacttcttctccttatctccatagctgtcgtccactgcttatccttccgtgtggagatcgacgagttcgagccaccacagcaaggagaacaagaaggtccccgtcgccgtcctggtggtggctctggcgagggatgggaggaagagtcgacgaatcatccataccacttcaggaagcggagtttcagtgattggttccagtcaaaggaaggttttgtgagagtgctgcctaagttcacaaaacatgcaccggctctcttccgaggaatcgagaactacagattctcgttggtggagatggagccaacaactttctttgtgcctcaccatttggatgccgatgctgtttttatagtcctacaaggtaaaggagtgatcgagttt

SEQ ID NO: 143805 - DNA, 422 bp, Arabidopsis thaliana
caaaaaactccgactgaaggaggaagagttgaaattgaagcctgttgtttcatttgattgcgctgaaattagggagcgtgattggtgcaatgttgttacttgccatatggatacagcagaagcatatgtatggagacttcagaactttgtacttggagagcatatcctcaaaccatgccctgagaatccaacaccaattaaggcatgtgcaatcagtgcctgtggaaactttgcagtagtcggaacagctggtggatggattgagagattcaacctccaatctggaatcagccggggtagttacttcgatatgtcagagaaaagaaggtacgcccatgatggagaagttattggagttgcttgcgactccacaaacacactcatgattagtgcaagatatcatggggacttaaaggtttggg

SEQ ID NO: 143806 - DNA, 383 bp, Arabidopsis thaliana
acgaacaaacaaaaagaaaatgtgttaagctcacgcgtatcgtagcagagagagacccacaaagtcgttcccttccttaacgggtgtattgcgaggcaggcactatgggttcctactaagctacagaacgagtgtaacctcgacaacctagatgttctccaagccaccgaaactatcaagagtgaagccggtcagatcgagtactgggaccacaaccaccctcagctccgatgtgttggtgtatccagatgctcgttatgtaattgaacaaggcggtctatacttgcccaccttctttactttcccaaaaatttcctacgccgttcaaggaacgggtatcagccgaagagtggttcctggatgtgccgagaccttcatggact

SEQ ID NO: 143807 - DNA, 428 bp, Arabidopsis thaliana
acgaacaaacaaaaagtaaaatggttaagctcacgcgtatgtagagagagagacccacagagtcgatccctcctttaactggagtattggagggagcgaattatcggcgctgataaagcttctacccttgtgttagattttcgtcgtgagattcgattcgatcttaaggcggattaaatcgaggtatgcaccaaggggatcaaacggttctgagcttgagacctggtggcggtcgaggaaacagactatttggttcctcttcttcttcttcgtctctctcttttggctctctttcatcttcggatctacctctccttcgtcctcatggtggtgctcctgcttcctcttttcccttcaagggtggagactcgaggttcgatggccgcgaacgtgtgaagtacacccgtgagcagctccttgagcttaaa

SEQ ID NO: 143808 - DNA, 417 bp, Arabidopsis thaliana
ggtcaacaacgtcgagaataatggcatcatctctttgtgcttcttctgccatcgctgccatttcttctccaagtttcttgggtggtaagaaactgaggctgaagaagaagttgactgttccagctgtgtccaggccagatgcgtcggtgcgcgccgtcgcagctgatccagatagaccaatctggttcccgggaagcactcctccagagtggctagacggtagcctccctggtgacttcggatttgatcctcttggtctttcatcggacccggacagtctaaaatggaacgtacaagccgagatagtccactgccgatgggctatgctaggagccgccgggatattcatcccagagttcctaacgaagatcggaatcctcaacactccgtcatggtacacggcgggagagcaagagt

SEQ ID NO: 143809 - DNA, 432 bp, Arabidopsis thaliana
  unsure (1)..(432): unsure at all n locations
accacgcgtgcgcacctntctctcgccgacgacgctacaaccatggcgtctctcgctctctccggctcctgctctcgtgctttccctctcaaatctcgatctctctctctccctcgtcctccttcttcctctctcaatttgacgaaacctctccgatctctcgattctcgcttctccttactcaaatctccacttcccgtctctttacgccggagatcatcaactctcgttaaagcctcttccaccgtcgcttcagcttcctcttctccaactcctcctttggttccagctccggttccatggcaaggagctgccattaagcctcttctcgcttcgatcgctactggtttgattctatggttcgttccagtccccgaaggtgtcactcgcaacgcgtggcaattactcgcgatcttcctcgccaccatcgtc

SEQ ID NO: 143810 - DNA, 427 bp, Arabidopsis thaliana; identical to SEQ ID NO: 130104

SEQ ID NO: 143811 - DNA, 418 bp, Arabidopsis thaliana
ggcgggattacccgctgagtttaagcatatcaattagctgaggaaaagaaactaacaaggattccgttagtaacggcgagcgaaccgggaagagcccagcttgaaaatcggacgtcttcggcgttcgaattgtagtctggagaagcgtcctcagcgacggaccgggcctaagttccctggaaaggggcgccagagagggtgagagccccgtcgtgcccggaccctgtcgcaccacgaggcgctgtctacgagtcgggttgtttgggaatgcagccccaatcgggcggtaaattccgtccaaggctaaatacgggcgagagaccgatagcgaacaagtaccgcgaggtaaagatgaaaaggactttgaaaagagagtcaaagagtgcttgaaattgtcgggagggaagcggatgggggc

SEQ ID NO: 143812 - DNA, 397 bp, Arabidopsis thaliana
  unsure (1)..(397): unsure at all n locations
aacaaaaagaaaatggttaagctcagcaatctcctcgttgcaaccttcggggttctcctcgtgcttaacggctgccttgcgaggcagtcacttggggttcctcctcagctacagaacgagtgtaacctcgacaacctagatgttctccaagccaccgaaactatcaagagtgaagccggtcagatcgagtactgggaccacaaccaccctcagctccgatgtgttggtgtttccgttgctcgttatgtaattgaacaaggcggtctttacttgcccaccttnttcacttccccaaaaatttcctacgtcgttcaaggaacgggtatcagcggaagagtggtccctggatgtgccgagaccttcatggactcgcagccgatgcaaggacaacaacaag

SEQ ID NO: 143813 - DNA, 418 bp, Arabidopsis thaliana
aaatggttaagctcagcaatctcctcgttgcaaccttcggggttctcctcgtccttaacggctgccttgcgaggcagtcacttggggttcctcctcagctacagaacgagtgtaacctcgacaacctagatgttctccaagccaccgaaactatcaagagtgaagccggtcagatcgagtactgggaccacaaccaccctcagctccgatgtgttggtgtttccgttgctcgttatgtaattgaacaaggcggtctttacttgcccaccttcttcacttccccaaaaatttcctacgtcgttcaaggaacgggtatcagcggaagagtggtccctggatgtgccgagaccttcatggactcgcagccgatgcaaggacaacaacaaggccaaccatggcaaggacgacaggggcaaca

SEQ ID NO: 143814 - DNA, 414 bp, Arabidopsis thaliana
ctacgacgctctctaaacttcttatacaaaacaaaacacacccaaatatgcataagcttttggtttctcttctctccgtcgtctcactctcatttctcctcttcttccatggcgccgaggcacgccagcgagaggcgccgtttccaaacgcctgccatttcagccaaatcaacagcctcgcgcccgctcaggcgacgaagttcgaagccggtcagatggaagtatgggaccacatgagccctgagctccgatgcgccggtgtaacggtggctcgcatcacccttcagcccaattccattttcttgcccgctttctttagcccacctgcccttgcttacgttgtccaaagagaaggagttatggggacgattgcttctggttgtcctgagacttttgcagaagttgaggatcatc

SEQ ID NO: 143815 - DNA, 371 bp, Arabidopsis thaliana
gtcttatcatcaaacgttacgttctcgttttctcaaattccaaacaataccaagaaacctctacttgaaaagagaagattatcgccgcgtgtgtgcctaagagcgatggcgtctgagaaacaaaaacaacatgcacaacctggcaaagaacatgtcatggaatcaagcccacaattctctagctcagattaccaaccttccaacaagcttcgtggtaaggtggcgttgataactggtggagactctgggattggtcgagccgtgggatactgttttgcatccgaaggagctactgtggctttcacttacgtgaagggtcaagaagaaaaagatgcacaagagaccctacaaatgttgaaggaggtcaaaac

SEQ ID NO: 143816 - DNA, 425 bp, Arabidopsis thaliana
ggaagagttattccgggatgcgccgagacgttcatggattcaccggtatttggagaaggtcaaggtgagggtcagagtcaagggttccgtgacatgcaccagaaagtagagcacctacggtgcggtgacaccattgcaacaccatctggtgtagctcaatggttctacaacaatggaaatgagcctctcattcttgttgcagccgcggatctcgccagcaaccagaaccatgcttgaccgcaaccttagaccatttttgatagccggaaacaacccacaagggcaggaatggctacatggccgaaagcaacagaagcaaaacaacatcttcaatggcttcgcacctgagatcttggctcaagcctttaagatcaatgtcgagacggctcagcagctccagaaccagcaagataaccgtggcaaca

SEQ ID NO: 143817 - DNA, 424 bp, Arabidopsis thaliana
ttcattgccagcaggaggcatctcttcgctgcgattaccagtggtagtaactagccatgagtcgagccctgtggctagatgtcgaagagtatatgctcatgctcatgattatcatattaattcaatctcaaataacagcgacggcgaaacatttatttctgctgatgatttgcgaattaatctttggaatctggaaattagcaatcaaagtttcaatattgttgatgtcaagcctgcgaaaatggaagatctatctgaggttatcacatcagcagaatttcatcctacccattgcaatatgttagcctatagcagttcgaaaggttcaattcgcctgattgatctgcgccagtcagctttatgtgattcacattcaaaattgtttgaggaaccagagcaagcaggtcctaaatcgttctttact

SEQ ID NO: 143818 - DNA, 403 bp, Arabidopsis thaliana
cgagaaacgcccctgagagcttacagacttggagattcttgagatgctgatgttgtcgtgcttaagaattatctagatgctcagtactatggtgagatcgccattggtactccacctcagaagttcactgtggtttttgacactgggagctctaacctctgggtgccatcatcaaaatgctatttctcacttgcatgtctcttgcatcccaaatacaagtcgtctcgtttaagcacatatgagaagaatggaaaagctgccgcaattcattacggcactggtgcaattgctggtttttttagtaatgatgccgtcacagttggcgatttagttgtcaaggatcaggagtttatcgaggcaaccaaggagcctggtataacatttggtgaagctaatttgatgg

SEQ ID NO: 143819 - DNA, 397 bp, Arabidopsis thaliana
cgttcggtctacaaagtccatttgcttcttctgatttgcaaaggagcttaaaccttaaggtataatatgagagatagacaaatgtaaagaaaaacacagagagaaaattagtttaattaatctctcaaatatatacaaatattaaaacttcttcttcttcaattacaattctcattctttttttcttgttcttatattgtagttgcaagaaagttaaaagattttgacttttcttgtttcagatttcagcaaatgggatcgattttaagcttcgtctgggttaaaagcttggatcctatctgaagacagaacaaaggttcttgcttttgattcattgcccattttgagaagatgttcgaagggtcgcctcgtgattcttgtctagtttcaacacttt

SEQ ID NO: 143820 - DNA, 419 bp, Arabidopsis thaliana
cggctttggctcggattcgtccgtcttctttcttcttagccgagtacttcggtagattagttggaacgattgatgattttgagttaattgaatgttcggcgtatgagtggtgatcggatagctagtgttcgtaggctccatgctcgcgcatcgaactacctaccacctatccttctcagttaattcacgggcgatgttacgctcgatgatgagttccggggcctgtgtttcgtacctaatttgaaggaattgttgagtttggtttacacctttgcccgcggcttctccttcgtggggaagtcgtgggcacaaacatcggcgcttgttcacctctcgtcatcgcatttgttgccttgctcgcattggtgaatgagttgcgggttgaaatctcggatgcggaaaagttgtcgacggtgact

SEQ ID NO: 143821 - DNA, 424 bp, Arabidopsis thaliana
aaggcttttcacatactggacgagcgatgcttatcaagctacgggctgctacaatctcctttgttcgggtttcatacaaatcaacagtcaaatagcaatgggagcaagtatctctccggtatctggcttccataacccgcaatacgatataagtattaccatttggaaggatccaaaagaagggcactggtggatgcagtttggagacgggtatgtgttgggatactggccaagctttctattctcttacttagcagatagtgcatcaatagtagagtggggtggagaagtagtgaacatggaagaagatggtcaccacacaaccacgcaaatgggaagcggtcaatttccggatgaagggttcacgatagcgagttacttcaggaacattcaagtcgttgatagctctaataatctgaaagaa

SEQ ID NO: 143822 - DNA, 417 bp, Arabidopsis thaliana
gaaatataagaaataacaaaatggctcgagtctcttctcttctttctttcttcttaacacttttgatccttttccatggctacgcggctcaacagggtcagcagggtcagcagtttccgaacgagtgccagctcgaccagctcaatgcgctcgagccgtcacacgtactgaagagcgaggctggtcgcatcgaggtgtgggaccaccacgctcctcagctccgttgctcaggtgtctcctttgcacgttacatcatcgagtctaagggtctctacttgccctctttctttaacaccgcgaagctctctttcgtggctaagggacgaggtcttatgggaaaagtgatccctggatgcgccgaaacattccaagactcatcagagttccaaccacgcttcgaaggtcaaggtcaaagct

SEQ ID NO: 143823 - DNA, 403 bp, Arabidopsis thaliana
cttagacttatctctatatacccccttttaatttgtgtgctcttagcctttactctatagttttatatcatatcaatcgacatggcgaatgtggaccgtgatcggcgtgtgcatgtagaccgtactgacaaacgtgttcatcagccaaactacgaagatgatgtcggttttggtggctatggcggttatggtgctggttctgattataagagtcgcggcccctccactaaccaaatcttggcacttatagcaggagttcccattggtggcacactgctaaccctagctggactcactctagccggttcggtgatcggcttgctagtctccatacccctcttcctcctcttcagtccggtgatagtcccggcggctctcactattgggcttgctgtgacgggaa

SEQ ID NO: 143824 - DNA, 415 bp, Arabidopsis thaliana
caaaaccaaaaccatcagatcttaagaagaagaacctaaagctcactacgatatttttcgagaatatgacgactttttctgttccgattgataacggagattctatgaagatcgcagaagaagaatcacaaagaacactatacccatatgttactggaacttcaattgttgcaatcaagtacaaagatggggttttgatggcttctgatatgggaggttcatatggatcaaccttaagatacaagaacatcgagagagtgaaggctattggtaagcattctcttcttggtgccagcggagaaatcagcgactttcaggagattctccgttatcttgatgagctcaccctgaatgataacatgtgggatgatggtaactctttgggaccaaaagagattcacaactatctgacccg

SEQ ID NO: 143825 - DNA, 409 bp, Arabidopsis thaliana
aaaaagaaaatggttaagctcagcaatctccttgttgcaaccttcggggttctcctcgtccttaacggctgccttgcgagggagtcacttggggttcctcctcagctacagaacgagtgtaacctcgacaacctagatgttctccaagccaccgaaactatcaagagtgaagccggtcagatcgagtactgggaccacaaccaccctcagctccgatgtgttggtgtttccgttgctcgttatgtaattgaacaaggcggtctttacttgcccaccttcttcacttccccaaaaatttcctacgtcgttcaaggaacgggtatcagcggaagagtggtccctggatgtgccgagaccttcatggactcgcagccgatgcaaggacaacaacaaggccaaccatggcaag

SEQ ID NO: 143826 - DNA, 412 bp, Arabidopsis thaliana
agaaaatggttaagctcagcaatctcctcgttgcaaccttcggggttctcctcgtccttaacggctgccttgcgaggcagtcacttggggttcctcctcagctacagaacgagtgtaacctcgacaacctagatgttctccaagccaccgaaactatcaagagtgaagccggtcagatcgagtactgggaccacaaccaccctcagctccgatgtgttggtgtttccgttgctcgttatgtaattgaacaaggcggtctttacttgcccaccttcttcacttccccaaaaatttcctacgtcgttcaaggaacgggtatcagcggaagagtggtccctggatgtgccgagaccttcatggactcgcagccgatgcaaggacaacaacaaggccaaccatggcaaggacgaca

SEQ ID NO: 143827 - DNA, 336 bp, Arabidopsis thaliana
cgtacgtgaaaaatgggtcgagggccatttattattctctttctctttgacactctagaacctcttcaatggctacactgcccgacagtggcccaacgagtgccagctcgatcaactcaatgcgctcgaaccattccaaatgatcaagagcgagggtggtcgcatcgaggtctgggaccaccatgcaccccagctccggtggtcccgctttgcctttgagcgtttcgtcattgagcctcagggtcttttcttgcccactgtgttgaacgccggcaaactcacgtttgttgttcacggaaggggtctaatgggaagagatattgcacgatgccccct

SEQ ID NO: 143828 - DNA, 405 bp, Arabidopsis thaliana
ctagttgaagagtcttctttgccacctgcagcaggcgacgatgagcctatactggtgggacctgatgatattgcaggcgttgcatcggtttggtctggaattccagttcagcagatcactgcagatgaaagaatgcttcttatgagtctagaagatcagcttagaggcagagttgttggtcaagatgaggcggtagctgccatatctagagctgtgaagaggtcccgggttggcttaaaagatcccgaccgtccaattgctgctatgcttttctgtggaccaacaggggttggaaaaacggagcttacaaaagctctggcagcaaattattttggctcggaagaatccatgctgagattggacatgagtgaatacatggagcgtcatactgtgagcaagctgata

SEQ ID NO: 143829 - DNA, 410 bp, Arabidopsis thaliana
caccacattattttcactgagcgcattacatttttgagacaagagactctctctctctctcttctctctttctctgcgccctctctccggcgatggttgttgctatggaccaacgcaccaatgtgaacggagatcccggcgccggagaccggaagaaagaagaaaggtttgatccgagtgcacaaccaccgttcaagatcggagatataagggcggcgattcctaagcactgttgggttaagagtcctttgagatcaatgagttacgtcgtcagagacattatcgccgtcgcggctttggccatcgctgccgtgtatgttgatagctggttcctttggcctctttattgggccgcccaaggaacacttttctgggccatctttgttctcggccacgactgtggacatggg

SEQ ID NO: 143830 - DNA, 405 bp, Arabidopsis thaliana
atggaaagtgaatcacacatgttactatcgcttttgacaagcagatcagccatcgaaccaatggttgtgtacaaagataaataaacctacaacaattatgtaacgtatactcaatattagaatacacattgccaaataaactgcatcaagaattgttccgttaaacattgaatagtagggttaggtggctgtaagtagcaatcacctgcaaaagagctggtctatccttgcttatacagtcaaacaacacttgcagacagaactccttgaattcagaatcagatctggatcaatgaatatgttagaattcgcccttctgagtttgccaagcaaactaccgaactctgttatgacttatggaactaaaagcacaaataaatgtgaatcaaccggataaaacagtac

SEQ ID NO: 143831 - DNA, 411 bp, Arabidopsis thaliana
aacgtatcgtcaaatattcaatttgattctacaagatctagtttcgttcaaggaacggattctagccaattggacggatcttctgatcaattcatagatcctttcgattccattagtaatgaggattcggaatatcactatcacacattgatcaatcaaagagagattcaacaactaaaagaaagatcgattcttttggatccttcctttattcaaacggaaggaagagagatagaatcagaccgattccctaaatacctttctggctattcctcaatgccccggctattcacggaacgtgagaagcgaatgaataatcatctgcttccggaagaaagcgaagaatttcttgggaatcctacaagagccattcgttcttttttctctgacagatggtcagaacttcatctg

SEQ ID NO: 143832 - DNA, 413 bp, Arabidopsis thaliana
cggacgcgtgggctgaaaggaatgctccacgaacctggttgaatgcatttcggtaatgatgatccgtcgttgctccttccaagactcagcatcagcattgaagataccatcctcgagcagatcattgaaccgttctttgaaaaacgcaccttttgggaagttcttgaagttagtcttgagcatgtattcaacgttcgcagggacacaagtcacagctccatacgacccaccaagccagattccgttatagagaaaggtacctcgacattttttcaaacatcttgtagcccaaccataaacatcattcctgtgaaagaagaactctggagtaattccgaacacaggccatatcgttggccccagctttttagtaaccttctcacgcacacaacagaaaacaaacagtcccaaca

SEQ ID NO: 143833 - DNA, 407 bp, Arabidopsis thaliana
atcaataaagaggaagaaaaatgggtcgagtctcatctattatctctttctctttgacactcttgatcctcttcaatggcgacactgcccaacagtggcccaacgagtgccagctcgatcaactcaatgcgctcgaaccatcccaaatcatcaagagcgagggtggtcgcatcgaggtctgggaccaccatgcaccccagctccgttgctccggctttgcctttgagcgtttcgtcattgagcctcagggtcttttcttgcccactttcttgaacgccggcaaactcacgtttgttgttcacggaaggggtctaatgggaagagttattccgggatgcgccgagacgttcatggagtcaccggtatttggagaaggtcaaggtcagggtcagagtcaagggttccgt

SEQ ID NO: 143834 - DNA, 411 bp, Arabidopsis thaliana
gaaaatggttaagctcagcaatctccttgttgcaaccttcggggttctcctcgtccttaacggctgccttgcgaggcagtcacttggggttcctcctcagctacagaacgagtgtaacctcgacaacctagatgttctccaagccaccgaaactatcaagagtgaagccggtcagatcgagtactgggaccacaaccaccctcagctccgatgtgttggtgtttccgttgctcgttatgtaattgaacaaggcggtctttacttgcccaccttcttcacttccccaaaaatttcctacgtcgttcaaggaacgggtatcagcggaagagtggtccctggatgtgccgagaccttcatggactcgcagccgatgcaaggacaacaacaaggccaaccatggcaaggacgaca

SEQ ID NO: 143835 - DNA, 407 bp, Arabidopsis thaliana
aaagaaaatggttaagctcagcaatcttcttgttgcaaccttcggggttctcctcgtccttaacggctgccttgcgaggcagtcacttggggttcctcctcagctacagaacgagtgtaacctcgacaacctagatgttctccaagccaccgaaactatcaagagtgaagccggtcagatcgagtactgggaccacaaccaccctcagctccgatgtgttggtgtttccgttgctcgttatgtaattgaacaaggcggtctttacttgcccaccttcttcacttccccaaaaatttcctacgtcgttcaaggaacgggtatcagcggaagagtggtccctggatgtgccgagaccttcatggactcgcagccgatgcaaggacaacaacaaggccaaccatggcaag

SEQ ID NO: 143836 - DNA, 413 bp, Arabidopsis thaliana
ctctcttcatcgaaaatgtggagactttctgtgtcaattttcctcttctcatgtctcttcgtttcttcgtcttcggtgggcgattcggaggcgacgtgttccggtatagttccgttacggtaccggtacgataagatctcgataaccgactttggaggcgttggagatggtcgaacggtgaatactaaggcgtttagggcggcgatttatcggattcagcatctgaagaggagaggaggcacgcttttgtatatacctccgggagtgtatttgacggagagcttcaatctcactagccatatgactctttacttagctaaaggtgctgtgattagagctgttcaggatacctggaattggccattgattgatcctttgccgtcttatggaagagggagagagttaccaggggg

SEQ ID NO: 143837 - DNA, 398 bp, Arabidopsis thaliana
caacaaacaaaaagaaaatggttaagctcagcaatctcctcgttgcaaccttcgggggtctcctcgtccttaacgggtgccttgcgaggcagtcacttggggttcctcctcagctacagaacgagtgtaacctcgacaacctagatgttctccaagccaccgaaactatcaagagtgaagccggtcagatcgagtactgggaccacaaccaccctcagctccgatgtgttggtgtttccgttgctcgttatgtaattgaacaaggcggtctttacttgcccaccttcttcacttccccaaaaatttcctacgtcgttcaaggaacgggtatcagcggaagagtggtccctggatgtgccgagaccttcatggactctcagcccgtgcaaggacaacaa

SEQ ID NO: 143838 - DNA, 410 bp, Arabidopsis thaliana
cgacaatggtaacagagtgtttgacggacaagtctctcaaggacagctcatagccgtaccacaaggtttctgggtggtgaaacgcgcaacaagcaaccgattccagtgggttgagttcaaaacaaacgctaacgcgcaaatcaacactctggcgggacgaacctcagtcttgagaggtttaccacttgaagtcataaccaatgggttccaaatctcacccgaagaagcaaggagggtcaagttcaacacgctcgagaccactttgactcacagcagtggcccagctagctacggaaggccaagagtggctgcagcttaagagcttaaaaccgcggcttaacaatgaaccgctactgtaaaaggaagttaaatagtacgtagtaattataataatgtacgaaaatgtgaca

SEQ ID NO: 143839 - DNA, 409 bp, Arabidopsis thaliana
agaaaacatacacaaatagcaaaacatggctaacaagctcttcctcgtctgcgcagctctcgccctctgcttgctgggcaccaacgcttccatctaccgcaccgttgtcgaattcgaagaagatgacgccagcaaccccgtaggtccaagacagagatgccagaaggagtttcagcaatcacaacacctaagagcttgccagagatggatgagcaagcaaatgaggcaaggacgtggtggtggtccttccctcgacgatgagttcgatttcgagggcccccagcagggataccagctactccagcagtgctgcaacgagcttcgccaggaagagccagtttgcgtttgccccaccttgaaacaagctgccagggcagttagcctccagggacagcacggaccattccaa

SEQ ID NO: 143840 - DNA, 411 bp, Arabidopsis thaliana
tggtattatcgtctcctttgattgaaatgcctttaactaagttctctggtctcattgtatgttcgttttggaaacagaagcgcttctgatggacaggaacacttggttgatgatgttggagctggttttatacctggacatggtagtcagcagccatcttcttcagaacataatgtggatcgaacaattgactcgccaggccaggaagaaaccggaatgactggtgtttctaaagtaatcagagctgaccagaaacggttcttctttgatcttgggaacaataacaggggccatttcttaaggatatctgaggtaatcttggaagaacaatcttttgctggcttatctcttgagagcttgtatttaccatggttttaacattaaagcatttctcaatataggtggcaggtt

SEQ ID NO: 143841 - DNA, 391 bp, Arabidopsis thaliana
aaaaagaaaatggttaagctcagcaatctcctcgttgcaaccttcggggttctccgggtccttaacggctgccttgggaggcagtcacttggggttcctcctcagctacagaacgagtgtaacctcgacaacctagatgttctccaagccaccgaaactatcaagagtgaagccggtcagatcgagtactgggaccacaaccaccctcagctccgatgtgttggtgtttccgttgctcgttatgtaattgaacaaggcggtctttacttgcccaccttcttcacttccccaaaaatttcctacgtcgttcaaggaacgggtatcagcggaagagtggtccctggatgtgccgagaccttcatggactcgcagccgatgcaaggacaacaac

SEQ ID NO: 143842 - DNA, 412 bp, Arabidopsis thaliana
ctatcgccaccggaagaagcttcttattaccaccgtcataccaaaagatacaacaggtcctcttcttcaaccgccagcggaatcatcgaatcatcggtttccgatttcgtcaaacgtcccaaaatctctcatccgaattacatatcaagttccgagatcgaatcagagttttctcatcacgatccagatttcgcaagaatcaacaacggtagttttggttgttgtccgtcatcaatcctagctttacaacgagattggcagctccggttccttcgtcaaccggatcgattctatttcgacgaactcaaaccaaaaatctccgattctagatctgtaatcaaacggttaataaacgccgagcatgacgatgaagtctcgatcgtcgataacgcaacaaccgcagcagcaatcg

SEQ ID NO: 143843 - DNA, 413 bp, Arabidopsis thaliana
ttttagggttttttttttcttatcacttttctctcttctcaatttccccaaatgggataaattcctccgaagggtgtagatttcactctcccccgaactatacaaaattccctcaaaaggaaaaactaaaaagccgatcttggcttttttgtttctgagtgcatctcgatacttggaagcattctttggtgaggctgattcattctcatctgtgaaagtctttggcttttgaagcaatactatggaaggaattcagcatcctatacctcgcactgtcgaagaggtttttagcgactttcgtggtcgtagagctggtctcatcaaggctctctctactgatgtacagaagttttaccatcagtgtgaccctgagaaggaaaacttgtgtctttatggacttccaaatgagacat

SEQ ID NO: 143844 - DNA, 409 bp, Arabidopsis thaliana
aagaaaatggttaagctcagcaatcttctcgttgcaaccttcggggttctcctcgtccttaacggctgccttgcgaggcagtcacttggggttcctcctcagctacagaacgagtgtaacctcgacaacctagatgttctccaagccaccgaaactatcaagagtgaagccggtcagatcgagtactgggaccacaaccaccctcagctccgatgtgttggtgtttccgttgctcgttatgtaattgaacaaggcggtctttacttgcccaccttcttcacttccccaaaaatttcctacgtcgttcaaggaacgggtatcagcggaagagtggtccctggatgtgccgagaccttcatggactcgcagccgatgcaaggacaacaacaaggccaaccatggcaaggac

SEQ ID NO: 143845 - DNA, 409 bp, Arabidopsis thaliana
cggacgcgtgggtggctatatcgctttccaatcgattgcttatgaatgtttcattaggtggctctaaatgataagaaactatttttcgtgcttttgcctctttactccatcgatttagaatgtaggtagatgggattcttctaacattcttcttgtctaacattttcaatgcataaagacataaaatcccggcaaatctaaacttcatgcaactataacatatcgactcgtttacagcatcataattaaccaaatgctcccatgctacaccacagtaagatactttatattcatataccatctcagacttactaaccttgttggcaacataatcaccaataactatgtattgtttctggaacaagttaaattttttgggtgtattcatttcctctgcatgttgcaacat

SEQ ID NO: 143846 - DNA, 415 bp, Arabidopsis thaliana
aaacaaccagcagggaggctttggctttttttatgcaacaacaagaacagaaaaacttgtggagcgggttcgacgcacaggggatagctcaagcattgaaaattgacgttcagttggctcagcagcttcagaaccaacaagacagcagaggaaacatcgttcgtgttaagggacctttccaggtcgtgaggccacctctaagacagccctaccagagcgaggagtggagacacccacgtagcccacagggcaacggccttgaggagactatctgcagcatgaggtcccacgagaacattgacgaccctgctcgtgctgacttgtacaagcccagcctaggtcgcgtgaccagcgtcaacagctataccttgcccatcttggagtatgtcaggctcaatgccactcgtggcgttct

SEQ ID NO: 143847 - DNA, 415 bp, Arabidopsis thaliana
  unsure (1)..(415): unsure at all n locations
ttccaattttgatttatcaaagaaaactcctttgtgagagattatttatgtactcttggtgcanagaggataatccaatgccgagttttctgagtcgtaatttagagagaatccaattcgatggatttagatatgaacggaggaaacaagagagtctttcaaagactgggcggtggctctaatcggccgacgacggactcaaatcagaaggtttgtttccactggcgagctggccggtgcaatcgttacccatgcccttacctgcatagagaattgccgggtccgggttcgggtccagtagcagcttcttcaaataaaagggtcgctgatgaatctgggtttgcgggtccgagtcaccggagagggcctgggttcagcgggactgctaataactggggaagattttgtgggaaca

SEQ ID NO: 143848 - DNA, 462 bp, Arabidopsis thaliana
  unsure (1)..(462): unsure at all n locations
ccggggcgacgccacgcccgtccgagtaggatagaaaaatgtgttcgaggtctctatctatttatctgctttctcttttgacacctcttgggtcgctcttcaatgagctacaggtgcgccaacagntggctccaaccgagtgccagcttcgattcaactcaatgcgcgtcgaacccattccaaatcatcaagagcgagggtggtcgcatcgaggtctgggaccaccatgcaccccagctccgttgctccggctttgcctttgagcgtttcgtcattgagcctcagggtcttttcttgcccactttcttgaacgccggcaaactcacgtttgttgttcacggaaggggtctaatgggaagagttattccgggatgcgccgagacgttcatggagtcaccggtatttggagaaggtcaaggtcagggtcagagtcaagggttccgtgacatgcaccagaaagta

SEQ ID NO: 143849 - DNA, 407 bp, Arabidopsis thaliana
cttgaaaacgttaaatgatctttttcttctatcattaatctcttttaatctttctgggtctcttcttgaaaagatggcggccgataacggaaatgctactaacggtgacggaggttttagtttccctaaaggaccggtgatgccgaagataacgacctgagcagcaaagagaggtagcgtagtctgccacgactatagtggtccgactgtgaatgccacaaccatcgatgagcttcattcgttacataagaaacgttctgcttctaccacacctatcaaccaaaacgccgccgctgcttttgccgccgtctccgaggaggagcgtcagaagattcagcttcaatctatcagtgcatcgttagcatcgttaacgagagagtcaggaccaaaggtggtgagaggagatc

SEQ ID NO: 143850 - DNA, 408 bp, Arabidopsis thaliana
caagtaattaactaacaacaaatggcttacaagctcttcctcgtctgcgcagctctcgccctgtgtttcatcctcagcaacgcttccgtctatcgcacggttgtcgagttcgacgaagatgacgccagtaaccccataggcccaatacagaaatgtcagaaggagtttcagcaagaacagcacctaagagcttgccagagatggatgcgcaagcaaatgtggcaaggacgtggtggtggtccttccctcgacgatgagttcgatatggaagacgacatcgagaacccgcagagacgacagctactccagaagtgctgcagcgagcttcgccaagaagagccagtttgcgtttgccccaccttgagacaagctgccaaggccgttagattccagggacagcaacaccaa

SEQ ID NO: 143851 - DNA, 414 bp, Arabidopsis thaliana
cggacgcgtgggcaacaaacaaaaagaaaatggttaagctcagcaatctcctcgttgcaaccttcggggttctcctcgtccttaacggctgccttgcgaggcagtcacttggggttcctcctcagctacagaacgagtgtaacctcgacaacctagatgttctccaagccaccgaaactatcaagagtgaagccggtcagatcgagtactgggaccacaaccaccctcagctccgatgtgttggtgtttccgttgctcgttatgtaattgaacaaggcggtctttacttgcccaccttcttcacttccccaaaaatttcctacgtcgttcaaggaacgggtatcagcggaagagtggtccctggatgtgccgagaccttcatggactcgcagccgatgcaaggacaacaacaag

SEQ ID NO: 143852 - DNA, 417 bp, Arabidopsis thaliana
cgcagaagttgaacataagtgaagcttacaatggcgaggattaaggttcacgaagggagggataagtcgaagagcggtcttcaaaaccagctgaaggaactcaaagctgagctcgctctcctccgtgtcgctaaagtcaccggaggtgctccaaacaagctctctaaaatcaaggtcgtgcgtaaatccatagctcaggttttgacagtgtcttctcagaagcagaagtctgctctaagagaagcatacaagaacaagaagttgcttcctcttgatctccgtcccaagaagacccgtgctattcgtagacgcctcaccaaacaccaggcctcgttgaagacagagcgtgagaagaagaaggagatgtatttcccaataaggaagtacgctatcaaagtttaagttttagctgctaga

SEQ ID NO: 143853 - DNA, 407 bp, Arabidopsis thaliana
cctaggaggtaacagcttaagctctcctattaccccaaactgcaaaatttctcatctttctctctctttatcttgttttcaacagcagcctttacctttttcttttaacctctgatcttgttatcttccatggatccatttccttaaaggttttggtaatatgaattgagaagtccacgcacgtgtgtatctctattaccgtcagattttggtttaaaagcagttatttttactagtcttgtaagaatgagtttaacaaagaaagcaagtgaaccaaagctaagtggtactagtatcaagccaacaactttaaaccctcatgctgctgagtttgttccgtttactctacgttctccttcatctggaggtacaagtactttggatacaagacttttagcttcttctag

SEQ ID NO: 143854 - DNA, 407 bp, Arabidopsis thaliana
cggacgcgtgggcggacgcgtgggggcccatttccgccgcacacaccactcgttaaccgccgtaacatcaacaaccaccggcctcgtaacgcaaccgtcacctccgctttacctgatattttcctcgcggcggtctctctccttttcctctggtcatctcctaaacctctagtctctcttcctccgaacagattctctttccctctaaatcctcgccgtcgatccatcaccgccatgtctcgccgatctcctcctcctcctcctcctactcaacgcttcgctaatcctcaatctctctccgattggctcgaatcgcgattaccttccgattcattcgccgcttggggagtcaaaccgggaaccaaaaacgttcataacctctggctagaactctccgacggcgaaac

SEQ ID NO: 143855 - DNA, 409 bp, Arabidopsis thaliana
ataaaaatggctcgagtctcttctcttctttctttctccttaacacttttgatccttttccatggctacgcggctcaacagggtcagcagggtcagcagtttccgaacgagtgccagctcgaccagctcaatgcgctcgagccttcacacgtactgaagagcgaggctggtcgcatcgaggtgtgggaccaccacgctcctcagctccgttgctcaggtgtctcctttgcacgttacatcatcgagtctaagggtctctacttgccctctttctttaacaccgcgaagctctccttcgtggctaaaggacgaggtcttatgggaaaagtgatccctggatgcgccgaaacattccaagactcatcagagttccaaccacgcttcgaaggtcaaggtcaaagccagaggt

SEQ ID NO: 143856 - DNA, 418 bp, Arabidopsis thaliana
aaaagaaaatggttaagctcagcaatctcctctttgcaaccttcggggttctcctcgtcgttaacggctgccttgcgagggagtcacttggggttcctcctcagctacagaacgagtgtaacctcgacaacctagatgttctccaagccaccgaaactatcaagagtgaagccggtcagatcgagtactgggaccacaaccaccctcagctccgatgtgttggtgtttccgttgctcgttatgtaattgaacaaggcggtctttacttgcccaccttcttcacttccccaaaaatttcctacgtcgttcaaggaacgggtatcagcggaagagtggtccctggatgtgccgagaccttcatggactcgcagccgatgcaaggacaacaacaaggccaaccatggcaaggacgacaggg

SEQ ID NO: 143857 - DNA, 399 bp, Arabidopsis thaliana
gttccgtgacatgcaccagaaagtggttcacattaggagcggtgataccattgccacaacacccggtgtagcccaggggttctacaacgacggacagcaaccacttgtcatcgtcagcatcttcgatctagccagtcaccagaaccagcttgaccgcaacccaaggccattttacttagccggaaacaacccacaaggtcaagtatggctacaaggacgagagcaacagccacagaagaacatcttcaatggatttggacccgaggttattgctcaagctttgaagattgatcttcagacagcgcagcaacttcagaaccaagatgacaaccgtggaaacattgttcgagtccaaggcccgttcggtgtcattaggccgcctttgaggggccagagacc

SEQ ID NO: 143858 - DNA, 404 bp, Arabidopsis thaliana
cgaaaatatcagatctaaagaagagcgtcttcataaacgcccttcgtcttcttccctgcaaatctattttctagatctttctttcttccgcgaaacgacaatgagagagtgcatttcgatccacattggtcaggctggtattcaagtcggaaatgcttgctgggagctttactgtcttgaacatggcattcagcctgatggccagatgcctggtgacaagactgttggtggaggtgatgatgctttcaacaccttcttcagtgaaaccggtgcaggtaagcacgtcccacgtgctgtctttgttgatcttgagccaactgtgatcgacgaggtcaggactggtacttaccgtcagcttttccaccctgaacaactcatcagtggtaaagaagacgctgctaaca

SEQ ID NO: 143859 - DNA, 406 bp, Arabidopsis thaliana
gtttttcgcctctttctcaactctcttctcgaaaacctagcagtcgtctctttctcagttctccatgggaaagtctaaatccgccaccaaagttgttgcagagattaaggccactaagcctttgaagaaaggcaagagagagcctgaagatgatattgacaccaaagtgagtcttaagaagcagaagaaagacgtgattgctgctgtccagaaggaaaaagctgtgaagaaggttcctaagaaggttgagagctctgatgattcagattctgaatctgaggaagaggagaaggctaagaaagtcccagccaagaaggctgcttcaagcagtgatgagtcatctgatgactcttcttcagatgatgaacctgcacccaagaaggccgttgctgctactaacggaact

SEQ ID NO: 143860 - DNA, 408 bp, Arabidopsis thaliana
ctctctcctcaaaaactcaaaagagctaaaaaaagagaagaagaatcaaaatcccacacaatggcaacacactcttccttcaccgcaacaacacctctctttctcatcgttcttctatccctatcctccgtctcagttctcggcgcatctcaccaccacgcaacggcgccggctccgtctgtagactgttcgactctcatactcaacatggctgactgtttatccttcgtttcgagcggaggcacggtggcgaaaccggaaggtacatgttgctctggtcttaagacggtgcttaaagctgactctcagtgtctatgtgaagcgtttaagagcagtgcttctcttggagttactttgaatatcactaaggcttctactcttcccgccgcatgcaagcttcacgctcct

SEQ ID NO: 143861 - DNA, 392 bp, Arabidopsis thaliana
cccccttttaatttgtgtgctcttagcctttactctatagttttatatcatatcaatcgacatggcgaatgtggaccgtgatcggcgtgtgcatgtagaccgtactgacaaacgtgttcatcagccaaactacgaagatgatgtcggttttggtggctatggcggttatggtgctggttctgattataagagtcgcggcccctccactaaccaaatcttggcacttatagcaggagttcccattggtggcacactgctaaccctagctggactcactctagccggttcggtgatcggcttgctagtctccatacccctcttcctcctcttcagtccggtgatagtcccggcggctctcactattgggcttgctgtgacgggaatcttggctt

SEQ ID NO: 143862 - DNA, 380 bp, Arabidopsis thaliana
  unsure (1)..(380): unsure at all n locations
ngagaaaaatgggtcgaggcccatctattatctctttctctttgacactcttgatcctcttcaatggctacactgcccaacagtggcccaacgagtgccagctcgatcaactcaatgcgctcgaaccatcccaaatcatcaagagcgagggtggtcgcatcgaggtctgggaccaccatgcaccccagctccgttgctccggctttgcctttgagcgtttcgtcattgagcctcagggtcttttcttgcccactttcttgaacgccggcaaactcacgttttgttgttcacggaaggggtctaatgggaagagttattccgggatgcgccgagacgttcatggggtcaccggtttttggagaaggtcaaggtcagggtca

SEQ ID NO: 143863 - DNA, 409 bp, Arabidopsis thaliana
agcgttataagctctcactagcatgcttgtactagcaacaatggcctcaagcactgctactatgctcaaagggtcacccgtgaaatctgcttgggttaagggacagagtctactgctccgtcaaccttcctctgtctcagctattcgagccacgtggcaccttccgctctcaccgtgcgcgccgcttctgcttacgccgatgagctcgtcaaaaccgctaaaacaatcgcgtctccgggacacggaattatggcgatggctgagtccaacgcgacttgtgggaagcgtttggcgtcaattgggctagagaacacggaggctaaccgtcaagcttacaggacgttgcttgtgtcggctccaggacttggacaggacatctgcggagctatcctgttcgaggagactctgt

SEQ ID NO: 143864 - DNA, 407 bp, Arabidopsis thaliana
cgtctctctatctcctccttcctatattcccttgctctctgggtttttgctcagtgtgctacgtgagagatagagagatggaaggtctgattcaaaccagaggaattctctctttacccgcgaagcccatcggagtgagaaggcttctccaaccctcacatggcttaaagcaaagacttttcaccacaaacttacctgccttgtccttatcctctaatggtcacaagaaatttcaagcctttcagcaaatcccacttgggatttcggtttcccacaaggagagaagcagaggattcatctgcaaggcggaagctgcggcggccggaggcggaaatgtgttcgacgaaggagacacagcggcgatggcggtgtcgcctaagattttcggtgtggaggttacgactctg

SEQ ID NO: 143865 - DNA, 411 bp, Arabidopsis thaliana
gctcgaaccatcccaaatcatcaagagcgagggtggtcgcatcgaggtctgggaccaccatgcaccccagctccgttgctgcggctttgcctttgagcgtttcgtcattgagcctcagggtcttttcttgcccactttcttgaacgccggcaaactcacgtttgttgttcacggaaggggtctaatgggaagagttattccgggatgcgccgagacgttcatggagtcaccggtatttggagaaggtcaaggtcagggtcagagtcaagggttccgtgacatgcaccagaaagtagagcacctacggtgcggtgacaccattgcaacaccatctggtgtagctcaatggttctacaacaatggaaatgagcctttcattcttgttgcagccgcggatctcgccagcaacca

SEQ ID NO: 143866 - DNA, 418 bp, Arabidopsis thaliana
aagaaaacatacacaaatagcaaaacatggctaacaagctcttcctcgtctgcgcaactctcgccctctgcttcctcctcaccaacgcttccatctaccgcaccgttgtcgaattcgaagaagatgacgccagcaaccccgtaggtccaagacagagatgccagaaggagtttcagcaatcacaacacctaagagcttgccagagatggatgagcaagcaaatgaggcaaggacgtggtggtggtccttccctcgacgatgagttcgatttcgagggcccccagcagggataccagctactccagcagtgctgcaacgagcttcgccaggaagagccagtttgcgtttgccccaccttgaaacaagctgccagggcagttagcctccagggacagcacggaccattccaatccaggaa

SEQ ID NO: 143867 - DNA, 314 bp, Arabidopsis thaliana
gttccttagttagagtataggcgagtaacgggtctgatccaaccacaatacgcctgtaatatcaagcacatggcacagattataaggactgattttggagagcagaaagcaaacttggtcaccaaataacgacagagacggtattttatacaagttgatgagagatcaagacaatctatcgctgaaaaaagccaacttaccagtctccgtctactgcttttagaatccttgtcaaccctttcaattgactgatcatataggcattcactgctccaccaagcacttccttcagtttcaattaatcatacataatg

SEQ ID NO: 143868 - DNA, 408 bp, Arabidopsis thaliana
aagaaaacatacacaaatagcaaaacatggctaacaagctcttcctcgtctgcgcaactctcgccctctgcttcctcctcaccaacgcttccatctaccgcaccgttgtcgaattcgaagaagatgacgccagcaaccccgtaggtccaagacagagatgccagaaggagtttcagcaatcacaacacctaagagcttgccagagatggatgagcaagcaaatgaggcaaggacgtggtggtggtccttccctcgacgatgagttcgatttcgagggcccccagcagggataccagctactccagcagtgctgcaacgagcttcgccaggaagagccagtttgcgtttgccccaccttgaaacaagctgccagggcagttagcctccagggacagcacggaccattcc

SEQ ID NO: 143869 - DNA, 335 bp, Arabidopsis thaliana
aagaggaagaaaaatgggtcgagtctcatctattatctctttctctttgacactcttgatcctcttcaatggctacactgcccaacagtggcccaacgagtgccagctcgatcaactcaatgcgctcgaaccatcccaaatcatcaagagcgagggtggtcgcatcgaggtctgggaccaccatgcaccccagctccgttgctccggctttgcctttgagcgtttcgacattgagcctcatggtcttttcttgcccactttcttgaacgccggcaaactcacgtttgttgttcacggaaggggtctaatgggaagagttattccggtatgcgcct

SEQ ID NO: 143870 - DNA, 409 bp, Arabidopsis thaliana
cggacacgtgggcgaaaagctttaccaaaatctcacgcccccgacgattcatcgggatttgagtttgcactaaacccacagtggtttcctatcgtgctaccacagagacgatttccctggctttagaagccaacagctcggaggctattacgatactgtaccaggttttggaagacccttcttcatctcctgaggctatacggatcaaggagcaagcgattacaaacctttgtgatcgattgactgaagagaagagaggtgaggatctccggaaactgttgaccaagttgaggcctttcttttccttaatccccaaggcgaaaactgcgaaaatcgtcagaggaatcattgatgctgtggcaaagattcctggaacaactgatctccagatcactctctgcaaagagat

SEQ ID NO: 143871 - DNA, 417 bp, Arabidopsis thaliana
aaaacatacacacatagcaaaaaatggtaaacaagttgttcctcgtctgcgcagctctcgctctctgcttcgggcggaccaacgcttccatctaccgcaccgtcgttgagttcgaagaagatgacgccactaaccccataggcccaaaaatgaggaaatgccgcaaggagtttcagaaagaacaacacctaagagcttgccagcaattgatgctccagcaagcaaggcaaggccgtagcgatgagtttgatttcgaagacgacatggagaacccacagggacaacagcaggaacaacagctattccagcagtgctgcaacgagcttcgccaggaagagccagattgtgtttgccccaccttgaaacaagctgccaaggccgttagactccagggacagcaccaaccaatgcaagtca

SEQ ID NO: 143872 - DNA, 389 bp, Arabidopsis thaliana
gtgaaggacagggacagcagttacattttgggttccgtgacatgcaccagagggtggaacatgtgagacgcggagaggtcttttccaacactccaggctctgcccactggatctacaactcaggagaacagccacttgtcatcatcgctcttctcgacatcgccaactaccaaaaccaactcgaccgcaaccctagagtgttccatttggccggaaacaaccagcagggaggctttggcggttcacagcaacaacaagaacagaaaaacttgtggagcggtttcgacgcacaggtcatagctcaagcattgaaaattgacgttcagttggctcagcagctttagaaccaacaagacagcagaggaaacattgttcgtgttaaaggacct

SEQ ID NO: 143873 - DNA, 298 bp, Arabidopsis thaliana
ggaatatttttaaaatattataaaactaaatttttaaaagaaaagaaaaaaaagtatacacttatacgtataattttaaacaagtagtactactgtacaacttatatacaagtcctaaaacttagtaaattatatttatatcgttaaatttggcttattaatattaaggcatataactgaacatagcacgagtatgactttcttgtatacaataaacagaactatacaatatatatgtcctatgtgactacgtgtgattacaaaatgcagtgatatagcctataggtaatttgccccc

SEQ ID NO: 143874 - DNA, 408 bp, Arabidopsis thaliana
ggaatgactactacggtggagagtcatcttctcttaatctcaatcagctgtggaagaagtgcaggggagaagagaaggcgcctgctcatttaggttctagcagagactacaatgttgacatgatgccaaagtttatgatggctaacggaaagcttgttcgtgtccttattcatacggatgtgaccaagtacttgtcttttaaagctgttgatggaagctatgtttttgtccaaggcaaggtccaaaaagtgccagcaactcccatggaggccctcaaatctcctcttatgggtatttttgagaaacgtcgagctggaaagtttttcagctatgttcaagaatacgacgagaaggacccaaaaacacatgatggaatggatttgaggagagttacaactaatgatttga

SEQ ID NO: 143875 - DNA, 417 bp, Arabidopsis thaliana
caaaagcttaacactcagtcgactcgtgcgctactcatcccgagtcgccggaatcgtcgcgaagatccgtttcgggggcgaaggagtcgatagatccgatctcaaacccgtttacaacgaagatacacgataccaaaccgaggatctaacgacacctgtcgtctccggagcctctcaaggaagcggcgagtatttctcaagaatcggtgtcggaactccggcgaaagagatgtacttggttctcgacaccggaagcgacgtaaattggatccagtgtgaaccttgcgccgactgttaccaacagtccgacccggtttttaacccgacttcgtcttccacatacaaatctctcacttgctctgctccacagtgctctcttctcgaaacctccgcttgtcggtcaaacaaatgtctcta

SEQ ID NO: 143876 - DNA, 410 bp, Arabidopsis thaliana
caacaaacaaaaagaaaatggttaagctcagttatctcctcgttgcaaccttcggggttctgctcgtccttaacggggggcgtgcgaggcagtcacttggggttcctcctcagctacagaacgagtgtaacctcgacaacctagatgttctccaagccaccgaaactatcaagagtgaagccggtcagatcgagtactgggaccacaaccaccctcagctccgatgtgttggtgtttccgttgctcgttatgtaattgaacaaggcggtctttacttgcccaccttcttcacttccccaaaaatttcctacgtcgttcaaggaacgggtatcagcggaagagtggtccctggatgtgccgagaccttcatggactcgcagccgatgcatggacaacaacaaggccaacca

SEQ ID NO: 143877 - DNA, 413 bp, Arabidopsis thaliana
aagctcttatcttcttcatcttctccaatgtcgagaggaccaggtcgtttaatacagaacgtgacacagttcgctgatgctcaattcaaacaattctctactcgttatggacaacaagttatagacattctcgattttccaatcaagctcgtcttgtctcctttcactctcgcctttgatatcgctggctctgcacctcgtggttttggcatccctgagttcatctccaaaatttcgtatctctctgtttttgcggttgctacgcttggaacttatgacattgcattggatttgggaaagaaagtcatatgccaaagggattgcaaaacttgtaatgggtggcaggcattacggtgcactatgtgcaaaggaacagggagtgttcattaccaaatcaaagattacaacttgag

SEQ ID NO: 143878 - DNA, 405 bp, Arabidopsis thaliana
gcctcagccgccgcacgacctcttgttaccgtccaaggacttgacggtgacatgagcaccgatcaatccaccaccgggactttaccagacgtcatgactgctccagttcgacctgacattgtcaacttcgtccacgcccaaatctccaacaacagccgtcagccttacgcagtctccaaaaaggccggtcaccaaacctccgccgagtcctggggaaccggaagagccgtgtcacgtatccctcgtgttcctggtggtggaactcaccgtgccggtcaagcagcgttcggaaacatgtgtcgtggtggtcgtatgtttgctccgactaagatctggagacgctggcaccgtcgtgtcaatgtcaacatgaagaggcacgcgattgtttctgcaatcgctgctact

SEQ ID NO: 143879 - DNA, 400 bp, Arabidopsis thaliana
cttaagctttatttctccgttttcgttttgtctttctttatcgtcttggtttcgtcgtctgatgtcaacgacggcgatgatctcgtgatccgtcaggtggttggtggagccgagcctcaggttttgacctcagaggatcacttttctctcttcaagcggaagttcgggaaggtctacgcttccaacgaggagcatgactatagattctcggttttcaaagcgaatctcaggcgagcgaggcgtcaccagaagttggatccgtcggcgactcatggtgttacgcagttctcagatctgactcggtctgagttccgtaagaagcacttgggggttagaagtggctttaagcttcctaaagatgccaacaaggcttccgtttcttcctaccgaaaaattttcc

SEQ ID NO: 143880 - DNA, 408 bp, Arabidopsis thaliana
agaaaaatgggtcgagtctcatctattatctctttctctttgacactcttgatcctgttcaatggctacactggcgggcagtggcccaacgagtgccagctcgatcaactcaatgcgctcgaaccatcccaaatcatcaagagcgagggtggtcgcatcgaggtctgggaccaccatgcaccccagctccgttgctccggctttgcctttgagcgtttcgtcattgagcctcagggtcttttcttgcccactttcttgaacgccggcaaactcacgtttgttgttcacggaaggggtctaatgggaagagttattccgggatgcgccgagacgttcatggagtcaccggtatttggagaaagtcaaggtcagggtcagagtcaagggttccgtgacatgcaccagaaa

SEQ ID NO: 143881 - DNA, 409 bp, Arabidopsis thaliana
caaaaagaaaatggttaagctcagcattcttctcgttgcaaccttcggggttctcctcggccttaacggctgccttgcgaggcagtcacttggggttcctcctcagctacagaacgagtgtaacctcgacaacctagatgttctccaagccaccgaaactatcaagagtgaagccggtcagatcgagtactgggaccacaaccaccctcagctccgatgtgttggtgtttccgttgctcgttatgtaattgaacaaggcggtctttacttgcccaccttcttcacttccccaaaaatttcctacgtcgttcaaggaacgggtatcagcggaagagtggtccctggatgtgccgagaccttcatggactcgcagcccatgcaaggacaacaacaaggccaaccatggcaa

SEQ ID NO: 143882 - DNA, 238 bp, Arabidopsis thaliana
aaaatggctcgagactctcctcttctttctttctccttaacacttttgatccttttgcatggctacgcggctcagcgagggtcagcagggtcagcagtttccgaacgagtgccagctcgaccagctcaatgcgctcgagccttcacacgtactgaagagcgaggctggtcgcatcgaggtgtgggaccaccacgctcctcagctccggtgctcatgtgtctcctttgcacgttacatc

SEQ ID NO: 143883 - DNA, 414 bp, Arabidopsis thaliana
aatggctcgagtctcttctcttctttctttcttcttaacacttttgatccttttccatggctacgcggctcaacagggtcagcagggtcagcagtttccgaacgagtgccagctcgaccagctcaatgcgctcgagccgtcacacgtactgaagagcgaggctggtcgcatcgaggtgtgggaccaccacgctcctcagctccgttgctcaggtgtctcctttgcacgttacatcatcgagtctaagggtctctacttgccctctttctttaacaccgcgaagctctctttcgtggctaagggacgaggtcttatgggaaaagtgatccctggatgcgccgaaacattccaagactcatcagagttccaaccacgcttcgaaggtcaaggtcaaagccagaggttccgtgacat

SEQ ID NO: 143884 - DNA, 412 bp, Arabidopsis thaliana
ataggcccaatacagaaatgtcagaatgagtttcagcaagaacagcacctaagagcttgccagagatggatgcgcaagcaaatgtggcaaggacgtggtggtggtccttccctcgacgatgagttcgatatggaagacgacatcgagaacccgcagagacgacagctactccagaagtgctgcagcgagcttcgccaagaagagccagtttgcgtttgccccaccttgagacaagctgccaaggccgttagattccagggacagcaacaccaaccagagcaagtcaggaaaatttaccaggcagctaagtacttgcctaacatttgcaaaatccagcaagttggtgtttgccccttccagatcccttcaatcccttcttactactaaattccaaacaagtgtgagcgtgtgg

SEQ ID NO: 143885 - DNA, 415 bp, Arabidopsis thaliana
ctgcgcagctctcgctctctgcttccttctcaccaacgcttccatctaccgcaccgtcgttgagttcgaagaagatgacgccactaaccccataggcccaaaaatgaggaaatgccgcaaggagtttcagaaagaacaacacctaagagcttgccagcaattgatgctccagcaagcaaggcaaggccgtagcgatgagtttgatttcgaagacgacatggagaacccacagggacaacagcaggaacaacagctattccagcagtgctgcaacgagcttcgccaggaagagccagattgtgtttgccccaccttgaaacaagctgccaaggccgttagactccagggacagcaccaaccaatgcaagtcaggaaaatttaccagacagccaagcacttgcccaacgtttgcgac

SEQ ID NO: 143886 - DNA, 414 bp, Arabidopsis thaliana
gcgtcttcgatctagccagtcaccagtaccatcttgaccgcaacccaaggccattttacgtagccggaaacaacccacaaggtcaagtatggctacaaggccgagagcaacagccacagaagaacattttcaatggatttggacccgaggttattgctcaagctttgaagatcgatcttcagacagcgcagcaacttcagaaccaagatgacaaccgtggaaacattgtccgagtccaaggcccgttcggtgtcattaggccgcctttgaggggccagagacctcaggaggaggaagaagaagaagaaggacgacatggacgacacggtaatggcttagaggagaccatctgcagcgccaggtgcaccgataacctcgatgacccgtctcgtgctgacgtgtacaagccacagc

SEQ ID NO: 143887 - DNA, 421 bp, Arabidopsis thaliana
caatcacagcacctaagagcttgccagaaattgatgcgcatgcaaatgaggcaaggccgtggtggtggtccctccctcggcgatgagttcgatttggaagacgacatcgagaacccacaaggcccccagcagggacaccagatcctccagcagtgctgcagcgagcttcgccaggaagagccagtttgtgtttgccccaccttgagacaagctgccagggccgttagcctccagggacaacacggaccattccaatccaggaaaatttacaagacagctaagtacttgcctaacatttgcaagatccagcaagttggtgaatgccccttccagaccaccatccctttcttccctccttactaatagattccaaacaaaaaccctcgagcgtatgagagtgtggttgttgatacatgttaac

SEQ ID NO: 143888 - DNA, 415 bp, Arabidopsis thaliana
acacaatctaatcccaaaaatcaaaagatgaatgccacaaagtttgttgtgcttctcgtgattggcgttttgtgtgccattggcaccgcaaggcaggtcaaagatttgtccacggagaccaaattaggggcctctcttccaaaaactactaccaaaggcattggagctcagctttctgcaactggcacaacttacagcaccagcagtgtcgttagctatgctaatggttttaacaatcccaaaggtccaggggccaatgcattcgaaagtgccaacacatttaccagcggacaagtcactgccaagggtcgcaaggcaagagtttcttctacaagtgcttctgccgctgaaggcgatgctgcagctgcagtgactcgcaaagctgctgctgcacgtgcaaagggtaaggtagctt

SEQ ID NO: 143889 - DNA, 410 bp, Arabidopsis thaliana
aaagcgtttagaaaaaaaacagcttattaaaccgaaacatcaagcaaacaaaaaaaaagaggagaattttttttttttgttttcgttttcaaaaacaaaatctttgaattttatggcaacccgtcttctccgaacaaactttatccggcgatcttaccgtttacccgcttttagcccggtgggtcctcccaccgtgactgcttccaccgccgtcgtcccggagattctctcctttggacaacaagcaccggaaccacctcttcaccacccaaaacccactgagcaatctcacgatggtctcgatctctccgatcaagcccgtcttttctcctctatcccaacctctgatctcctccgttccaccgccgtgttgcatgcggcggcgataggtcctatggtcgacctaggga

SEQ ID NO: 143890 - DNA, 406 bp, Arabidopsis thaliana
cacatagcaaaaaatggcaaacaagttgttcctcgtctgcgcagctctcgctctctgcttcctcctcaccaacgcttccatctaccgcaccgtcgttgagttcgaagaagatgacgccactaaccccataggcccaaaaatgaggaaatgccgcaaggagtttcagaaagaacaacacctaagagcttgccagcaattgatgctccagcaagcaaggcaaggccgtagcgatgagtttgatttcgaagacgacatggagaacccacagggacaacagcaggaacaacagctattccagcagtgctgcaacgagcttcgccaggaagagccagattgtgtttgccccaccttgaaacaagctgccaaggccgttagactccagggacagcaccaaccaatgcaagtc

SEQ ID NO: 143891 - DNA, 408 bp, Arabidopsis thaliana
tttgatttttgtaatgtgagaaaggtttcgttatgttaaagaggcactctatcgccattctctccagaatcgcaagcttcgattcccataaaacccttatgtcttcctttaccgatcccctttttctgcgatcgctttactctcctcgatccatcgccatcagatttcatggagattttgctcatagactctacaatcccattcaaatttacaacaacaacaacaacaacagtggctcttgtaatggtttgttcaaggttaaaggtggaggaggaaagccgaaaggattcaccttgcgaagttgttttgattctcataagaaacctgatcaaaaggctcgagctttaactcaacatcgccgctttctccatgatctgggatctgggcctagtgaagaacgcgccgctg

SEQ ID NO: 143892 - DNA, 301 bp, Arabidopsis thaliana
  unsure (1)..(301): unsure at all n locations
cgcgtncggagaaaggttccatgtgaactgcacttgcacatgggttagtcgatcctaagagtcgggggaaacccgtctgatagcgcttaagcgcgaacttcgaaaggggatccggttaaaattccggaaccgggacgtggcggttgacggcaacgttagggagtccggagacgtcggcgggggcctcgggaagagttatcttttctgtttaacagcctgcccaccctggaaacggctcagccggaggtagggtccagcggctggaaaagcaccgcacgtcgcgtggtgtccggtgcgcccc

SEQ ID NO: 143893 - DNA, 383 bp, Arabidopsis thaliana
  unsure (1)..(383): unsure at all n locations
ccggtaattaccgggcggacccacccgtncgaaacttaggagaacagccacttgtcattatttttcttctcgacatcgccaactaccaaaaccaactcgaccgcaaccctagagtgttccatttggccggaaacaaccagcagggaggctttggcggttcacagcaacaacaagaacagaaaaacttgtggagcgggttcgacgcacaggtcatagctcaagcattgaaaattgacgttcagttggctcagcagcttcagaaccaacaagacagcagaggaaacatcgttcgtgttaagggacctttccaggtcgtgaggccacctctaagacagccctacgagagcgaggagtggagacacccacgtagcccacagggcaac

SEQ ID NO: 143894 - DNA, 419 bp, Arabidopsis thaliana
cgccaaaaaccttgaaacctttaaaaaatcgaaactatggctaagctcattctcgttttcgcaactcttgccctcttcatcctcctagccaacgcatccatctaccgcacagtggtggagttcgaggaagatgatgacgtgagcaacccacaacaaggtaagtgccagagggagtttatgaagcatcagcaactaagaggttgcaagcaatggatccgcaagagagctcaacaaggaagaatcggatacgaagctgatgactttgagctcactcttgatgtcgatcttgaggacgatgagaacccaatggggcctcaacaacagtcatctcttaaaatgtgttgtaatgaattaaggcaagtggacaagatgtgtgtgtgtcctacactgaaaaaggcggctcaacaagtcagattcca

SEQ ID NO: 143895 - DNA, 395 bp, Arabidopsis thaliana
  unsure (1)..(395): unsure at all n locations
ggttaagctcagcaatctcctcgttgtaaccttcggggttctcctcgtccttaacggctgccttgcgaggcagtcacttggggttcctcctcagctacagaacgagtgtaacctcgacaacctagatgttctccaagccaccgaaactatcaagagtgaagccggtcagatcgagtactgggaccacaaccaccctcagctccgatgtgttggtgtttccgttgctcgttatgtaattgaacaaggcggtctttacttgcccaccttcttcacttccccaaaaatttcctacgtcgttcaaggaacgggtatcagcggaagagtggtccctggatgtgccgagaccttnatggactngnagnngatgcaaggacaacaacacggccaaccatggt

SEQ ID NO: 143896 - DNA, 409 bp, Arabidopsis thaliana
gaaacaaccagcagggaggctttggcggttcacagcaacaacaagaacagaaaaacttgtggagcgggttcgacgcacaggtcatagctcaagcattgaaaattgacgttcagttggctcagcagcttcagaaccaacaagacagcagaggaaacatcgttcgtgttaagggacctttccaggtcgtgaggccacctctaagacagccctacgagagcgaggagtggagacacccacgtagcccacagggcaacggccttgaggagactatctgcagcatgaggtcccacgagaacattgacgaccctgctcgtgctgacgtgtacaagcccagcctaggtcgcgtgaccagcgtcaacagctataccttgcccatcttggagtatgtcaggctcagtgccactcgtgg

SEQ ID NO: 143897 - DNA, 413 bp, Arabidopsis thaliana
aacaaaaagaaaatggttaagctcagcaatctcctcgttgcaaccttcggggttctcctcgtccttaacggctgccttgcgaggcagtcacttggggttcctcctcagctacagaacgagtgtaacctcgacaacctagatgttctccaagccaccgaaactatcaagagtgaagccggtcagatcgagtactgggaccacaaccaccctcagctccgatgtgttggtgtttccgttgctcgttatgtaattgaacaaggcggtctttacttgcccaccttcttcacttccccaaaaatttcctacgtcgttcaaggaacgggtatcagcggaagagtggtccctggatgtgccgagaccttcatggactcgcagccgatgcaaggacaacaacaaggccaaccatggcaagg

SEQ ID NO: 143898 - DNA, 415 bp, Arabidopsis thaliana
aacaaacttacggaaagttataacggttatgcttgaatatatcaagatttatacattgttagaaaaaaacactgttggtaaatgggttatttacttattcttagatcttgaacagaattttatattaatcttcttgtatctttaaggagttgttaattagttatatttaggggtataaaccggccttaatcaatccaccttgcttgtgatacaagaagattaatctaattttgtttaatatctacattctacaattagatccttatttttaataaacaatgtataaatattgatatccttaccatagtaatgaatattgcgatgttttttttatatatatatacaaacctcacataagacttttcttcttattttgtaacaaaacttttgtacaatcaatacatgacaaatcatt

SEQ ID NO: 143899 - DNA, 415 bp, Arabidopsis thaliana
gcgcatcgagcgaaaccagagctgaaatcggagatctaatcacacagctcgagtctaagaaccctactccagctccgacggaagctcttttccttctcaacggcaaatggatcctcgcctacacatcgttcgtgaatttgttcccgttgctatcacgaggaatcgtaccgttaataaaagtcgatgagatctctcaaaccattgattcagataacttcaccgtccagaactctgttcgtttcgctggtcctttaggtacaaactcgattagcaccaacgctaaattcgaaatccgaagccctaaacgcgtccagattaagtttgagcaaggcgtaattgggacgcctcagctaacggattctattgagataccggaatatgtagaggttcttggtcaaaagattgatcttaaccc

SEQ ID NO: 143900 - DNA, 418 bp, Arabidopsis thaliana
cacacatagcaaaaaatggcaaacaagttgttcctcgtctgcgcagctctcgctctgtgcttcctcctcaccaacgcttccatctaccgcaccgtcgttgagttcgaagaagatgacgccactaaccccataggcccaaaaatgaggaaatgccgcaaggagtttcagaaagaacaacacctaagagcttgccagcaattgatgctccagcaagcaaggcaaggccgtagcgatgagtttgatttcgaagacgacatggagaacccacagggacaacagcaggaacaacagctattccagcagtgctgcaacgagcttcgccaggaagagccagattgtgtttgccccaccttgaaacaagctgccaaggccgttagactccagggacagcaccaaccaatgcaagtcaggaaaattt

SEQ ID NO: 143901 - DNA, 415 bp, Arabidopsis thaliana
caacaagaaaacatgcacaactagctgttcctggtttgcacagctctcgctctctgcttcctcctcaccaacgcttgcatctaccgcaccgtcgttgagttcgaagaagatgacgccactaaccccataggcccaaaaatgaggaaatgccgcaaggagtttcagaaagaacaacacctaagagcttgccagcaattgatgctccagcaagcaaggcaaggccgtagcgatgagtttgatttcgaagacgacatggagaacccacagggacaacagcaggaacaacagctattccagcagtgctgcaacgagcttcgccaggaagagccagattgtgtttgccccaccttgaaacaagctgccaaggccgttagactccagggacagcaccaaccaatgcaagtcaggaaaattt

SEQ ID NO: 143902 - DNA, 421 bp, Arabidopsis thaliana
ccatgcgtccaaacatgcttacgctaaggtattatgttttttccggcgtctcactctcatttctactgttcttccatggcgccgaggcacgccagctagaggccccatttccaaacgcctgccatttcagccaaatcaacagcctcgcgcccgctcaggcgacgaagttcgaagccggtcagatggaagtatgggaccacatgagccctgagctccgatgcgccggtgtaacggtggctcgcatcacccttcagcccaattccattttcttgcccgctttctttagcccacctgcccttgcttacgttgtccaaggagaaggagttatggggacgattgcttctggttgtcctgagacttttgcagaagttgaaggatcatcaggaagaggaggaggaggagacccgggtcgacgttttga

SEQ ID NO: 143903 - DNA, 418 bp, Arabidopsis thaliana
gagaaagttaaagagagaaggagagattcttttagaaagagaaagagaatgggttctaagggagacaacgttgctgtgtgtgacatgaagctcgagagacttctcagcatgaaaggtggcaaaggacaagacagctacgccaataactctcaagctcaggcaatgcatgcacggtccatgcttcacctcctagaggaaacacttgaaaatgttcacctcaactcctccgccagtccgtcaccgttcacggcggttgatcttggctgttcctccggcgcaaatactgtccacataatcgatttcatagtcaaacatatctctaagaggtttgatgctgccggaatcgaccctccggagttcacagttttcttctccgatctcccaagcaacgacttcaacacgctttttcagctttctt

SEQ ID NO: 143904 - DNA, 417 bp, Arabidopsis thaliana
ggacttgctttcactgagaaagagcgatgactctcattacttgcgtggtcttctccctccagttgttcttgatcaagggcgggaggagaagaggctgatgaacaatatccgccaatatcaatttccattacaaaagtacatggccttgacagaacttcaggaaagaaacgagagactgttttacaagttgttgatagataatgttgaggagcttcttcctattgtttatactccaactgttggtgaagcttgccagaaatttggaagtattttcaggcgacctcagggtttattcatcagtttaaaagacaagggaaagattctagatgtgttaaagaactggcctgaaaggaatatacaagttattgttgttactgatggtgaaaggattttgggattaggggatcttggatgtca

SEQ ID NO: 143905 - DNA, 402 bp, Arabidopsis thaliana
caacaagaaaacatgcacaaatagcagatcatggctaacaagctcttcctcgtctgcgcaactctcgccctctgcttgctcctcaccaacgcttccatctaccgcaccgttgtcgaattcgaagaagatgacgccagcaaccccgtaggtccaagacagagatgccagaaggagtttcagcaatcacaacacctaagagcttgccagagatggatgagcaagcaaatgaggcaaggacgtggtggtggtccttccctcgacgatgagttcgatttcgagggcccccagcagggataccagctactccagcagtgctgcaacgagcttcgccaggaagagccagtttgcgtttgccccaccttgaaacaagctgccagggcagttagcctccagggacagcac

SEQ ID NO: 143906 - DNA, 410 bp, Arabidopsis thaliana
cgaaattcaaattcacccagaaaaaatctcaatccgcgatggttgaagaatcaccttgtgcgtcggaagcttcggtgatacaaaccctaaccgagccggcgacggagattgcgcaaaccctagaacctaacctagcctcaatcgaagccaccgtcgaatcggttgttcagggaggcactgaatcgacttgtaacaacgattctaataacaacaacgccgctgatagtgctgctactgaggtttgtgatgaggagcgtgagaagacgcttgagttcgctgaggaattgacggagaaaggctctgtgtttttgaaagagaacgatttcgctgaagccgtcgattgcttcagccgtgctctcgaaatcagggttgcacattatggtgaacttgatgctgagtgtataaacgca

SEQ ID NO: 143907 - DNA, 452 bp, Arabidopsis thaliana
  unsure (1)..(452): unsure at all n locations
cacgcccgtccgnnacaaaaagaaaatnnggttaagcttctagcatatcttctctcgttgcaaccctnntcggggttctcgctcgtcccttaaccggctgccgtgtgcggaggcagtctacttggnnggttcctcctcagctacagnnaacgagtgtaancctcgacaaccctagantgttctccaagcccaccgaaactatcaagagtgaagccggtcagatcgagtactgggaccacaaccaccctcagctccgatgtgttggtgtttccgttgctcgttatgtaattgaacaaggcggtctttacttgcccaccttcttcacttccccaaaaatttcctacgtcgttcaaggaacgggtatcagcggaagagtggtccctggatgtgccgagaccttcatggactcgcagccgatgcaaggacaacaacaaggccaaccatggcaagga

SEQ ID NO: 143908 - DNA, 420 bp, Arabidopsis thaliana
caagggttccgtgacatgcaccagaaagtagagcacctacggtgcggtgacaccattgcaacaccatctggtgtagctcaatggttctacaacaatggaaatgagcctctcattcttgttgcagccgcggatctcgccagcaaccagaaccagcttgaccgcaaccttagaccatttttgatagccggaaacaacccacaagggcaggaatggctacaaggccgaaagcaacagaagcaaaacaacatcttcaatggcttcgcacctgagatcttggctcaagccttcaagatcaatgtcgagacggctcagcagctccagaaccagcaagataaccgtggcaacatcgtcaaggtcaacggacctttcggcgtcattaggccacccttgagacgcggcgaaggcggccaacaaccacat

SEQ ID NO: 143909 - DNA, 415 bp, Arabidopsis thaliana
aaaaagaaaatggttaagctcagtaatttcctcgttgcaaccttcggggttctcctggtccttaacgactgcctgtggaggcagtcacttggggttcctcctcagctacagaacgagtgtaacctcgacaacctagatgttctccaagccaccgaaactatcaagagtgaagccggtcagatcgagtactgggaccacaaccaccctcagctccgatgtgttggtgtttccgttgctcgttatgtaattgaacaaggcggtctttacttgcccaccttcttcacttccccaaaaatttcctacgtcgttcaaggaacgggtatcagcggaagagtggtccctggatgtgccgagaccttcatggactcgcagccgatgcaaggacaacaacaaggccaaccatggcaaggacgac

SEQ ID NO: 143910 - DNA, 345 bp, Arabidopsis thaliana
cagcaatctcctcgttgcaaccttcgtggttctcctcgtccttaacggctgccttgcgaggcagtcacttggggtgtgctcctcagctacagaacgagtgtaacctcgacaacctagatgttctccaagccaccgaaactatcaagagtgaagccggtcagatcgagtactgggaccacaaccaccctcagctccgatgtgttggtgtttccgttgctcgttatgtaattgaacaaggcggtctttacttgcccaccttcttcacttccccaaaaatttcctacgtcgttcaaggaacgggtatcagcggaagagtggttcctggatgtgccgagaccttcatgg

SEQ ID NO: 143911 - DNA, 414 bp, Arabidopsis thaliana
cattgcttcatcattaccaaatcatcaacttaatcgtttctctcaaatttagggttttctcttttctcgaaagtcttgcggttttctgaatcatctctatctggtttgagggtttcgtttgatatctggagaaaggggtttctggaaacaaggagttcataattcgcgatcttgatctatcgatcttcatttatatataaaagcgtgaatgagattatgatggagtcgaaaggtggtaaaaagaagtccagcagtagtagttccttattttacgaagctcccctcggttacagcattgaagacgttcgtccaaacggtggaatcaagaaattcaaatcttctgtctactcaaactgctccaagaggccatcctgagtaccagcgtgcaccgatcttcataatatagttatagct

SEQ ID NO: 143912 - DNA, 417 bp, Arabidopsis thaliana; identical to SEQ ID NO: 130111

SEQ ID NO: 143913 - DNA, 416 bp, Arabidopsis thaliana
ataagaaataacaaaatggctcgagtctcttctcttctttctttcttcttaacactttgggtccttttccatggctggcggggctcaacagggtcagcagggtcagcagtttccgaacgagtgccagctcgaccagctcaatgcgctcgagccgtcacacgtactgaagagcgaggctggtcgcatcgaggtgtgggaccaccacgctcctcagctccgttgctcaggtgtctcctttgcacgttacatcatcgagtctaagggtctctacttgccctctttctttaacaccgcgaagctctctttcgtggctaagggacgaggtcttatgggaaaagtgatccctggatgcgccgaaacattccaagactcatcagagttccaaccacgcttcgaaggtcaaggtcaaagccaga

SEQ ID NO: 143914 - DNA, 412 bp, Arabidopsis thaliana
atcgacatggcgaatgtggaccgtgatcggcgtgtgcatgtagaccgtactgacaaacgtgttcatcagccaaactacgaagatgatgtcggttttggtggctatggcggttatggtgctggttctgattataagagtcgcggcccctccactaaccaaatcttggcacttatagcaggagttcccattggtggcacactgctaaccctagctggactcactctagccggttcggtgatcggcttgctagtctccatacccctcttcctcctcttcagtccggtgatagtcccggcggctctcactattgggcttgctgtgacgggaatcttggcttctggtttgtttgggttgacgggtctgagctcggtctcgtgggtcctcaactacctccgtgggacgagtgatacag

SEQ ID NO: 143915 - DNA, 411 bp, Arabidopsis thaliana
ctcattggcttggacaggtcatttagtccatgtcgctattcctgcatccaggggggaatatgttcgatggaataatgtcttaaatgtattaccgcatccccaagggttaggcccactttttacgggtcagtggaatctttatgctcaaaaccccgactcgagtagtcatttatttggtacctcccaaggatccggaactgccattctaacccttcttgggggattccatccacaaacgcaaagtttatggctaaccgatatggcacatcatcatttagctatcgcaattcttttcctcattgcgggtcatatgtatagaacgaactttggaatcggacacagtataaaagatcttttagaagcacatattcctccgggaggacgattggggcgtgggcataaaggtcttta

SEQ ID NO: 143916 - DNA, 414 bp, Arabidopsis thaliana
aagaaaaaaaaataatcaaatcctccttctctgcttcaccaccaaaaagcatattcttctctcgtcttctccggttaatcaaaatctctccgtgtgaatcgtttgtgaatggtggaaactaatccgatcggtggtaagtttacgctctccctttccatcaaaagggcgagcttttctcttcctctctcgacatcctctgttttcgctttcggatcttgcaaagaaggctggtactttcgctgccttggcctcgacccgtgaacgattcgcccctaaaattcacaacccggaaccctaatttcctaaaaagtggttctttttttattgattctgttacttgtgagatttgctctgttttttgttctctcgatttcgaagatgttgctctacaacaagcagaagaagaaccaaaac

SEQ ID NO: 143917 - DNA, 267 bp, Arabidopsis thaliana
aaaacatacacaaatagcaaaacatggctaacaagctcttcctcgtctgcgcaactctcgccctctgcttcctcctcaccaacgcttccatctaccgcaccgttgtcgaattcgaagaagatgacgccagcaaccccgtaggtccaagacagagatgccagaaggagtttcagcaatcacaacacctaagagcttgccagagatggatgagcaagcaaatgaggcaaggacgtggtggtggtccttccctcgacgatttgttcgatt

SEQ ID NO: 143918 - DNA, 411 bp, Arabidopsis thaliana
gaagctctcgattaagcttgaacttggaggatcaatggccgacgttcgcacacactcgcaccagcttcaagtgcaccctcaacgccagcatgaaggaggcatcaaagtcctttatcctcagagtggcccttcttccactcaggtgctagccgtgtttgtcggtgtaccgataggaggaacgctgctgactatagccggtttgacattagccggttcggttataggactaatgctagcattcccgttgtttctcatctttagtccggttattgtaccagcagcctttgtcatcggtctagctatgactggattcctggcttcaggggccataggtctcaccggactatcatccatgtcgtgggtactcaactacatccgccgggccgggcagcatatcccggaggagcttga

SEQ ID NO: 143919 - DNA, 413 bp, Arabidopsis thaliana
caaaaagaaaatggttaagctcagcaatctcctcgttgcaaccttcggggttctcctcgtccttaacggctgccttgcgaggcagtcacttggggttcctcctcagctacagaacgagtgtaacctcgacaacctagatgttctccaagccaccgaaactatcaagagtgaagccggtcagatcgagtactgggaccacaaccaccctcagctccgatgtgttggtgtttccgttgctcgttatgtaattgaacaaggcggtctttacttgcccaccttcttcactttcccaaaaatttcctacgtcgttcaaggaacgggtatcagcggaagagtggtccctggatgtgccgagaccttcatggactcgcagccgatgcaaggacaacaacaaggtcaaccatggcaaggac

SEQ ID NO: 143920 - DNA, 364 bp, Arabidopsis thaliana
aagaaaatggttaagctcagcaatctcctcgttgcaaccttcggggttctcctcgtccttaacggctgccttgcgaggcagtcacttggggttcctcctcagctacagaacgagtgtaacctcgacaacctagatgttctccaagccaccgaaactatcaagagtgaagccggtcagatcgagtactgggaccacaaccaccctcagctccgatgtgttggtgtttccgttgctcgttatgtaattgaacaaggcggtctttacttgcccaccttcttcacttccccaaaaatttcctacgtcgttcaaggaacgggtatcagcggaagagtggtccctggatgtgccgagaccttcatggact

SEQ ID NO: 143921 - DNA, 417 bp, Arabidopsis thaliana
aaaagaaaatggttaagctcagcaatctccttgttgcaaccttcggggttctcctcgtccgtaacggctgccttgcgagggagtcacttggggttcctcctcagctacagaacgagtgtaacctcgacaacctagatgttctccaagccaccgaaactatcaagagtgaagccggtcagatcgagtactgggaccacaaccaccctcagctccgatgtgttggtgtttccgttgctcgttatgtaattgaacaaggcggtctttacttgcccaccttcttcacttccccaaaaatttcctacgtcgttcaaggaacgggtatcagcggaagagtggtccctggatgtgccgagaccttcatggactcgcagccgatgcaaggacaacaacaaggccaaccatggcaaggacgacagg

SEQ ID NO: 143922 - DNA, 415 bp, Arabidopsis thaliana
ctatcttattgacacataaacatggaccggtccactttcatcttatctctactcttcacactcaccgtctcgactacgaccctcttctctccggttttcgcaggaacgttcgacacagaattcgatatcacttggggtgatggtcgtggcaaggttcttaacaacggagagcttctcactctctccctcgacagagcctccggctctggttttcaaaccaagaaagagtatttgttcgggaaaatcgacatgcagctcaaactcgtccctggaaactccgccggaaccgtcactgcctactacttgaagtcaaaaggtgatacgtgggacgaaatcgatttcgagtttcttggtaatctaactggtgatccgtataccatgcatacgaatgtgtatactcaaggcaaaggtgata

SEQ ID NO: 143923 - DNA, 418 bp, Arabidopsis thaliana
ggaccacaaccaccctcagctccgatgtgttggtgtttccgttgctcgttatgtaattgaacaaggcggtctttacttgcccaccttcttcacttccccaaaaatttcctacgtcgttcaaggaacgggtatcagcggaagagtggtccctggatgtgccgagaccttcatggactcgcagccgatgcaaggacaacaacaaggccaaccatggcaaggacgacagggacaacaaggccaaccatgggaaggacagggacaacagggacaacaaggaagacaaggccaaccatgggaaggacagggacaacagggacaacatggacgacagggacaacaaggccaaccatgggaaggacagggacagcagggacaacaagggttccgtgacatgcaccagaaggtggaacatgtgaga

SEQ ID NO: 143924 - DNA, 412 bp, Arabidopsis thaliana
tagagtttctcatgtctgaggcaaatgaggagagaacacatggcgattttagggaaatgggtcagaggcttgcgcaggaagttgtttcttttttcaagaggaaaaaggataaacatgcgagatacgggcgcttgaaaaacatcaagctgagttttgttggacattcaattggtaacgtcatcatcagagctgcaatagctgatagtttgatggatccatacaggaagtattttcatacatatatatcgctttcgggtccacacttgggttatctatacagttcaaattccttgtttaattctggactttggctcctgaagaagttaaagagtactcaggttattcatcagcttacactcacagatgatcctgatctccagaatactttcttttacaagctctgcaagcaaaa

SEQ ID NO: 143925 - DNA, 412 bp, Arabidopsis thaliana
cgccaaaaaccttgaaacctttaaaaattcgaaactatggctaagctcattctcgtgttcgcaactcttgccctctggatcctcctagccaacgcatccatctaccgcacagtggtggagttcgaggaagatgatgacgtgagcaacccacaacaaggtaagtgccagagggagtttatgaagcatcagcaactaagaggttgcaagcaatggatccgcaagagagctcaacaaggaagaatcggatacgaagctgatgactttgagctcactcttgatgtcgatcttgaggacgatgagaacccaatggggcctcaacaacagtcatctcttaaaatgtgttgtaatgaattaaggcaagtggacaagatgtgtgtgtgtcctacactgaaaaaggcggctcaacaagtca

SEQ ID NO: 143926 - DNA, 414 bp, Arabidopsis thaliana
cttgttttgagagaaagggtagagaatatgtctgcttgtttgtgttttgttttcctgtggttctctattgttgcagaagcggcgtattctccaggaggtttccaccatctttcttctgtaagacaaaagaagaaggcgtccaagtcaaaacatgagttaccttttgaaactcgttacttccctcaaaatcttgaccacttcagtttcacaccagacagctacaaagtcttccaccagaagtacctcatcaacaaccgtttctggcgaaaaggtggtcccatctttgtctacactggaaatgaaggaaacatcgactggtttgcttccaacaccggtttcatgctggatattgctcccaagttccgggctcttcttgttttcattgaacaccggttctatggagaatcaacgcca

SEQ ID NO: 143927 - DNA, 409 bp, Arabidopsis thaliana
atctaaggctgttggcaatgtgaacaacatcatcgggccagcacttattggaaaggacccaactcagcagactgctattgacaacttcatggtccatgaacttgacggaacccaaaacgagtgggggtggtgcaagcaaaagcttggagccaatgcgattcttgctgtgtctcttgctgtctgcaaagctggggctgttgtcagcggcattcctctatacaagcacattgccaaccttgctggtaaccccaagattgtgctaccagttcctgccttcaacgtcatcaatggtggatcccatgccggaaacaagcttgctatgcaggagtttatgatccttcctgttggagctgcttcttttaaggaagccatgaatatgggtgtggaaaggtaccaccacttgaagtct

SEQ ID NO: 143928 - DNA, 403 bp, Arabidopsis thaliana
gataaaaatggctcgagtctcttctcttctttctttctccttaacacttttgatccttttccatggctacgcggctcaacagggtcagcagggtcagcagtttccgaacgagtgccagctcgaccagctcaatgcgctcgagccttcacacgtactgaagagcgaggctggtcgcatcgaggtgtgggaccaccacgctcctcagctccgttgctcaggtgtctcctttgcacgttacatcatcgagtctaagggtctctacttgccctctttctttaacaccgcgaagctctccttcgtggctaaaggacgaggtcttatgggaaaagtgatccctggatgcgccgaaacattccaagactcatcagagttccaaccacgcttcgaaggtcaaggtcaaagc

SEQ ID NO: 143929 - DNA, 417 bp, Arabidopsis thaliana
tacacacatagcaaaaaatggcaaacttgttgttcctcgtctgcgcagctctcgctctctgcttcctcctcaccaacgcttccatctaccgcaccgtcgttgagttcgaagaagatgacgccactaaccccataggcccaaaaatgaggaaatgccgcaaggagtttcagaaagaacaacacctaagagcttgccagcaattgatgctccagcaagcaaggcaaggccgtagcgatgagtttgatttcgaagacgacatggagaacccacagggacaacagcaggaacaacagctattccagcagtgctgcaacgagcttcgccaggaagagccagattgtgtttgccccaccttgaaacaagctgccaaggccgttagactccagggacagcaccaaccaatgcaagtcaggaaaa

SEQ ID NO: 143930 - DNA, 408 bp, Arabidopsis thaliana
gtagagcactgcaaggatctccgtcgcctctctctatctggcctcttgaccgacaaggtttttgaatacattgggacatatgccaagaagatggaaatgctctcagtggcatttgcaggagacagtgacttaggcatgcatcatgttttgtccgggtgcgatagcttgaggaaactagagataagggactgcccgtttggagacaaggcgcttttggccaatgcttcaaagctggagacaatgcgatccctttggatgtcttcttgttccgtgagttttggagcctgcaagttactaggacagaagatgccaaagctgaatgtggaagtcatcgatgaacggggtgcaccggactcgagaccagagagctgccctgttgagagagtcttcatataccgaacagtggct

SEQ ID NO: 143931 - DNA, 418 bp, Arabidopsis thaliana
caaacgagtaagaatacaaatacaaatagcaaaaaaaatggcaaacaagctcttcctcgtctgcgcaactttcgccctctgcttcctcctcaccaacgcttccatctaccgcactgttgtcgagttcgacgaagatgacgccagcaaccccatgggcccaagacagaaatgtcagaaggagtttcagcaatcacagcacctaagagcttgccagaaattgatgcgcatgcaaatgaggcaaggccgtggtggtggtccctccctcgacgatgagttcgatttggaagacgacatcgagaacccacaaggcccccagcagggacaccagatcctccagcagtgctgcagcgagcttcgccaggaagagccagtttgtgtttgccccaccttgagacaagctgccagggccgttagcctc

SEQ ID NO: 143932 - DNA, 418 bp, Arabidopsis thaliana
gggacagcagggacaacaagggttccgtgacatgcaccagaaggtggaacatgtgagacgcggagacgtctttgccaacactccaggctctgcccactggatctacaactcaggagaacagccacttgtcatcatcgctcttctcgacatcgccaactaccaaaaccaactcgaccgcaaccctagagtgttccatttggccggaaacaaccagcagggaggctttggcggttcacagcaacaacaagaacagaaaaacttgtggagcgggttcgacgcacaggtcatagctcaagcattgaaaattgacgttcagttggctcagcagcttcagaaccaacaagacagcagaggaaacatcgttcgtgttaagggacctttccaggtcgtgaggccacctctaagacagccctacgag

SEQ ID NO: 143933 - DNA, 411 bp, Arabidopsis thaliana
aaatataagaaataacaaaatggctcgagtctcttctcttctttctttcttcttaacacttttgatccttttccatggctacgcggctcaacagggtcagcagggtcagcagtttccgaacgagtgccagctcgaccagctcaatgcgctcgagccgtcacacgtactgaagagcgaggctggtcgcatcgaggtgtgggaccaccacgctcctcagctccgttgctcaggtgtctcctttgcacgttacatcatcgagtctaagggtctctacttgccctctttctttaacaccgcgaagctctctttcgtggctaagggacgaggtcttatgggaaaagtgatccctggatgcgccgaaacattccaagactcatcagagttccaaccacgcttcgaaggtcaaggtca

SEQ ID NO: 143934 - DNA, 412 bp, Arabidopsis thaliana
ctttcgatttcaaatctcagatctagctcaacaatggcgttgctcgtcgagaagacctcaagtggccgtgaatacaaggtcaaagacatgtctcaagccgatttcggtcgtctcgaactcgagctcgccgaagttgagatgcctggactcatggcttgtcgtaccgaattcggaccttctcagccattcaaaggcgctagaatcaccggatctcttcacatgacgatccaaaccgccgtactcatcgaaaccctaactgctctcggtgctgaagtcagatggtgttcctgcaacatcttctccactcaagaccacgccgccgcagccatcgctcgtgactccgccgctgttttcgcctggaaaggtgagactcttcaggagtactggtggtgtaccgagcgtgctttagatt

SEQ ID NO: 143935 - DNA, 417 bp, Arabidopsis thaliana
acaaggccaaccatgggaaggacagggtcaacagggacaacaaggaagacaaggccaaccatgggaaggacagggacaacagggacaacaaggacgacagggacaacaaggccaaccatgggaaggacagggacagcagggacaacaagggttccgtgacatgcaccagaaggtggaacatgtgagacgcggagacgtctttgccaacactccaggctctgcccactggatctacaactcaggagaacagccacttgtcatcatcgctcttctcgacatcgccaactaccaaaaccaactcgaccgcaaccctagagtgttccatttggccggaaacaaccagcagggaggctttggcggttcacagcaacaacaagaacagaaaaacttgtggagcgggttcgacgcacaggtcat

SEQ ID NO: 143936 - DNA, 415 bp, Arabidopsis thaliana
ggttccgtgacatgcaccagaatgtatagcacctacggtgcggtgacaccatggcggcaccatctggtgtaggtcagtggttctacaacaatggaaatgagcctctcattcttgttgcagccgcggatctcgccagcaaccagaaccagcttgaccgcaaccttagaccatttttgatagccggaaacaacccacaagggcaggaatggctacaaggccgaaagcaacagaagcaaaacaacatcttcaatggcttcgcacctgagatcttggctcaagccttcaagatcaatgtcgagacggctcatcagctccagaaccagcaagataaccgtggcaacatcgtcaaggtcaacggacctttcggcgtcattaggccacccttgagacgctgtgaatgcggccaacatccaca

SEQ ID NO: 143937 - DNA, 403 bp, Arabidopsis thaliana
ctcatctattatctctttctctttgacactcttgatcctcttcaatggctacactgcccaacagtggcccaacgagtgccagctcgatcaactcaatgcgctcgaaccatcccaaatcatcaagagcgagggtggtcgcatcgaggtctgggaccaccatgcaccccagctccgttgctccggctttgcctttgagcgtttcgtcattgagcctcagggtcttttcttgcccactttcttgaacgccggcaaactcacgtttgttgttcacggaaggggtctaatgggaagagttattccgggatgcgccgagacgttcatggagtcaccggtatttggagaaggtcaaggtcagggtcagagtcaagggttccgtgacatgcaccagatagttgagcaccta

SEQ ID NO: 143938 - DNA, 478 bp, Arabidopsis thaliana
  unsure (1)..(478): unsure at all n locations
gcgggacccacgcgnntccgcttcaatgggatnnttggacccgagtgttattggtctcaagcttnntgaagattgatnncttcagacanngcgcagcaacttttcagtacgcaagatgacaanccgtggnaaaccatttngtccgagtccataggggcccgttcggtggtcattaggccgccttttgagtggtgccagagactctcatggaggggaggaagaagaagtaagaagggacgacactggaccgacactggtatatggctttagaaggagaccatttctgcagcgccaggtgtgcaccgataactctcgatgatctcgtctcgtgctgacgtgtacaagccacagctcggttacatcagcactctcaacagttacgatctccccatccttcgcttcatccgtctctcagccctccgtggatctatccgtcaaaacgcaatggtgctttcacagtggaacgcaaacgcgaacg

SEQ ID NO: 143939 - DNA, 414 bp, Arabidopsis thaliana
caaacaaaaagaaaatggttaagctcatcattctcctcgttgcaaccttcggggttctcctcgtccttaacggctgccttgcgaggcagtcacttggggttcctcctcagctacagaacgagtgtaacctcgacaacctagatgttctccaagccaccgaaactatcaagagtgaagccggtcagatcgagtactgggaccacaaccaccctcagctccgatgtgttggtgtttccgttgctcgttatgtaattgaacaaggcggtctttacttgcccaccttcttcacttccccaaaaatttcctacgtcgttcaaggaacgggtatcagcggaagagtggtccctggatgtgccgagaccttcatggactcgcagccgatgcaaggacaacaacaaggccaaccatggcaag

SEQ ID NO: 143940 - DNA, 415 bp, Arabidopsis thaliana
agaaaaatgggtcgagtctcatctattttttctttctctttgacactcttgatcctcttgaatggctacactgcccaacagtggcccaacgagtgccagctcgatcaactcaatgcgctcgaaccatcccaaatcatcaagagcgagggtggtcgcatcgaggtctgggaccaccatgcaccccagctccgttgctccggctttgcctttgagcgtttcgtcattgagcctcagggtcttttcttgcccactttcttgaacgccggcaaactcacgtttgttgttcacggaaggggtctaatgggaagagttattccgggatgcgccgagacgttcatggagtcaccggtatttggagaaggtcaaggtcagggtcagagtcaagggttccgtgacatgcaccagaaagtagagc

SEQ ID NO: 143941 - DNA, 416 bp, Arabidopsis thaliana
acaaaacaaaacacacccaaatatgcataagcttttgttttctcttctctccgtcgtctcactctcatttctcctcttctgccatggcgccgaggcacgccagcgagaggcgccgtttccaaacgcctgccatttcagccaaatcaacagcctcgcgcccgctcaggcgacgaagttcgaagccggtcagatggaagtatgggaccacatgagccctgagctccgatgcgccggtgtaacggtggctcgcatcacccttcagcccaattccattttcttgcccgctttctttagcccacctgcccttgcttacgttgtccaaggagaaggagttatggggacgattgcttctggttgtcctgagacttttgcagaagttgaaggatcatcaggaagaggaggaggaggagacccgg

SEQ ID NO: 143942 - DNA, 412 bp, Arabidopsis thaliana
gaaaatggttaagctcagcaatctcctcgttgcaaccttcggggttctcctcgtccttaacggctgccttgcgaggcagtcacttggggttcctcctcagctacagaacgagtgtaacctcgacaacctagatgttctccaagccaccgaaactatcaagagtgaagccggtcagatcgagtactgggaccacaaccaccctcagctccgatgtgttggtgtttccgttgctcgttatgtaattgaacaaggcggtctttacttgcccaccttcttcacttccccaaaaatttcctacgtcgttcaaggaacgggtatcagcggaagagtggtccctggatgtgccgagaccttcatggactcgcagccgatgcatggacaacaacaaggccaaccatggcatggacgacag

SEQ ID NO: 143943 - DNA, 413 bp, Arabidopsis thaliana
gcagaggaaacatcgttcgtgttaagggacctttccaggtcgtgaggccacctctaagacagccctacgagagcgaggagtggagacacccacgtagcccacagggcaacggccttgaggagactatctgcagcatgaggtcccacgagaacattgacgaccctgctcgtgctgacgtgtacaagcccagcctaggtcgcgtgaccagcgtcaacagctataccttgcccatcttggagtatgtcaggctcagtgccactcgtggcgttctccagggtaatgcgatggtgcttcctaaatacaacatgaacgctaacgagatcttgtactgcactggaggacaaggaaggatccaagtggtcaacgacaacggacagaacgtgttggaccaacaggtgcagaagggacagctc

SEQ ID NO: 143944 - DNA, 408 bp, Arabidopsis thaliana
cctctctctctctctctctctatctttctctcttcaccatttctttatcttccatggaagaacagtcttcaacaacaaactaaaaacatgtttctaaagttgtttcttctcttatctttggtctccttctcacactcagactcttcttccacagtttcttgtcctaacggcacagacttccatcaactaaccacagtttttcgttacgtctccggtttcaactcttcctggttctcctcaaactgctccgccgttatcactcacgtcgttcttccgtcaagaaaactaaacggcaccgtttcttggaaccctatacgtaatctcacgcgcttacgtgttcttgatctcttcaacaactctctcgatggttctctttccacttggctctggtctatgccaggtcttgtc

SEQ ID NO: 143945 - DNA, 260 bp, Arabidopsis thaliana
  unsure (1)..(260): unsure at all n locations
cacgccgnntccgggattgtacaccacnngtcaagtcattatacttcanntctaagacannaggaggtgatgtaactaaggatagcacttataactaagtgtgcatgagaggagaccagctatctganntgtctttnncttttcccttttcttttcgtgtttattaattttttcactttcttttggttcacacattgtgatgtttctgatgatgaccttgtggggttagttgttttgagatgaacttgaaggcactaatt

SEQ ID NO: 143946 - DNA, 432 bp, Arabidopsis thaliana
actggtttcaacaatcccaaaggtccagacgctaatggatactaaagtggctacacaagtaccatcggacaagtcattgcaaagggtcgcaaggcaagagtttcttctgcaagtgcttctaccgccaaaggtgacgctgcagctgcagtgactcgcaaagctgctgctgcacgtgcaaacggtaaggtagcttcggcatcaagggtgaagggttcctctgagaagaagaagggcaaaggaaaaaaggattgagcgtgaggtgctctcatattctcatgcatgcgtattcctcaaacctatatattaataatatcctacaaaataaagtcacaatctctttcttgttcataaataaaaccagagattgtcacctctatatattattgtgaaatgctactcattctcatgtaatggcttttcttaaaataaaat

SEQ ID NO: 143947 - DNA, 391 bp, Arabidopsis thaliana
gattaatttgctatcgaagattttttttgtattcgaaaaaattcgtaacaaaatttaacatattttttttattatgagaacaaatcctactacttcaaatccagaggtttcgatacgtgaaaaaaaaaacctgggacgtatcgcccaaatcattggtccggtactggatgtagccttccccccgggcaaaatgcctaatatttacaatgctctggtggttaagggtcgagatactcttggtcaagaaattaatgtgacttgtgaagtacagcaattattaggaaataatcgagttagagctgtagctatgagtgcgacagagggtttaaagagaggaatggacgtggttgatatgggaaatcctttaagtgttccagtcggcggagcgact

SEQ ID NO: 143948 - DNA, 393 bp, Arabidopsis thaliana
cagcttttgagctttgaaggttcgaaattggatcgaattgcgtctgcgactttctcttgccctgcgatttcattgtcccgcgtctgtagaatcagcccttttggcttaaacattaaaaccaaccatagaaagagattctcgtgtcgagtagctgtagcttctggagagacttcggccagggtcgtcgtcgacaatgaacttgacttagaacacaagaaacacgatctactgagagctgttcaagacactcaacgaggactcactgccacttctgatcaacgatctatcattgaggaggctctggtgactgtggaagggtttaatggcggtgaagaaattgatccagtgaagttagatggaacatggaggctacaatatacatctgcacctgat

SEQ ID NO: 143949 - DNA, 418 bp, Arabidopsis thaliana
cgtggaaatcatgagtctcttgcaatgaatagaatttatggttttcttacagaatgcgaagaaagaatggtacgtctcttcagagaatatatattctcattgtcattggctaattaatgaagtaacatatataatcttgttctgtacgttaccagggcgagtcctatgggttcgaagcatggttaaagattaatcaagtttttgattatcttccgcttgctgcacttctagaaaagaaagttttgtgtgtccatggcggaattgggagggcagttacgatcgaagaaattgaaaatatcgaaaggccggcattcccggatactggatcaatggtcttgaaagacatcttatggtaacatactctcaactatttctaactttttttctttccaagctgtgtaataacatttttttatgg

SEQ ID NO: 143950 - DNA, 414 bp, Arabidopsis thaliana
ttttctcttcttcttctccaagaaaacactgaagaagaaatggggttccttaagccaaccatggcgattctttttctagcgatggtcgccgtttcatcagccgtggacatgtcaatcatctcctacgacgagaaacatggcgtctccaccaccggtggccgtagcgaagccgaggttatgagtatctacgaggcatggttggtgaaacacggcaaggctcagagccagaactctcttgttgagaaagatcgacggttcgagatctttaaagacaatcttcgtttcgtcgatgaacataacgagaagaatcttagttatagattgggtttgactcgttttgcggatcttactaacgatgagtatagatccaagtatcttggagctaagatggagaagaaaggtgagagaaggact

SEQ ID NO: 143951 - DNA, 404 bp, Arabidopsis thaliana
cggatgaaactcatagtctgtcgctcgagcaagtttatttataaatggatttaatgaaactgatgatgagcgactacaaggtggagatgatcaatgatggcatgcaagagttctttgacgaattcagtggacccaaagacagtatatatgatggaggtgtgtggaagataagagttgaacttcctgatgcttatccttataaatctccatctgttggtttcattaccaaaatataccaccctaatggcgatgaaatgtcgggttctgattgtctagatggtattaaccagacctggagcccaaagttcgacctggtgaatgtgttcgagacatttcttacttaactttttttgtattcgaatccgttagatccattgtatggtgaagcagttgcattgatgatg

SEQ ID NO: 143952 - DNA, 415 bp, Arabidopsis thaliana
ctaccatattcgttgaaaccagagaagatggtgggtgtgtcgccgaagatcgctccgtcgatgttgtcatcggactttgcaaatcttgccgcggaggctaagcggatgatcgatttgggcgccaattggcttcacatggacattatggacgggcattttgtttctaacctaacgattggtgctcctgtcatcgagagtttgaggaagcacacaaatgcatatcttgattgccacttaatggtgacgaaccccatggattatgtggatcagatggctaaagctggggcgtctggtttcacattccacgttgaggtggcccaagagaattggcaagaacttgtgaagaagattaaggctgctgggatgaggccaggtgtggctctaaagcctggaacacctgttgaacaagtctatt

SEQ ID NO: 143953 - DNA, 379 bp, Arabidopsis thaliana
gttatagacacctttccgtactttgtatctggagtacttcacttaatttcttctgcagttttgggctttggcggtatttatcatgcacttctgggacccgaaactcttgaagaatcttttccctttttcggttatgtatggaaagatagaaataaaatgaccaccattttgggtattcacttaattttgttaggtgtaggtgcctttcttctagtattcaaggctctctattttgggggcgtatatgatacctgggctccgggagggggggatgtaagaaaaattacaaacttgactcttagcccaagtgttatatttggttatttactaaaatctccctttgggggagaaggatggattgttagtgtggacgatttgg

SEQ ID NO: 143954 - DNA, 417 bp, Arabidopsis thaliana
aaaaaatatgcaatcactactcttgccgccggcgagttcctccggcgtatccgccgtggcgctacggccaggtttccagcactcatttaaccaccaaagcctctctactcgctccctgccattgtttaatccacttctcttcgctccaaagaagaaaaccaccatctcctcataccaatctctgtccgtctacggtttccaaatcggaggatctaaacctagtttcgcaccatccacggtggcattttcatatccgagttctccgtcttccgtttccagtgataatgaggtcgacaaagcaaaactcgctcaggttgcaaagagattagagaagacttcaaggtacttcaagaggctagggagtattggtttctgggggcagcttgtgtcaactgtggttgcagctgtgattctatc

SEQ ID NO: 143955 - DNA, 422 bp, Arabidopsis thaliana
aacatacacacatagcaaaaaatggcaaacaagttgttcctcgtctgcgcagctctcgctctctgcttcctcctcaccaacgcttccatctaccgcaccgtcgttgagttcgaagaagatgacgccactaaccccataggcccaaaaatgaggaaatgccgcaaggagtttcagaaagaacaacacctaagagcttgccagcaattgatgctccagcaagcaaggcaaggccgtagcgatgagtttgatttcgaagacgacatggagaacccacagggacaacagcaggaacaacagctattccagcagtgctgcaacgagcttcgccaggaagagccagattgtgtttgccccaccttgaaacaagctgccaaggccgttagactccagggacagcaccaaccaatgcaagtcaggaaaat

SEQ ID NO: 143956 - DNA, 415 bp, Arabidopsis thaliana
ggagaacagccacttgtcatcatcgctcttctcgacatcgccaactaccaaaaccaactcgaccgcaaccctagagtgttccatttggccggaaacaaccagcagggaggctttggcggttcacagcaacaacaagaacagaaaaacttgtggagcgggttcgacgcacaggtcatagctcaagcattgaaaattgacgttcagttggctcagcagcttcagaaccaacaagacagcagaggaaacatcgttcgtgttaagggacctttccaggtcgtgaggccacctctaagacagccctacgagagcgaggagtggagacacccacgtagcccacagggcaacggccttgaggagactatctgcagcatgaggtcccacgagaacattgacgaccctgctcgtgctgacgtgt

SEQ ID NO: 143957 - DNA, 352 bp, Arabidopsis thaliana
ctttcatttttttatcagtttctcatttctctctcagtcgcatataaatttgaaacgccgattcgtttttgctctttaagctttcttcttgatttcgacggtgtctctcaatctccgtcaagcttgacgaatttcaggagctatatataccatggcgctcttgtctcaagcaggaggatcatacactgttgttccttctggagtttgttcaaagactggaactaaagctgttgtttcgggtggcgtgaggaatttggatgttttgaggattaaagaagcttttggtagctttctactctaggagtctatctactaaatttatgcttttccattctgttaatatgagtaagat

SEQ ID NO: 143958 - DNA, 411 bp, Arabidopsis thaliana
gcatttttagtttgtgtttggcctcctctgtttttacaaactctgttcctaattggtttcgatcattggccgccgtttaagtggggaccaaaatttccatattctccacctaaaccgccgccaatcgagaaatatcctccaccggtgcagtatccaccaccgatcaagaagtattcaccgccaccatacgagcattcaccggtgaagtatccaccaccgatcaagacttaccctcatccgccggtgaagtatcctccaccagaacagtatccaccgccgattaagaagtatcctccaccagaacagtatccaccgtcgtttaagaagtatccttcaccagaacagtattcaccgcctttcaagaagtatcctccgccagaacagttttcaccaccgatcaagaagtattct

SEQ ID NO: 143959 - DNA, 404 bp, Arabidopsis thaliana
  unsure (1)..(404): unsure at all n locations
ctaacctttagagagagaaaaacaaatgtcgttccgtagcatagttcgtgatgtgagagatagtataggaagtctatcgaggcgtagtttcgactttaagttaagcagcttgaacaaagaaggtggtaaatcccgtggttcggttcaagattctcatgaggaacaacttgtagtaacgattcaagaaacaccgtgggcgaatctacctccagagttattacgtgatgtgatcaaaagacttgaagagagtgaaagtgtgtggcctgctcgtagacatgttgttgcttgcgcttctgtttgcaggtcatggagagatatgtgtaaagagattgttcaaagtccggagctctcatgcaaaatcacattttcttgtttgttgaaaaagnctggaccaagagatgcaa

SEQ ID NO: 143960 - DNA, 409 bp, Arabidopsis thaliana
gtaaacaagaacaaaaaaatggcggattcagctagaggaacccatcacgatatcatcggcagagaccagtacccgatgatgggccgagaccgagaccagtaccagatgtccggacgaggatctgactactccaagtctaggcagattgctaaagctgcaactgctgtcacagctggtggttccctccttgttctctccagccttacccttgttggaactgtcatagctttgactgttgcaacacctctgctcgttatcttcagcccaatccttgtcccggctctcatcacagttgcactcctcatcaccggttttattttctttggagggtttggcattgccgctataaccgttttctcttggattacaagtacgcaacgggagagcacccacagggatcagacaagtt

SEQ ID NO: 143961 - DNA, 414 bp, Arabidopsis thaliana
cgagaattcatttgaatattggtgcataaaacatttgagatgttgacaaaaaaatggctttttgagatgtattggcgtattgcgtgcgcatattcatatccactatccaaaatcaatattggaccactggaatctcctcgatccacttttttgtccccgtaagttttgtcctcaactctttgaaaataactattctctgcattcttctatagtatataagtatacaaatttcaattttttttgtttttcagaaaatatcagtatttaaactatagatcttgtaaaatactagatacgatatagtaacacgatggttttttagaaaaagcaaaaccactagcttttatgtaacgaggtgatatggttgacgattaatcatatttttttttgagttacgaattagatagtatatat

SEQ ID NO: 143962 - DNA, 415 bp, Arabidopsis thaliana
aacctctctctctcacactctacactctgataacagcgtttatcttgctttctcctgccaaaaagtcccaaaaaacatcaatttctccagagaaacctctcaggttctacatgtgaatgtttggtaaagacagaaagaaagaaaagaggagagacatctgtgacttctttcataaacggtgtcgttctcatttctccttttattcccactagcaatctttgaaacggacccttcagtttttattttttttgcttgctggtctcaatagtaaagtttgaatattttctaaaaagaaagagagctttttttgagattttagcattctgggtttctttcaaatggtttcgtgttctagaagaagtacatagctccaaaagactacatttttgctcaaatgggtccttaaattcgggtt

SEQ ID NO: 143963 - DNA, 446 bp, Arabidopsis thaliana
ctgcacgtaccgaaccgcaatttccggcccaggcctacccaacaaaaagaaaatggttaagctcagcaatcttctcgttgcaaccttcggggttctcctcgtccttaacggctgccttgcgaggcagtcacttggggttcctcctcagctacagaacgagtgtaacctcgacaacctagatgttctccaagccaccgaaactatcaagagtgaagccggtcagatcgagtactgggaccacaaccaccctcagctccgatgtgttggtgtttccgttgctcgttatgtaattgaacaaggcggtctttacttgcccaccttcttcacttccccaaaaatttcctacgtcgttcaaggaacgggtatcagcggaagagtggtccctggatgtgccgagaccttcatggactcgcagtcgatgcaaggacaacaacaaggccaaccat

SEQ ID NO: 143964 - DNA, 403 bp, Arabidopsis thaliana
cactcacaaattaaaaagagagagagagagagagacagagagagagagagattctgcggaggagcttcttcttcgtagggtgttcatcgctattaacgttatcgcccctacctcagctccatctccagaaacatgggtgcaggtggaagaatgccggttcctacttcttccaagaaatcggaaaccgacaccacaaagcgtgtgccgcgcgagaaaccgcctttcttggtgggagatctgaagaaagcaatcccgccgcattgttttaaacgctcaatccctcgctctttctcctaccttatcagtgacatcattatagcctcatgcttttactacgtcgccaccaattacttttttttccttcctcagcctctctcttacttggcttggccactctattggg

SEQ ID NO: 143965 - DNA, 412 bp, Arabidopsis thaliana
taaagaggaagaaaaatgggtcgagtctcatctattatctctttctctttgacactcttgatcctcttcaatggctacactgcccaacagtggcccaacgagtgccagctcgatcaactcaatgcgctcgaaccatcccaaatcatcaagagcgagggtggtcgcatcgaggtctgggaccaccatgcaccccagctccgttgctccggctttgcctttgagcgtttcgtcattgagcctcagggtcttttcttgcccactttcttgaacgccggcaaactcacgtttgttgttcacggaaggggtctaatgggaagagttattccgggatgcgccgagacgttcatggagtcaccggtatttggagaaggtcaaggtcagggtcagagtcaagggtttcctgacatgcacc

SEQ ID NO: 143966 - DNA, 415 bp, Arabidopsis thaliana
ctagtgtctacatatataaaaagatcatgacgaccaccgttattatcattatcttcgttgccatcttcgctacgactcttcacgacgccagaggagcaaccatggaaccgtgtctcgaatcaatgaagactgcttcgcttcctgatcttccgtatgcttatgatgcgctagagccagcaatcagtgaggagatcatgcggctacaccatcagaaacaccaccagacttatgtcactcagtacaacaaagccctcaacagccttcgttctgccatggctgacggtgatcactcctccgtcgtcaaactccaaagcctcatcaagttcaacggcggagggcacgttaaccatgcaatcttctggaaaaacctagccccggttcatgaaggaggtggcaaaccaccgcatgatccttt

SEQ ID NO: 143967 - DNA, 203 bp, Arabidopsis thaliana
ggggcgacccacgcgttcgctgactcttcacacattccaattttttttgttagtcaatcaaataatagataggaaatgcgtcggtttgaaaagtgatgaattgcttgtcgtagaatattactctcgacagacttaataaacctaacttaagtaaaaaaaaaaattactaaaaacaagagttcggacaactccccttttccatt

SEQ ID NO: 143968 - DNA, 372 bp, Arabidopsis thaliana
attgaagatgaggaagctgagaaacccgaaggatggttagatgatgagcctgaggaggtcgacgaccccgaagcgaccaagcctgaagattgggatgatgaggaagatggtatgtgggaggctcctaaaattgacaaccccaagtgtgaagcagcacctggttgtggtgaatggaagagaccaatgaagaggaatcctgcttacaagggcaaatggagctcacctcttattgataacccggcttacaagggaatctggaaacccagagatatccctaaccctgactactttgagctagacagacccgattacgaacccattgcagccatcggtattgagatctggacaatgcaagatggtattcttgttgac

SEQ ID NO: 143969 - DNA, 424 bp, Arabidopsis thaliana
cgcaaacgcgaacgctattctttattttacagacggggaagcccaaatccagatcgtaaacgacaatggtaacagagtgtttgacggacaagtctctcaaggacagctcatagccgtaccacaaggtttctcggtggtgaaacgcgcaacaagcaaccgattccagtgggttgagttcaaaacaaacgctaacgcgcaaatcaacactctggcgggacgaacctcagtcttgagaggtttaccacttgaagtcataaccaatgggttccaaatctcacccgaagaagcaaggagggtcaagttcaacacgctcgagaccactttgactcacagcagtggcccagctagctacggaaggccaagagtggctgcagcttaagagctttaaaccgcggcttaacaatgaaccgctactgtaaaagga

SEQ ID NO: 143970 - DNA, 388 bp, Arabidopsis thaliana
aaacatacacaagtaattaactaattatcaaatggcgaacaagctcttcctcgtctgcgcagctctcgccctgtgtttcatcctcaccaacgcttccgtctatcgcacggttgtcgagttcgacgaagatgacgccagtaaccccataggcccaatacagaaatgtcagaaggagtttcagcaagaacagcacctaagagcttgccagagatggatgcgcaagcaaatgtggcaaggacgtggtggtggtccttccctcgacgatgagttcgatatggaagacgacatcgagaacccgcagagacgacagctactccagaagtgctgcagcgagcttcgccaagaagagccaggttgcgtttgccccaccttgagacaagctggcaag

SEQ ID NO: 143971 - DNA, 389 bp, Arabidopsis thaliana
cacacaaaacagataaaattcatagtatggtaacgaaacacttatcaaacccattggttgatctacattacaattacaacttcataacataaaccaaaacgacccaaaaagaaaaacacataggcgggtggtgaaatccctcctctgcccctacccacttttgttttttaaaccacaagacagaagcttgaaaaaagaagataaaacaaaataaaaaaattataaaacaaaggaacccattggtgaaacatagaggtcccttaagacacaccactttactaattaacacccacttactaaaaccctaatccttaacatgactaaaagagcccttattaaacaagcttttttttcattttacccctcaagagttaaagaaaaagttttaa

SEQ ID NO: 143972 - DNA, 433 bp, Arabidopsis thaliana
atctatcggtcctgtggttggaggcgttgattatgcctatgctgtacgcgcgcgctaggcgtgtgtctttatgcgaaggaagggaagcgacctgctagagttcaaagtccaagcagcaacatggctattcatccgcatcattcgggtgacaacgatgacattaaactcactgttgcagattctagtcttaacagtggtggaggaagagatcgctacagtcacagcggaagtgcatcgagtgatattcacgttgttgaagctgcgaacttggttatatcgatacaggtccttgggaatgtgacgaataacttcagcgcagagaatattctcgggagaggtgtgttcggcacagtttacaaaggcgaaacttcaccatcggacaaaaatagctgtgaaaagaattgagtcttcctttgtgagtgatcaatgtctt

SEQ ID NO: 143973 - DNA, 428 bp, Arabidopsis thaliana
tacacacatagcaaaaaatggcaaacattatgttcctcgtctgcgcagctctcgctctctgcttcctcctcaccaacgcttccatctaccgcaccgtcgttgagttcgaagaagatgacgccactaaccccataggcccaaaaatgaggaaatgccgcaaggagtttcagaaagaacaacacctaagagcttgccagcaattgatgctccagcaagcaaggcaaggccgtagcgatgagtttgatttcgaagacgacatggagaacccacagggacaacagcaggaacaacagctattccagcagtgctgcaacgagcttcgccaggaagagccagattgtgtttgccccaccttgaaacaagctgccaaggccgttagactccagggacagcaccaaccaatgcaagtcaggaaaatttaccagaca

SEQ ID NO: 143974 - DNA, 428 bp, Arabidopsis thaliana
caaaaagaaaatggttaagctcagcaatctcctcgttgcaaccttcggggttctcctcgtccttaacggctgccttgcgaggcagtcacttggggttcctcctcagctacagaacgagtgtaacctcgacaacctagatgttcttcaagccaccgaaactatcaagagtgaagccggtcagatcgagtactgggaccacaaccaccctcagctccgatgtgttggtgtttccgttgctcgttatgtaattgaacaaggcggtctttacttgcccaccttcttcactttcccaaaaattttctacgtcgttcaaggaacgggtatcagcggaagagtggtccctggatgtgcccagacctttatggactctcagtcgatgcaaggacaacaacaaggccaaccatggtaaggacgacagggacaacaag

SEQ ID NO: 143975 - DNA, 426 bp, Arabidopsis thaliana
accgggacggaatgcctcggatcgacgccacgcgtatcgatcggtgctgtggatctagccagtcactataaccagcttgaccgcaacccaaggccattttacttagccggaaacaacccacaaggtcaagtatggctacaaggccgagagcaacagccacagaagaacattttcaatggatttggacccgaggttattgctcaagctttgaagatcgatcttcagacagcgcagcaacttcagaaccaagatgacaaccgtggaaacattgtccgagttcaaggcccgttcggtgtcattaggccgcctttgaggggccagagacctcaagaggaggaagaagaagaagaaggacgacatggacgacacggtaatggcttagaggagaccatttgcagcgccaggtgcaccgataacctcgatgac

SEQ ID NO: 143976 - DNA, 286 bp, Arabidopsis thaliana
aagaggaagaaaaatgggtcgagtctcatctattatctctttctctttgacactctggatcctcttcaatggctacgctgcccaacagtggcccaacgagtgccagctcgatcaactcaatgcgctcgaaccatcccaaatcatcaagagcgagggtggtcgcatcgaggtctgggaccaccatgcaccccagctcctgtgctgcggctttgcctttgagcgttttggcattgagccttaaggtctttttttgcccactttcttgaacgccggcaaactcacgttt

SEQ ID NO: 143977 - DNA, 429 bp, Arabidopsis thaliana
ctcctctgaatttttaagacaaaatagatttcttcttctctttgtttgacccacattttctctggaaaaaattcgtctactttctccgatcgtctcttcattgatcggaaaaccaacaacgacccattattcctctcctgtttctggcgcaaacccttgtagcaagttttgattttggtgagaaaatattttagggatctgaagagaaagaacacgatgatgacgagtatggaagggatggtggagaaaggagtattggatgatattataagaagattgttagaaggtaaaggaggcaaacaggttcagctttccgagagcgagattcgtcaactctgctttaacgctcgtcaaatcttcctctctcaacctaatctccttgatctccatgccccaattcgcatctgcggtgatattcatggtcaatat

SEQ ID NO: 143978 - DNA, 430 bp, Arabidopsis thaliana
aagaaaggcaaggtgggaacattacaatgccttggctgaacaagaaattcagaaagatcaagaagctgacaaagctcgacacactaaagaggccaatgaaacccacgcaaaagatagtggaaagaatggtgaggatatatcttccatccttaaagatatgaggttggaggaagagtcattaagggctctccaagaagagactgaagagacgaatgctgaagcaactttgatcaatggtgaggatgatattgatcatgatattgaagtcgaagctgaggggatcgatgttgcaaatcaagcgctagagaacttggagattgctagtgaggctgaggataccttcgaggcatcatcgattggagatgatggtagcagcgagcagagttggtcattgagagctttatctgagtccagtgtagcttgtataact

SEQ ID NO: 143979 - DNA, 393 bp, Arabidopsis thaliana
gccaaagtagacgactacttgtagtaaacaaaacctttggctttaacactctcctccaaatcccagatctctctctgtctctgtcccgcggagtccccgagagattgatcaccatcacttttgtaccttccttgtactacctatggcgtctgctagcttcgttaagcctaacaccctctcttctccatggatcggccaacgctcctttgctcacacctctgcttcttcttctcctcctcctcgagtctccttcgcgatccgcgccggtgcttactccgacgagcttgttaaaaccgccaaaagcattgcatcccctgggagaggtatcttggcgatcgatgagtccaatgcaacctgtgggaagaggcttgcttctatcggcttggataacac

SEQ ID NO: 143980 - DNA, 429 bp, Arabidopsis thaliana
aagaggaagaaaaatgggtcgagtctcatctattatctctttctctttgacactcttgatcctcttcaatggctacactgcccaacagtggcccaacgagtgccagctcgatcaactcaatgcgctcgaaccatcccaaatcatcaagagcgagggtggtcgcatcgaggtctgggaccaccatgcaccccagctccgttgctccggctttgcctttgagcgtttcgtcattgagcctcagggtcttttcttgcccactttcttgaacgccggcaaactcacgtttgttgttcacggaaggggtctaatgggaagagttattccgggatgcgccgagacgttcatggagtcaccggtatttggagaaggtcaaggtcagggtcagagtcaagggttccgtgacatgcaccagaaagtagagcacctacg

SEQ ID NO: 143981 - DNA, 367 bp, Arabidopsis thaliana
  unsure (1)..(367): unsure at all n locations
caacaaacaaaaagaaaatggttaagctcatcaatctcctcgttgcaaccttcgggggtctcctcgtccttaacgggtggcttgcgaggcantcacttggggttcctcctcagctacagaacgagtgtaacctcgacaacctagatgttctccaagccaccgaaactatcaagagtgaagccggtcagatcgagtactgggaccacaaccaccctcagctccgatgtgttggtgtttccgttgctcgttatgtaattgaacaaggcggtctttacttgcccaccttcttcactttcccaaaaattttctacgtcgttcaaggaacgggtttctgcggaagagtggtccctggatgtgccgtgacctt

SEQ ID NO: 143982 - DNA, 380 bp, Arabidopsis thaliana
gttaagggacctttccaggtcgtgaggtcacctctaagacagccctacgagagcgaggagtggagacacccacgtagcccacagggcaacggccttgaggagactatctgcagcatgaggtcccacgagaacattgacgaccctgctcgtgctgacgtgtacaagcccagcctaggtcgcgtgaccagcgtcaacagctataccttgcccatcttggagtatgtcaggctcagtgccactcgtggcgttctccagggtaatgcgatggtgctttctaaatacaacatgaacgctaacgagatcttgtactgcactggaggacaaggaaggatccaagtggtcaacgacaacggacagaacgtgttggaccaacaggtgca

SEQ ID NO: 143983 - DNA, 362 bp, Arabidopsis thaliana
aacaaaaagaaaatggttaagctcagttatctcctcgttgcaaccttcggggttctcctcgtccttaacggctgccttgcgaggcagtcacttggggttcctcctcagctacagaacgagtgtaacctcgacaacctagatgttctccaagccaccgaaactatcaagagtgaagccggtcagatcgagtactgggaccacaaccaccctcagctccgatgtgttggtgtttccgttgctcgttatgtaattgaacaaggcggtctttacttgcccaccttcttcactttcccaaaaattttctacgtcgttcaaggaacgggtatcagctgaagagtggttcctggatgtgccgagacctt

SEQ ID NO: 143984 - DNA, 400 bp, Arabidopsis thaliana
gaaggtggaacatgtgagacgcggagacgtctttgccaacactccaggctctgcccactggatctacaactcaggagaacagccacttgtcatcatcgctcttctcgacatcgccaactaccaaaaccaactcgaccgcaaccctagagtgttccatttggccggaaacaaccagcagggaggctttggcggttcacagcaacaacaagaacagaaaaacttgtggagcgggttcgacgcacaggtcatagctcaagcattgaaaattgacgttcagttggctcagcagcttcagaaccaacaagacagcagaggaaacatcgttcgtgttaagggacctttccaggtcgtgaggccacctctaagacagccctacgagagcgaggggtggagacaccca

SEQ ID NO: 143985 - DNA, 422 bp, Arabidopsis thaliana
atgacagcaaaattcttgaatattttgtaggccatggtctttgtaacttgtcaagaacatagatacgtcggataaattcatagatatcaattcaaatgataagctagcttacgaaaagcgtttctcaagaaactatgatttttttctaagaattagttggtcgttacgataaataagaaaccttgaattgatggaaaagaagataaggaattaattaagagattggtaaaatggtagttgagaaagtaaaaaggtcacgtgttagggcaaatcattaatggaagaaggagaaagcaggtagaaatgcactctccattttcattacattacaaactccacgtgaggtttcaccgattgtaggaactcctgattttgggttaattactcacaagtaattatcatatagcgcgttgcttaatatt

SEQ ID NO: 143986 - DNA, 427 bp, Arabidopsis thaliana
aaaacatacacacatagcaaaaaatggcaaacaagttgttcctcgtctgcgcagctctcgctctctgcttcctgctcaccaacgcttccatctaccgcaccgtcgttgagttcgaagaagatgacgccactaaccccataggcccaaaaatgaggaaatgccgcaaggagtttcagaaagaacaacacctaagagcttgccagcaattgatgctccagcaagcaaggcaaggccgtagcgatgagtttgatttcgaagacgacatggagaacccacagggacaacagcaggaacaacagctattccagcagtgctgcaacgagctttgccaggaagagccagattgtgtttgccccaccttgaaacaagctgccaaggccgttagactccagggacagcaccaaccaatgcatgtcaggaaaattta

SEQ ID NO: 143987 - DNA, 300 bp, Arabidopsis thaliana
ggtttccagatctctcccgaggaagctaggaagatcaagttcaacacacttgagaccactttgacccgcgctgccggtaggcaacaacaacagttgatcgaggagattgtcgaggcttaaatcaaaacgtttttctttttcttaataaagtatggtcagtttgtaatcacgtccctttacctttaacgtacgtgtaaaatatgtgtctgcggcacctcacttgtaataacactttcttctcataaataaaagggaagtttcgagtttaaaaaaaaaaaaaaaaaaaaaaaaaaaaaatat

SEQ ID NO: 143988 - DNA, 382 bp, Arabidopsis thaliana
agaaaaatgggtcgagtctcatctattatctctttctctttgacactcttgatcctcttcaatggctacactgcccaacagtggcccaacgagtgccagctcgatcaactcaatgcgctcgaaccatcccaaatcatcaagagcgagggtggtcgcatcgaggtctgggaccaccatgcaccccagctccgttgctccggctttgcctttgagcgtttcgtcattgagcctcagggtcttttcttgcccactttcttgaacgccggcaaactcacgtttgttgttcacggaaggggtctaatgggaagagttattccgggatgcgccgagacgttcatggagtcaccgggatttggaggaagtcaaggtcagggtcagagtc

SEQ ID NO: 143989 - DNA, 427 bp, Arabidopsis thaliana
aagaggaagaaaaatgggtcgagtctcatctattatctctttctctttgacactcttgatcctcttcaatggctacgctggccaacagtggcccaacgagtgccagctcgatcaactcaatgcgctcgaaccatcccaaatcatcaagagcgagggtggtcgcatcgaggtctgggaccaccatgcaccccagctccgttgctccggctttgcctttgagcgtttcgtcattgagcctcagggtcttttcttgcccactttcttgaacgccggcaaactcacgtttgttgttcacggaaggggtctaatgggaagagttattccgggatgcgccgagacgttcatggagtcaccggtatttggagaaggtcaaggtcagggtcagagtcaagggttccgtgacatgcaccagaaagtagagcaccta

SEQ ID NO: 143990 - DNA, 432 bp, Arabidopsis thaliana
ctatcgccaccggaagaagcttcgtattattaccgtcataccaaaagatacaacacctgctcttcttcaaccaccagagcggaatcatcgaatcatcggtttccgatttcgtcaaacgtcccaaaatctctcatccgaattacatatcaagttccgagatcgaatcagagttttctcatcacgatccagatttcgcaagagtcaacaacggtaggttcgcgcgttggccgtcatcaatcctagctctacagcgagattggcagctccggctccttcttaatccggctcgcttgtataacgactaactcaaaccaaaaatctccgattctagatctgtaatcaaacggttaataaacgccgagcatgacgatgaagtctcgatcgttgataacgcaacaaccgtagcagcaatctgtctttaacaaaccgttt

SEQ ID NO: 143991 - DNA, 365 bp, Arabidopsis thaliana
aaagaaaatggttaagctcagcaatctctttgttgcaaccttcggggttctcctcgtccttaacggctgccttgcgaggcagtcacttggggttcctcctcagctacagaacgagtgtaacctcgacaacctagatgttctccaagccaccgaaactatcaagagtgaagccggtcagatcgagtactgggaccacaaccaccctcagctccgatgtgttggtgtttccgttgctcgttatgtaattgaacaaggcggtctttacttgcccacccttttcactttcccaaaaatttcctacgtcgttcaaagaacgggtatcagcggaagagtggtccctggatgtgccctgaccttcatggact

SEQ ID NO: 143992 - DNA, 424 bp, Arabidopsis thaliana
aatcggcaaagcaggaatcgagaaaagattcggcatgttcgccttcacgctcacttttctcctctcttcaacagccgaaaccctcccgatcttcatcaacgagcgtccaattcttctcagggagacttcgagtggtgtttacagactctcctctcacattctcgcaaatacactcgtattcttgccgtacttgttcgttatctcaatcatttactctgtttcggtctatttcctcattggtctctgccccacatggcaagcttttgggtacttcgttctcgtgatatggatcattctcctaatggcgaactcttttgttctcttcttgagctctcttgccccaaattacattacgggaacctctcttgtgacaattcttctagcggctttcttcttgttttccggttacttcatttccaaggaa

SEQ ID NO: 143993 - DNA, 361 bp, Arabidopsis thaliana
aacaaaaagaaaatggttaagctcagcaatctcctcgttgcaaccttcggggttctcctcgtccttaacggctgccttgcgaggcagtcacttggggttcctcctcagctacagaacgagtgtaacctcgacaacctagatgttctccaagccaccgaaactatcaagagtgaagccggtcagatcgagtactgggaccacaaccaccctcagctccgatgtgttggtgtttccgttgctcgttatgtaattgaacaaggcggtctttacttgcccaccttcttcacttgcccaaaaatttcctacctcgttcaaggaacgggttttagcggaagagtggtccctggatgtgccgagacct

SEQ ID NO: 143994 - DNA, 413 bp, Arabidopsis thaliana
ttcttattcgcttccctttcttgaattgtgatctttttgaggtgacaaatggagatttcggagagagctagagctcgattagccgttctcaatgcgcacttgacagtatctgagccgaatcaggtgttgccagcgatcgaaccatggtgcacatcggctcacataaccgctgcaccgcatggatcgcttaaaggaaatttgaagatcgtcgatgagcgtacggggaatgaatatcaggtcccagtctcagagcatggtaccgttaaaaccgttgatctcaagaagataacgacagggaaggatgacaaggggcttaacttatacgatcctggttacttaaacacggcttctgttcgatcttcgatttcttacattgatggagatgagggaatcctacgttttcggggataccc

SEQ ID NO: 143995 - DNA, 429 bp, Arabidopsis thaliana
caacaaacaaaaagaaaatggttaagctcagcaatctcctcgttgcaaccttcggggttctcctcgtccttaacggctgccttgcgaggcagtcacttggggttcctcctcagctacagaacgagtgtaacctcgacaacctagatgttctccaagccaccgaaactatcaagagtgaagccggtcagatcgagtactgggaccacaaccaccctcagctccgatgtgttggtgtttccgttgctcgttatgtaattgaacaaggcggtctttacttgcccaccttcttcacttccccaaaaatttcctacgtcgttcaaggaacgggtatcagcggaagagtggtccctggatgtgccgagaccttcatggactcgcagccgatgcaaggacaacaacaaggccaaccatggcaaggacgacagggac

SEQ ID NO: 143996 - DNA, 411 bp, Arabidopsis thaliana
ctctctctcagatccgattcaagctttccgatttgcgatggacggtggagcggaaggatctcagcagcctcaccttattctagccaacaagctcttcctcctcactcatccagatgttccagacatcgagaaagtccagctcaagtctgaggttttggatttcatcagatcccatggtatggctcctttgtacgaaaccctaattgcctcttcggtgctggatttggatcaaagcttgttagagtctatgcgggccgctaatgaagaggagcttaagaagctcgacgagaagattgcagatgcagaagaaaatttgggtgaaagtgaagttcgtgaagctcatcttgctaaggctctgtattcatcaggatagggataaggagaaagctctggagcagctaaaactcactg

SEQ ID NO: 143997 - DNA, 250 bp, Arabidopsis thaliana
aagaggaagaaaaatgggtcgagtcttatctattatctctttctctttgacactcttgatcctcttcaatggctacactgcccaacagtggcccaacgagtgccagctcgatcaactcaatgcgctcgaaccatcccaaatcatcaagagcgagggtggtcgcatcgaggtctgggaccaccatgcaccccagcttcgttgcttcggctttgcctttgagcgtttcgtcattgagcctcagggtcttttt

SEQ ID NO: 143998 - DNA, 398 bp, Arabidopsis thaliana
gagatatggaattcttctcaggtagagaaggagttccatattccacagaaagttcatggctctgtatacgttgatggatggtttgaagggatctcttggaattcagatgagactcatgttgcgtatgtcgccgaggagccatctcgtcccaagcctacatttgatcaccttggttattacaagaaaggaaattctttggacaaggatattggaagctggaaaggtgaaggggattgggaagaggaatggggagaagcatacgccggaaaaaggcagcctgcgctgtttgttatcaaatgtgacagtggagaggtcgagccaatcaaaggaattcctagatcaaaaagttgtggacaggttgtttggagttcaaacaggtaccgatcatcttaatattt

SEQ ID NO: 143999 - DNA, 389 bp, Arabidopsis thaliana
caaaaagaaaatggttaagctcagcaatcttctcgttgcaaccttcggggttctcctcgtccttaacggctgccttgcgaggcagtcacttggggttcctcctcagctacagaacgagtgtaacctcgacaacctagatgttctccaagccaccgaaactatcaagagtgaagccggtcagatcgagtactgggaccacaaccaccctcagctccgatgtgttggtgtttcccgtgctcgttatgtaattgaacaaggcggtctttacttgcccaccttcttcactttcccaaaaattatctacgtcgttcaaggaacgggtatcagcggaagagtggttcctggatggtccgagacctttatggactcttagccgatgcaaggacaac

SEQ ID NO: 144000 - DNA, 430 bp, Arabidopsis thaliana
ctgaaatctccttacccaacacaccctttctcacatacattgacatttgacacattctttgttatttctcaattagtattgtcctttaagtacataaaatgattgtttttgtaacaatgatgggtaatttatagtttacactaatgttgttagtttgttgccatctagggttcatctaaaataataataataaaaaaaaaaaatctagggttcatctttaggaaaaaagcatgtcgacaaaagagaatctaaatggtcgatgtgttcaatgtttagtgcctcatgggatttttcaaacgtagcactatatcaaagattcaaagtgtaacgtttaagacaaggaaaacaattgttagcataagaataactaagtttgtaataaactatatttaaatgcaaatatgcaatatagtccgatacgtcaatcgtt

SEQ ID NO: 144001 - DNA, 394 bp, Arabidopsis thaliana
ctttcgaatttttcgatcagatcattgtcgttaagcaaatataaaacaaatcaggagcaaaccttattgttcttccttaggtatgcatgtgcacctcttctgttcttctgttaactcctatatgatccacaccaaaataaaccaactcaaaaatgcatacttaaatagtaattaagaactctttttactatatactttgttgactaatcatttttcattcatctattgggttcctctaaaaggttttgtgtatatatattaacttagataatttacctggatctgcctttgaagaactttcacgtattctactgcttcttctaacatgtcttgccgtgtggtttgctgcaacaaagacaaaaaaggaaacctagattcaagatctttatatatt

SEQ ID NO: 144002 - DNA, 109 bp, Arabidopsis thaliana
gacacttgacacataccacacctcatcgtgtgttttatgataaatgtaagcttttggatgtttgagggtaatgtaagcactacttaataaataagagttttgtttattt

SEQ ID NO: 144003 - DNA, 296 bp, Arabidopsis thaliana
cccacgcgtccgagaggaagaaaaatgggttgagtctcatctattatctctttctctgtgacactcttgatcctctgcaatggctacactgtccaacagtggcccaacgagtgccagctcgatcaactcaatgcgctcgaaccattccaaatcatcaagagcgagggtggtcgcatcgaggtctgggaccaccatgcaccccagcttcgttgctccggctttgcctttgagcgtttcgtctattgagcctcaagggttattttttgcccactttttttgaacgcctggtaaaactt

SEQ ID NO: 144004 - DNA, 258 bp, Arabidopsis thaliana
aaaaatggctcgagtctcttctcttttttctttctccttaacacttttgatccttttccatggctacgcggctcaacagggtcagcagggtcagcagtttccgaacgagtgccagctcgaccagctcaatgcgctcgagcctttacacgtactgaagagcgaggctggtcgcatcgaggtgtggtaccaccactcttctcagcttctttgctcatgtgttttttttgttctttacatcattatagtcttttggtcttt

SEQ ID NO: 144005 - DNA, 305 bp, Arabidopsis thaliana
aacaaacaaaaagaaaatggttaagctcagcaatctcctcgttgcaaccttcggggttctcctcgtccttaacggctgccttgcgaggcagtcacttggggttcctcctcagctacagaacgagtgtaacctctacaacctagatgttctccaagccaccgaaactatcaagagtgaagccggtcagatcgagtactgggaccacaaccaccctcagtttcgatgtgttggtgttttctgatgcttgatatgtaatttaacaaggctgtttttatttgtccatcttctttactttctcaaaaatt

SEQ ID NO: 144006 - DNA, 361 bp, Arabidopsis thaliana
  unsure (1)..(361): unsure at all n locations
ataagaaataacaaaatggctcgagtctcttctcttctttctttcttcttaacacttttgatccttttccatggctacgcggctcaacagggtcagcagggtcagcagtttccgaacgagtgccagctcgaccagctcaatgcgctcgagccgtcacacgtactgaagagcgaggctggtcgcatcgaggtgtgggaccaccacgctcctcagctccgntgctcaggtgtctcctttgcacgttacatcatcgagtctaagggtctctacttgccctctttctttaacaccgcgaagctctctttcgtggctaagggacgaggtcttatgggaaaagtgatccctggatgcgccgaaacat

SEQ ID NO: 144007 - DNA, 371 bp, Arabidopsis thaliana
ccccaaaaatattcctacgtttttttataggaacgggtatcagtcggaagagtggtgccctggatgtgccgagaccttcatggactcgcagccgatgcaaggacaacaacaaggccaaccatggcaaggacgacagggacaacaaggccaaccatgggaaggacagggacaacagggacaacaaggaagacaaggccaaccatgggaaggacagggacaacagggacaacaaggactacagggacaacaaggccaaccatgggaaggacagggacagcaaggacaacaaggggttcgtgacatgcaccagaaggtgggacatgtgagacgcggagacgtctttgtcaacactttcatgctctgcccactgg

SEQ ID NO: 144008 - DNA, 392 bp, Arabidopsis thaliana
caaaaagaaaatggttaagctcagcaatctcctcgttgcaaccttcggggttctcctcgtccttaacggctgccttgcgaggcagtcacttggggttcctcctcagctacagaacgagtgtaacctcgacaacctagatgttctccaagccaccgaaactatcaagagtgaagccggtcagatcgagtactgggaccacaaccaccctcagctccgatgtgttggtgtttccgttgctcgttatgtaattgaacaaggcggtctttacttgcccaccttcttcactttcccaaaaatttcctacgtcgttcaaggaacgggtatcagcggaagagtggtccctggatgtgccgagacctttatggactcgcagccgatgcaaggacaacaac

SEQ ID NO: 144009 - DNA, 396 bp, Arabidopsis thaliana
cgttcagttggctcagcagcttctgatccaacaagacagcagaggaaacatcgttcgtgttaagggacctttccaggtcgtgaggccacctctaagacagccctacgagagcgaggagtggagacacccacgtagcccacagggcaacggccttgaggagactatctgcagcatgaggtcccacgagaacattgacgaccctgctcgtgctgacgtgtacaagcccagcctaggtcgcgtgaccagcgtcaacagctataccttgcccatcttggagtatgtcaggctcagtgccactcgtggcgttctccagggtaatgcgatggtgctttctaaatacaacatgaacgcttacgagatcttgtactgcactggaggacaaggaaggatccaagt

SEQ ID NO: 144010 - DNA, 425 bp, Arabidopsis thaliana
ccatcttcttcttcttcctctctccttcttcggccactttcctcactctctggtctccctatatcagcgctttttagctgatcctctctccggcatttctctctctctcttttttttagccatggagaaatttgcgcctgtcgctgctctgttactgcttcttctctgttttccggtagctttctccggtcatgattatggtcaagctctttccaagagtcttctcttcttcgaagctcagagatctggtgttcttcctcgtaaccagagagtcacttggcgctctcactccggtctcaccgatggcaaatcaagcggcgtgaatctggtcggaggttactacgacgccggagacaatgtgaaatttggattaccgatggcttttacggtgacgatgatggcgtggagtgtgattgagtacggga

SEQ ID NO: 144011 - DNA, 398 bp, Arabidopsis thaliana
gtgtgctcttagcctttactctatagttttatatcatatcaatcgacatggcgaatgtggaccgtgatcggcgtgtgcatgtagaccgtactgacaaacgtgttcatcagccaaactacgaagatgatgtcggttttggtggctatggcggttatggtgctggttctgattataagagtcgcggcccctccactaaccaaatcttggcacttatagcaggagttcccattggtggcacactgctaaccctagctggactcactctagccggttcggtgatcggcttgctagtctccatacccctcttcctcctcttcagtccggtgatagtcccggcggctctcactattgggcttgctgtgacgggaatcttggcttctggtttgtttgggttgacg

SEQ ID NO: 144012 - DNA, 262 bp, Arabidopsis thaliana
acgcgagaaaatggttaaagatcagcaatacttcttgttgcaacacgtcggtgattctcctcgtccttaacggctgccttgcgaggcagtcacttggggttcctcctcagctacagaacgagtgtaacctcgacaacctagatgttctccaagccaccgaaactatcaagagtgaagcccgtcagatcgagtactgggaccacaaccacccttagctccgatgtgttggtgttttcgttgctcgttatgtaatttaacaagg

SEQ ID NO: 144013 - DNA, 160 bp, Arabidopsis thaliana
caaagaaagagtttttttaactagctttgttcaaagtgtttgcttaagacaagaagaacatggcgtcttaccagaggcgtccaggaggtcaggccactgacgagtacggaaacccgatccagtagtagtttgactagtactgaaattcgatgggaggagg

SEQ ID NO: 144014 - DNA, 291 bp, Arabidopsis thaliana
aaaatatctcataaagatcaaatatacactaaacctgaaagcaaaaaaatggcagcacgagcaacattcatattctatgctctcttcctaaccacactccaattccttctaacacaccatgtgtcatccgccgcccgaggattatggaaatacatcgcccccaacgtcggaatcttcgcgatgcatatgcaacttctccataacgaccgtgtcgtaatgtacgaccgaaccaactttggaccatcaaacatctttttacctaacggtaactgccgggccaccccctaagac

SEQ ID NO: 144015 - DNA, 393 bp, Arabidopsis thaliana
caaaaagaaaatggttaagctcagcaatctcctcgttgcaaccttcggggttctcctcgtccttaacggctgccttgcgaggcagtcacttggggttcctcctcagctacagaacgagtgtaacctcgacaacctagatgttctccaagccaccgaaactatcaagagtgaagccgctcagatcgagtactgggaccacaaccaccctcagctccgatgtgttggtgtttccgttgctcgttatgtaattgaacaaggcggtctttacttgcccaccttcttcacttacccaaaaatttcctacttcgtttcaaggaacgggtatcagcggaagagtggtccctggatgtgccggacctttttggactcgcagccgatgcaaggacaacaaca

SEQ ID NO: 144016 - DNA, 292 bp, Arabidopsis thaliana
gcgaggcagtcacttggggttccttcttagctacagaacgagtgtaacctcgacaacctagatgttctccaagccaccgaaactatcaagagtgaagccggtcagatcgagtactgggaccacaaccaccctcagctccgatgtgttggtgtttccgttgctcgttatgtaattgaacaaggcggtctttacttgcccaccttcttcactttcccaaaaattttctacgtcgttcaaggaacgggtatcagcggaagagtggtccctggatgtgccgagacctttatggact

SEQ ID NO: 144017 - DNA, 365 bp, Arabidopsis thaliana
gatgatgccattgccacaacacctggtgtttttcagtggttccacaacgactgacagcaaccacttgtcatggctagcatgttcgatctagccagtcaccagaaccagcttgaccgcaacccaaggccattttacttagccggtaacaacccacaaggtcaagtatggctacaaggacgagagcaacagccacagaagaacatcttcaatggatttggacccgaggttattgctcaagctttgaagattgatcttcagacagcgcatcaacttcagaaccaagatgacaaccgaggaaacattgtccgtgtccaaggccctgtctgagtcattaggccgactttgaggggcccgagaccttacta

SEQ ID NO: 144018 - DNA, 224 bp, Arabidopsis thaliana
  unsure (1)..(224): unsure at all n locations
agaggaagaaaaacgggncgagttttttctattatctctttctctctgacactgttgatcctctttaatggttgggctgcccaacatttgtccaacttgtgccagctcgatcaacttaatgcgctcgtaccattctaaatcatcatgagcgagggtggtcgcatcgaggtctgtgactctccttgcactctagtttcgttgtttctgttttgctcttgagcgtt

SEQ ID NO: 144019 - DNA, 289 bp, Arabidopsis thaliana
tcgcttctttaccattaggttcgaacttttatttaaattaggataatatatggctacatctgctagaagagcatataggagttcgggagtagctgactgaggtcgacttcacaccgtgacttccatttagagtccatctttggcgtgatgttactttccacgttcgtcatcgtctttgctggagaaggctcaatcctcgctctagacaagttgtattgggacacggcggtttatacggggacaaacacgcctggagggttagtactggtggcgttagctaatgcattgg

SEQ ID NO: 144020 - DNA, 400 bp, Arabidopsis thaliana
aacaaaatggctcgagtctcttctcttctttctttcttcttaacacttttgatccttttccatggctacgcggctcaacagggtcagcagggtcagcagtttccgaacgagtgccagctcgaccagctcaatgcgctcgagccgtcacacgtactgaagagcgaggctggtcgcatcgaggtgtgggaccaccacgctcctcagctccgttgctcaggtgtctcctttgcacgttacatcatcgagtctaagggtctctacttgccctctttctttaacaccgcgaagctctctttcgtggctaagggacgaggtcttatgggaaaagtgatccctggatgcgccgaaacattccaagactcatcagagtttcaaccacgcttcgaaggtcaaggtcaaa

SEQ ID NO: 144021 - DNA, 332 bp, Arabidopsis thaliana
cgtcaaaacgcaatggtgcttccacagtggaacgcaaacgcgaacgctattctgtacgtgacagacggggaaggcgggatccagatcgtaaacgacaatggtaacagagtgtttgacggacaagtctctcaaggacagctcatagccgtaccacaaggtttctcggtggtgaaacgcgcaacaagcaaccgattccagtgggttgagttcaaaacaaacgctaacgcgcaaatcaacactctggcgggacgaacctcagtcttgagaggtttaccacttgaagtcataaccaatgggttccaaatttcacccgaagaagcaaggagggtcaa

SEQ ID NO: 144022 - DNA, 433 bp, Arabidopsis thaliana
aagaaaacatacacaaatagcaaaacatggctaacaagctcttcctcgtctgcgcagactctcgccctctgctggcgtcgtcaccaacgcttccatctaccgcaccgttgtcgaattcgaagaagatgacgccagcaaccccgtaggtccaagacagagatgccagaaggagtttcagcaatcacaacacctaagagcttgccagagatggatgagcaagcaaatgaggcaaggacgtggtggtggtccttccctcgacgatgagttcgatttcgagggcccccagcagggataccagctactccagcagtgctgcaacgagcttcgccaggaagagccagtttgcgtttgccccaccttgaaacaagctgccagggcagttagccttcagggacagcacggaccattccaatccaggaaaatttaccagtca

SEQ ID NO: 144023 - DNA, 350 bp, Arabidopsis thaliana
cagaacttgaactccgccggtccgttcgatagttgcgaagaccttccggtactcaattcctacctccattacacctacaattcctcaaattcatctctctccgtcgctttcgtcgccactccatctcaagccaacggtggctgggtcgcttgggctattaaccctacggggactaagatggctggttctcaagccttcctcgcttacagatccggcggtggtgcggctccggtcgtgaagacgtacaacattagcagctacagcagtctcgtcgaaggtaaacttgcttttgatttttggaatctacgcgccgagtcgttaagcggcggtaggatcgccattttcacgac

SEQ ID NO: 144024 - DNA, 407 bp, Arabidopsis thaliana
gaacttgtcccagcggcgaattgtcgaacatctggatccctctgacgaagcatttcgtcggatcttcgaattcgtggtggagaacaccttcgtaagggtatttcactagggagaggtaatggaaccagatccagtagagtgggattcgatctctagagatgaagaatccggagaagaggaggaaataagcgaggattgctacaaccaccgtgaatccgatcatcacgtgtgagactacgccggataagaacgtcacgaaggaactttcggcccaaaacgcggtgaggattgtgaagaagaagaagaggaatccctcggagcctccggcgagtcctacggccgaaaatgttgtggcggcgaatgcggcggataagattatgagagcaaggatggagattatgtgtgag

SEQ ID NO: 144025 - DNA, 434 bp, Arabidopsis thaliana
ctttgaagattgatcttcagacagcgcatcaacttcagaaccaagatgacaaccgtgggaacattgtccgagtccaagggccgttcggtgtcattaggccgcctttgaggggccagagacctcaggaggaggaagaagaagaagaaggacgacacggacgacacggtaatggcttagaggagaccatctgcagcgccaggtgcaccgataacctcgatgatccgtctcgtgctgacgtgtacaagccacagctcggttacatcagcactctcaacagttacgatctccccatccttcgcttcatccgtctctcagccctccgtggatctatccgtcaaaacgcaatggtgcttccacagtggaacgcaaacgcgaacgccattctttacgtgacagacggggaagcccaaatccagatcgtaaacgacaatggt

SEQ ID NO: 144026 - DNA, 277 bp, Arabidopsis thaliana
cgcgattttcgtgcttattagtatggtttcttcaggtacttctttggctcaagagaatgctgttggttgtttggctagtgtaacgagtggggatgaggatttgatgatatctgttgttagagaaggagggattcagtgtttgaagagtttttgggattctgtttctagtgttaagagtcttgaggttggagttgttcttctgaagaacttatcgttgtgtcctattgtgagagaagttgctatatccaatgggtttattcatttcttgttactggtt

SEQ ID NO: 144027 - DNA, 385 bp, Arabidopsis thaliana
ggcgggacgcacgcgtccgcaacaaacaaaaagaaaatggttaagctcattaatctcctcgttgcaaccttcggggggggcctcgtccttaacggctgcggtgcgaggcagtcacttggggttcctcctcagctacagaacgagtgtaacctcgacaacctagatgttctccaagccaccgaaactatcaagagtgaagccggtcagatcgagtactgggaccacaaccaccctcagctccgatgtgttggtgtttccgttgctcgttatgtaattgaacaaggcggtctttacttgcccaccttcttgacttccccatacattaactacgtcgttcaaggaacgggtatcagctgaagagtggtccctggatgtgccgtgacct

SEQ ID NO: 144028 - DNA, 276 bp, Arabidopsis thaliana
ataaaaatggctcgagtctcttctcttttttctttctccttaacacttttgatcctgttccatggctacgcgggtcgacagggtcagcagggtcagcagtttccgaacgagtgccagctcgaccagctcaatgcgctcgagccttcacacgtactgaagagcgaggctggtcgcatcgaggtgtgggaccaccacgctcctcagctccgttgctcaggtgtctcctttgcacgatacatcatcgagtctaagggtatctactttgtcctttttttt

SEQ ID NO: 144029 - DNA, 311 bp, Arabidopsis thaliana
ctccggtgtatagagaggacctcaccgttttagaagtaaccatagaaacgatggaacccactatttatccaagggatttactacgttttgtagttattctatttttttatatcaaggcctttcaaagtaaaggaaaatacctagcaaaaaatagtggtggggaaggttagagtagcaaaagccattggaattttttttatacattggaataattcgttcgtgtattaatagactagtaaaggggaaaagaataacttaaaaaagaattagttattcatcaaagtttgatttattcaatgacttgatttaaa

SEQ ID NO: 144030 - DNA, 426 bp, Arabidopsis thaliana
ctctgttcttgatgtgcactttactcagctgggcttgaacagcgtagcctacttgatgggcaatgatgatgagactaagaaatggcatgtctatgctgcctctgcccaggactccagcaactgcaacaacaatgtctacactctcgagatgtgcatgactggtctggacagagagaaagctgctgtcttctacaaggatgaagctgacaagactgggtcaatgactgataactctggaatcagaaagatccttcccaagtctgagatctgcgactttgaattcgagccctgcggctactctatgaactcaattgaaggggatgcaatctccacgatccatgtgacccctgaagatgggtttagctacgctagcttcgaagctgtgggttacgacttcaacacccttgaccttagccagctggtgac

SEQ ID NO: 144031 - DNA, 340 bp, Arabidopsis thaliana
gaaaatttcaagaaccctagttaataactataatgggttcgagagttttggcttccttctttgttttcttaatcttgacggtcatcacattgcctcccacgatccaagcttgcactccttgtactcgtcctcatcctccggttccgaaacctccacaacacggcggtggtggaggtggtggtagcaagccgcctccacatcacggtggaaaaggtggtggtttacccccaccccacggtggtatatgtgttggtttcgttttttttgttttttgtggactaattctcactctctcatcctctttattatctatctttattttattatttttttttttttt

SEQ ID NO: 144032 - DNA, 386 bp, Arabidopsis thaliana
caaaaagaaaatggttaagctcagcaatctcctcgttgcaaccttcggggttctcctcgtccttaacggctgccttgcgaggcagtcacttggggttcctcctcagctacagaacgagtgtaacctcgacaacctagatgttctccaagccaccgaaactatcaagagtgaagccggtcagatcgagtactgggaccacaaccaccctcagctccgatgtgttggtgtttccgttgctcgttatgtaattgaacaaggcggtctttacttgcccaccttcttcacttccccaaaaatttcctacgtcgttcaaggaacgggtttcagcggaagagtggtccctggatgggccgagaccttcatggactcgcagcctatgcaaggac

SEQ ID NO: 144033 - DNA, 432 bp, Arabidopsis thaliana
ctcgccaaaaaccttgaaacctttaaaaaatcgaaactatggctaagctcattctcgttttcgcaactcttgccctcttcatcctcctagccaacgcatccatctaccgcacagtggtggagttcgaggaagatgatgacgtgagcaacccacaacaaggtaagtgccagagggagtttatgaagcatcagcaactaagaggttgcaagcaatggatccgcaagagagctcaacaaggaagaatcggatacgaagctgatgactttgagctcactcttgatgtcgatcttgaggacgatgagaacccaatggggcctcaacaacagtcatctcttaaaatgtgttgtaatgaattaaggcaagtggacaagatgtgtgtgtgtcctacactgaaaaaggcggctcaacaagtcagattccagggaatgcatg

SEQ ID NO: 144034 - DNA, 399 bp, Arabidopsis thaliana
ctcagcaatctcctcgttgcaaccttcggtgttctcctcgtccttaacggctgccttgcgaggcagtcacttggggttgctcctcagctacagaacgagtgtaacctcgacaacctagatgttctccaagccaccgaaactatcaagagtgaagccggtcagatcgagtactgggaccacaaccaccctcagctccgatgtgttggtgtttccggtgctcgttatgtaattgaacaaggcggtctttacttgcccaccttcttcactttcccaaaaatttcctacgtcgttcaaggaacgggtatcagcggaagagtggtccctggatgtgccgagacctttatggactcgcagtcgatgcaaggacaacaacatggccaaccatggtaaggacgacag

SEQ ID NO: 144035 - DNA, 404 bp, Arabidopsis thaliana
tacatatatatagatacctacatatatatatctctatgtctttgttcatcatcagttatataggtgatgtagatagatggacaaaaaaacagcgtaagacctagtttctgacttacatatgttttaaattctttgtctgaatcattacaggatccgagagagagagctctggaacgatattaacatatatcatgaagaaaaagattgaagtattgatatgggaataactaaaacttctcctaatactacaattctcttgaagacttttcacaataattctatgtcccaagattatcatcatcatcatcatcataatcaacaccaaggaggtatcttcaacttctctaatggattcgaccgatcagattcttccaatttaacaactcagcagaagcaagagcatt

SEQ ID NO: 144036 - DNA, 58 bp, Arabidopsis thaliana
ctcgacaaaaaccttgaaaccttttttatatatcgaaactatggctaagctcattctc

SEQ ID NO: 144037 - DNA, 370 bp, Arabidopsis thaliana
agaaaacatacacaaatagcaaaacatggctaacaagctcttcctcgtctgcgcaactctcgccctctgcttcctggtcaccaacgcttccatctaccgcaccgttgtcgaattcgaagaagatgacgccagcaaccccgtaggtccaagacagagatgccagaaggagtttcagcaatcacaacacctaagagcttgccagagatggatgagcaagcaaatgaggcaaggacgtggtggtggtccttccctcgaccatgagttcgattttgagggccctcaacagggataccagctacttccagcagtgctggaacgagcttcgccaggaagagccaggtttgcgtttgccccaccttgtaacaagctg

SEQ ID NO: 144038 - DNA, 492 bp, Arabidopsis thaliana
catcacaaacgagtaagaatacaaatacaaatagcaaaaaaaatggcaaacaagctcttcctcgtctgcgcaactttcgccctctgcttcctcctcaccaacgcttccatctaccgcactgttgtcgagttcgacgaagatgacgccagcaaccccatgggcccaagacagaaatgtcagaaggagtttcagcaatcacagcacctaagagcttgccagaaattgatgcgcatgcaaatgaggcaaggccgtggtggtggtccctccctcgacgatgagttcgatttggaagacgacatcgagaacccacaaggcccccagcagggacaccagatcctccagcagtgctgcagcgagcttcgccaggaagagccagtttgtgtttgccccaccttgagacaagctgccagggccgttagcctccagggacaacacggaccattccaatccagggaaaattacaagacagctaagtacttgcctaacatttgc

SEQ ID NO: 144039 - DNA, 466 bp, Arabidopsis thaliana
acaggtcatagcgtaagcattgaaaattgacgttcagttggctcagcagcttcagaaccaacaagacagcagaggaaacatcgttcgtgttaagggacctttccaggtcgtgaggccacctctaagacagccctacgagagcgaggagtggagacacccacgtagcccacagggcaacggccttgaggagactatctgcagcatgaggtcccacgagaacattgacgaccctgctcgtgctgacgtgtacaagcccagcctaggtcgcgtgaccagcgtcaacagctataccttgcccatcttggagtatgtcaggctcagtgccactcgtggcgttctccagggtaatgcgatggtgcttcctaaatacaacatgaacgctaacgagatcttgtactgcactggaggacaaggaaggatccaagtggtcaacgacaacggacagaacgtgttggaccaacagtgc

SEQ ID NO: 144040 - DNA, 538 bp, Arabidopsis thaliana
catagctcaagcattgaaaattgacgttcagttggctcagcagcttcagaaccaacaagacagcagaggaaacatcgttcgtgttaagggacctttccaggtcgtgaggccacctctaagacagccctacgagagcgaggagtggagacacccacgtagcccacagggcaacggccttgaggagactatctgcagcatgaggtcccacgagaacattgacgaccctgctcgtgctgacgtgtacaagcccagcctaggtcgcgtgaccagcgtcaacagctataccttgcccatcttggagtatgtcaggctcagtgccactcgtggcgttctccagggtaatgcgatggtgcttcctaaatacaacatgaacgctaacgagatcttgtactgcactggaggacaaggaaggatccaagtggtcaacgacaacggacagaacgtgttggaccaacaggtgcagaagggacagctcgtggtcatcccacaagggttcgcatacgttgtccagtcccacggaaacaagttcgagtggatc

SEQ ID NO: 144041 - DNA, 471 bp, Arabidopsis thaliana
aaaaagaaaatggttaagctcagcaatctcctcgttgcaaccttcggggttctcctcgtccttaacggctgccttgcgaggcagtcacttggggttcctcctcagctacagaacgagtgtaacctcgacaacctagatgttctccaagccaccgaaactatcaagagtgaagccggtcagatcgagtactgggaccacaaccaccctcagctccgatgtgttggtgtttccgttgctcgttatgtaattgaacaaggcggtctttacttgcccaccttcttcactttcccaaaaatttcctacgtcgttcaaggaacgggtatcagcggaagagtggtccctggatgtgccgagaccttcatggactcgcagccgatgcaaggacaacaacaaggccaaccatggcaaggacgacagggacaacaaggccaaccatgggaaggacagggacaacagggacaacaaggagac

SEQ ID NO: 144042 - DNA, 478 bp, Arabidopsis thaliana
ttctctgagaaaaaacaacagatccgaattttatctttaatcagccggaaaaaatggaggaagcgatcgagagacaacgcgttcttcttgagcatctccgaccttcttcttcttcttcgcacaattacgaggcttctctatctgcttctgcttgcttggctggggacagtgctgcatatcagaggacctctctctatggagatgatgttgtcattgtcgcggcacataggactccactatgcaagtccaaacgtggcaatttcaaggatacatatcccgatgatttgctcgcacctgttttgagggcattgatagagaagacgaatctaaacccaagtgaagtaggtgacattgttgtgggtactgttttggcacctggatctcagagagccagtgaatgcaggatggctgcgttctatgctggtttccctgaaaccgtggctgtcagaactgtgaatagacagtgctcatctgggct

SEQ ID NO: 144043 - DNA, 222 bp, Arabidopsis thaliana
aagaggaagaaaaatgggtcgagtctcatctattatctctttctctttgacactcttgatcctcttcaatggctacactgcccaacagtggcccaacgagtgccagctcgatcaactcaatgcgctcgaaccatcccaaatcatcaagagcgagggtggtcgcatcgaggtctgagaccaccatgcaccccagctccgatgctcccgctgtgcctctgagcg

SEQ ID NO: 144044 - DNA, 404 bp, Arabidopsis thaliana
caaaaagaaaatggttaagctcagcaatctcctcgttgcaaccttcggggttctcctcgtccttaacggctgccttgcgaggcagtcacttggggttcctcctcagctacagaacgagtgtaacctcgacaacctagatgttctccaagccaccgaaactatcaagagtgaagccggtcagatcgagtactgggaccacaaccaccctcagctccgatgtgttggtgtttccgatgctcgttatgtaattgaacaaggccggctttacttgcccaccttctccacttacccaaaaattcactacgacgctcaaggaacggatatcaacggaagagtggtccctgtatgtgccgagaccttcatggactcgcagccgatgcacggacaacaacaaggccaaccat

SEQ ID NO: 144045 - DNA, 483 bp, Arabidopsis thaliana
gaactggaggacatggaaggatccaagtggtcaacgacaacggacagaacgtgttggaccaacaggtgcagaagggacagctcgtggtcatcccacaagggttcgcatacgttgtccagtcccacggaaacaagttcgagtggatctctttcaaaactaatgaaaacgcaatgatcagcactttggcgggtagaacctcgctcttgagggcattgccattggaggtcatatcaaatggtttccagatctctcccgaggaagctaggaagatcaagttcaacacacttgagaccactttgacccgcgctgccggtaggcaacaacaacagttgatcgaggagattgtcgaggcttaaatcaaaacgtttttctttttcttaataaagtatggtcagtttgtaatcacgtccctttacctttaacgtacgtgtaaaatatgtgtctgcggcacctcacttgtaataacactttcttctcataaat

SEQ ID NO: 144046 - DNA, 549 bp, Arabidopsis thaliana
tccggaattgcggacgactcccgcgtgcggttatctgaatagctgctgatggcgctgtggtgctgggaagccctgttgcaccccctgtaaatggtgatatgcggactgatattagccctgaaaatgcattacttccaggaactcggagaacgaataagggtgtggagtatcttgttgaagcatcagcagcggaagctgaggcgatcagtgcgacgttggctgctgccaaggcaagacaagtcaatggtgaagttgaactccctgatagggattgtggtgcagaggctacacccagtgggaaacctacattttcgctaatcaagccagattctatgggctcaatgagtgttacacctgcagggattcgtcttcatcatagagctgtggtggttgctgctgaaactggtggcgccttatgtggaatggttagacagttatccattgatcaatttgaaaatgaaggacggcgtgtcagttattggacaccagaaagtgcaacagcagcaagggaactattagatcgacaaatgtcaatcaacagtgtttcaa

SEQ ID NO: 144047 - DNA, 484 bp, Arabidopsis thaliana
aagaaaaatgggtcgagtctcatctattatctctttctctttgacactcttgatcctcttcaatggctacactgcccaacagtggcccaacgagtgccagctcgatcaactcaatgcgctcgaaccatcccaaatcatcaagagcgagggtggtcgcatcgaggtctgggaccaccatgcaccccagctccgttgctccggctttgcctttgagcgtttcgtcattgagcctcagggtcttttcttgcccactttcttgaacgccggcaaactcacgtttgttgttcacggaaggggtctaatgggaagagttattccgggatgcgccgagacgttcatggagtcaccggtatttggagaaggtcaaggtcagggtcagagtcaagggttccgtgacatgcaccagaaagtagagcacctacggtgcggtgacaccattgcaacaccatctggtgtagctcaatggttctacaacaatggaaat

SEQ ID NO: 144048 - DNA, 524 bp, Arabidopsis thaliana
ctctatctctcttgtccgtgcgcatcggattttggaaaccattgatgcagacctcaatccatctctaacaccactgatctatctacttaggtcttctctaacaatacttgtaattttctttctttttgcttcttccgtcactatatctatggccgctgagtcttctaaccctcgcaccgtcgaagagatcttcaaggattttagcggtcgtcgctccggttttcttcgagctctctccgtagatgttgacaagttctactctttatgcgatccggaaatggagaatctgtgtttgtacggacacccgaatgggacatgggaagtgaatcttccagctgaggaagtgcctccggagctacctgagccagctcttggaatcaatttcgctagagatggtatgcagcgtaaagattggctctctttagttgctgtccacagtgattggtggtactctctgtttcttctaacttcggcgctcgtcttaatcgcaatgagaggaaacgtctatttagtctgatcaacga

SEQ ID NO: 144049 - DNA, 382 bp, Arabidopsis thaliana
cgacatggatgcatgggctcgtagatgatctaaaaaactggtttcgattttaaccacatctaactaagtggcgcgcttcactaaggattggagcctaccaacatcctcactaactaagctggtagtagggcagaacaatataagccgactccgctcgcacgttctcacttacctagaggcatccacagggtaagccggacaccagcgccgcacctacaaagtacgacgagtcagtctcgcatacttcatacgtaagccttgtgattcgagttcaacgtatacaggataagtcaagggacgccttgccccataatacgtttcgaaaccaagcttaaacgccaaggaaaacctcgcagaatataagcttaggataaccttgcac

SEQ ID NO: 144050 - DNA, 516 bp, Arabidopsis thaliana
  unsure (1)..(516): unsure at all n locations
ttgaccacgcgtccgnttgttttgaactttttgaccaaaaacacactcgtgagcttataaaaaaaaatttacaatgaagattcctctcttggggttgcttttactaataagtcttgtcggcgtctccgacaagggctgaagaaggacctgtttgcccgaagaccgaaactcttagccgtgcaagttttccggagggctttatgtttggtactgcaaccgcagcctttcaggtggaaggtgcagtaaatgaaggttgcagaggtccaagcctgtgggacatctacaccaagaaatttccacatagagttaagaatcacaatgctgacgaggccgtcgatttctaccatcgctacaaggaggatatccagttgatgaaaaagctgaacactgatgtgtttagactttctatttcgtggccaagaatatttcctcatgggaggatggagaaaggaattagcaaagagggagtcaattttaccacgatcttattgatgagctccttaaaaatgacataac

SEQ ID NO: 144051 - DNA, 459 bp, Arabidopsis thaliana
  unsure (1)..(459): unsure at all n locations
accacgcgtccggattgatcttcagacagcgcagcaacttcagaaccaagatgacaaccgtggaatcattgtccgagtccaaggcccgttcggtgtcattaggccgcctttgaggggccagagacctcangaggaggaagaagaagaagaaggacgacacggacgacacggtaatggcttagaggagaccatctgcagcgccaggtgcaccgataacctcgatgatccgtctcgtgctgacgtgtacaagccacagctcggttacatcagcactctcaacagttacgatctccccatccttcgcttcatccgtctctcagccctccgtggatctatccgtcaaaaacgcaatggtgctttcacagtggaacgcaaacgcgaacgccattctttacgtgacagacggggaagcccaaatccagatcgtaaacgacaatggtaacagagtgtttgacggac

SEQ ID NO: 144052 - DNA, 538 bp, Arabidopsis thaliana
ccagaaccagcttgaccgcaacccaaggccattttacttagccggaaacaacccacaaggtcaagtatggctacaaggccgagagcaacagccacagaagaacattttcaatggatttggacccgaggttattgctcaagctttgaagatcgatcttcagacagcgcagcaacttcagaaccaagatgacaaccgtggaaacattgtccgagtccaaggcccgttcggtgtcattaggccgcctttgaggggccagagacctcaggaggaggaagaagaagaagaaggacgacatggacgacacggtaatggcttagaggagaccatctgcagcgccaggtgcaccgataacctcgatgacccgtctcgtgctgacgtgtacaagccacagctcggttacatcagcactctcaacagttacgatctccccatccttcgcttcatccgtctctcagccctccgtggatctatccgtcaaaacgccatggttgcttcacagtggaacgcaaacgcgaacgctattctttacgtgacagac

SEQ ID NO: 144053 - DNA, 503 bp, Arabidopsis thaliana
aaacaaaaagaaaatggttaagctcagcaatctcctcgttgcaaccttcggggttctcctcgtccttaacggctgccttgcgaggcagtcacttggggttcctcctcagctacagaacgagtgtaacctcgacaacctagatgttctccaagccaccgaaactatcaagagtgaagccggtcagatcgagtactgggaccacaaccaccctcagctccgatgtgttggtgtttccgttgctcgttatgtaattgaacaaggcggtctttacttgcccaccttcttcacttccccaaaaatttcctacgtcgttcaaggaacgggtatcagcggaagagtggtccctggatgtgccgagaccttcatggacttgcagccgatgcaaggacaacaacaaggccaaccatggcaaggacgacagggacaacaaggccaaccatgggaagacagggacaacagggacaacaagaagacaaggtcaaccatggaaggacaggacaaca

SEQ ID NO: 144054 - DNA, 92 bp, Arabidopsis thaliana
gtctgattcgctctcgaatcaaaagagaccaccgagaaagaagaagaagaaacttttagaaccgaaaccggtttcttaagccgttcttaaat

SEQ ID NO: 144055 - DNA, 480 bp, Arabidopsis thaliana
gaacttgaaagagagttagaccgaatgggtcggcctgtcgcagttgatgctggggctcaactatacactatattggagatgtgccgtgcattcgataagatattcaaggaacatcttgatggcgggcgtcctggaggtgaccgtatctatggagtctttgacaaccaacttccagctgcacttaaaaagcttccttttgatcgccatctttctctacaaagcgtgaagaaaatcgtgtccgaggcagatggttatcaacctcacttgattgcaccagaacagggttatcgccgtctaatcgaaggggcactgggttactttagaggtccagctgaagcttcttgggatgctgttcactatgtcttgaaagagcttgtgaggaaatcaatatcagaaactgaggagctaaagcgtttcctttcactgcaagtcgagcttgcttgcacagtcaacagttccttggagaaattcaggaagaaa

SEQ ID NO: 144056 - DNA, 436 bp, Arabidopsis thaliana
gtgagagaagaaagatagagaaaaaaaatgggaggcaaaggtgtgatgatggtggcgatactttgcctttgggcactctctgcaacatctgaagcagtaacagaggctgagccaggtttgatgatgaacttctacaaggacacgtgtcctcaggccgaagacatcgtccgtgaacaagtcaaactcctctacaaacgccacaagaacaccgctttctcttggctccgtaacatcttccatgactgcgccgttgagtcatgtgatgcgtcgcttttgctggattcgacaagaagagagctaggagagaaagaacacgacaggagcttcggacttagaaactttaggtacatcgaggagatcaaggaagctctcgagagggagtgtcctggtgttgtctcatgttctgacattctcgtcttgtccgcaagagaaggca

SEQ ID NO: 144057 - DNA, 490 bp, Arabidopsis thaliana
cggacgcgtgggttcttcttcttcttgttcttctttctttgggttagctgagaaatggatgtaatgaagcttgatcacgacagtgtattaaaagagcttgagaggatcacctcgaaagctgctgaagttcaagataacattttacgtgggatcttggaaagaaacaaggacacagagtacttgagtaagtacatgaatggctctaaggatgttctggagtttaaacgcgctgtgccaatcatcacatacaaagatatctatccgtacattcagagaattgctaatggagaagactcatctcttattactggccattctattactgaaatattatgcagctctgggacttctgctggagagccaaagctaatgccaaccattcctgaagatcttgatcgccgtacttttctctacaattttatcattccaatcgtgaacaagtacttaacaggacttgtcaaaggaaaagcaatgtaccttaaatttgtaa

SEQ ID NO: 144058 - DNA, 539 bp, Arabidopsis thaliana
  unsure (1)..(539): unsure at all n locations
caacgattgcgtgagttactgaaacaatcccaatcagcccccctcacagtggaagaacagataatgaccatttataccggaacaaatggttatctggatggattagaaattggacaagtaagaaaatttctcgttcaattacgcacttacttaaaaacgaataaacctcagtttcaagaaatcatagcctctaccaagacattaaccgctgaagcagaaagctttttgaaagaaggtattcaagagcaactagaacgtttcctacttcaggagaaagtataaaaaacgaaacggattattcttaatttttgattctttagtcaattttactctttaattttaattaattttttaagaaattctagaaatagaagtctataagtcaagtatatataatagaaagaagtttctaactaatatctgtttaatattaaatcttaaagcattcagaattnctttcttattctaattatttcttatcttntttcgaaatagatattatatataatatatagaaatggaaataatagataaatttc

SEQ ID NO: 144059 - DNA, 492 bp, Arabidopsis thaliana
  unsure (1)..(492): unsure at all n locations
aaattggtcaaataaaaattgatcaagttcatgtcgaaaaagatgtaaaaggattttgcatgttacattaacctaaaaccatagtaaattataatttctaactactgagagcaaatcctctaccaaaaaatatcctaaaaacctaagaaaccccacaaatagtacaactgttacattacataggagcagtgcaagttgttctgaaatggcctgtctgattacaccgaccacaatgaaccacacgcctcacacggtcacgatcctctgcccttactctcctcttcctcggagcacctttcatagcctttggtgtttttattacattttcactgtctctctctgaatcattntctttccactgaactttgtctgatattggctctagagtttctgcataagctcttctgtaattcttcactgtgaaacaactctctgtgtatctataaacgtcctcttcgcaagacaaagagagctcaatggcgtggctacagg

SEQ ID NO: 144060 - DNA, 328 bp, Arabidopsis thaliana
  unsure (1)..(328): unsure at all n locations
ctgcttcgagtttttgttaacctttttctctgatctaatggcgatggaagatcaatcggcggcgagatctatcggaaaagttagttggtttagcgatggaaaaggctacggtttcattactcccgatgatggcggcgaagagctttttgttcatcaatcctcaattgtctccgatggatttcgtagcttgactcttggtgaatcgngtgaatacgaaatcgcgcttggaagcgacgggaagaccaaggccattgaagttactgcttcccgcggcggttcacttaataaggaggaaaacagctcccgtggatcccgaggtaattgtttt

SEQ ID NO: 144061 - DNA, 416 bp, Arabidopsis thaliana
  unsure (1)..(416): unsure at all n locations
caaaaagaaaatggttaagctcagcaatctcctcgttgcaaccttcggggttctcctcgtccttaacggctgccttgcgaggcagtcacttggggttcctcctcagctacagaacgagtgtaacctcgacaacctagatgttctccaagccaccgaaactatcaagagtgaagccggtcagatcgagtactgggaccacaaccaccctcagctccgatgtgttggtgtttccgttgctcgttatgtaattgaacaaggcggtctttacttgcccaccttcttcacttccccaaaaatttcctacgtcgttcaaagaacgggtatcagcngaggagtggtccctggatgtgccgagaccttcatggactcgcagccgatgcaaggacaacaacatggccaaccatggcaaggacgac

SEQ ID NO: 144062 - DNA, 519 bp, Arabidopsis thaliana
  unsure (1)..(519): unsure at all n locations
cagaaacatgggtgcaggtggaagaatgccggttcctacttcttccaagaaatcggaaaccgacaccacaaagcgtgtgccgtgcgagaaaccgcctttctcggtgggagatctgaagaaagcaatcccgccgcattgtttcaaacgctcaatccctcgctctttctcctaccttatcagtgacatcattatagcctcatgcttctactacgtcgccaccaattacttctctctcctccctcagcctctctcttacttggcttggccactctattgggcctctcaaggctgtgtcctaactggtatctgggtcatagcccacgaatgcggtcaccacgcattcagcgactaccaatggctggatgacacagttggtcttatcttccattccttcctcctcgtcccttacttctcctggaagtatagtcatcgccgtcaccattccaacactggatccctcgaaagagatgaagtatntgtcccaaagcagaaatcagcaatcaagtggtacgggaaata

SEQ ID NO: 144063 - DNA, 166 bp, Arabidopsis thaliana
caaaaacacgataaaaaattgttctgattattagcagttcaacgggaccccctcgaatcagacaaagaaggaagagttgggccccgttgagttcttatgttttcacgtctataactcagctcatccaatttctacagggatgaacctaatcctgaatatgaaccat

SEQ ID NO: 144064 - DNA, 280 bp, Arabidopsis thaliana
gcgatgattaccattaagatccttgaaggaggaggagaggttggttgtatgacatagccaagagttggccccgaggatgggtgagatggcctggtctgagacgttgggtttgaaatgtcgggttttgatgatattcctattgtgagtggattctttaactgatgttttctcttctcggttgacgaaggctttgatctggatatctacaaacgaggccatgtcgggggggagaccagaggtgggtagaataaggtcgagcatgaataggtcggagagtttt

SEQ ID NO: 144065 - DNA, 421 bp, Arabidopsis thaliana
ctctttgagacctaaagagagagagagcgatagtgagatttagatcaacagatttgaatcgatttctgaaaacatgcagtacaagaatctggggaaatcgggtttaaaagtgagcacgctctcgttcggagcgtgggttacgttcgggaaccagctcgatgtgaaagaagcgaaatcgattcttcagtgttgtcgtgatcatggagtcaatttcttcgataacgcagaggtttacgctaatggtcgcgctgaggagattatgggtcaagcgattcgtgaactgggttggcgtcgatccgatatcgtcatctctaccaagatcttctggggtggtcctggtcctaacgataagggtttatctaggaaacatatcgttgaaggcactaaagcttctctcaaacgacttggtatggattacgtt

SEQ ID NO: 144066 - DNA, 349 bp, Arabidopsis thaliana
ggtgcttccacagtggaacgcaaacgcgaacgctattctttacgtgacagacggggaagcccaaatccagatcgtaaacgacaatggtaacagagtgtttgacggacaagtctctcaaggacagctcatagccgtaccacaaggtttctcggtggtgaaacgcgcaacaagcaaccgattccagtgggttgagttcaaaacaaacgctaacgcgcaaatcaacactctggcgggacgaacctcagtcttgagaggtttaccacttgaagtcataaccaatgggttccaaatctcacccgaagaagcaaggagggtcaagttcaacacgctcgagaccactttgactcac

SEQ ID NO: 144067 - DNA, 498 bp, Arabidopsis thaliana
  unsure (1)..(498): unsure at all n locations
ctaacgctcaacaaaatctctctctactaatatctctctctctctctttattgttgaagaagactcataatcggagattgtttgtttttggtttgctctgtaaattggagaagttttgttagagatcaaatggctgggatttgttgcggtgtagttggagagactgaaccggcggcaccggttgattcaacttctcgagcttctcttagacggaggttagatctacttccgtcgatcaaaattgttgctgactccgccgttgctcctccgcttgaaaactgccgtaaacggcnagaagcgtgagacagtagtgcttctgacgttaccgggaaatctagatctggattcgaatgtgaggagtgataataagaaggctagatcagcggttacgaattcaaattctgttacttgagcagagagtttcttttccgatgtacctaagatcggttcgacgtccgtttgtggtagaagacgagacaatggaagacgctgtctcga

SEQ ID NO: 144068 - DNA, 353 bp, Arabidopsis thaliana
cattctccagaaaaggggagaggcaaaaatggtttctctgaagctccataagcggttcgccgcatcagtgatgaagtgcgggaagggcaaagtttggctcgatcccaacgaaagctccgacatctccatggccaattcccgccaaaacatcaggaagcttgtgaaggatggtttcatcatcaggaagccaaccaagattcactctcgttccagagctcgcaaaatgaagattgccaagatgaagggtcgtcactctggatacccgtagaggaagggtacccgtgaagctaggttgccaacaaaggtactgtggatgcgtaggatgcgtgttcttaggcgtctgttgaagaaat

SEQ ID NO: 144069 - DNA, 495 bp, Arabidopsis thaliana
taaagaggaagaaaaatgggtcgagtctcatctattatctctttctctttgacactcttgatcctcttcaatggctacactgcccaacagtggcccaacgagtgccagctcgatcaactcaatgcgctcgaaccatcccaaatcatcaagagcgagggtggtcgcatcgaggtctgggaccaccatgcaccccagctccgttgctccggctttgcctttgagcgtttcgtcattgagcctcagggtcttttcttgcccactttcttgaacgccggcaaactcacgtttgttgttcacggaaggggtctaatgggaagagttattccgggatgcgccgagacgttcatggagtcaccggtatttggagaaggtcaaggtcagggtcagagtcaagggttccgtgacatgcaccagaaagtagagcacctacggggcggtgacaccattgcaacaccatctggtgtagctcaatggttctacaacaatggaaatgag

SEQ ID NO: 144070 - DNA, 540 bp, Arabidopsis thaliana
ggcttgtcgatcactgatcttgtgctcgctggattatcacacgtgagcgagaagggattctgggtcatgggaagtggtgttgggctccaaaaattaagctctctgaccatcacagcctgccaaggagtgactgacatggggcttgaatctgttggaaagggctgcccgaacatgaaaaaggcgatcatcagtaaatcccctttgttatctgacaacgggttggtctcttttgcaaaagcttctttatcacttgagagtcttcagcttgaagaatgccacagggttacccaatttgggttttttggttcccttttgaactgtggtgaaaagttgaaggctttctctctggtgaactgtttgagcattagagatctcaccacaggattgcctgcttcatctcattgcagcgctctgcgctctttgtctattcgtaactgccctggctttggtgatgcaaatcttgcagccatcgggaagttgtgccctcagctcgaggatattgatctgtgtgggctcaaggggataacagagtctggtttt

SEQ ID NO: 144071 - DNA, 500 bp, Arabidopsis thaliana
gaacaaggcggtctttacttgcccaccttcttcacttccccaaaaatttcctacgtcgttcaaggaacgggtatcagcggaagagtggtccctggatgtgccgagaccttcatggactcgcagccgatgcaaggacaacaacaaggccaaccatggcaaggacgacagggacaacaaggccaaccatgggaaggacagggacaacagggacaacaaggaagacaaggccaaccatgggaaggacagggacaacagggacaacaaggacgacagggacaacaaggccaaccatgggaaggacagggacagcagggacaacaagggttccgtgacatgcaccagaaggtggaacatgtgagacgcggagacgtctttgccaacactccaggctctgcccactggatctacaactcaggagaacagccacttgtcatcatcgctcttctcgacatcgccaactaccaaaaccaactcgaccgcaacccctagagtgttccatt

SEQ ID NO: 144072 - DNA, 441 bp, Arabidopsis thaliana
  unsure (1)..(441): unsure at all n locations
aaacaccaggaaaaattggcattacccaacaaattaatcataacacttcttctccttatctccatagctgtcgtccactgcttatccttccgtgtggagatcgacgagttcgagccaccacagcaaggagaacaagaaggtccccgtcgccgtcctggtggtggctctggcgagggatgggaggaagagtcgacgaatcatccataccacttcaggaagcggagtttcagtgattggttccagtcaaaggaagggttttgtgagagtgctgcctaagttcacaaaacatgcaccggctctcttncgaggaatcgagaactacagattctcgttggtggagatggagccaacaactttctttgtgcctcaccatttggatgccgatgctgtttttaatagcctacaaagtaaaggagtgatcgagtttgtgacggataaaac

SEQ ID NO: 144073 - DNA, 447 bp, Arabidopsis thaliana
caaaaagaaaatggttaagctcagcaatctcctcgttgcaaccttcggggttctcctcgtccttaacggctgccttgcgaggcagtcacttggggttcctcctcagctacagaacgagtgtaacctcgacaacctagatgttctccaagccaccgaaactatcaagagtgaagccggtcagatcgagtactgggaccacaaccaccctcagctccgatgtgttggtgtttccgttgctcgttatgtaattgaacaaggcggtctttacttgcccaccttcttcacttccccaaaaatttcctacgtcgttcaaggaacgggtatcagcggaagagtggtccctggatgtgccgagaccttcatggactcgcagccgatgcaaggacaacaacaaggccaaccatggcaaggacgacagggacaacaaggccaaccatgggaaggaca

SEQ ID NO: 144074 - DNA, 487 bp, Arabidopsis thaliana
  unsure (1)..(487): unsure at all n locations
aacaaaaagaaaatggttaagctcagcaatctcctcgttgcaaccttcggggttctcctcgtccttaacggctgccttgcgaggcagtcacttggggttcctcctcagctacagaacgagtgtaacctcgacaacctagatgttctccaagccaccgaaacaaccagcagggaggctttggcggttcacagcaacaacaagaacagaaaaacttgtggagcgggttcgacgcacaggtcatagctcaagcattgaaaattgacgttcagttggctcagcagcttcagaaccaacaagacagcagaggaaacatcgttcgtgttaagggacctttccaggtcgtgaggccacctctaagacagccctacgagagcgaggagtggagacacccacgtagcccacagggcaacggccttgaggagactatctgcagcatgaggtcccacgagaacatngacgaccctgctcgtgctgacgtgtacaagcc

SEQ ID NO: 144075 - DNA, 427 bp, Arabidopsis thaliana
ctttgccaacactccaggctctgcccactggatctacaactcaggagaacagccacttgtcatcatcgctcttctcgacatcgccaactaccaaaaccaactcgaccgcaaccctagagtgttccatttggccggaaacaaccagcagggaggctttggcggttcacagcaacaacaagaacagaaaaacttgtggagcgggttcgacgcacaggtcatagctcaagcattgaaaattgacgttcagttggctcagcagcttcagaaccaacaagacagcagaggaaacatcgttcgtgttaagggacctttccaggtcgtgaggccacctctaagacagccctacgagagcgaggagtggagacacccacgtagcccacagggcaacggccttgaggagactatctgcagcatgaggtcccacgag

SEQ ID NO: 144076 - DNA, 317 bp, Arabidopsis thaliana
atggaagttgggaacgatggtgttgctgtcatcaccatttctaaccctcctgttaactctttagccagtccaattatttctgggttgaaggagaagtttcgtgacgccaatcaaaggaatgatgttaaggccatcgtgttgatcgggaacaatggaagattttcgggtggttttgatatcaatgtctttcagcaagttcataagactggggatttatcgcttatgcctgaagtatctgttgagcttgtgtgtaacctgatggaagactccaggaagccggttgttgctgcagatgaaggattagcttttggtggtgg

SEQ ID NO: 144077 - DNA, 422 bp, Arabidopsis thaliana
aagaaaaatgggtcgagtctcatctattatctctttctctttgacactcttgatcctcttcaatggctacactgcccaacagtggcccaacgagtgccagctcgatcaactcaatgcgctcgaaccatcccaaatcatcaagagcgagggtggtcgcatcgaggtctgggaccaccatgcaccccagctccgttgctccggctttgcctttgagcgtttcgtcattgagcctcagggtcttttcttgcccactttcttgaacgccggcaaactcacgtttgttgttcacggaaggggtctaatgggaagaggtattccgggatgcgccgagacgttcatggagtcaccggtatttggagaaagtcaaggtcagggtcagagtcaagggtccgtgacatgcaccagaaagtagagcacctacg

SEQ ID NO: 144078 - DNA, 385 bp, Arabidopsis thaliana
agaagaagagccacacactcacaaattaaaaagagagagagagagagagacagatagagagagagattctgcggaggagcttcttcttcgtagggtgttcatcgttattaacgttatcgcccctacgtcagctccatctccagaaacatgggtgcaggtggaagaatgccggttcctacttcttccaagaaatcggaaaccgacaccacaaagcgtgtgccgtgcgagaaaccgcctttctcggtgggagatctgaagaaagcaatcccgccgcattgtttcaaacgctcaatccctcgctctttctcctaccttatcagtgacatcattatagcctcatgcttctactacgtcggcaccaattaactttcttttcttcctcagc

SEQ ID NO: 144079 - DNA, 494 bp, Arabidopsis thaliana
atctctttcaagaattttggtatatatatattagacatactctaaactaaaataaaacttataacatatgtattgtgaaaggacagatacagaggaatgggagttatcaatgtgtgacaagtgagagcagaaaagcatgaccaaactattcaacaggtacattaaagtgttctcaggaagggaaatctaatcttttcttctgacataattttgtagccaactaaattgacaggaaacgaatcatttagatttatatacatgcataagtagttatccctcgaacatttttatatatataggaaatataacatgagtgtgtggataacagtttacatttaaaaagattggaggaaaaaggaaactttggtgcaagaaatcagaaagacagaagtggtgaaaatacaagaacttattaaattaatgagtggatacattaaaattcaattattataaaagaaacaatgattaagctgatgggtcctcttaatttatat

SEQ ID NO: 144080 - DNA, 395 bp, Arabidopsis thaliana
ctgcagcatgaggtcccacgagaccattgacgaccctgctcgtgctgacgtgtacaagcccagcctaggtcgcgtgaccagcgtcaacagctataccttgcccatcttggagtatgtcaggctcagtgccactcgtggcgttctccagggtaatgcgatggtgcttcctaaatacaacatgaacgctaacgagatcttgtactgcactggaggacaaggaaggatccaagtggtcaacgacaacggacagaacgtgttggaccaacaggtgcagaagggacagctcgtggtcatcccacaagggttcgcatacgttgtccagtcccacggaaacaagttcgagtggatctctttcaaaacttatgaaaacgcaatgatcagcactttggcgggta

SEQ ID NO: 144081 - DNA, 458 bp, Arabidopsis thaliana
  unsure (1)..(458): unsure at all n locations
caaatatgcataagcttttgttttctcttctctccgtcgtctcactctcatttctcctcttcttccatggcgccgaggcacgccagcgagaggcgccgtttccaaacgcctgccatttcagccaaatcaacagcctcgcgcccgctcaggcgacgaagttcgaagccggtcagatggaagtatgggaccacatgagccctgagctccgatgcgccggtgtaacggtggctcgcatcacccttcagcccaattccattttcttgcccgctttctttagcccacctgcccttgcttacgttgtccaaggagaaggagttatggggacgattgcttctggttgtcctgagacttttgcagaagttgaaggatcatcangaagaggaggaggaggagacccgggtcgacgttttgaggacatgcaccagaaagtggagaatttccggcgaggggattgtgtt

SEQ ID NO: 144082 - DNA, 508 bp, Arabidopsis thaliana
  unsure (1)..(508): unsure at all n locations
catggtctaataaagaataattctgattagttgataattttgtgaaagattcctgtgaaaaaggttaattaaatctattcctaatttatgtcgagtagaccttgttgttttgttttattgcaagaattctaaattcatgacttgtagggagggacttatgtcaccacaaacagagactaaagcaagtgttgggttcaaagctggtgttaaagagtataaattgacttactatactcctgaatatgaaaccaaggatactgatatcttggcagcattccgagtaactcctcaacctggagttccacctgaagaagcaggggctgcggtagctgctgaatcttctactggtacatggacaactgtgtggaccgatgggcttaccagccttgatcgttacaaaggacgatgctaccacatcgagcccgttccaagagaagaaactcaanttattgcgtatgtagcttatcccttagacccttttgaagaaggttcggtactaacatgttta

SEQ ID NO: 144083 - DNA, 485 bp, Arabidopsis thaliana
  unsure (1)..(485): unsure at all n locations
cattgcaacaccatctggtgtagctcaatggttctacaacaatggaaatgagcctctcattcttgttgcagccgcggatctcgccagcaaccagaaccagcttgaccgcaaccttagaccatttttgatagccggaaacaacccacaagggcaggaatggctacaaggccgaaagcaacagaagcaaaacaacatcttcaatggcttcgcacctgagatcttggctcaagccttcaagatcaatgtcgagacggctcagcagctccagaaccagcaagataaccgtggcaacatcgtcaaggtcaacggacctttcggcgtcattaggccacccttgagacgcggcgaaggcggccaacaaccacatgaaatagctaatggtttagaggagactntgtgcaccatgcgatgcacntgaaaacctgatgacccctcggatgcttgcgtgtacaagccatcactcggatacattagcacacttaaca

SEQ ID NO: 144084 - DNA, 386 bp, Arabidopsis thaliana
  unsure (1)..(386): unsure at all n locations
agaggaagaaaaatgggtcgagtctcatctattatctctttctctttgtcactcttgatcctcttcaatggctacactgcccaacagtggcccaacgagtgccagctcgatcaactcaatgcgctcgaaccatcccaaatcatcaagagcgagggtggtcgcatcgaggtctgggaccaccatgcaccccagctccgttgctccggctttgcctttgagcgtttcgtcattgagcctcagggtctnttcttgcccactttcttgaacgccggcaaactcacgtttgttgttcacggaaggggtctaatgggaagagttattccgggatgcgccgagacgttcatggagtcaccggtttttggagaaggttaaggtcagggtcagag

SEQ ID NO: 144085 - DNA, 409 bp, Arabidopsis thaliana
caatcgtgacaagttctgattcgtccctggttgataagtcggtgaacacgatcaggtttctggcaatagatgcggttgagaaggcgaaatcaggtcatccaggtcttcctatgggctgtgctccgatgtctcacattttgtacgatgaagtcatgaagtataaccccaagaatccttactggtttaaccgtgatcgtttcgttctctctgctggacatggatgcatgttgcaatacgctctgcttcaccttgctggctacgacagcgttagggaggaagatttgaagagcttccgtcaatggggaagtaagactccaggacatcctgagaattttgagacttctggtgttgaagccactaactggtcctcttggacaaggtattgcaaatgctgttggttagctcttgc

SEQ ID NO: 144086 - DNA, 430 bp, Arabidopsis thaliana
caacaaacaaaaagaaaatggttaagctcagcaatctcctcgttgcaactcttcggggttctcctcgtccttaacggctgccttgcgaggcagtcacttggggttcctcctcagctacagaacgagtgtaacctcgacaacctagatgttctccaagccaccgaaactatcaagagtgaagccggtcagatcgagtactgggaccacaaccaccctcagctccgatgtgttggtgtttccgttgctcgttatgtaattgaacaaggcggtctttacttgcccaccttcttcacttccccaaaaatttcctacgtcgttcaaggaacgggtatcagcggaagagtggtccctgtatgtgccgagaccttcatggactcgcagccgatgcatggacaacaacaaggccaaccatggcaaggacgacagggac

SEQ ID NO: 144087 - DNA, 478 bp, Arabidopsis thaliana
caaaaagaaaatggttaagctcagcaatctcctcgttgcaaccttcggggttctcctcgtccttaacggctgccttgcgaggcagtcacttggggttcctcctcagctacagaacgagtgtaacctcgacaacctagatgttctccaagccaccgaaactatcaagagtgaagccggtcagatcgagtactgggaccacaaccaccctcagctccgatgtgttggtgtttccgttgctcgttatgtaattgaacaaggcggtctttacttgcccaccttcttcacttccccaaaaatttcctacgtcgttcaaggaacgggtatcagcggaagagtggtccctggatgtgccgagaccttcatggactcgcagccgatgcaaggacaacaacaaggccaaccatggcatggacgacagggacaacaaggccaaccatgggaaggacagggacaacagggacaacaaggaagacaaggc

SEQ ID NO: 144088 - DNA, 491 bp, Arabidopsis thaliana
cacaaacgagtaagaatacaaatacaaatagcaaaaaaaatggcaaacaagctcttcctcgtctgcgcaactttcgccctctgcttcctcctgaccaacgcttccatctaccgcactgttgtcgagttcgacgaagatgacgccagcaaccccatgggcccaagacagaaatgtcagaaggagtttcagcaatcacagcacctaagagcttgccagaaattgatgcgcatgcaaatgaggcaaggccgtggtggtggtccctccctcgacgatgagttcgatttggaagacgacatcgagaacccacaaggcccccagcagggacaccagatcctccagcagtgctgcagcgagcttcgccaggaagagccagtttgtgtttgccccaccttgagacaagctgccagggccgttagccttcagggacaacacggaccattccaattcaggaaaattacaagacagctaagtacttgcctaacatttgcaag

SEQ ID NO: 144089 - DNA, 146 bp, Arabidopsis thaliana
taaagaggaagaaaaatgggtcgagtctcatctattatctctttctctttgacactcttgatcctcttcaatggctacactggccaacagtggcccaacgagtggcagcttggtcaacttaatgcgcttggaccattccaaattat

SEQ ID NO: 144090 - DNA, 428 bp, Arabidopsis thaliana
atcgacatggcgaatgtggaccgtgatcggcgtgtgcatgtagaccgtactgacaaacgtgttcatcagccaaactacgaagatgatgtcggttttggtggctatggcggttatggtgctggttctgattataagagtcgcggcccctccactaaccaaatcttggcacttatagcaggagttcccattggtggcacactgctaaccctagctggactcactctagccggttcggtgatcggcttgctagtctccatacccctcttcctcctcttcagtccggtgatagtcccggcggctctcactattgggcttgctgtgacgggaatcttggcttctggtttgtttgggttgacgggtctgagctcggtctcgtgggtcctcaactaccttcgtgggacgagtgatacagtgccagagcaattgga

SEQ ID NO: 144091 - DNA, 491 bp, Arabidopsis thaliana
cactgataagggcaactctagggttcatcatgtggctaacaggtgaaaggtagataccctagacgatagattcaaaaaccgggtcaatccactctcgtgaaagagacccccataactctaccacttcctaatctcaattctcgttgatgaaacatagtagatcagagtttaagcaacaatctaccaaattcaataagcggtctagccaatctctttgtctagagtctataaatctctgaaattcgtaaatcaggcatccatttgaacttcttttggacgtgggatacctatggtcgaatacccacattagccagcaaaaaccgcataggggccaacgaatccaggagggatctaacctaatcttaaccacctgactaacctagagattacgctaatctaatccatcctcaagaaccctaatcactactcaagcaacataactaagaacacaaacccataaattacttgaatcataccaaaatgtagatcta

SEQ ID NO: 144092 - DNA, 364 bp, Arabidopsis thaliana
tccggatgatgttgtgtttggaggatgggatataagtgacatgaacttagcagatgccatggctagagccagggttcttgatatcgacttgcagaaacagctcaggccttacatggagaacattgtgccactccctgggatcttcgatcctgatttcatagctgctaatcaagggtcacgtgctaaccacgtgatcaaaggtaccaagaaggaacaagtcgaccacatcatcaaggacatgagggactttaaggagaagaataaggtggataaggatgtggttctctggacggctaacacagagcgttatagcaatgtggtcggtgggatgaacgatacaatgggaaatctcatggagactgtg

SEQ ID NO: 144093 - DNA, 499 bp, Arabidopsis thaliana
aagaggaagaaaaatgggtcgagtctcatctattatctctttctctttgacactcttgatcctcttcaatggctacactgcccaacagtggcccaacgagtgccagctcgatcaactcaatgcgctcgaaccatcccaaatcatcaagagcgagggtggtcgcatcgaggtctgggaccaccatgcaccccagctccgttgctccggctttgcctttgagcgtttcgtcattgagcctcagggtcttttcttgcccactttcttgaacgccggcaaactcacgtttgttgttcacggaaggggtctaatgggaagagttattccgggatgcgccgagacgttcatggagtcaccggtatttggagaagtcaaggtcagggcagagtcaagggtccgtgcatgcccaaaagagagactacgggcgggcaccatgacacattgtgagctatggtctcacaatgaatgagcttatctgtgcgcccgtctgcagacagacagt

SEQ ID NO: 144094 - DNA, 359 bp, Arabidopsis thaliana
caaactttcaaatttaaaagtttgtatacgagttaattcagtttttttgaattgttttatttttatcaaaaatagtaaatttaaaacttttaaatattataattcatagatttaaaatcaaaaaaaatttataatattatgaaaatttggacatattaaaagaataatacatgatatattatattgtaggatagagttatatggaaggatgagtttgaatcaacattaataaaatttaaaatatcaagatatgttaaattctcatattattattttttaaagccatcaatattagacatttcgactctgaaatgaattttttaagccattttgaaaatatcgtttcatttaaatgacta

SEQ ID NO: 144095 - DNA, 445 bp, Arabidopsis thaliana
  unsure (1)..(445): unsure at all n locations
cctggtcttcctatgggttgtgctccgatggctcacattttgtatgatgaggtcatgaggtataaccccaagaacccttattggttcaaccgtgaccgattcgttctatctgctggacatggatgtatgttgctctacgcgttgcttcatcttgccggctacgacagcgtccaggaggaagatttgaagcagttccgtcaatggggaagcaagacaccaggacatcctgagaatttcgagactcctggaattgaagtcactactggtcctcttggacaaggaatcgctaatgctgttggtttagctcttgctgagaagcatttggctgctagattcaacanacctgatgctgaagtagtcgaccactacacatatgcgatccctggagatggttgtcagatggagggtatttctaatgaagcttgctttctagctggccattggg

SEQ ID NO: 144096 - DNA, 485 bp, Arabidopsis thaliana
agaaaaatgggtcgagtctcatctattatctctttctctttgacactcttgatcctcttcaatggctacactgcccaacagtggcccaacgagtgccagctcgatcaactcaatgcgctcgaaccatcccaaatcatcaagagcgagggtggtcgcatcgaggtctgggaccaccatgcaccccagctccgttgctccggctttgcctttgagcgtttcgtcattgagcctcagggtcttttcttgcccactttcttgaacgccggcaaactcacgtttgttgttcacggaaggggtctaatgggaagagttattccgggatgcgccgagacgttcatggagtcaccggtatttggagaaggtcaaggtcagggtcagagtcaagggttccgtgacatgcaccagaaagtagagcacctacggtgcggtgacaccattgcaacaccatctggtgtagctcaatggttctacaacaatggaaatga

SEQ ID NO: 144097 - DNA, 494 bp, Arabidopsis thaliana
  unsure (1)..(494): unsure at all n locations
gagaaggtcaaggtcagggtcagagtcaagggttccgtgacatgcaccagaaagtagagcacctacggtgcggtgacaccatngcaacaccatctggtgtagctcaatggttctacaacaatggaaatgagcctctcattcttgtgcagccgcgattctcgcaggcaccaagaccaagttggacggaaccttaaaacaatttttggatggccgaaacaacccacaagggcaggaatggctacaaggccgaaagcaacagaagcaaaacaacatctttaatggcttcgcacctgagatcttggctcaagccttcaagatcaatgtcgagacggcttaacagctccagaaccagcaagataaccgtggcaacattgtcaaggtcaacggacctttcggcgtcattaggccacccttgagacgcggcgaatgcggccaacaaccacatgaaatagcttatggtttagaggagactttgtgcaccatgcgatgcactg

SEQ ID NO: 144098 - DNA, 116 bp, Arabidopsis thaliana
tcgtgttaacaccacacctcatcgtgtcttttatgaaaatgtaagttttggatgtttgaggctaaatgtatttagcacaagtccttaataaataagagttttgtttatgtttcaaa

SEQ ID NO: 144099 - DNA, 507 bp, Arabidopsis thaliana
gaaaatggttaagctcagcaatctcctcgttgcaaccttcggggttcttctcgtccttaacggctgccttgcgaggcagtcacttggggttcctcctcagctacagaacgagtgtaacctcgacaacctagatgttctccaagccaccgaaactatcaagagtgaagccggtcagatcgagtactgggaccacaaccaccctcagctccgatgtgttggtgtttccgttgctcgttatgtaattgaacaaggcggtctttacttgcccaccttcttcacttccccaaaaatttcctacgtcgttcaaggaacgggtatcagcggaagagtggtccctggatgtgccgagaccttcatggactcgcagccgatgcaaggacaacaacaaggccaaccatggcaaggacgacagggacaacaaggccaaccatgggaaggacagggacaacagggacaacaaggaagacaggccaaccatgggaaggacaggtacaacagggacaacaa

SEQ ID NO: 144100 - DNA, 462 bp, Arabidopsis thaliana
gtcaaggtcaaagccagaggttccgtgacatgcaccagaaagtggagcacattatgagcggtgataccattgccacaacacccggtgtagcacagtggttctacaacgacggacaggaaccacttgtcattgctagcggcttctatctagtcagtcaccagagccagcttgaccgcaacccaaggccattttacttagccggaaacaacccacaaggtcaagtatggctacaaggccgagagcaacagccacagaagaacattttcaatggatttggacccgagggtattgctcaagctttgaagatcgaacttcagacagcgcagcaacttcagaaccaagatgacaaccgtggaaacattgtccgagtccaagggcccgttcggtgtcattagggccgctttgaggggccagagacctcaagaggaggaagaagaaagaagaagacgacatggacgacac

SEQ ID NO: 144101 - DNA, 277 bp, Arabidopsis thaliana; identical to SEQ ID NO: 116484

SEQ ID NO: 144102 - DNA, 417 bp, Arabidopsis thaliana
ctcattaagaaagaccaacacagacacggaagaagtagctcggctcttctctttgtgaaggtgaatgcgggagatggggactggagattctgcttcgagactgattctctggttctgcttagggtttttgatactaggtgttggatttgtgcaatgtggagttacttatgaccggaaagcacttatcattaatggacagagacgaatcctcttctctggctccatacattaccctcgaagcactcctgatatgtggtacgatttgattcagaaggcgagagatggaggcattgatgtgattgagacgtatgtgttctggaatctttatgagccttctgcttgaaaatacgattttgcagggagaaatgatttggcgagattcgtgaagacgattcacaaagctggtttatatgctca

SEQ ID NO: 144103 - DNA, 537 bp, Arabidopsis thaliana
  unsure (1)..(537): unsure at all n locations
agactctataattttaaaggtcttcctaataaatgccacattcatgcaaaataaaaaagtaacaataaaaaaatgaaggtaggtgactcttgtatctaccaaaagggtccaaaaagaatctaaagggacccaatcacacatgccagcctgaccagccccaatagtcttcacgtgagatctaacccaccggtgacgctaaacctccggccaactcaatcttgtctgcttgccggtcctgcctctgtctgccacgtggcatcttccttcctcacaagtcaccacctatgctccttcctctctcgntattcgccacgttctctctccttatttcccgaattacccttcacgtaagggtccgtttcggcaaaaactataacccaccatgcgctgtcatgtttacttgttatcactacacgacactttctacgtggacttagnatcttggtgctgncttcttcttctttccttagtatatataaactcgtcacaagggtcgctctttcattcacaatcacaactcttaagaataaattaaaa

SEQ ID NO: 144104 - DNA, 419 bp, Arabidopsis thaliana
caatctttttagtgagagagaaatcttagagctgagctaagaaaaatgtcaaaagaagtgagtgaagaaggaagacatggcaaagactacgtggatccacctccagctccacttctagacatggctgagcttaagctctggtctttttacagagctatcatcgcagagttcatcgccactctcctcttcctctatgtaaccgtagctacagtcattggccacaagaaccaaaccggtccttgtggcggtgttggtttactcggcattgcgtgggcctttggtggcatgatctttgtcctcgtctattgcaccgccggtatctccggaggtcacattaacccagctgtgacatttggtctgttctttggctcgtaaagtgtcgcttccctagagcagttgcttacatggtggctcagtgt

SEQ ID NO: 144105 - DNA, 391 bp, Arabidopsis thaliana
  unsure (1)..(391): unsure at all n locations
gcagcgccaggtgcaccgataacctcgatgatccgtctcgtgctgacgtgtacaagccacagctcggttacatcagcactctcaacagttacgatctccccatccttcgcttcatccgtctctcagccctccgtggatctatccgtcaaaacgcaatggtgcttccacagtggaacgcaaacgcgaacgccattctttacgtgacagacggngaagcccaaatccagatcgtaaacgacaatggtaacagagtgtttgacggacaagtctctcaaggacagctcatagccgtaccacaaggtttctcggtggtgaaacgcgcaacaagcaaccgattccagtgggttgagttcaaaacaaacgcaaacgcgcaaatcaacactcttgcggg

SEQ ID NO: 144106 - DNA, 275 bp, Arabidopsis thaliana
  unsure (1)..(275): unsure at all n locations
caacaaacaaaaagaaaatggttaagctcagcaatctcctcgttgcattctttttggttctcctcgtccttaacggctgccttgcgaggcagtcacttggggttcctcctcagctacagaacgagtgtaacctcgacaacctagatgttctccaagccaccgaaactatcaagagtgaagccggtcagatcgagtactgngaccacaaccaccctcagctccgatgtgttggtgtttccgttgctcgttatgtaattgaacaaggcggtctttac

SEQ ID NO: 144107 - DNA, 411 bp, Arabidopsis thaliana
  unsure (1)..(411): unsure at all n locations
cgctatctctctatctctctatctccaacgctattcgatgtgcgtaaattagggttcttcactcgtcggatctgattgtatattgtgaaaatctcagatctcagatctcttatctaacaccgtcgcgtgtcttcgtttccttctggaaatcattactttggataacatcgatcttcttctccgattattggatgcaatttattgattgaatttcagattttgaaggaggtgaagcaaagtcgggagctgtacatttccgctttcatgttctgtgttgaatccgaattctctccacattagttgtttttacagatctncgaagttggctcctcaaagaagatcacagcgcctcatgggcggccaaatgcagcaaaacaatgctgcggctgcgacggcgctttacgatggggc

SEQ ID NO: 144108 - DNA, 497 bp, Arabidopsis thaliana
gcgcagggtttaaagttgctcgctgatgcaacttcaactcctcaagatcctggtattagttggagtaaaagagcagaatgcggtcctaacgacgacactggttgtgtgcttacaattaatgatatctacttgtggcttcttgggactttctttttgtggtttgttttggctctttactttgacaatataactccaaatgcttctggagtaagaaaatctatcttctactttctaaaacctgggtactggaccggcaaaggtggcaaccgagtagaagaaggtggaatttgtagttgtattggttcagttccacctgtggatcacattaccccagatgacgaagatgtccttgaagaggaaactttagttaaacaacattcaatggagggtttagttgatcccaacgttgcagttcaaatacgtggtcttgcaaagacttattctgggacgaccaagtttggatgcttgaaatgcaaaaaaactttcccttttcatgc

SEQ ID NO: 144109 - DNA, 307 bp, Arabidopsis thaliana
gtaaaaacaatttctcattagcttacaatggcggatacacaccgtgtcgaccgtactgatagacactttcaatttcagtcgccctatgaaggcggccgaggtcaaggtcagtatgaaggtgaccgtggttacggtggtggcggttacaagagcatgatgcctgaaagtggcccatctagtacccaagtattggccctgttgattggagtccctggcggcggttcgctacttgccttggctggattacttctagctggttcggtgatcggcttaatggttgctttaccactatttctctttttcagcc

SEQ ID NO: 144110 - DNA, 327 bp, Arabidopsis thaliana
acaacaaacaaaaagaaaatggttaagctcagcaatctcctcgttgcaaccttcggggttctcctcgtccttaacggctgccttgcgaggcagtcacttggggttcctcctcagctacagaacgagtgtaacctcgacaacctagatgttctccaagccaccgaaactatcaagagtgaagccggtcagatcgagtactgggaccacaaccaccctcagctccgatgtgttggtgtttccgttgctcgttatgttattgaacaaggcgtgctatacttgctcccctatgtgactttccctataatttcctacgatgttcaaggaacg

SEQ ID NO: 144111 - DNA, 535 bp, Arabidopsis thaliana
aaaaaaacatggagacaattgcggcgtgtaggctttctgttttcattcttcacaagaagggccacatggccgtacgatcatgtgactctgtggcccatagtcagagaaaagaaaaaatatgacgccagaaagcttgttagcgtcggcgtcgatcaacataggactcgccgtcgttgcactctggctcttctccgtcctcaagaagcagccccgtaacgccgtcgtgtactatgctcgccgcctctccgatcgccaccaccaccgtcctctgtctctacactcatacctttgcctccctcgtttccttccttccgttgcgtggatcccacgcgcctttcgtgtccccgaggacgagatccttagccgccacggtcttgatgctctcgtcctcatcaggctcttcaaattcggaattagattcttcctgatgtgttcgttacttggagcatcactacttctttcggttgattattacaatgagtcagatctaccgacacgaaaagagtattcaatggatgctttcacaatatcaaat

SEQ ID NO: 144112 - DNA, 459 bp, Arabidopsis thaliana
caaatattcaaatttccttcaattacaattttgaaaaatgtctggtttatcatcagtttaccattttcgttgcttgaaatgatgaactctagacatagtgatttaaattcctaattttatgtcgactttcattttaatcacgaattctcgttaactaagtcaattaaggcacatctctagaaatttcttaattaaaaaccctaaatcaccataatcagttgtcaattttttctctctatttttcctatggattctctcatccttattctttgaattcaaattaattatctgcctctagatctacttatggtgaaaaaactagattattcctgccttaattttcttctgttacaagaattcatgacttaattcaatttattcttataattaaattaatttactttgctctgtgttattctctaattattctatatgtttatctattattattttcatttt

SEQ ID NO: 144113 - DNA, 341 bp, Arabidopsis thaliana
  unsure (1)..(341): unsure at all n locations
gttccccccacgctccgacgaagtcttgtctacctacttttgctctcacantgttagtaacacatggatttatttttagttggngttgggccgcctgtgtttctacaaactctgttcctaattggtttcatcattggccgccgtttaaatggggaccaaaatttccatattctccacctaaaccgccggcaatcgagaaatatcctccaccggtgcagtatccaccaccgatcaagaagtatccaccgncaccatacgagcattcaccggtgaagtatccaccaccgatcaagacttaccctcatccgccggtgaagtatcctccaccagaacagtatcca

SEQ ID NO: 144114 - DNA, 212 bp, Arabidopsis thaliana
tggttaagctcagcaatctcctcgttgcaaccttcggggttctccttgtccttaacggctgccttgcgaggcagtgacttggggttcctcctcagctacagaacgagtgtaacctcgacaacctagatgttctccaagccaccgaaactatcaagagtgaagccgttctgatcgagtactgtgaccacaaccaccctcagctccgatgtgtt

SEQ ID NO: 144115 - DNA, 491 bp, Arabidopsis thaliana
  unsure (1)..(491): unsure at all n locations
cggacgcgtgggcggacgcgtgggtggaaaggacaggaacagcaggttcaacatgggttccgtgacatgcaccagggggtggaacatgtgagacgcggagacgtctttnccaacactccaggctctgcccactggatctacaactcaggagaacagccacttgtcatcatcgctcttctcgacatcgccaactaccaaaaccaactcgaccgcaaccctagagtgttccatttggccggaaacaaccagcagggaggctttggcggttcacagcaacaacaagaacagaaaaacttgtggagcgggttcgacgcacaggtcatagctcaagcatngaaaattgacgttcagttggctcagcagcttcagaaccaacaagacagcagaggaaacatcgttcgtgttaagggaccttttcaggtcgtgaggccacctcttaaacagccctacgagagcgaggagtggagacacccacgtagcccacagggcaa

SEQ ID NO: 144116 - DNA, 484 bp, Arabidopsis thaliana
ttcttcttcttcttcctctctgctttgtctctcttcttcttcaaagttaaaattcaacagtggttcatgagtggtattgtgatcgatctgttacttttggagtgcgagcaataagaagaggaaggatatgtcgtcactcagcagagaactcgtgtttttgatacttcagtttctcgatgaagagaaattcaaagatactgttcacaggttggagaaagagtctggttttttcttcaacatgaggtactttgaagatagtgtaacagctggtgaatgggatgatgtagagaagtatctttctggattcactaaagttgatgataatagatactctatgaaaatatttttcgagattcggaagcagaagtatcttgaagcacttgacaagaaagatcatgccaaggcggttgatattcttgttaaggagttgaaaggtgtctcgacattcaacgaagagctttttaaggagattaccatgctttta

SEQ ID NO: 144117 - DNA, 499 bp, Arabidopsis thaliana
  unsure (1)..(499): unsure at all n locations
aaaaaaccggacgcggggaaaaaaaaagaaaggggcccactaaaattgctaatttcctctttttatttttcaaatacaacattgacattttgctttgttttcaagttaaatttgtctcattccatcaanaataattcgactaaataacaaaatgaaaaatattcaagtaacaacactaaataactaaaatcagttgtaaattgttattggctttgtggcatttacaacttcatgaacacttctgattctgacaatctcatgttataacaagtaacaaaatcatgttataaaattgacgacattttgatgatattttcttcaatctattatgacgaattcgttccattatctcccctattcattctaaggtaattgaatctctttttgaatttgtgatttacttttgtcctttcaaataattaacttatttttctaaatatatatatatcttctactcttataaacaattatagcgtttcaaatactaattatcattatc

SEQ ID NO: 144118 - DNA, 499 bp, Arabidopsis thaliana
  unsure (1)..(499): unsure at all n locations
acgcgtacgggcgccatcggagctgccaagaagaaactcgacgaagatgtaccattacaaagcttcgagagcgtcggtgctgtgatcggcgttactggaatcgtcngaaacagcttggcggagattctccctctttccgacacacccggtggtccatggaaagtctacggcgtcgctcgtcgtcctcgtcctacctggaacgccgatcatccgatcgattacatccagtgcgatgtctccgacgccgaagacacaagatccaagctttcccctttaaccgatgtcacacatgtcttctacgtcacctggaccaatcgtgaatcggaaagtgaaaactgtgaagcaaatggctcaatgctccgtaacgttctccaagcgattatcccatacgcgccaaatctccgacatgtttgtctccagacagggacaaagcactaccttggccctttcaccaacgttgacggacctcggcacgatccaccggtcactgaggatatgc

SEQ ID NO: 144119 - DNA, 359 bp, Arabidopsis thaliana
gtgaatttcacatctgaaagaaatacaaactcccatagttttcaattttcacgatctccgaatttcacgacgtttgatacttggtttctttgcacattcacgcgacgaagatgaggctgttgaaggttgctacgtgtaacttgaaccaatgggccatggatttcgagagcaacatgaagaacatcaaggcttcgatcgctgaggcaaaggctgctggtgctgttatcaggcttggacccgagctcgaggtcactggctatggttgcgaggatcacttcttggaactcgacactgtcactcatgcgtgggagtgtttgaaggaattgctgcttggtgattggacggatgatattttgtgc

SEQ ID NO: 144120 - DNA, 164 bp, Arabidopsis thaliana
acccagcgtgcgagaaaaggcgtcgggtctaatctattatctctttctctttgactttctggaccctttaaaatggctacagtgcccaacagtggcccaacgagtgccagctcgatcaactcaatgcgctcgaaccatcccaattcataagacgagggtggtcg

SEQ ID NO: 144121 - DNA, 469 bp, Arabidopsis thaliana
  unsure (1)..(469): unsure at all n locations
acatggtcaagtatggctacaaggacgagagcaacagccacagaagttcatcttcaatggatttggacccgaggttattgctcaagctttgaagattgatcttcanacagcgcagcaacttcagaaccaagatgacaaccgtggaaacattgtccgagtccaaggcccgttcggtgtcattaggccgcctttgaggggccagagacctcaggaggaggaagaagaagaagaaggacgacacggacgacacggtaatggcttagaggagaccatctgcagcgccaggtgcaccgataacctcgatgatccgtctcgtgctgacgtgtacaagccacagctcggttacatcagcactctcaacagttacgatctccccatccttcgcttcatccgtctctcagccctccgtggatctatccgtcaaaacgcaatggtgctttcacagtggaacgcaaacgcgaacgccatt

SEQ ID NO: 144122 - DNA, 501 bp, Arabidopsis thaliana
accacgcgtccgcacaaacgagtaggattccaattccaattggcaaaaaaattggcaattatgtttttcctcgtctgcccaactttggcgcggctgtttcctcctaaccaacgcttccatctaccgaactgttgtcgagttcgacgaaaatgccgccagcaaccccatgggcccaagacagaatgtcagaaggagtttcagcaatcacagcacctaaaagcttgccagaaattgatgcgcatgcaaatgaggcaaggccgtggtggtggtccctccctcgacgatgagttcgatttggaagacgacatcgagaacccacaaggcccccagcagggacaccagatcctccaacagtgctgcagcgagcttcgccaggaagagccagtttgtgtttgccccaccttgagacaagctgccagggccgttagcctccaaggacaacacggaccattccaatccaggaaaatttacaagacagctaagtacttgcctaacatttgc

SEQ ID NO: 144123 - DNA, 288 bp, Arabidopsis thaliana
aaaatggttaacctcaacaatctcctcgttccaaccttcggggttttctctttccttaacggttgcctagcagtgcgggcatttggggttcctcctaagctacaaaacgagtgtaacctggacaacctagatgttttccaagccaccgaaactatcaagagtgaagccggtcagatcgagtactgggaccacaaccaccctcagctccgatgtgttggtgtttccgttgctcgttatgtaattgaacaaggcgctctttactcgcccaccttcttgacttgcccaaaa

SEQ ID NO: 144124 - DNA, 497 bp, Arabidopsis thaliana
tcgaccacgcgtcgcgcacagagagaaaaaaaactgaaacatcccaaatggatcatcatctttttctcattacaacacgaaacccttcttctcgagagtcttcaaaaccttgaaacaaagcctcaaaatttcacttcgtggatccgaatgtctcagaacccatcactcttcttcctcttatgtctagggttaggtttttgcgttgacctgggtcaatccctgaaagttcctttcagcgttaacgatgttcttccgatgctacctcgtcaagtctcatggcctgttttgaacagtttccacaacgctgtggatttgttgccggtttttattgggtcagttactcctaataatgtatctattgagtggaaaggtgcttgctttaatggtaatgaagctcgtcttgatatcaccgttagcgatcgtgacttcctggacttggtggtgtgttcttcatttaaacatccaagcacatactttgcatgtatgatcttatgtgt

SEQ ID NO: 144125 - DNA, 518 bp, Arabidopsis thaliana
  unsure (1)..(518): unsure at all n locations
atttctccaagtcatcaaaattctcgccgtcaaatcaaatcataaatttttgtttctccaatttgttgagaaacatcacattccgtgtttgatcatcggacaatgaaataaacccactcaaaaagacagaatcaaactcctttttgttctctttctcttaaacccattaaccattttcgtatctgctaccaacttcctgtaatttttctcgggaaaaacanaaaaacataaaacccaaatctttaagcgattttttcatggcgtttctgatggaggtcgatgaagaagaagagatatgatttagtcgttcttcaaattgagaatctttgggggtggtgtttttattggagtcatgattattaccacacacaaaagagatataacccttgtgggctcaattaggagcagctctgctgatcttttgctgatttctcttgccgattagaaagatacaaaaagaatggcctactttgctctcttcacctacttctgatatgatcagagctttccacaatcat

SEQ ID NO: 144126 - DNA, 446 bp, Arabidopsis thaliana
aagaaataacaaaatggctcgagtctcttctcttctttctttcttcttaacacttttgatccttttccatggctacgcggctcaacagggtcagcagggtcagcagtttccgaacgagtgccagctcgaccagctcaatgcgctcgagccgtcacacgtactgaagagcgaggctggtcgcatcgaggtgtgggaccaccacgctcctcagctccgttgctcaggtgtctcctttgcacgttacatcatcgagtctaagggtctctacttgccctctttctttaacaccgcgaagctctctttcgtggctaaaggacgaggtcttatgggaaaagtgatccctggatgcgccgaaacattccaagactcatcagagttccaaccacgcttcgaaggtcaaggtcaaagccagaggttccgtgacatgcaccaaaaagtggagcaca

SEQ ID NO: 144127 - DNA, 347 bp, Arabidopsis thaliana
agaaaaatgggtcgagtctcatctattatctctttctctttgacactcttgatcctcttcaatggctacggtggcgaacagtggcccaacgagtgccagctcgatcaactcaatgcgctcgaaccatcccaaatcatcaagagcgagggtggtcgcatcgaggtctgggaccaccatgcaccccagctccgttgctccggctttgcctttgagcgtttcgtcattgagcctcaaggtcttttcttgcccactttcttgaacgccggcaaactcacgtttgttgttcacggaaggggtctaatgggaagagttattccgggatgcgcccagacattcatggagtcacc

SEQ ID NO: 144128 - DNA, 372 bp, Arabidopsis thaliana
cacaaactcggtatgtaacaatacctagtttttagattttgttttacattaaaaccgctctgaacgttgcttgtcactacccaatacgcgtgtggtgtgtaaaccatctgaatctgctatcgagaaagctcttgaaatcgccaatatcgatcctaaccgaacgctgttctttgaggacagtgtccgaaacgtacaagctggaaaacgcgttggtctttacacggttctggttggtaaatcgaccaaagtcaaaggagcggattacgcgttggaaaacattcacaacatgaaagaggcgataccggagttatgggaatccgaccggaaatcgtcggatgtatgttcctaccccatgatcgactttgagacttt

SEQ ID NO: 144129 - DNA, 227 bp, Arabidopsis thaliana
cggacgcgtgggcggacgcgtgggtgtaactccttcggattcatttttcataattgctgcaaatgctatgggtcgcatcccgtacttcagctgtggtttgaaaggtgttgcaaggagcatgccaacctcagctgctcttgatgtcgttgcaaaaagcttgaatttgaagttctttgaggttccaacatgctggaagtctttcggtaatctagatgcgatgctgggat

SEQ ID NO: 144130 - DNA, 391 bp, Arabidopsis thaliana
caaaagaaaatggttaagctcagcaatctcctcgttgcaaccttctttgttctcctcgtccttaacggctgcctggcgaggcagtcacttggggttcctcctcagctacagaacgagtgtaacctcgacaacctagatgttctccaagccaccgaaactatcaagagtgaagccggtcagatcgagtactgggaccacaaccaccctcagctccgatgtgttggtgtttccgttgctcgttatgtaattgaacaaggcggtctatacttgcccaccttcttcacttccccaaaaatttcctacgtcgttcatggaacgtttattagcggaagagtggtgggtggttgtgccgagaccctcatggactcttattctattcatggacaacttc

SEQ ID NO: 144131 - DNA, 491 bp, Arabidopsis thaliana
aacgcaaacgcggcactctacgtgacaaacggaaaggctcatatacatatggtgaacgacaacggagaaagagtgttcgaccaagagatctccagcggacagttactagtcgtgccacaaggcttttcggtcatgaaacatgccataggcgaacagttcgagtggatcgaattcaagacaaacgaaaacgcacaggtcaacacactcgcgggccgtacctcagtcatgagaggtttgccgcttgaggttataaccaatgggtaccagatctctcccgaagaagctaaacgagtaaagtttagcacgattgagaccacactgacccatagcagtccaatgagctacggaaggcctatggcttgaggcttgatgagcgcgtggtggaatagcgttcgaatctaaagttcggtttggtacgacttgtaatatgaaataataatgtacaaagtagttctacgcttaatgtacctgtattgttatgagtcttgtat

SEQ ID NO: 144132 - DNA, 260 bp, Arabidopsis thaliana
gacccacgcgtgccgaaacaaaaagaaaatggttaacctcaccaatctcctcgttgcaactttttttttctcctcgtccttaacggcttgcttgcgatgcaatcacttggggttcctcctcaactacagaacgagtgtaaccttgacaacctaaatgttctccaagccaccgaaactatcaagagtgaatccggtcagatcgagtactgggaccacaaccaccctcagctccgatgtgttggtgtttccgttgctcgtta

SEQ ID NO: 144133 - DNA, 310 bp, Arabidopsis thaliana
  unsure (1)..(310): unsure at all n locations
ataacataacaccacgcgtccggttaaactagcaatctcctcttgcaaccttcttgattctcctctttctttacgactcccttacaagacactcgcttgttgttctttctcagctacagaacgagnnnaacctnnacaacctaaatgttctccaaaccacctaaactatcaagattgaaacctgtcatatcgagtactgggaccacaaccaccctcaactccgatgtgttggtgtttccattgctcgttatgtaatttaacaaggcgttctttacttgcccaccttcttcacttccccaaaaatttccta

SEQ ID NO: 144134 - DNA, 470 bp, Arabidopsis thaliana
caggaattttttttcttaatcttaatcctgaagatggatccgaatttgaaatttaaaaattaataaattggaaatggagacgcctaatctaaatttttagatattattagagaataaatgatcaactggaaaaggtgctgataaagtttaagatattaccgaaacaaaaaatatttgtaaggagggaaatgacaaaaaaggaaccaaatatatgtctaacgataattaatgacgtaaggaaatatcttacctacatacaaataaaagcagtgcgcaagggggtgacgttgttttgcggctgaaccttgaatgttaggtgtatgattactttttttttttttttcactaagtgttgtctttcttgtattaagaacatcaaaaaggacactagtggaccttccacttacaggatgaagacaaacactataacaaggaaaaacatgatctaacaaaacacaatgttgatcatg

SEQ ID NO: 144135 - DNA, 317 bp, Arabidopsis thaliana
gcgaagaaaatggttaagctcagcaatctcctcgttgcaaccttcggggttctccttttccttaacggctgccttgcgaggcagtcacttgtggttcctcctgagctacagaacgagtgtaacctcgacaacctagatgttctccaagccaccgaaactatcaagagtgaagccggtcagatcgagtactgggaccacaaccaccctcagctccgatgtgttggtgtttcccgtgctcgttatgtaattgaacaaggcgggctttacttgcccaccttcttcacttcctcaaaaatttcctacgtcgatcaatgaac

SEQ ID NO: 144136 - DNA, 407 bp, Arabidopsis thaliana
cacaaacacaatctaatcccaaaaatcaaaagatgaatgccacaaagtttgttgtgcttctcgtgattggcgttttgtgtgccattgtcaccgcaaggcaggtcaaagatttgtccacggagaccaaattaggggcctctcttccaaaaactactaccaaaggcattggagctcagctttctgcaactggcacaacttacagcaccagcagtgtcgttagctatgctaatggttttaacaatcccaaaggtccaggggccaatgcattcgaaagtgccaacacatttaccagcggacaagtcactgccaagggtcgcaaggcaagaagttcttctacaaatgcttctgccggtgaaagcgatgcttcaacttgagtgactcgcaaagctgctgcttcacgtgcaaag

SEQ ID NO: 144137 - DNA, 530 bp, Arabidopsis thaliana
caaaaagaaaatggttaagctcagcaatctcctcgttgcaacctttgttgttctcctcgtccttaacggctgccgggcgaggcagtcacttggggttcctcctcagctacagaacgagtgtaacctcgacaacctagatgttctccaagccaccgaaactatcaagagtgaagccggtcagatcgagtactgggaccacaaccaccctcagctccgatgtgttggtgtttccgttgctcgttatgtaattgaacaaggcggtctttacttgcccaccttcttcacttccccaaaaatttcctacgtcgttcaaggaacgggtatcagcggaagagtggtccctggatgtgccgagaccttcatggactcgcagccgatgcaaggacaacaacaaggccaaccatggcaaggacgacagggacaacaaggccaaccatgggaaggacagggacaacagggacaacaaggaagacaaggccaaccatgggaaggacagggacaacagggacaacaaggacgacagggacaac

SEQ ID NO: 144138 - DNA, 490 bp, Arabidopsis thaliana
  unsure (1)..(490): unsure at all n locations
ctcatgcacacaaacgctgcgtctaacaattccgagatttttgatatcgttggacattttaaccggtctgaaccggtcggttcacttcccaaaacgcctgttgtgtgtaaaccatctgaatctgctatcgagaaagctcttgaaatcgccaatattgatcctaaccgaacgctgttctttgaggacagtgtccgaaacgtacaagctggaaaacgcgttggtctttacacggttctggttggtaaatcgaccaaagtcaaaggagcggattacgcgttggaaaacattcacaacatgaaagaggcgataccggagttatgggaatccgaccggaaatcgtcggatgttggatattccggcaaggtcgccgttgagacttctgttagagcttaggaggagtactgtttcgccgntgtacctaattttccaccactgtcattttcattttcttttttcaaatgacgtaatgtcaattttgttttttttcgac

SEQ ID NO: 144139 - DNA, 474 bp, Arabidopsis thaliana
ccgagaaaacgaaaaccctagtttcagaggcatctccagacacttatattggcggaaggactcgttttgctgtcgccatgcgtgcacacactgacatggtgaccgcaatcgccaccccaatcgataacgcagacatcatcgtctcagcttcccgcgacaaatccatcattttgtggaaactcaccaaggacgacaaagcctacggtgtagctcagaggcgtctcactggtcactctcacttcgttgaggatgttgttctctcctccgatggacaattcgcgctttcctgcagctgggacggcgagctccgtctttgggatcttgctgctggtgtcttcactcgtagattcgtgggacacaccaaggacgtgctctacgtcgccttctcactcgacaaccgttagatcgtctttgcatcttgtgaccggaccatcaagctttggaacacttcttgtgagtgtaagtacacctatt

SEQ ID NO: 144140 - DNA, 183 bp, Arabidopsis thaliana
gttgggcaagaataaatacacgggaaaaatcttttttacgttggggaaaatccgcgcgcgttcgtggttagatatgtcaggcaacgctctcacaggaaccattccgttacagctcgtttggtgcaagaaactgacacacatcgatctcaataacaattttctataaggtcctatacctccatg

SEQ ID NO: 144141 - DNA, 526 bp, Arabidopsis thaliana
  unsure (1)..(526): unsure at all n locations
aagaaaaatgggtcgagtctcatctattatctctttctctttgacactcttgatcctcttcaatggctacactgcccaacagtggcccaacgagtgccagctcgatcaactcaatgcgctcgaaccatcccaaatcatcaagagcgagggtggtcgcatcgaggtctgggaccaccatgcaccccagctccgttgctccggctttgcctttgagcgtttcgtcattgagcctcagggtcttttcttgcccactttcttgaacgccggcaaactcacgtttgttgttcacggaaggggtctaatgggaagagttattccgggatgcgccgagacgttcatggagtcaccggtatttggagaaggtcaaggtcagggtcagagtcaagggttccgtgacatgcaccagaaagtagagcacctacggggcggtgacaccattgcaacaccatctggtgtagctcaatggttctacaacaatggaaatgagcctctcattcttgtgcaacncgggatctcgccagcaacc

SEQ ID NO: 144142 - DNA, 359 bp, Arabidopsis thaliana
aagaaaatggttaagctcagcaatctcctcgttgcaaccttcggggttctcctcgtccttaacggctggcgtgcgaggcagtcacttggggttcctcctcagctacagaacgagtgtaacctcgacaacctagatgttctccaagccaccgaaactatcaagagtgaagccggtcagatcgagtactgggaccacaaccaccctcagctccgatgtgttggtgtttccgttgctcgttatgtaattgaacaaggcggtctatacttgcccaccttcttcacttgctcaaaaatttcctacgtcgttcaaggaacgggtatcatccgaagagtggtccctggatgtgcgcggaccttcat

SEQ ID NO: 144143 - DNA, 257 bp, Arabidopsis thaliana
  unsure (1)..(257): unsure at all n locations
gtctcacnggttgtaagtctcttcatactccatcgcttgagaatgttttacaaaaaacgacattgttttcgccaataggccagagttaattctcgggaaacatattgagtacaactccaccactatgactagtgcgccttatggtgaccactggcgaaacttgcgccgcattgctaccctggagatcttcgcatcacataagctcaacggcttcttatctgtccgtaaggatgagatcccgcagttgttactacgtc

SEQ ID NO: 144144 - DNA, 72 bp, Arabidopsis thaliana
acttggggttcctcctcacctacaaaacaagtgtaacctctacaacctaaattttctccatgccacctaaac

SEQ ID NO: 144145 - DNA, 323 bp, Arabidopsis thaliana
gaaggacgacacggacgacacggtaatggcttagaggagaccatctgtatgtgctagtgtgcaccgataacctcgatgatccgtctcgtgctgacgtgtacaagccacagctcggttacatcagcactctcaacagttacgatcttcccatccttcgcttcatccgtctctcagtcctccgtggatctatccgtcaaaacgcattggtgctttcacagtggaacgcaaacgctaacgtcatactttacgtgacagacggtgaagcccaaatccagttcgttaacgacaatggtatcatagcgtttgaccgacaagtctctcat

SEQ ID NO: 144146 - DNA, 394 bp, Arabidopsis thaliana
aaaaaaaaaaaagtcttttattgcagaaatttcgatcgtttttgttgtgtacatagagattatcgcgttttgttggcaatcgccattaaaccttcttccctctaacccaatcaaatttgcggctctttcttttatcttctcgcctcggttttagcaaaccctttagttatcttcttcctcaagcaatttttcttttggattagattggtgttttcttttggtttgtgtggtgatgatgagaaggcaacgagatgaacaacaatctagggttttttacgatctatcatcttttgtgttgaatctttctcttctcctcctatgccgatttttttacctgatcgtgttcctgggccgccctctagaattctatctccttcttcttttcatcgttttt

SEQ ID NO: 144147 - DNA, 389 bp, Arabidopsis thaliana
  unsure (1)..(389): unsure at all n locations
cgatataatttcacagcggagactttgggaaagggatggctctcatcgcgatcatagtcaggcttttcttccttaaagaatttccaggtcagaaccagcagttttcatgactaaccattagttggaaacttggatctggaaaatcttttttcttttttgcatataaatgtagagtggctagagattccggtagcattgattcttattgtggtggtgtcgccgagccttatagcttggacactaaagaagctgggttggggcagtcatatgtctagtaatagcatggtaccttttccatgaacacataaaagcttctggtggattcaaaaactcttttactcaaaagaatggaatctncaataccaattgggatcgttgcccttcctcgt

SEQ ID NO: 144148 - DNA, 458 bp, Arabidopsis thaliana; identical to SEQ ID NO: 130130

SEQ ID NO: 144149 - DNA, 421 bp, Arabidopsis thaliana; identical to SEQ ID NO: 130131

SEQ ID NO: 144150 - DNA, 508 bp, Arabidopsis thaliana
tcacaaacgagtaagaatacaaatacaaatagcaaaaaaaatggcaatcaagctcttcctcgtctgcgcagggttggccctctgcttcctgctcaccaacgcttccatctaccgcactgttgtcgagttcgacgaagatgacgccagcaaccccatgggcccaagacagaaatgtcagaaggagtttcagcaatcacagcacctaagagcttgccagaaattgatgcgcatgcaaatgaggcaaggcccgggtggtggtccctccctcgacgatgagttcgatttggaagacgacatcgagaacccacaaggcccccagcagggacaccagatcctccagcagtgctgcagcgagcttcgccaggaagagccagtttgtgtttgccccaccttgagacaagctgtcagggccggtagcctacatggacaacacggaccattccaatccatgaaaatttacaagaccgctaagtacttgtctaacatttgcaagatccacaagttggtg

SEQ ID NO: 144151 - DNA, 269 bp, Arabidopsis thaliana
ggtctttctaaaacgccggcaaactcacgtttgttgttcacgaaagggttttattggaaagagttattccggaatgggccgagacgttcatggagtcaccggtatttgaagaaggtcaaggtcagggtcagagtcaagggttccgtgacatgcaccagaaagtagagcacctacggtgcggtgacaccattgcaacaccatctggtgtagctcaatggttctacaacaatggaaatgagcctctcattcttgttgcagccgcggatctc

SEQ ID NO: 144152 - DNA, 520 bp, Arabidopsis thaliana
  unsure (1)..(520): unsure at all n locations
caatcacagtaccaaaaaaaaatggacagccgccgcaccaggcaccgtcaccaacagcagcaccggaaccaaacatggtggcaccactaatttgacgcaatcggccacccaatgttctcccggatccgtctggcaacaccgtccgatgtcccattcatccacaaactaattcaccaaatggcagtcttcgaacgtctcacgcatctcttctccgccaccgaatcacgtctcgcttcaacactcttcacctctcgtcctttccaatcattcacagtcttcctcttagaagtctctcgttctccatttccagcaaccatcacttcatcaccatctcccgatttcacaccgtttctcaaaacgcataaccttgatctcccgattgatgatccggagagttacaatttctcgccggatatgttgaacgacgtcgttgtagctgggtttgttcttgttttcccgaattactctagcnttttgtccaaacctgagttttacattgaggatatatttgtgagagagc

SEQ ID NO: 144153 - DNA, 535 bp, Arabidopsis thaliana
  unsure (1)..(535): unsure at all n locations
gcggatctcgccagcaaccagaaccagcttgaccgcaaccttagaccatttttgatagccggaaacaacgcacaagggcaggaatggctacaaggccgaaagcaacagaagcaaaacaacatcttcaatggcttcgcacctgagatcttggctcaagccttcaagatcaatgtcgagacggctcagcagctccagaaccagcaagataaccgtggcaacatcgtcaaggtcaacggacctttcggcgtcattaggccacccttgagacgcggcgaaggcggccaacaaccacatgaaatagctaatggtttagaggagactttgtgcaccatgcgatgcactgaaaacctcgatgacccgtcggatgctgacgtgtacaagccatcactcggatacattagcacacttaacagctacaatcttcctatcctcagacttctccgccttagcgctcttcgtggctccatccgtaaaaacggcttggtgctaccgcaatggaacgtaaacgcanacgcggcactctacgtgacaaacg

SEQ ID NO: 144154 - DNA, 416 bp, Arabidopsis thaliana
  unsure (1)..(416): unsure at all n locations
ccaacacttggcagatccaaccgcgattactcaagctctttgctggaaatgcatacttggtggataacaagaagaggaaggagaagaaggagaagaaagagaaggtgaanaaagcaaagacattcaatgtttttgaatctgaaccggatttcgagagcccctacggtagtactataacgattaacaggaaggatctgaaagttttaaaaggctcaatggttggagtttccatggtgaatctcactcaaggatcgatgatgggaccgcactggaatccatgggcttgcgagatttcaattgtgttgaaaggagcaagaatggttagggtacttaagtcttcgatatcatcaaactcatcatccgactgtaaaaacgtgaggtttaaagtagaagaaggagatattttcgcagttcca

SEQ ID NO: 144155 - DNA, 491 bp, Arabidopsis thaliana
  unsure (1)..(491): unsure at all n locations
aagaggaagaaaaatgggtcgagtctcatctattatctctttctctttgacactcttgatcctcttcaatggctgcgctgcggaacattggcccaacgagtgccagctcnatcaactcaatgcgctcgaaccatcccaaatcatcaagagcgagggtggtcgcatcgaggtctgggaccaccatgcaccccagctccgttgctccggctttgcctttgagcgtttcgtcattgagcctcaaggtcttttcttgcccactttcttgaacgccggcaaactcacgtttgttgttcacggaaggggtctaatgggaagagttattccgggatgccccgagacgttcatggagtcaccggtatttggagaaagtcaaggtcagggtcagagtcaagggttccgtgacatgcaccagaaagtagagcacctactgtgcggtgacaccattgcaacaccatctggtgtagctcaatggttctacaacaatggaaatg

SEQ ID NO: 144156 - DNA, 335 bp, Arabidopsis thaliana
cccacgcgtccgcggaaagaggaggagaaagcggcgcagagcgtggcggtgactgtggtgacttcggacgtggattcggcggtggacgtggaggtggccgtggccgtgatcgtggtccaagaggccgtggaagacgtggaggccgtgcctcggaagaaacgaaatgggttccagtgaccaaactaggtcgtctagtggctgacaataaaataacgaagctagagcagatctatctccattctcttccagtaaaggagtaccaaatcatagatcatcttgttggtcctacgttgaaagacgaggttatgaagatcatgccagttcagaaacaaacc

SEQ ID NO: 144157 - DNA, 445 bp, Arabidopsis thaliana
cacgaagagaaaagaagagaagaagaagaagaagaagcagcagaagaagagatgtagaatccaatcatggcggctgcgtgagtggatctgattgggcaaagcctggtgcttgggctcttgaagccgaggaacacgaagctgagctcaaacaacaaccctctcccaccaaccagaaatcctctgccggagattcctccgatttcccatccttagccgctgcagcgaccaccaaaacgaagaagaagaagggccaaaccatctctcttgctgaattcgctacctacggtactgctaaggcaaagccggctccacagacggagcgtctcactcaggctgagctggtcgctctttcgaccgggccacgtgaacgctcttgttgggagcttgatagatctaaagcttggaggtggtttccggagccatggtgggggtcgttatggagatg

SEQ ID NO: 144158 - DNA, 532 bp, Arabidopsis thaliana
attttgtacttctgcatcggtgcgttcttcttagccacctgtagtaaccaaagttacattggtttatagccaaaatattagccacggggtgtatggtgtggacatacaaatcaactgcaactaaaccgaaccatgtgttttcatgaatggttagattggtttatatatgtaaatccaaagaaaccgaagctaaagccaaacttaaaccaattaatttgagtataaacgaaccacacgaacttaaattaagaaataatttctatgttaaactatctaagaaaaattagatcgaaccatgtttaatatttcttaaaaataattatagctaagtacatagtagctatttgtatatgttttttacatcaacctgacccaaatctatcatagttatttatgtcttatatttatttgttattcataaaagaacaaaagtaaatttgacagaaactacatcaacctttccaaaaaattatccaaagaaaaccgaattgattatatacaaattatcttatatttagtattaatcttatat

SEQ ID NO: 144159 - DNA, 433 bp, Arabidopsis thaliana
  unsure (1)..(433): unsure at all n locations
aagaaaatggttaagctcagcaatctcctcgttgcaaccttcggggttctcctcgtccttaacggctgcgcgggcgaggcagtcacttggggttcctcctcagctacagaacgagtgtaacctcgacaacctagatgttctccaggccaccgaaactatcaagagtgaagccggtcagatcgagtactgggaccacaaccaccctcagctccgatgtgttggtgtttccgttgctcgttatgtaattgaacaaggcggtctttacttgcccaccttcttcacttccccaaaaatttcctacgtcgntcaaggaacgggtatcagccgaagaatgttccctggatgtgccgggaccttcatggactcgcaaccgattcaaggacaacaacaaggtcaaccatggcaaggacgacagggacaacaaggccaacca

SEQ ID NO: 144160 - DNA, 461 bp, Arabidopsis thaliana
  unsure (1)..(461): unsure at all n locations
ctagtgttaaaccagagtaaagcttgaaactttggactaaaataatgtcgtctttgggtgtgtcggaaatgcttggtactccccttaacgtgcagggcagtttcaagatcgtctgctccgttggcatcaagcccatccacgttcaagactgttgctctcttctctaagaaaaagccagctcctgctaagtccaaggctgtctctgagactagcgatgagctcgccaagtggtatggtcctgacaggagaattttcttgcctgatggtcttttggatagatcagagatcccagagtacttaaacggtgaagttgctggagattattggtatgacccatttggtcttggaaagaagcctganaactttgctaaataccaagcttttgaattgatccatgcgagatgggctatgttaggagcagctggtttcatcattcctgaagctttaaacaaatatggcgc

SEQ ID NO: 144161 - DNA, 437 bp, Arabidopsis thaliana
  unsure (1)..(437): unsure at all n locations
ggacgacatggacgacacggtaatggcttagaggagaccatctgcagtgccaggtgcaccgataacctggatgacgggtctcgtgctgacgtgtacaagccacagctcggttacatcagcactctcaacagttacgatctccccatccttcgcttcatccgtctctcagccctccgtggatctatccgtcaaaacgcaatggtgcttccacagtggaacgcaaacgcgaacgctattctttacgtgacagacggggaagcccaaatccagatcgtaaacgacaatggtaacagagtgtttgacggacaagtctctcaaggacagctcatanccgtaccacaaggtttctcggtggtgaaacgcgcaacaagcaaccagatccagtgggttgagttcaaaacaaacgctaacgcgcaaatgaacactctggcgggacg

SEQ ID NO: 144162 - DNA, 463 bp, Arabidopsis thaliana
aaaaagaaaatggttaagctcagcaatctcctcgttgcaaccttcggggttctcctcgtccttaacggctgccttgcgaggcagtcacttggggttcctcctcagctacagaacgagtgtaacctcgacaacctagatgttctccaagccaccgaaactatcaagagtgaagccggtcagatcgagtactgggaccacaaccaccctcagctccgatgtgttggtgtttccgttgctcgttatgtaattgaacaaggcggtctttacttgcccaccttcttcacttccccaaaaatttcctacgtcgttcaaggaacgggtatcagcggaagagtggtccctggatgtgccgagaccttcatggactcgcagccgatgcaaggacaacaacaaggccaaccatggcaaggacgacagggacaacaaggccaaccatgggaaggacagggacaacagggacaac

SEQ ID NO: 144163 - DNA, 456 bp, Arabidopsis thaliana
aagaaaatggttaagctcagcaatctcctcgttgcaaccttcggggttctcctcgtccttaacggctgccttgcgaggcagtcacttggggttcctcctcagctacagaacgagtgtaacctcgacaacctagatgttctccaagccaccgaaactatcaagagtgaagccggtcagatcgagtactgggaccacaaccaccctcagctccgatgtgttggtgtttccgttgctcgttatgtaattgaacaaggcggtctttacttgcccaccttcttcacttccccaaaaatttcctacgtcgttcaaggaacgggtatcagcggaagagtggtccctggatgtgccgagaccttcatggactcgcaaccgatgcaaggacaacaacaaggccaaccatggcaaggacgacagggacaacatggccaaccatgggaagacagggcaacagggaca

SEQ ID NO: 144164 - DNA, 545 bp, Arabidopsis thaliana
  unsure (1)..(545): unsure at all n locations
gcggtggcgttgaatctgcgatggcgggaatcaaattgctaccggaagatcttgttacgactcctaaacaacaagcctgtgccgtctccgcggtgacaacgacaacaacnaatagtttggcttccgatgacgatcgatctatcgcggcggattcgtggtcgatcaaaagtgagtatggaagcactctcgatgacgatcaacgtcacgccgatgccgtcgaggctctctcgaccgctaaacttcgtgtctcttccgatacagttctgataaggaagagccagatgctgatggaggaggtcaatcaatgcttggtcttcaaagctattgtgatgcaacgtattccgatgtgctgactaatttcagagagcattggtcatgcttatgaagtttgttttgtataatattaactggagattttaacttatttgtctaattgcttaattcttctactatttttttattatacttctttcttttctatctctactttcattttttctttttatattattttttttatattattttattttcttctttatttt

SEQ ID NO: 144165 - DNA, 355 bp, Arabidopsis thaliana
  unsure (1)..(355): unsure at all n locations
gaattccgggacgaccacgcgtgcggaaaatggttaagctcagcaatctcctcgttgcaaccttcggggttctccttttccttaacggctgccttgcgaggcagggacttggggttcctcctgagctacagaacgagtgtaacctcgacaacctagatgttctccaagccaccgaaactatcaagagtgaagccggtcagatcgagtactgggaccacaaccaccctcagctccgatgtgttggtgtttccgntgctcgttatgtaattgaacaaggcggtctttacttgcccaccttcttcacttccccaaaaatttcctacgtcgttcaaggaacgggtatcagcggaagaat

SEQ ID NO: 144166 - DNA, 243 bp, Arabidopsis thaliana
  unsure (1)..(243): unsure at all n locations
aaagctctctttttttctccagatttcgattcccgaggctcgagagaaaaccgtaaatctcttctccgttcactcaatcaaccaaagatgcgtgagattcttcacatccagngtggtcaatgcggtaaccagatcggagccaagttctgggaagtggtttgcgccgagcacggcatcgatccaaccggaaggtacaccggagactcagatctgcaacttgagcgcatcaacgtttactacaat

SEQ ID NO: 144167 - DNA, 535 bp, Arabidopsis thaliana
  unsure (1)..(535): unsure at all n locations
gaattacggaacgaccacgcgtccggagagaagaaagatagagaaaaaaaatgggaggcaaaggtgtgatgatgttggcgatactttgccttagggcggtggctgcaacatctgaggcggtaacagaggctgagccaggtttgatgatgaacttctacaaggacacgtgtcctcaggccgaagacatcgnccgtgaacaagtcaaactcctctacaaacgccacatgaacaccgctttctctnggctccgtaacatcttccatgactgcgccgttgagtcatgtgatgcgtcgcttttgctggattcgacaagaagagagctaggagagaaagaacacgacaggagcttcggacttagaaactttaggggcatgcgggagatcaaggaagctttttagagggagtgttctggagttgactcattgtctgacattctttgtcttggccgtatgagatagcattcaagctatatgaggaccttaatatttttttgaagacaggattggagagttggattaaaatcatgaccgttatt

SEQ ID NO: 144168 - DNA, 509 bp, Arabidopsis thaliana
atccaattgaatcatagcaaattaagtttcgcattcgaagtttttcttgatttgataaaaatggcggccatgcgactaacaagaaccgctctagttggtctctcaaaggctttccctggaatcaaagctccggctactctcgctgcttcttcccggaaagtctctcgcatctgcttcgccacctccgttagccaaaacgagggaagagatcctctagataacgctagagactcgagagctgattcagcttacggatcgaagaaatggagggaggacatcggagaaaactatgcccaagcggctaaagacaaggctaacgaaagagcaagcaaagctgcagataaagcctacgagacaaaagagcaagcaaaggataaagcctacgaaactaaagagaaagcaaaggatacagcctacaatgcaaaagagaaggctaaggattatgctgaacggactaaagataaggtgaacgaaagggcgtataatgcaagggattaaggcggagatac

SEQ ID NO: 144169 - DNA, 494 bp, Arabidopsis thaliana
  unsure (1)..(494): unsure at all n locations
atcgcttaattctgcttttattaccagagaaagcaagaatatatatttttcagaaattgggtgaagaagagtggtcttgattactaagatgtctctctctttctacatcattcatcttctcattttctccttgatttccacttgtgttgtctccaaccaggccgaggataatcttcttcaaggcctaaacagctaccgaactgctcaaagagttcctccatttgccaagaatgagaaggctgattgtgtggctgatgagatcgccgacaagctcgaagatcagccatgcacaaaccacaccacaggagcacggttactcctggctcggtacctncacggctgacgaactaccaggacattctctctgaatgcaaaatcgacccaaacactacccgtgacggattgatcctacctgtcttgattcctaaccggatcccgactttggctttaactaattacacccaaactggttatgcctcggatttaatgattca

SEQ ID NO: 144170 - DNA, 134 bp, Arabidopsis thaliana
cagttttggttttttgtttcctcctacaccaacgttgccatttaccgaaccgtggtggagttcgaagaagatgacgccactaaccccataggcccaaaattgaggaaatgccgcagggagtttcagaaggacca

SEQ ID NO: 144171 - DNA, 438 bp, Arabidopsis thaliana
gcatacattgataccatgaacaaggtgttaagtgcacattttcgtgcttatattcaagcacttgagaaactacagttagatatagccacagcatatgacttaattggggtagagaccagaaccaccggcctcttctcaagagctagggagccactaaagaaccgctctgccgtttttgctttgggtgacaggataaaaattataaaggatattgatcaacctgctttgatcccacacatagccgaagctagctctctcaaatatccttatgaagtgctcttcaggagcctgcacaagctacttatggatacagctacttctgagttctgttgatttttccccttttatatttgtgttattgtcgctcatcgctcaacccccaggttaacgtcatttgttttcattttaacaggtatatgttttgtgatgatttctttg

SEQ ID NO: 144172 - DNA, 353 bp, Arabidopsis thaliana
agaaaatggttaagctcagcaatctcctcgttgcaaccttcggggttctcctcgtacttaacggctgccttgcgaggcagtcacttggggttcctcctcagctacagaacgagtgtaacctcgacaacctagatgttctgcaagccaccgaaactatcaagagtgaagccggtcagatcgagtactgggaccacaaccaccctcagctccgatgtgttggtgtttccgatgctcgacatgtaattgaacaaggcggtctatacttgccaaccatcttcacttacgcaaaaatatcctacgttgatcaaggcacgggcatcagcggaagagtgatccctggatgtgcctagacc

SEQ ID NO: 144173 - DNA, 255 bp, Arabidopsis thaliana
taaagaggaagaaaaatgggtcgagtctcatctattatctctttctctttgacactcttgatcctcttcatggctacactgaccaacagtggcccaacgagtgccagctcgatcaactcaatgcgctcgaaccatgccaaatcatcaagagcgagggtggtcgcatcgaggtctgggaccaccatgcaccccagctccgttgctccggctttgcctttgagcgtttcgacattgaacctcaagggcttttcttgc

SEQ ID NO: 144174 - DNA, 367 bp, Arabidopsis thaliana
gcggtaattaactaacaacaaatggcgaacaagctcttcctcgtctgcgcagctctcgccctgtgtttcatcctcaccggcgcgtccgtctatcgcacggttgtcgagttcgacgaagatgacgccagtaaccccataggcccaatacagaaatgtcagaaggagtttcagcaagaacagcacctaagagcttgccagagatggatgcgcaagcaaatgtggcaaggacgtggtgtgaggccttccctagacgaagagtaacctatggaacacgacatagggaacccgcactgacgacagcatttggacaccctctggaccgagctttgccaagaagagccagtttgcgtttgccccaccttgagac

SEQ ID NO: 144175 - DNA, 281 bp, Arabidopsis thaliana
gcaataacctacaaataatcataacacttcttctccttatctccatagctgtcgtccactgcttatccttccgtgtggagatcgacgagttcgagccaccacagcacggagaacaagaaggtccccgtcgccgtactggtggtggctctggcgagggatgggaggaagagtcgacgaatcatccataccacttcaggaagccgagtttcagtgattggttccagtcaaaggaaggttttgtgagagtgcttgctaagttcacaaaacatgcaccggctctc

SEQ ID NO: 144176 - DNA, 341 bp, Arabidopsis thaliana
tgtaatcccttagatcttcttttcaaatttcaatggcgtccggtgatgttgagtatcggtgcttcgttggaggtctagcatgggccactgatgacagagctcttgagactgccttcgctcaatacggcgacgttattgattccaagatcattaacgatcgtgagactggaagatcaaggggattcggattcgtcaccttcaaggatgagaaagccatgaaggatgcgattgagggaatgaacggacaagatctcgatggccgtagcatcactgttaacgaggctcagtcacgaggaagcggtggcggcggaggccaccgtggaggtggttgcggtggatac

SEQ ID NO: 144177 - DNA, 420 bp, Arabidopsis thaliana
agaggaagaaaaatgggtcgagtctcatctattatctctttctctttgacactcttgatcctcttcaatggctacactgcccgacagtggcccaacgagtgccagctcgatcaactcaatgcgctcgaaccatcccaaatcatcaagagcgagggtggtcgcatcgaggtctgggaccaccatgcaccccagctccgttgctccggctttgcctttgagcgtttcgtcattgagcctcagggtcttttcttgcccactttcttgaacgccggcaaactcacgtttgttgttcacggaaggggtctaatgggaagagttattccgggatgcgccgagacgttcatggagtcaccggtttttggagaatgtcaaggtcagggtcagaggcaagggttccgtgacatgcaccaagaagtagag

SEQ ID NO: 144178 - DNA, 366 bp, Arabidopsis thaliana
  unsure (1)..(366): unsure at all n locations
cagagatagagagagagatggcgacggaaacggaagttgtggctccggtaagcaacggcggaggcaaaggatgttgcaagtacggtggtcctggttacgcgacgcctctcgccgctatgtctggtccatcagagaaacttatctacgtcaccgccgtctacaccggaactggaatagataaaccggactatttggcgacggtggatgtagatccaagctcgccttcgtattcaagtgttattcatagattaccaatgcctnttggtggtgatgagcttcatcattctggttggaactcttgtagttcttgccatggtgatgcttctgttgatagacgttatctcgtgttacccgctcttatatctg

SEQ ID NO: 144179 - DNA, 467 bp, Arabidopsis thaliana
  unsure (1)..(467): unsure at all n locations
tggttctacaacaatggaaatgagcctctcattcttgttgcagccgcggatctcgccagcaaccagaaccagcttgaccgcaaccttagaccatttttgatagccggaaacaacccacaagggcaggaatggctacaaggccgaaagcaacagaagcaaaacaacatcttcaatggcttcgcacctgagatcttggctcaagccttcaagatcaatgtcgagacggctcagcagctccagaaccagcaagataaccgtggcaacatcgtcaaggtcaacggacctttcggcgtcattaggccacccttgagacgcggcgaaggcggccaacaaccacatgaaatagctaatggtttagaggagactntgtgcaccatgcgatgcactgaaaacctcgatgacccgtcggatgctgacgtgtacaagccatcactcggatacattagcacacttaacagctacaatct

SEQ ID NO: 144180 - DNA, 373 bp, Arabidopsis thaliana
acaaaacccaattatgccggagatggccgcaacatccgccgctgctgtagctgcttcttacatcatgggtactcgggtggctcccggtatccatcccggatcacgtcggttcacagacgtgttcggtttcggaaagaagaaggcagctcccaaaatgagtgccaaaaagacggtgactacggaccggcctctttggtacccaggcgccatttctactgactggcttgatggttccttgggtggagattacggatttgatcccttcggtttaggcaaaccggccgagtatcttcaatacgatatcgatgtactagaccagaatctggctaagaacttgtgcggagacgtgatcggaacccgtactgaagctgcc

SEQ ID NO: 144181 - DNA, 520 bp, Arabidopsis thaliana
cttaccacccactccttccgatcagcatcatacatttctcctgttgtttgggtacactagtatggacttgggttgggcctacaagttattcatataccttttaaggtgtctacaaatacaaatacctaatgagtgtggatccaagccgcaccttttgtatctccaaaactagcccctctatgaatcttggaggggtacagttgattccaaccgtcactactttctcacaattttcagctatggagatacactccttgatggaatccccgctaaccacgtttacgccattctttgagttgaatgaaaaccacccaggaatcttcacatctccctcttctaatagatcagcaaatgccttgcatatcacagaaagaaacacccacaggaagctaacaacatcaaaattgggacgctcgatatgaaaggataaatctactacaatatgtcaaatatcatcatcagtacctgagcctctatcttgtttggaatggtctcaaatgctattaaatcagcaccagat

SEQ ID NO: 144182 - DNA, 148 bp, Arabidopsis thaliana
aagaaaaatgggtcgggtctaattaataatctcttccttttggacactttggatccttttaaatggttacactgcccaacagtggcccaacgggtgccagttcgatcaactaattgcgctcgacccatcccaattaatcaagagcgag

SEQ ID NO: 144183 - DNA, 372 bp, Arabidopsis thaliana
  unsure (1)..(372): unsure at all n locations
ggctacaaggccgaaagcaacagaagcaaaacaacatcttcaatggcttcgcacctgagatcttggctcaagccttcaagatcaatgtcgagacggctcagcagctccagaaccagcaagataaccgtggcaacatcgtcaaggtcaacggacctttcggcgtcattaggccacccttgagacgcggcgaaggcggccaacaaccacatgaaatagctaatggtttagaggagactttgtgcaccatgcgatgcactgaaaacctcgatgacccgtcggatgctgacgtgtacaagccatcactcggatacattagcacacttaacagctacaatcttnctatcctcagacttctccgccttagcgctcttc

SEQ ID NO: 144184 - DNA, 249 bp, Arabidopsis thaliana
cgtcgttcaaggaacgggtatcagcggaagagtggtccctgtatgtgccgagaccttcatggactcgcaggcgatgcaaggacaacaacaaggccaaccatggcaaggacgacagggacaacaaggccaaccatgggatggacagggacaacagggacaacaaggaagacacggccaaccatgggaaggacagggacaacagggacaacaagaacgacagggacaacaaggccaacaatgggaaggaca

SEQ ID NO: 144185 - DNA, 235 bp, Arabidopsis thaliana
atctattatctctctctctttgacactcttgatcctcttcaatggctacactgcccaacagtggcccaacgagtgccagctcgatcaactcaatgcgctcgaaccatcccaaatcatcaagagcgagggtggtcgcatcgaggtatgagaccaccatgcacctcagatgcgctggtgcggctttgcctttgagcgtttcgtcattgagcctcaaggtcttttcttggccactttc

SEQ ID NO: 144186 - DNA, 314 bp, Arabidopsis thaliana
  unsure (1)..(314): unsure at all n locations
aagaaaacatacacaaatggcaaaccatggctaacaggctcttcctcgtttgcgcaactttcgccctttgcttcctcctaaccaacgcttccatctaccgcaccgttgtcgaattcgaagaagatgacgccagcaaccccgtaggtccaagacagagatgccagaaggagtttcagcaatcccaacacctaagagcttgccagaaatggatgagcaagcaaaatgaggcaaggacgtggtggtggtccttnccctcgacgatgagttcgatttcgagggcccccagcagggataccagctactccagcagtgct

SEQ ID NO: 144187 - DNA, 482 bp, Arabidopsis thaliana
atgaggtcccacgagaacattgacgaccctgctcgtgctgacgtgtacaagcccagcctaggtcgcgtgaccagcgtcaacagctatacctggcccatcttggagtatgtcaggctcagtgccactcgtggcgttctccagggtaatgcgatggtgcttcctaaatacaacatgaacgctaacgagatcttgtactgcactggaggacaaggaaagatccatgtggtcaacgacaacggacagaacgtgttggaccaacaagtgcagaaaggacagctcgtggtcatcccacaagggttcgcatacgttgtccagtcccacggaaacaagttcgagtggatctctttcaaaactaatgaaaacgcaatgatcagcactttggcgggtagaacctcgctcttgagggcattgccaattggaggtcatatcaaatggttttcagatctctcccgaggaagcttaggaagatcaagttcaacaca

SEQ ID NO: 144188 - DNA, 502 bp, Arabidopsis thaliana
cggacgcgtgggcggacgcgtgggcggacgcgtgggagtggatggatttgagttattctagatatctgaaagagcttcccaatctttcaactgcaactaatctcgaagaattaaagcttttaaattgctcaagtttagtggagctcccctcctctattgaaacactcaccagtctccagatattagatctccgagattgctcaagtcttgtggagcttccctcttttgggaatgcaacaaaacttgagaaattgttgctttcaaattgttggatcttacaaattcccgctatcgagaatgcgactaatctccgggaattgaatctccaaaattgctcaagtctaatagagctccctctttctattggaactgccacaaatctgaagaaattggatattagcggatgctcaagtctcgtgaaactcccatcctctattggagatatgactaatctccgggaattgaatctccaaaattgctcaagtctaatagagctcccttt

SEQ ID NO: 144189 - DNA, 433 bp, Arabidopsis thaliana
gagcctctcattcttgttgcagccgcggatctcgccagcaaccagaaccagcttgaccgcaaccttagaccatttttgatagccggaaacaacccacaagggcaggaatggctacaaggccgaaagcaacagaagcaaaacaacatcttcaatggcttcgcacctgagatcttggctcaagccttcaagatcaatgtcgagacggctcagcagctccagaaccagcaagataaccgtggcaacatcgtcaaggtcaacggacctttcggcgtcattaggccacccttgagacgcggcgaaggcggccaacaaccacatgaaatagctaatggtttagaggagactttgtgcaccatgcgatgcactgaaaacctcgatgacccgtcggatgctgacgtgtacaagccatcactcggatacattagcacactta

SEQ ID NO: 144190 - DNA, 259 bp, Arabidopsis thaliana
attcgacgcacgcgcccggcgttctataatctccgacgtctcactctcatttctcctctttttgcatggcgccaaggcacgccagcgagaggcgccgtttccaaacgcctgccatttcagccaaatcaacagcctcgcgcccgctcaggcgacgaaattcgaagccggtcagatggaagtatgggaccacatgagccctgagctccgatgcgccggtgtaacggtggctcgcatcacccttcagcccaattccattttc

SEQ ID NO: 144191 - DNA, 486 bp, Arabidopsis thaliana
taaagaggaagaaaaatgggtcgagtctcatctattatctctttctctttgacactcttgatcctcttcaatggctacactgcccaacagtggcccaacgagtgccagctcgatcaactcaatgcgctcgaaccatcccaaatcatcaagagcgagggtggtcgcatcgaggtctgggaccaccatgcaccccagctccgttgctccggctttgcctttgagcgtttcgtcattgagcctcagggtcttttcttgcccactttcttgaacgccggcaaactcacgtttgttgttcacggaaggggtctaatgggaagagttattccgggatgcgccgagacgttcatggagtcaccggtatttggagaaggtcaaggtcagggtcagagtcaagggttccgtgacatgcaccagaaagtagagcacctacggtgcggtgacaccattgcaacaccatctggtgtagctcaatggttctacaacaat

SEQ ID NO: 144192 - DNA, 478 bp, Arabidopsis thaliana
caaaacaaaacacacccaaatatgcataagcttttgttttctcttctctccgtcgtctcactctcatttctcctcttcttccatggcgccgaggcacgccagcgagaggcgccgtttccaaacgcctgccatttcagccaaatcaacagcctcgcgcccgctcaggcgacgaagttcgaagccggtcagatggaagtatgggaccacatgagccctgagctccgatgcgccggtgtaacggtggctcgcatcacccttcagcccaattccattttcttgcccgctttctttagcccacctgcccttgcttacgttgtccaaggagaaggagttatggggacgattgcttctggttgtcctgagacttttgcagaagttgaaggatcatcaggaagaggaggaggaggagacccgggtcgacgttttgaggacatgcaccacacgttggagaatttccggcgaggggatgtgttgcttc

SEQ ID NO: 144193 - DNA, 332 bp, Arabidopsis thaliana
aagaaaacatacacaaatagcaaaacatggctaacaagctctttctcgtctgcgcaactatcgccctctgggggctgctcaccaacgctggcatctaccgcaccgttagtcgaattcgaagaagatgacgccagcaaccccgtatgtccaagacagagatgccagaaggagtgtcagcaatcacaacacctaagagcttgccagagatggatgagcaagcaaatgaggcaaggacgtggcggtgggccttccctagacgatgagtccgattcagagggccgccagcatggataccagcatctgcagtagtgcatgaacgagctttaccagga

SEQ ID NO: 144194 - DNA, 354 bp, Arabidopsis thaliana
caaaaagaaaatggttaagctcagcaatctcctcgtagcaaccttcggggttctcctcgtcctgaacggctgccttgcgaggcagtcacttggggttcctcctcagctacagaacgagtgtaacctcgacaacctagatgttctccaagccaccgaaactatcaagagtgaagccggtcagatcgagtactgggaccacaaccaccctcagctccgatgtgttggtgtttccgttgctcgttatgtaattgaacaaggcgggctttacttgcccaccttcttcacttccccaaaaatttcctacgtcgttcaaggaacgggtatctatcgtaagagtggttcctggatgtgccg

SEQ ID NO: 144195 - DNA, 459 bp, Arabidopsis thaliana
gaaaatggttaagctcagcaatctcctcgttgcaaccttcggggttctcctcgtccttaacgggtgccttgcgaggcagtcacttggggttcctcctcagctacagaacgagtgtaacctcgacaacctagatgttctccaagccaccgaaactatcaagagtgaagccggtcagatcgagtactgggaccacaaccaccctcagctccgatgtgttggtgtttccgttgctcgttatgtaattgaacaaggcggtctttacttgcccaccttcttcacttccccaaaaatttcctacgtcgttcaaggaacgggtatcagcggaagagtggtccctggatgtgccgagaccttcatggactcgcagccgatgcaaggacaacaacaaggccaaccatggcaaggacgacagggacaacaaggccaaccatgggaaggacagggacaacagggacaaca

SEQ ID NO: 144196 - DNA, 386 bp, Arabidopsis thaliana
  unsure (1)..(386): unsure at all n locations
actacggcttccgcgctcaggagagctctcatgtcatatgcccagcttgacaatgcctcgctgtgatgggcgctatgggaacactggtctttacgttggccgattatcatcgagaactaggacccgagaccttgaacgtctttttagcagatacggaagagtgcgagatgtggatatgaagcgagattatgctttcgctgaatttggtgatccccgtgatgctgatgatgcaagacattacctggacggacgagactttgatggaagtcgcatcactgtggagttttcacgaggggcaccctcgggttctcgggattttgatagcanaggcccaccacctggagctggtcgctgttttaactgtggtgtagatggtcattgggctc

SEQ ID NO: 144197 - DNA, 445 bp, Arabidopsis thaliana
cgctacaactcatgagaacagccacttgtcatcatcgctcttttcgacatcgccaactaccaaaaccaactggaccgcaaccctagagtgttccatttggcccgaaacaaccagcagggaggctttggcggttcacagcaacaacaagaacagaaaaacttgtggagcgggttcgacgcacaggtcatagctcaagcattgaaaattgacgttcagttggctcagcagcttcagaaccaacaagacagcagaggaaacatcgttcgtgttaagggacctttccaggtcgtgaggccacctctaagacagccctacgagagcgaggagtggagacacccacgtatcccacagggcaacggccttgaggagactatctgcagcatgaggtcccacgagaacattgacgaccctgctcgtgctgacgtgtacaagcccagcctaggtc

SEQ ID NO: 144198 - DNA, 464 bp, Arabidopsis thaliana
gcaacagccacagaagaacatcttcaatggatttggacccgaggttattgctcaagctttgaagagtgatcttcagacagcgcagcaacttcagaaccaagatgacaaccgtggaaacattgtccgagtccaaggcccgttcggtgtcattaggccgcctttgaggggccagagacctcaggaggaggaagaagaagaagaaggacgacacggacgacacggtaatggcttagaggagaccatctgcagcgccaggtgcaccgataacctcgatgatccgtctcgtgctgacgtgtacaagccacagctcggttacatcagcacttctaacagttacgatctccccatccttcgcttcatccgtctctcagcccttccgtggatctatccgtcaaaacgcaatggtgcttccacagtggaacgcatacgcgaacgccattctttacgtgacagacggggaagcc

SEQ ID NO: 144199 - DNA, 452 bp, Arabidopsis thaliana
actgcgggttcgacgcacaggacatatctcatgcattgaaaattgtacgttcagttgtctcagcggcgttagaaccaacaagacagcagaggaaacatcgctcgtgttaagggacctttccaggtcgtgaggccacctctaagacagccctacgagagcgaggagtggagacacccacgtagcccacagggcaacggccttgaggagactatctgcagcatgaggtcccacgagaacattgacgaccctgctcgtgctgacgtgtacaagcccagcctaggtcgcgtgaccagcgtcaacagctataccttgcccatcttggagtatgtcaggctcagtgccactcgtggcgttctccagggtaatgcgatggtgcttcctaaatacaacatgaacgctaacgagatcttgtactgcactggaggacaaggaaggatccaagtggtcaacga

SEQ ID NO: 144200 - DNA, 450 bp, Arabidopsis thaliana
gagatgggtaggaaaaagaaatctagggcttcgactaccgaagaagatgagattgagatggataatgctggcccatcctctgagacaagtctttacgaggttcttggagttgaaagaagagccacttcacaggaaataagaaaagcataccataagttggcattgaagcttcaccctgataaaaatcaggatgataaggaagctaaagacaagttccagcagctgcaaaaagtgatatcaattcttggtgatgaagagaaaagggcagtctatgatcaaactggctcaattgatgatgctgatattcctggagatgcgtttgagaatttgcgggatttcttccgggacatgtataagaaggtcaacgaagctgatattgaagagtttgaggcaaactacaggggatctgagtcagagaagaaagacttgcttgagcttttcaacaagttt

SEQ ID NO: 144201 - DNA, 438 bp, Arabidopsis thaliana
  unsure (1)..(438): unsure at all n locations
gttcgctgttgctttttcatcttcttcttctccttctctgtttctctgctttcgtcacgaaagggcgatatgtattgtttctcagtaggaagctcgttactctgattcgattcgattctcaatcctttcatcaaaccgttttgggacttcggattttcatattaaggtagcgtatccgcttagggatccaattttctccgagaattgtctccttctacaatctgattctcctcgatttttccagttttcaaagcagtcaattagggtttgtagactaattcggatttggagacggtagcggttatggacgcttttggaatcgggagtagtttaaatcaagctcccgtaactcaggatcttaagaanatttggagataattctacaggtaacacaatgtttgatgcatctcaatatngcctttttgggaacgatgttgt

SEQ ID NO: 144202 - DNA, 457 bp, Arabidopsis thaliana
ttttgccgtccgttcaagatatgcttccaacacgactccgtttaagctaaaacccaaatcagaagaggttttagaattaactaaacaccaatacgtttagttaattctaaaaacccaaagcccaacacttttagttcattctgaacaatatatgagacttattgtactccaatatttttttccgagagaactccacttagagaatggtgtccacgagcaagatcaaatccgttgatttctataggaaaatcccgagggatttgacagaggcgtctctgtctggtgctggattgtccattatagcagccctctctatgatatttctatttggaatggagttgaataattatttggctgtcagcacttccacatcggtcattgttgacaggagcgctgacggagacttcttgcgcttagattttaacataagcttcccgtcactttcatgtgaattcgc

SEQ ID NO: 144203 - DNA, 467 bp, Arabidopsis thaliana
gcgtccgcggacgcgtggggtaaaaacgctatggtgctaccgcaatggaacgtaaacgcaaacgcggcactgtacgtgacaaacggaaaggctcatatacaaatggtgaacgacaacggagaaagagtgttcgaccaagagatctccagcggacagttactagtcgtgccacaaggcttttcggtcatgaaacatgccataggcgaacagttcgagtggatcgaattcaagacaaacgaaaacgcacaggtcaacacactcgcgggccgtacctcagtcatgagaggtttgccgcttgaggttataaccaatgggtaccagatctctcccgaagaagctaaacgagtaaagtttagcacgattgagaccacactgacccatagcagtccaatgagctacggaaggcctagggcttgaggcttgatgagcgcgtggtggaatagcgtttgaatctaaaagttcggttg

SEQ ID NO: 144204 - DNA, 303 bp, Arabidopsis thaliana
tcgacccacgcgtgcgattggaggtcatatcaaatggtttccagatctctcccgagtaagctaggaagatcaagttcaacacacgggagaccactttgacccgcgctgccggtaggcaacaacaacagttgatcgaggagattgtcgaggcttaaatcaaaacgtttttctttttcttaataaagtatggtcagtttgtaatcacgtccctttacctttaacgtacgtgtaaaatatgtgtctgcggcacctcacttgtaataacactttcttctcataaataaaagggaagtttcgagttaa

SEQ ID NO: 144205 - DNA, 386 bp, Arabidopsis thaliana
cagggttcagcccttcaagcgctgatgattcccctttcttcactacaaactcagttgctcctgtctggagcaacaactcttctttgactgtcggaactcgaggtccaatccttctggaggactatcatctgcttgagaaactcgctaactctgacagggagcggattcctgagagggttgttcatgccaggggagccagcgctaatggtttctttgaagtcactcatgacattacccaacttacttctgctgattttcttcgaggacctggtgttcagactcctgctatcggtcgcttctcaactgtcatccatgagcgtggcagttccgagactctcagagatcccccgggttttgcttgtaagtcttacaccagagaggggaac

SEQ ID NO: 144206 - DNA, 289 bp, Arabidopsis thaliana
tctcttcttcttcttctacttctctctattcttttctttaaactacattcaccaaatcaggtggtgttcattacaacgcttatttccctactagaactaatgtcaccaatctcttactctattactactatgcaccaatcaccatatcccactctaaaaagattccctttttattttccaccacataattcccattaaacctctcattttcttcattaagatctaaactattaaacaacccttcacacttttcttcaccttcttctatacccacttcttatttctccta

SEQ ID NO: 144207 - DNA, 454 bp, Arabidopsis thaliana
cgtctttgccaacactccaggctctgcccactggatctacaactcaggagaacagccacttgggggcatcgctcttctcgacatcgccaactaccaaaaccaactcgaccgcaaccctagagtgttccatttggccggaaacaaccagcagggaggctttggcggttcacagcaacaacaagaacagaaaaacttgtggagcgggttcgacgcacaggtcatagctcaagcattgaaaattgacgttcagttggctcagcagcttcagaaccaacaagacagcagaggaaacatcgttcgtgttaagggacctttccaggtcgtgaggccacctctaagacagccctacgagagcgaggagtggagacacccacgtagcccacagggcaacggccttgaggagactatctgcagcatgaggtcccacgagaacattgacgaccctgctcgtgct

SEQ ID NO: 144208 - DNA, 462 bp, Arabidopsis thaliana
ctacaactcaggagaacagccacttgtcatcatcgctcttctcgacatcgccaactaccaaaaccaactcgaccgcaaccctagagtgttccatttggccggaaacaaccagcagggaggctttggcggttcacagcaacaacaagaacagaaaaacttgtggagcgggttcgacgcacaggtcatagctcaagcattgaaaattgacgttcagttggctcagcagcttcagaaccaacaagacagcagaggaaacatcgttcgtgttaagggacctttccaggtcgtgaggccacctctaagacagccctacgagagcgaggagtggagacacccacgtagcccacagggcaacggccttgaggagactatctgcagcatgaggtcccacgagaacattgacgaccctgctcgtgctgacgtgtacaagcccagcctaggtcgcgtgaccagcgtcaacag

SEQ ID NO: 144209 - DNA, 233 bp, Arabidopsis thaliana
gtttcccactccacatccaaaaaaacagtgtaataataatcataatcacctgatcaatctcttacataaaagctacagatctggttttatacaatcatcaccgcaccaagttcctaaaggtttcgactttactgtttctattttcggaaagagagtgcaagattgaaatcgaagatgaaggcggcaacaaggccgatccacgccgtgacgacatgggttcgtcggcaaccacc

SEQ ID NO: 144210 - DNA, 398 bp, Arabidopsis thaliana
  unsure (1)..(398): unsure at all n locations
cacgcgtgcgacgacacactaagtatggtgcaaggctcaatgactgttggttgtacaacctctgaagcgagtagggaagcggtaaggatttgctgtgatggcttanttgaaaggcttttaccagtcaagaccgctttggtggagcaaacaggaggacctgtgacttgggatagtctcatcagtcaggcttatcagcaatcgataaacatgtccgttagtagcaaatacatgcctgactccactggcgaatacctgaactatggaattgcagcgagcgaggttgaagtaaacgttttgacgggagaaacaacgatcctgcgtacagatattatctatgattgtgggaagaagtctaatcccgctgttgatttaagacagattgaaaggagccttttgtt

SEQ ID NO: 144211 - DNA, 475 bp, Arabidopsis thaliana
ggtcgaccacgcgtgcgctcacattttcgtagccgcaagactcctttcagattcttacttgcagctatgggtaaagagaaggttcggattaacattgtggtcattggtcatgttgattctggaaaatcgaccacaactggtcacttgatctataagcttggtggtattgacaagcgtgtcatcgagaggttcgagaaggaggctgctgagatgaacaagaggtccttcaagtacgcatgggtgttggacaaacttaaggccgagcgtgagcgtggtattaccatcgatattgctctatggaagttcgagaccaccaagtactactgcacagtcattgatgccccaagacatcgtgatttcatcaagaacatgattactggtacctcccaagctgattgtgctgttcttatcattgactccaccactggaggttttgaggctggtatctttaaggatggtcagacccgtgagcacc

SEQ ID NO: 144212 - DNA, 295 bp, Arabidopsis thaliana
  unsure (1)..(295): unsure at all n locations
gcggaatcttcttttcctctttttgagattctctaattatccttttggaagagtttcgtgtgagagagaagcgtaatgggctgctttggttgttgtggtggtggtnaggatttccgtagagtttctgaaactggaccaaagccagtgcataacactggaggttacaatggaggtcaccattaaagggcagatccacccaaaaacctttcagtcattcagatgcagcctatctttgttgcggccattccagctgatgaattgagggatataacggataactatggttcaaagtcct

SEQ ID NO: 144213 - DNA, 240 bp, Arabidopsis thaliana
caaaaagaaaaggttaagctcagcaatctcctgttgcaaccttcggggttctcctgtcctacggggtgctggggcgggcactgggcctcctactccgacggggacctgcacctatgctcagcccacttaagggcgcgcggcggcccacccagtctggggtcggtgtgagcaggcctgcctctcatctcgagcgtggggcggccgctgcgctcgcccgccggccgccgcccggcgccgccg

SEQ ID NO: 144214 - DNA, 447 bp, Arabidopsis thaliana
gcggccaatgaccaaggaaaccgtattacaccttcatgggttgtttttactgactctgaaaggctcagtggtgaggctgctaagaatcaagcagctgttaatccagagaggactgtcttcgacgttaagagattgatcgggcgaaaatttgaggacaaggaggttcaaaaggacaggaaacttgtaccttaccagattgtgaacaaggatggtaagccatacattcaagtcaagatcaaggatggtgagactaaagttttcagtcctgaggagatcagtgccatgattctgactaagatgaaggagacagtcggaggctacgcttgggaataaaatcaaggacgcttgtgtcactgttccagcttactttaatgatgctcaaaggcaagctaccaaggatgccggtgtgattgcttggcctcaatgttgttagaattataaactaac

SEQ ID NO: 144215 - DNA, 352 bp, Arabidopsis thaliana
ccggaagattaagcaggccaattaaaatggaaggcttaacattgatagtagtgatgatgggaaggtttatgttgggagggcaaggtcagcatataagcacgccatgcacctcctccatgatctctaccttcactccatgtctcaacttcatcaccggaagcagcggcggttccgtcactcccaccgtcggctgctgcgactccttgaagacgttgaccaacactggcatgggctgtgcttgcctcatcctcactgctaacgtcccgctgcctactggcttcatcaatcggactctggcgcttgctctacctcgagcctgcaaaatgggcggtgtacctattcaatgtcaagc

SEQ ID NO: 144216 - DNA, 463 bp, Arabidopsis thaliana
gaagactggaatttttttgaggaggactctgcttcatcgccgcccgccctgtaacccaccgggctcagtaaactagtctgtaacacaatatcttctatttcagataagatttagcttggagaagagcaagttccgaaaatggaggggcgtcgtgtatagatccaccacccacagccctgatggaagcagacaacggaggccccaattctagtcatgcatccaaacaacgtctgcgttggacgcatgagctacatgaacgcttcgttgatgccgttgctcaacttggtggccctgatagagctacacccaaaggcgttcttagagtgatgggtgtacaaggcttaactatatatcatgtcaagagtcacttacagaaatatcgacttgcaaagtatcttccagattcgtcttctgaagggaaaaaaactgataagaaagaatctggagatatgctctctggggt

SEQ ID NO: 144217 - DNA, 456 bp, Arabidopsis thaliana
gtaattgtccggggaatttactgaatccaccatactggacacaaaaatgcacaaacaatggcggggttaagcagattgttatcatcagtaaccgatcatgaatcgtagatgtaaacacatgaatgaagacaatgtaccaaactatcctaatggctctataggctgctactagtaatattgctaaataaatattagcttagttgcaggtttgcctatctactcagttactttacaaatttagaaattaatatcagctgagatatgagatgtagagaatagttaccttggactgacaactcattaaaaatttgcgcagagccattttgtcgatcaatgtatcgcctcctataagtttaaggacagctccaatcctacaaatatgcaaggcccatcataagcagatgagaacaattagggtcggtgacagcaaaagttgaggtgactaaccaaaatgca

SEQ ID NO: 144218 - DNA, 456 bp, Arabidopsis thaliana
caaaaagaaaatggttaagctcagcaatctcctcgttgcaaccttcggggttctcctcgtccttgacggctgccttgcgaggcagtcacttggggttcctcctcagctacagaacgagtgtaacctcgacaacctagatgttctccaagccaccgaaactatcaagagtgaagccggtcagatcgagtactgggaccacaaccaccctcagctccgatgtgttggtgtttccgttgctcgttatgtaattgaacaaggcggtctttacttgcccaccttcttcacttccccaaaaatttcctacgtcgttcaaggaacgggtatcagcggaagagtggtccctggatgtgccgagaccttcatggactcgcagccgatgcaaggacaacaacaaggccaaccatggcaaggacgacagggacaacaaggccaaccatgggaaggacagggacaaca

SEQ ID NO: 144219 - DNA, 371 bp, Arabidopsis thaliana
gcgctcgattaagcttgaacttggaggatcaatggccgacgttcgcacacactcgcaccagcttcaagtgcgccctcaacgccagcatgaaggaggcatcaaagtcctttatcctcagagtggcccttcttccactcaggtgctagccgtgtttgtcggtgtaccgataggaggaacgctgctgactatagccggtttgacattagccggttcggttataggactaatgctagcattcccgttgtttctcatctttagtccggttattgtaccagcagcctttgtcatcggtctagctatgactggattcctggcttcaggggccataggtctcaccggactatcatccatgtcgtgggtactcaactaca

SEQ ID NO: 144220 - DNA, 135 bp, Arabidopsis thaliana
gcgcccccttttaatttgtgtgctcttagcctttactctatagttttatatcatatcaatcgacatggcgagtgtggaccgtgatcggcgtgtgcatgtagaccgtactgacatacgtgttcatcagccaaaact

SEQ ID NO: 144221 - DNA, 191 bp, Arabidopsis thaliana
ccattttgtacctgaaaagcccatgtatgaacaaggattaattttacttccccacctagccactgtaggatggggggtagggcctgggtgagaatttatagacaccttttcgtactttgtatctggagtacttcacttaatttcttctgcatttttggtctttggcggtattttttatgcacttttggtac

SEQ ID NO: 144222 - DNA, 371 bp, Arabidopsis thaliana
  unsure (1)..(371): unsure at all n locations
gtcgatgaagagacaatgaggcggttcattgaggctcagagagaggctgttattctccctacagcggcggcagctcccccgcatgttggtgaaatggttagcgaccgctttgtttgaggaatgtgtgaaagggtttctttttgtatgttatgtatgtagttaaacatgagtatgtatggatgtatgtttttgtttctttgaaataacattaataaaggtgatcactaaagcataaaaaaaaaaaaaaaaaatataaaaaaaaaaaaaaatattaatataaaatatgggnggacgttttatggtttccaggcttgcggacccattcttcctacgtcttacttcttctatagtggcacctaatttgaattcat

SEQ ID NO: 144223 - DNA, 448 bp, Arabidopsis thaliana
ctctaaaaaaaaatctttctggtgagtaacgaaaaaaatgtgtccggtggagaacaaatggttaaaggtgggtcaaaaaggagctggtcctggggctagaagctcacatgccatgaccgtcgttgggaacaaagtttactgttttggtggtgagcttaagccaacgatccatattgataacgatctttacgttttcgatcttgagactcaagaatggtcgatagctcctgcgaccggagaggctcctttcccctgttttggtgtctcgatggtaacgatcggttcaacgatctatgtctacggtggccgtgacgataaacggagatacaacggtcttcattcgtatgatactgagaccaatgagtggaaattgttggctcctgttgaggaagggcttcctggtcgtagctatcattcaatggctggtgatgatcggaaaggttatgtg

SEQ ID NO: 144224 - DNA, 469 bp, Arabidopsis thaliana
ggccgcctttgaggggccagagacctcaggaggaggaagaagaagaagaaggacgacacggacgacacggtaatggcttagaggagaccatctgcagcgccaggtgcaccgataacctcgatgatccgtctcgtgctgacgtgtacaagccacagctcggttacatcagcactctcaacagttacgatctccccatccttcgcttcatccgtctctcagccctccgtggatctatccgtcaaaacgcaatggtgcttccacagtggaacgcaaacgcgaacgccattctttacgtgacagacggggaagcccaaatccagatcgtaaacgacaatggtaacagagtgtttgacggacaagtctctcaaggacagctcatagccgtaccacaaggtttctcggtggtgaaacgcgcaacaagcaaccgattccagtgggttgagttcaaaacaaacgcaaacgcgcaaat

SEQ ID NO: 144225 - DNA, 468 bp, Arabidopsis thaliana
  unsure (1)..(468): unsure at all n locations
gtcgacgccagcgcgtgcgaacactctggtcaaaatgggagtatactcgagagcggttgcgttttcggtctttgtgtcnttgggggtggttttcactgctgagtggtaagagaaatgatggaacattcagagttggcctgaaaaaactgaagttggatcctaacaaccgactcgcaacacgctttggttccaagcaagaagaggccttgagatcttctttgcgttcgtacaacaacaatcttggtggtgattctggagatgctgatattgtcccgctcaagaattacttggatgctcagtactatggtgagatcgctattggttctccaccgcagaagttcactgtcaattttgattcctgaagctcttacctttgtgtgccatcaagaaaatgttttttctcgctgtcttgttacttttcattcttagttcaagtcccttcgatcaatctcatattagtagagtggt

SEQ ID NO: 144226 - DNA, 379 bp, Arabidopsis thaliana
ccttattcgtcttcttcgttctctagttttttcctcagtctctgttcttagatcccttgtagtggccagatcttccgataaaaatgtcgggtaaaggagaaggaccagctatcggtatcgatcttggtaccacttactcttgcgtcggagtatggcaacacgaccgtgttgagatcattgctaatgatcaaggaaacagaaccacgccatcttacgttgctttcaccgactccgagaggttgatcggtgacgcagctaagaatcaggtcgccatgaaccccgttaacaaccgtttcgacgcttagaggttgatcgggcgtcgtttctctgacagctctgttcagagtgacatgaatattgggccattcaagattcaagc

SEQ ID NO: 144227 - DNA, 393 bp, Arabidopsis thaliana
gataaatctctataagccagagcattatccgaagcacaccgatatcactgaagaagactgggagtagacgatgagggctgtatttttaaggaagttgtaggacgctatagagacccacatgaaaatgctccatagaataaggggcatacacaatgatgtcacaggtccaatagctggaaatgaaactgataatgatgattctgtaagtggaaagcataatgaatatgatggtgatgattatggctagtggtcagtagttttatttttttatatttttcctatttcatattttctttttatataagggggggggggggggttctctttttttatttttatattatttttattttaatttgttcttttacttatttatttttattttttatttta

SEQ ID NO: 144228 - DNA, 450 bp, Arabidopsis thaliana
  unsure (1)..(450): unsure at all n locations
cggacgcgtgggtttgcatttcgaatctcactgtgttcgacattcatgttgtcatcagggtccgtgaactttcataaagatttgtcttcctgtctgcattgttttgttaatctcatcttctacttcactttcagtcaaatccttctcatccatcaaatctattttcgttatatctttttcaaatgacttcttatctttctcttgtttagactcaacctcctcttgatgcagttgcaagtctttcttcaattggacgaccccaacatcatcacttttctcaaccattatattaccaacagaatggtcctgtagattcttttcagcttcactttctgagttcacctctccaattccttcagacctagacccatcgtggactgaatgatcatcgctctggcttaaattgacttgcgatgagcccccctcaatatcagaacttgnacacttctc

SEQ ID NO: 144229 - DNA, 455 bp, Arabidopsis thaliana
  unsure (1)..(455): unsure at all n locations
taagaatacaaatacaaatagcaaaaaaaatggcaaacaagctcttcctcgtctgcgcaactttggccctctgcttcctcctcaccaacgcttccatctaccgcactgttgtcgagttcgacgaagatgacgccagcaaccccatgggcccaagacagaaatgtcagaaggagtttcagcaatcacagcacctaagagcttgccagaaattgatgcgcatgcaaatgaggcaaggccgtggtggtggtccctccctcgacgatgagttcgatttggaagacgacatcgagaacccacatggcccccagcagggacaccagatcctncagcagtgctgcagcgagcttcgccaggaagagccagtttgtgtttgccccaccttgagacaagctgccagggccgttagccttcagggacaacacggaccattccaatccaggaaaatttacaagaca

SEQ ID NO: 144230 - DNA, 466 bp, Arabidopsis thaliana
aagaaaacatacacaaatagcaaaacatggctaacaagctcttcctcgtctgcgcaactctcggcctctgcttcctcctcaccaacgcttccatctaccgcaccgttgtcgaattcgaagaagatgacgccagcaaccccgtaggtccaagacagagatgccagaaggagtttcagcaatcacaacacctaagagcttgccagagatggatgagcaagcaaatgaggcaaggacgtggtggtggtccttccctcgacgatgagttcgatttcgagggcccccagcagggataccagctactccagcagtgctgcaacgagcttcgccaggaagagccagtttgcgtttgccccaccttgaaacaagctgccagggcagttagcctccagggacagcacggaccattccaatccaggaaaatttaccagtcagctaagtacttgcctaacatttgcaagatccagca

SEQ ID NO: 144231 - DNA, 363 bp, Arabidopsis thaliana
tacacacatagcaaaaaatggcaaacaagttgttcctcgtctgcgcagctctcgctctctgctggctcctcaccaacgcttccatctaccgcaccgtcgttgagttcgaagaagatgacgccactaaccccataggcccaaaaatgaggaaatgccgcaaggagtttcagaaagaacaacacctaagagcttgccagcaattgatgctccagcaagcaaggcaaggccgtagcgatgagtttgatttcgaagacgacatggagaacccacagggacaacagcaggaacaacagctattccagcagtgctgcaacgagcttcgccaggaagagccagattgtgtttgccccaccttgaaacaag

SEQ ID NO: 144232 - DNA, 416 bp, Arabidopsis thaliana
gttggctcatcagcttcagaaccaacaagacagcataggaaacatcgttcgtgttaagggacctgtccaggtcgtgaggccacctctaagacagccctacgagagcgaggagtggagacacccacgtagcccacagggcaacggccttgaggagactatctgcagcatgaggtcccacgagaacattgacgaccctgctcgtgctgacgtgtacaagcccagcctaggtcgcgtgaccagcgtcaacagctataccttgcccatcttggagtatgtcaaggctcagtgccactcgtggcgttctccagggtaatgcgatggtgcttcctaaatacaacatgaacgctaacgagatcttgtactgcactggaggacaaggaaggatccaagtggtcaacgacaacggacagaacgtg

SEQ ID NO: 144233 - DNA, 273 bp, Arabidopsis thaliana
gcgcatcgagcgaaacaggagctgaaatgggggatctattaacacagttggagtctaagaaccgtactggagttccgacggaggcttttttccttttcaacggcaaatggatcctcgcctacaaatggtggtgaattgtcccgtgcttcaacaggatgacgtataaaggaggacttaacatgtaatactacgcaacttgtgtgtgctagcaatgtgacacgtatgaacagcaactcgtagtggagtatggccatcgtttggtcgatgagttga

SEQ ID NO: 144234 - DNA, 468 bp, Arabidopsis thaliana
  unsure (1)..(468): unsure at all n locations
tgaaagggtatatatctcacacacaaaacagatcagaagctaaaaggtaataatataatggcggatttgagggacgaaaaaggtaatccgatccatctaactgacacacagggaaacccaattgtcgacctgactgatgagcacggtaaccccatgtacctaaccggtgttgttagctccactcctcagcataaggagagtactaccagcgacattgcagagcaccctactagcaccgttggagaaacacatccggcagctgctccagctggtgctggtgctgccaccgctgccactgcgacaggagtctctgctggtactggagcaaccaccacagggcagcaacaccatgggtcgcttgaagagcatcttcgtcggntctgaagttcatctagctctagcttggaggatgatgggcaaggagggaggaggaagagagcataaaggagaaaatttaagagaagttcg

SEQ ID NO: 144235 - DNA, 470 bp, Arabidopsis thaliana
cagttttatgttttgcctctctcccacttctgtaaataatcttctcacatccccgcacgattatggtggagccgatcaacgagacacagagacgctaatgtatttgactcgattcgaatcattagtcctctaatcacaccgattgatttccacccacagatttcttgtctgaaatttagggttagcgaaggtttggatcaatgatgcaaggtgaagtacaattgcagccaccggattcacagaaactaagtgattccgctcctttgttaggagatcacaccaattcttcttcggcgtctccttctgctgcgtctgtggtggcaggaaatagcgatgagataaaggctgaagaagatttagagaacgatgcttcttcagctccttgttgtcgtatttgtttggaggacgatagtgaattgttaggcgatgaattgatttcaccttgtatgtgtaaaggcactcaacaattc

SEQ ID NO: 144236 - DNA, 483 bp, Arabidopsis thaliana
cgacccacgcgtgcgatttaaaagaaaacaatcaatcgagaaatggcaatgtctgtaacatacgtggcggaggtaccggttagagggatcggcggagaaacactacaagaagtggaggaacgaaaaccacgtcttccaggatgccgtcggccaccacatccaaggttgcactatgcatgacggtgactgggactcccacggctccatcagatcatggaatatcacatgcgatggaaagccggaagtcttcaaggagaagagagagatagacgacgaaaagatggcgttgacgttgaaagggctagagggtcaagcgatggagaagtacaagaagtatgaggttatctaccagttcattcccaagtcgaaagaaggctgcgtctgcaaaatcactctcatatgggaaaagcgcaacgaaaactcccccgaacccatcaactacatgtaagttgtcaagagcttagttgctgacatggacgacca

SEQ ID NO: 144237 - DNA, 191 bp, Arabidopsis thaliana
atcaatttctctctcttctctctctacgattattctgagagaggaaacatgatctttgggtctgcatccagtttgtttactggttctgtctctggtatggtccagctttgtctccggcgaggttcggctttgtttcgcctatctgttgccgctttatgcttgtcgtgctctttaaacttttcgttctcttt

SEQ ID NO: 144238 - DNA, 454 bp, Arabidopsis thaliana
ataaaataagaaaaataaacctctttcaaataggaataagaaaaaaattaggaattaatgattgggatttttagtggaggtgtggaccatttagttgagtttctaatatggtaattagcccatcaagattttaatatattttttaaaccgttctttttaagccgattagggtttagaaattctaagggaattaggttcttgagtttttataattttgttttgcaaatattgtccaaaaatcattaaaaatctgaaaacatatttatggcctaaaggctaaaagttggatataatttatttattttcagttggatatattttgcttagttttatcccgtatgtattttttccttatttatatacagtaaacgaaaacgttgacagaacatagttgggatggagacagagaagaagaagaagaagaagaagaagaagaagaggatgagaagaggag

SEQ ID NO: 144239 - DNA, 458 bp, Arabidopsis thaliana
  unsure (1)..(458): unsure at all n locations
caaccacccatatgttatcaagttctttgaaagcactaattccaaggcgatgttgttcattaaggtcactggagaaggagctgagtctcttaaatcaaagtaccgtgaagttgctacatccaacaagggacagggtcttagcttccttctaggtgatgctgagaacagccaaggtgcattccagtactttggactcgaagagagccaagttcctctcatcatcatccagactgctgacgacaagaaatacctgaaaacaaatgttgaggttgaccagattgaatcatgggtcaaggacttcaaggatggaaaaattgctccccacaaaaaatctcaacctatcccagccgaaaacaacgagccagtgaaggttggtgtttctgacagncttgacgacattgtcttaaactctggaaagaacgttttgcttgaattctatgctccatggtgtggacact

SEQ ID NO: 144240 - DNA, 439 bp, Arabidopsis thaliana
  unsure (1)..(439): unsure at all n locations
catatttctcacattttcgtagccgcaagactcctttcagattcttacttgcagctatgggtaaagagaagtttcacattaacattgtggtcattggtcatgttgattctggaaaatcgaccacaactggtcacttgatctataagcttggtggtattgacaagcgtgtcatcgagaggttcgagaaggaggctgctgagatgaacaagaggtccttcaagtacgcatgggtgttggacaaacttaaggccgagcgtgagcgtggtattaccatcgatattgctctatggaagttcgagaccaccaagtactactgcacagtcattgatgccccatgacatcgtgatttcatcaagaacatgattactggtacctnccaggctgattgtgctgttcttatcatttgactcaccactggaggttttgaggctggtatctc

SEQ ID NO: 144241 - DNA, 468 bp, Arabidopsis thaliana
cccaaatatgcataagcttttgttttctcttctctccgtcgtctcactctcatttctcctcttgttccatggcgccgaggcacgccagcgagaggcgccgtttccaaacgcctgccatttcagccaaatcaacagcctcgcgcccgctcaggcgacgaagttcgaagccggtcagatggaagtatgggaccacatgagccctgagctccgatgcgccggtgtaacggtggctcgcatcacccttcagcccaattccattttcttgcccgctttctttagcccacctgcccttgcttacgttgtccaaggagaaggagttatggggacgattgcttctggttgtcctgagacttttgcagaagttgaaggatcatcaggaagaggaggaggaggagacccgggtcgacgttttgaggacatgcaccagaagttggagaatttccggcgaggggatgtgtttgcttcgct

SEQ ID NO: 144242 - DNA, 411 bp, Arabidopsis thaliana
gatataacaaccatgatctctacctgaaaaacttttaatgctcgtttagccgtggttttggagaagtcgaagaacctaccacgtcacaagaaatgacacaaaaacgagttgaacacaaacttttcttgtaatcaccaagagaattcattttaggtagggaaaacgtaaatatatactttatacagttgtctttggcactagatattaggattgtgctccgagggtggaaatcaagatcgtttatcggctgcaaatgattatcactaatttaagagcctgtttaagagatacacaaaatcagaacggcaaaaattttgaagaaagaaacgcttacttcagcatgatcataaaaagtccgtattaatggtcgagcttgagtatctcctgaaatcatctgtttaacttttggca

SEQ ID NO: 144243 - DNA, 431 bp, Arabidopsis thaliana
agtcaatcaatttagatggatccgaaatatgattcaaatccaattccaatatagtccctatgggtccataagaaatgtatggaatcgattctttttaatgaagagacctgatcgcaacttcgaatatggaattcaaagggatctaataggaaatgatactctgaatcatagaactataatgaaagatacgatcaaccaacatttatcgaaattgaaaaagagtcagaagaaaatggttcgatcctctttatttttctttctcaaaccgagagatccataaatcgggaatcctaatgcatatagatacaaatggtccaatggggagcaaagaatttccaaggagcattttgaaacattttcgttttctgagcggaaggagccgtttttcaagtagtggttcgatccaattatgtattaaaatcaatattcga

SEQ ID NO: 144244 - DNA, 414 bp, Arabidopsis thaliana
ggcatgcaaaattgtcgagggacaacggtacacgaaaaggttgaatgagaagcagattactgctctcttgaaagttacatgccaaaggccgagggacagagaaaacgatattttgcggactgtccaacacaacgcatatgatcaagatccatatgcaaaggagtttggcatgaacataagcgaaaagttagcttctgttgaagctcgtattcttccagctccatggcttaagtatcacgagaacgggaaagaaaaagattgtctcccgcaagttggtcagtggaatatgatgaacaagaaaatgatcaacgggatgactgtgagcagatgggcctgtgttaacttctcacgcagcgttcaagaaaacgttgctcgtggattttgtaatgaacttggtcagatgtgtgaagtctc

SEQ ID NO: 144245 - DNA, 438 bp, Arabidopsis thaliana
ccacgcgtgcggttttctcctgcattctctctattcttcgctaaaccttgaataaagacatgttctttaacatgggtttttgcggtttaaagtagtggtatctttgtttcccctttaaaccgggtttaagctcaatcttttcttagaacaactccaactgtttgacgatttgactgagagaaaacagagtcatggaagagacttttgtgccgtttgaaggaatcaagaatgatcttaaaggaagattgatgtgctataagcaagattggactggtggattcaaagctggatttaggattctggctcccaccacttacatatttttcgcttctgcgattcctgtcatctcatttggtgaacaactcgaaagaagcaccgatggagttctcacggctgttcaaaccttagcatctacagccatttgcggtatgatacatt

SEQ ID NO: 144246 - DNA, 355 bp, Arabidopsis thaliana
aacacacacaaatctctgaagtaaaatgacgttcccttctctttctgtctcatttctctggtgtgccttcatattcgtgacgcatgcattcgacctcagcatcatccagatgcaacagggaacatgtccgtacacggtggttgtcatgacaagctgtctttctccggagtcgacaagagatcagatcagcattgtttttggcgatgccgacggtaacaaggtgtatgcaccgaaactagggggtttggttagaggaccagctggtttagtcaaagttgtattttggatactggctcccaccacttacggggtgggatgggggtgtgattcctgtcatttcatttggtgaatcaac

SEQ ID NO: 144247 - DNA, 453 bp, Arabidopsis thaliana
  unsure (1)..(453): unsure at all n locations
gaaagtggtaatttctcagtttatgaggaccggacctcccgtttttttcctcctgctccaagacctccaaagatgcctggactggtagctggtgactccagtttcatggatgacggtgaagactctttggcagagctatccaatacctcattccggaagtttaacattctttgcactggtgatcgtgatgggaacatatgcttcagtatatttggaatatttcagataggaaagattaacatacacgagctgtctcttcctgtgcctcatctcgatgagcatgcctcttgcaaactatttaatgcttccatttacaaggttgctctgtcaaaagacctttgccgtctggtagtaatgtgcacaggagagcttaaagattgtgatatcaagccaagagaggaaaaaataaatgttcaagatctggccgggttacatngcctttgcatggacaca

SEQ ID NO: 144248 - DNA, 456 bp, Arabidopsis thaliana
ctccggtcctccctctcgctttacctctggagaacttgacggcgactgcgtcttcctccgccgtcgaaacacaaaaacccgtcaggtgactttatctacttcgctactctccgattttagaagccttaacactggaatgtgatgatttgtgtctgaattcgtgcgaattgcgtccttgttgtatacttagtattcgaggttgtctctgtggaatcttcggttcaattttgtgagcaaatatgctttacgaaggctatttaaaatatatgaaagcgaaatacggcgaacggtcgcagggaacgtacttcatggctggagaggatctgataagcaaattacctgattctctgataactcagatactcttgtatctcccaataaaggatattgttaggactagttctttgtccagtaggtgggaaagtctctggcttttgattcctcggttggatttgg

SEQ ID NO: 144249 - DNA, 454 bp, Arabidopsis thaliana
  unsure (1)..(454): unsure at all n locations
taaagaggaagaaaaatgggtcgagtctcatctattatctctttctctttgacactcttgatccggntgaatggctacactgcccaacagtggcccaacgagtgccagctcgatcaactcaatgcgctcgaaccatcccaaatcatcaagagcgagggtggtcgcatcgaggtctgggaccaccatgcaccccagctccgttgctccggctttgcctttgagcgtttcgtcattgagcctcagggtcttttcttgcccactttcttgaacgccggcaaactcacgtttgttgttcacggaaggggtctaatgggaagagttattccgggatgcgccgagacgttcatggagtcaccggtatttggagaaagtcaaggtcagggtcagagtcaagggttccgtgacatgcaccataaaagtgagcacctactgtgcggtgacaccattgcaacac

SEQ ID NO: 144250 - DNA, 453 bp, Arabidopsis thaliana
caacatagctcttagctatgctactctcccgggatggttaccgtctccgttcttccctatatagattcacaacattcacaaggcaaagcacggaagcgactctaaaacatatgacaatgaaggaaggtatacaccagcgaatcttgagttgatgtttagcaaatacgcgaggaccataccagacaagttgagtcttggagagctatgggacatgaccgaaggaaaccgcgatgcctttgacttttttggatggttagcgagcaaagtggaatggggtgtattgtatgcattagcgagtgatgaagaaggattcttgtctaaagaagccacaaggcggtgcttcgatgggagcttgttcgagtattgtgccaagaactacgctgagatcaaggagtacaagacgtactactgatcatgatgatcggtggtttttgtattcaaagcaacacgctc

SEQ ID NO: 144251 - DNA, 453 bp, Arabidopsis thaliana
ctttatgttgtcgacactctttcagttctctcgacgccgtccatcgccctccgtcatatcgccgccgctaaagtactggcagagagttcacaacaatggagtacgtaaaccctgaaggtcttcgattagatggtcgccgattcaacgagatgaggcaaatcgtagctgaagttggagttgtttctaaggctgacggttctgctgtcttcgagatgggtaataccaaagtaattgcagctgtttatggtccaagagagattcaaaacaagagccagcaaaagaagaacgaccatgcagtggtgttgtgtgagtatagtatggctcagtttagtactggtgatcgtagaagacagaaattcgacaggcgatcaacagagctatctcttgtcatccgtcagacaatggaagcttgcatattaaccgaattgatgcctcactctcagatcgatattt

SEQ ID NO: 144252 - DNA, 470 bp, Arabidopsis thaliana
  unsure (1)..(470): unsure at all n locations
agacaagtgaaagaactgaattgaaaaaaaagaaggagtagtaaaaaaagacgcggtatttggtgcattggtcctatatgtgcaaatcaaaatcgggcaaatttttccttttactcggggtagagcataaacctaaaaaatggaataaaaaaaggaagaagcccgttcaggaacaagaaaaaaccatcgccatttcaactgaatctcgatgaaaaaaaaaaatatcaatgaatcaatcatttttttagaggattttaatatctaataaaaggcgccaaaactcaaaatttcttttacttttgggggcaagcccttccgttataagttagaaagaaaaaccctctatgaaaaaagggtaggttggaatcaacacattgattttttcacaatttttattgaaccgtatgcaccaaaaggtgcctgtacggctcctaaggaataaaanaatatcctaatcaaccgactttatc

SEQ ID NO: 144253 - DNA, 332 bp, Arabidopsis thaliana
  unsure (1)..(332): unsure at all n locations
ctctcaatacctttctcaatttctggatccaccatgcaagcgcttcaatcttgatgtgtgcgngcttctcctccaaacccacttcgcttaccatcaaatcgtcaatcacatcagctaattaccaatgcgagacctttgcgaagacaacaacgttccttcatctccgcatcagcatccactgtctccgctcctaaacgcgaaacagatccgaagaaacgagttgtcattactggtatgggtctcgtctctgtgtttggtaacgatgttgatgcttactaccagaaattgttgtctggtgagagtggaatcagtttgattgatcgtttcgatgc

SEQ ID NO: 144254 - DNA, 411 bp, Arabidopsis thaliana
acagtgagctctgtgcttgaaagtgccaaacaagctttaaaggaagctgtgattttgcctgtgaaggttccacagttcttcaccggtaaatatttgagagcttgaaaaaggttgtaaacctatgcacaaatcaattaacttataaacgatgtctttctctattgttttgttaatagctagggccatatatgatccaagagatgtattcttctaacagtctaaacttctggcgctttgctatatccatgaatatctccatcctcttgctgaactctgacccactctccttgcatctaaaggaaccagaacactcacactgctctgtcaaatgagccgctttcacctgattgcacctaatgcacactacatcctgcatatggtacattctttctctctgtctcaccatctcta

SEQ ID NO: 144255 - DNA, 214 bp, Arabidopsis thaliana
ctttatgttgtagtcacttagacgaagttaagaacgagattgactctatttcgacatgtgggcgtatctcatatgcagatatcattcaattagcaggtaatgttatagtatataccaaaacttgttcatgaagagtagcattactgtatttgtggataactgaaatctatcttgggttggcatctgtaagacaatcaacggtcaattttacata

SEQ ID NO: 144256 - DNA, 241 bp, Arabidopsis thaliana
gcttctgctttctttgtgactcagactttgcgtgctttatcacgagatggaaggacggtgatagcatcgatccaccaaccgagcagtgaggtttttgagttgtttgatcggttgtatctgctttctggaggcaaaactgtttactttggtcaagcttcagatgcatatgagttctttgcacaagctgggtttccatgtcctgcgttaaggaacccttctgatcattccctgagacgcataa

SEQ ID NO: 144257 - DNA, 456 bp, Arabidopsis thaliana
atttcaatgatttcccaagctttgtgaaccttgagagcgatcttcatctttaaagcccatattgtatagtttgttgtattaagcatagggaattgaatcgatgtagatgctctagattcttttgttcttcccgttgaaacagcgagttttgacatcgttgcaaggctctgataccaaatctagtattcaagaaatattaagaacacaagtataaacaaatatctctctttttagtatctttaggaaactctctcaaaacctaaagtctcgatctctctcaaatctcataagttctatcacaccttgatgtatcctaagatttgtaattagatatttccaaatacattattctagataattcctagaacaactaaagctaatttccttttctcttctttaataacttactcctcaagttactcttttcaagcttatccaacacaggtatccataacc

SEQ ID NO: 144258 - DNA, 289 bp, Arabidopsis thaliana
aaaaagaacaatggtgtaagctcaccaatctatatgttgcaaccttcgggggtgtactcgggggtgacggctgtcttgcgaggcaggcacttgtggttcctcctgagctacagaaccagtgtaacgctggacaacctagatgctctacaagccaccgagactatcaagagtgaagccggacacgatcgatgtcgtgggaccacaaccaccctgagctacgatgtgtgggtgatatcgctgctcgggaagctatggatcatcagtgttcaactacactggacaccacttt

SEQ ID NO: 144259 - DNA, 471 bp, Arabidopsis thaliana
gaaggacagggacagcagggacaacaagggttccgtgacatgcaccagaaggtggaacatgtgagacgcggagacgtctttgccaacactccaggctctgcccactggatctacaactcaggagaacagccacttgtcatcatcgctcttctcgacatcgccaactaccaaaaccaactcgaccgcaaccctagagtgttccatttggccggaaacaaccagcagggaggctttggcggttcacagcaacaacaagaacagaaaaacttgtggagcgggttcgacgcacaggtcatagctcaagcattgaaaattgacgttcagttggctcagcagcttcagaaccaacaagacagcagaggaaacatcgttcgtgttaagggacctttccaggtcgtgaggccacctctaagacagccctacgagagcgaggagtggagacacccacgtagcccacagggcaacggcctt

SEQ ID NO: 144260 - DNA, 419 bp, Arabidopsis thaliana
aagaaaaatgggtcgagtctcatctattatctctttctctttgacactcttgatcctgttcagtggctacactgcccaacagtggcccaacgagtgccagctcgatcaactcaatgcgctcgaaccatcccaaatcatcaagagcgagggtggtcgcatcgaggtctgggaccaccatgcaccccagctccgttgctccggctttgcctttgagcgtttcgtcattgagcctcagggtcttttcttgcccactttcttgaacgccggcaaactcacgtttgttgttcacggaaggggtctaatgggaagagttattccgggatgcgccgagacgttcatggagtcaccggtatttggagaaggtcaaggtcagggtcagagacatgggttccgtgacatgcaccatatagtagagcact

SEQ ID NO: 144261 - DNA, 357 bp, Arabidopsis thaliana
caaaaagaagtggttaagctagcaatctcctctttgcatttcttcggggttctcctcgcctgaacggctgggttgaccagcagtcacttagggttactacttacatacagaacgagtgtaacctccacaacctagatgtatgtgaagccaccgaaactatcaagagtgaagccggtcagatcgagttctgggaccacaaccaccctcaggtcagttgtgatgatggttctctctgacattgtgaactaccaaaaccaactcgatcgtatccctagagtgtttcatttggccggaaactaccatttcgtagaggaacgggtatcactcgaagagaggtccttggatgtgccgagacct

SEQ ID NO: 144262 - DNA, 409 bp, Arabidopsis thaliana
  unsure (1)..(409): unsure at all n locations
gtggaacatgtgagacgcggagacgtctttgccaacacttcaggctctgcccactggatctacaacggangagaacagccacttgtcatcatcgctcttctcgacatcgccaactaccaaaaccaactcgaccgcaaccctagagtgttccatttggccggaaacaaccagcagggaggctttggcggttcacagcaacaacaagaacagaaaaacttgtggagcgggttcgacgcacaggtcatagctcaagcattgaaaattgacgttcagttggctcagcagctttagaaccaacaagacagcagaggaaacatcgttcgtgttaagggacctttccaggtcgtgaggccacctctaagacagccctactagagcgaggagtggagacacccacgtagtccacaag

SEQ ID NO: 144263 - DNA, 55 bp, Arabidopsis thaliana
aaacaaaaagaaaatggttaagctcagcaatctcctcgtggccacccttcggggt

SEQ ID NO: 144264 - DNA, 465 bp, Arabidopsis thaliana
cgtccgaaagaaaatggttaagctcagcattctcctcgttttatctttcggggttctcctcgtccttaacgggtgctttgcaaggcagtaacttggggttcctcctaagttacagaacaggggtaacctcgacaccctaaatgttctccaggccaccgaaactatcaaaagtgaagccggtcgaatcgagtattggaaccacaaccaccttcagttccgatgtgtgggtgtttccgttgttcgttatgtaatggaccaaggcggtctttactggcccaccttctttactttccccaaaaatttcctcgtcgttcaaggaacgggtttcagcggaagagtggtccctggatgtgccgagacctttatggactcgcagccgatgcaaggacaacaacaaggccaaccatggcaaggacgacagggacaacaaggccaaccatgggaaggacagggacatcagggaca

SEQ ID NO: 144265 - DNA, 442 bp, Arabidopsis thaliana
  unsure (1)..(442): unsure at all n locations
tcgttgcaaccttcggggttctcctcgtccggaacggctgccttgcgaggcagtcacttggggttcctcctcagctacagaacgagtgtaacctcgacaacctagatgttctccaagccaccgaaactatcaagagtgaagccggtcagatcgagtactgggaccacaaccaccctcagctncgatgtgttggtgtttcccgtgctcgttatgtaattgacaaggcgggctttacttgcccaccttcttcactttcccaaaatttcctacgtcgttcaagggacgggtataagcggaagagtgttccctggatgtgcccagaccttcatggactcgcagccgatgcaaggacaacaacaaggccaacattgcaaagacgacaggtacaacaaggccactcatgggaaggacagggacaacagggacaacaaggaagacaagg

SEQ ID NO: 144266 - DNA, 289 bp, Arabidopsis thaliana
ggaagacatggtcaaccatgggatggacttggacatcagggacaacaaggacgacacgcacagcaaggtcaaccatgggaaggacagggacagcaatgacaacaagggttccgtgacatgcaccagaaggtggaacatgtgagacgcggagacgtctttgccaacactccaggctctgcccactggatctacaactcacgtgaacagccacttgtcataatcggtcttcttgacattggcaactatcaaaaccatacttgattgtatactctatagtgttttcattttg

SEQ ID NO: 144267 - DNA, 410 bp, Arabidopsis thaliana
gtaaaaacaatttctcattagcttacaatggcggatacacaccgtgtcgaccgtactgatagacacgtgtcaatttcagtcgccctatgaaggcggccgaggtcaaggtcagtatgaaggtgaccgtggttacggtggtggcggttacaagagcatgatgcctgaaagtggcccatctagtacccaagtattgtccctgttgattggagtccctgtcgtcggttcgctacttgccttgctggattacttctagctggttcggtgatcggcttaatggttgctttaccactattttttctcttcagcccgggtatagtcccagcggctctaactattgggcttgcaatgacaggctttttagcctcggggatgttcggtctaaccgggcttaagctaatctcatgggtcat

SEQ ID NO: 144268 - DNA, 470 bp, Arabidopsis thaliana
cacgtactgaagagcgaggctggtcgcatcgaggtgtgggaccaccacgctcctcagctccggggctcaggtgtctcctttgcacgttacatcatcgagtctaagggtctctacttgccctctttctttaacaccgcgaagctctctttcgtggctaagggacgaggtcttatgggaaaagtgatccctggatgcgccgaaacattccaagactcatcagagttccaaccacgcttcgaaggtcaaggtcaaagccagaggttccgtgacatgcaccagaaagtggagcacattaggagcggtgataccattgccacaacacccggtgtagcacagtggttctacaacgacggacaggaaccacttgtcatcgtcagcgtcttcgatctagccagtcaccagaaccagcttgaccgcaacccaaggccattttacttagccggaaacaacccacaaggtcaagtatggct

SEQ ID NO: 144269 - DNA, 471 bp, Arabidopsis thaliana
aaacaaaaagaaaatggttaagctcagcaatctcctcgttgcaaccttcggggttctcctcgggcttaacggctgccttgcgaggcagtcacttggggttcctcctcagctacagaacgagtgtaacctcgacaacctagatgttctccaagccaccgaaactatcaagagtgaagccggtcagatcgagtactgggaccacaaccaccctcagctccgatgtgttggtgtttccgttgctcgttatgtaattgaacaaggcggtctttacttgcccaccttcttcacttccccaaaaatttcctacgtcgttcaaggaacgggtatcagcggaagagtggtccctggatgtgccgagaccttcatggactcgcagccgatgcaaggacaacaacaaggccaaccatggcaaggacgacagggacaacaaggccaaccatgggaaggacagggacaacagggacaacaagg

SEQ ID NO: 144270 - DNA, 216 bp, Arabidopsis thaliana
aaaaaagctatgtctacctttactgaaggatcattatcatgtgacactgggatttttaatagagagtagtttttctgaacctactcaagtttcaagttcaacattcgttttcatgatctcacaaatcagataacagaattaaatgaaatatacgaatatgtcttaaattaaacccaagaaaagaagaagtaaaattccctaaagtatctggctatc

SEQ ID NO: 144271 - DNA, 471 bp, Arabidopsis thaliana
aaacaaaaagaaaatggttaagctcagcaatctcctcgttgcaaccttcggggttctcctcgtgctggagcggctgccttgcgaggcagtcacttggggttcctcctcagctacagaacgagtgtaacctcgacaacctagatgttctccaagccaccgaaactatcaagagtgaagccggtcagatcgagtactgggaccacaaccaccctcagctccgatgtgttggtgtttccgttgctcgttatgtaattgaacaaggcggtctttacttgcccaccttcttcacttccccaaaaatttcctacgtcgttcaaggaacgggtatcagcggaagagtggtccctggatgtgccgagaccttcatggactcgcagccgatgcaaggacaacaacaaggccaaccatggcaaggacgacagggacaacaaggccaaccatgggagggacaaggacaacagggacaacaag

SEQ ID NO: 144272 - DNA, 342 bp, Arabidopsis thaliana
caaccctagagtgttccatttggccggaaacaaccagcattgaggctttggcggttcacaggagcagcaagaacagaaaaacttgtggagcgggttcgacgcacaggtcatagctcaagcattgaaaattgacgttcagttggctcagcagcttcagaaccaacaagacagcagaggaaacatcgttcgtgttaagggacctttccaggtcgtgaggccacctctaagacagccctacgagagcgaggagtggagacacccacgtagcccacagggcaacggccttgaggagactatctgcagcatgaggtcccacgagaacattgacgaccctgctcgtgc

SEQ ID NO: 144273 - DNA, 458 bp, Arabidopsis thaliana
catacacacatagcaaaaaatggcaaacaagttgttcctcgtctgcgcagctctcgctcttgctgtgtcctcaccaaccgcttcatctaccgcaccgtcgttgagttcgaagaagatgacgccactaaccccataggcccaaaaatgaggaaatgccgcacggagtttcagaaagaacaacacctaagagcttgccagcaattgatgctccagcaagcaaggcaaggccgtagcgatgagttcgatttcgaagacgacatggagaacccacagggacaacagcaggaacaacagctattccagcagtgctgcaacgagcttcgccaggaagagccagattgtgtttgccccaccttgaaacaagctgccaaggccgttagacttcagggacagcaccaaccaatgcaggtcaggaaaatttaccagacagccaagcacttgcccaacgtttgcgacat

SEQ ID NO: 144274 - DNA, 184 bp, Arabidopsis thaliana
ccacgcgtccgacttgcctaacatttgcaaaatccagcaagttggtgtttgccccttccagatcccttcaatcgcttgttactactaaattccaaacaagtgtgagcgtgtggttgttgatatatgttaacaccacatctcgccttgtgtttttataaaaaaataagctttgggaaaataaaaa

SEQ ID NO: 144275 - DNA, 169 bp, Arabidopsis thaliana
cgcgtccgcaggctcagtgccactcgtggcgttctccagggttttgcgatggtgcttcctaaatacaacagtaacgctaacgagatcttgtactgcactggaggacaaggaaggatccaagtggtcaacgacaacggacagaacgggtttgacacaacaggtgcctaat

SEQ ID NO: 144276 - DNA, 204 bp, Arabidopsis thaliana
caagaaaacatacacaaatagcataacatggctaataagctcttcctcgtctgcgcaagtcgtggccctctgcttcctcctcaccaacgcttccatctaccgcaccgttgtcgaattcgaagaagatgacgccagcaaccccgtaggtccaagacaggagatgccagaaggggtttaagcattaacacaactaaaagcttggca

SEQ ID NO: 144277 - DNA, 467 bp, Arabidopsis thaliana
ggacgcggagaaggctactgataagactaatgtccatctctcctcggaccatgagcggggcgcggtggtggaagtggctcttgttgtgcctgagacggatgatccaagcctaccggtgatgacattcagagcttggttcttgggtctgacctcttgtgttctgctcatctttctcaacacgttcttcacataccgtacgcagccactcaccatctcagccatcctcatgcagatcgctgttttgcccatcggcaagttcatggctcggactcttcccaccacttctcacaaccttcttgggtggagttttagcctcaatcctggtccttttaacatcaaggagcatgtcattatcaccatctttgctaattgtggcgttgcttacggtggtggtgatgcttactctattggggctatcactgttatgaaagcttactataaacagagccttagcttcatctgtggtc

SEQ ID NO: 144278 - DNA, 412 bp, Arabidopsis thaliana
agaagacatacacttatagcaaatcatggatatcatgccattcatcgtctgtgcagctatggggctctgcttgctactcaccaactctttcatttaccgaaccgccgtttgactggcagaagatgacggcagcgacctatgaggtacaagacagagacgccagaaggagttacagcattcacaacacctaatagcttggccgatatggaagagcacgcaaatgaggcaaggacgtgcgggcgagcacttatatacgcgatgagggcgacttggagggcccgacactaggatcccacctactgcatcagtgctgaaccgagctatgacaggtggagcccggttgatgatgcatcatcttgaacccagctggccgggcaggtagcgatccatggacagcacggaccattcccat

SEQ ID NO: 144279 - DNA, 448 bp, Arabidopsis thaliana
  unsure (1)..(448): unsure at all n locations
caaaaacacaagcgtagaaaacaaaactcaactaattgtgttatcacccaaaagagaagagcggacacaatggctttcgctttgaggttcttcacatgctttgttttgacggtgttcatcgttgcatcagtggatgcagcaataacatgtggcacagtggcaagtagcttgagtccatgtctaggctacctatcaaaggcgtgggtggtgccacctccgngctgtgcaggagtcaaaaagttgaacggtatggctcaaaccacacccgaccgtcaacaagcatgcagatgcttacagttcgctgcaaacggggttaatccaagtctagcctctggcctttctggaaagtgcggtgttagcataccctatcccatatgcacgagcaccaactgcgccaccatcaagtcgagtggggaataactgcattatttgcctgacgagcatggtt

SEQ ID NO: 144280 - DNA, 351 bp, Arabidopsis thaliana
agacaacctaaatgttttccaagccaccgaacctgtcaagagtgaagccgtgcaaatcgagtactgggaccacaaccaccttaagttccgatgggtgggggtttccgtggctcgttatgtaattgaacaaggcggtctttactggcccacctttttaacttccccaaaaatttcctacgtcgttcaaggaacgggtttaatcggaagagtggtccctggatgtgccgagaccttaatggactcgcagccgatgcaaggacaacaacaaggccaaccatggcaaggacgacagggacaacaaggccaaccatgggagggacagggccaacagggacaacaaggaagacaagg

SEQ ID NO: 144281 - DNA, 474 bp, Arabidopsis thaliana
gccttgcgaggcagtcacttggggttcctcctaagttacagaacgagtgtaacctcgacaacctgggggttttccaagccaccgaaactatcaagagtgaagccggtcagatcgagtactgggaccacaaccaccctcagctccgatgtgtgggggtttccgttgttcgttatgtaatggaacaaggcggtctttactggcccacctttttcacttccccaaaaatttcctacgtcgttcaaggaacgggtatcaccggaagagtggtccctggatgtgccgagaccttaatggattcgcagccgatgcagggacaacaacaaggccaaccatggcaaggacgacagggacaacaagggcaaccatgggaaggacagggacaacagggacaacaaggaagacaaggccaaccatgggaaggacagggacaacagggacaacaaggacgacagggacaacaaggccaaccatggg

SEQ ID NO: 144282 - DNA, 477 bp, Arabidopsis thaliana
  unsure (1)..(477): unsure at all n locations
aagaatacaaatacaaatagcaaaaaaaatggcaaacaagctcttcctcgtttgcccaactttcggcgtttgtttcctcctaaccaacgcttccatctaccgaactgttgtcgagttcgacaaaaatgaccccagcaacccaatgggcccaagacagaaatgtcagaaggagtttcagcaatcacagcacctaagagcttgccagaaattgatgcgcatgcaaatgaggcaaggccgtggtggtggtccctccttcgacgatgagttcgatttggaagacgacatcgagaacccacaaggcccccagcagggacaccagatcctccagcagtgctgcagcgagcttcgccaggaagagccagtttgtgtttgccccaccttgagacangctgccagggccgttagcctncagggacaacacggaccattccaatccaggaaaatntacaagacagctaagtacttgcctaacatttg

SEQ ID NO: 144283 - DNA, 298 bp, Arabidopsis thaliana
aaaaagaaaatggttaagctcagcaatctcctcgttgcaaccttcggggttctcctcggccggaacggctgccttgcgaggcagtcacttggggttcctcctcagctacagaacgagtgtaacctcgacaacctagatgttctccaagccaccgaaactatcaagagtgaagccggtcagatcgagtactgggaccacaaccaccctcagttccgatgtgttggtgtttccgttgctcgttatgtattgaacaagggcggctttacctggccaaccttttcaatttccccaaaatttt

SEQ ID NO: 144284 - DNA, 474 bp, Arabidopsis thaliana
aaacaaaagaatcgttccacataactaaaggtgatgtggtaagaatcccttctggtgtcacgcggctttatcaccaacactaaccagacggttcctctccgcctcgcccagatcaccgtccctgtcaacaatcccggcaactacaaggattacttccctgctgcatcccaatttcagcaatcctacttcaatgggtttaccaaagaagtcctctctaccagtttcaacgtgccggaagaattgctagggagattggttacgagatcaaaagaaattggtcaagggattatccgaagaatttctccagaccaaatcaaggaacttgctgagcacgctacatctccttcaaacaaacacaaagccaaaaaagaaaaggaggaagacaaagacctaagaaccgtgtggactcctttcaatctctttgcaatagatccaatctactccaacgaccttggtcatttccacgaggcacat

SEQ ID NO: 144285 - DNA, 304 bp, Arabidopsis thaliana
gaacagcaatacagcataatattatagtagtaaaatacttttaaatccttttttttcgtgtgggcaaagcgctatactaaaaaatatagcaaactcaagtatacactaaaataaaattagtacatttgctagtcttcacctctagaagacaagagtatgtcgttttcttgacaaagacgatttggttttggtgagttattatagtaagataatataatactaataaaaatgtatttattataatctatagattagagagacagcttaacgctaatgtgtagtttatgcgcctacgacgcggtta

SEQ ID NO: 144286 - DNA, 475 bp, Arabidopsis thaliana
gcaaaaaatggcaaacaagttgttcctcgtctgcgcagctctcgctctctgcttcctgctcggcaacgcttccatctaccgcaccgtcgttgagttcgaagaagatgacgccactaaccccataggcccaaaaatgaggaaatgccgcaaggagtttcagaaagaacaacacctaagagcttgccagcaattgatgctccagcaagcaaggcaaggccgtagcgatgagtttgatttcgaagacgacatggagaacccacagggacaacagcaggaacaacagctattccagcagtgctgcaacgagcttcgccaggaagagccagattgtgtttgccccaccttgaaacaagctgccaaggccgttagactccagggacagcaccaaccaatgcaagtcaggaaaatttaccagacagccaagcacttgcccaacgtttgcgacatcccgcaagttgatgtttgtcccttcaac

SEQ ID NO: 144287 - DNA, 450 bp, Arabidopsis thaliana
aagaaataacaaaatggctcgagtctcttctcttctttctttcttcttaacacttttgatcgttttccatggctacgcggctcaacagggtcagcagggtcagcagtttccgaacgagtgccagctcgaccagctcaatgcgctcgagccgtcacacgtactgaagagcgaggctggtcgcatcgaggtgtgggaccaccacgctcctcagctccgttgctcaggtgtctcctttgcacgttacatcatcgagtctaagggtctctacttgccctctttctttaacaccgcgaagctctctttcgtggctaagggacgaggtcttatgggaaaagtgatccctggatgcgccgaaacattccaagactcatcagagttccaaccacgcttcgaaggtcaaggtcaaagccagaggttccgtgacatgcaccagaaagtggagcacattag

SEQ ID NO: 144288 - DNA, 473 bp, Arabidopsis thaliana
gtttgaaggaaactaactttattatataagattaatatcacatctttctacaagccaatggcggcaagaagctgtgaatgcttggaaacaggaactagcgaattcgccacaatcgcgccgctagctgccactgcaggaactccgatcccgggaaaggtcgagtcaccgcaacacaaaagctgcggaatgggagtggaatggccaggaaaagtacctttacctgcctctattgcaggcccatatgttcctctattcctccttagaaacctctgatgcgtcaatggtgttccaaccaaactcacctcgcacttttctcttttgaaccctggccctaatgcccgctcaaccgctctccacatcaccttcaccaaacggtaccagtacattttggttaagatttgttttttcgtattcagagaactgaagattacaaaaatgaataggtacctcggaccgttgggatttgagattct

SEQ ID NO: 144289 - DNA, 472 bp, Arabidopsis thaliana
tgcagcatgaggtcccacgagaacattgacgaccctgctcgtgctgacggtcaagcccagctagtcgcgtgaccagcgtcaacagctataccttgcccatcttggagtatgtcaggctcagtgccactcgtggcgttctccagggtaatgcgatggtgcttcctaaatacaacatgaacgctaacgagatcttgtactgcactggaggacaaggaaggatccaagtggtcaacgacaacggacagaacgtgttggaccaacaggtgcagaagggacagctcgtggtcatcccacaagggttcgcatacgttgtccagtcccacggaaacaagttcgagtggatctctttcaaaactaatgaaaacgcaatgatcagcactttggcgggtagaacctcgctcttgagggcattgccattggaggtcatatcaaatggtttccagatctctcccgaggaagctaggaagatcaa

SEQ ID NO: 144290 - DNA, 476 bp, Arabidopsis thaliana
  unsure (1)..(476): unsure at all n locations
tacacacatagcaaaaaagggcaaacaggtggttcttcgtttgcgcagttttcgttttttggtcgtcctaaccaacgcttccatctaccgcaccgtcgttgagttcgaagaagatgacgccactaaccccataggcccaaaaatgaggaaatgccgcacggagtttcagaaagaacaacacctaagagcttgccagcaattgatgctccagcaagcaaggcaaggccgtagcgatgagtttgatttcgaagacgacatggagaacccacagggacaacagcaggaacaacagctattccagcagtgctgcaacgagcttcgccaggaagagccagattgtgtttgccccaccttgaaacaagctgccaaggccgttagactccagggacagcaccaaccaatgcaagtcaggaaaatttaccagacagncaagcacttgcccaacgtttgcgacatcccgcaggntgatgtttgtc

SEQ ID NO: 144291 - DNA, 473 bp, Arabidopsis thaliana
  unsure (1)..(473): unsure at all n locations
ctctctcaatctcgagatccgttctctttaaatttgtctttttctcttcaatctcattgtctggcgggctcttttgttgagatcaatctcacattgaaatcaatcatcatagacaattaagttttgattttcgtttttttttttaaatttcttcatcagatctagtttttaccaataacggataaattcaggtcttagccaatcaccaacatggcgactggggcagcaactgagaaccagtggctcaaagggagagtgaaggctgttacctncggagactgcttggtgatcacggctttgacccacaacagagctggcccaccttcggaaaagaccatcactctttcttctcttatggctcctaagatggctcgcagaggaggtatagatgagccttttgcatgggaaagcacggagtttctaaggaagctttgcattggaaaggaggttgctttcaaagtggattacaaagt

SEQ ID NO: 144292 - DNA, 91 bp, Arabidopsis thaliana
ccttccagcgtaagttcttttcttttgttctcttgaaactgaatccaccagacaaaaaaatgggggttgatggtgaactgaaaaagaagaa

SEQ ID NO: 144293 - DNA, 464 bp, Arabidopsis thaliana
ggaagacaaggccaaccatgggaaggacagggacatcagggacaacaaggacgacagggagggcgaggtcaaccatgggaaggacagggacagcagggacaacaagggttccgtgacatgcaccagaaggtggaacatgtgagacgcggagacgtctttgccaacactccaggctctgcccactggatctacaactcaggagaacagccacttgtcatcatcgctcttctcgacatcgccaactaccaaaaccaactcgaccgcaaccctagagtgttccatttggccggaaacaaccagcagggaggctttggcggttcacagcaacaacaagaacagaaaaacttgtggagcgggttcgacgcacaggtcatagctcaagcattgaaaattgacgttcagttggctcagcagcttcagaaccaacaagacagcagaggaaacatcgttcgtgttaagggacc

SEQ ID NO: 144294 - DNA, 470 bp, Arabidopsis thaliana
atttagcatcatcaaggatcgaaaacattaagtatctagttaagagagagagagagaggggggggaacattaagtttccagttatagacttgtctaagctcaatggtgaagagagagaccaaaccatggctttgatcgacgatgcttgtcaaaactggggcttcttcgagctggtgaaccatggactaccatatgatctaatggacaacattgagaggatgacaaaggaacactacaagaaacatatggaacaaaagttcaaagaaatgcttcgttccaaaggtttagataccctcgagaccgaagttgaagatgtcgattgggaaagcactttctacctccgtcatctccctcaatctaacctatacgacatccctgatatgtcaaatgaataccgattggcaatgaaggattttgggaagaggcttgagattctagctgaagagctattggacttgttgtgtgagaat

SEQ ID NO: 144295 - DNA, 472 bp, Arabidopsis thaliana
gtggagacacccacgtagcccacagggcaacggtcttgaggagactatctgcagcatgaggggccacgagaacattgacgaccctgctcgtgctgacgtgtacaagcccagcctaggtcgcgtgaccagcgtcaacagctataccttgcccatcttggagtatgtcaggctcagtgccactcgtggcgttctccagggtaatgcgatggtgcttcctaaatacaacatgaacgctaacgagatcttgtactgcactggaggacaaggttggatccaagtggtcaacgacaacggacagaacgtgttggaccaacaggtgcagaagggacagctcgtggtcatcccacaagggttcgcatacgttgtccagtcccacggaaacaagttcgagtggatctctttcaaaactaatgaaaacgcaatgatcagcactttggcgggtagaacctcgctcttgagggcattgccattg

SEQ ID NO: 144296 - DNA, 471 bp, Arabidopsis thaliana
aaaagaaaatggttaagctcagcaatctcctcgttgcaaccttcggggttctcctcgggctgagcggctgccttgcgaggcagtcacttggggttcctcctcagctacagaacgagtgtaacctcgacaacctagatgttctccaagccaccgaaactatcaagagtgaagccggtcagatcgagtactgggaccacaaccaccctcagctccgatgtgttggtgtttccgttgctcgttatgtaattgaacaaggcggtctttacttgcccaccttcttcacttccccaaaaatttcctacgtcgttcaaggaacgggtatcagcggaagagtggtccctggatgtgccgagaccttcatggactcgcagccgatgcaaggacaacaacaaggccaaccatggcaaggacgacagggacaacaaggccaaccatgggaaggacagggacaacatggacaacaaggaagac

SEQ ID NO: 144297 - DNA, 473 bp, Arabidopsis thaliana
  unsure (1)..(473): unsure at all n locations
aatcaataaagaggaagaaaaatgggtcgagtcttatctattatctctttctctttgacactgttgatcctcttcaatggctacactgcccaacagtggcccaacgagtgccagctcgatcaactcaatgcgctcgaaccatcccaaatcatcaagagcgagggtggtcgcatcgaggtctgggaccaccatgcaccccagctccgttgctccggctttgcctttgagcgtttcgtcattgagcctcagggtcttttcttgcccactttcttgaacgccggcaaactcacgtttgttgttcacggaaggggtctaatgggaagagttattccgggatgcgccgagacgttcatggagtcaccggtatttggagaaggtcaaggtcagggtcagagtcaaggnttccgtgacatgcaccagaaagtagagcacctacggggcggtgacaccattgcaacaccatctggtgtagc

SEQ ID NO: 144298 - DNA, 188 bp, Arabidopsis thaliana
  unsure (1)..(188): unsure at all n locations
accttctttacttccccaaaaatttcctacgtcgntcaaggaaccggtatcagccgaagagtggtccctggatgtgccgagaccctcatggactcgcagccgatgcaaggacaaacaacaggcaaccatggcaaggacgacagggacaacatggccaaccatgggaaggacagggacaacagggacaa

SEQ ID NO: 144299 - DNA, 153 bp, Arabidopsis thaliana
tttgtcttcactcgtttcgaagatatctccatctttcttttcgttcttcacgaggatatattggaagggttatttatttagataattatttttatgaagcttcccatcaattatctagttttttccaaatacaagatctctttgttcactcgt

SEQ ID NO: 144300 - DNA, 460 bp, Arabidopsis thaliana
tcccggtcgaccacgcgtccgctcgctccgtccttcctcagatctgatcgtccgtcggttttcacgatgccgtcttcctcctgcgggggcgttctcgtgttccttcttctcgtttcccttctcactcctacgttcgcatccgattcagatcacaagtatcaagccgaggagcacgtcaccctatgggtaaacaaagttggcccatataacaatccacaagaaacatacaactattacagtcttccattttgccgcccatctggaaacaatgttcacaaatggggtggtcttggtgaagttctacgtggaaatgagctgattgacagcgagattgcgataaaattcatgaaaaatgtcgagagaagtgtcatctgtccgcttgaactcgatgaagctaatgtcaagcattttaaagatgccattgaatctagctactggttcgaatttttatggtgatcta

SEQ ID NO: 144301 - DNA, 418 bp, Arabidopsis thaliana
aaactttgctgattgattgattttcgattcctttagaaaaaaaatggtttttggggggggtaatgagaaccttatcattaacccaaaaaaagaaaggcgttttcgaactgatccaagcataactgatgagcttacaccaaaaccaatggatcaactggagatttttgatcatataagagatatcaaagatccagagcatcctaatattctggaagatctcagagtagttacagaagactcagttgaagtggatgatgagaacagttatgttagggttacgttcactccaactgtcgaacattgtagcatggcaaccgttatcggtctttgtgtccgtgtgaaacttctacgaagcctttcttctcgatacaagattgatataagggtagcacctggttctcatgcaacagaagatgca

SEQ ID NO: 144302 - DNA, 468 bp, Arabidopsis thaliana
cggacgcgtgggtaagaaataacaaaatggctcgagtctcttctcttctttctttcttcttgacacttttgatccttttccatggctacgcggctcaacagggtcagcagggtcagcagtttccgaacgagtgccagctcgaccagctcaatgcgctcgagccgtcacacgtactgaagagcgaggctggtcgcatcgaggtgtgggaccaccacgctcctcagctccgttgctcaggtgtctcctttgcacgttacatcatcgagtctaagggtctctacttgccctctttctttaacaccgcgaagctctctttcgtggctaagggacgaggtcttatgggaaaagtgatccctggatgcgccgaaacattccaagactcatcagagttccaaccacgcttcgaaggtcaaggtcaaagccagaggttccgtgacatgcaccagaaagtggagcacattatgagcg

SEQ ID NO: 144303 - DNA, 401 bp, Arabidopsis thaliana
atcatcacaaacgagtaagaatacaaatacatattgcaaaaaaatggcaaacaagctcggccgcgtctgcgcaactttcgccctctgcttcctcctcaccaacgcttccatctaccgcactgttgtcgagttcgacgaagatgacgccagcaaccccatgggcccaagacagaaatgtcagaaggagtttcagcaatcacagcacctaagagcttgccagaaattgatgcgcatgcaaatgaggcaaggccgtggtggtggttcctccctcgacgatgagttcgatttggaagacgacatccagaacccacaaggcccccagcatggacaccaaatccttcagcagtgctgcagcgagctttgccaggaagagccagcttgcgtatgatccaccttgagac

SEQ ID NO: 144304 - DNA, 401 bp, Arabidopsis thaliana
ttcaacttcaacagcttttgttcaattctaaatcgcttcaatgttttccagggagtgccagtaattgcagcagtgggagaatctgttaagaatttggaagttgggactccagctgctgttatgacgtttggagcatattctgaatacatgatagtatgagaactactaaaccatatgagcaacaagttgacatttttcaaggcttcagtgatcatgtgaacctgtctgttttggatttaggtatcttctaagcatgttcttcctgttccaagaccagatccagaagttgttgccatgcttacctcgggagtaactgcattaattgcccttgaaaaggtcgtgctaacgagtgtcattaactgtcttgtttcatcgttttttttttcatactctcaaattcc

SEQ ID NO: 144305 - DNA, 323 bp, Arabidopsis thaliana
ccggtcgccacgcgtcgctatggttaaggaacttgtcacatgcgatgactgaaacctcatgacccggggatgctgacgtgtacaagccatcactcggatacattagcacacttaacagctacaatctttctatcctcagacttctccgcttagcgctctttcggggcttcatccgtaaaaaacgctatggtgctaccgcaatggaacgtaacgcaaacgcggcactctacgtgacaaacggaaaggctcatatacaaatggtgaacgacaacggagaaagagtgttcgaccaagagatctccagcggacagttacctagtcgt

SEQ ID NO: 144306 - DNA, 470 bp, Arabidopsis thaliana
gtcggaatctgatggaggagaagaagaagaatggttatgatgaattgaactcgaaaccgccggtaatggcgttgaaccatgtgtcaaggctttgtaaagacgtcaaaaagtctctcgagttctacacaaaggtattagggttcgtggagatagagcgtccagcttctttcgacttcgacggtgcgtggcttttcaactacggcgttgggatccacttggtgcaggccaaggaccaagataagttaccttctgacacggaccatttggacccaatggataaccacatctctttccagtgtgaagatatggaagctttggagaagaggctgaaggaggtgaaggtaaagtacatcaagaggacggtgggtgatgagaaagatgcagctatcgaccagctcttcttcaatgaccctgacggctttattggtgaaatctgtaactgcgagaatctcgaacttgtcccgcgccat

SEQ ID NO: 144307 - DNA, 355 bp, Arabidopsis thaliana
aaagtaaacatcttttgcctactttcttctttttttctcacttagtcacttgcatggggcggcagtcagcatcttctctctttttctcccccaattctctcaagagaatctctaagcttttgttcttcttacaaatcatgtacttataataaacccaagaaagaagaagaagaaaaacaaaaccaatcccaagctgtgatggcgaaacagagttacttcttcgtcttcaccttcttgtttctttctcttctctcatactgttcttcaacaactacacatcatgatgtgttaaacccaccaacggtctttcctacaaaccccacaactacacccgacggctaccatttcctccggt

SEQ ID NO: 144308 - DNA, 474 bp, Arabidopsis thaliana
  unsure (1)..(474): unsure at all n locations
canaaagaaaatggttaacctaaccaatttcttttttgcacccttcggggttttcctgggggttaacggttgctttgcaaggcagcaatttggggttcttcttaacttccaaaccagtgtaacctcgacaacctagatgttcttcaagccaccgaaactatcaagagtgaagccggtcagatcgagtactgggaccacaaccaccctcagatccgatgtgttggtgtttccgctgctcgttatgtaaatgaacaaggcggtctttacttgcccaccttcttcacttccccaaaaatttcctacgtcgttcaaggaacgggtatcagcggaagagtggtccctggatgtgccgagaccttcatggactcgcagccgatgcaaggacaacaacaaggccaaccatggcaaggacgacagggacaacaaggccaaccatgggaaggacagggacaacagggacaacaaggaagacaa

SEQ ID NO: 144309 - DNA, 414 bp, Arabidopsis thaliana
  unsure (1)..(414): unsure at all n locations
atcatttgtgacacaagcagcagtatcatcgtcgtcatcactcactagcaaagctcgacctggttgggtcttcttcaatggtcgctctcttccttctctgaacccgatctctccgtttctgttcctccccacaagtagatccttcgctctcgtcgtcaagagcattctcggtacaaccaccttgcatgcagaaggaatggagacanatctttacttaggatgactntaagtggggatagctcggaaactgtagagatgacttcaactgatatgattttcgagcccgatttggagcatggagtttccggtttgattgttctgttgaccataggaaggctgcttttcctagtgtttcatttaagaacagcaaagacccggaagttcctattgtgagtcacattgttccagcatata

SEQ ID NO: 144310 - DNA, 472 bp, Arabidopsis thaliana
caaacaaaaagaaaatggttaagctcagcaatctcctcgttgcaaccttcggggttctcctcgcctgaacggctgccttgcgaggcagtcacttggggttcctcctcagctacagaacgagtgtaacctcgacaacctagatgttctccaagccaccgaaactatcaagagtgaagccggtcagatcgagtactgggaccacaaccaccctcagctccgatgtgttggtgtttccgttgctcgttatgtaattgaacaaggcggtctttacttgcccaccttcttcacttccccaaaaatttcctacgtcgttcaaggaacgggtatcatcggaagagtggtccctggatgtgccgagaccttcatggactcgcaaccgatgcaaggacaacaacaaggccaaccatggcaaggacgacagggacaacaaggccaaccatgggaaggacagggacaacagggacaacaagga

SEQ ID NO: 144311 - DNA, 475 bp, Arabidopsis thaliana
aggaattggagttggatattcaaacttcgttgtctgatgatgaaggacgagatacagactgaaaggctatgcgtggcagtctcaacttacgaattcatagagtaggtgatgataaaccgatggaaaatacagttgacaatgcctcctcaggaactgcatcgtcatctcaaaatgatagaacgtcttatcagccagagggagccattgatatgaaacgtagatatgttggccactgtaacgtaggaactgatattaagcaggccagttttcttggtcagagaggtgaatatattgcaagtggaagcgatgaccgttcggggtttatatgggagaaacagactggaaggcttatgaaagtgctcgttggcgatgaatcagttttgaactgcattcaatgccatccgtttgatagtgttgagcaacgagtggaattgataacacaataaagatatggagcccaaccgcatcagtccca

SEQ ID NO: 144312 - DNA, 485 bp, Arabidopsis thaliana
  unsure (1)..(485): unsure at all n locations
cccgtccgatcatcacaaacgagtaagaatacaaatacaaatagcataaaaaatggcaaacaagctcttcggggggtgcgcaactttcgccctctgtttcctcctaaccaacgcttccatctaccgcactgttgtcgagttcgacaaaaatgacgccagcaaccccatgggcccaagaaagaaatgtcagaaggagtttcagcaatcacagcacctaagagcttgccagaaattgatgcgcatgcaaatgaggcaaggccgtggtggtggtccctccctcgacgatgagttcgatttggaagacgacatcgagaacccacaaggcccccagcagggacaccagatcctccagcagtgctgcagcgagcttcgccaggaagagccagtttgtgtttgccccaccttgagacaagctgccagggccgttagcctccagggacaacacggaccattccaatccaggaaaatntacaagacagctaagt

SEQ ID NO: 144313 - DNA, 441 bp, Arabidopsis thaliana
cttcgctacgactcttcacgacgccagaggagcaaccatggaaccgtgtctcgaatcgaggaggactgcttcgcttcctgatcttccgtatgcttatgatgcgctagagccagcaatcagtgaggagatcatgcggctacaccatcagaaacaccaccagacttatgtcactcagtacaacaaagccctcaacagccttcgttctgccatggctgacggtgatcactcctccgtcgtcaaactccaaagcctcatcaagttcaacggcggagggcacgttaaccatgcaatcttctggaaaaacctagccccggttcatgaaggaggtggcaaaccaccgcatgatcctttggcttcggcgatcgatgctcatttcggatcactagaaagattgatccaaaaaatgaacgcggaaggcgctgctgtacagggatctgggat

SEQ ID NO: 144314 - DNA, 449 bp, Arabidopsis thaliana
gaaagaaggaaataggacaccttacttttgacaaagatgatcagttagctgtagaatggggtgctgctgctgcaaatatccgcgctgagtctttcagaattcctttgcacagcctttttgaagcgaaaggtattgctggaaacattgttcatgctgttgctacgaccaacgccattattgctggtttaattgtcattgaagcaatcaaagtgctgaaaaaggatgtggacaagttcagaatgacatattgcttagaacacccaagcaaaaagctgctgcttatgccaatcgagccatatgaacctaatcctgcttgctatgtctggtccgagaccacattaggactcgagatcaatactcggaaatcaacactacgggatctaggtgagaaagatgcgaaaaccaaacttggaatgaacctaccgcagattatgcacgggaattcgctt

SEQ ID NO: 144315 - DNA, 468 bp, Arabidopsis thaliana
cggagaaggtggaacttttgctttgtactcattgatctgccgtcatgtcaaagttagcctcgtcccaaaccgacaagtctctgatgaggcactgtccacttataagctggagcatccaccggagaagaaccatgactcgtgtgtgaaaagatatctggagaaacacaagtggttacacactgctttgctgcttcttgttcttcttgggacttgtatggttattggagatggacttctcactccagctatctccgttttctctgctgtgtcaggtcttgagctgaatatgtctaaagaacatcaccaatatgcagtaattcctattacctgcttcatactagtctgccttttctcgcttcagcattttgggacacatcgtgttgggtttgttttcgcgcctattgtcctcacttggctgctctgtataagtggtattggcttgtacaatataatacagtggaatcctta

SEQ ID NO: 144316 - DNA, 367 bp, Arabidopsis thaliana
ccgggtcggcccaacccgtccgaatgacgttcccttctctttctgtctcatttctcttctttgccttcatattcgttacgcatgcatgggacctcagcatcatccaaatgcaacagggaacatgtccgtacacggtggttgtcatgacaggctgtctttctccggagtcgacaggagatcagaatcagcatggtttttggcgatgccgacggtaacaaggtgtatgcaccgaaactagggggtttggtaggaggaccagggggtttgggaaagtgttcaacgaccacattccaggtcagaggtcaatgttggaatgaccctatctgctctctctatataaaccggaatggacccgccggttgggtcc

SEQ ID NO: 144317 - DNA, 464 bp, Arabidopsis thaliana
caaagatcaccactctcggtgggccggtttcttagccgattccttgcccgccggatccgcgggttcgcgtatcggcatggtcgggagcttttatctcggtcttgtcgtgcgcgttgcttccggatatcacaaaaccccggcacgaaaagtgtcaaggaacatgcaaacgaacggctggcattcgcctccccggagacggagtgtgggcggatgctgtgctgcgaactgaagtctaaaacgactctcggcaacggatatctcggctctcgcatcgatgaagaacgtagcgaaatgcgatacttggtgtgaattgcagaatcccgtgaaccatcgagtctttgaacgcaagttgcgccccaagccttctggccgagggcacgtctgcctgggtgtcacaaatcgtcgtccctcaccatcctttgctgatgcgggacggaagctggtcttccgtgtgttaccgcacg

SEQ ID NO: 144318 - DNA, 475 bp, Arabidopsis thaliana
agcattttaattttaaaatcccccttaactagattctaagaaaagttcttaaaacactgacgagggtatgtaggagtaaaaccatctattaagcttatttgataaattaggtatctacgtgtgacaaagaacattcacatgtctataacaattaaatttgaaaagtacaaaacaatcgttcaaaagggtcatagagcacaaatactgcagattaaatttgtcagaacaattgatcaagttaattataattatatatttgtgatatcatactaaccggtaagtgaaagttgttcatgatgagaagacatagctgattcggtacgataaatgaagatgcagagaagaaccacaatgaacacttgagtcaattttgaaacaaaaatcttttccatttctctctccctctttgtttactactagttttgctttctctaatctcatattgactcgagcctttgtagtttataggctcaaa

SEQ ID NO: 144319 - DNA, 466 bp, Arabidopsis thaliana
  unsure (1)..(466): unsure at all n locations
atttccttagaatcgaatgaacatattgggaattgatttgcagaaaatgatacatgatgggggtaggtgttacacatcttaagagttaataactttaaaaccaaatttcacatcatcaagttactagtgcttttttttttttttttttttaagtttccaatgacagtggcagtacctctatttttttctttaattcatttattttacaaatattgccggtttgatacatttcataaatattaaataaattgttaaaacatttatctttaaaagtgagaatggaagttatgtttttttgtcaagaggttgtagaaacaagggagcatctatctttctctcgtncctactccactcaagtatggtcagctctaacccaggatatgcttggtttatggtttactacacgctgggagtctctaatcccttaatcatggcctcgactactccacaagttgtatgatcattt

SEQ ID NO: 144320 - DNA, 475 bp, Arabidopsis thaliana
cacaacaaagacccacaaaattctttttttttttctttttcaaatcccattaataaaaacctgaccagcccatgaagtaaagtaaactcctttcttataaactctcttttgttctttttttttcaacttcatcagtctcttaactcaccatcacaagaacaagaaagatgaagagaggatacggagaaacatgggatccgccaccaaaaccactaccagcttctcgttccggagaaggtccttcaatggcggataagaagaaggctgatgatgacaacaacaacagcaacatggatgatgagcttcttgctgttcttggctacaaggttcgatcttctgagatggctgaagtagcacagaagcttgaacaacttgagatggtcttgtctaatgatgatgttggttctactgtcttaaacgactctgttcattataacccatctgatctctctaactgggtcgagagcatgctttt

SEQ ID NO: 144321 - DNA, 406 bp, Arabidopsis thaliana
cgggtcggaccaacccgtccggtgagaaccttcttccaattaggtcttgcaaagtgtgttctgacctgaaaaatgaagattttggtgacgaatcatatctttatgtgtgggttcatttttccacaatttataatttggggaccgcgttaggaaatcaaaagaatcacgacttacgaagaaagtaacgtaccctagtgccagagacaatgtcgacaccatttttggcatgattaagagcttgaaccattgtaatgagagcagaacgagcatcaccttcttcatacacagcttgtaaatagttatgcatctctatcacaccctgttccacacaattgtttttttgattgtctcacattgaatcttctcgggaaaatttcgatggtgtctgtcacgaaatgttttgagt

SEQ ID NO: 144322 - DNA, 440 bp, Arabidopsis thaliana
gttcctttcaaattcttacttgcagctatgggtaaagagatgtttcacattaacattgtgggcgtggggcatgttgattctggaaaatcgaccacaactggtcacttgatctataagcttgcgggtattgacaagcgtgtcatcgagaggttcgagaaggaggctgctgagatgaacaagaggtccttcaagtacgcatgggtgttggacaaacttaaggccgagcgtgagcgtggtattaccatcgatattgctctatggaagttcgagaccaccaagtactactgcacagtcattgatgccccacgacatcgtgatttcatcaagaacatgattactggtacctcccaggctgattgtgctgttcttatcattgactccaccactggaggttttgaggctggtatctctaaggatggtcagacccgtgagcacgctct

SEQ ID NO: 144323 - DNA, 178 bp, Arabidopsis thaliana
ggtcggtgtggtaaaactgggatagcaacgacgtttatattcaagaatcaaagcgaaaccacgctggtggatttgaaacacttgttgcaaggagctaaacagaggattccacctgtccttgctgagctgaatgatccaatggaagaagcagagaccattgctaatgcaagtggtgtca

SEQ ID NO: 144324 - DNA, 463 bp, Arabidopsis thaliana
gattttcagacaaaagtataatcaatcattctgtaacttaaggtttgatattcagacggacgacaatcaattcgcgattggtctcagaagatgcattcttgttctcatactcacttcgtatctttcaagcttcctcatttcttcgcgcctaagagttttgtggtgtcttcacggagagaattaagagtgttcgcagtggcaactaccgtcgaggaggcgtccggtaacataccagcggctccgatttctctacctctagggtcatggaaacagatagctggtggagttacagctgctaaagggtttaaagctgctggtatgtatgctggattacgagctgcaaggaagaaacctgatctcgctcttgtaacatgtgatgtcgaagctgtagctgcaggtgtgtttactactaatgtggttgctgctgctcctgtagtttactggaaaaaagtttttgagactt

SEQ ID NO: 144325 - DNA, 467 bp, Arabidopsis thaliana
cacaatgactagatttgcggtattgccactctctgttctccttctcgttctcttgttgctctgcgactgagtcgttggctaagtcggaggagtctgaagaatacgacgtcgctgtgccttcatgttgcgggttttcgtctcctcttctgattaagaaagatcaatggaaaccaatcttcgagacgaagtttggacagatttcaaccgttcaaatcggcaatggatgcggtggaatgggaccttacaagatacattccataacgttggagccaaacacaattttgctccctcttcttcttcattccgacatggtcttcttcgttgactctggaagtgggattctgaattgggttgacgaggaagcgaagagtactgagattagactaggggacgtttacaggctacgtcccggttcggttttctacttacagagcaaaccggtggatatctttcttggaaccaaactt

SEQ ID NO: 144326 - DNA, 462 bp, Arabidopsis thaliana
agaaaaatgggtcgagtctcatctattatctctttctctttgacactcttgatcctgggcaagcgctacactgcccaacagtggcccaacgagtgccagctcgatcaactcaatgcgctcgaaccatcccaaatcatcaagagcgagggtggtcgcatcgaggtctgggaccaccatgcaccccagctccgttgctccggctttgcctttgagcgtttcgtcattgagcctcagggtcttttcttgcccactttcttgaacgccggcaaactcacgtttgttgttcacggaaggggtctaatgggaagagttattccgggatgcgccgagacgttcatggagtcaccggtatttggagaaggtcaaggtcagggtcagagtcaagggttccgtgacatgcaccagaaagtagagcacctactgggcggtgacaccattgcaacaccatctggtgtagctcaa

SEQ ID NO: 144327 - DNA, 106 bp, Arabidopsis thaliana
agaaaaatgggtcgagtctcatctattatctctttctctttgacactcttgatcctcttcaatggcgacactggccaacaatggcccaacgagtggcagctcgatc

SEQ ID NO: 144328 - DNA, 481 bp, Arabidopsis thaliana
aacaaaaatgggtctggtaacataagctctcaaatatctcttactcctttctatttccgggggtttcatctacaccaatgcagtttcatccgcttctccaatgactccaccgtcatcgccggctaagatgagcaggagacttgtggcagttgaaggcatggtttattgcaagtcatgcaagtattccggcgtcgatactctcttggaagcatctcctcttcaaggagcgaccgtaaagcttgcatgcaacaacacaaagagaggtgtgacaatggagacaaaaacagacaaaaacggatacttcttcatgctagccccaaaaaaactcaccacctacgctttccacacgtgccgggcttggcctacgaatcctggacccacgactgcaacgatgacatgcaccgtgccgtcaaagctcaacaatggaataaccggtgctatgcttaagccttctaagacaatcaacatcggtgaacacgac

SEQ ID NO: 144329 - DNA, 483 bp, Arabidopsis thaliana
agaaaaatgggtcgagtctcatctattatctctttctctttgacactcttgatcctcggcaagggctacactgcccaacagtggcccaacgagtgccagctcgatcaactcaatgcgctcgaaccatcccaaatcatcaagagcgagggtggtcgcatcgaggtctgggaccaccatgcaccccagctccgttgctccggctttgcctttgagcgtttcgtcattgagcctcagggtcttttcttgcccactttcttgaacgccggcaaactcacgtttgttgttcacggaaggggtctaatgggaagagttattccgggatgcgccgagacgttcatggagtcaccggtatttggagaaagtcaaggtcagggtcagagtcaagggttccgtgacatgcaccagaaagtagagcacctacggtgcggtgacaccattgcaacaccatctggtgtagctcaatggttctacaacaatggaaat

SEQ ID NO: 144330 - DNA, 456 bp, Arabidopsis thaliana
  unsure (1)..(456): unsure at all n locations
agaaaacatacacaaatagcaaaacatggctaacaagcttttnctcgtctgcgcaactctcgggctgtgctttctcctcanccaacgcttcatctaccgcaccgttgtcgaattcgaagaagatgacgccagcaaccccgtaggtccaagacagagatgccagaaggagtttcagcaatcacaacacctaagagcttgccagagatggatgagcaagcaaatgaggcaaggacgtggtggtggtccttccctcgacgatgagttcgatttcgagggccctcagcagggataccagctactccagcagtgctgcaacgagcttcgccaggaagagccagtttgcgtttgccccaccttgaaacaagctgncagggcagttagcctncagggacagcacggaccattccaatccaggaaaattaccagtcagctaagtacttgcctaacatttgcaag

SEQ ID NO: 144331 - DNA, 488 bp, Arabidopsis thaliana
  unsure (1)..(488): unsure at all n locations
gtccgagaaaaatgggtcgagtctcatctattatctctttctctttgacactctggatcctattcaagggcggcactgtccaacagtggcccaacgagtgccagctcgatcaactcaatgcgctcgaaccatcccaaatcatcaagagcgagggtggtcgcatcgaggtctgggaccaccatgcaccccagctccgttgctccggctttgcctttgagcgtttcgtcattgagcctcagggtcttttcttgcccactttcttgaacgccggcaaactcacgtttgttgttcacggaaggggtctaatgggaagagttattccgggatgcgccgagacgttcatggagtcaccggtatttggagaaggcaaggtcagggtcagagtcaagggttccgtgacatgcaccagaaagtagagcacctacggtgcggtgacaccatngcaacaccatctggtgtagctcaatggttctacaacaatggaaatg

SEQ ID NO: 144332 - DNA, 412 bp, Arabidopsis thaliana
ccacccgtccggtccctttcacaagagataaagaggttaatcaaatatactttggttcaattgattcgcctccgtgaggcattcaaaatccataagtgccttccttttcaaaacttatttctcaaccaacaaagcattttttttttattggcctaatgggtaatggcaaccattataggtcccccaaatctcacatctctcctttttttcataatcaagaattttataaagaaacaaacacacacagatttatgaaattgatatacttcacttagcaattaattgtggttggatcgggtagtcatggatcccacaattatgacgtggactccacactctctttgatgaaaagtttcaatgaaaaatttgataaatctgaagaatttttgttaattttatatgaatcttgaaa

SEQ ID NO: 144333 - DNA, 471 bp, Arabidopsis thaliana
cacccggtgtagcacagtggttctacaacgacggtcaggaaccacttgtcatcgtcagcggcggcgatctagccagtcaccagaaccagcttgaccgcaacccaaggccattttacttagccggaaacaacccacaaggtcaagtatggctacaaggccgagagcaacagccacagaagaacattttcaatggatttggacccgaggttattgctcaagctttgaagatcgatcttcagacagcgcagcaacttcagaaccaagatgacaaccgtggaaacattgtccgagtccaaggcccgttcggtgtcattaggccgcctttgaggggccagagacctcaggaggaggaagaagaagaagaaggacgacatggacgacacggtaatggcttagaggagaccatctgcagcgccaggtgcaccgataacctcgatgacccgtctcgtgctgacgtgtacaagccacaag

SEQ ID NO: 144334 - DNA, 456 bp, Arabidopsis thaliana
aaagaaaatggttaagctcagcaatctcctcgttgtaaccttcggggttctcctcgggggtggcggctgtcttgcgaggcagtcacttggggttcctcctcagctacagaacgagtgtaacctcgacaacctagatgttctccaagccaccgaaactatcaagagtgaagccggtcagatcgagtactgggaccacaaccaccctcagctccgatgtgttggtgtttccgttgctcgttatgtaattgaacaaggcggtctttacttgtccaccttcttcacttccccaaaaatttcctacgtcgttcaaggaacgggtatcatcggaagagtggtccctggatgtgccgagaccttcatggactcgcagccgatgcaaggacatcaacaaggccaaccatggcaaggtcgacagggacaacaaggtcaaccatgggaaggacagggacatcaggg

SEQ ID NO: 144335 - DNA, 367 bp, Arabidopsis thaliana
gggttgagttcaaaacaaacgctaacgcgcaaatcaacactctggcgggacgaacctcagtcttgagaggtttaccacttgaagtcataaccaatgggttccaaatctcacccgaagaagcaaggagggtcaagttcaacacgctcgagaccactttgactcacagcagtggcccagctagctacggaaggccaagagtggctgcagcttaagagcttaaaaccgcggcttaacaatgaaccgctactgtaaaaggaagttaaatagtacgtagtaattataataatgtacgaaaatgtgacaagttttgttgaggtttacctgtaaaatgccactccttttctgaataaaatctttctttccgatc

SEQ ID NO: 144336 - DNA, 388 bp, Arabidopsis thaliana
taaagaggaagaaaaatgggtcgagtctcatctattatctctttctctttgacactcttgatcctcttcaatggctacactgcccaacagtggcccaacgagtgccagctcgatcaactcaatgcgctcgaaccatcccaaatcatcaagagcgagggtggtcgcatcgaggtctgggaccaccatgcaccccagctccgttgctccggctttgcctttgagcgtttcgtcattgagcctcagggtcttttcttgcccactttcttgaacgccggcaaactcacgtttgttgttcacggaaggggtctaatgggaagagttattccgggatgcgccgagacgttcatggagtccccggtatttggagaaggtcaaggtcagggtcaga

SEQ ID NO: 144337 - DNA, 373 bp, Arabidopsis thaliana
ttcaatatataatgactgaagctaactttggttggttaatccgatcagttcatcgatggtcggcaagtatgatggtcctaatgatgatcctgcacgtatttcgtgtatacctcaccggtggttttaaaaaacctcgcgaattaacttgggttactggtgtggttctgggtgtattgaccgcatcttttggtgtaacaggttattctttaccttgggatcaaattggttattgggcggtcaaaattgtaacaggtgtacctgacgctattccggtaataggatcacctcttgtagaattattacgcggaagtgctagtgttggacaattcactttgactcgtttttaatagttacacacttttgaattacctct

SEQ ID NO: 144338 - DNA, 398 bp, Arabidopsis thaliana
gatagatcgtttgacaaaaaaaaaaaaagagtttatggatagagaatcaacgcatgggataatgttaatctcataattatttatttgaactttgaattcactttttaaagtataaaaaatggatagaaaaccatgggataacgttcataattatttgtatctatgtattacacatgaccacatggaaatataataattatttctatgaattaagttaattgctattatttttaacatgttgagaaggtgcatatagaaatcaatgtagtcaatcttacatttttcaacattcattcactttcctttatttttatttctgtttagatgtttttatcatgtgaataataaagaaaagatcaatatatatatatatatatataccagcctttccggaccaa

SEQ ID NO: 144339 - DNA, 428 bp, Arabidopsis thaliana
  unsure (1)..(428): unsure at all n locations
accggngcggagacccaggcgcgacccagaccgtcaatataatctagaaaaaaaaagagaagagagaagagagaaatgtcgagagctttgtcagtcgttggtgtcttgctcgccatatccttcgtctgtgcacgtgctcgtcaggtgccgggagagtctgatgagggaaagacgacgggacatgacgatacaacaacaatgcccatgcatgcaaaagcagctgatcagttaccaccaaagagcgtcggcgacaaaaaatgcatcggaggagttgctggagtcggtggattcgccggagttggtggtgttgccggcgtgggaggtctagggatgccactcatcggtggtcttggcgggatccgtaagtatggtggcataagcggtgcagctggaatcggtggatttcatagtataggcggtgttggcgg

SEQ ID NO: 144340 - DNA, 351 bp, Arabidopsis thaliana
gaccacgcgtccggttgccaagttggaaaagaggaaacatatatgattaagcaaagtattatatgcctttgtgaatggttgtgatcaatagagaaaagattcatttcaaatttaattgctaccaataataggttgcgtttataaatctaaatactaatcatgtgaacatgcagaagaagaaaagaagtccattaaatccttcacatctttagcaatgttgaaatttgaagtttatttaaatttatcatatgaccgaataatacaaattttgaaaactgtaaaatattaacacaagtaagaggacccacgtgaagacccatacccagttgcacagagacagacacacagatg

SEQ ID NO: 144341 - DNA, 390 bp, Arabidopsis thaliana
cggggggaccaggcgtccgttttttaactaatctttaatacccccttttaatttgtgtgcttttagcctttactctatagtgttatatgatatcaatcgacatggcgaatgtggaccgtgatcggcgtgtgcatgtagaccgtactgacaaacgtgttcatcagccaaactacgaagatgatgtcggttttggtggctatggcggttatggtgctggttctgattataagagtcgcggcccctccactaaccaaatcttggcacttatagcaggagttcccattggtggcacactgctaaccctagctggactcactctagccggttcggtgatcggcttgctagtctccatacccctcttcctcctcttcagtccggtgatagtcccgg

SEQ ID NO: 144342 - DNA, 384 bp, Arabidopsis thaliana
caaacacacacaaatctctgaagtaaaatgacgtttccttctctttctgtctcatttctcttgtttgccttgatattcgttacgcatgcattcgacctcagcatcatccagatgcaacagggaacatgtccgtacacggtggttgtcatgacaagctgtctttctccggagtcgacaagagatcagatcagcattgtttttggcgatgccgacggtaacaaggtgtatgcaccgaaactagggggtttggtaagaggaccagggggttttgggaagtgttcaacgaacacattccaagtcagaggtcaatgtttgaatgaccctatctgctctctctatatcaaccggaatggacccgacggttgggtcccggagtccattgag

SEQ ID NO: 144343 - DNA, 415 bp, Arabidopsis thaliana
ctgagctctgtggtttcccattacagaagctgtgtaaagatgaaggtacgaaccctaagctcgtcgctccagaaccagaaggctcgcaaatcctcccgaagaaaccaaaccctagcttcatcgacaaggacggaagaaagaataaaccgatcaccggatccgtaacggtttctctcatctccggagtctcaatcgtaatcggagcagtttctatctccgtatggctgattcgaagaaaattaagctccactgtgagtacaccggaaaaaaacaacacggcggcgccattggatgatgcggcggatgaggaggagaaggaaggtaaattcgtggtgatggacgaaggattcgagctcgagctcgaggatttgctgagagcatcggcttacgtcgtcggaaagagcagaagtgggat

SEQ ID NO: 144344 - DNA, 358 bp, Arabidopsis thaliana
agaaaacatacacaaatagcaaaacatggctaacaagctcttcctcgtctgcgcagctctcgcgctctgcttcctcctcaccaacgcttccatctaccgcaccgttgtcgaattcgaagaagatgacgccagcaaccccgtaggtccaagacagagatgccagaaggagtttcagcaatcacaacacctaagagcttgccagagatggatgagcaagcaaatgaggcaaggacgtggtggtggtccttccctcgacgatgagttcgatttcgagggcccccagcagggataccagctactccagcagtgctgcaacgagcttcgccaggaagagccagtttgcgtttgccccaccttg

SEQ ID NO: 144345 - DNA, 376 bp, Arabidopsis thaliana
gtgaagccggtcagatcgagtactgggaccacaaccaccctcagctccgatgtgttggtgtttgcgttgctcgttatgtaattgaacaaggcggtctttacttgcccaccttcttcacttccccaaaaatttcctacgtcgttcaaggaacgggtatcagcggaagagtggtccctggatgtgccgagaccttcatggactcgcagccgatgcaaggacaacaacaaggccaaccatggcaaggacgacagggacaacaaggccaaccatgggaaggacagggacaacagggacaacagggaagacaaggccaaccatgggaaggacagggacaacagggacaacaaggacgacagggccaacaaggccaaccatg

SEQ ID NO: 144346 - DNA, 360 bp, Arabidopsis thaliana
  unsure (1)..(360): unsure at all n locations
gagagacacaacacaccatctcaatcatgacttcttcgtttctctcctccactgctttcttcctcctcctttgtctaggattctgccacgtgtcctcttcctcctccgaccaaggaacttacatcgttcacatggctaaatctcagatgccgtcgtctttcgacctccactctaactggtacgattcatctctcagatctatctccgactcagccgaattgctctacacttacgagaacgcgattcatggattctcaacacggctaactcaagaagaagccgactcgctcatgactcaacctggtgttatctccgntttaccggagcaccgttacgagctacacaccactcgtactcctc

SEQ ID NO: 144347 - DNA, 387 bp, Arabidopsis thaliana
ctcaaaacaagacccatcgataacagcgatcatggtggctaaagccttagcacagctgataacatgcatcatcttattctgccacgttgtagcttccgtagaagacctcaccatacgccaagtcacggccgacaatcggcgaattcgcccgaatcttctcgggactcacacagagagtaaattccggcttttcatgtccgattacggcaagaactactccacgagggaggagtacatccaccgcctcggaatatttgccaaaaacgtccttaaggccgcagagcaccagatgatggacccctccgccgtccacggagtcacacagttctctgacctcacggaagaggagttcaagcggatgtacactggagtagccgatgttggcgg

SEQ ID NO: 144348 - DNA, 317 bp, Arabidopsis thaliana
atttaagcttcaactatatatttgcatgttatttgtcaaaaggatttgacaataatgcaacaagagtttcattgaaaatttcaagaaccctagttaataacgataatgggttcgagagttttggcttccttctttgttttcttaatcttcacggtcatcacattgcctcccacgatccaagcttgcactccttgtactcgtcctcatcctccggttccgaaacctccacaacacggcggtggtggaggtggtggtagcaagccgcctccacatcacggtggaaaaggtggtggtaaacccccaccccacggtggaaa

SEQ ID NO: 144349 - DNA, 455 bp, Arabidopsis thaliana
  unsure (1)..(455): unsure at all n locations
tcgcggacgctgtgggagcccaaaaaatggcaaacaagggttgttctctcgtctgcgcagnnctctcgctctctgcttcctncctcaccaaccgcttccatctanccgnncaccgtcgttgagttcgaaganagatgaccgccactataccccatagggcccaaaaatganggaaatgctcgcaagggagtttctagaaagaacaaccacctaagagccttgccagcaattgatgctccagcaagcaaggcaaggccgtagcgatgagtttgatttcgaagacgacatggagaacccacagggacaacagcaggaacaacagctattccagcagtgctgcaacgagcttcgccaggaagagccagattgtgtttgccccaccttgaaacaagctgccaaggccgttagactccagggacagcaccaaccaatgcaagtcaggaaaatttaccaga

SEQ ID NO: 144350 - DNA, 426 bp, Arabidopsis thaliana
cggacgcgtgggcgtgacatgcaccagaaggtggttcatgtgagacgcggagacgtctttgccaacactccaggctctgcccactggatctacaactcaggagaacagccacttgtcatcatcgctcttctcgacatcgccaactaccaaaaccaactcgaccgcaaccctagagtgttccatttggccggaaacaaccagcagggaggctttggcggttcacagcaacaacaagaacagaaaaacttgtggagcgggttcgacgcacaggtcatagctcaagcattgaaaattgacgttcagttggctcagcagcttcagaaccaacaagacagcagaggaaacatcgttcgtgttaagggacctttccaggtcgtgaggccacctctaagacagccctacgagagcgaggagtggagacaccca

SEQ ID NO: 144351 - DNA, 467 bp, Arabidopsis thaliana
  unsure (1)..(467): unsure at all n locations
ccgggtcggacccacgcccgtccggtgccgagaaccttcatngtgactcgcagccgatgcaatggacaacaactaaggctcaaccatggcaagggacgacagtggacaacaagtgccaaccatgggaaggaccagggacaactagggacaacaatggaagacaaggccaaccatgggaaggacagggacaacagggacaacaaggacgacagggacaacaaggccaaccatgggaaggacagggacagcagggacaacaagggttccgtgacatgcaccagaaggtggaacatgtgagacgcggagacgtctttgccaacactccaggctctgcccactggatctacaactcangagaacagccacttgtcatcatcgctcttctcgacatcgccaactaccaaaaccaactcgaccgcaaccctagagtgttccaattggccggaaacaaccagcaaggaggcttt

SEQ ID NO: 144352 - DNA, 400 bp, Arabidopsis thaliana
  unsure (1)..(400): unsure at all n locations
aacaaacaaanaagaaaatggttaagctcagcaatctcctcgttgcaaccttcggggttctcctcgtccttaacggctgccttgcgaggcagtcacttggggttcctcctcagctacagaacgagtgtaacctcgacaacctagatgttctccaagccaccgaaactatcaagagtgaagccggtcagatcgagtactgggaccacaaccaccctcagctccgatgtgttggtgtttccgctgctcgttatgtaattgaacaaggcggtctttacttgcccaccttcttcacttccccaaaaatttcctacgtcgttcaaggaacgggtatcagcggaagagtggtccctggatgtgccgagaccttcatggactcgcagccgatgcaaggacaacaaca

SEQ ID NO: 144353 - DNA, 273 bp, Arabidopsis thaliana
cttcatcattaccaaatcatcaacttaatcgtttctctcaaatttagggttttctcttttctcgaaagtcttgcggttttctgaatcatctctatctggtttgagggtttcgtttgatatctggagaaaggggtttctggaaacaaggagttcataattcgcgatcttgatctatcgatcttcatttatatataaaagcgtgaatgagattatgatggagtcgaaaggtggtaaaaagaagtccagcactagtagttccttattttaccgaag

SEQ ID NO: 144354 - DNA, 421 bp, Arabidopsis thaliana
attgaaaattgacgttcagttggctcagcagctttagaaccaacaagacagcagaggaaacatcgttcgtgttaagggacctttccaggtcgtgaggccacctctaagacagccctacgagagcgaggagtggagacacccacgtagcccacagggcaacggccttgaggagactatctgcagcatgaggtcccacgagaacattgacgaccctgctcgtgctgacgtgtacaagcccagcctaggtcgcgtgaccagcgtcaacagctataccttgcccatcttggagtatgtcaggctcagtgccactcgtggcgttctccagggtaatgcgatgggggcttcctaaatacaacatgaacgctaacgagatcttgtactgcactggaggacaaggaaggatccaagtggtcaacgacaa

SEQ ID NO: 144355 - DNA, 305 bp, Arabidopsis thaliana
acataactcaccaaccaatcaactaaccatggattctgagatcgtcgcggactgcgctccattgctcaaaatctacacgagtggccgaatcgagcgactcatgggtgaagccaccgtactaacttcatacgaaccacaaagcggagacgcttccagggacgttgtttattacgccgactacaacctagccagccgtatatacctcccggagaaagccggcgccgagaccgactcgaaactccctatactagatgacttacacggcggaggatccatcattgcgacagctatctctgcaacttacc

SEQ ID NO: 144356 - DNA, 369 bp, Arabidopsis thaliana
cggacgcgtgggtcacaaacgagtaagaatacaaatacaaatagcaaaaaaaatggcaaacaagctcttcctcgtctgcgcaactttcgccctctgcttcctcctcaccaacgcttccatctaccgcactgttgtcgagttcgacgaagatgacgccagcaaccccatgggcccaagacagaaatgtcagaaggagtttcagcaatcacagcacctaagagcttgccagaaattgatgcgcatgcaaatgaggcaaggccgtggtggtggtccctccctcgacgatgagttcgatttggaagacgacatcgagaacccacaaggcccccagcaaggacaccagatcctccagcagtgctgcagcgagct

SEQ ID NO: 144357 - DNA, 427 bp, Arabidopsis thaliana
  unsure (1)..(427): unsure at all n locations
gataaaaatnggctcgagtctcnttctcttctttctttctccttaacacttttgatccttttccatggctacgcggctcaacagggtcagcagggtcagcagtttccgaacgagtgccagctcgaccagctcaatgcgctcgagccttcacacgtactgaagagcgaggctggtcgcatcgaggtgtgggaccaccacgctcctcagctccgttgctcaggtgtctcctttgcacgttacatcatcgagtctaagggtctctacttgccctctttctttaacaccgcgaagctctccttcgtggctaaaggacgaggtcttatgggaaaagtgatccctggatgcgccgaaacattccaagactcatcagagttccaaccacgcttcgaaggtcaaggtcaaagccagaggttccgtgacatgcacc

SEQ ID NO: 144358 - DNA, 411 bp, Arabidopsis thaliana
  unsure (1)..(411): unsure at all n locations
ccgggncggacccacgccgtccgcaacaaacnaaaaagaaaatggttaagctcagcaatctcctcgttgtaaccttcggggttctcctcgtccttagacggctgccttgcgaggcagtcacttggggttcctcctcagctacagaacgagtgtaacctcgacaacctagatgttctccaagccaccgaaactatcaagagtgaagccggtcagatcgagtactgggaccacaaccaccctcagctccgatgtgttggtgttttccgtgctcgttatgtaattgaacaaggcggtctttacttgcccaccttcttcacttccccaaaaatttcctacgtcgttcaaggaacgggtatcagcggaagagtggtccctggatgtgccgagaccttcatggactcgcagccgatg

SEQ ID NO: 144359 - DNA, 347 bp, Arabidopsis thaliana
aaacatgctcgacgagaggagcgtcttgccaagggtcctggaggatacatacctgccgatgcaccacctgcacaaaccgctgaggtacctgcgaaaaagtctaagaagtgagaagctagctcggtagtgaattctcttataagcagcgattttgaatggtttatgtgatatagctttgtgaaaactctatatttgtcacaaatatgagaacctatggcagcagtacgtactgttacaggagacttaactctatcttcaagtgcttttctctctcacagcaacaacaagaacagaaaaacttgtggagcggggtcgacgcacaagtcatagctcaagcattgaaaatt

SEQ ID NO: 144360 - DNA, 424 bp, Arabidopsis thaliana
atggatcacaactgttggtgctggtactttagatcgtgattttccggcgcttgcgattctcggtaacggcaagaatttcaccggagtttctttgtttaaaggagaagctttaccggataaattgttgccgtttatttacgctgggaatgctagtaatgctactaatggtaatctctgtatgaccggaactttgatcccggagaaagtaaaggggaagattgtgatgtgtgatagaggaattaatgctagagttcagaaaggtgatgtggttaaagcagcaggtggagttggaatgattctggctaacactgcggcgaatggtgaagagcttgttgcggatgctcatttgttaccggcgaccaccgttggtgaaaaagccggtgatataatccggcattacgtgactactgatcctaatcccacc

SEQ ID NO: 144361 - DNA, 392 bp, Arabidopsis thaliana
aacaaaaagaaaatggttaagctcagcaatctcctttttgcaaccttcggggtgctcctcgtgcttaacggctgccttgcgaggcagtcacttggggttcctcctcagctacagaacgagtgtaacctcgacaacctagatgttctccaagccaccgaaactatcaagagtgaagccggtcagatcgagtactgggaccacaaccaccctcagctccgatgtgttggtgtttccgttgcttcgttatgtaattgaacaaggcggtctttacttgcccaccttcttcacttccccaaaaatttcctacgtcgttcaaggaacgggtatcagcggaagagtgggccctggatgtgccgagaccttcatggactcgcaaccgatgcaaggacaac

SEQ ID NO: 144362 - DNA, 334 bp, Arabidopsis thaliana
caaacgagtaagaatactaatacaaatagcagagttatggcaaacatgctattcctgcggtgggcaactatcgccctctgcttcctccttaccaacgcttacatctaccgaactggtgacgagttcgacgaagatgacgccagcaacctcatgggcccaagacagaaatgtcagaaggagtttcagcaatcacagcacctaagagctcgccagacattgatgcgcatgcaaatgaggcaaggccgtggaggtggttcctccctcgacgataagttcaatatggaagacgacatcgagaacccacaacgcccgcagcagggacaccagatccttc

SEQ ID NO: 144363 - DNA, 425 bp, Arabidopsis thaliana
  unsure (1)..(425): unsure at all n locations
caaaaagaaaatggttaagctcagcaatctcctcgttgcaaccttcggngttctcctcgtgctgaacggctgccttgcgaggcagtcacttggggttcctcctcagctacagaacgagtgtaacctcgacaacctagatgttctccaagccaccgaaactatcaagagtgaagccggtcagatcgagtactgngaccacaaccaccctcagctccgatgtgttggtgtttccgttgctcgttatgtaattgaacaaggcggtctttacttgcccacctttttcactttcccaaaaatttcctacgtcgttcaaggaacgggtatcagcggaagagtggtccctggatgtgccgagaccttcatggacttgcagccgatgcaaggacaacaacaaggccaaccatggcaaggacgacagggacaac

SEQ ID NO: 144364 - DNA, 292 bp, Arabidopsis thaliana
ggcaatattattattttaataatgtgattttatagtgctgttgcgtttgtgaaattagctttttcgttggcattttcttttgtttttttttatgattggcacatttcaatttcataggtataattttatgttttttttgtttcttttgcgtttgttttttttgtttttcgttctcttgtttactctacgaaaatggtctaaataggtataattgtcaaaaaaattgttccaaaaggttaaaaaaagggtaattaaagctttaaaacattctcaaatatataaatcagtgaaa

SEQ ID NO: 144365 - DNA, 239 bp, Arabidopsis thaliana
ggcggctagcagccgcgggaaataagtcttggattagaggagactttgtgcaccatgcgacgcactgaaatggtcgaagacacgtcagatgctgacgtgtacaagccaggactgggatacatgagcacacttaacagctacaagctacctatcctcagactggtccgccttagcgctctacgaggctgcatacgagaaaacgctatggtgctaccgaagtggaacgtaaacgcaaacgc

SEQ ID NO: 144366 - DNA, 382 bp, Arabidopsis thaliana
caaaaagaaaatggttaagctcagcaatctcctcgttgcaaccttcggggttctgctcgtccgtaacggctgccttgcgaggcagtcacttggggttcctcctcagctacagaacgagtgtaacctcgacaacctagatgttctccaagccaccgaaactatcaagagtgaagccggtcagatcgagtactgggaccacaaccaccctcagctccgatgtgttggtgtttccgttgctcgttatgtaattgaacaaggcggtctttacttgcccaccttcttcacttccccaaaaatttcctacgtcgttcaaggaacgggtatcagcggaagagtggtccctggatgtgcccagacctttatggactcgcagtcgatgcaa

SEQ ID NO: 144367 - DNA, 362 bp, Arabidopsis thaliana
atatcaatcgacatggcgaatgtggaccgtgatcggcgtgtgcatgtagaccgtactgacaagacgtgttcatcagccaaactacgaagatgatgtcggttttggtggctatggcggttatggtgctggttctgattataagagtcgcggcccctccactaaccaaatcttggcacttatagcaggagttcccattggtggcacactgctaaccctagctggactcactctagccggttcggtgatcggcttgctagtctccatacccctcttcctcctcttcagtccggtgatagtcccggcggctctcactattgggcttgctgtgacgggaatcttggcttctggtttgtttgggttga

SEQ ID NO: 144368 - DNA, 413 bp, Arabidopsis thaliana
caacaaattcacattcctctctgtttttttgttttcgattctctttcttcaatggcttccatgtccaccggcttccccaaaccaacctctttcatttctcaacctctaacaaaatctcacaaatccgatttcgtaaccacatccatttcattcccttcgaattcgaaaactcgtagcttaagaaccatctctgtacgagctggcttaatcgagccagatggtgggaaactttgtggatcttgttgtaccggaaccgagactgcgagagaagaaacacgaaagcgcggtttttcctagagtgagattgactgcgattgatttgcaatggatgcatgttttgagtgaatgttggcctattcctctttcgtggtttattgaggaatttcgattccttccaaactttcattttaatt

SEQ ID NO: 144369 - DNA, 415 bp, Arabidopsis thaliana
aaatataagaaataacaaaatggctcgagtctcttctcttctttctttcttctgagacacttttgatccttttccatggctacgcggctcaacagggtcagcagggtcagcagtttccgaacgagtgccagctcgaccagctcaatgcgctcgagccgtcacacgtactgaagagcgaggctggtcgcatcgaggtgtgggaccaccacgctcctcagctccgttgctcaggtgtctcctttgcacgttacatcatcgagtctaagggtctctacttgccctctttctttaacaccgcgaagctctctttcgtggctaagggacgaggtcttatgggaaaagtgatccctggatgcgccgaaacattccaagacttattagagttccaaccacgcttcgaaggttaaggtcaaag

SEQ ID NO: 144370 - DNA, 396 bp, Arabidopsis thaliana
aagaagatgacgccagcaaccccgtatgtccaagtatagagatgccagaaggagtggcagcaatcacaacacctaagagcttgccagagatggatgagcaagcaaatgaggcaaggacgtggtggtggtccttccctcgacgatgagttcgatttctagggcccccagcagggataccagctacttcagcagtgctgcaacgagcttcgtcaggaagagccagtttgcgtttgccccaccttgaaacaagctgccagggcagttagcctccagggacagcacggaccattccaatccaggaaaatttaccagtcagctaagtccttgtctaacttttgcaagatccaacaagttggtgaatggcctttccagaacaccattcccttttttccttct

SEQ ID NO: 144371 - DNA, 425 bp, Arabidopsis thaliana
aacaaaaagaaaatggttaagctcagcaatctcctcgttgcaaccttcggggttctcctcgtccttaacggctgccttgcgaggcagtcacttggggttcctcctcagctacagaacgagtgtaacctcgacaacctagatgttctccaagccaccgaaactatcaagagtgaagccggtcagatcgagtactgggaccacaaccaccctcagctccgatgtgttggtgtttccgttgctcgttatgtaattgaacaaggcggtctttacttgcccaccttcttcacttccccaaaaatttcctacgtcgttcaaggaacgggtatcagcggaagagtggtccctggatgtgccgagacctttatggactcgcagccgatgcaaggacaacaacaaggccaactcatgcaaggaccacagggaca

SEQ ID NO: 144372 - DNA, 384 bp, Arabidopsis thaliana
caactcgcgaacaaagcagaccctagatcatccatcggcgagtgagacggcagctcctcgacggcaattgcttacaccggcggcgaccactcaccctcagatctctcaatcccactcatgtctgtgacactctggtggaaattctgccatggcggagcattagcctctaatctttggcactgagaaagacagagcgaattgccctttctactccaagactggcgcttgccgacatggcgaccggtgctcgcgtttttacaaccgatctaccatctgcccgacactcattctttgaaacatgtgccagatgcctgacatgattacccctggtgaagacgctcagggccaaccactcgacccgcgtaagatacaggagcactttga

SEQ ID NO: 144373 - DNA, 418 bp, Arabidopsis thaliana
ccaggttttgcccactggatctacaactaaggagatcagccacttgtaataatcgctcttctggacatcgccaactaccaaaaccaactggaccgcagccctagagtgttccatttggccggaaacaaccagcagggaggctttggcggttcacagcaacaacaggaacagaaaaacttgtggagcgggttcgacgcacaggtcatagctcaagcattgaaaattgacgttcagttggctcagcagcttcagaaccaacaagacagcagaggagacatcgttcgtgttaagggacctttccaggtcgtgaggccaccctctaagacagccctacgagagcgaggagtggagacacccacgtagtccacagggcaacggccttgaggagactatctgcagcatgaggtcccacgagaac

SEQ ID NO: 144374 - DNA, 357 bp, Arabidopsis thaliana
cacacatagcaaaaaatggcaaacaagttgttccttgtctgcgcagctctcgctctctgctgcctcctcaccaacgcttccatctaccgcaccgtcgttgagttcgaagaagatgacgccactaaccccataggcccaaaaatgaggaaatgccgcaaggagtttcagaaagaacaacacctaagagcttgccagcaattgatgctccagcaagcaaggcaaggccgtagcgatgagtttgatttcgaagacgacatggagaacccacagggacaacagcaggaacaacagctattccagcagtgctgcaacgagcttcgccaggaagagccagattgtgtttgccccaccttgaaa

SEQ ID NO: 144375 - DNA, 398 bp, Arabidopsis thaliana
ggaaactaccactggtgttaagaggctttaccagtatgcagcaaaatggaactctgttgttcggtgccattaacgtcaacgactctgtcaccaagagcaagttcgacaacttgtatggatgccgtcactcactccctgatggtctcatgagggccactgatgtcatgatcgctggaaagggtgctgttatctgtggatatggtgaatgtggaaagggtagtatcttcatcttgaagtttttcttttataattttattgtttttattattgttcttatttttattcttaaattttttttatttctatttatttttctatttcttttttattttttttttgttattatctgttttttctttttttcttttatctgtcatttatttatctatattttttct

SEQ ID NO: 144376 - DNA, 409 bp, Arabidopsis thaliana
gaaaagaaattgagaagaaaaaagaaaaaaaggtgaccgtattctccgtcgattgtagccgcccgaagaaatatcttctcctctctcgtttaaccacgaatttgctctgatattagtgtttctctagccatggcgaacgcggcatctggaatggctgtgcatgatgattgcaagctgagatttctggaactgaaggctaaaaggacacaccgtttcatagtttacaagattgaggagaagcagaagcaagttgttgttgagaaagttggtcaaccgatccaaacttacgaggagtttgcagcatgtcttccagctgatgaatgtcgttacgccatttacgacttcgactttgtcactgctgagaattgccagaagagcaagatcttctttatcgcgtggtgtccggata

SEQ ID NO: 144377 - DNA, 359 bp, Arabidopsis thaliana
cacacatagcaaaaaatggcaaacaagttgttccttgtctgcgcagctctcgctctctgcttgctcctcaccaacgcttccatctaccgcaccgtcgttgagttcgaagaagatgacgccactaaccccataggcccaaaaatgaggaaatgccgcaaggagtttcagaaagaacaacacctaagagcttgccagcaattgatgctccagcaagcaaggcaaggccgtagcgatgagtttgatttcgaagacgacatggagaacccacagggacaacagcaggaacaacagctattccagcagtgctgcaacgagcttcgccaggaagagccagattgtgtttgtcccaccttgaaaca

SEQ ID NO: 144378 - DNA, 378 bp, Arabidopsis thaliana
aaaatggttgcctaagccgccgcacgacctcttgtcaccgtccaaggacttgacggtgacatgagcaccgatcaatccaccaccgtcactttaccagacgtcatgactgctccagttcgacctgacattgtcaacttcgtccacgcccaaatctccaacaacagccgtcagccttacgcagtctccaaaaaggccggtcaccaaacctccgccgagtcctggggaaccggaagagccgtgtcacgtatccctcgtgttcctggtggtggaactcaccgtgccggtcaagcagcgttcggaaacatgtgtcgtggtggtcgtatgtttgctccgactaagatctggagacgctggcaccgtcgtgtcaatgtcaacatg

SEQ ID NO: 144379 - DNA, 322 bp, Arabidopsis thaliana
ggcgcggggtcacaaacgagtagaatacaaatacaaatagcaaaaaaaatggcaaacaagctcttctcgctgcgcaactttcgccctctgttctcctaccaacgcttcatctaccgactgtgcagttcgacgaagatgacgccagcaaccccatgggcccaagacagaaatgtcagaaggagttagcaatcacagcacctaagagcttgccagaaattgatgcgcatgcaaatgaggcaaggccgtggtggtggccctccctcgcgatgagttcgatttggagacgacatcgagacccacaggcccccacagggcaccagat

SEQ ID NO: 144380 - DNA, 373 bp, Arabidopsis thaliana
gaaaatggttaagctcagcaatctcctcgttgcaaccttcggggttctcctcgtccttaacggctgccttgcgaggcagtcacttggggttcctcctcagctacagaacgagtgtaacctcgacaacctagatgttctccaagccaccgaaactatcaagagtgaagccggtcagatcgagtactgggaccacaaccaccctcagctccgatgtgttggtgtttccgttgctcgttatgtaattgaacaaggcggtctttacttgcccaccttcttcacttccccaaaaattttctacgtcgttcaaggaacgggtattagcggaagagtggttcctggatgggccgagaccttcatggactttcaatccatg

SEQ ID NO: 144381 - DNA, 410 bp, Arabidopsis thaliana
gcctttactctatagttttatatcatatcaatcgacatggcgaatgtggaccgtgatcggcgtgtgcatgtagaccgtactgacaaacgtgttcatcagccaaactacgaagatgatgtcggttttggtggctatggcggttatggtgctggttctgattataagagtcgcggcccctccactaaccaaatcttggcacttatagcaggagttcccattggtggcacactgctaaccctagctggactcactctagccggttcggtgatcggcttgctagtctccatacccctcttcctcctcttcagtccggtgatagtcccggcggctctcactattgggcttgctgtgacgggaatcttggcttctggtttgtttgggttgacgggtctgagctcggtctcgtgggt

SEQ ID NO: 144382 - DNA, 419 bp, Arabidopsis thaliana
gaaccacgccgccgggcacaggtcatagctcaagcattgaaaatgacgttctagtgtttagcagcttcagaaccaacaagacggcagaggatacatcgttcgtgttaagggaaccttccaggtcgcgaggccacctctaagacagccctacgagagcgaggagtggagacacccacgtagcccacaaggcaacggccttgaggagactatctgcagcatgaggtcccacgagaacattgacgaccctgctcgtgctgacgtgtacaagcccagcctaggtcgcgtgaccagcgtcaacagctataccttgcccatcttggagtatgtcaggctcaatgccacctcgtggcgttccccagggtaatgcgatggtgcttcctaaatacaacatgaacgctaacgagatcttgtactgcact

SEQ ID NO: 144383 - DNA, 404 bp, Arabidopsis thaliana
  unsure (1)..(404): unsure at all n locations
nncgcggacacanngacacggactcaggtcctgtggttgcaacaaccaaactcgtcactttcctccagcgtgtgcagcacacggcacttcgatcataccctaaaaaacaaacgcctgatcccaaatcctacattgatctatctctcaaacgtccctacagtctctccaccatcgaatcagccttcgatgatctcacgagcgagtcacatgaccagccagtgccagtggagacgcttgaaaagttcgtcaaggaatattttgacggtgcaggggaggatctgctgcaccacgaaccagtagatttcgtctcagatccctccggctttctctccaacgtggagaacgaagaaatcagagaatgggcgcgtgaggtacacggtctttggagaaatctgagctgcaga

SEQ ID NO: 144384 - DNA, 306 bp, Arabidopsis thaliana
cttacattttgaaaccctaatttctcaaaaaaaattgtctgaagttgagtaccggtgctttgtcggcggccttgcctgggccaccaatgatgaagatcttcaaaggacgttctcacagttcggcgacgttatcgattctaagatcattaacgaccgcgagagtggaagatcaaggggattcggattcgtcaccttcaaggacgagaaagccatgagggatgcgattgaagagatgaacggtaaagagctcgatggacgtgtcatcaccgtgaacgaggctcagtctagaggtagcggcggtggcgg

SEQ ID NO: 144385 - DNA, 379 bp, Arabidopsis thaliana
  unsure (1)..(379): unsure at all n locations
ggttaagctcagcaatctcctcgttgcaaccttcggggttctcctcgtccttaacggctgccttgcgaggcggtcacttggggttcctcctcagctacagaacgagtgtaacctcgacaacctagatgttctccaagccaccgaaactatcaagagtgaagccggtcagatcgagtactgngaccacaaccaccctcagctccgatgtgttggtgtttccgttgctcgttatgtaattgaacaaggcggtctttacttgcccaccttcttcactttcccaaaaatttcctacgtcgttcaaggaaacggtattcagcggaagagtgggtcctggatgtgccgagaaccttatggactcgcagccgatgcaaggacaaca

SEQ ID NO: 144386 - DNA, 385 bp, Arabidopsis thaliana
gaaaatggttaagctcagcaatctcctcgttgcaaccttcggggttctcctcgtccttaacggctgccttgcgaggcagtcacttggggttcctcctcagctacagaacgagtgtaacctcgacaacctagatgttctccaagccaccgaaactatcaagagtgaagccggtcagatcgagtactgggaccacaaccaccctcagctccgatgtgttggtgtttccgttgctcgttatgtaattgaacaaggcggtctttacttgcccaccttcttcacttccccaaaaatttcctacgtcgttcaaggaacgggtatcagcggaagaggggtccctggatgggccgagacctctaatggactcgcagccgatgcaaggacaaca

SEQ ID NO: 144387 - DNA, 363 bp, Arabidopsis thaliana
caaaaagaaaatggttaagctcagcaatctcctcgttgcaaccttcggggttctcctcgtccgtaacggctgccttgcgaggcagtcacttggggttcctcctcagctacagaacgagtgtaacctcgacaacctagatgttctccaagccaccgaaactatcaagagtgaagccggtcagatcgagtactgggaccacaaccaccctcagctccgatgtgttggtgtttccgttgctcgttatgtaattgaacaaggcggtctttacttgcccaccttcttcacttccccaaaaatttcctacgtcgttcaaggaacgggtatcagcggaagagtggtccctgatgtgccgagaccttcatg

SEQ ID NO: 144388 - DNA, 179 bp, Arabidopsis thaliana
gtcaaacgacaattggatgaacctatggataatgagataacttcatacgtggtttttttttggagcttcggttgtatatacttcggtttgatggtatctaaccagttaaaagtatgacgatttgtgttgaaattgtggaaatagttgcttctttttaaaaatattaaatttcaataaat

SEQ ID NO: 144389 - DNA, 383 bp, Arabidopsis thaliana
cggacgcgtgggtcttgatgtcaccaacagagaaaaccagcttgaccaagtccctaggatgtgccaactagccgggagcagaacgcaagaagaagaacaaccattaacgtggccatcaggcaacaacgctttcagcggtttcgacccaaacataatcgcggaagcattcaaaatcaacatcgagacagctaagcaactacaaaaccagaaggacaacagaggaaacataatccgagcaaatggtcctctccatttcgtcatcccaccgcctcgtgaatggcagcaagatggcattgctaatggcatcgaagagacttattgcacggctaagattcatgagaatatcgatgatccagaacggtctgaccattttagcacacgag

SEQ ID NO: 144390 - DNA, 418 bp, Arabidopsis thaliana
gggcggctcacagctccagaaccagcaagaaactcgggcaacatcgtcaaggtcaacggacctttcggcgtcattaggccacccttgagacgcggcgaaggcggccaacaaccacatgaaatagctaatggtttagaggagactttgtgcaccatgcgatgcactgaaaacctcgatgacccgtcggatgctgacgtgtacaagccatcactcggatacattagcacacttaacagctacaatcttcctatcctcagacttctccgccttagcgctcttcgtggctccatccgtaaaaacgctatggtgctaccgcaatggaacgtaaacgcaaacgcggcactctacgtgacaaacggaaaggctcatatacaaatggtgaacgacaacggagaaagagtgttcgaccaagagatct

SEQ ID NO: 144391 - DNA, 365 bp, Arabidopsis thaliana
  unsure (1)..(365): unsure at all n locations
aaacatacacacatagcanaaaatggcanacaagttgttcctcgtctgcgcagctctcgctctctgcttcctgctcaccaacgcttccatctaccgcaccgtcgttgagttcgaagaagatgacgccactaaccccataggcccaaaaatgaggaaatgccgcaaggagtttcagaaagaacaacacctaagagcttgccagcaattgatgctccagcaagcaaggcaaggccgtagcgatgagtttgatttcgaagacgacatggagaacccacagggacaacagcaggaacaacagctattccagcagtgctgcaacgagcttcgccaggaagagccagattgtgtttgccccaccttgaaac

SEQ ID NO: 144392 - DNA, 177 bp, Arabidopsis thaliana
aggctctctattttgggggcgtatatgatacctgtgctccggtatttggggatgtaagaaaaattacaaacgtgactcttagcccaagtgttatatttgattatttactaaaatctcccttaattgtaaaaggatagattgttcctttttgccccaatcctatgcaactgaaaacct

SEQ ID NO: 144393 - DNA, 286 bp, Arabidopsis thaliana
cgtgcgaaatggttaagctcagcaatctcctcgttgcaaccttcggggtttttctcgtccttaacggctgccttgcgaggcagtcacttggggttcctcctcagctacagaacgagtgtaacctcgacaacctagatgttctccaagccaccgaaactatcaagagtgaagccggtcagatcgagtactgggaccacaaccaccctcagctccgatgtgttggtgtttcctgtgctcgttagtaattgaacaaggcggttttatcttgccaaccttcctcattttt

SEQ ID NO: 144394 - DNA, 301 bp, Arabidopsis thaliana
ccagaaggtggaacatgtgagacgcggagacgtctttgccaacactccaggctctgcccactggatctacaactcaggagaacagccacttgtcatcatcgctcttctcgacatcgccaactaccaaaaccaactcgaccgcaaccctagagtgttccatttggccggaaacaaccagcagggaggctttggcggttcacagcaacaacaagaacagaaaaacttgtggagcgggttcgacgcacaggtcatagctcaagcattgaaaattgacgttcagttggctcagcagcttcagaac

SEQ ID NO: 144395 - DNA, 290 bp, Arabidopsis thaliana
caaaaagaaaatggttaagctcagcaatctcctcgttgcaaccttcggggttctcctcgtcctgaacggctggcttgcgaggcagtcacttggggttcctcctcagctacagaacgagtgtaacctcgacaacctagatgttcttcaagccaccgaaactattaagagtgaagccggtcagatcgagtactgggaccacaaccactctcagcttcgatgtgttggtgtttacggtgctcgttattgttaattgacaaggcggtctttactagcccaccttctttcacttt

SEQ ID NO: 144396 - DNA, 421 bp, Arabidopsis thaliana
atttgaaagggtatatatctcacacacaaaacatatcagaagctaaaaggtaataatataatggcggatttgagggacgaaaaaggtaatccgatccatctaactgacacacagggaaacccaattgtcgacctgactgatgagcacggtaaccccatgtacctaaccggtgttgttagctccactcctcagcataaggagagtactaccagcgacattgcagagcaccctactagcaccgttggagaaacacatccggcagctgctccagctggtgctggtgctgccaccgctgccactgcgacaggagtctctgctggtactggagcaaccaccacagggcagcaacaccatgggtcgcttgaagagcatcttcgtcggtctggaagttcatctagctctagctcggaggatgatgggc

SEQ ID NO: 144397 - DNA, 371 bp, Arabidopsis thaliana
atacacaagtaattaactaacaacaaatggcgaacaagctcttcctcgtctgcgcagctctcgccctgtgtttcatcctcaccaacgcttccgtctatcgcacggttgtcgagttcgacgaagatgacgccagtaaccccataggcccaatacagaaatgtcagaaggagtttcagcaagaacagcacctaagagcttgccagagatggatgcgcaagcaaatgtggcaaggacgtggtggtggtccttccctcgacgatgagttcgatatggaagacgacatcgagaacccgcagagacgacagctactccagaagtgctgcagcgagctttgccaagaagaggccagttggcgtttgcccacccttgag

SEQ ID NO: 144398 - DNA, 403 bp, Arabidopsis thaliana
  unsure (1)..(403): unsure at all n locations
cctgtggagaacattaaaaacgaaatctagtgtttatttatctatcgcccttgggtcttttcgtattacgagattcccattacttctaaattccattcattctttttttctttcttccacacagattcgtaacgagttcttcattttcatatatctccgnttctggtttttttttttccctttcaagtttcaattttttcttctgggtttttcatttggtgattaaacgtttgcattagacgaatcctgtattgttccaagagtcaaaaccatgtccgatggatacatcaattcgaagaagactgatgatatttgcgaagatgtctgtggacagggatcaaaagcagcaaaaacaatctcaaggctaaaatgtgtacttaaaggttttgatttaagaacatac

SEQ ID NO: 144399 - DNA, 267 bp, Arabidopsis thaliana
  unsure (1)..(267): unsure at all n locations
acccacgcgtgcgcaggtnattaactaacaacaaatggcgaacaagctcttcctcgtttgcgcagctctcgccctgtgtttcatcctcaccaacgcttccgtctatcgcacggttgtcgagttcgacgaagatgacgccagtaaccccataggcccaatacagaaatgtcagaaggagtttcagcaagaacagcacctaagagcttgccagagatggatgcgcaagcaaatgtggcaaggacgtggtggtggtccttccctcgacga

SEQ ID NO: 144400 - DNA, 431 bp, Arabidopsis thaliana
  unsure (1)..(431): unsure at all n locations
accgnngcggaganccaggcgtgcgcctcatttgattacttgtttctttgatttctccttccgcagaacctaattgttttcagtctgagatttctcctgccgagagaacgattttaatctattttcctcgagagtagaaaatggctgatggtgaagatattcaaccccttgtctgtgacaatggaactggaatggttaaggctggttttgctggggatgatgcaccgagggctgtgtttccaagtattgttggccgtcctcgccacactggagtgatggttggaatgggacagaaggatgcatatgttggcgatgaagctcaatccaagcgtggtattcttacccttaaataccctattgagcacggtattgtcaacaattgggatgatatggaaaaaatctggcatcatactttctacaatgagctccgt

SEQ ID NO: 144401 - DNA, 318 bp, Arabidopsis thaliana
ctcgttgcaaccttcggggttctcctcgtccttaacggctgccttgcgaggcagtcacttggggttcctcctcagctacagaacgagtgtaacctcgacaacctagatgttctccaagccaccgaaactatcaagagtgaagccggtcagatcgagtactgggaccacaaccaccctcagctccgatgtgttggtgtttccgttgctcgttatgtaattgaacaaggcggtctttacttgcccaccttcttcacttccccaaaaatttcctacgtcggtcaaggaacgggtatcagcggaagagtggtccctggatgt

SEQ ID NO: 144402 - DNA, 369 bp, Arabidopsis thaliana
  unsure (1)..(369): unsure at all n locations
cattattatagaattgaaagaccacaccggatctatgctaagatcatttatttacaacggaatggtatacaaagtcaacagatcgtaatgaatacaaaataagatttatggctacacaaactgttgaagatagttctagatctggtccaagaagcactactgtagggaagttattgaaaccattgaattccgaatatggtaaagtagctcccggatggggaacgacccctttgatgggtgttgcaatggctctatttgcggnattcctatctattattttggagatttataattcttctgttctactggatggaatttcagtgaattagactgagaagaatcttgaagttctagcttttagctcgatac

SEQ ID NO: 144403 - DNA, 285 bp, Arabidopsis thaliana
gtcaaagatcaggagtttattgagacaaccagtgagcctggtttaacattcctggtggctaagtttgatggtcttcttggtcttgggttccaagagatcgctgttggaaacgctactcctgtttggtacaatatgctcaagcaaggccttataaagaggccggtcttttcattttggcttaaccgtgatccaaagagtgaagaaggcggtgaaatcgtattcggaggtgttgatccaaagcattttataggagaacatacatttgttcctgtgacacaaaggggt

SEQ ID NO: 144404 - DNA, 417 bp, Arabidopsis thaliana
agcaaatgtggcaaggacgtggtggtggtccttccctcgacgatgagttcgatatggaagacgacatcgagaacccgcagagacgacagctactccagaagtgctgcagcgagcttcgccaagaagagccagtttgcgtttgccccaccttgagacaagctgccaaggccgttagattccagggacagcaacaccaaccagagcaagtcaggaaaatttaccaggcagctaagtacttgcctaacatttgcaaaatccagcaagttggtgtttgccccttccagatcccttcaatcccttcttactactaaattccaaacaagtgtgagcgtgtggttgttgatatatgttaacaccacatctcgccttgtgtttttataaaaaaataagctttgggatgtttgaggctaatgtaat

SEQ ID NO: 144405 - DNA, 407 bp, Arabidopsis thaliana
  unsure (1)..(407): unsure at all n locations
ggatcgcttccgttcaatgtaacccgaaacagagcaatctgaaattatcttagggctatggggatggatattttcatggatttcttcaataaaccttctgttacagagacattcgtcgacgttttgctatgtgtagttccgatttgggtcgctgttatgatcgggcttctgatcggttggtcttggcgtcctagatggactagcttggtttatttaggtttccgttctaagcttcggtttctatgtactgttcctcctggatttggtgctcgtcgtattaggcttgctttcaccgctctctttgctttttccggtcgttcaagactcggtccaacctccaataaatcctcggntaatgacggtttctctaaaccggtcgaagaagaagcattttcacgagctagtgt

SEQ ID NO: 144406 - DNA, 413 bp, Arabidopsis thaliana
gttgcagtttttttcatgcaaaccaaaatatacattcctctcctctcttcttctacttttgcttcggtcttcttcagtagctgagctctctttcaacttctacgccggttcttgtcctggagctgagttaatcgtcagaaacaccgttagatctgcttcttcctctgatccatcagtccttgggaagctcctacgtctcatcttccatgactgcttcgtccagggttgtgatggctcagtgttgattcgaggaaacggtacagagcgaagcgaccctgggaatgcgtctctaggaggattcgctgttatagaaagcgtcaaaaatatcctcgaaatcttttgtcccggcacagtctcttgtgctgatatacttgttcttgccgcaagagatgcagtagaagctctcggaggac

SEQ ID NO: 144407 - DNA, 414 bp, Arabidopsis thaliana
gtgagagaagaaagatagagaaaaaaaatgggaggcaaaggtgtgatgatggtggcgatactttgcctttgggcactctctgcaacatctgaagcagtaacagaggctgagccaggtttgatgatgaacttctacaaggacacgtgtcctcaggccgaagacatcgtccgtgaacaagtcaaactcctctacaaacgccacaagaacaccgctttctcttggctccgtaacatcttccatgactgcgccgttgagtcatgtgatgcgtcgcttttgctggattcgacaagaagagagctaggagagaaagaacacgacaggagcttcggacttagaaactttaggtacatcgaggagatcaaggaagctctcgagagggagtgtcctggtgttgtctcatgttctgacattctc

SEQ ID NO: 144408 - DNA, 404 bp, Arabidopsis thaliana
aagaaaaatgggtcgagtctcatctattatctctttctctttgacactcttgatcctcttcagggggtacactgcccaacagtggcccaacgagtgccagctcgatcaactcaatgcgctcgaaccatcccaaatcatcaagagcgagggtggtcgcatcgaggtctgggaccaccatgcaccccagctccgttgctccggctttgcctttgagcgtttcgtcattgagcctcagggtcttttcttgcccactttcttgaacgccggcaaactcacgtttgttgttcacggaaggggtctaatgggaagagttatttcgggatgcgccgagacgttcatggagtcaccggtatttggagaaggtcaaggtcagggtcagagtcaagggtttcgtgacatgcacc

SEQ ID NO: 144409 - DNA, 420 bp, Arabidopsis thaliana
caagaattctacatggaaaaacaatcctaatctaagtatctaccattgcctacagtattttcccaggttcctacatgaaaagactcgttacaaattcgttttcctacatctattaacgctattagccatacatcactagggaacaagccattagtgctaaaactccaacagacgcttgaaaggctccaaatgtcagaccctccaaacaaatatctagaaccatgcagcccttcacagttagactaaataccatgtcaaaaatttaatacaactgtcacctagggatgcttcttccatcgagggcaagttttgcagcggttgcagtttctgcatcagtaaattgaaccagtgcctacgagcaagtcagacagtaaacattttaagtataatagatattaacaataaaatacaaagcaaaat

SEQ ID NO: 144410 - DNA, 410 bp, Arabidopsis thaliana
attattttcactgagcgcataacatttttgagacaagagactctctctctctctcttcgctgggtctctccccctctctccggcgatggttgttgctatggaccaacgcaccaatgtgaacggagatcccggcgccggagaccggaagaaagaagaaaggtttgatccgagtgcacaaccaccgttcaagatcggagatataagggcggcgattcctaagcactgttgggttaagagtcctttgagatcaatgagttacgtcgtcagagacattatcgccgtcgcggctttggccatcgctgccgtgtatgttgatagctggttcctttggcctctttattgggccgcccaaggaacacttttctgggccatctttgttctcggccacgactggggacatgggagtttct

SEQ ID NO: 144411 - DNA, 403 bp, Arabidopsis thaliana
atagatatcttagtggcgagagagggagatagcggaattgataacaataagcatgagtaagagcactgcgcagaaagaaccgatgagagatcccgagatgcgttcacagaatccgtcaaattgctggcagatcggtggccaattagcagttgtgttcccctcgtgagctaaatacacggtggctgttgctgcagatgctccagagctaaccaaagccagcatcacctgattatatatagaaaccataaatcccaacacttttgagtggtcaaatttaaaattatatatgggttttcattaaaatgttatctttcttgggtcacaagttagttggatatttggtgccctgttttgttctcttaaagagggagatatttaccgtgtcgacaacgagcaagatgat

SEQ ID NO: 144412 - DNA, 413 bp, Arabidopsis thaliana
cttcttccttcttcctcttttattataagaagagaaagaaaaaaacatcatcttttttggctggaataacagagcgattgctcttatctcagttgattggccatggcttcttcagtcgtcttcgcggcaactgggtttctctccgttcctccattgaagtctcggagattctatgttaattcttcactcgactccgatgtttccgacatgagtgttaacgctccaaaggggttatttcctccagagcctgtaccatacaagggacctaagctgaaagtagccattataggagctggacttgcaggcatgtcgactgctgtagagcttctggatcagggtcacgaggtggatatatatgattcgaggacattcattggtggcaaagtgggttctttttgtagatagacgtggga

SEQ ID NO: 144413 - DNA, 429 bp, Arabidopsis thaliana
gcccaacagtggcccaacgagtgccagctcgatctactcaatgcgctcgaaccatcccaaatgatcgggagcgagggtggtcgcatcgaggtctgggaccaccatgcaccccagctccgttgctccggctttgcctttgagcgtttcgtcattgagcctcagggtcttttcttgcccactttcttgaacgccggcaaactcacgtttgttgttcacggaaggggtctaatgggaagagttttttctggatgctcctagactgttttggatttacctggttttttagaatgtttaggttattggtcatttgtttagggtttttgtgtttttccacttttaagttatatcttcttattttgtgtgattctttttattttttatctttttttttttattttatttttgcttctttttattttattttttatt

SEQ ID NO: 144414 - DNA, 413 bp, Arabidopsis thaliana
agaaaacatacacaaatagcaaaacatggctaacatgctcttcctcgtctgcgcaactcgcgggctctgcttcctcctcaccaacgcttccatctaccgcaccgttgtcgaattcgaagaagatgacgccagcaaccccgtaggtccaagacagagatgccagaaggagtttcagcaatcacaacacctaagagcttgccagagatggatgagcaagcaaatgaggcaaggacgtggtggtggtccttccctcgacgatgagttcgatttcgagggcccccagcagggataccagctactccagcagtgctgcaacgagcttcgccaggaagagccagtttgcgtttgccccaccttgaaacaagctgccagggcagttagccttcagggacagcacggaccattccaatcca

SEQ ID NO: 144415 - DNA, 415 bp, Arabidopsis thaliana
cggacgcgtgggcgacaatggtaacagagtgtttgacggacaagtctctcaaggacagctcagagccgtaccacaaggtttctcggtggtgaaacgcgcaacaagcaaccgattccagtgggttgagttcaaaacaaacgctaacgcgcaaatcaacactctggcgggacgaacctcagtcttgagaggtttaccacttgaagtcataaccaatgggttccaaatctcacccgaagaagcaaggagggtcaagttcaacacgctcgagaccactttgactcacagcagtggcccagctagctacggaaggccaagagtggctgcagcttaagagcttaaaaccgcggcttaacaatgaaccgctactgtaaaaggaagttaaatagtacgtagtaattataataatgtacgaaaa

SEQ ID NO: 144416 - DNA, 411 bp, Arabidopsis thaliana
gaaaaacttgtggagcgggttcgacgcacaggtcatagctcaagcattgaaaattgacgttcggttggctcagcagcttcagaaccaacaagacagcagaggaaacatcgttcgtgttaagggacctttccaggtcgtgaggccacctctaagacagccctacgagagcgaggagtggagacacccacgtagcccacagggcaacggccttgaggagactatctgcagcatgaggtcccacgagaacattgacgaccctgctcgtgctgacgtgtacaagcccagcctaggtcgcgtgaccagcgtcaacagctataccttgcccatcttggagtatgtcaggctcagtgccacttgtggcgttcttcatggttatgcgatggtgcttcctaaaaacaacattaacgctta

SEQ ID NO: 144417 - DNA, 351 bp, Arabidopsis thaliana
catgattgagaggtcaaccaaccttgactggtacaaggtaccaactcttcttgaggctcttggccggatcaacgagcccaagaggccatcagacaagccccttcgtcttccacttcaggatgtctacaagattggtggtattggaacggtgccagtgggacgtgttgagactggtatgatcaagcctggtatggttgttacctttgctcccacagggttgaccactgaggttaagtctgttgagatgcaccacgagtctcttcttgaggcacttcccggtgacaatgttgtattcaatgtcacgaatgttgctgttcaatgatcttaatagaggatacgctgcctctaact

SEQ ID NO: 144418 - DNA, 382 bp, Arabidopsis thaliana
cgaaaggaaaagcatgtttaaactctgtctcgttctcgtcttggttattgcagtagatgcaggtccggttaagtccggttcttgtagttgctccgggaatatatcagcgagcgatgtcgatcgagttcatttcgcgatgaacttggagttcaccgaggcggagttcttcttgaaaggggctaccggaaaaggacttgatgcctataacgcgacacttgctaaaggcggaccaccgtcggtaggggccaagaaagccaaccttgatcctataactaaccgaatcatcgaggagtttggttatcaagaaatcggtcatcttatggcgattacggatatgactggaggaattccacgtccgctaataaatctgacgagagagaat

SEQ ID NO: 144419 - DNA, 349 bp, Arabidopsis thaliana
cacatagtataaaatggcaaacaagttgatccttgtatgttcaactctcgctctctgcttgctgcgggcaacgcttacatctaccagacctccgatgagctcgaacaaaatgacgccactaaccccatagtcccaaacatgatgtaatgccccaaggagcactatagcgaaccacacctaagatcttgccggctatccactctacatcatgaacagcagggtccaaatcttatccttagaatccaggacggccaagattaacacgcttgacaccactttgacccacatctattccaataatgctgcaacgagctttgccaggaaaagccatattgtgttttccccacct

SEQ ID NO: 144420 - DNA, 414 bp, Arabidopsis thaliana
cttattgacacataaacatggaccggtccacttttatcttatctctactcttcacactcaccgtggggactacgaccctcttctctccggttttcgcaggaacgttcgacacagaattcgatatcacttggggtgatggtcgtggcaaggttcttaacaacggagagcttctcactctctccctcgacagagcctccggctctggttttcaaaccaagaaagagtatttgttcgggaaaatcgacatgcagctcaaactcgtccctggaaactccgccggaaccgtcactgcctactacttgaagtcaaaaggtgatacgtgggacgaaatcgatttcgagtttcttggtaatctaactggtgatccgtataccatgcatacgaatgtgtatactcaaggcaaaggtgatagag

SEQ ID NO: 144421 - DNA, 402 bp, Arabidopsis thaliana
gaagtcttgtctagctacttttgctctcgcagtgttagtaacacaaggaagcatttttagttggtgtttggcctcctctgcttctacaaactctgttcctaattggtttcatcattggccgccgtttaaatggggaccaaaatttccatattctccacctaaaccgccgccaatcgagaaatatcctccaccggtgcagtatccaccaccgatcaagaagtatccaccgccaccatacgagcatccaccggtgaagtatccaccaccgatcaagacttaccctcatccgccggtgaagtatcctccaccagaacagtatccaccgccgattaagaagtatcctccaccagaacagtatccaccgccgattaagaagtatcctccaccagaacagtattcacc

SEQ ID NO: 144422 - DNA, 332 bp, Arabidopsis thaliana
ggaggtcatatcaaatggtttccagatctctccctaggaagctaggaagatcaagttcagcgggcttgagaccactttgacccgcgctgccggtaggcaacaacaacagttgatcgaggagattgtcgaggcttaaatcaaaacgtttttctttttcttaataaagtatggtcagtttgtaatcacgtccctttacctttaacgtacgtgtaaaatatgtgtctgcggcacctcacttgtaataacactttcttctcataaataaaagggaagtttcgagtttaataatacaaaaaataaataattaatagaacatattatttaaaataatt

SEQ ID NO: 144423 - DNA, 376 bp, Arabidopsis thaliana
aaaacatacacacatagcaaatatatggcaaacatgttgttcctcgtctgcgcagctctggctgggttctttctcctcaccaacccttccatctaccgcaccgtcgttgagttcgaagatccttcaagccctacttctataccaatcataatccatatataccttatgctgtttagtattaccacactttttacaataaatctttttcttcttctgtccttttttctatgttctaatttttaatatgttcatagtccttcgtctcctttgcgtcagtggcctactatatcttcaaggttcacgatgtaaactttttttctttcggtcccccttcattctaggagtcacttcttgttcggatctttccagctttatc

SEQ ID NO: 144424 - DNA, 379 bp, Arabidopsis thaliana
gatcaacgttgaatttcaaaactgtttcatcttcatgctcttatgtctcttctcactcctcggggctctctgctcttcaggaaaccaagctcaagacaaaactcctatgactgtgatctgcctccaagccctccttctatgccaatcatcggccatcttcaccttatgctctcttctcttgtccacaagtcttttcaaaaaatctcctccaagtacggacctctcctccatctccgcatcttcaacgtccccatagtcctcgtctcctctgcgtcagtggcctacgattatcttcagggtgcacgatgtaaacgtctcttctcgcggtccccctccattcgaggagtcactcttgttcggatcttccagcttcatcagc

SEQ ID NO: 144425 - DNA, 397 bp, Arabidopsis thaliana
cacaactggtcacttgatctataagcttggtggtattgacaagcgtgtcatcgagaggtgcgagaaggaggctgctgagatgaacaagaggtccttcaagtacgcatgggtgttggacaaacttaaggccgagcgtgagcgtggtattaccatcgatattgctctatggaagttcgagaccaccaagtactactgcacagtcattgatgccccaggacatctgtgattcatcaagaacatgattactggtaccttccaggctgattgtgctgttcttatcattgactccaccactggaggttttgaggctggtatctctaaggatggacaaacccgtgagcacgctcttttttgctttcacccttggtgtcaagcagatgatttgctgttgttacat

SEQ ID NO: 144426 - DNA, 415 bp, Arabidopsis thaliana
cgaaagctctcttcctttccctttttggcgctcaatacaatcatgacgttagagagttacgcgggcgatgttcacacggtaccacaatcggagaactcgatggaggagagaggcggcggtgagcttttcgtgccacctcttaacttcgctatggtcgataatggaattttccgttctggttttcctgaacccgtcagtttcagctttctccagtctttgcgtctcaaatccatcatatatttgtgtcctgaggcatatccagaggtgaatagagagtttgcaaaatcaaatgggatccaagtttttcaatttggaattgaaagatgcaaggaaccatttgttaatatccctgacgaggtaatccgagaagccttacaagtacttctagatacagagaatcatcctgtcttgattc

SEQ ID NO: 144427 - DNA, 414 bp, Arabidopsis thaliana
cacaattcctctttcacaatctttctttcgattttttagcttaatcctgagtagcgttaacgggggctggtaaaggagaaggtccagcgattggtatcgatctcggtaccacttactcttgcgttggagtttggcaacacgaccgtgttgagatcattgctaatgatcaaggtaacagaaccacaccgtcttacgtcgccttcactgatagcgaacggttgattggtgacgccgcaaagaatcaggtcgccatgaacccgattaacactgttttcgatgcgaagaggttgattggtcgaagatttactgatagctctgttcaaagtgacatcaaattgtggcccttcacgctcaaatctggacctgctgaaaaaccaatgatcgtcgttaactacaagggagaagataaagagt

SEQ ID NO: 144428 - DNA, 412 bp, Arabidopsis thaliana
caaacgcgaacgctattctttacgtgacagacggtgaagcccaaatccagatcgtaaacgacaatggtaacagagtgtttgacggacaagtctctcaaggacagctcatagccgtaccacaaggtttctcggtggtgaaacgcgcaacaagcaaccgattccagtgggttgagttcaaaacaaacgctaacgcgcaaatcaacactctggcgggacgaacctcagtcttgagaggtttaccacttgaagtcataaccaatgggttccaaatctcacccgaagaagcaaggagggtcaagttcaacacgctcgagaccactttgactcacagcagtggcccagctagctacggaaggccaagagtggctgcagcttaagagcttaaaaccgcggcttaacaatgaaccgctac

SEQ ID NO: 144429 - DNA, 415 bp, Arabidopsis thaliana
cagcatcccgattttggagcgtgttaagaggcctttagagaaagctctctctgatgcgggccggactgttgaagatgtacatatggtcgaggttgtcggctctggctctcgtgtccctgctatgatcaagattctaactgagttttttggtaaggagcccaggcgtacaatgaatgcaagtgagtgtgtgtcgaggggatgtgccttgcagtgtgccattctcagtccgacctttaaagttcgcgaattccaggttcatgagagcttccctttctcaatatcgcttgcttggaaaggagcagcgactgatgctcaaaatggaggaactgagaaccagcagagcactattgtttttccgaaaggaaatcctattcctagtgtcaaggctctaacattttatcgttctggaacattc

SEQ ID NO: 144430 - DNA, 447 bp, Arabidopsis thaliana
  unsure (1)..(447): unsure at all n locations
cgatagctttcaagcattgaaaatntgacgttcagnttggcttcagcnagcttcagancccccaacaagacagcggagaggaaaccatcnngttcgtgttaaggggacccctttccaggtcgtgagggcccacctctaagacnagccctacgagagtcgaggagtggagacanccctacgtagcccacagtggcnnaacggccttgagggagaactatctgcagcatgangggtcccacgagaacatnttgacgaccctgctcgtgctgacgtgtacaagcccagcctaggtcgcgtgaccagcgtcaacagctataccttgcccatcttggagtatgtcaggctcagtgccactcgtggcgttctccagggtaatgcgatggtgcttcctaaatacaacatgaacgctaacgagatcttgtactgcactggaggacaaggaaggat

SEQ ID NO: 144431 - DNA, 253 bp, Arabidopsis thaliana
ctcccgaggaagctaggaagatcaagttcaacacacttgagaccactttgacccgcgctgccggtaggcaacaacaacagttgatcgaggagattgtcgaggcttaaatcaaaacgtttttctttttcttaataaagtatggtcagtttgtaatcacgtccctttacctttaacgtacgtgtaaaatatgtgtctgcggcacctcacttgtaataacactttcttctcataaataaaagggaagtttcgagtt

SEQ ID NO: 144432 - DNA, 188 bp, Arabidopsis thaliana
ataaggtgtaacatgtgagactcgtatacatttttgccaacactacatgctctgcccaggggggctactattaacgataacagccacttgtcatcatcgttcttcttaacaacaccaactaccaaatctaactctaccgcaaccctatagtgttccattttttctaaatcaaccatttttgtgacatt

SEQ ID NO: 144433 - DNA, 415 bp, Arabidopsis thaliana
cctttctctatttatctctctatacacaacaatggcggtcttcgttttatctctactcatactctgttccttctcagccattccattcacttatgcagattctggaatgatcggagttaactacggccgtatagcagacaatcttccggcaccggagaaagtagttgagctactgaaaacacaaggaatcaaccgcatcaagctttacgacaccgagacaactgtactaaccgcactcgcgaactccggaatcaaagtcgttgtctctctccccaacgaaaacctcgcttccgccgccgcagatcagagctacaccgacacttgggttcaggacaacataaagaagtacattccagcgacggatatcgaagcaatcgctgtcgggaacgaagtgttcgtcgatccgaggaacacg

SEQ ID NO: 144434 - DNA, 417 bp, Arabidopsis thaliana
aactcaggagaacagccacttgtcatcatcgctcttctcgacatcgccaactaccaaagcgcggcgtcgaccgcaaccctagagtgttccatttggccggaaacaaccagcagggaggctttggcggttcacagcaacaacaagaacagaaaaacttgtggagcgggttcgacgcacaggtcatagctcaagcattgaaaattgacgttcagttggctcagcagcttcagaaccaacaagacagcagaggaaacatcgttcgtgttaagggacctttccaggtcgtgaggccacctctaagacagccctacgagagcgaggagtggagacacccacgtagcccacagggcaacggccttgaggagactatctgcagcatgaggtcccacgagaacattgacgaccctgctcgtgctg

SEQ ID NO: 144435 - DNA, 409 bp, Arabidopsis thaliana
gttctacaacgacggacaggaaccacttgtcatcgtcagcgtcttcgatctagccagtcacgggaaccagcttgaccgcaacccaaggccattttacttagccggaaacaacccacaaggtcaagtatggctacaaggccgagagcaacagccacagaagaacattttcaatggatttggacccgaggttattgctcaagctttgaagatcgatcttcagacagcgcagcaacttcagaaccaagatgacaaccgtggaaacattgtccgagtccaaggcccgttcggtgtcattaggccgcctttgaggggccagagacctcaggaggaggaagaagaagaagaaggacgacatggacgacacggtaatggcttagaggagaccatctgcagcgccaggtgcaccgat

SEQ ID NO: 144436 - DNA, 414 bp, Arabidopsis thaliana
aagaaaacatacacaaatagcaaaacatggctaactagctcttcctcgtctgcgcaactctcgccctgtgcttcctcctcaccaacgcttccatctaccgcaccgttgtcgaattcgaagaagatgacgccagcaaccccgtaggtccaagacagagatgccagaaggagtttcagcaatcacaacacctaagagcttgccagagatggatgagcaagcaaatgaggcaaggacgtggtggtggtccttccctcgacgatgagttcgatttcgagggcccccagcagggataccagctactccagcagtgctgcaacgagcttcgccaggaagagccagtttgcgtttgccccaccttgaaacaagctgccagggcagttagcctccagggacagtacggaccattccaatcca

SEQ ID NO: 144437 - DNA, 411 bp, Arabidopsis thaliana
cgaatctctctccaccatcatcacctttctccttcacttgcctcagatctggctgcgattggagaggcttccttagtttctctcgcatcgctcggccgttgacggtcccgtcctttccgtggatctgattctggccccggattctctcgccgcgatctgaggtcaaacatggcggctgctaacgcgcccatcattatgaaggaggtcctaacgcttccgagcgttgggatcggtcaacagttcatcacctttacaaatgttactatggagtctgataagtacatatgtgtacgagagactgcaccgcagaacagtgttgtaattatcgatatgaatatgccgatgcagctcttaaggaggcctataactgctgattctgctcttatgaacccaaacttcgggttccttgcc

SEQ ID NO: 144438 - DNA, 417 bp, Arabidopsis thaliana
agaaaatggttaagctcagcaatctcctcgttgcaaccttcggggttctcctcgtccttaacggctgccttgcgaggcagtcacttggggttcctcctcagctacagaacgagtgtaacctcgacaacctagatgttctccaagccaccgaaactatcaagagtgaagccggtcagatcgagtactgggaccacaaccaccctcagctccgatgtgttggtgtttccgttgctcgttatgtaattgaacaaggcggtctttacttgcccaccttcttcacttccccaaaaatttcctacgtcgttcaaggaacgggtatcagctgaagagtggtccctggatgtgccgagaccttcatggactcgcaaccgatgcaaggacaacaacaaggccaaccatggcaaggacgacagggac

SEQ ID NO: 144439 - DNA, 413 bp, Arabidopsis thaliana
ggcggccaacaaccacatgaaatagctaatggtttagaggagactttgtgcaccatgcgatggacggaaaacctcgatgacccgtcggatgctgacgtgtacaagccatcactcggatacattagcacacttaacagctacaatcttcctatcctcagacttctccgccttagcgctcttcgtggctccatccgtaaaaacgctatggtgctaccgcaatggaacgtaaacgcaaacgcggcactctacgtgacaaacggaaaggctcatatacaaatggtgaacgacaacggagaaagagtgttcgaccaagagatctccagcggacagttactagtcgtgccacatggcttttcggtcatgaaacatgccataggcgaacagttcgagtggatcgaattcaagacaaacga

SEQ ID NO: 144440 - DNA, 415 bp, Arabidopsis thaliana
cgacgacggcaatggcgtcagcttccaagaacattcagtaaaaccctttctcctcgaaaccaccagggactccgtattcctccggcgctgcatcaacaaccgccgtggcttccacctcagccgagcccctaattcgaaactctaccttaaatcctaaccctagcaccagcggcttaccgtcgacatcgaattcaccgattacgatgtcacaagaagatgaaatcctcgcacgctccagtcacataacccggtcggagcttctcaaacgccgatcacacaacctgaagcagctggccaagtgttatagagacaattattgtgctttaatggaggatgtcaaggcacaacacagggattattggtggaagtatgggattagtcagtttaaagacgaaaataatcaatcgaattagag

SEQ ID NO: 144441 - DNA, 411 bp, Arabidopsis thaliana
agcagaggtcatgttgaggaaaagaaataaaagaaagaagtaagagagatgtgcatttacattggtgacgaagaagagtcaatcatcaaaaggagaaatcttgacgaaaacattgacattaagatcacaatatgaagatgtcaattagcaaggtcaagagcatgttctgcacaaccttaacaaagtcaatgccagccattgccttctttgggagaatggcattttcctttgtctttttcattactgcaatccaagattatgctgatcattatggcggtggagctggcgggccactcgagaagacgatgggaccagccgtgaacatgttgagcaaatatggttctaaggctctcacattttactttggaatgcaagtggtcgcattcgatgttagacttattgagttcgcac

SEQ ID NO: 144442 - DNA, 408 bp, Arabidopsis thaliana
cttagacttatctctatatacccccttttaatttgtgtgctcttagcctttactctatggtgttatatcatatcaatcgacatggcgaatgtggaccgtgatcggcgtgtgcatgtagaccgtactgacaaacgtgttcatcagccaaactacgaagatgatgtcggttttggtggctatggcggttatggtgctggtactgattataagagttgcggtccctccactaaccaaatcttggcacttatagcaggagttcccattggtggcacactgctaaccctagctggactcactctagccggttcggtgatcggcttgctagtcttcaaactcttctttctcctcttcagttcggtgatagtcttcggcggtttttactattgtgcttgctttgacaggaatttt

SEQ ID NO: 144443 - DNA, 415 bp, Arabidopsis thaliana
aaaaaaaacaaaaaaagagggatgcaacacgaggacttcccgggaggtcacccatcctagtactactctcgcccaagcacgcttaactgcggagttcttatgggatccggtgcattagtgctggtatgatcgcatccgttagtatatgcaatgcaatcgtatatattctttttttaagtcttgatgaaccgttcgccgtgggtcccacccgccatgtagggataccccatctagtcttaacgagctttgatgcatgaaaaatattcgaaaacaatgcttgaaagagtaattttgggtccgtaatatagcacaaatcacgaaaatgcccgaaaaagtacttaaaggtcaaaatttggagtcgacaaaaagtcaatggaaaagttccattgtcttgcttctttcgtcggagggctct

SEQ ID NO: 144444 - DNA, 415 bp, Arabidopsis thaliana
gataaaagccattttgatttgtcgttttaatgccttccatttttaaaaagaaagattactagcgccgactctctaaaactctctcaaaccataaaaaatattctccgatcatcattttaatggagagtacagattcttccggtggtcctccgccgccgcaaccaaacctccctccaggattccggtttcatccaacagacgaagaacttgtaattcattacctcaaacgcaaagcagattctgttcctttaccagtcgcgatcatcgccgacgttgatctttacaaatttgatccatgggaacttcccgcgaaagcttcgtttggagaacaagaatggtattttttcagtccaagagatcggaaatatcccaacggagctagacctaaccgagctgcgacttccggttattggaa

SEQ ID NO: 144445 - DNA, 415 bp, Arabidopsis thaliana
gggaaatattgaatgaattgattgtaaattataagatttttttaattgttttccttgaaaagaggatcctaatcttagggaaaatggaatttcgacaatcactgcaaataaaacagatatcatttgataatagaaaagactggtatgccccaaaaaggaattttggttcacatccttagtgggaataatcaaacgattctgttcatacattcgcaaaattaagcgtttcgtaattagtgaactatattttttgtcataatccgcattttccaagaaaatatagcgatttctatttaatctatttaaaccatgatcataagcaagtacataaatatactcccgaaaaaaaagtggatatagaaaactctgttgccgagccccatcgaactctaaatatccttgaaatttatccatt

SEQ ID NO: 144446 - DNA, 415 bp, Arabidopsis thaliana
ggcaaatcaagtcatttcattttctacaagaacggatctagctagcatacactaagactcattgataaatatgtaatcatgctaaagaccctagctttaccagcccaatgtgatagtagctagacagagacaaacgtttaatctcacacacattcacatgtaacatgcacacaaatcaaaacccattttcccaaaagcatcagaaagacacgagaaagagacagtagagacaaaaaaagagagaccttcatcgcaaccaggtgtgcattcgcaggtgatttcaaggtcaccggtggggaaaaccctaagtctagcaacagcatcgccgtatcggtgactggtacaaccacacatgacctcaacgtaatcgccaccaacattgaccccactcatctcttgtagctcctcttgctta

SEQ ID NO: 144447 - DNA, 417 bp, Arabidopsis thaliana
cgcggagacgtctttgccaacactccaggctctgcccactggatctacaactcaggagaacaggcgcttgtcatcatcgctcttctcgacatcgccaactaccaaaaccaactcgaccgcaaccctagagtgttccatttggccggaaacaaccagcagggaggctttggcggttcacagcaacaacaagaacagaaaaacttgtggagcgggttcgacgcacaggtcatagctcaagcattgaaaattgacgttcagttggctcagcagcttcagaaccaacaagacagcagaggaaacatcgttcgtgttaagggacctttccaggtcgtgaggccacctctaagacagccctactagagcgaggagtggagacacccacgtagcccacagggcaacggccttgaggagactatc

SEQ ID NO: 144448 - DNA, 390 bp, Arabidopsis thaliana
aagaaagagtttttttaactagcttagctcaaagtgtttgcttaagacaagaagaacatggcgtcgtaccagaaccgtccaggaggtcaggccactgacgagtacggaaacccgatccagcagcagtatgacgagtacggaaatccgatgggaggaggaggatacggaactggtggtggtggaggagctacaggtggccaaggatacggaacaggtggccaagggtacggatcaggtggccaagggtacggaaccggtggccaaggatacggaaccgggaccgggactgaaggctttggaactggcggaggagctaggcaccacggccaagagcaactccacaaggaaagtggtggtggcttgggaggaatgctttaccggtccggatct

SEQ ID NO: 144449 - DNA, 242 bp, Arabidopsis thaliana
  unsure (1)..(242): unsure at all n locations
attgcatttattttattttaaaaaagccattacatgagaaagagtagcatttcataataataattagaggtgacaatctctggttttatttatgaacaagaaagagattgttgtgttgtagttnttaggttataattaatatatattgttgagttatattctttctttattattttattttttttatttttttatcttttcttctttatttttattattttaattttttatatttattttat

SEQ ID NO: 144450 - DNA, 408 bp, Arabidopsis thaliana
gataaaaatggctcgagtctcttctcttctttctttctccttaacacttttgatcctttgccatggctacgcggctcaacagggtcagcagggtcagcagtttccgaacgagtgccagctcgaccagctcaatgcgctcgagccttcacacgtactgaagagcgaggctggtcgcatcgaggtgtgggaccaccacgctcctcagctccgttgctcaggtgtctcctttgcacgttacatcatcgagtctaagggtctctacttgccctctttctttaacaccgcgaagctctccttcgtggctaaaggacgaggtcttatgggaaaagtgatccctggatgcgccgaaacattccaagactcatcagagttccaaccacgcttcgaaggtcaaggtcaaagccagag

SEQ ID NO: 144451 - DNA, 293 bp, Arabidopsis thaliana
gtttcattgaaaatttcaagaaccctagttaataacgataatgggttcgagagttttggctgccttctttgttttcttaatcttcacggtcatcacattgcctcccacgatccaagcttgcactccttgtactcgtcctcatcctccggttccgaaacctccacaacacggcggtggtggaggtggtggtagcaagccgcctccacatcacggtggaaaaggtggtggtgatcctccatcctacggaggcaatggtgaacgaccagctcgtcatgatcaaggagtctgacttg

SEQ ID NO: 144452 - DNA, 415 bp, Arabidopsis thaliana
cggccactgaacactatcgatctaatcttttcagctctctccatcgtcgtcgtatctgtgactctcgtgatcatcgcctgaaaaaaatttgagataatggccagaaagttcttcgtcggaggcaactggaaatgtaacggaactgctgaggaggtgaagaagattgtgaacactcttaatgaagctcaggttccttcacaggatgttgtagaggttgtggttagccctccatatgtttttcttcccctggttaagagcacattgaggtctgacttttttgttgcggcacaaaactgttgggttaagaaaggaggtgctttcactggtgaagtgagtgcggagatgcttgtgaacttggatattccatgggttatccttggtcactctgaaaggagggcaatccttaatgaatcaa

SEQ ID NO: 144453 - DNA, 418 bp, Arabidopsis thaliana
caaacgagtaagaatacaaatacaaatagcaaaattatatggcaaacaagctcttcctcgtctgcgcagctttcgccctctgcttcctcctcaccaacgcttccatctaccgcactgttgtcgagttcgacgaagatgacgccagcaaccccatgggcccaagacagaaatgtcagaaggagtttcagcaatcacagcacctaagagcttgccagaaattgatgcgcatgcaaatgaggcaaggccgtggtggtggtccctccctcgacgatgagttcgatttggaagacgacatcgagaacccacaaggcccccagcagggacaccagatcctccagcagtgctgcagcgagcttcgccaggaagagccagtttgtgtttgccccaccttgagacaagctgccagggccgttagcct

SEQ ID NO: 144454 - DNA, 416 bp, Arabidopsis thaliana
ggaggagaaagccaatggcacatgccacgtttacatcggaagggcagaatatggagtcgtttggacgcttgagtggccacaaaatcccagccgttggactcggcacgtggcgatctgggtctcaagccgcccacgccgttgtcactgcaatcgtcgagggtggctataggcacatagatacagcttgggagtatggtgatcagagagaggtcggtcaaggaataaagagggcgatgcacgctggccttgaaaggagggacctctttgtgacctcgaagctttggtgcactgagttatctcctgagagagtgcgttctgctctgcaaaacacccttaaagagcttcaattagagtaccttgatctctacttgattcactggcctttccggctaagagaaggagccagttagccacca

SEQ ID NO: 144455 - DNA, 421 bp, Arabidopsis thaliana
tacacacatagcaaaaaatggcaaacaagttgttcctcgtctgcgcagctctcgctctctggtgcgggctcaccaacgcttccatctaccgcaccgtcgttgagttcgaagaagatgacgccactaaccccataggcccaaaaatgaggaaatgccgcaaggagtttcagaaagaacaacacctaagagcttgccagcaattgatgctccagcaagcaaggcaaggccgtagcgatgagtttgatttcgaagacgacatggagaacccacagggacaacagcaggaacaacagctattccagcagtgctgcaacgagcttcgccaggaagagccagattgtgtttgccccaccttgaaacaagctgccaaggccgttagactccagggacagcaccaaccaatgcaagtcaggaaaattta

SEQ ID NO: 144456 - DNA, 414 bp, Arabidopsis thaliana
aaacaacaagaaaaaatggcaataaccaacaaattaatcataacacttcttctccttatctccatagctgtcgtccactgcttatccttccgtgtggagatcgacgagttcgagccaccacagcaaggagaacaagaaggtccccgtcgccgtcctggtggtggctctggcgagggatgggaggaagagtcgacgaatcatccataccacttcaggaagcggagtttcagtgattggttccagtcaaaggaaggttttgtgagagtgctgcctaagttcacaaaacatgcaccggctctcttccgaggaatcgagaactacagattctcgttggtggagatggagccaacaactttctttgtgcctcaccatttggatgccgatgctgtttttatagtcctacaaggtaaaggg

SEQ ID NO: 144457 - DNA, 412 bp, Arabidopsis thaliana
agaagaaagatagagaaaaaaaatgggaggcaaaggtgtgatgatggtggcgatactttggctttgggcactctctgcaacatctgaagcagtaacagaggctgagccaggtttgatgatgaacttctacaaggacacgtgtcctcaggccgaagacatcgtccgtgaacaagtcaaactcctctacaaacgccacaagaacaccgctttctcttggctccgtaacatcttccatgactgcgccgttgagtcatgtgatgcgtcgcttttgctggattcgacaagaagagagctaggagagaaagaacacgacaggagcttcggacttagaaactttaggtacatcgaggagatcaaggaagctctcgagagggagtgtcctggtgttgtctcatgttctgacattctcgtc

SEQ ID NO: 144458 - DNA, 418 bp, Arabidopsis thaliana
gttgcagagccttacagttaaaggcatacgcttcaccgttctcttccgtcttttctccactcgttggcatgaattccgatggacccaaatccggtaagaagagacgagagattcgtgctaaacttgtgaagaagttgacgagtgacgaagatggctcgggaaagctagtcaaggacaacaataagagtctaaagaggggaagagaaggcaaatctgatgttgatgagcctcttattaagaaaccagcttctactacgcctctagtgactcaaattgctaaaacttcagattcttatttgtcaaagacaagatttgatcagttcccactgtctcccttaacgttaaaaggaattgaggatgctggatttaagacaatgactgttgttcaggaggctactcttcctttcattctccaagg

SEQ ID NO: 144459 - DNA, 415 bp, Arabidopsis thaliana
cggacgcgtgggcagggacagcagggacaacaagggttccgtgacatgcaccagaaggtggagcatgtgagacgcggagacgtctttgccaacactccaggctctgcccactggatctacaactcaggagaacagccacttgtcatcatcgctcttctcgacatcgccaactaccaaaaccaactcgaccgcaaccctagagtgttccatttggccggaaacaaccagcagggaggctttggcggttcacagcaacaacaagaacagaaaaacttgtggagcgggttcgacgcacaggtcatagctcaagcattgaaaattgacgttcagttggctcagcagcttcagaaccaacaagacagcagaggaaacatcgttcgtgttaagggacctttccaggtcgtgaggccacctc

SEQ ID NO: 144460 - DNA, 410 bp, Arabidopsis thaliana
gtctggttttactttttttctttcttcaaaatcattcattctttaacatcaagcaagaatcagatggtgggcatactcaaattcttcatctttttaatatatatttttgccaagaacaagtcttttactttatctctgcagtttttgtttgctcctttgtgcatttggtgatgattcaatcaatgattgtctcttacctttgatctaatcgtttccgcaaaattctcttctcgttttctctgatttcaagctcaacaatctcaaaataatcaatttttggtagtgtgttaaatctgagaagggtttttgggttttgggtataaagcttgttactttgatctttatttggtgaattcgaagtggaaatggaatcgtttccatctccatttggcgatccagctcctaattta

SEQ ID NO: 144461 - DNA, 270 bp, Arabidopsis thaliana
aagagatcagatcagcattgtttttggcgatgccgacggtaacaaggttaagtaactagattgttgtgtatatagttccagttaagtcgacatcttatttgctttaaagtggtttagataccttgcatgtgtgctcagtgcaagtaactttatagtgatttaaataaaaatgttaaatatctctgttgttttaggtgtatgcaccgaaactagggggtttggtaagaggaccagggggtttggggaagtgtttaacgatcacattttaag

SEQ ID NO: 144462 - DNA, 421 bp, Arabidopsis thaliana; identical to SEQ ID NO: 130154

SEQ ID NO: 144463 - DNA, 418 bp, Arabidopsis thaliana
catacacacatagcaaaaaatggcaaacaagttgttcctcgtctgcgcagctctcgctctctgctggctcctcaccaacgcttccatctaccgcaccgtcgttgagttcgaagaagatgacgccactaaccccataggcccaaaaatgaggaaatgccgcaaggagtttcagaaagaacaacacctaagagcttgccagcaattgatgctccagcaagcaaggcaaggccgtagcgatgagtttgatttcgaagacgacatggagaacccacagggacaacagcaggaacaacagctattccagcagtgctgcaacgagcttcgccaggaagagccagattgtgtttgccccaccttgaaacaagctgccaaggccgttagactccagggacagcaccaaccaatgcaagtcaggaaa

SEQ ID NO: 144464 - DNA, 415 bp, Arabidopsis thaliana
aaagaaaatggttaagctcagcaatctcctcgttgcaaccttcggggttctcctcgtccttaacggctgccttgcgaggcagtcacttggggttcctcctcagctacagaacgagtgtaacctcgacaacctagatgttctccaagccaccgaaactatcaagagtgaagccggtcagatcgagtactgggaccacaaccaccctcagctccgatgtgttggtgtttccgttgctcgttatgtaattgaacaaggcggtctttacttgcccaccttcttcacttccccaaaaatttcctacgtcgttcaaggaacgggtatcagcggaagagtggtccctggatgtgccgagaccttcatggactcgcagccgatgcaaggacaacaacaaggccaaccatggcaaggacgacag

SEQ ID NO: 144465 - DNA, 412 bp, Arabidopsis thaliana
aagaaaaatgggtcgagtctcatctattatctctttctctttgacactcttgatcctcttcaatggctacactgcccaacagtggcccaacgagtgccagctcgatcaactcaatgcgctcgaaccatcccaaatcatcaagagcgagggtggtcgcatcgaggtctgggaccaccatgcaccccagctccgttgctccggctttgcctttgagcgtttcgtcattgagcctcagggtcttttcttgcccactttcttgaacgccggcaaactcacgtttgttgttcacggaaggggtctaatgggaagagttattccgggatgcgccgagacgttcatggagtcaccggtatttggagaaggtcaaggtcagggtcagagtcaagggttccgtgacatgcaccagaaagta

SEQ ID NO: 144466 - DNA, 415 bp, Arabidopsis thaliana
ctaacaatggcgccttctccgatcatcttctccgttcttcttctcttcatcttctcactctcatgatctgctcaaacacctttccgtcccaaagctctccttctcccagtaacaaaagaccaatctaccctccagtacacaaccgtcatcaaccaacgcacacctctcgtccccgcttccgtcgtcttcgacctcggtggtcgagaactctgggtcgactgcgacaaaggctacgtctcctccacttaccagtctcctcgctgcaactccgccgtctgctcacgtgccggctccacaagctgcggcacatgcttctcccctccgagacctggctgtagtaacaacacttgcggcggcattccggataacaccgttaccggtaccgcaacttccggcgaatttgctttagacgttg

SEQ ID NO: 144467 - DNA, 155 bp, Arabidopsis thaliana
gggaccacaaccaccctcagctccgatgtgttggtgttttcgttgctcgttatgtaattgaacaaggcggtctttacttgcccaccttcttcacttccccaaaaatttcctacttcgttcaaggaacgtgtatcagcggaagagttttccctgta

SEQ ID NO: 144468 - DNA, 417 bp, Arabidopsis thaliana
aaaaaactaaacggagaagacaaacaaaacaaaggatgccgaagaagaagccggcgaaacattgcggcgaagatgacatcaccattccggtatcaccacaaaccggatcttcgattgatacttggtggtggctaacacataaaggaaccacaacttcatttctctgcatctccctcttcgcattactgatccgatctgctgtaacaatgtatccatactccggcgccggaattcctcctaaattcggcgatttcgaagctcagagacattggatggagataaccacaaatcttccagttatcgattggtatagaaatggcacttacaacgatctcacttactggggattagattatcctcctttaactgcttatcaaagttacatccatggaatcttcctccgattcttcaatcctg

SEQ ID NO: 144469 - DNA, 311 bp, Arabidopsis thaliana
ccgtctaaaaaccctaatctcactccgcctcctgcgagatccatcaacacttccgcaaaaatgaaggttgttgctgcgtttttgcttgccgtcttgagcgggaaagcttccccaaccactggcgatatcaaggatattcttggatcagttggtgctgagacagaggattctcagattgagcttttgttgaaggaagtgaaagggaaagacttggctgagctaattgctgctggaagggagaagttagcttcagtaccatcaggaggtggtggtggtgttgcggttgcttctgctacatttggaggtggagg

SEQ ID NO: 144470 - DNA, 403 bp, Arabidopsis thaliana
cttctctctctctctcaatctctcaaaagatctccggtaacgttttaacgtcggtgaaaaaatgcggaagttaacggcggttaattcactactgaaacggaacaattatcttcttccgcgccatggctcctcacaaacagcagctcagagaacatcctccgtccgcgagaccgagaccgaaacaaaacttccgaaaatgcccccgttcaattattctccgccgccttacgacggtccatctacggcagagatcatcgcaaagcggcgagagttcctcagccccgctctttttcacttctacaacacacccttaaacattgtggaggcaaagatgcagtatgtgttcgacgagaatggacgtcgatatttagatgcctttggaggaatagcgacggtttcgtgc

SEQ ID NO: 144471 - DNA, 414 bp, Arabidopsis thaliana
gaattaaagccagcttcagagtattttagttctgatgaggctgaatcagtatccgctgcttgtgatgattggcgcgactcagatttaactactgatgttccattctttttggtttcggtttcttctgattcaaaagctagtatcagacatcttaaagacttggaagcgtgccaaggtgatcatcaaaagttgcttttcggtttctatgacccgtgtcaccttcctagtaatcctggctggccacttcgaaactacttggcactgattcgctcaagatggaacctcgagacagtttggttcttctgctacagagagagtcgtggtttcgctgactagaacctttctcttgttgttcaagcctcaattacacttttatcaagtgaatcagtttagactgttccttactcagtggga

SEQ ID NO: 144472 - DNA, 419 bp, Arabidopsis thaliana
ataaaaatggctcgagtctcttctcttctttctttctccttaacacttttgatccttttccatggctacgcggctcaacagggtcagcagggtcagcagtttccgaacgagtgccagctcgaccagctcaatgcgctcgagccttcacacgtactgaagagcgaggctggtcgcatcgaggtgtgggaccaccacgctcctcagctccgttgctcaggtgtctcctttgcacgttacatcatcgagtctaagggtctctacttgccctctttctttaacaccgcgaagctctccttcgtggctaaaggacgaggtcttatgggaaaagtgatccctggatgcgccgaaacattccaagactcatcagagttccaaccacgcttcgaaggtcaaggtcaaagccagaggttccgtgacat

SEQ ID NO: 144473 - DNA, 381 bp, Arabidopsis thaliana
gcgctcccccgagaaaacgaaaaccctcatttcagaggcatcttcagacaccgaaaatggcggaaggacgcgttttgaagggcaccatgcgtgcacacactgacatggtgacggcaatcgccaccccaatcgataacgcagacatcatcgtctcagcttcccgcgacaaatccatcattttgtggaaactcaccaaggacgacaaagcctacggtgttgcttacaggcgtgtcactggtcactctcacttcgttgaggatgttgttctctcctccgatggacaattcgcgctttccggcagctgggacggcgagctctcgctttgggatcttgctgctggtgactacactcgtagattcgttggacacaccaaggacgtgc

SEQ ID NO: 144474 - DNA, 414 bp, Arabidopsis thaliana
caaacgttacgttctcgttttctcaaattccaaacaataccaagaaacctctacttgaagagagaagattatcgccgcgtgtgtgcctaagagcgatggcgtctgagaaacaaaaacaacatgcacaacctggcaaagaacatgtcatggaatcaagcccacaattctctagctcagattaccaaccttccaacaagcttcgtggtaaggtggcgttgataactggtggagactctgggattggtcgagccgtgggatactgttttgcatccgaaggagctactgtggctttcacttacgtgaagggtcaagaagaaaaagatgcacaagagaccctacaaatgttgaaggaggtcaaaaccttggactccaaggaacctatcgtcattccaacggatttaggatttgacgaaa

SEQ ID NO: 144475 - DNA, 427 bp, Arabidopsis thaliana
cgacccacgcgttcgggtaaagccaagctcttcaaaaaggttaacgagcttttcttgttggcgaaaagacacggaggggtggatgttatatcctacaacaccattatagctgcctatggaaagaacaaggactatacaaacatgtcatcagcgattaagaatatgcaatttgacgggttttctgtgtcacttgaagcttataatactttgttggatgcatatgggaaagataaacagatggagaaattcagaagcatcttgaaaagaatgaagaagtcgactagtggaccggatcattatacatacaacatcatgatcaatatatatggagagcaaggatggatcgatgaagtcgctgatgttctgaaagaattgaaagaatcgggacttggtcctgacttgtgtagctataacacgctgataaagg

SEQ ID NO: 144476 - DNA, 187 bp, Arabidopsis thaliana
gagaagcaccatttttctttctcgacgtgtcatcgttttctcagattcctgaataatgatgcgcttccgattccaaaatccccaaacctcatccactcctccatctcccggattcggattcccagaatcatgcccatggagaacgacaatggcccacacgttggcaacgtcgtcgtcaccgctgagc

SEQ ID NO: 144477 - DNA, 192 bp, Arabidopsis thaliana
atcatatcaatcgacatggcgaatgtggaccgtgttcggcgtgtgcatgtagaccgtacttgctgacgtgttcatcagccaaactacgaagatgatgtcggttttggtggctatggcggatttactgctgcttcccattatgttcaagacagagatgtcagtaggcgtatctgcaatctcaacacctaagag

SEQ ID NO: 144478 - DNA, 413 bp, Arabidopsis thaliana
cggacgcgtgggcacaaacgagtaagaatacaaatacaaatagcaaaaaaaatggcaaacaagctcttcctcgtctgcgcaactttcgccctctgcttcctcctcaccaacgcttccatctaccgcactgttgtcgagttcgacgaagatgacgccagcaaccccatgggcccaagacagaaatgtcagaaggagtttcagcaatcacagcacctaagagcttgccagaaattgatgcgcatgcaaatgaggcaaggccggggtggtggtccctccctcgacgatgagttcgatttggaagacgacatcgagaacccacaaggcccccagcagggacaccagatcctccagcagtgctgcagcgagcttcgccaggaagagccagtttgtgtttgccccaccttgagacaagc

SEQ ID NO: 144479 - DNA, 204 bp, Arabidopsis thaliana
  unsure (1)..(204): unsure at all n locations
accgggccgaccccgcgnncgaatcaggtcgagtaaattttcacgactgcatatgtgtaaatgcacaatctcggggaagaatgcttatttaagtgactgncgcaaaactgatgaacctctgcagattaaaaattgctattaacagaatcaaacccattgacaacatcttaccgatgatttccctgacatggatgtgattggaat

SEQ ID NO: 144480 - DNA, 393 bp, Arabidopsis thaliana
aaaaagaaaatggttaagctcagcaatctcctcgttgttaccttcggggttctcctcgtccttagcggctgccttgcgaggcagtcacttggggttcctcctcagctacagaacgagtgtaacctcgacaacctagatgttctccaagccaccgaaactatcaagagtgaagccggtcagatcgagtactgggaccacaaccaccctcagctccgatgtgttggtgtttccgttgctcgttatgtaattgaacaaggcggtctttacttgcccaccttcttcactttcccaaaaatttcctacgtcgttcaaggaacgggtatcagcggaagagtggtccctggatgtgccgagaccttcatggactcgcagccgttgcaaggacaacaacaa

SEQ ID NO: 144481 - DNA, 475 bp, Arabidopsis thaliana
  unsure (1)..(475): unsure at all n locations
cgaaatatgcataaggcttttgttttctcttctcttccgtcggtctcacttctacatttctcctcttctgtccgatggcgccgaggncacgccagcgagaggcgccgtttccaaaccgcctgccatttcagccaaatcaacagcctcgcgcccgctcaggcgacgaagttcgaagccggtcagatggaagtatgggaccacatgagccctgagctccgatgcgccggtgtaacggtggctcgcatcacccttcagcccaattccattttcttgcccgctttctttagcccacctgcccttgcttacgttgtccaaggagaaggagttatggggacgattgcttctggttgtcctgagacttttgcagaagttgaaggatcatcaggaagaggaggaggaggagacccgggtcgacgttttgaggacatgcaccagaagttggagaatttccggcgaggggatgtgtttgcttcgc

SEQ ID NO: 144482 - DNA, 474 bp, Arabidopsis thaliana
tcacaaacgagtaagaatacaaatacaaatagcaaaaaaaatggcaaacaagctcttcctcgtgtgcgcaactttcgccctctgcttcctcctcaccaacgcttccatctaccgcactgttgtcgagttcgacgaagatgacgccagcaaccccatgggcccaagacagaaatgtcagaaggagtttcagcaatcacagcacctaagagcttgccagaaattgatgcgcatgcaaatgaggcaaggccgtggtggtggtccctccctcgacgatgagttcgatttggaagacgacatcgagaacccacaaggcccccagcagggacaccagatcctccagcagtgctgcagcgagcttcgccaggaagagccagtttgtgtttgccccaccttgagacaagctgccagggccgttagcctccaaggacaacacggaccattccaatccaggaaaatttacaagacagctaagta

SEQ ID NO: 144483 - DNA, 337 bp, Arabidopsis thaliana
tgagaagcaccatgtttatttctaggactgcaaagtgttaaatgcacaatcgcggggaagaatgcttatgtaaggttctgttgtagtactggtgatgctatggggatgaatatggtttctaaaggtgtgcagaatgttcttgagtatcttaccgatgatttccctgacatggatgtgattggaatctctggtaacttctgttcggacaagaaacctgctgctgtgaactggattgaaggacgtggtaaatcagttgtttgcgaggctgtaatcagaggagagatcgtgaacaaggtcttgaaaacgagcgtggctgctttagtcgagctcaacatgc

SEQ ID NO: 144484 - DNA, 360 bp, Arabidopsis thaliana
gaaaacatacacaaatagcaaaacatggctaacatgctcttcctcgtctgcgcaactctcggcctctgcttcctcctcaccaacgcttccatctaccgcaccgttgtcgaattcgaagaagatgacgccagcaaccccgtaggtccaagacagagatgccagaaggagtttcagcaatcacaacacctaagagcttgccagagatggatgagcaagcaaatgaggcaaggacgtggtggtggtccttccctcgacgatgagttcgatttcgagggcccccagcagggataccagctactccaacagtgctgcaacgagcttcgccaggaagagccagtttgcgtttgccccaccttgaaa

SEQ ID NO: 144485 - DNA, 342 bp, Arabidopsis thaliana
  unsure (1)..(342): unsure at all n locations
gcgtccaacggacttttcggcgtaattaggccacttttgacacgcggggaaggcgggcggcggccacatgaaatagttaagggttaaaaggagactttgtgcacaatgcgatgcactgaaaacctcgatgacccgtcggatgctgacgtgtacaagccataactcggttaaattagcacacttaacagctacaatcttcctatcctcagacttctccgncttagcgcttttcgtggcttcatccgaaaaaacgctatggtgctaccgcaatggaacgtanacgcatacgcggcactctacgtgacaaacggaaaggctcatatacaaatggtgaacgacaac

SEQ ID NO: 144486 - DNA, 399 bp, Arabidopsis thaliana
cttcagaaccaagatgacaaccgtggaaacattgttcgagtccaaggcccgttcggtgtcattaggccgcctttgaggggccagagacctcaggaggaggaagaagaagaagaaggacgacatggacgacacggtaatggcttagaggagaccatctgcagcgccaggtgcaccgataacctcgatgacccgtctcgtgctgacgtgtacaagccacagctcggttacatcagcactctcaacagttacgatctccccatccttcgcttcatccgtctctcagccctccgtggatctatccgtcaaaacgcaatggtgcttccacagtggaacgcaaacgcgaacgctattctttacgtgacagacggggaagcccaaatccagatcgtaaacgacaat

SEQ ID NO: 144487 - DNA, 294 bp, Arabidopsis thaliana
aaataaaagagaaagagaaaagtgaaataggtgctgatatatagtgatatgtggatagaggtaaagcaacaagaacacaatcttttcgatggtagtttaactagactacctatagctattctttcgtttttttctgatttatataggaaacaacaagaccacaatcttttcaatgataagaggtcccaattaaaacaacaatggaaatactagaataattaagttgtgacaattcgatttggatttagattaaaaattgtaatgttttgtatttgactttttccagtaattcct

SEQ ID NO: 144488 - DNA, 294 bp, Arabidopsis thaliana
caacaaacaaaaagaaaatggtttagctcagcatttttctctttgcaaccttcgggggtctgctcgtacttaacggatgccttgcgaggcagtcacttgactggactacttatctacataacgagggtaacctctgcaacatagatgaaacaacagcaccacaaactattaagagataagacggccaaatcgagtcctcagtccacatactcgaataattaagatgtgacaatgcgatcgggatttagattaaaaattgtaatgttttgtatttgactttttccagtaattcct

SEQ ID NO: 144489 - DNA, 428 bp, Arabidopsis thaliana
cacggatcgaaaacattaagtagctagttaagagagagtgagagatggagatgaacattaaggttggggttatagacttgtctaagctcaatggtgaaaagagagaccaaaccatggctttgatcgacgatgcttgtcaaaactggggcttcttcgagctggtgaaccatggactaccatatgatctaatggacaacattgagaggatgacaaaggaacactacaagaaacatatggaacaaaagttcaaagaaatgcttcgttccaaaggtttagataccctcgagaccgaagttgaagatgtcgattgagaaagcactgtctaccttcgtcatctccctcaatctaacctatacgacatccctgatatgtcaaatgaataccgattggcaatgaaggattttgggaagagcttgagattctagctg

SEQ ID NO: 144490 - DNA, 391 bp, Arabidopsis thaliana
  unsure (1)..(391): unsure at all n locations
aagctcaatgnggaaaagagagaccaaaccatggctttgatcgacgatgcttgtcaaaactggggcttcttcgagctggcgaaccatggactaccatatgatctaatggacaacattgagaggatgacaaaggaacactacaagaaacatatggaacaaaagttcaaagaaatgcttcgttccaaaggtttagataccctcgagaccgaacgtgaagatgtcgattgagaaagcactttctacctacgtcatcttcctcaatctaacctatacgacatccctgatatgtcaaatgaataccgattggcaatgaatgattctgggaagaggcttgagattctagctgaagagctattggacttgttgtgtgagaatctagggttggagaaag

SEQ ID NO: 144491 - DNA, 462 bp, Arabidopsis thaliana
agcttgccagcaattgatgctccagcaagcaaggtatgtccgtagcgatgagtttgatttcggggacgacatggagaacccacagggacaacagcaggaacaacagctattccagcagtgctgcaacgagcttcgccaggaagagccagattgtgtttgccccaccttgaaacaagctgccaaggccgttagactccagggacagcaccaaccaatgcaagtcaggaaaatttaccagacagccaagcacttgcccaacgtttgcgacatcccgcaagttgatgtttgtcccttcaacatcccttcattcccttctttctactaaatctcaaacaaaccctcaaagcgtatgagaagggtcgtgttgatatatacatgttgacacttgacacataccacacctcatcgtgtgtgttatgataaatgtaagcttatggatggttgagggtaatgtaagcacta

SEQ ID NO: 144492 - DNA, 457 bp, Arabidopsis thaliana
gttcagttggctcagcagcttcagaaccaacaagacatttgaggaaacatcgttcgtgttaagggacctttccaggtcgtgaggccacctctaagacagccctacgagagcgaggagtggagacacccacgtagcccacagggcaacggccttgaggagactatctgcagcatgaggtcccacgagaacattgacgaccctgctcgtgctgacgtgtacaagcccagcctaggtcgcgtgaccagcgtcaacagctataccttgcccatcttggagtatgtcaggctcagtgccactcgtggcgttctccagggtaatgcgatggtgcttcctaaatacaacatgaacgctaacgagatcttgtactgcactggaagacaaggaaggatccaagtggtcaacgacaacggacagaacgtgttggaccaacaagtgcagaagggacagctcggggtca

SEQ ID NO: 144493 - DNA, 390 bp, Arabidopsis thaliana
  unsure (1)..(390): unsure at all n locations
ccgtccggggtacactaagggttcgtgagttaaccccataccnctgnggtgtgtgcgccatacgtagtggaaacgggaatctactgatgttagaggctgcagcacannccgacgacccacaaaactggacgaactaagcccaaatataacctgaccccaccatttgcgcagactttacattccggtcccataagaacacataccgctggtctaacccatcattcatcgatccctaaccttttcgccaagacactacttaaccttatcgctctttaaggatggatgatgataacttactctcaccataaaattcatcgttggtctagccaacaccctctatattctcattaaaccctcttaccaacgctaattcaaaccaacatcacatat

SEQ ID NO: 144494 - DNA, 474 bp, Arabidopsis thaliana
aaacaaaacacacccaaatatgcataagcttttgttttctcttctctccgtcgtctcacgtcgtggatttctcctcttcttccatggcgccgaggcacgccagcgagaggcgccgtttccaaacgcctgccatttcagccaaatcaacagcctcgcgcccgctcaggcgacgaagttcgaagccggtcagatggaagtatgggaccacatgagccctgagctccgatgcgccggtgtaacggtggctcgcatcacccttcagcccaattccattttcttgcccgctttctttagcccacctgcccttgcttacgttgtccaaggagaaggagttatggggacgattgcttctggttgtcctgagacttttgcagaagttgaaggatcatcaggaagaggaggaggaggagacccgggtcgacgttttgaggacatgcaccagaagttggagaatttccggcgaggggatgtgtt

SEQ ID NO: 144495 - DNA, 438 bp, Arabidopsis thaliana
aacaaatcgaacagtgttcgataacttttagattgcaagtcctgtttttgatttggtcgggagaaagaaaactagggttttgatgggaactgatacagttatgtctggacgagtaaggaaagatctatcaaaaacgaatccaaatgggaatattcctgctaattcacgtaagaagatccaacgacggagtaagaaaaccctaatctgtccggttcaaaaactattcgatacttgtaagaaagttttcgctgatggcaaatctggtaccgtcccttctcaagaaaacattgagatgcttcgagccgttttggatgaaatcaagcctgaggatgttggtgtaaatcctaagatgtcgtattttcgatctacagtgaccggacgatctccgttagtgacgtatcttcacatctatgcatgtcatagattctcgatttgcat

SEQ ID NO: 144496 - DNA, 479 bp, Arabidopsis thaliana
  unsure (1)..(479): unsure at all n locations
gaaaaacttgtggagcgggttcgacgcacaggttttagctcaagcattgaaaattgacgttcagttggctcagcagcttcagaaccaacaagacagcagaggaaacatcgttcgtgttaagggacctttccaggtcgtgaggccacctctaagacagccctacgagagcgaggagtggagacacccacgtagcccacagggcaacggccttgaggagactatctgcagcatgaggtcccacgagaacattgacgaccctgctcgtgctgacgtgtacaagcccagcctaggtcgcgtgaccagcgtcaacagctataccttgcccatcttggagtatgtcaagctcagtgccactcgtggcgttctccaaggtaatgcgatggtgcttnnctaataccacatgaacgctaacgagatcttgtactgcactggaggacaaggaaggatccaagtggtcaacgacaacggacagaacgtgt

SEQ ID NO: 144497 - DNA, 452 bp, Arabidopsis thaliana
ggagcgggttcgacgcacaggtcatagctcaagcattgaaaattgacgttcagttggctcggcggcttcagaaccaacaagacagcagaggaaacatcgttcgtgttaagggacctttccaggtcgtgaggccacctctaagacagccctacgagagcgaggagtggagacacccacgtagcccacagggcaacggccttgaggagactatctgcagcatgaggtcccacgagaacattgacgaccctgctcgtgctgacgtgtacaagcccagcctaggtcgcgtgaccagcgtcaacagctataccttgcccatcttggagtatgtcaggctcagtgccactcgtggcgttctccaaggtaatgcgatggtgcttcctaaatacaacatgaacgctaacgagatcttgtactgcactggaagacaaggaaggatccaagtggtcaacgac

SEQ ID NO: 144498 - DNA, 452 bp, Arabidopsis thaliana
gagagagagagatggggtcaaagacggagatgatggagagagacgcaatggctacggtggctggctatgcgccggtcacttaccatcgccgtgctcgtgttgacttggatgatagacttcctaaaccttatatgccaagagcattgcaagcaccagacagagaacacccgtacggaactccaggccataagaattacggacttagtgttcttcaacagcatgtctccttcttcgatatcgatgataatggcatcatttacccttgggagacctactctggactgcgaatgcttggtttcaatatcattgggtcgcttataatagccgctgttatcaacctgacccttagctatgccactcttccggggtggttaccttcacctttcttccctatatacatacacaacatacacaagtcaaagcatggaagtgattcaaaaacatatgacaat

SEQ ID NO: 144499 - DNA, 460 bp, Arabidopsis thaliana
taaagaggaagaaaaatgggtcgagtctcatctattatctctttctctttgacactcttgagcctgttcaatggctacactgcccaacagtggcccaacgagtgccagctcgatcaactcaatgcgctcgaaccatcccaaatcatcaagagcgagggtggtcgcatcgaggtctgggaccaccatgcaccccagctccgttgctccggctttgcctttgagcgtttcgtcattgagcctcaaggtcttttcttgcccactttcttgaacgccggcaaactcacgtttgttgttcacggaaggggtctaatgggaagagttattccgggatgcgccgagacgttcatggagtcaccggtatttggagaaggtcaaggtcagggtcagagtcaagggttccgtgacatgcaccagaaagtagagcacctacggggcggtgacaccattgcaacacccatct

SEQ ID NO: 144500 - DNA, 470 bp, Arabidopsis thaliana
  unsure (1)..(470): unsure at all n locations
gactaatctataatctctttctctttgacactcttgatcctcttcaatggctacactgcccagcggtggcccaacgagtgccagctcgatcaactcaatgcgctcgaaccatcccaaatcatcaagagcgagggtggtcgcatcgaggtctgggaccaccatgcaccccagctccgttgctccggctttgcctttgagcgtttcgtcattgagcctcangctcttttcttgcccactttcttgaacgccggcaaactcacgtttgttgttcacggaaggggtctaatgggaagagttattccgggatgcgccgagacgttcatggagtcaccggtatttggagaaggtcaaggtcagggtcagagtcaagggttccgtgacatgcaccagaaagtagagcacctacggtgcggtgacaccatngcaacaccatctggtgtagctcaatggttctacaacaatggaaatga

SEQ ID NO: 144501 - DNA, 459 bp, Arabidopsis thaliana
agaaaacatacacaaatggcaaaacatggctaacaagttcttcctcgtctgcgcaactctcgccggctgcttcctcctcaccaacgcttccatctaccgcaccgttgtcgaattcgaagaagatgacgccagcaaccccgtaggtccaagacagagatgccagaaggagtttcagcaatcacaacacctaagagcttgccagagatggatgagcaagcaaatgaggcaaggacgtggtggtggtccttccctcgacgatgagttcgatttcgagggcccccagcagggataccagctactccagcagtgctgcaacgagcttcgccaggaagagccagtttgcgtttgccccaccttgaaacaagctgccagggcagttagcctccagggacagcacggaccattccaatccaggaaaatttaccagtcagctaagtacttgcctaacatttgcaagat

SEQ ID NO: 144502 - DNA, 458 bp, Arabidopsis thaliana
tcctctttaaaatcgcgagttacgatcaagatgcagattttcgtaaagactctcacgggaaggacgatcaccctcgaggtggaaagctcaaacaccattgacaacgtcaaggccaagatccaggacaaggaggggatccctccggaccagcagaggctcatcttcgcgggcaagcagctcgaggatggcaggactctagctgactacaacatccaaaaggagtcgactttgcatctcgtcctcaggctccgtggtggtatgcagattttcgttaagactttgacgggaaagaccattactttggaggtggagagttcagacactattgacaatgtcaagaccaagattcaggacaaggagggtattccccccgaccagcagaagctgatctttgctggaaagcagcttgaagacggcaggacattggctgattacaacattcaggacgagtctacgct

SEQ ID NO: 144503 - DNA, 403 bp, Arabidopsis thaliana
cggacgcgtggggtgcaatggaaaaaaatgataagtctacttcgtaaattggaaattctaataggggtatactattctatgactatatagatatatatatagaattaaggttatgttttatttatttaatgatgaatgatagtcactatttatgtgagctatattctgttctagaatatatagaatatcattaattctaactagataaggaaaaatattaatagaatagttaattgatacgatctagtagtttagtgaatttgtatgcatgcgctattttattcgagcccgcttagctcagaggttagagcatcgcatttgtaatgcgatggtcatcggttcgattccgatagccggctatgccatatttcttcgtttgtatatacatgatttttaatgtact

SEQ ID NO: 144504 - DNA, 475 bp, Arabidopsis thaliana
gacgattctctctcttgagttgaagaaatgaagcacaacaatgttatccccaatggtcacttgaaaaagcactggcagaattatgtcaagacatggttcaaccagcctgccaggaaaaccagaagaagaattgcgaggcaaaagaaggctgtgaagatcttccctcgtccaacttctggacctctccgccctgttgtgcatggtcagactcttaagtacaacatgaaggtcagaaccggtaaaggattcactcttgaagagctcaaggctgctggtatcccaaagaagttggcgcctacaattggtattgctgttgaccatcgtcgcaagaaccgatctttggagggtcttcaaacaaatgtccagaggctgaaaacctacaagaccaagttagtcattttcccgcgtcgtgcccgcaaggtcaaggctggtgactctacaccaagaagagtggctaatgctacccaaagtcaag

SEQ ID NO: 144505 - DNA, 401 bp, Arabidopsis thaliana
cttctctctctctctagattcgaaaaaatggctatactggtgatgttgctgaatctctgcggcttaccggagatagccatggcggcaaggacagggaaatatcggaaatgaatacaatggccgatcaaggaagcacctactgagacattctcaaaatatccttcctgactcaagaattctactacttcatcctcggggcaacggtgaaactatcatgcacagacaggaagacaatgcccgagagtgacacactcttaactatctcaaacatgatcggatcgcatagaatcattcgcctacactagcacttgctcgagaccatcgacgcatgaaccgatctatggagggtcttaaaacaaattttcataggctgaaaacctacaaaaccaagttagtcattt

SEQ ID NO: 144506 - DNA, 460 bp, Arabidopsis thaliana
agaaaccatacacaaatggcaaaacatggttaacatgtttttcctggtttgcgcaactttggcggggtgtttcctcctaaccaacgcttccatctaccgaaccgttgtcgaattcgaagaagatgacgccagcaaccccgtaggtccaagacagagatgccagaaggagtttcagcaatcacaacacctaagagcttgccagagatggatgagcaagcaaatgaggcaaggacgtggtggtggtccttccctcgacgatgagttcgatttcgagggcccccagcagggataccagctactccagcagtgctgcaacgagcttcgccaggaagagccagtttgcgtttgccccaccttgaaacaagctgccagggcagttagcctccagggacagcacggaccattccaatccaggaaaatttaccagtcagctaagtacttgcctaacatttgcaagatc

SEQ ID NO: 144507 - DNA, 455 bp, Arabidopsis thaliana
ctcagtgccactcgtggcgttctccagggtaatgcgatggtgcttcctaaatacaacatgagcgctaacgagatcttgtactgcactggaggacaaggaaggatccaagtggtcaacgacaacggacagaacgtgttggaccaacaggtgcagaagggacagctcgtggtcatcccacaagggttcgcatacgttgtccagtcccacggaaacaagttcgagtggatctctttcaaaactaatgaaaacgcaatgatcagcactttggcgggtagaacctcgctcttgagggcattgccattggaggtcatatcaaatggtttccagatctctcccgaggaagctaggaagatcaagttcaacacacttgagaccactttgacccgcgctgccggtaggcaacaacaacagttgatcgaggagattgtcgaggcttaaatcaaaacgtttttctt

SEQ ID NO: 144508 - DNA, 405 bp, Arabidopsis thaliana
ccgttgctccggctttgcctttgagcgtttcgtcattgagcctcagggtcttttcttgccgcgctttcttgaacgccggcaaactcacgtttgttgttcacggaaggggtctaatgggaagagttattccgggatgcgccgagacgttcatggagtcaccggtatttggagaaggtcaaggtcagggtcagagtcaagggttccgtgacatgcaccagaaagtagagcacctacggtgcggtgacaccattgcaacaccatctggtgtagctcaatggttctacaacaatggaaatgagcctctcattcttgttgcagccgcggatctcgccagcaaccagaaccagcttgaccgcaaccttagaccatttttgatagccggaaacaacccacaagggcaggaat

SEQ ID NO: 144509 - DNA, 469 bp, Arabidopsis thaliana
aagccgtcctttcgcaagaaaccatttggagttggagctttggacgacaacaatggccccgaagaagggagtgaaggtagctgctaagaaaaagaccgcggagaaagtttcaaaccctctattcgagaggaggcctaagcaattcggtattggtggagctttacctcctaagaaggatctctctcgctacatcaaatggcccaaatccatccgtcttcaaaggcaaaagaggatcctgaagcagaagttgaaggtccctccagctcttaaccaattcaccaagactcttgacaagaatcttgctaccagcctcttcaaggtccttctgaagtacaggccagaagacaaagctgccaagaaggagcgtcttgtaaagaaggcccaagctgaagctgagggaaagccttctgagtctaaaaagcccattgtagtcaaatacggcctcaaccatgtgacctacctcattgag

SEQ ID NO: 144510 - DNA, 384 bp, Arabidopsis thaliana
  unsure (1)..(384): unsure at all n locations
caagacagctaaatactggcctaacatttgcaagttctttcaagtgggtgaatgccccttgcggagcaccatccctttattccctccttactaatcgattccaaacaaaaaccctcgagcgtatgagagtgtggctgatgatacatgttaacaccacaccttatcgtgtatgaaagtgcactgtcactacatgatgtggcccagatccattgcgtcttcacaggcaacagaatgattctgagcataggttgttggtccctccaactcttaaccaattcaccaagactcttgacangaatcttgctaccagcctcttcaaggtccttctgaagtacacgccataagacaaagctgccatgaacgagcgtcttgtaaagaatgccc

SEQ ID NO: 144511 - DNA, 460 bp, Arabidopsis thaliana
aagaaaacatacacaaatggcaaaacatggctaacatgttcttcctcgtctgcgcaactctgggcgtctgcttcctcctcaccaacgcttccatctaccgcaccgttgtcgaattcgaagaagatgacgccagcaaccccgtaggtccaagacagagatgccagaaggagtttcagcaatcacaacacctaagagcttgccagagatggatgagcaagcaaatgaggcaaggacgtggtggtggtccttccctcgacgatgagttcgatttcgagggcccccagcagggataccagctactccagcagtgctgcaacgagcttcgccaggaagagccagtttgcgtttgccccaccttgaaacacgctgccagggcagttagcctccatggacagcacggaccattccaatccaggaaaatttaccagtcagctaagtacttgcctaacatttgcaagat

SEQ ID NO: 144512 - DNA, 483 bp, Arabidopsis thaliana
ccacgcgtccgatcatcacaaacgagtaagaatacaaatacaaatagcaaaaaaaatggcaaacaagctcttcctggtctgcgcaactttcgccctctgcttcctcctcaccaacgcttccatctaccgcactgttgtcgagttcgacgaagatgacgccagcaaccccatgggcccaagacagaaatgtcagaaggagtttcagcaatcacagcacctaagagcttgccagaaattgatgcgcatgcaaatgaggcaaggccgtggtggtggtccctccctcgacgatgagttcgatttggaagacgacatcgagaacccacaaggcccccagcagggacaccagatcctccagcagtgctgcagcgagcttcgccaggaagagccagtttgtgtttgccccaccttgagacaagctgccagggccgttagcctccagggacaacacggaccattccaatccaggaaaatttacaagacagc

SEQ ID NO: 144513 - DNA, 302 bp, Arabidopsis thaliana
aaaaagaaaatggttaagctcagcaatctcctcgttgcaaccttcggggttctcctcgggcgtaacggctgccttgcgaggcagtcacttggggttcctcctcagctacagaacgagtgtaacctcgacaacctagatgttctccaagccaccgaaactatcaagagtgaagccggtcagatcgagtactgggaccacaaccaccctcagctccgatgtgttggtgtttccgatgctcgttatgcaattgaacaaggctgtatttacttgcccaccttcttcactttctcaaaaatttctta

SEQ ID NO: 144514 - DNA, 440 bp, Arabidopsis thaliana
gggaaggacagggacaacagggacaacaaggacgacagggacaacaaggccaaccatgggagggacagggacagcagggacaacaagggttccgtgacatgcaccagaaggtggaacatgtgagacgcggagacgtctttgccaacactccaggctctgcccactggatctacaactcaggagaacagccacttgtcatcatcgctcttctcgacatcgccaactaccaaaaccaactcgaccgcaaccctagagtgttccatttggccggaaacaaccagcaaggaggctttggcggttcacagcaacaacaagaacagaaaaacttgtggagcgggttcgacgcacaagtcatagctcaagcattgaaaattgacgttcagttggctcagcagcttcagaaccaacaagacagcagaggaaacatcggtcgtgttaag

SEQ ID NO: 144515 - DNA, 483 bp, Arabidopsis thaliana
  unsure (1)..(483): unsure at all n locations
gggncggaattaccggggcggaccaacccgtccggagagacgaaaggaaaagcatgtttaaactctgttttgttctcgtctgggtaatggcagaggaggcaaatccggttaagtccggttcttgaagttgctccgggaatatatcagcgagcgatgtcgatcgagttcatttcgcgatgaacttggagttcaccgaggcggagttcttcttgaaaggggctaccggaaaaggccttgatgcctataacgcgacacttgctaaaggcggaccaccgccggtaggggccaagaaagccaaccttgatcctataactaaccgaatcatcgaggagtttggttatcaagaaatcggtcatcttagggcgattacggatatgacgggaggaattccacgtccgctaataaatctgacgagagagaatttcgcagtgtttatggacagagcggttggacgcaaatctaattccgcggttgatccttacg

SEQ ID NO: 144516 - DNA, 455 bp, Arabidopsis thaliana
aacaaacaaaaagaaaatggttaagctcagcaatctcctcgttgcaaccttcggggttctcgtggtccttaacggctgccttgcgaggcactcacttggggttcctcctcagctacagaacgagtgtaacctcgacaacctagatgttgtgcaagccaccgaaactatcaagagcgaagccggtcagatcgagtactgggaccacaaccaccctcagctccgatgtgttggtgttaccgtcgctcgttatgtaattgaacaaggcggtctttacttgcccaccgttttcacttgcccaaaaatttcctacgtcgttcaaggaacgggtatcaccggaagagtggtacctggatgtgccgaaaccttcatggactctcagccgatgcaaggacaacaacaaggccaaccatgggcaggacgacagggacaacacggccaaccatgggaaggacagg

SEQ ID NO: 144517 - DNA, 452 bp, Arabidopsis thaliana
caaaaagaaaatggttaagctcagcaatctcctcgttgcaaccttcggggttctcctcgtcggtaacggctgccttgcgaggcagtcacttggggttcctcctcagctacagaacgagtgtaacctcgacaacctagatgttctccaagccaccgaaactatcaagagtgaagccggtcagatcgagtactgggaccacaaccaccctcagctccgatgtgttggtgtttccgttgctcgttatgtaattgaacaaggcggtctttacttgcccaccttcttcacttccccaaaaatttcctacgtcgttcaaggaacgggtatcagcggaagagtggtccctggatgtgccgagaccttcatggactcgcagccgatgcaaggacaacaacaaggccaaccatggcaaggacgacagggacaacaaggccaaccatgggaaggacaaggac

SEQ ID NO: 144518 - DNA, 449 bp, Arabidopsis thaliana
agaaaaatgggtcgagtctcatctattatctctttctttttgacactcttgatcctcttcaatgggtacactgcccaacagtggcccaacgagtgccagctcgatcaactcaatgcgctcgaaccatcccaaatcatcaagagcgagggtggtcgcatcgaggtctgggaccaccatgcaccccagctccgttgctccggctttgcctttgagcgtttcgtcattgagcctcagggtcttttcttgcccactttcttgaacgccggcaaactcacgtttgttgttcacggaaggggtctaatgggaagagttattccgggatgcgccgagacgttcatggagtcaccggtatttggagaaggtcaaggtcagggtcagagtcaagggttccgtgacatgcaccaaaaagtagagcacctacggtgcggtgacaccattgcaacaccatc

SEQ ID NO: 144519 - DNA, 424 bp, Arabidopsis thaliana
ggtggcgacaatcgccgccgtcgtatcctacaagttattccaacggctaagatacaagttccggcggggcccaagccccaagccaatcgtcggtaacctctacgacataaaaccggtccggttcagatgttactacgagtgggctcaatcttatggaccaatcatatcggtctggatcggttcaattctaaacgtggtcgtatctagcgccgagctagcaaaagaagttctgaaagaacacgaccagaaactcgccgaccggcaccggaacagatcgacggaagcatttagccgcaacggtcaggatcttatatgggccgattatgggcctcattacgtgaaggtgagaaaagtttgcacgcttgagctcttcacaccgaaacgactcgagtctctcagacctatccgtgaagatgaagtcacc

SEQ ID NO: 144520 - DNA, 419 bp, Arabidopsis thaliana
gcgtccggacagttcgtggtcatcccacaagggttcgcatactttttccagtcccacggaaacaagttcgagtggatctctttcaaaactaatgaaaacgcaatgatcagcactttggcgggtagaacctcgctcttgagggcattgccattggaggtcatatcaaatggtttccagatctctcccgaggaagctaggaagatcaagttcaacacacttgagaccactttgacccgcgctgccggtaggcaacaacaacagttgatcgaggagattgccgaggcttaaatcaaaacgtttttctttttcttaataaagtatggtcagattgtaatcacgttcctttacctttaacgtacgtgtaaaatatgtgtctgcggcacctgacttgaaataacactttcttctcataaataaaa

SEQ ID NO: 144521 - DNA, 468 bp, Arabidopsis thaliana
acgcgtccggagagagaagaaagatcgaaaaaaaaaatgggaggtataggtgtgatgatggtggcgatactgggcgtttgggcactctctgcaacatctgaagcagtaacagaggctgagccaggtttgatgatgaacttctacaaggacacgtgtcctcaggccgaagacatcgtccgtgaacaagtcaaactcctctacaaacgccacaagaacaccgctttctcttggctacgtaacatcttccatgactgcgccgttgagtcatgtgatgcgtcgcttttgctggattcgacaagaagagagctaggagagaaagaacacgacaggagcttcggacttagaaactttaggtacatcgaggagatcaaggaagctctcgagagggagtgtactggtgttgtctcatgttctgacattctcgtcttgtccgcaagagaaggcatcgaagcaatacgaggaccttat

SEQ ID NO: 144522 - DNA, 443 bp, Arabidopsis thaliana
ggaagaaaaatgggtcgagtctcatctattatctctttctctttgacactcttgatcctgtgcaatggctacactgcccaacagtggcccaacgagtgccagctcgatcaactcaatgcgctcgaaccatcccaaatcatcaagagcgagggtggtcgcatcgaggtctgggaccaccatgcaccccagctccgttgctccggctttgcctttgagcgtttcgtcattgagcctcacggtcttttcttgcccactttcttgaacgccggcaaactcacgtttgttgttcacggaaggggtctaatgggaagagttattccgggatgcgccgagacgttcatggagtcaccggtatttggagaaggtcaaggtcagggtcagagtcaagggttccgtgacatgcaccaaaaagtagagcacctacggggcggtgacaccattgc

SEQ ID NO: 144523 - DNA, 472 bp, Arabidopsis thaliana
ggaagaaaaatgggtcgagtctcatctattatctctttctctttgacactcttgatccggtgcaatggctacactgcccaacagtggcccaacgagtgccagctcgatcaactcaatgcgctcgaaccatcccaaatcatcaagagcgagggtggtcgcatcgaggtctgggaccaccatgcaccccagctccgttgctccggctttgcctttgagcgtttcgtcattgagcctcaaggtcttttcttgcccactttcttgaacgccggcaaactcacgtttgttgttcacggaaggggtctaatgggaagagttattccgggatgcgccgagacgttcatggagtcaccggtatttggagaaagtcaaggtcagggtcagagtcaagggttccgtgacatgcaccagaaagtagagcacctacggtgcggtgacaccattgcaacaccatctggtgtagctcaatggttct

SEQ ID NO: 144524 - DNA, 452 bp, Arabidopsis thaliana
cgtccgaaaaaaaggggccgggtctaatttataacaaatttgttttgaacactctggatcctctacaggggctccactgcccaacagtggcccaacaagtgccagctcgatcaactcaatgcgcttgaaccatcccaaataataaagagcgagggtggacgcatcgaggtctgggaccaccatgcacgcgagctccgatgatccggctttgcctttgagcgtttagacattgagcctgatggtctattattgcccactttcttgaacgccggcaaactcacgtttgttgatcacggaaggggtctaatgggaagagttatttcgcgatgcgccgagacgttcatggagtcaccggtatttggagaaagtcaaggtcagggtcatagtcaagggttccgtgacatgcaccaggaaagagagcacctacggtgcggtgacaccattgcaacacc

SEQ ID NO: 144525 - DNA, 396 bp, Arabidopsis thaliana
tcacaaacgagtaagaatacaaatacaaatagtataaaaatggcaaacaagctcttcctcgggtgcgcaactttcgccctctgcttcctcctcaccaacgcttccatctaccgcactgttgtcgagttcgacgaagatgacgccagcaaccccatgggcccaagacagaaatgtcagaaggagtttcagcaatcacagcacctaagagcttgccagaaattgatgcgcatgcaaatgaggcaaggccgtggtggtggtccctccctcgacgatgagttcgatttggaagacgacatcgagaacccacaaggcccccagcagggacaccagatcctccagcagtgctgcagcgagcttcgccaggaagagccagtttgtgtttgccccaccttgaga

SEQ ID NO: 144526 - DNA, 379 bp, Arabidopsis thaliana
cacaaacgagtaagaatacaaatacaaatagcaaaaaaaatggcaaacaagctcttcctcggctgcgcaactttcgccctctgcttcctcctcaccaacgcttccatctaccgcactgttgtcgagttcgacgaagatgacgccagcaaccccatgggcccaagacagaaatgtcagaaggagtttcagcaatcacagcacctaagagcttgccagaaattgatgcgcatgcaaatgaggcaaggccgtggtggtggtccctccctcgacgatgagttcgatttggaagacgacatcgagaacccacaaggcccccagcagggacaccagatcctccagcagtgctgcagcgagcttcgccaggaagagccagtttgtg

SEQ ID NO: 144527 - DNA, 411 bp, Arabidopsis thaliana
ccagcgtcaacagctataccttgcccatcttggagtatgtcaggctcagtgccactcgtggcgttctccagggtaatgcgatggtgcttcctaaatacaacatgaacgctaacgagatcttgtactgcactggaggacaaggaaggatccaagtggtcaacgacaacggacagaacgtgttggaccaacaggtgcagaagggacagctcgtggtcatcccacaagggttcgcatacgttgtccagtcccacggaaacaagttcgagtggatctctttcaaaactaatgaaaacgcaatgatcagcactttggcgggtagaacctcgctcttgagggcattgccattggaggtcatatcaaatggtttccagatctctcccgaggaagctaggaagatcaagttcaacacac

SEQ ID NO: 144528 - DNA, 443 bp, Arabidopsis thaliana
atgacgtccgttaacgttaagctcctttaccgttacgtcttaaccaactttttcaacctcggggggttcccgttaacggcgttcctcgccggaaaagcctctcggcttaccataaacgatctccacaacttcctttcctatctgcaacacaaccttataacaggaactttactctttgctttcactgatttcggtttggttctctacatcgtaacccgacccaatccggtttatctcgttgactactcgtgttaccttccaccaccgcatctcaaagttagtgtctctaaagtcatggatattgtctaccaaataagaaaagctgatacttcttcacggaacgtggcatgtgatgatccgtcctcgctcgatttcctgaggaagattcaagagcgttcaggtctaggtgatgagacgtacagtcctgagggactcattcacgt

SEQ ID NO: 144529 - DNA, 446 bp, Arabidopsis thaliana
gaaagaaaaatgggtcgagtctcatctattatctttttctctttgacactcttgatcctctggggtggctacactgcccaacagtggcccaacgagtgccagctcgatcaactcaatgcgctcgaaccatcccaaatcatcaagagcgagggtggtcgcatcgaggtctgggaccaccatgcaccccagctccgttgctccggctttgcctttgagcgtttcgtcattgagcctcagggtcttttcttgcccactttcttgaacgccggcaaactcacgtttgttgttcacggaaggggtctaatgggaagagttattccgggatgcgccgagacgttcatggagtcaccggtatttggagaaggtcaaggtcagggtcagagtcaagggttccgtgacatgcaccagaaagtagagcacctacggtgcggtgacaccattgcaac

SEQ ID NO: 144530 - DNA, 446 bp, Arabidopsis thaliana
cggcattggtctctccccattccaattatgccgtttaccaccggcgacgacaaaactccgacggaggcacaacacctctacaactatctgatccggcagcaaatgggccgaccgacttctctccgacttcaatttcacctccgattcctactcctgctccttcgacaccggcaccaccaccgcacactctcgtctgtccgtcaccatctattgatcgtcccgaacgccacgtccccatccccattgatttctaccatgtattaagagctcaaacacatttcttaaccgatggaatcagaagagcattcggagctagggtttcgaaacccccgcaattcggtttcagcgacgacgctttaatcagccggagacagattcttcaagctgattgcgaaactctcgctaatcctcggtctaaaacagagtacaatgaaagtcttcttgat

SEQ ID NO: 144531 - DNA, 465 bp, Arabidopsis thaliana
  unsure (1)..(465): unsure at all n locations
ggagaaggtcaaggtcagggtcagagtcaagggttccgtgacatgcaccanaaagtagagcggctgcggtgcggtgacaccattgcaacaccatctggtgtagctcaatggttctacaacaatggaaatgagcctctcattcttgttgcagccgcggatctcgccagcaaccagaaccagcttgaccgcaaccttagaccatttttgatagccggaaacaacccacaagggcaggaatggctacaaggccgaaagcaacagaagcaaaacaacatcttcaatggcttcgcacctgagatcttggctcaagccttcaagatcaatgtcgagacggctcagcagctccagaaccagcaagataaccgtggcaacatcgtcaaggtcaacggacctttcggcgtcattaggccacccttgagacgcggcgaaggcggccaacaaccacatgaaatagctaatggttta

SEQ ID NO: 144532 - DNA, 375 bp, Arabidopsis thaliana
gagcgatatgtgtcttatccgcaagtggtgctgtctctactgcaactcttcttcagccagcgaccttctcatggaactattatatacgagggtctattcgagctcatatctctctcaacttcttatctgaacacaactgacaatgactacccaaaccgcactggaagtctagcggtctcacttgctagccctgatggtcgtgtcattggtggtggaattggaggtcctctaatagcagcaagccaagtccaggtcattgttggcagcttcatttgggcaattccgaaagggaagattaaaaaacgtgaagaaacttctgaagatgtccaagatactgatgctttggaaaacaacaacgataacacagcagcaacg

SEQ ID NO: 144533 - DNA, 471 bp, Arabidopsis thaliana
tttcgattcacccctaggatttcttttaatttaattcaatcagaatctgccatataattaaggggtgaaactcatttaaatattaaatttaatctctaaccagtattttataaatccaaactgatatctaatctcctttaattataatatctaatccctaattatcttttgtaaacccaaactggtattttacctcttttaatcgtaaaatttaaatatttttataaacccaaactggtatttaaatataaatagctatatctatcatctatggctttcatgcaaatatcaaaaatattaaatttcttcttaatctcacttaaaaaatatcaaatttattttgaataaatcaaaattcaggtttatatagattgattgttttggacaaagaaaatcaaccttagtatatcttctcttgttgcattataaatctcgggtttctctacgtttgattgtgagtaaggtttcttg

SEQ ID NO: 144534 - DNA, 414 bp, Arabidopsis thaliana
aattatcgaagcccactggtttcggagctgatcgttctctatttctctcttcatacatatggcaagcagataaagttgatcggatactagaatgggaggaggatttagagttttgcatttggtgaggccattcttggcttttctgcctgaggttcagagtgctgataggaaggttccattcagagagaaggttatctacactgtcatctctctcttcatctttcttgtctgcagtcagcttcctctttatggaatccattccaccaccggtgcggatccattctattggatgcgtgtcattcttgcgtccaaccgtggaactgtcatggagctcggtattactcctattgttacatctggacttgtgatgcaactcttggctggttccaagattattgaggttgacaacaatgt

SEQ ID NO: 144535 - DNA, 360 bp, Arabidopsis thaliana
aacaagttccttatcaaatcacaacaacaaatctttatttgagaagcataccactaaatctgaggggtccagacataattcgaagaagatttgaagaagaaagacgaagatttgaagagatcgaagactaagattcatgaaaagaagaagaaccctagaagattagggcaaaaagagaagatttttacagaagaaatgtttgtgatattgagaagaacaaggaagaaaatgagaaacgtctttaatggtgagagaggtgtacggtcgaagttgatgtaaaggataaaaactctgaatcctaatgaatacacgcggaaggagcgaatcatatgatgacgatcattttgccgataccgaatc

SEQ ID NO: 144536 - DNA, 467 bp, Arabidopsis thaliana
  unsure (1)..(467): unsure at all n locations
cacaaacgagtaagaatccaaatccaaatagcaaaaattttggcaaacaagctcttcctcggcggcgcaactttcgccctctgcttcctcctcaccaacgcttccatctaccgcactgttgtcgagttcgacgaagatgacgccagcaaccccatgggcccaagacagaaatgtcagaaggagtttcagcaatcacagcacctaagagcttgccagaaattgatgcgcatgcaaatgaggcaaggccgtggtggtggtccctccctcgacgatgagttcgatttggaagacgacatcgagaacccacaaggcccccagcagggacaccagatcctccagcagtgctgcagcgagcttcgccaggaagagccagtttgtgtttgccccaccttgagacaagctgccagggcccgtagcctncacggacaacacggaccattccaatccaggaaaatttacaagacagc

SEQ ID NO: 144537 - DNA, 474 bp, Arabidopsis thaliana
aacatacacacatagcaaaaaatggcaaacatgtttttcctcgtctgcgcagctctcggtggtgcttcctcctcaccaacgcttccatctaccgcaccgtcgttgagttcgaagaagatgacgccactaaccccataggcccaaaaatgaggaaatgccgcaaggagtttcagaaagaacaacacctaagagcttgccagcaattgatgctccagcaagcaaggcaaggccgtagcgatgagtttgatttcgaagacgacatggagaacccacagggacaacagcaggaacaacagctattccagcagtgctgcaacgagcttcgccaggaagagccagattgtgtttgccccaccttgaaacaagctgccaaggccgttagactccagggacagcaccaaccaatgcacgtcaggaaaatttaccagacaggcaagcacttgcccaacgtttgcgacatcccgcaagttgatg

SEQ ID NO: 144538 - DNA, 382 bp, Arabidopsis thaliana
aactaccaaaaccaactcgaccgcaaccctagagtgttccatttggccggaaacaaccagcggggaggctttggcggttcacagcaacaacaagaacagaaaaacttgtggagcgggttcgacgcacaggtcatagctcaagcattgaaaattgacgttcagttggctcagcagcttcagaaccaacaagacagcagaggaaacatcgttcgtgttaagggacctttccaggtcgtgaggccacctctaaaacagccctacgagagcgaggagtggagacacccacgtagcccacaaggcaacggccttggggagactatctgcagcatgaggtcccacgagaacattgacgaccctgctcgtgctgacgtgtacaagccca

SEQ ID NO: 144539 - DNA, 465 bp, Arabidopsis thaliana
accaggaaaccttccacaattggcaaaccatggttaacaagctcttcctggtttgcgcaacggtggccctttgtttcctcctaaccaacgcttccatctaccgaaccgttgtcgaattcgaagaagatgacgccagcaaccccgtaggtccaagacagagatgccagaaggagtttcagcaatcacaacacctaagagcttgccagagatggatgagcaagcaaatgaggcaaggacgtggtggtggtccttccctcgacgatgagttcgatttcgagggcccccagcagggataccagctactccagcagtgctgcaacgagcttcgccaggaagagccagtttgcgtttgccccaccttgaaacaagctgccagggcagttagcctccagggacagcacggaccattccaatccaggaaaatttaccagtcagctaagtacttgcctaacatttgcaagatcc

SEQ ID NO: 144540 - DNA, 445 bp, Arabidopsis thaliana; identical to SEQ ID NO: 117582

SEQ ID NO: 144541 - DNA, 317 bp, Arabidopsis thaliana
atcgaaagagagacacttttctctctctatttctttatctccttccaatctctctagggtttgcgttacaacggcgaaaagatgttcggtagaggaccctcgaagaagagcgacaacactaagttctacgagatcttaggtgttcctaagagcgcatcaccagaagatctcaagaaagcttacaaaaaagccgctatcaagaatcatactgataagggtggagatcccgagaagtttaacgagttagcacaagcttatgaagtgcttaatgacccggagaagcgtgagatttatgaccagtatggagaggatgcact

SEQ ID NO: 144542 - DNA, 470 bp, Arabidopsis thaliana
caaatctttcagctaccttaaatcagaattctagggttcttccgattagggtaaaatcgaatccggatttcccaaaattctgatctttgatttataaaagatgtctcaaaacgggaagataatcccaaatctggaccaaaacagtacgaggctcctcaatctcacagttctccagcggatcgatccatacatcgaggaaatcctcatcacagccgctcatgtcactttctatgaattcaacattgagctcagccaatggagtcgtaaggacgttgaaggatctttgtttgttgtcaaaagaagtacacaacctcgatttcagtttattgtgatgaatcgtcgtaatacagataatctggtggagaatctcctgggagattttgagtatgaagtacaaggtccatatttactttaccgtaatgcatctcaagaagtaatggcatttggttctacaataaacgtgaatgcga

SEQ ID NO: 144543 - DNA, 500 bp, Arabidopsis thaliana
  unsure (1)..(500): unsure at all n locations
ggaattaccggggcggaccacacccgtccgcggacgcgtggccagccgaaaatccaagtcgactattacgacgattttagttattcggccgggagggttgataatttcgtgtgattaatctatggagttggaatttgaatcaaagtacgagattaaccgtacggcggagttcattattagcaaaagcttcaccagaattgctttacagttcccggatgagttgttaaaagattcgactaaggtcgtgagtgctcttaagagcaaaactcgtttgcttactgacagagaagtcaggttctttgtaatggctgacacaacttatggtagttgctgtattgatgaagatggagctttgcatattgattctgaatgtgttgntcattacggtcaaacatgtctaagcccgacatcaagtcttacagcattcttcgtttttgggaaagcttcgataaacgtctgcagctgtgttaagcatttgatagattatgcgtcaaagagcg

SEQ ID NO: 144544 - DNA, 458 bp, Arabidopsis thaliana
  unsure (1)..(458): unsure at all n locations
cgtactgaaactctagtgctagaaggcgaggcgaatgttatgatttgtgaggcggnggagaaaatgcacgttgatcttctcgttgtgggtagtcgtggccttggcaagatcaaaagagcgtttcttgggagcgttagcgattactgcgctcatcacgccaactgccccatccttattgtcaagccacctaaggagatgactaagtaatatggagctgtttacatgtttgggttattagtacgaattttataatgagtgtgccataatttacctaaaaaagaaaaaaaagaaaaaaagagtgttgtatgtacgtgtgtttgacttggataattagtgacattttaagcaaatgtgtatttggaaaagtgatgtcaatgaaatatgaatatgggtcgaataaagaagcgaagatctgtagactgttgcttctctgcatctgttggtgtattcccgatcat

SEQ ID NO: 144545 - DNA, 464 bp, Arabidopsis thaliana
gacgcgtgcgaaaagttttatgaatggaattgtagctctggttttaatttttgaattgtttgattattaagggtgggtaaacaaagaaatatagaaaagtttacgcaactagtatagtatgatggaatttttgatcaagccaagtaacatttgttatcaaaagtagattgtacaatcttttttttctttttctttttaagttagaatttaataaaaatggatcaatgcatatgaaagtgatgtatgaacgtatgctttttttttttgaataacttagaggttctggatccaaacttgtacatcatgtcaaacaaaagaccggagtattttatatgctttttttgtctaaggcaacaaaacaaattgtcatttttatattacttccaattccaagaaacatattttcaaggttgcttttgcagttatatccatattatctccttggctactggatcaacgacgag

SEQ ID NO: 144546 - DNA, 453 bp, Arabidopsis thaliana
aagcacacttgtctctctctatatatgtatcgtcgtctaatgttgctaagacggccctgaagggtacgatgagaaggaggtggatttggaagtgagaggagtgatcaatgtggcggaagcgtgtggaagaacagagagtatagagacgattgtgttttcttcttcgttaacagcttcaatgaggcgagacaacattggaactcaaaatgatgttgatgagaagtgttggagtgaccatgacttatgtatcaccaagaagttgtggcatgcactggcaaaaatgttgtcggcgaaagcaggttgggcattatccattgaccgtaggctcaacatggtatctatcaaccctggtattgttgtctgaccatctgtgagacatcacatcgcttggtgcaccatgtgataccttaaaggatctgcacaaatgtatgagaatggtggttagcttatgta

SEQ ID NO: 144547 - DNA, 422 bp, Arabidopsis thaliana
ccgtcaaaacgcaatggtgcttccacagtggaacgcaaacgcgaacgccattctttacgtggcgagacggggaagcccaaatccagatcgtaaacgacaatggtaacagagtgtttgacggacaagtctctcaaggacagctcatagccgtaccacaaggtttctcggtggtgaaacgcgcaacaagcaaccgattccagtgggttgagttcaaaacaaacgcaaacgcgcaaatcaacactcttgcgggacgaacctcagtcttgagaggtttaccacttgaagttataaccaatgggttccaaatctcacctgaagaagcaaggagggtcaagttcaacacgctcgagaccactttgactcacagcagtggcccagctagctacggaaggccaagggtggcttgagcttaagagcttaaa

SEQ ID NO: 144548 - DNA, 463 bp, Arabidopsis thaliana
agaaaaatgggtcgagtctcatctattatctctttctctttgacactcttgatcctctgggggggctacactgcccaacagtggcccaacgagtgccagctcgatcaactcaatgcgctcgaaccatcccaaatcatcaagagcgagggtggtcgcatcgaggtctgggaccaccatgcaccccagctccgttgctccggctttgcctttgagcgtttcgtcattgagcctcaaggtcttttcttgcccactttcttgaacgccggcaaactcacgtttgttgttcacggaaggggtctaatgggaagagttattccgggatgcgccgagacgttcatggagtcaccggtatttggagaaagtcaaggtcagggtcagagtcaaggggtccgtgacatgcaccagaaagtaaagcacctacggtgcggtgacaccattgcaacaccatctggtgtagcttaat

SEQ ID NO: 144549 - DNA, 429 bp, Arabidopsis thaliana
  unsure (1)..(429): unsure at all n locations
attctcttctctctcgatatcatctaaatctctctcgatctcaatttcgcaaaatggctgacgaggaagatcagaatcggaatcaacggtttcggaagaatcggtcgtttggttgctagagttgttcttcagagggatgatgttgagctcgtcgctgttaacgatcctttcatcaccaccgagtacatgacatacatgtttaagtatgacagtgttcacggtcagtggaagcaccatgagcttaaggtgaaggatgacaaaactcttctcttcggtgagaagccagtcactgttttcggcatcaggaaccctgaggacatcccatggggtgaggctggagctgactntgttgttgagtctactggtgtcttcactgacaaagacaaggctgctgctcacttgaagggtggtgctaaaaaggttgtcatc

SEQ ID NO: 144550 - DNA, 382 bp, Arabidopsis thaliana
aaatgtgaaacatcttcaccaggtgctcccatcattcgttggcttcatgatttaagggtaacgattgacttgataaaatgtgagaacctagcgaaaagactactttcgttaatgctgaaactagctgcagtttttcgttatactccgcttgagcttctgagaagccagactacagtcagcccttcaagtccaacagaagatgacagtcggtgcagcctcatctcaccacctcctagagagcccacaatgaaagaccggattcttccatgtttggaacgtattcagaaactggagaaaagttatgaggatattcggaacaaacccggtgcaatacctgtagagaaagagagaatgttggtggattctttagacagaatcaagt

SEQ ID NO: 144551 - DNA, 438 bp, Arabidopsis thaliana
aaaaatggctcgagtctcttctcttctttctttcttcttaacacttttgatccttttgcatggctacgcggctcaacagggtcagcagggtcagcagtttccgaacgagtgccagctcgaccagctcaatgcgctcgagccttcacacgtactgaagagcgaggctggtcgcatcgaggtgtgggaccaccacgctcctcagctccgttgctcaagtgtctcctttgcacgttacatcatcgagtctaagggtctctacttgccctctttctttaacaccgcgaagctctccttcgaggctaaaggacgaggtcttatgggaaaagtgatccctggatgcgccgaaacattccaagactcatcagagttccaaccacgcttcgtaggtcaaggtctaaaccagaggttccgtgacatgcaccagaatagggagcacat

SEQ ID NO: 144552 - DNA, 443 bp, Arabidopsis thaliana
tacacacatagcaaaaaatggcaaacaagttgttcctcgtctgcgcagctctcgctctgtggttgctcctcaccaacgcttccatctaccgcaccgtcgttgagttcgaagaagatgacgccactaaccccataggcccaaaaatgaggaaatgccgcaaggagtttcagaaagaacaacacctaagagcttgccagcaattgatgctccagcaagcaaggcaaggccgtagcgatgagtttgatttcgaagacgacatggagaacccacagggacaacagcaggaacaacagctattccagcagtgctgcaacgagcttcgccaggaagagccagattgtgtttgccccaccttgaaacaagctgccaaggccagtagactccagggacagcaccaaccaatgcaagtcaggaaaatttaccagacagccaagcacttgccc

SEQ ID NO: 144553 - DNA, 434 bp, Arabidopsis thaliana
ggcaaatcaagtcatttcattttctacaagaacggatctagctagcatacactaagactcattgataaatatgtaatcatgctaaagaccctagctttaccagcccaatgtgatagtagctagacagagacaaacgtttaatctcacacacattcacatgtaacatgcacacaaatcaaaacccattttcccaaaagcatcagaaagacacgagaaagagacagtagagacaaaaaaagagagaccttcatcgcaaccaggtgtgcattcgcaggtgatttcaaggtcaccggtggggaaaaccctaagtctagcaacagcatcgccgtatcggtgactggtacaaccacacatgacctcaacgtaatcgccaccaacattgaccccactcatctcttgtagctcctcttgcttaaacaacatggacccacatt

SEQ ID NO: 144554 - DNA, 365 bp, Arabidopsis thaliana
gctcaagctttgaagatcgatcttcatacagcgcttcatcttcagaaccaagatgacaaccggggagacattgtccgagtccaagagcccgttcggtgtcattaggccgcctttgaggggccagagacctcatgaggaggaagaagaagaagaaggacgacatggacgacacggtaatggcttagaggagaccatctgcagcgccaggtgcaccgataacctcgatgacccgtctcgtgctgacgtgtacaagccacagctcggttacatcagcactctcaacagttacgatcttcccatccttcgctttattcgtctttcaacccttcgtggatcttttcgtcaaaacacaatggtgctttcac

SEQ ID NO: 144555 - DNA, 436 bp, Arabidopsis thaliana
gctatgtcacagttgagcggtaaaatgatcgaaagcaagccactctatgtggctattgcacagcggaaggaagacagaagggtcagactacaggctcagttttcccaagtgaggccagttgcaatgcagccgtctgttggtccccgcatgccagtgtatcccccgggtggtcctggtattggacaacaaatgttctatggtcaggcccctcctgccatgattcctccccagcctgggtatggataccaacagcagcttgttcctggaatgagacctggtgggggtcctgtacccagtttcttcatgcctatggttcagccacagcagcagcgtcctggaggaggaagacgtcctgggggaatccaacactcccagcaacaaaatcccatgatgcagcaacagatgcatccaaggagtcggatgttccggtatcccc

SEQ ID NO: 144556 - DNA, 426 bp, Arabidopsis thaliana
cgagtctcatctattatctctttctctttgacactcttgatcctcttcaatggctacactgcgcgcaacagtggcccaacgagtgccagctcgatcaactcaatgcgctcgaaccatcccaaatcatcaagagcgagggtggtcgcatcgaggtctgggaccaccatgcaccccagctccgttgctccggctttgcctttgagcgtttcgtcattgagcctcaaggtcttttcttgcccactttcttgaacgccggcaaactcacgtttgttgttcacggaaggggtctaatgggaagagttattccgggatgcgccgagacgttcatggagtcaccggtatttggagaaggtcaaggtcagggtcagagtcaagggttccgtgacatgcaccagaaagtagagcacctacggtgcggtgacacca

SEQ ID NO: 144557 - DNA, 361 bp, Arabidopsis thaliana
caaaaagaaaatggttaagctcagcaatctcctcgttgcttccttcgggagttctcctcgtccgtaacggctgccttgcgaggcagtcacttggggttcctcctcagctacagaacgagtgtaacctcgacaacctagatgttctccaagccaccgaaactatcaagagtgaagccggtcagatcgagtactgggaccacaaccaccctcagctccgatgtgttggtagtttccgtgctcgttatgtaattgaacaaggcggtctttacttgcccaccttcttcactttcccaaaaatttcctacgtcgttcaaggaacgggtatcatcggaagagtggtccctggatgtgccgagacctt

SEQ ID NO: 144558 - DNA, 278 bp, Arabidopsis thaliana
attagcctttactctatagatttatatcatatctatcgacatggcgaatgtggaccgtgatgggtttttgcatgttgaccgcactgacaaacttgttcatcaggcaaacatactaacataatgtcggttttggagactatgacgattaaggtgctcggcatgtgattatagacagaaatgtcagatggagttacaaaattttagagctcttagcagcgagttacaatttgatgcacactgataacacgtaatggactcactgtagtccgttcgttgat

SEQ ID NO: 144559 - DNA, 161 bp, Arabidopsis thaliana
aaacaacaacaaagccaaccatgtcaagtactacttgtacaacaaggccaaccatgggaaggacatgggacaactaacacaacaaggaagacacagccaaccatgagaaggacagagacaacaggagcaacataggactacagggacaacaaggccaacca

SEQ ID NO: 144560 - DNA, 400 bp, Arabidopsis thaliana
aacatacacaagtaattaactaacaacaaatggcttacaagctcttcctcgtctgcgcagctgtggccctgtgtttcatcctcaccaacgcttccgtctatcgcacggttgtcgagttcgacgaagatgacgccagttaccccataggcccaatacagaaatgtcagaaggagtttcagcaagaacagcacctaagagcttgccagagatggatgcgcaagcatatgtggcaaggacgtggtggtggtccttccctcgacgatgagttcgatatggaagacgacatctagaacccgcagagacgacagctactccagaagtgctgcatcgagcttcgccaagaagagccagtttgcgtttgccccaccttgagacaagctgccaaggccgttagatttca

SEQ ID NO: 144561 - DNA, 192 bp, Arabidopsis thaliana
gtttcattgaaaatttcaagaaccctagtttataacgataatgggttcgagagttttggcttgcttctttgttttcttaatcttcacggtcatcacattgcctcccacgatccaagcttgcactccttgtactcgtcctcatcctccggttccgaaacctccacaacacggcggtggtggaggtggtggttt

SEQ ID NO: 144562 - DNA, 439 bp, Arabidopsis thaliana
tgtcagtcttgctggtgcacagaaagcgtctctctatcccgatgacttgcttctactctcaaattttgtcatgtcatcagaatcattcaggcaagtgctaaatattttgtccatttacccaccgggaaccatacatctgtttgtgtaacttgttctcactgctaacaggacatcagaatctttctcaccaatctgcctaccaagatacaacgctcaagcctttttgcatgcctatgtccacttctttgatgtgagtcaaatacttgtaaagagcttcttaaattcatccagtgcacaatgtgaaatattaacttactcgatggtgtaggatgatacatatgtaatattgcttaccacacgttcagatgcgttccatcatctcaaagattgcaggtaataaaagctatatcatacttgaaggtactcgtgttttttacat

SEQ ID NO: 144563 - DNA, 423 bp, Arabidopsis thaliana
cttttctctccagatttcgattcccgatgctcgagagattttccgaaatctcttctccgttgagtcagtcaaccaaagatgcgtgagattcttcacatccagggtggtcaatgcggtaaccagatcggagccaagttctgggaaagtggttgcgccgagcacggcatctatccaaccggaaggtacaccggagactcagatctgcaacttgagcgcatcaacgtttacttcaatgaatcgagttgcggtagattcgttcctcgtgcagagctcatggatttggagcctgggtctattgatagtctcaaatctggaccggacggtcagacctttttacctgattactttcgtcttggtcaatccggtgcgggttacaactgggccaagggacacttcacttgaatgagctgaacttatcgattt

SEQ ID NO: 144564 - DNA, 402 bp, Arabidopsis thaliana
  unsure (1)..(402): unsure at all n locations
tccgttttttctttccatctagnctaagagaaagaggaggacttaagagaaagaagaagaggacttgaatacggaagcttgagagaatgaaagcgatcgtgatctcggagccaggtaagccggaggttcttgaactccgtgatgtggcagacccagaagttaaagacgatgaggttctcatcagagttctcgctactgctttgaatcgcgcagatactcttcaaagacttggcctttataattcaccacctggctcaagcccttaccttggtcttgaatgttctgggaccattgaatccttcagtaaaggcgtctttcgatggaaagtccgataccaggtgtgtgctcttttttttagaggaggttatgcagagaaaagttttgtttctgctggacaaattt

SEQ ID NO: 144565 - DNA, 209 bp, Arabidopsis thaliana
aagaaaaatgggtcgagtctcatctattatctctttctctttgacactctagatcctcttcaaaggcgactcttcccaacattatcccaaccagttccatcttgatcatctcaattctctcgtaccacctccttatcatcttgatcattcttcatttctaaacctttacaacatcattattgtgtatttttaatctttcttttttttta

SEQ ID NO: 144566 - DNA, 442 bp, Arabidopsis thaliana
  unsure (1)..(442): unsure at all n locations
agaaaacatacacaaatagcaaaacatggctaacaagctcttcctcgtctgcgcaactctcgcgctctgcttcctcctcaccaacgcttccatctaccgcaccgttgtcgaattcgaagaagatgacgccagcaaccccgtaagtccaagacagagatgccagaaggagtttcagcaatcacaacacctaagagctngccagagatggatgagcaagcaaatgaggcaaggacgtggtggaggtccttccctcgacaataagttcgattccaagggcccccagcagggataccagctactccagcagtgctggaccaagcttcgccaggaaaagccagtttgcgtttgccccaccttgaaacaagctgccagggcagttagcctccagggacagcacggacctatccaatccaggaaaatttaccagccagctaagtacttg

SEQ ID NO: 144567 - DNA, 341 bp, Arabidopsis thaliana
cacacatagcaaaaaatggcaaacaagttgtttcttgtctgcgcagctctcgctctctggttgctgctcaccaacgcttccatctaccgcaccgtcgttgagttcgaagaagatgacgccactaaccccataggcccaaaaatgaggaaatgccgcaaggagtctcagatagaacaacacctaatagcttgccagcaattgatgctccagcaagcaaggcaaggccgtagcgatgagtttgattcctaagactacatggtgaacccttagggtcatcatcaggaacaatcagttattccatcattgcttcaccagagctttgtctgtatatgcttgatttg

SEQ ID NO: 144568 - DNA, 436 bp, Arabidopsis thaliana
gtttgatacacatttgaagaaagaaatggcatccaaccaacagagctacaaagctggtgagaccagaggcatagcccaggagaagactggacaagctatgggaacgatgaaggacaaagctggagaaggcccggacaaaacttcttaaacaggccaaacaagccaacaaaaaggccatgagacaagccagtcaggttaaaataaaacatcttaaactggccaagcggcttaacaaaaaggccatgaaaccgcccaatcagcaaaagaaaaaacattctaaactggccaaaccggacaacaaaaaggccatgagacgacgcaagccgcaaaagaaaagacatctcaagctggcgacaaagctcgcgagggcaaagacaaggccgggagcttcttatcggagacaggcgaaaccataaagaacaaggctcaagacgct

SEQ ID NO: 144569 - DNA, 131 bp, Arabidopsis thaliana
catcgctcttctcgacatcgccaactaccttaactaactcgaccgcaaccctagagagggcgtgtggccggaaacaaccagcagggaggctttggcggttcacagcaacaacaagaacagaaaaacttgtg

SEQ ID NO: 144570 - DNA, 314 bp, Arabidopsis thaliana
atctcaatcaaagtcaaaatatatttgcttgtttggtaattcttagatgtgcttgagtttttatttgtgtgaagagattaatatattcgaaacacttggcgtgaatgcaaatcctaacgagataagcaatcctcttaatgtaaagaacaacaaataacatggtccatgcccatatttaacagcgtgttatcaacacttgagaccactttgacccgctctgccggtttgcaacaacaggccggccgtcctagagattccaagctttcatacgcaagcatgcgacctcttagttaattctatagtggcacctaaat

SEQ ID NO: 144571 - DNA, 438 bp, Arabidopsis thaliana
cttgaatacagaagcttgagagaatgaaagcgatcgtgatctcggagccaggtaagccggaggttctgcaactccgtgatgtggcagacccagaagttaaagacgatgaggttctcatcagagttctcgctactgctttgaatcgtgcagatactctccaaagacttggcctttataatccaccacctggctcaagcccttaccttggtctcgaatgttctgggaccattgaatccgtcggtaaaggcgtctctcgatggaaagtcggagaccaggtgtgtgctcttctttctggaggaggttatgcagagaaagtttctgttcctgctggacaaattttcccaattcccgctggtatctctctaaaagatgcagcggctttccctgaattggcatgcactgtttggtctactgtctttatgatgggcccgtctcttt

SEQ ID NO: 144572 - DNA, 439 bp, Arabidopsis thaliana
attactttcataatctgtaaaacattgtaaccaattgtgagtgcagagtaaagcttgtgcattctttggaagtcaacagtttaaatatggagaactaatctaatttactataatcgtttgattaaattctcacctacattcgtttatcttggttcattatttttggtcatttttattaaaggttagtgaaacatagcccctgcaaagaaattaaatcaaataatctttctatttttttcttaggatttgattactctttaagctataaaatatgaattgtttgccaagaagaagaacatgacgatttttctatgagatgttaaaaatggggcaacatcaatggaaggaggttgattatggtggggtatccataagtcagttagtgtttgtgtcaataacaatctttactttggaagttacacagttaatggatcgagct

SEQ ID NO: 144573 - DNA, 434 bp, Arabidopsis thaliana
gactaaaacggtccctacatcacaaccaacatgttatgcatcagaagctgcaacataagctaggcggaatcatcttcctaataaccatcactgactacgaatctaaagccgaacatggcttgcaatcatgatactactctcggccaatatttcaatgctcttcccaaaatcgcatataacaaacacctggcaggcattatatctccgatctcagccgataaatggaactgctcaattatctctacacacgccaaccaatgatcgtgtgtgagagttctaaagcactacacgtgaagcaagtcaatggcatagtgaaaagtccaagtacacctctttactccgtatcgatcatcacaacgcacttagggaaacgcattatcaatacgcagaatgtgaaacctcgagaatcacactcatgaaaaaagaatctttct

SEQ ID NO: 144574 - DNA, 436 bp, Arabidopsis thaliana
aaaatggctcgagtctcttctcttctttctttctccttaacacttttgatccttttccatggctacgcggctcaacagggtcagcagggtcagcagtttccgaacgagtgccagctcgaccagctcaatgcgctcgagccttcacacgtactgaagagcgaggctggtcgcatcgaggtgtgggaccaccacgctcctcagctccgttgctcaagtgtctcctttgcacgttacatcatcgagtctaagggtctctacttgccctctttctttaacaccgcgaagctctccttcgtggctaaaggacgaggtcttatgggaaaagtgatccctggatgcgccgaaacattccaagactcatcagagttccaaccacgcttcgaaggtcaaggtcaaagccagaggttccgtgacatgcaccagaaagtggagcaca

SEQ ID NO: 144575 - DNA, 290 bp, Arabidopsis thaliana
aaacaaaaagaaaatggttaagctcagcaatctcctcgttgcaaccttcggggttctcctcgtgcttaacggctgccttgcgaggcagtcacttggggttcctcctcagctacagaacgagtgtaacctcgacaacctagatgttctccaagccaccgaaactatcaagagtgaagccggtcagatcgagtactgggaccacaaccaccctcagctccgatgtgtaggtgtttccgttgctcgttatgtaattgaacaaggcggactttacttgcccaccttcttcactt

SEQ ID NO: 144576 - DNA, 442 bp, Arabidopsis thaliana
aagaggaagaaaaatgggtcgagtctcatctattatctctttctctttgacactcttgatcctcttcaatggctacactgcccaacagtggcccaacgagtgccagctcgatcaactcaatgcgctcgaaccatcccaaatcatcaagagcgagggtggtcgcatcgaggtctgggaccaccatgcaccccagctccgttgctccggctttgcctttgagcgtttcgtcattgagcctcaaggtcttttcttgcccactttcttgaacgccggcaaactcacgtttgttgttcacggaaggggtctaatgggaagagttattccgggatgcgccgagacgttcatggagtcaccggtatttggagaaggtcaaggtcagggtcagagtcaagggttccgtgacatgcaccagaaagtagagcacctacggtgcggtgacacc

SEQ ID NO: 144577 - DNA, 442 bp, Arabidopsis thaliana
cagggacaacaaggacgacagggacaacaaggccaaccatgggaaggacagggacagcagggacaacaagggttccgtgacatgcaccagaaggtggaacatgtgagacgcggagacgtctttgccaacactccaggctctgcccactggatctacaactcatgagaacagccacttgtcatcatcgctcttctcgacatcgccaactaccaaaaccaactcgaccgcaaccctagagtgttccatttggccggaaacaaccagcaaggaggctttggcggttcacagcaacaacaagaacagaaaaacttgtggagcgggttcgacgcacaagtcatagctcaagcattgaaaattgacgttcagttggctcagcagcttcagaaccaacaagacagcagaggaaacatcgttcgtgttaagggacctttccaggtcgtga

SEQ ID NO: 144578 - DNA, 416 bp, Arabidopsis thaliana
cacaagggttcgcatacgttgtccagtcccacggtaacaagttcgagtggatctctttcaaaactaatgaaaacgcaatgatcagcactttggcgggtagaacctcgctcttgagggcattgccattggaggtcatatcaaatggtttccagatctctcccgaggaagctaggaagatcaagttcaacacacttgagaccactttgacccgcgctgccggtaggcaacaacaacagttgatcgaggagattgtcgaggcttaaatcaaaacgtttttctttttcttaataaagtatggtcagtttgtaatcacgtccctttacctttaacgtacgtgtaaaatatgtgtctgcggcacctcacttgtaataacactttcttctcataaataaaaaggaagtttcgagttacatact

SEQ ID NO: 144579 - DNA, 429 bp, Arabidopsis thaliana
  unsure (1)..(429): unsure at all n locations
acaagggttccgtgacatgcaccanaaggtggaacatgtgagacgcggagacgtctttgccagcactccatgctctgcccactggatctacaactcaagagaacagccacttgtcatcatcgctcttctcgacatcgccaactaccaaaaccaactcgaccgcaaccctagagtgttccatttggccggaaacaaccagcagggaggctttggcggttcacagcaacaacaagaacagaaaaacttgtggagcgggttcgacgcacaggtcatagctcaagcattgaaaattgacgttcagttggctcagcagcttcagaaccaacaagacagcagaggaaacatcgttcgtgttaagggacctttccaggtcgtgaggccacctctaagacagccctacgagagcgaggagtggagacacccacgtag

SEQ ID NO: 144580 - DNA, 419 bp, Arabidopsis thaliana
ataaagaaatggtaagctcacaatctcttgttgcaacccttcggggtctcctcgtccgtaacggctgccttgcgaggcagtcacttggggttccttctcaactacagaacgagtgttacctcgacaacctagatgttctccaagccaccgaaactatcaagagtgaagccggtcagatcgagtactgggaccacaaccaccctcagctccgatgtgttggtgtttccgttgctcgttatgtaattgaacaaggcggtctttacttgcccaccttcttcacttccccaaaaatttcctacgtcgttcaaggaacgggtatcagcggaagagtggtccctggatgtgccgagaccttcatggactcgcagccgatgcaaggacaacaacaaggccaaccatggctaggacgacagggacaa

SEQ ID NO: 144581 - DNA, 313 bp, Arabidopsis thaliana
caacaaacaaaaagaaaatggttaagctcagcaatctcctcgttgcaaccttcggggttctcgtagtgcttaacggctgccttgcgaggcaatcacttggggttcctcctcagctacagaacgagtgtaacctcgacaacctagatgttctccaagccaccgaaactatcaagagtgaagccggtcagatcgagtactgggaccacaaccaccctcagctccgatgtgttggtgtttccgttgctcgttatgtaattgaacaaggcggtcttttacttgcccaccttcttcactttcccaaaaattttctacg

SEQ ID NO: 144582 - DNA, 441 bp, Arabidopsis thaliana
ggagactatctgcagcatgaggtcccacgagaacattgacgaccctgctcgtgctgacgtgtacaagcccagcctaggtcgcgtgaccagcgtcaacagctataccttgcccatcttggagtatgtcaggctcagtgccactcgtggcgttctccagggtaatgcgatggtgcttcctaaatacaacatgaacgctaacgagatcttgtactgcactggaggacaaggaaggatccaagtggtcaacgacaacggacagaacgtgttggaccaacaggtgcagaagggacagctcgtggtcatcccacaagggttcgcatacgttgtccagtcccacggaaacaagttcgagtggatctctttcaaaactaatgaaaacgcaatgatcagcactttggcgggtagaacctcgctcttgagggcattgccattggaggtcat

SEQ ID NO: 144583 - DNA, 443 bp, Arabidopsis thaliana
cacatagcaaaaaatggcaaacaagttgttcctcgtctgcgcagctctcgctctctgcttcctgctcaccaacgcttccatctaccgcaccgtcgttgagttcgaagaagatgacgccactaaccccataggcccaaaaatgaggaaatgccgcaaggagtttcagaaagaacaacacctaagagcttgccagcaattgatgctccagcaagcaaggcaaggccgtagcgatgagtttgatttcgaagacgacatggagaacccacagggacaacagcaggaacaacagctattccagcagtgctgcaacgagcttcgccaggaagagccagattgtgtttgccccaccttgaaacaagctgccaaggccgttagactccagggacagcaccaaccaatgcaagtcaggaaaatttaccagacagccaagcacttgcccaacg

SEQ ID NO: 144584 - DNA, 441 bp, Arabidopsis thaliana
gttccatgtaataaataatctgcctttatagatcttgggatgactcaactatcacatatattagaaggcgatgaacacgacacgatattgtataattttacagtcacctagtacaataaagcagataagtcgcactgtaaacaaaaaaaaaaagagtacattcatggcatatcttattgcatcatcacggcaggaatcggaacacctggtctagcggtccatcccttgcgtgatctgtaagcatcgatggcttgtaatcgcagcctctcctgggaagcacttagagtagactttcttgcctgccaaattaacatacatataatcatttgaaccaatagcacaatctctttcctgagttttcctaacaaacaatagcaagactatataccttcggaacaacagccaacttaagtggagctggcacaacatcaccaaatctta

SEQ ID NO: 144585 - DNA, 439 bp, Arabidopsis thaliana
aatgagcctctcattcttgttgcagccgcggatctcgccagcaaccagaaccagcttgaccgcaaccttagaccatttttgatagccggaaacaacccacaagggcaggaatggctacaaggccgaaagcaacagaagcaaaacaacatcttcaatggcttcgcacctgagatcttggctcaagccttcaagatcaatgtcgagacggctcagcagctccagaaccagcaagataaccgtggcaacatcgtcaaggtcaacggacctttcggcgtcattaggccacccttgagacgcggcgaaagcggccaacaaccacatgaaatagctaatggtttagaggagactttgtgcaccatgcgatgcactgaaaacctcgatgacccgtcggatgctgacgtgtacaagccatcactcggatacattagcacacttaaca

SEQ ID NO: 144586 - DNA, 193 bp, Arabidopsis thaliana
gtccaagatcaaatcaagaaacccattaaaaaaattaatcatgtttaggcttcagatttaagggtggagggtttcttggcgaagaaacgacccacactctctgtggatctcaacaggaggaagagcttatcgatttacctcctggtttcaagttttatccatcagacaattaacgcttatcatactatattca

SEQ ID NO: 144587 - DNA, 440 bp, Arabidopsis thaliana
ctcaggaggaggaagaagaagaagaaggacgacacggacgacacggtaatggcttagaggagaccatctgcagcgccaggtgcaccgataacctcgatgatccgtctcgtgctgacgtgtacaagccacagctcggttacatcagcactctcaacagttacgatctccccatccttcgcttcatccgtctctcagccctccgtggatctatccgtcaaaacgcaatggtgcttccacagtggaacgcaaacgcgaacgccattctttacgtgacagacggggaagcccaaatccagatcgtaaacgacaatggttacagagtgtttgtcggacaagtctcttaaggacagctcatagccgtaccacaaggtttctcgtgggtgaaacgcgccacatgcaaccgtttccatggggtgtgttcaaaacatactcaaactcgc

SEQ ID NO: 144588 - DNA, 331 bp, Arabidopsis thaliana
aaacgattcgattctgcgaaagcacttttcaattctcatcggattatttctcttccaatttctacaacgggagctaaactatctagatcggagcattcaatggctgcttcttccgaacccaaatctctttacgatttcaccgtcaaggatgctaagggaaacgatgttgatctaagcatctacaaagggaaggttcttttgattgtgaacgttgcttctcaatgtggcttgactaattcgaattatactgagcttgcgcagctgtttgagaagtacaaaggccatggtttcgagattcttgctattccgtgttaccagttcgagaatcaag

SEQ ID NO: 144589 - DNA, 342 bp, Arabidopsis thaliana
caatttcttcaaccctaattcttctctctttttcttatctaccaaacttgatctccaagggcgggctcagcaccaccagtcctcccaatctccaatccccaaaccgttccatccgccgctccttcctccgtcgaatctcaaccaccgatcgctactccagctttccgcaatttcatcaatcagatcaccgaaaccgttaaaaacggtctctctaagcgtcgtccttgggctgagctcgcggatcgttccgctattatccaaacctgagtcgaactccgacgctgtagttcgatccgcatgattttctcgttttcaaggttattttccctatcgtccgcttca

SEQ ID NO: 144590 - DNA, 436 bp, Arabidopsis thaliana
cacctacggtgcggtgacaccattgcaacaccatctggtgtagctcaatggttctacaacaatggaaatgagcctctcattcttgttgcagccgcggatctcgccagcaaccagaaccagcttgaccgcaaccttagaccatttttgatagccggaaacaacccacaagggcaggaatggctacaaggccgaaagcaacagaagcaaaacaacatcttcaatggcttcgcacctgagatcttggctcaagccttcaagatcaatgtcgagacggctcagcagctccagaaccagcaagataaccgtggcaacatcgtcaaggtcaacggacctttcggcgtcattaggccacccttgagacgcggcgaaagcggccaacaaccacatgaaatagctaatggtttagaggagactttgtgcaccatgcgatgcactg

SEQ ID NO: 144591 - DNA, 370 bp, Arabidopsis thaliana
gggtgattctcagattcacaagcttttagagctcgaatttgattggcgagctagaaatgtcgaggttttgaggaagaagcaaccacaaaagaggattgattttaagggcttttttgtttctttccgatcttgcggcagagatggcgtcaaggtttataaagtgtgtgaccgtcggagatggtgccttctgaaaaacttgcatgctcatttcttacactagcaatactttccctactgattatgtgccaactgttttcgacaacttcagagctaatgtggtttgttgattcatcattgtctatttttgactgtggatacttttgttttattgtcttcatcttgtttcttccttttttttcattagttctgt

SEQ ID NO: 144592 - DNA, 442 bp, Arabidopsis thaliana
gtgaagtgttcggatcgcggcgacgtgggtggttcgccgcccgcgacgtcgcgagaagtccactaaaccttatcatttagaggcaggagaagagtgagatggttggtccttggaaagctaaggtctatgagatgaacaatgttgttgttagtgttaagtcaagaaaggttcctggttcattggctgtagaaggaggcgatgatgatatctgcgatgttttaacagatgaagagcaaaagcaactagaggatgctcttaagctggatttaccagacttcccaaatgtcaatggtgagaatggtttcattgttcatcatcaggaagatcatgttgaggccaacaagaaagcagagaagaaagggtggttaggaggttggagaaagaaagagactaaacaagagaagcagattcaatacgcgccaccgagaaactctctttgtgt

SEQ ID NO: 144593 - DNA, 439 bp, Arabidopsis thaliana
ctgtcatcgatggcctctttgatgctcaacggggccattaccttccccaaaggtttaggttgccctggttccaatttgcatgccagatcgattcctcggccgaccttactctcagttacccgaacctccacacctagactctcggtggctactagatgcagcagcagcagcgtgtcgtcttcccggccatcggcgcaacctaagttcattcagcacaagaaggaggcttactggttctacaggttcttatccatcgtatacgaccatgtcatcaatcctgggcattggaccgaggatatgagagacgacgctcttgagccagcggatctcagccatccggacatgcgagtggtcgatgtcggcggcggaactggtttcactactctgggcatagtcaagacagtgaaggccaagaatgtgaccattctggaccagtcgc

SEQ ID NO: 144594 - DNA, 439 bp, Arabidopsis thaliana
tcgagatctttttcctcatcatgtcagcaaatcccacgactgtggtatcaggatcaatttcaaagagcttctctacaatcttggtgtaggcgtgttcatgacgcctctcatcagcagcaatggtgccacaaatcttcccaagtgtcaagtctccaagatcctttgccagtctagcagtgtttccatgggagatgaatgtagctctttcttgaaaagaagtatatatgaatcccaagtaagggttgttttcagtttttggatcctacaaaacaaaacacaatcaatacgaccaaaaaaagagacttgtaggtttagcctttataagaaaagctagccatcttattatactataagagcttaccattccagaaccaatgaggtattgaatagttttttcaatctgtctcatgtctactcgtccagacagataaaggtactt

SEQ ID NO: 144595 - DNA, 277 bp, Arabidopsis thaliana
cacaatctaatcccaaaaatcaaaagatgaatgccacatagttgttgagcttctcgtgattggcgtgttgtgtgccattgtcaccgcaaggcaagtcaaagatttgtccacggagaccaaattaggggcctctcttccaaaaactactaccaaaggcattggagctcagctttttgcaactggcacaacttacagcaccagcagagtcgttagctatgctaatggtttaaacattcccaaaggtccggggcccattgcattcaaaggggccacacat

SEQ ID NO: 144596 - DNA, 433 bp, Arabidopsis thaliana
cggacgcgtgggcaagagtttccagatgtgaagagttgccgtagagcactgagagatatggcgattgctcttcatttcgaaatgcagactataaaatctgacaaaactcgtttcacagctaagtgttcgagtgacggatgtccatggagagttcacgctgcaaagctccccggggttccaactttcacaatcagaacgatccatgaaagccatagctgtggaggaataaatcacttgggtcatcaacaagcttcagttcaatgggttgctagctcggttgagcagcggcttcgcgagaatccgaactgtaaacctaaagagattcttgaagagatacaccgggttcacggaatcaccttatcgtacaaacaagcttggcgtggtaaagaaagaatcatggcgactatgcgcggatcttttgaagaaaggtatc

SEQ ID NO: 144597 - DNA, 199 bp, Arabidopsis thaliana
gagtagattctcagattcacaagcttttagagcttttatttgattggcgagctagaaatgtcgaggtgttgaggttgaagcaaccacaaaagaagattgattttaagggcttttttgtttctttccgatcttgcggtaaatatggcgtcaaggtttataaagttgtgtgaccgtctgatattttgccatcttaataact

SEQ ID NO: 144598 - DNA, 425 bp, Arabidopsis thaliana
agaaaacatacacaaatagcaaaacatggctaacaagctcttcctcgtctgcgcaactctcgccctgtgcttcctcctcaccaacgcttccatctaccgcaccgttgtcgaattcgaagaagatgacgccagcaaccccgtaggtccaagacagagatgccagaaggagtttcagcaatcacaacacctaagagcttgccagagatggatgagcaagcaaatgaggcaaggacgtggtggtggtccttccctcgacgatgagttcgatttcgagggcccccagcagggataccagctactccagcagtgctgcaacgagcttcgccaggaagagccagtttgcgtttgccccaccttgaaacaagctgccagggcaggtagccttcagggacagcacggaccattccaatccaggaaaatttacc

SEQ ID NO: 144599 - DNA, 381 bp, Arabidopsis thaliana
aaagaaaatggttaagctcagcaatctcctcgttgcaaccttcggggttctcctcgtccttaacggctgccttgcgaggcagtcacttgtggttcctcctcagctacagaacgagtgtaacctcgacaacctagatgttctccaagccaccgaaactatcaagagtgaagccggtcagatcgagtactgtgaccacaaccaccctcagctccgatgtgttggtgtttccgttgctcgttatgtaattgaacaaggcggtctttacttgcccaccttcttcactttcccaaaaattttctacttttttctaggaacgtgtttcatcggtagagtggtccctggatgtgccgagaccttcatggactcgcatccgattcaatg

SEQ ID NO: 144600 - DNA, 441 bp, Arabidopsis thaliana
cgccaactaccaaaaccaactcgaccgcatctcctatagtgttccatttggccggaaacaaccagcagggaggctttggcggttcacagcaacaacaagaacagaaaaacttgtggagcgggttcgacgcacaggtcatagctcaagcattgaaaattgacgttcagttggctcagcagcttcagaaccaacaagacagcagaggaaacatcgttcgtgttaagggacctttccaggtcgtgaggccacctctaagacagccctacgagagcgaggagtggagacacccacgtagcccacagggcaacggccttgaggagactatctgcagcatgaggtcccacgagaacattgacgaccctgctcgtgctgacgtgtacaagcccagcctaggtcgcgtgaccagcgtcaacagctataccttgcccatcttggagtatg

SEQ ID NO: 144601 - DNA, 438 bp, Arabidopsis thaliana
cgctcttctcgacatcgccaactaccaaaaccaactcgaccgcaaccctagagtgttccatttggccggaaacaaccagcagggaggctttggcggttcacagcaacaacaagaacagaaaaacttgtggagcgggttcgacgcacaggtcatagctcaagcattgaaaattgacgttcagttggctcagcagcttcagaaccaacaagacagcagaggaaacatcgttcgtgttaagggacctttccaggtcgtgaggccacctctaagacagccctacgagagcgaggagtggagacacccacgtagcccacagggcaacggccttgaggagactatctgcagcatgaggtcccacgagaacattgacgaccctgctcgtgctgacgtgtacaagcccagtctaggtcgcgtgaccagcgtcaacagctatacctt

SEQ ID NO: 144602 - DNA, 428 bp, Arabidopsis thaliana
agactttcttacctgtggcaagcactgggtcgaccaaaaatactcttgaattcttgggaaattcatcatgcaacctaaagaagatgtatcaaaggtgttattataaacacttcagtcactacaaacacaatgctgcagagaagttcttacttgttaagatacaccgatggttaaagtgttttctcatctctacttactcctgtaaaagaaaagaagcacggggacatcaataagctatttgataaaaggtctcatttctgacatccgaagttcaagcaagagatgatatatagctagattactaacctaaatgataaattttattagcaggtaaaactgaggatgcgcgttccgcaagagcaagaccagctcttaatatcgggacaacctacacagagacaaaaccaagaattagaaacgcttacatg

SEQ ID NO: 144603 - DNA, 443 bp, Arabidopsis thaliana
cctggatgcgccgaaacattccaagactcatcagatttccaaccacgcttcgaaggtcaaggtcaaagccagaggttccgtgacatgcaccagaaagtggagcacattaggagcggtgataccattgccacaacacccggtgtagcccagtggttctacaacgacggacagcaaccacttgtcatcgtcagcatcttcgatctagccagtcaccagaaccagcttgaccgcaacccaaggccattttacttagccggaaacaacccacaaggtcaagtatggctacaaggacgagagcaacagccacagaagaacatcttcaatggatttggacccgaggttattgctcaagctttgaagatagatcttcagacagcgcagcaacttcagaaccaagatgacaaccgtggaaacattgtccgagtccaaagcccgttcggtgt

SEQ ID NO: 144604 - DNA, 150 bp, Arabidopsis thaliana
ataagaaataacaaaatggctcgagtctcttctcttctttctttcctcttaacacttttgatgctttgtcatggctacgcggctcaacagggtcagcagggtcagcagtttccgaacgagtgccagcttgaccagcttaatgcgctcgag

SEQ ID NO: 144605 - DNA, 440 bp, Arabidopsis thaliana
agaaaaatgggtcgagtctcatctattatctctttctctttgacactcttgatcctcttcaagggctacactgcccaacagtggcccaacgagtgccagctcgatcaactcaatgcgctcgaaccatcccaaatcatcaagagcgagggtggtcgcatcgaggtctgggaccaccatgcaccccagctccgttgctccggctttgcctttgagcgtttcgtcattgagcctcaaggtcttttcttgcccactttcttgaacgccggcaaactcacgtttgttgttcacggaaggggtctaatgggaagagttattccgggatgcgccgagacgttcatggagtcaccggtatttggagaaggtcaaggtcagggtcagagtcaagggttccgtgacatgcaccagatagtagagcacctacggtgcggggacaccattgc

SEQ ID NO: 144606 - DNA, 441 bp, Arabidopsis thaliana
gtccgcagaaaaactcttttgactccacgagcgttttaagatgtaccttctagcttccgatttgcggggatgaccaagaagccacaatggtggtggagaactttggcttgcctgccttacctaatgccactgcatgaaacttggatgtatgcagaaaccgcttaccatctccacccattcctagaagattttgaattcttaacctacccatttctaggcgccataggaagattaccaagctggttcctcatggcttacttttttgtagcttatctagggatagtgcgaagaaaagaatggcctcacttcttcaggttccatgtagtgatgggtatgctgcttgaaatcgcactccaggttatagggaccgttagcaagtggatgcctcttggagtctattggggtaagtttgggatgcatttttggactgctgttgcgttt

SEQ ID NO: 144607 - DNA, 406 bp, Arabidopsis thaliana
ggaagaaaaatgggtcgagtctcatctattatctctttctctttgacactcttgatcctcttgaatggctacactgcccaacagtggcccaacgagtgccagctcgatcaactcaatgcgctcgaaccatcccaaatcatcaagagcgagggtggtcgcatcgaggtctgggaccaccatgcaccccagctccgttgctccggctttgcctttgagcgtttcgtcattgagcctcaaggtcttttcttgcccactttcttgaacgccggcaaactcacgtttgttgttcacggaaggggtctaatgggaagagttattccgggatgcgccgagacgttcatggagtcaccggtatttggagaaggtcaaggtcagggtcagagtcaagggttccctgacatgcacc

SEQ ID NO: 144608 - DNA, 456 bp, Arabidopsis thaliana
ttccgggcgcccagcgtcggaaatggtaagctatcaatctcctcgtgcatccttcggggttctcctcgtccttaacgggtgcgttgcgaggcagtcacttggggttcctcctcagctacagaacgagtgtaacctcgacaacctagatgttctccaagccaccgaaactatcaagagtgaagccggtcagatcgagtactgggaccacaaccaccctcagctccgatgtgttggtgtttccgttgctcgttatgtaattgaacaaggcggtctttacttgcccaccttcttcacttccccaaaaatttcctacgtcgttcaaggaacgggtatcagcggaagagtggtccctggatgtgccgagaccttcatggactcgcagccgatgcaaggacaacaacaaggccaaccatggcaaggacgacagggacaacaaggccaaccatgggaaggaca

SEQ ID NO: 144609 - DNA, 426 bp, Arabidopsis thaliana
aagaaatcatcgtcttcttcttcatctattcaggatcgatccggcttgagatttattacaaattcgtccttctatttgctccaaaagttcgacaatttcgtaggggcaaagatggacgctgattccaagagatttctagctacgcttcgatcccgatctgaaatgttaatgggctttgaagaaatagatggagatgatgatttccaggaggagtttgcttgcccgttctgtgcagaatcgtatgatatcatcgggttgtgctgtcacatagatgatgaacatactttagagtcgaagaacgcggtatgccctgtttgttctcttaaagagggagttgatatcgtagcacacataacgcttcaccatgggagtttatttaagttgcagcgaaagagaaagtcacgaaaaagcggtaccaattcgaca

SEQ ID NO: 144610 - DNA, 437 bp, Arabidopsis thaliana
cccaaatttcagagaaaggagttttacaaattttgctggatttgagatttgcatctgaggtgggttctgggggtgatactagcaccaatgtggagacaccaaagagcacaataaatagatcggcttacaggcgaaggcaggagcaacagaaaacaaagttagtcaatagaggtcgcattgatggagtgacctcccaactaacccaaaagttggatcccatagactggcttacgtacgagccttatctttgggagaacgaaaagcagtcatacctacgccatgctgtactctttggtttctttgtgcaacttaaccgaatgttcacagatactgcgcagagactatcaatttatatagaatcaaatatcatgccatgttccacagtttcccgcttcaaatacctttccataagcgctccaactctgtcatttagaagt

SEQ ID NO: 144611 - DNA, 442 bp, Arabidopsis thaliana
gtttgaaggaaactaactttattatataagattaatatcacatctttctacaagccaatggcatcaagaagctgtgaatgcttggaaacaggaactagcgaattcgccacaatcgcgccgctagctgccactgcaggaactccgatcccgggaaaggtcgagtcaccgcaacacaaaagctgcggaatgggagtggaatggccaggaaaagtacctttacctgcctctattgcaggcccatatgttcctctattcctccttagaaacctctgatgcgtcaatggtgttccaaccaaactcacctcgcacttttctcttttgaaccctggccctaatgcccgctcaaccgctctccacatcaccttcaccaaacggtaccaggacattttggttaagatttgttttttcgtattcagagaactgtagattacaaaaatgaatt

SEQ ID NO: 144612 - DNA, 349 bp, Arabidopsis thaliana
atcaaactttgttttctttgcttcttctatcttcttcttctttcttcttctcgctttaatactctttgattcctctgttcgtttgatgagaattagattttaaatggcaaaagtttcgtttaaggattctctgaaagctcttgaagctgatattcaacacgctaacactgtagctttagattatcctcgggagaaggatggagcgcgtgttcaaatgaggctatcgtacactccagctgctcagtttttactttttcttgtacaatggactgattgccatcttgctggtacactcggtctgctcagagttctgatttacatgacctatgcggttgggaataccacattg

SEQ ID NO: 144613 - DNA, 424 bp, Arabidopsis thaliana
  unsure (1)..(424): unsure at all n locations
ctcgttctaaaaaaaatctagctgctatctctctattagttcactcctccttcaagcaaagcgacgtggctcttctttttgctcctctgagataggtttaagattaaaccagacccatctaatggatctggaacaagcttcgtctctggttccactctgatcatcagagtattaaaaatggagtcnttcttctccagatccacctccatcgtctccaaattgagtttcttggccttatggatcgtcttcttgatttcttcatcttcctttacttcgacagaagcatatgatgcgcttgatccagaaggcaacattacaatgaaatgggatgttatgagctggactcctgatggctatgttgccgtggttaccaatgttaactttcaataatacaaacacattcaatcttcaagatggacatttg

SEQ ID NO: 144614 - DNA, 354 bp, Arabidopsis thaliana
gaaaatggttaagctcagcaatctcctcgttgcttctctttgagttctcctcgtccttaacggctggctagcgaggcagtcacttggggttcctcctcagctacagaacgagtgtaacctcgacaacctagatgttctccaagccaccgaaactatcaagagtgaagccggtcagatcgagtactgggaccacaaccaccctcagctccgatgtgttggtgtttccgtagctcagtattaattgaacaaggcggtctttacttgcccacctttttaactttcccaaaaattccttcttcgttcaatgaacggtgttcagcttgtagagtggttccctgtatgtgccttgtcctt

SEQ ID NO: 144615 - DNA, 393 bp, Arabidopsis thaliana
cttagacttatctctatatacccccttttaatttgtgtgctcttagcctttactctatagttgtatatcatatcaatcgacatggcgaatgtggaccgtgatcggcgtgtgcatgtagaccgtactgacaaacgtgttcatcagccaaactacgaagatgatgtcggttttggtggctatggcggttatggtgctggttctgattataagagtcgcggcccctccactaaccaaatcttggcacttatagcaggagttcccattggtggcacactgttaaccctagctggactcactctagccggttcggtgatcggcttgctagtctccatacccctctttcttctcttcagtccggtgatagacccggcggttctcactattgggcttgct

SEQ ID NO: 144616 - DNA, 439 bp, Arabidopsis thaliana
agcaaaccggtgatcttgctgaaattcgcggtactcttcttgcgttgcatcattctgcaacgctaaggcacgatgagctgggtcaggaaacccttctgaacctgttgctacgtaactatttgcattacaacctctatgatcaggcagagaagctaagatcaaaggcacctcgctttgaggctcattcaaaccaacagttttgtaggtaccttttctatctcgggaagattcgtactattcagctcgaatatacggacgcaaaagagagccttcttcaagcggccaggaaagcccctatagcagctttgggcttcaggatccaatgtaataaatgggcaattctggttcggctactgctgggtgagataccagagcgttctatcttcactcaaaaaggtatggagaaggccctcataccctacttcgagctaacaaatgc

SEQ ID NO: 144617 - DNA, 306 bp, Arabidopsis thaliana
  unsure (1)..(306): unsure at all n locations
gaagaaatacaaaatggctcgagtctcttctcttctttctttcttcnaacacttttgatccttttcgatggctacgcggctcaacagggtcagcagggtcagcagtttccgaacgagtgccagctcgaccagctcaatgcgctcgagccgtcacacgtactgaagagcgaggctggtcgcatcgaggtgtgggaccaccacgctgctcagcttcgttgctcaagtgacttctttgcacgttacattatcgagtttaatggtctttacttgccctcttattttaacacccggattctttctttcgtg

SEQ ID NO: 144618 - DNA, 425 bp, Arabidopsis thaliana
caaaaagaaaatggttaagctcagcaatctcctcgttgcaaccttcggggttctcctcgtgcgtaacggctgccttgcgaggcagtcacttggggttcctcctcagctacagaacgagtgtaacctcgacaacctagatgttctccaagccaccgaaactatcaagagtgaagccggtcagatcgagtactgggaccacaaccaccctcagctccgatgtgttggtgtttccgttgctcgttatgtaattgaacaaggcggtctttacttgcccaccttcttcacttccccaaaaatttcctacgtcgttcaaggaacgggtatcagcggaagagtggtccctggatgtgccgagaccttcatggactcgcagccgatgcaaggacaacaacaaggccaaccatggcaaggacgacagggacaac

SEQ ID NO: 144619 - DNA, 368 bp, Arabidopsis thaliana
accaaaaccaactcgaccgcaaccctagagtgtttcatttggccggaaacaaccagcagggaggctttggcggttcacagcaacaacaagaacagaaaaacttgtggagcgggttcgacgcacaggtcatagctcaagcattgaaaattgacgttcagttggctcagcagcttcagaaccaacaagacagcagaggaaacatcgttcgtgttaagggacctttccaggtcgtgaggccacctctaagacagccctacgagagcgaggagtggagacacccacgtagcccacagggcaacggccttgaggagactatctgcagcatgaggtcccacgagaacattgacgaccctgctcgtgctgacgtg

SEQ ID NO: 144620 - DNA, 172 bp, Arabidopsis thaliana
  unsure (1)..(172): unsure at all n locations
cactcacaaattaaaaagagagagagagagtgagtctgagagagagagagattctgcggaggaagcttctttcttcgnaagggtgttcatagattattaacgttatggtccctacgttagctccatttccagaaacatgggtgcaggggagaatgctgtttacaatcaagaa

SEQ ID NO: 144621 - DNA, 438 bp, Arabidopsis thaliana
atttgaggtggatatggcctcgacccttttctccagaactttcttggctgctagtcaccgactgattactccttctcttccgcaaaagatctttaatccagccacctttctcagtaggtcactccactctcaattaggctccgcttctacagcctataaatcaactacttgggctcgtcgagctatggcttctactggagttgagacaaaagccggttactccacatcatccgtatcaaccagtgaacctgttgtttctagtgattggcttcatgctaatcttaaagagcctgatttgaagattttggatgcttcatggtatatgccggatgagcagagaaatccgatccaagaatatcaggttgctcatattccccgcgctctcttctttgatttggatggaatatcagatcgaaaaactagtttgccacatatgtt

SEQ ID NO: 144622 - DNA, 404 bp, Arabidopsis thaliana
aatcctctcttccctcatccactgcttctttttttaataacccatttcatctctttcccctggtacgctcttttctttcttcattttctgtggaaattttcagagcttttctgtgtaaattaaagagttcttttttgaaggaaataggcaatctcatcctgagaatcaaacaaccggaaaattcaataaatgaaacgcctttaattgttttttcttacaaaacttctaagcagattactttggcggagacccatctgattggtatttttgcagatattccgttcttggagtaccaactggcctggagctacattccttagcctggagtaaataataggctgaccctttgaaatcaacatggtttcctcaagaacttaataacttttcgctggtttctgtcctgg

SEQ ID NO: 144623 - DNA, 392 bp, Arabidopsis thaliana
tttatccattaaggtttgatcctctcacttaaattaggattatatatggctacatctgctagaagagcatatggattcgggagagctgacgaggcgactcacccggactccattagagccactttggctgagtttctttccacgttcgtcttcgtctttgctggagaaggctcaatcctcgctctagacaagttgtattgggacacggcggctcacacggggacaaacacgcctggagggttagttctggtggcgttagctcatgcattggccttgttcgcggctgtttctgcagccatcaatgtctctggtggccacgtcaaccccgctgtcacttttgctgctctaatcggaggcaggatctcggtcattcgagctatctactattgggt

SEQ ID NO: 144624 - DNA, 329 bp, Arabidopsis thaliana
  unsure (1)..(329): unsure at all n locations
agaaaaaagattccactcttgaaagaaaagaacggactaacagggtaaatgacctaatcaattttcaaaatgaaataccgttactgtataaaggggatctcattgtgaaagacctattactggaatattcatggggtagagccaaagaatgtgaattgtacatgttaccaatagtattgattaattaaaagaaggagctccggtgtatagagaggacctcaccgttttagaagtaaccatagaaacgatggaacccactatttatccaattctatttactacgttttgtagttattctatttttntatatcaaggcctttcaaagtaaa

SEQ ID NO: 144625 - DNA, 446 bp, Arabidopsis thaliana
cttccctggaatgttaccttttggagaggaacatgtaagctatcttgcagatccggctgaagtagagattgtgaatttcaatacatgtcaaggagctgtggaaaaatatcaacatctggaggattttcattgggctgtgagacctttgcttattgctatgggtctattgacagcgatgaagttagggatctgtgtcaggaagaaaataggaaggtcaaaggatgggaaacaacgcgatggctcgactggacaaggtgactgtaagattccggatggtaagggctctgacaaatctaaatggcttgtgttcttttaggtctgctatgagacacagaccttgtctggtccatatattatactgttctagtcataataacgtttcatgtacataatgacgttttttttttttttgctctttaaaattaccaaaaagctttcacgcacca

SEQ ID NO: 144626 - DNA, 354 bp, Arabidopsis thaliana
agaaaaatgggtcgagtctcatctattatctctttctctttgacactcttgatcctcttcaatggctggactgcccaacagtggcccaacgagtgccagctcgatcaactcaatgcgctcgaaccatcccaaatcatcaagagcgagggtggtcgcatcgaggtctgggaccaccatgcaccccagctccgttgctccggctttgcctttgagcgtttcgtcattgagcctcaaggtcttttcttgcccactttcttgaacgccggcaaactcacgtttgttgttcacggaaggggtctaatgggaagagttattccgggatgcgccgagacgttcatggagtcaccacgcttt

SEQ ID NO: 144627 - DNA, 436 bp, Arabidopsis thaliana
aaaaacaatttctcattagcttacaatggcggatacacaccgtgtcgaccgtactgatagacactttcaatttcagtcgccctatgaaggcggccgaggtcaaggtcagtatgaaggtgaccgtggttacggtggtggcggttacaagagcatgatgcctgaaagtggcccatctagtacccaagtattgtccctgttgattggagtccctgtcgtcggttcgctacttgccttggctggattacttctagctggttcggtgatcggcttaatggttgctttaccactatttctcctcttcagcccggttatagtcccagcggctctaactatcgggcttgcaatgacaggctttttagcctcggggatgttcggtctaaccgggcttagctcaatctcatgggtcatgaactatctttgtgggacaaggaggact

SEQ ID NO: 144628 - DNA, 413 bp, Arabidopsis thaliana
tcgccaaaccgatccaaatttcgagaaagactttttttttttccttttcctctgcaaaaatggggattgagagcttcaaagttgagagcccgaacgtgaagtacacagagaatgagattcactctgtgtacgattacgagacgacagaagttgctcatgagaagaccgtcaatggctcttaccaatggatagggaagccaaaaactgtcaaatacgatttcaaaaccgattttcgtgtccccatattaggagttttgcttgtgggtttgggaggaaacattgtatcaacttttaccgttggcgtgattgcgaactaagaaggaatcttgtggtcaacgaatgacaaagtgctacatgcgaatttcttttggtcactaactcaagcttcatcgattcgtgtcggatcttttaac

SEQ ID NO: 144629 - DNA, 408 bp, Arabidopsis thaliana
ggcaaggaggagaaagccaatggcacatgccacgtttacatcggaagggcagaatatggagtcgtttcgactcttgagtggccacaaaatcccagccgttggactcggcacgtggcgatctgggtctcaagccgcccacgccgttgtcactgcaatcgtcgagggtggctataggcacatagatacagcttgggagtatggtgatcagagagaggtcggtcaaggaataaagagggcgatgcacgctggccttgaaaggagggacctctttgtgacctcgaagctttggtgcactgagttatctcctgagagagtgcgtcctgctctgcaaaacacccttaaagagctttaattagagtaccttgatctctacttgattcactggcctttccggctaagagaaggagc

SEQ ID NO: 144630 - DNA, 377 bp, Arabidopsis thaliana
atcacaaacgagtaagaatacaaatacaaatagcaaaaaaaatggcaaacaagctcttcctcgtctgcgcaactttcgccctctgcttcctcctcaccaacgcttccatctaccgcactgttgtcgagttcgacgaagatgacgccagcaaccccatgggcccaagacagaaatgtcagaaggagtttcagcaatcacagcacctaagagcttgccagaaattgatgcgcatgcaaatgaagcaaggccgtggtgggggtccctccctcgacgatgagttcgatttggaagacgacatcgagaacccacaaggcccccagcagggacaccagatccttcagcagtgctgcagcgagcttcgccaggaagagccagtt

SEQ ID NO: 144631 - DNA, 405 bp, Arabidopsis thaliana
cgctcttctcgacatcgccaactaccaaaaccaactcgaccgcaaccctagagtgttccattgggccggaaacaaccagcagggaggctttggcggttcacagcaacaacaagaacagaaaaacttgtggagcgggttcgacgcacaggtcatagctcaagcattgaaaattgacgttcagttggctcagcagcttcagaaccaacaagacagcagaggaaacatcgttcgtgttaagggacctttccaggtcgtgaggccacctctaagacagccctacgagagcgaggagtggagacacccacgtagcccacagggcaacggccttgaggagactatctgcagcatgaggtcccacgagaacattgacgaccctgctcgtgctgacgtgtacaagcccagcct

SEQ ID NO: 144632 - DNA, 414 bp, Arabidopsis thaliana
aaaatggttaagctcagcaatctcctcgttgcaaccttcggggttctcctcgtccttaacggctgccttgcgaggcagtcacttggggttcctcctcagctacagaacgagtgtaacctcgacaacctagatgttctccaagccaccgaaactatcaagagtgaagccggtcagatcgagtactgggaccacaaccaccctcagctccgatgtgttggtgtttccgttgctcgttatgtaattgaacaaggcggtctttacttgcccaccttcttcacttccccaaaaatttcctacgtcgttcaaggaacgggtatcagcggaagagtggtccctggatgtgccgagaccttcatggactcgcagccgatgcaaggacaacaacaaggccaaccatggcaaggacgacaggga

SEQ ID NO: 144633 - DNA, 377 bp, Arabidopsis thaliana
gaaaatggttaagctcagcaatcttctcgttgcaaccttttggggttctcctcgtccttaaacggtgccgtgcgaggcagtcactttggggttctcctcagctacagaacgagtgtaacctcgacaacctagatgttctccaagccaccgaaactatcaagagtgaagccggtcagatcgagtactgtgaccacaaccaccctcagctccgatgtgttggtgttttcgttgctcgttatgtaattgaacaaggcggtctttacttgcccaccttcttcactttcccaaaaaattcctacgtcgttcaaggaacgggtatcaacggaagagtggtccctggatgtgccgagacctttatggactcgcagccgttgcaa

SEQ ID NO: 144634 - DNA, 425 bp, Arabidopsis thaliana
cggacgcgtgggtccaagcccacaaacaccggctagaaccaagaatgttactcggaagcaatctggagcaatgcaggtcatcttcccttgcttatcagcctccttgtcatagatgtatcctgcgagaatggccgagaaaatggtggcaccaagcgggtttcccagcagtatgaagttgaagttgattccaaaatgtctaagaccaaatagctcggagatggttgcgatagataagaactgaaaccccatgcatattcctattagagcagtcgcaacgtaaatggtgtggtcgatagccatggcgaagaggaggaatgtgaacaccataactagctgcgcggctcccatccatagtgttcttggaagcgttcttgacctgagagacaaataggagagtcgtatgaaacagctattttccagagaga

SEQ ID NO: 144635 - DNA, 417 bp, Arabidopsis thaliana
cttctttatccattaaggtttgatcctctcacttaaattaggattatatatggctacatctgctagaagagcatatggattcgggagagctgacgaggcgactcacccggactccattagagccactttggctgagtttctttccacgttcgtcttcgtctttgctggagaaggctcaatcctcgctctagacaagttgtattgggacacggcggctcacacggggacaaacacgcctggagggttagttctggtggcgttagctcatgcattggccttgttcgcggctgtttctgcagccatcaatgtctctggtggccacgtcaaccccgctgtcacttttgctgctctaatcggaggcaggatctcggtcattcgagctatctactattgggttgctcagcttataggtgctat

SEQ ID NO: 144636 - DNA, 214 bp, Arabidopsis thaliana
cggacgcgtggggaagttttgcaaaaacaagtccatctagtaatttcaagtctgcgagaggctgtagatagtgcagatggatttcagaatactcatcaaattaaacagtttaaatctgcagaatttagcattgatcaggttgtctttagtctaaagaatgtgcatatgatatgggagccagtcttactgcccaaaacttacaagcaaagcatgt

SEQ ID NO: 144637 - DNA, 416 bp, Arabidopsis thaliana
ctgtttccacctacatatataggatattttaagaagtgaacatctttattagtagcaaggtctggagcaagaataggaaaggttatttcactatatttttgaccaggaacaggacctatcacaagaatattttttttattgggacgataattctgaaaagaaagatttcctatcttttctttcatctcgggtgaaatacgatcgtggggggctaattcaaaaccctccggtaaaataagaacagctcccacattcaaagccccttttttaccattagctagaacttgttttagttgcatatcataaggaattttaacaactgcttcaaatacagtatcaggaagtaccgtttgtggaacctcaatatccacgggcttattagctaaatggcaattggcacatacaatacgcccagt

SEQ ID NO: 144638 - DNA, 401 bp, Arabidopsis thaliana
aaaatgggtcgagtctcatctattatctctttctctttgacactcttgatcctttgcagtggctacactgcccaacagtggcccaacgagtgccagctcgatcaactaaatgcgctcgaaccatcccatataataagaaggggggtgggtccaagtatgggttcaccaaacacaccaaccccagttctgtggctttgcctttgagcgtttcgtcattgagcctcagggtcttttcttgtccactttcttgaacgccggcaaactcacgtttgttgttcacggaaggggtctaatgggaagagttatttctggatgcgccgagacgttcatggagtcaccggtatttggagaaagtcaaggtcagggtcagagttaaggggttcgtgacatgcaccaaaaag

SEQ ID NO: 144639 - DNA, 419 bp, Arabidopsis thaliana
gctacttttgctctcgcagtgttagtaacacaaggaagcatttttagtttgtgtttggcctgctctgcttctacaaactctgttcctaattggtttcatcattggccgccgtttaaatggggaccaaaatttccatattctccacctaaaccgccgccaatcgagaaatatccttcaccggtgcagtatccaccaccgatcaagaagtatccaccgccaccatacgagcatccaccggtgaagtatccaccaccgatcaagacttaccctcatccgccggtgaagtatcctccaccagaacagtatccaccgccgattaagaagtattctccaccagaacagtatccaccgccgattaagaagtattctccaccagaacagtattcaccgccttttaagaagtatccttcgccagaaca

SEQ ID NO: 144640 - DNA, 427 bp, Arabidopsis thaliana
cggacgcgtgggtacacacatagcaaaaaatggcaaacaagttgttcctcgtctgcgcagctgtggctctctgcttcctcctcaccaacgcttccatctaccgcaccgtcgttgagttcgaagaagatgacgccactaaccccataggcccaaaaatgaggaaatgccgcaaggagtttcagaaagaacaacacctaagagcttgccagcaattgatgctccagcaagcaaggcaaggccgtagcgatgagtttgatttcgaagacgacatggagaacccacagggacaacagcaggaacaacagctattccagcagtgctgcaacgagcttcgccaggaagagccagattgtgtttgccccaccttgaaacaagctgccaaggccgttagactccagggacagcaccaaccaatgcatgtcaggaa

SEQ ID NO: 144641 - DNA, 421 bp, Arabidopsis thaliana; identical to SEQ ID NO: 130166

SEQ ID NO: 144642 - DNA, 412 bp, Arabidopsis thaliana
atccacaccaatccagaacgttcctcaaaaagctccctccttttctctcaaaatggcgtgtgcggacgctctctcttccgcctccgtcctctgttcttcccgtcagagtaagttgggaggaggaaatcagcagcaaggtcagagagttagctacaacaagaggacaatcagacgttttagtgttagagctaatgtgaaggaaatagcttttgaccagcactctagagctgctctacaagctggtattgataagcttgctgattgtgttggtcttacgcttggccccagagggaggaatgttgtgttggatgaatttggaagtcctaaggttgtgaatgatggagtcaccattgctagagctattgagttacctaatgccatggaaaatgctggtgcagcgcttattcgtgag

SEQ ID NO: 144643 - DNA, 410 bp, Arabidopsis thaliana
caccaagcgagtctagaccttgagtagtggtctcgccgttggtccctgctagatcaaccaagacccttgtccactttgattccggggataacaccgttctcctgatccaaagaaaaatcagatccaaactgaaacagtaagttccatttgggtcatgtcaagagcttcaactctgcaactcttggacccaatgactaagactagagctggagtttgcttttttcgagacggaccatgaggagatcgacgaaaggtttgccatcagaggttttctggtagagggtttcctcgaagagtataacaccagagaggcaagggtaactgccaggggaagtgaagaggagctcacggttagcttggcggttggactcaatgttctcaacaatgattccggcgaatcgttttccaat

SEQ ID NO: 144644 - DNA, 412 bp, Arabidopsis thaliana
aaacaaaaagaaaatggttaagctcagcaatctcctcgttgcaaccttcggggttctcctggtgcttaacggctgccttgcgaggcagtcacttggggttcctcctcagctacagaacgagtgtaacctcgacaacctagatgttctccaagccaccgaaactatcaagagtgaagccggtcagatcgagtactgggaccacaaccaccctcagctccgatgtgttggtgtttccgttgctcgttatgtaattgaacaaggcggtctttacttgcccaccttcttcacttccccaaaaatttcctacgtcgttcaaggaacgggtatcagcggaagagtggtccctggatgtgccgagaccttcatggactcgcagccgatgcaaggacaacaacaaggccaaccatggcaa

SEQ ID NO: 144645 - DNA, 425 bp, Arabidopsis thaliana
aacaaacaaaaagaaaatggttaagctcagcaatcttctcgttgcaaccttcggggttctcctcgtgcttaacggctgccttgcgaggcagtcacttggggttcctcctcagctacagaacgagtgtaacctcgacaacctagatgttctccaagccaccgaaactatcaagagtgaagccggtcagatcgagtactgggaccacaaccaccctcagctccgatgtgttggtgtttccgttgctcgttatgtaattgaacaaggcggtctttacttgcccaccttcttcacttccccaaaaatttcctacgtcgttcaaggaacgggtatcagcggaagagtggtccctggatgtgccgagaccttcatggactcgcagccgatgcaaggacaacaacaaggccaaccatggcaaggacgacagg

SEQ ID NO: 144646 - DNA, 420 bp, Arabidopsis thaliana
aacatacacaagtaattaactaacaacaaatggcgaacaagctcttcctcgtctgcgcagctgtgggcctgtgtttcatcctcaccaacgcttccgtctatcgcacggttgtcgagttcgacgaagatgacgccagtaaccccataggcccaatacagaaatgtcagaaggagtttcagcaagaacagcacctaagagcttgccagagatggatgcgcaagcaaatgtggcaaggacgtggtggtggtccttccctcgacgatgagttcgatatggaagacgacatcgagaacccgcagagacgacagctactccagaagtgctgcagcgagcttcgccaagaagagccagtttgcgtttgccccaccttgagacaagctgccaaggccgttagattccagggacagcaacaccaaccag

SEQ ID NO: 144647 - DNA, 333 bp, Arabidopsis thaliana
cgatcgagtacctgggaccaccaaccaccctcagctccgtatgtgttggtgttttccgttgctcgttatgtgggttgaacaaggcggtctttacttgcccaccttcttcactttcccaaaaatttcctacgtcgttcaaggaacgggtatcagcggaagagtggtccctggatgtgccgagaccttcatggactcgcagccgatgcaaggacaacaacaaggccaaccatggcaaggacgacagggacaacaaggccaaccatgggaaggacagggacaacagggacaacaaggaagacaaggccaaccattgtaaggacagggacaacatgg

SEQ ID NO: 144648 - DNA, 416 bp, Arabidopsis thaliana
ccgctttctccgtcatcgtacctcgtcggagatgtctcagattggttacttcttgtgtctccaccggtcaaagctccgtcgcaacaaacggttcctctccagctcctgctccggccgctgttgtcgttgagcgtgaccagattcgtcttggtcttcctagtaaaggacgtatggctgctgatgcaatcgatcttctcaaggactgtcaactgtttgttaaacaagtcaatcctaggcaatatgttgcacagattccccagttaccaaacactgaagtctggtttcaacggccaaaagatattgtcaggaagttactctcaggagatttggatctaggtatcgttggtcttgacacacttagtgaatatggtcaggaaaatgaagatcttatcattgtccatgaagctttcaacttt

SEQ ID NO: 144649 - DNA, 422 bp, Arabidopsis thaliana
caaaaagaaaatggttaagctcagcaatctcctcgttgcaaccttcggggttctcctcgtccggaacggctgccttgcgaggcagtcacttggggttcctcctcagctacagaacgagtgtaacctcgacaacctagatgttctccaagccaccgaaactatcaagagtgaagccggtcagatcgagtactgggaccacaaccaccctcagctccgatgtgttggtgtttccgttgctcgttatgtaattgaacaaggcggtctttacttgcccaccttcttcacttccccaaaaatttcctacgtcgttcaaggaacgggtatcagcggaagagtggtccctggatgtgccgagaccttcatggactcgcagccgatgcaaggacaacaacaaggccaaccatggcaaggacgacagggac

SEQ ID NO: 144650 - DNA, 393 bp, Arabidopsis thaliana
cgattaagcttgaacttggaggatcaatggccgacgttcgcacacactcgcaccagctgtgaagtgcaccctcaacgccagcatgaaggaggcatcaaagtcctttatcctcagagtggcccttcttccactcaggtgctagccgtgtttgtcggtgtaccgataggaggaacgctgctgactatagccggtttgacattagccggttcggttataggactaatgctagcattcccgttgtttctcatctttagtccggttattgtaccagcagcctttgtcattcggtctagctatgactggattcctggcttcaggggccatatgtcttaccggactatcattcatgtcgtgggtactcaactacattcgtctgctcgggcagcattattc

SEQ ID NO: 144651 - DNA, 425 bp, Arabidopsis thaliana
ctaatgggaagagttattccgggatgcgccgagacgttcatggagtcaccggtatttggagaaggtcaaggtcagggtcagagtcaagggttccgtgacatgcaccagaaagtagagcacctacggtgcggtgacaccattgcaacaccatctggtgtagctcaatggttctacaacaatggaaatgagcctctcattcttgttgcagccgcggacctcgccagcaaccagaaccagcttgaccgcaaccttagaccatttttgatagccggaaacaacccacaagggcaggaatggctacaaggccgaaagcaacagaagcaaaacaacatcttcaatggcttcgcacctgagatcttggctcaagccttcaagatcaatgtcgagacggctcagcagctccagaaccagcaagataaccgtgg

SEQ ID NO: 144652 - DNA, 419 bp, Arabidopsis thaliana
gaaaatggttaagctcagcaatctcctcgttgcaaccttcggggttctcctcgtccttaacggctgccttgcgaggcagtcacttggggttcctcctcagctacagaacgagtgtaacctcgacaacctaaatgttctccaagccaccgaaactatcaagagtgaagccggtcagatcgagtactgggaccacaaccaccctcagctccgatgtgttggtgtttccgttgctcgttatgtaattgaacaaggcggtctttacttgcccaccttcttcacttccccaaaaattttctacgtcgttcaaggaacgggtatcagcggaagagtggtccctggatgtgccgagaccttcatggactcgcaaccgatgcaaggacaacaacaaggcccaccatggcatggacgacagggacaac

SEQ ID NO: 144653 - DNA, 410 bp, Arabidopsis thaliana
attgtatcagtgagagaacccaacaacctccaaattcttcctcagatctccaaaggaatgcagggaaaaacttaaactaatgttgaaacttcctccgagattcttctctgtttactcaactctcatccacattcttgcctccttcctctgctcctccgacgtcagaggcgatttcccggcgacgagattcgatctcggaacgttgactctctcaagcctcaaacttctcggcgatgctcatctcaacaacggaactattaagctcactcgtgaactctctgttcccacttccaccgccggaaaagctctttatgggaaaccggttaaattccggcacccggaaactaaatctccggcgagtttcactacttacttctccttctcggtaacgaatctcaatccttcctcaa

SEQ ID NO: 144654 - DNA, 276 bp, Arabidopsis thaliana
tactattcagtttgttgactggtgtcctactggattcaagtgtggaatcaactaccagccaccaactgttgttccaggaggtgatcttgctaaagtccagagagctgtgtgtatgatctcaaactccaccagtgttgctgaggtgttctcccgtattgatcacaagtttgatcttatgtacgcaaaacgtgctttcgttcactggtatgtgggtgagggtatggaaagaggagaatttttagaggctcgtgaggatcttgcagcattggagaagga

SEQ ID NO: 144655 - DNA, 413 bp, Arabidopsis thaliana
aatgggtcgagtctcatctattatctctttctctttgacactcttgatcctcttcaatggctacactgcccaacagtggcccaacgagtgccagctcgatcaactcaatgcgctcgaaccatcccaaatcatcaagagcgagggtggtcgcatcgaggtctgggaccaccatgcaccccagctccgttgctccggctttgcctttgagcgtttcgtcattgagcctcagggtcttttcttgcccactttcttgaacgccggcaaactcacgtttgttgttcacggaaggggtctaatgggaagagttattccgggatgcgccgagacgttcatggagtcaccggtatttggagaaggtcaaggtcagggtcagagtcaagggttccgtgacatgcaccagaaagtagagcacc

SEQ ID NO: 144656 - DNA, 424 bp, Arabidopsis thaliana
gaaaatggttaaactcaacaatctcctccttgcaaccttcggggttcttctcgtccttaacggctggcttgcgaggcaatcacttggggtttcttcttaactacagaaacagtgtaacctcgacaacctagatgttctccaagccaccgaaacttttaagagtgaagccggtcagatcgagtactgggaccacaaccaccctcagctccgatgtgttggtgtttcccgttgctcgttatgtaatttgaacaaggcggtctttacttgcccaccttcttcacttccccaaaaatttcctacgtcgatcaaggaacgggtatcagcggaagagtgggccctggatgtgccgagaccttcatggactttcagccgatgcaaggacaacaacaaagccaaccatggcaaggacgacagggacaacaag

SEQ ID NO: 144657 - DNA, 423 bp, Arabidopsis thaliana
  unsure (1)..(423): unsure at all n locations
ggaagaaaaatgggtcgaggctcatctattatctctttctctttgacactctngatcctcttcaatggctacactggccaacagtggcccaacgagtgccagctcgatcaactcaatgcgctcgaaccatcccaaatcatcaagagcgagggtggtcgcatcgaggtctgggaccaccatgcaccccagctccgttgctccggctttgcctttgagcngttcgtcattgagcctcagggtcttttcttgcccactttcttgaacgccggcaaactcacgtttgttgttcacggaaggggtctaatgggaagagttattccgggatgcgccgagacgttcatggagtcaccggtatttggagaaggtcaaggtcagggtcagagtcaagggttccgtgacatgcaccagaaagtagagcaccta

SEQ ID NO: 144658 - DNA, 414 bp, Arabidopsis thaliana
cggacgcgtggggtttgatatttgggtttgttcgattatattttttttgtcgaatctcttatctgggataacaatatctagggttttcggttcgcaagtttcttgcaactacttcgcaattttgcgagggatatatttgcaggttgaagtgaaaccaatagttggtgttaatcctcatgaatgtgaccactttgtttcaaaaaagaatcctaaagacagggatcttttacatattttttatcttgtgaacaaagggtataaaatgagcaagaaggtttggagttaaggatggattaaagtggaacaagtacatgaaggtagaattaatcatgtaatgaaacctgctatcgaaagagtttctactaggtcttctagggaaaaataaaaataagaggaaagaagaaaattttagga

SEQ ID NO: 144659 - DNA, 203 bp, Arabidopsis thaliana
aaaaaatcaacgaacacaaaactcattaaagctccttaattccctaaacacaatctcttcatggtgtgtgaatctctctctcgttcggattctcatctcttcttctggtttcagatttgagtctttgtacagtattttttttaagatttttgttgtgttttctattatttttttcttatataatctttaactttctcttattt

SEQ ID NO: 144660 - DNA, 432 bp, Arabidopsis thaliana
gtcgccccgacttcaaccggtggtggcggagtctgctggccagacgcttcctgggaattttggacgctcggactgacggtgccctggaagttgagtcgcgttcgagctccagtaatccgcgcagttcctgcagaaagtgaatcgactcgttctgcgtatgcgttgtgagccgatctgattttggaatgattagccgctagtgctgcgagttggccgttgcattgctcttggaaggtcacgaacttgtcggagagagacgtcacggcaagctgctgtcggtcagtcttctcggatagctgctgaagcagctgcttaatgtcgtcgagggtgggggctcggtcgccggagctctgatcgtcgttgctactcatggtgactttgatcgttgttctgaagtaaaagactttatttcccctccttctagcgccaaat

SEQ ID NO: 144661 - DNA, 419 bp, Arabidopsis thaliana
gggagaatggccgttctaagcagccagaagagtctctctaactcaatcctgacggtttcagaggtagaggagattgattatgctgaccccacgatacaaagcagtaaatccatgactctgcagagtttgcgttcagtgtacgaggatgagtatccgcaagggcaagtgaggaggaggcatgtgaggttccagttaacggcgtcaagtggtgggatggggtcctcagttagggaagagctaatggatctgatacgggcgaaagaggcgggtgttgcatatataatgggccactcgtatgtgaaatcgaggaaatcctcgtcttggttgaagaagatggcgatagacatcggttattctttcttgaggaagaactgcaaagggccagccgtagcactcaacattcctcacatcagccttat

SEQ ID NO: 144662 - DNA, 402 bp, Arabidopsis thaliana
gttcttcttctctctaatacgagaagaaaaaggcgaaaacctcgccaatccgattacgcgaagaatcaaaggtttttggatatggcgtcgaagcggatcttgaaggaattgaaggatctccagaaggatccacctacatcatgtagcgcaggtcctgttgctgaagacatgtttcactggcaggcaacgataatgggtccttcagagagtccttatgctggaggtgttttccttgtaaccatccatttccctccggattacccattcaagcctcctaaggtggcctttaggaccaaggtgtttcatcccaacattaacagcaacggtagcattttgcctcgacatcttgaatgagcaatggagtcctgcgctcatcatttcaaggtgctgctttcgatctgt

SEQ ID NO: 144663 - DNA, 336 bp, Arabidopsis thaliana
ggtgaacgaagagtcagatcggcgagcctgagatgggttggggttcggtgtggcgattactggcggaggctcttctttgtcagagggcaagttcaatcggagctaactggggcacacaggcgtctcacccacttccaccggacatagttgtgcggatgctaagagagaatggtattcagaaagtaaagctctttgacgccgaatacgacactctcagagctttgggcaaatccggaatctaagtcatggttggtattcccaatgagatgcttgctactctcgcctttagcctgaaagctgcttagaaatgggttgctaaaaatgtttctactcaca

SEQ ID NO: 144664 - DNA, 411 bp, Arabidopsis thaliana
caaaaagaaaatggttaagctcagcaatctcctcgttgcaaccttcggggttctcctcgtcctgtaacggctgccttgcgaggcagtcacttggggttcctcctcagctacagaacgagtgtaacctcgacaacctagatgttctccaagccaccgaaactatcaagagtgaagccggtcagatcgagtactgggaccacaaccaccctcagctccgatgtgttggtgtttccgttgctcgttatgtaattgaacaaggcggtctttacttgcccaccttctcacttccccaaaaatttcctacgtcgttcaaggaacgggtatcagcggaagagtggtccctggatgtgccgagaccttcatggactcgcagccgatgcaaggacaacaacaaggccaaccatggcaagg

SEQ ID NO: 144665 - DNA, 421 bp, Arabidopsis thaliana
acaaaaagaaaatggttaagctcagcaatctcctcgttgcaaccttcggggttctcctcgtccttaacggctgccttgcgaggcagtcacttggggttcctcctcagctacagaacgagtgtaacctcgacaacctagatgttctccaagccaccgaaactatcaagagtgaagccggtcagatcgagtactgggaccacaaccaccctcagctccgatgtgttggtgtttccgttgctcgttatgtaattgaacaaggcggtctttacttgcccaccttcttcacttccccaaaaatttcctacgtcgttcaaggaacgggtatcagcggaagagtggtccctggatgtgccgagaccttcatggactcgcagccgatgcaaggacaacaacaaggccaaccatggcaaggacgacaggg

SEQ ID NO: 144666 - DNA, 425 bp, Arabidopsis thaliana
  unsure (1)..(425): unsure at all n locations
cccacgcgtncgcccacgcgtncgctacaactcaggagaacagccacttgtcatcatcgctcttctggacatcgccaactaccaaaaccaactcgaccgcaaccctagagtgttccatttggccggaaacaaccagcagggaggctttggcggttcacagcaacaacaagaacagaaaaacttgtggagcgggttcgacgcacaggtcatagctcaagcattgaaaattgacgttcagttggctcagcagcttcagaaccaacaagacagcagaggaaacatcgttcgtgttaagggacctttccaggtcgtgaggccacctctaagacagccctacgagagcgaggagtggagacacccacgtagcccacagggcaacggccttgaggagactatctgcagcatgaggtcccacgagaacattg

SEQ ID NO: 144667 - DNA, 413 bp, Arabidopsis thaliana
agaaataacaaaatggctcgagtctcttctcttctttctttcttcttaacacttttgatccttttggatggctacgcggctcaacagggtcagcagggtcagcagtttccgaacgagtgccagctcgaccagctcaatgcgctcgagccgtcacacgtactgaagagcgaggctggtcgcatcgaggtgtgggaccaccacgctcctcagctccgttgctcaggtgtctcctttgcacgttacatcatcgagtctaagggtctctacttgccctctttctttaacaccgcgaagctctctttcgtggctaagggacgaggtcttatgggaaaagtgatccctggatgcgccgaaacattccaagactcatcagagttccaaccacgcttcgaaggtcaaggtcaaagccagag

SEQ ID NO: 144668 - DNA, 463 bp, Arabidopsis thaliana
  unsure (1)..(463): unsure at all n locations
ntccgcaaatcaaacttcctttgtctcagntgaccctctagtctagcttccaaatggctgaaccgagtctatccgcgccgggttcactcaccaactatnagcggacaaaattcttccggcaaccttcaagctcccggcgaaattctcccaaaaaaaccaagcaccaccgaccatcnaacanttacgtaatccaaagttcccagaaagaatcccaaatctactcgtatacccaaccgccgggaaaaacgcacatctcgctttgaacaaccctctctcgtaaaaaaaaccaaccgcagtaaactggtagatgcttgcttctgctcattcctcgccgcggtttttcatcttaatcgtcctcgccggaatatccttcgcggttctctacctaatctaccgtccccaagctcctaaatactccatcgaaagattctctgtttccggcttcaatctgaattcaacatct

SEQ ID NO: 144669 - DNA, 375 bp, Arabidopsis thaliana
cgatgtgttggtgtttcccgtgctcgttatgtaattgaacaaggcggtctttacttgcccacgcttggtcacttccccaaaaatttcctacgtcgttcaaggaacgggtatcagcggaagagtggtccctggatgtgccgagaccttcatggactcgcagccgatgcaaggacaacaacaaggccaaccatggcaaggacgacagggacaacaaggccaaccatgggaaggacagggacaacagggacaacaaggaagacaaggccaaccatgggaaggacagggacaacagggacaacaaggacgacagtgacaacaaggccaaccatgggaaggacagggacagctgggacaacatggtttccctgacatgca

SEQ ID NO: 144670 - DNA, 415 bp, Arabidopsis thaliana
cttctcacatctcctcattctgtattttgacaaaaaaaaacaccctttgttttttctctcctgggcatgttgtgattgtttttgcttcacaacatgggagttttagtaatctcgcttctcgtggttcatctcctagctttttccgtctgcgttcagggcggctaccgtcgtggcggacaccatcccggcggtcacatgggaccttggatcaacgctcatgccactttttacggcggcggtgatgcttccggcactatgggtggagcatgcgggtacggcaatctgtatagccaaggttatggactggagacggcagcgctgagcacagcgttattcgaccaaggacttagttgtggcgcatgttttgagctgatgtgtgtcaacgatcctcaatggtgcataaaaggccgatcca

SEQ ID NO: 144671 - DNA, 416 bp, Arabidopsis thaliana
ctctgagaaaaaacaacagatccgaattttatctttaatcagccggaaaaaatggagagagcgatcgagagacaacgcgttcttcttgagcatctccgaccttcttcttcttcttcgcacaattacgaggcttctctatctgcttctgcttgcttggctggggacagtgctgcatatcagaggacctctctctatggagatgatgttgtcattgtcgcggcacataggactccactatgcaagtccaaacgtggcaatttcaaggatacatatcccgatgatttgctcgcacctgttttgagggcattgatagagaagacgaatctaaacccaagtgaagtaggtgacattgttgtgggtactgttttggcacctggatctcagagagccagtgaatgcaggatggctgcgttcta

SEQ ID NO: 144672 - DNA, 416 bp, Arabidopsis thaliana
ttagaatatagactttagattattacatcttgatgaaaatattaatgtcttcactagatatcgcaactcaattaacaaagaggtctcttgattcattattttgaagcttttagaaatatgagaagaaaaatgcttgaatattacttctgaaactctaagatggtgtagaagtaatcaatgtagaaaggtcgaaaagtagggaatcccgcggagagaccaagctctataaactcttcttcggttctatgcttacctttggttctatagatggtcatgacaaagatgtcaccttctaacaaggcacgagtccggtgactttcatcggtttccttaggcaagaccggctcacacgcaatcagctttcctccaactggtaacgcgttgtagcaattcttcattatctgcttgcattcttc

SEQ ID NO: 144673 - DNA, 418 bp, Arabidopsis thaliana
ttcaatttctcaaaatcttaaaaactttctctcaattctctctaccgtgatcaagatgcagagctttgttaagactctcaccggaaagacaatcaccctcgaggtggaaagctccgacaccatcgacaacgttaaggccaagatccaggataaggagggcattcctccggatcagcagaggcttattttcgccggcaagcagctagaggatggccgtacgttggctgattacaatatccagaaggaatccaccctccacttggtcctcaggctccgtggtggtatgcagattttcgttaaaaccctaacgggaaagacgattactcttgaggtggagagttctgacaccatcgacaacgtcaaggccaagatccaagacaaagagggtattcctccggaccagcagaggctgatcttc

SEQ ID NO: 144674 - DNA, 410 bp, Arabidopsis thaliana
agaaaacatacacaaatagcaaaacatggctaacatgctcttcctcgtctgcgcaactctcggcctctgcttcctcctcaccaacgcttccatctaccgcaccggtgtcgaattcgaagaagatgacgccagcaaccccgtaggtccaagacagagatgccagaaggagtttcagcaatcacaacacctaagagcttgccagagatggatgagcaagcaaatgaggcaaggacgcggtggtgggccttccctcgacgatgacgctcgatttcgggggcccccagcatggataccagctactccagccttgctgcgacgagcttctccaggaagagccagcttgccttggccccaccttgaaacaagctggcagtgcagttacgcctcagggacagtacggaccatttcaa

SEQ ID NO: 144675 - DNA, 420 bp, Arabidopsis thaliana
gtgacatgcaccataaggtggaacatgtgagacgcggagacgtctttgccaacactccaggcggtgcgcactggatctacaactcaggagaacagccacttgtcatcatcgctcttctcgacatcgccaactaccaaaaccaactcgaccgcaaccctagagtgttccatttggccggaaacaaccagcagggaggctttggcggttcacagcaacaacaagaacagaaaaacttgtggagcgggttcgacgcacaggtcatagctcaagcattgaaaattgacgttcagttggctcagcagcttcagaaccaacaagacagcagaggaaacatcgttcgtgttaagggacctttccaggtcgtgaggccacctctaagacagccctactagagcgaggagtggagacacccacgtagcc

SEQ ID NO: 144676 - DNA, 414 bp, Arabidopsis thaliana
ctcgaccgcaaccctagagtgttccatttggccggaaacaaccagcagggaggctttggcgggtgggagcaacaacaagaacagaaaaacttgtggagcgggttcgacgcacaggtcatagctcaagcattgaaaattgacgttcagttggctcagcagcttcagaaccaacaagacagcagaggaaacatcgttcgtgttaagggaccttttcaggtcgtgaggccacctctaaaacagccctactagagcgaggagtggagacacccacgtagcccacagggcaacggtcttgatgagactatctgcagcatgaggtcccactagaacattgacgaccttgcttgtgctgacgtgtacaagcccatcctaagttgtgttgaccagcgttaacaacaataccttgtccatttt

SEQ ID NO: 144677 - DNA, 389 bp, Arabidopsis thaliana
gtgtgatctctgagacgaaagaagaagaagatggttgttattgagcagaagaagaggtttgctgtgtttttagcgacgtgtgattcagagttcgtgaagaagacttacggtggttacttcaatgtcttcgtttcaactttcggcgaagaaagtgagcaatgggatctattccgagtcatcgacggacaatttcccgacgagaatgatttatacaagtacgacggtttcgttatcagtggtagtccacatgatgctttcggagacgccgattggattgttaagctttgcgaagtttgtcagaaacttgatcacatgaagaagaaagttctcggcatctgcttcggccaccagataattactagagttaaaggtgggaagataggaagagc

SEQ ID NO: 144678 - DNA, 352 bp, Arabidopsis thaliana
  unsure (1)..(352): unsure at all n locations
agaaaacatacacaaatagcaaaacatggctaacatgctcttcctcgtctgcgcaactctcgcgctgtgcttcctcctcaccaacgcttccatctaccgcaccgttgtcgaattcgaagaagatgacgccagcaaccccgtaggtccaagacagagatgccagaaggagtttcagcaatcacaacacctaagagcttgccagagatggatgagcaagcaaatgaggcaaggacgtggtggtnggccttccctcgacgatgagttcgatttcgagggcccccagcagggataccagctttcttcagcagtgctgcaacgaggcttctcccaggaagagctcagtttggcgttt

SEQ ID NO: 144679 - DNA, 415 bp, Arabidopsis thaliana
aacaaacaaaaagaaaatggttaagctcagcaatctcctcgttgcaaccttcggggttctccgggtccttaacggctgccttgcgaggcagtcacttggggttcctcctcagctacagaacgagtgtaacctcgacaacctagatgttctccaagccaccgaaactatcaagagtgaagccggtcagatcgagtactgggaccacaaccaccctcagctccgatgtgttggtgtttccgttgctcgttatgtaattgaacaaggcggtctttacttgcccaccttcttcactttcccaaaaatttcctacgttgttcaaggaacgggtttcagcggaagagtggtccctggatgtgccgagaccttcatggactcgcagccgatgcaaggacaacaacatggccaaccatggcaa

SEQ ID NO: 144680 - DNA, 420 bp, Arabidopsis thaliana
ccgcaatggaacgtaaacgcaaacgcggcactctacgtgacaaacggaaaggctcatatacaagatggtgaacgacaacggagaaagagtgttcgaccaagagatctccagcggacagttactagtcgtgccacaaggcttttcggtcatgaaacatgccataggcgaacagttcgagtggatcgaattcaagacaaacgaaaacgcacaggtcaacacactcgcgggccgtacctcagtcatgagaggtttgccgcttgaggttataaccaatgggtaccagatctctcccgaagaagctaaacgagtaaagtttagcacgattgagaccacactgacccatagcagttcaatgagctacggaaggcctagggcttgaggcttgatgagcgcgtggtggaatagtcgttgaatctaaag

SEQ ID NO: 144681 - DNA, 419 bp, Arabidopsis thaliana
acaaatacaaatagcaaaaaaaatggcaaacaagctcttcctcgtctgcgcaactttcgccctctgcttcctcctcaccaacgcttccatctaccgcactgttgtcgagttcgacgaagatgacgccagcaaccccatgggcccaagacagaaatgtcagaaggagtttcagcaatcacagcacctaagagcttgccagaaattgatgcgcatgcaaatgaggcaaggccgtggtggtggtccctccctcgacgatgagttcgatttggaagacgacatcgagaacccacaaggcccccagcagggacaccagatcctccagcagtgctgcagcgagcttcgccaggaagagccagtttgtgtttgccccaccttgagacaagctgccagggccgttagccttcagggacaacacggac

SEQ ID NO: 144682 - DNA, 281 bp, Arabidopsis thaliana
tatcaaatggtttccagatctctcccgaggaagctaggaagatcaagttcaacacacttgagaccactttgacccgcgctgccggtaggcaacaacaacagttgatcgaggagattgtcgaggcttaaatcaaaacgtttttctttttcttaataaagtatggtcagtttgtaatcacgtccctttacctttaacgtacgtgtaaaatatgtgtctgcggcacctcacttgtaataacactttcttctcataaataaaagggaagtttcgagttacatact

SEQ ID NO: 144683 - DNA, 417 bp, Arabidopsis thaliana
ctagatcttaagcccaaatgttgcacaaggcttctcccgctctctctctcttgagctccggctacaccggcggtggaaatctgtttcctccgtcgagaaattcgtcgaatcttctgttttctccgagtggatccaggttttctgttcaggcggcgaaaggaacgaacacgaagtcgttaaccggagttgtattcgaaccttttgaggaggtgaagaaagaaatggagctcgttcccactaccccttttgtttctctcgctcgccacaagttctccgacgattctgaatctgccatcaacgatcagatcaacgtggagtacaacgtctcgtatgtctaccatgccctgtatgcctactttgacagagacaatgtcggcttgaaaggtttcgccaagttttttaacgattcgaggtctg

SEQ ID NO: 144684 - DNA, 421 bp, Arabidopsis thaliana
  unsure (1)..(421): unsure at all n locations
cacaaatagcaaaacatggctaacaagctcttcctcgtctgcgcaactctcgccctctgcttgctcctcaccaacgcttccatctaccgcaccgttgtcgaattcgaagaagatgacgccagcaaccccgtaggtccaagacagagatgccagaaggagtttcagcaatcacaacacctaagagcttgccagagatggatgagcaagcaaatgaggcaaggacgtggtggtggtccttccctcgacgatgagttcgatttcgagggcccccagcagggataccagctactccagcagtgctgcaacgagcttcgccaggaagagccagtttgcgtttgccccaccttgaaacaagctgccagggcagttagcctccagggacagcacggaccattccaatccaggaaaatntaccagtcag

SEQ ID NO: 144685 - DNA, 420 bp, Arabidopsis thaliana
ggaagagttattccgggatgcgccgagacgttcatggagtcaccggtatttggagaaagtcaaggtcagggtcagagtcaagggttccgtgacatgcaccagaaagtagagcacctacggtgcggtgacaccattgcaacaccatctggtgtagctcaatggttctacaacaatggaaatgagcctctcattcttgttgcagccgcggatctcgccagcaaccagaaccagcttgaccgcaaccttagaccatttttgatagccggaaacaacccacaagggcaggaatggctacaaggccgaaagcaacagaagcaaaacaacatcttcaatggcttcgcacctgagatcttggctcaagccttcaagatcaatgtcgagacggctcagcagctccagaaccagcaagataaccgtggc

SEQ ID NO: 144686 - DNA, 396 bp, Arabidopsis thaliana
  unsure (1)..(396): unsure at all n locations
ataaaaatggctcgagtctcttctcttctttctttctccttaacacttttgatccttttccatggctacgcggctcaacagggtcagcagggtcagcagtttccgaacgagtgccagctcgaccagctcaatgcgctcgagccttcacacgtactgaagagcgaggctggtcgcatcgaggtgtgggaccaccacgctcctcagctccgttgctcaggtgtctcctttgcacgttacatcatcgagtctaagggtctctacttgccctctttctntaacaccgcgaagctcttcttcgtggctaaaggacgaggtcttatgggaaaagtgatccctggatgcgccgaaacattccaagactcatcagagttccaaccacgcttcgaggtcaaggtc

SEQ ID NO: 144687 - DNA, 419 bp, Arabidopsis thaliana
ctagagtgttccatttggccggaaacaaccagcatggaggctttggcggttcacagcaacaacgagagcagaaaaacttgtggagcgggttcgacgcacaggtcatagctcaagcattgaaaattgacgttcagttggctcagcagcttcagaaccaacaagacagcagaggaaacatcgttcgtgttaagggacctttccaggtcgtgaggccacctctaagacagccctacgagagcgaggagtggagacacccacgtagcccacagggcaacggccttgaggagactatctgcagcatgaggtcccacgagaacattgacgaccctgctcgtgctgacgtgtacaagcccagcctaggtcgcgtgaccagcgtcaacagctataccttgcccatcttggagtatgtcaggctcagt

SEQ ID NO: 144688 - DNA, 417 bp, Arabidopsis thaliana
cggacgcgtgggcggacgcgtgggcatcatcacaaacgagtaagaatacaaatacaaatagcggaaaaaatggcaaacaagctcttcctcgtctgcgcaactttcgccctctgcttcctcctcaccaacgcttccatctaccgcactgttgtcgagttcgacgaagatgacgccagcaaccccatgggcccaagacagaaatgtcagaaggagtttcagcaatcacagcacctaagagcttgccagaaattgatgcgcatgcaaatgaggcaaggccgtggtggtggtccctccctcgacgatgagttcgatttggaagacgacatcgagaacccacaaggcccccagcagggacaccagatcctccagcagtgctgcagcgagcttcgccaggaagagccagtttgtgtttgcccc

SEQ ID NO: 144689 - DNA, 417 bp, Arabidopsis thaliana
atcttcgacacctgtttctgaaatcttcttcttgtcttctccttggaattctatctgtgagcgggagtttcagatccaccaggtcatgtggacagttctcaacagtagcatacttcaacaaagatcattgcttttcagcggaacctgataatctccaacaaacattcttcggtttacagtattaacaccagcaggatagtgctgttttcccattcttgaagatggacagggcagatacgtcgggctttgtaagtggcggaagttgttcatctctcaacttgctccaatatatgcttatagctacaagtatgatgtgctaagtggtactatttcggagctctctttcatctatatccttttcatcttcatgtgaatttggacaaaggtgtagttccattctctagtgccattaatatg

SEQ ID NO: 144690 - DNA, 418 bp, Arabidopsis thaliana
caaaatcttaaaaactttctctcaattctctctaccgtgatcaagatgcagatctttgttaagactctcaccggaaagacaatcaccctcgaggtggaaagctccgacaccatcgacaacgttaaggccaagatccaggataaggagggcattcctccggatcagcagaggcttattttcgccggcaagcagctagaggatggccgtacgttggctgattacaatatccagaaggaatccaccctccacttggtcctcaggctccgtggtggtatgcagattttcgttaaaaccctaacgggaaagacgattactcttgaggtggagagttctgacaccatcgacaacgtcaaggccaagatccaagacaaagagggtattcctccggaccagcagaggctgatcttcgccggaaagc

SEQ ID NO: 144691 - DNA, 419 bp, Arabidopsis thaliana
ccagaaggtggaacatgtgagacgcggagacgtctttgccaacactccaggctctgcccactggatctacaactcaagagaacagccacttgtcatcatcgctcttctcgacatcgccaactaccaaaaccaactcgaccgcaaccctagagtgttccatttggccggaaacaaccagcagggaggctttggcggttcacagcaacaacaagaacagaaaaacttgtggagcgggttcgacgcacaggtcatagctcaagcattgaaaattgacgttcagttggctcagcagcttcagaaccaacaagacagcagaggaaacatcgttcgtgttaagggacctttccaggtcgtgaggccacctctaagacagccctacgagagcgaggagtggagacacccacgtagcccacagggca

SEQ ID NO: 144692 - DNA, 422 bp, Arabidopsis thaliana
gataaaaatggctcgagtctcttctcttctttctttctccttaacacttttgatccttttccatggctacgcggctcaacagggtcagcagggtcagcagtttccgaacgagtgccagctcgaccagctcaatgcgctcgagccttcacacgtactgaagagcgaggctggtcgcatcgaggtgtgggaccaccacgctcctcagctccgttgctcaggtgtctcctttgcacgttacatcatcgagtctaagggtctctacttgccctctttctttaacaccgcgaagctctccttcgtggctaaaggacgaggtcttatgggaaaagtgatccctggatgcgccgaaacattccaagactcatcagagttccaaccacgcttcgaaggtcaaggtcaaagccagaggttccgtgacatgt

SEQ ID NO: 144693 - DNA, 184 bp, Arabidopsis thaliana
tccctttcttccctccttactaatagattccaaacaaaaaccctcgagcgtatgagagtgtggttgttgatacatgttaacaccacacctcatcgtgtcttttatgaaaatgtaagttttggatgtttgaggctaaatgtatttagcacaagtccttaataaataagagttttgtttatgtttc

SEQ ID NO: 144694 - DNA, 420 bp, Arabidopsis thaliana
gctcgagtctcttctcttctttctttcttcttaacacttttgatccttttccatggctacgcggctcaacagggtcagcagggtcagcagtttccgaacgagtgccagctcgaccagctcaatgcgctcgagccgtcacacgtactgaagagcgaggctggtcgcatcgaggtgtgggaccaccacgctcctcagctccgttgctcaggtgtctcctttgcacgttacatcatcgagtctaagggtctctacttgccctctttctttaacaccgcgaagctctctttcgtggctaagggacgaggtcttatgggaaaagtgatccctggatgcgccgaaacattccaagactcatcagagttccaaccacgcttcgaaggtcaaggtcaaagccagaggttccgtgacatgcaccagaaa

SEQ ID NO: 144695 - DNA, 414 bp, Arabidopsis thaliana
gaaggatccaagtggtcaacgacaacggacagaacgtgttggaccaacaggtgcagaaaggacagctcgtggtcatcccacaagggttcgcatacgttgtccagtcccacggaaacaagttcgagtggatctctttcaaaactaatgaaaacgcaatgatcagcactttggcgggtagaacctcgctcttgagggcattgccattggaggtcatatcaaatggtttccagatctctcccgaggaagctaggaagatcaagttcaacacacttgagaccactttgacccgcgctgccggtaggcaacaacaacagttgatcgaggagattgtcgaggcttaaatcaaaacgtttttctttttcttaataaagtatggtcagtttgtaatcacgtccctttacctttaacgtacgt

SEQ ID NO: 144696 - DNA, 421 bp, Arabidopsis thaliana
attcaattgatcctctctccaaatcatcttaaaatcacagatctttgggtatcaagtaaaactgtgaagtgatgtcgggaagaggaaagggaggaaaaggattgtgaaagggaggagcgaagaggcacaggaaggttctgagggataacattcaaggaatcaccaagcctgccattcgtcgtcttgctcgtagaggtggtgtcaagcgtatcagtggtctcatctacgaagagaccagaggtgtcctcaagatcttcctcgagaatgtcatccgtgacgccgttacttacactgagcacgctagaaggaagacggtgaccgccatggatgttgtctacgctttgaagaggcaaggtcgtactctctacggtttcggaggttaatccgatttgggggattagggtttatgcaagttttgggg

SEQ ID NO: 144697 - DNA, 323 bp, Arabidopsis thaliana
  unsure (1)..(323): unsure at all n locations
gggtgggggtttttttttttttttttnggaccggaaagaaagatttttttcaaaaaaggagtggctttttacaggtaaacctcaacaaaacttgtcacattttcgtacatttttttaattactacgtcctttttaacttccttttacaggagcggtttatttttaagccgcggttttaagcttttaagctgcagccacttttggccttccgtagcttgctgggccacttctgtgagtcaaagtggtcttgagcgtgttgaacttgaccctccttgtttttttgggtgagattttgaacccattggttttgacttcaagtggta

SEQ ID NO: 144698 - DNA, 424 bp, Arabidopsis thaliana
aaaaagaaaatggttaagctcagcaatctcctcgttgcaaccttcggggttctcctcgtccttaacggctgccttgcgaggcagtcacttggggttcctcctcagctacagaacgagtgtaacctcgacaacctagatgttctccaagccaccgaaactatcaagagtgaagccggtcagatcgagtactgggaccacaaccaccctcagctccgatgtgttggtgtttccgttgctcgttatgtaattgaacaaggcggtctttacttgcccaccttcttcacttccccaaaaatttcctacgtcgttcaaggaacgggtatcagcggaagagtggtccctggatgtgccgagaccttcatggactcgcagccgatgcaaggacaacaacaaggccaaccatggcaaggacgacagggacaac

SEQ ID NO: 144699 - DNA, 415 bp, Arabidopsis thaliana
aacaaacaaaaagaaaatggttaagctcagcaatctcctcgttgcaaccttcggggttctgctggtccttaacggctgccttgcgaggcagtcacttggggttcctcctcagctacagaacgagtgtaacctcgacaacctagatgttctccaagccaccgaaactatcaagagtgaagccggtcagatcgagtactgggaccacaaccaccctcagctccgatgtgttggtgtttccgttgctcgttatgtaattgaacaaggcggtctttacttgcccaccttcttcacttccccaaaaatttcctacgtcgttcaaggaacgggtatcagcggaagagtggtccctggatgtgccgagaccttcatggactcgcagccgatgcaaggacaacaacaaggccaaccatggcaa

SEQ ID NO: 144700 - DNA, 418 bp, Arabidopsis thaliana
aaaaatggctcgagtctcttctcttctttctttctccttaacacttttgatccttttccatggctacgcggctcaacagggtcagcagggtcagcagtttccgaacgagtgccagctcgaccagctcaatgcgctcgagccttcacacgtactgaagagcgaggctggtcgcatcgaggtgtgggaccaccacgctcctcagctccgttgctcaggtgtctcctttgcacgttacatcatcgagtctaagggtctctacttgccctctttctttaacaccgcgaagctctccttcgtggctaaaggacgaggtcttatgggaaaagtgatccctggatgcgccgaaacattccaagactcatcagagttccaaccacgcttcgaaggtcaaggtcaaagccagaggttccgtgacatg

SEQ ID NO: 144701 - DNA, 397 bp, Arabidopsis thaliana
aaacaaaaagaaaatggttaagctcagcaatctcctcgttgcaaccttcggggttctgctggggcttaacggctgccttgcgaggcagtcacttggggttcctcctcagctacagaacgagtgtaacctcgacaacctagatgttctccaagccaccgaaactatcaagagtgaagccggtcagatcgagtactgggaccacaaccaccctcagctccgatgtgttggtgtttccgttgctcgttatgtaattgaacaaggcggtctttacttgcccaccttcttcacttccccaaaaatttcctacgtcgttcaaggaacgggtatcagcggaagagtggtccctggatgtgccgagaccttcatggactcgcagccgatgcaaggacaacaacaa

SEQ ID NO: 144702 - DNA, 414 bp, Arabidopsis thaliana
ggccaaccatgggaaggacaaggacaacaagtgacactcgggatacagggacaacaaggcccagcatggaaagggcagggacaggagggacatcaagggtttcgttacatgcaccaaaaggtggaacatgtgagacgcggagacgtcttttccaacactccaagctctgcccactggatctacaactcaagagaacagccacttgtcatcatcgctcttctcgacatcgccaactaccaaaaccaactcgaccgcaaccctagagtgtttcatttggccggaaacaaccagcaaggaggctttggcggttcacagcaacaacaagaacagaaaaacttgtggagcgggttcgacgcacaggtcatagctcaagcattgaaaattgacgttcagttggctcagcagcttcagaac

SEQ ID NO: 144703 - DNA, 383 bp, Arabidopsis thaliana
caacccaaggccattttacttaaccggaaacaacccacaaggtgggaggtggctacaaggacgagagcaacaaccacaaaagaacatcttcaatggatttggacccgaggttattgctcaagctttgaagattgatcttcagacagcgcaacaacttcagaaccaagatgacaaccgtggaaacattgtccgagtccaaggcccgttcggtgtcattaggccgtctttgaggggccagagacctcatgaggaggaagaagaagaagaaggacgacacggacgacactgtaatggcttagaggagaccatctgcagtgccaggtgcaccgataacctcgatgatccgtcttgtgctgacgtgtacaagccacaacttggttaca

SEQ ID NO: 144704 - DNA, 386 bp, Arabidopsis thaliana
aaaatggttaagctcagcaatctcctcgttgcaaccttcggggttctcctcgtccttaacgggtgccttgcgaggcaatcacttggggttcctcctcagctacagaacgagtgtaacctcgacaacctaaatgttctccaagccaccgaaactattaagagtgaagccggtcagatcgagtactgggaccacaaccaccctcagctccgatgtgttggtgtttccgttgctcgttatgtaattgaacaaggcggtctttacttgcccaccttcttcacttccccaaaaattttctacgtcgttcaaggaacgggtttcagcggaagagtggtccctggatgtgccgagacctttatggacttgcaaccgatgccaggacaacaaca

SEQ ID NO: 144705 - DNA, 402 bp, Arabidopsis thaliana
  unsure (1)..(402): unsure at all n locations
atttttagggttttttcagtatctcgcgaggttntacatttatttctccaatatggattcgaggatgaatcagaagactgttttggctgtgacggatgatgtggtgttacctgttagctctgttttagctataatgaaagagcttggaaaggaagtgattgagagttttgatcctctgattattactcaagcatccacaataaatcagtttcctttggatgcttcctctgtggaggcggtgctagccatttccaaaacatctgattttccaagtgataaaatatgtggtgagttctcaagaatcttgaagccttgtggtacggtttttgtgtgcaaagttttggagggtgaaacgggagaaattcaacagaccatttcaaggagagtgacattggctggttt

SEQ ID NO: 144706 - DNA, 424 bp, Arabidopsis thaliana
aatgggtcgagtctcatctattatctctttctctttgacactcttgatcctcttcaatggctacactgcccaacagtggcccaacgagtgccagctcgatcaactcaatgcgctcgaaccatcccaaatcatcaagagcgagggtggtcgcatcgaggtctgggaccaccatgcaccccagctccgttgctccggctttgcctttgagcgtttcgtcattgagcctcagggtcttttcttgcccactttcttgaacgccggcaaactcacgtttgttgttcacggaaggggtctaatgggaagagttattccgggatgcgccgagacgttcatggagtcaccggtatttggagaaggtcaaggtcagggtcagagtcaagggttccgtgacatgcaccagaaagtagagcacctacggtgcggt

SEQ ID NO: 144707 - DNA, 396 bp, Arabidopsis thaliana
cgagtaagaatacaaatacaaatagcaaaaaaaatggcaaacaagctcttcctcgtctgcgcaactttcgccctctgcttcctcctcaccaacgcttccatctaccgcactgttgtcgagttcgacgaagatgacgccagcaaccccatgggcccaagacagaaatgtcagaaggagtttcagcaatcacagcacctaagagcttgccagaaattgatgcgcatgcaaatgaggcaaggccgtggtggtggtccctccctcgacgatgagttcgatttggaagacgacatcgagaacccacaaggcccccagcagggacaccagatcctccagcagtgctgcagcgagcttcgccaggaagagccagtttgtgtttgccccaccttgagacaagct

SEQ ID NO: 144708 - DNA, 416 bp, Arabidopsis thaliana
  unsure (1)..(416): unsure at all n locations
atttctcacattttcgtagccgcaagactcctttcagattcttacttgcagctatgggtgaagagaagtttcacattaacattgtggtcattggtcatgttgattctggaaaatcgaccacaactggtcacttgatctataagcttggtggtattgacaagcgtgtcatcgagaggttcgagaaggaggctgctgagatgaacaagaggtccttcaagtacgcatgggtgttggacaaacttaaggccgagcgtgagcgtggtattaccatcgatattgctctatggaagttcgagaccaccaagtactactgcacagtcattgatgccccaggacatcgtgatttcatcaagaacatgattactggtacctnccaggctgattgtgctgttcttatcattgactccaccactgga

SEQ ID NO: 144709 - DNA, 393 bp, Arabidopsis thaliana
aaacagagcacaatgactagatttgcggtattgccactctctgttctccttctcgttctcttgttcctctgcactgagtcgttggctaagtcggaggagtctgaagaatacgacgtcgctgtgccttcatgttgcgggttttcgtctcctcttctgattaagaaagatcaatggaaaccaatctttgagacgaagtttggacagatttcaaccgttcaaatcggcaatggatgcggaggaatgggaccttacaagatacattccataacgttggagccaaacacaattttgctccctcttcttcttcattccgacatggtcttcttcgttgactctggaagtgggattctgaattgggttgacgaggaaagcgaaagttctgggattagacta

SEQ ID NO: 144710 - DNA, 409 bp, Arabidopsis thaliana
cttccgcatctcttttaatttctctctaatttctcgatctctccgtccaactatgtgtgcctgcaccagcaaattcgccgatgagttgatcgccaacgctgcctacatcggcacacctggaaaaggtattttggctgctgatgagtccactggtaccatcggaaagcgtcttgcgagcatcaacgtcgagaacgttgagaccaacagacgtaacctccgtgagcttctattcaccgcccctggtgctcttccatgcctcagcggtgtcatccttttcgaagagactctgtaccaaaagagttccgatggtaagcttttcgttgatatcttgaaggaaggaggagttcttccaggtatcaaggttgacatggttaccgttgaactagctggaaccggctttgtgaccacc

SEQ ID NO: 144711 - DNA, 411 bp, Arabidopsis thaliana
cggacgcgtgggcggacgcgtgggtaaaaatggctcgagtctcttctcttctttctttctccgtaacacttttgatccttttccatggctacgcggctcaacagggtcagcagggtcagcagtttccgaacgagtgccagctcgaccagctcaatgcgctcgagccttcacacgtactgaagagcgaggctggtcgcatcgaggtgtgggaccaccacgctcctcagctccgttgctcaggtgtctcctttgcacgttacatcatcgagtctaagggtctctacttgccctctttctttaacaccgcgaagctctccttcgtggctaaaggacgaggtcttatgggaaaagtgatccctggatgcgccgaaacattccaagactcatcagagttccaaccacgcttcgaag

SEQ ID NO: 144712 - DNA, 395 bp, Arabidopsis thaliana
gtcaggctcagtgccactcgtggcgttctccagggtaatgcgatggtgcttcctaaatacaacatgaacgcttacgagatcttgtactgcactggaggacaaggaaggatccaagtggtcaacgacaacggacagaacgtgttggaccaacaggtgcagaagggacagctcgtggtcatcccacaagggttcgcatacgttgtccagtcccacggaaacaagttcgagtggatctctttcaaaactaatgaaaacgcaatgatcagcactttggcgggtagaacctcgctcttgagggcattgccattggaggtcatatcaaatggtttccagatctctcccgaggaagctaggaagatcaagttcaacacacttgagaccactttgacccgcgc

SEQ ID NO: 144713 - DNA, 314 bp, Arabidopsis thaliana
  unsure (1)..(314): unsure at all n locations
gaaaaatcttccttcaacggcgggatcaggatcgagcaagtcaacaggagctgcatcaggttgggcagctttctgatgaatggagtgtaaaatttaagttattggacaagtccggcttcatcttcttgtgacttgagagcacgagacaatagacaacaatggtggtcagccaacagtctttttgatgtatgttaatggtaagttgatgtgtgtttctttgtaatcctcccacactccctgttttaattanttttctttcttataatcatcgntgttacattatcgattatcatttgtatcactgagatattaat

SEQ ID NO: 144714 - DNA, 381 bp, Arabidopsis thaliana
agaaaacatacacaaatagcaaaacatggctaacaagctcttcctcgtctgcgcaactctcgccctgtgcttcctcctcaccaacgcttccatctaccgcaccgttgtcgaattcgaagaagatgacgccagcaaccccgtaggtccaagacagagatgccagaaggagtttcagcaatcacaacacctaagagcttgccagagatggatgagcaagcaaatgaggcaaggacgtggtggtggtccttccctcgacgatgagttcgatttcgagggcccccagcagggataccagctactccagcagtgctgcaacgagctttcgcaggaagagccagtttgcgtttgccccaacttggaacaagctgccagggcagttag

SEQ ID NO: 144715 - DNA, 233 bp, Arabidopsis thaliana
cctaaatattccgagttcttgatttttgataacttcaggtcaaaatgggagtatactcgagaagcggtgcgttttcggtctttgtgtcggttctgctgtttttcactgcttattctaagagaaatgattgaacattcagagttggcctcgaaaaactgtagttggattcttacaaccgactcgtaacacgcttttttttcaaacaagaaaaaaaccttctaaatttttttttt

SEQ ID NO: 144716 - DNA, 414 bp, Arabidopsis thaliana
gcccactggatctacaactcaggagaacagccacttgtcatcatcgctcttctcgacatcgccaactaccaaaaccaactcgaccgcaaccctagagtgttccatttggccggaaacaaccagcagggaggctttggcggttcacagcaacaacaagaacagaaaaacttgtggagcgggttcgacgcacaggtcatagctcaagcattgaaaattgacgttcagttggctcagcagcttcagaaccaacaagacagcagaggaaacatcgttcgtgttaagggacctttccaggtcgtgaggccacctctaagacagccctacgagagcgaggagtggagacacccacgtagcccacagggcaacggccttgaggagactatctgcagcatgaggtcccacgagaacattgac

SEQ ID NO: 144717 - DNA, 235 bp, Arabidopsis thaliana
gtcgacgccacgcagccacgcgtgcgtacaagtagaaaatggttaagctcagcaatctactagttgcaaccttcggagctctagtcgggcttaacggctgccttgcgaggcagtcactcggggttgctcctcagctacagaacgagtgtaacctcgacaacctagatgttctccaagccaccgaaactatcaagagtgtagccggtcagatcgagtactgggaccacaaccaccc

SEQ ID NO: 144718 - DNA, 404 bp, Arabidopsis thaliana
cggacgcgtgggaaaagaaaatggttaagctcagcaatctcctcgttgcaaccttcggggttgtcctcgtccttaacggctgccttgcgaggcagtcacttggggttcctcctcagctacagaacgagtgtaacctcgacaacctagatgttctccaagccaccgaaactatcaagagtgaagccggtcagatcgagtactgggaccacaaccaccctcagctccgatgtgttggtgtttccgttgctcgttatgtaattgaacaaggcggtctttacttgcccaccttcttcacttccccaaaaatttcctacgtcgttcaaggaacgggtatcagcggaagagtggtccctggatgtgccgagaccttcatggactcgcagccgatgcaaggacaacaacaa

SEQ ID NO: 144719 - DNA, 408 bp, Arabidopsis thaliana
tacaaaataagatttatggctacacaaactgttgaagatagttctagatctggtccaagaagcactactgtagggaagttattgaaaccattgaattccgaatatggtaaagtagctcccggatggggaacgacccctttgatgggtgttgcaatggctctatttgcggtattcctatctattattttggagatttataattcttctgttctactggatggaatttcagtgaattagactgagaagaatcttgaagttctagcttttagctcgatacaaaaaagtaaagtatgcaggtctaacaattttagcctattctcctttggtagttcgaccgcgaaatttttttctgcattgtatatttccggaatatgagtaaagtttatgattggttcgaagaacgtcttg

SEQ ID NO: 144720 - DNA, 415 bp, Arabidopsis thaliana
atcactcactgcatcaacaatggccagagagaagattgtggtggctggtggtaccacaaagagctggagactactcttggggctgagaatatttgcattcatggctactttagctgcagccattgtaatgtcactaaacaaagagacaaagaccttggttgtggccaccattggtactgttcctattaaagccactttaaccgctaagtttcagcacacaccggcttttgtgttctttgttatagctaatgtaatggtgagcttccacaacttgttgatgattgtggttcagattttcagccggaaactggagtacaaaggtcttcgtctcctctctatcgccattcttgacatgctaaacgcaacactagtatctgcggctgcaaacgcggcggtgttcgtggcagagctaggg

SEQ ID NO: 144721 - DNA, 415 bp, Arabidopsis thaliana
cgcgattggcctctttgatgctcaacggggccattaccttccccaaaggtttaggttcccctgggtccaatttgcatgccagatcgattcctcggccgaccttactctcagttacccgaacctccacacctagactctcggtggctactagatgcagcagcagcagcgtgtcgtcttcccggccatcggcgcaacctaggttcattcagcacaagaaggaggcttactggttctacaggttcttatccatcgtatacgaccatgtcatcaatcctgggcattggaccgaggatatgagagacgacgctcttgagccagcggatctcagccatccggacatgcgagtggtcgatgtcggcggcggaactggtttcactactctgggcatagtcaagacagtgaaagccaagaatgt

SEQ ID NO: 144722 - DNA, 417 bp, Arabidopsis thaliana
cggaaaacgcgagggtaattaaaagtcagtgtttcatgacacaaggaacacctaacttctacatgcgtccgatcgaaggtttaaccattctcatcgatttagatacaaagcaagtgatcgagataaccgatacaggtcgggctatacccatacccggttcaaccaataccgattaccgcttccaaaagctcgcaaccaccgacaaaactcgtcctctaaacccgatatccattgagcagccacgtggtccaagcttcgtgatagaggacaaccatctagtgaaatgggcaaattgggaatttcatctaaaacctgacccgagagcaggtgtggttatatcacgggtaagagtacacgacccggatactcatgagacacgtgacgtgatgtacaaaggtttcgtgtctgaactttttg

SEQ ID NO: 144723 - DNA, 409 bp, Arabidopsis thaliana
gagaaacacaccaatatcgcaacagcgctcttaggacagatcaaggagagatctatggacgcgttcactaagaaagaaagcgacatgatgatgaggggcggaatcgacagaaccgaacttatggctgctctgaaaggcaaagggacaaagatggacaagctccggtttgcaatcatgtacctgatctccacagaaaccataaaccaatcggaagttgaagcagtggaggcagcattgaatgaagctgaggctgatacaagtgcgtttcagtatgtaaagaaaatcaaatcgttaaacgcatcttttgcagctacatcagcgaattcagctagcagaagcaacattgtagactgtgccgagaagctttacggacagtctataagcgcaatgactgcaggagtcaagaatc

SEQ ID NO: 144724 - DNA, 419 bp, Arabidopsis thaliana
gaaaacatacacaaatgcaaaacatggctaacaagctcttcctcgtctgcgcaactctcgccctctgcttcctcctaccaacgcttccatctaccgcaccgttgtcgaattcgaagaagatgacgccagcaaccccgtaggtccaagacagagatgccagaaggagtttcagcaatcacaacacctaagagcttgccagagatggatgagcaagcaaatgaggcaaggacgtggtggtggtccttccctcgacgatgagttcgatttcgagggcccccagcagggataccagctactccagcagtgctgcaacgagcttcgccaggaagagccagtttgcgtttgccccaccttgaaacaagctgccagggcagttagcctccagggacagcacggaccattccaatccaggaaaattt

SEQ ID NO: 144725 - DNA, 386 bp, Arabidopsis thaliana
cggacgcgtgggcgagaaaacgaaaaccctagtttcagaggcatctccagacaccgaaaatggcggaaggactcgttttgaagggcaccatgcgtgcacacactgacatggtgacggcaatcgccaccccaatcgataacgcagacatcatcgtctcagcttcccgcgacaaatccatcattttgtggaaactcaccaaggacgacaaagtctacggtgtagctcagaggcgtctcactggtcactctcacttcgttgaggatgttgttctctcctccgatggacaattcgcgctttccggcagctgggacggcgagctccgtctttgggatcttgctgctggtgtctccactcgtagattcgttggacacaccaaggacgtgctc

SEQ ID NO: 144726 - DNA, 405 bp, Arabidopsis thaliana
aacaaaaagaaaatggttaagctcagcaatctccttgttgcaaccttcggggttctcctcgggcttagacggtgccttgcgaggcagtcacttggggttcctcctcagctacagaacgagtgtaacctcgacaacctagatgttctccaagccaccgaaactatcaagagtgaagccggtcagatcgagtactgggaccacaaccaccctcagctccgatgtgttggtgtttccgttgcttgttatgtaattgaacaaggcggtctttacttgcccacctttttcacttccccaaaaatttcctacgtcgttcaaggaacgggtatcagcggaagagtggtccctggatgtgccgagacctttatggactcgcagccgatgcaaggacaacaacaaggccaacca

SEQ ID NO: 144727 - DNA, 418 bp, Arabidopsis thaliana
agaaaacatacacaaatagcaaaacatggctaacaagctcttcctcgtctgcgcaactctcgccctctgcttcctcctcaccaacgcttccatctaccgcaccgttgtcgaattcgaagaagatgacgccagcaaccccgtaggtccaagacagagatgccagaaggagtttcagcaatcacaacacctaagagcttgccagagatggatgagcaagcaaatgaggcaaggacgtggtggtggtccttccctcgacgatgagttcgatttcgagggcccccagcagggataccagctactccagcagtgctgcaacgagcttcgccaggaagagccagtttgcgtttgccccaccttgaaacaagctgccagggcagttagcctccagggacagcacggaccattccaatccaggaaa

SEQ ID NO: 144728 - DNA, 413 bp, Arabidopsis thaliana
cgacatcgccaactaccaaaaccaactcgaccgcaaccctagagtgttccatttggccggaaacaaccagcagggaggctttggcggttcacagcaacaacaagaacagaaaaacttgtggagcgggttcgacgcacaggtcatagctcaagcattgaaaattgacgttcagttggctcagcagcttcagaaccaacaagacagcagaggaaacatcgttcgtgttaagggacctttccaggtcgtgaggccacctctaagacagccctactagagcgaggagtggagacacccacgtagcccacagggcaacggccttgaggagactatctgcagcatgaggtcctacgagaacattgacgaccctgctcgtgctgacgtgtacaagcccagcctatgtcgcgtgaccagcg

SEQ ID NO: 144729 - DNA, 362 bp, Arabidopsis thaliana
aacaaacaaaaagaaaatggttaagctcatcaatctcctcgttgcaaccttcggggttctcctcgtccttaacggctgccttgcgaggcagtcacttggggttcctcctcagctacagaacgagtgtaacctcgacaacctagatgttctccaagccaccgaaactatcaagagtgaagccggtcagatcgagtactgggaccacaaccaccctcagctccgatgtgttggtgtttccgttgctcgttatgtaattgaacaaggcggtctttacttgcccaccttcttcacttccccaaaaattttctacgtcgttcaaggaacgggtatcaacggaagagtggtccctggatgtgccgaga

SEQ ID NO: 144730 - DNA, 417 bp, Arabidopsis thaliana
accctttgtacttacttcaacaaagaaagcacggacctcctcgagagaagaatttttgtcccaattcaagactaaacaagttcgaactaattgaatacttgtgtcagaaattcctcgagttggtttgccatttccataaaggatatagttgaaaactcgaagttgaatattatccttttcccgaaagagatcttgtgggaagagtgttgccaaatttatactgtccgctatctcataggtggctacgggccgcaccaaaacaaaaaactttttcttggttggtgtaatccgttggacataaatccaatttttaaattttttggattccttcgagtttgtttttcctcttcctggcggtatcaagatgccactgtgtcgggatattttatctgtcttgtccggaaaatggatatcccc

SEQ ID NO: 144731 - DNA, 415 bp, Arabidopsis thaliana
aaccaggaaaccatacacaaatagcaaaccatggctaacaagctcttcctcgtctgcgcaactctcgccctctgcttcctcctcaccaacgcttccatctaccgcaccgttgtcgaattcgaagaagatgacgccagcaaccccgtaggtccaagacagagatgccagaaggagtttcagcaatcacaacacctaagagcttgccagagatggatgagcaagcaaatgaggcaaggacgtggtggtggtccttccctcgacgatgagttcgatttcgagggcccccagcagggataccagctactccagcagtgctgcaacgagcttcgccaggaagagccagtttgcgtttgccccaccttgaaacaagctgccagggcagttagcctccagggacagcacggaccattccaat

SEQ ID NO: 144732 - DNA, 416 bp, Arabidopsis thaliana
gatgatgtttttccccaaaatgagactatcttgtttgcaaccacacctccattttaccagtggcagatcaatagcagcagctctagcttttccaagctcaagcataaggaacagaacatcatgtcttgttcggtgtggctcagccagaagaagattgactacgaaaagtagcagaaacagcaagcttgaaagagcacaacctcctcctctgggtttggaacggcactggagatatgctgtggttggtggagtctctgtagggttgatgatggttttggtattgggaatggatgcagagaaagctatggcgcttggaccagaaggtcctttaatggaagagttttgggacaacgttagaaggtacggtctttacgctctcacggttagcactggagctctctctgctgtctttgagc

SEQ ID NO: 144733 - DNA, 371 bp, Arabidopsis thaliana
gcaaaaaatggcaaacaagttgttcctcgtctgcgcagctctcgctctctgcttcctcctcaccaacgcttccatctaccgcaccgtcgttgagttcgaagaagatgacgccactaaccccataggcccaaaaatgaggaaatgccgcaaggagtttcagaaagaacaacacctaagagcttgccagcaattgatgctccagcaagcaaggcaaggccgtagcgatgagtttgatttcgaagacgacatggagaacccacagggtcaacagcatgaacaacagctattccagcagtgctgcaactagcttcgccaggtagagccagaatgttttttcccccactcttgtatcaagcctgccaaagttcttt

SEQ ID NO: 144734 - DNA, 349 bp, Arabidopsis thaliana
atttggtacaatgtttgctctcttctgcctctggtttggcatctcagtcccactagtctgcgatgggagcgtatctgggttacaagaagccaccaattgaagatccagtcaaaacaaacaagatccccaggcaagtaccagagcagccgtggtacatgaaaccagttttctctatactaattggaggcatcctcccgtttggagcagtcttcatcgagctctacttcatctcgacatctatatggctgaaccagttctactacatcttcggggtcccctttatgatctcttaatcttgatcgtcacctgtgcatagatcacagtggttctcttctacttccatcttttt

SEQ ID NO: 144735 - DNA, 333 bp, Arabidopsis thaliana
caaagccaccggtttttagacacacagatttcattttcagttgttaaatggtaactagagaggcgaagttgacgccagagcgagaagtagagtcgcccatggcgcaagcgagacataatggaggaggtggggttgaaaaactggcaaagaagctcaaaaggcatcaccaatgcctttacttacggctaatgggaatagcagcttggtagctagtggttataatcctcttttaggaacatttcaagctcttgattcattgtcgatagcttttatctcaccattacagtttattccttttccggagtattgatgaggcacatttaaatgggattg

SEQ ID NO: 144736 - DNA, 410 bp, Arabidopsis thaliana
gaacgcaaacgcgaacgctattctttacgtgacagacggggaagcccaaatccagatcgtgagacgacaatggtaacagagtgtttgacggacaagtctctcaaggacagctcatagccgtaccacaaggtttctcggtggtgaaacgcgcaacaagcaaccgattccagtgggttgagttcaaaacaaacgctaacgcgcaaatcaacactctggcgggacgaacctcagtcttgagaggtttaccacttgaagtcataaccaatgggttccaaatctcacccgaagaagcaaggagggtcaagttcaacacgctcgagaccactttgactcacagcagtggcccagctagctacggaaggccaagagtggctgcagcttaagagcttaaaaccggggcttaacaatga

SEQ ID NO: 144737 - DNA, 410 bp, Arabidopsis thaliana
accatctggtgtagctcaatggttctacaacaatggaaatgagcctctcattcttgttgcagccgcggatctcgccagcaaccagaaccagcttgaccgcaaccttagaccatttttgatagccggaaacaacccacaagggcaggaatggctacaaggccgaaagcaacagaagcaaaacaacatcttcaatggcttcgcacctgagatcttggctcaagccttcaagatcaatgtcgagacggctcagcagctccagaaccagcaagataaccgtggcaacatcgtcaaggtcaacggacctttcggcgtcattaggccacccttgagacgcggcgaaggcggccaacaaccacatgaaatagctaatggtttagaggagactttgtgcaccatgcgatgcactgaaa

SEQ ID NO: 144738 - DNA, 399 bp, Arabidopsis thaliana
ctttgggaacgaccatttcactgtagcatctttttttctgcaaattattctctctataaatggatttgatcttcagaccaatctctccctcaacatttcctcatctcatctctctgatttcttgcttcgaattttgatttatctctctctgtctctctctcggtctcgtgctctatctcgtttgtaggcagtgccaatttcaccacttgtgttgtgtgtcagcggatatagaatctgagaggaatatttaaagattctccctttgcttcttcttttttataccgtttctattaatgtttgggactcttgcttccggcgaaatcgaaactgccagactgaaccgtaatttggggattacgtccaatttagggggtttctgcggtggatttgaagactttg

SEQ ID NO: 144739 - DNA, 408 bp, Arabidopsis thaliana
agaaaaatgggtcgagtctcatctattatctctttctctttgacactcttgatcctgttcaatggctacactgcccaacagtggcccaacgagtgccagctcgatcaactcaatgcgctcgaaccatcccaaatcatcaagagcgagggtggtcgcatcgaggtctgggaccaccatgcaccccagctccgttgctccggctttgcctttgagcgtttcgtcattgagcctcagggtcttttcttgcccactttcttgaacgccggcaaactcacgtttgttgttcacggaaggggtctaatgggaagagttattccgggatgcgccgagacgttcatggagtcaccggtatttggagaaggtcaaggtcagggtcagagtcaagggtttcgtgacatgcaccagaaa

SEQ ID NO: 144740 - DNA, 385 bp, Arabidopsis thaliana
gaaaatggttaagctcagcaatctcctcgttgcaaccttcggggttctcctcgtccttaacggctgccttgcgaggcagtcacttggggttcctcctcagctacagaacgagtgtaacctcgacaacctagatgttctccaagccaccgaaactatcaagagtgaagccggtcagatcgagtactgggaccacaaccaccctcagctccgatgtgttggtgtttccgctgctcgttatgtaattgaacaaggcggtctttacttgcccaccttctttactttcccaaaaatttcctacgtcgttcaaggaacgggtatcagcggaagagtggtccctggatgtgccgagaccttcatggactcgcagccgatgcaaggacaacaa

SEQ ID NO: 144741 - DNA, 413 bp, Arabidopsis thaliana
attgcttcatcattcccaaatcatcaacttaatcgtttctctcaaatttagggttttctcttttctcgaaagtcttgcggttttctgaatcatctctatctggtttgagggtttcgtttgatatctggagaaaggggtttctggaaacaaggagttcataattcgcgatcttgatctatcgatcttcatttatatataaaagcgtgaatgagattatgatggagtcgaaaggtggtaaaaagaagtccagcagtagtagttccttattttacgaagctcccctcggttacagcattgaagacgttcgtccaaacggtggaatcaagaaattcaaatcttctgtctactcaaactgctccaagaggccatcctgagtaccagcgtgcaccgatcttcataatatagttatagct

SEQ ID NO: 144742 - DNA, 316 bp, Arabidopsis thaliana
ccaggcgtccgaacatagaaaaaaagggcaaacaggtggttcctggtttgtgcagttctagctctctgcttcctcctgagcaacgcttccatctaccggaccgtagttgagttcgaagaagatgacgccactaaccccataggcccaaaaatgaggaaatgccgcaaggagtttcagaaagaacaacacctaagagcttgccagcaattgatgctccagcaagcaaggcaagggcggagcgatgagtttgatttcgaagacgacatggagaacccacaggggcaacagcaggaacaacagctattccagcagtgct

SEQ ID NO: 144743 - DNA, 404 bp, Arabidopsis thaliana
atcacgaacaagtaagagtacaactacaaacagcataataaatggcgcacaagctcttgcttgcttgcgcaactactgccctctgctacctcctcaccaacacttgcatataccgcactgatgccgagactcgacgagatgacaccagccacgcgatgggcccaagacagaaatgtcagaaggagtttcagcaatcacagcacctaacagcttgccagaaattgatgcgcatgcaaatgaggcaaggccgcggtggaggtccctccctcgacgatgagttcgatgtggaagacgacatcgtgaacccacacagcccccagcatggacaccagatcctccagcagtgctgcagcgagcttctgcaggaagagccagtgtgtgtttgacccaccttgagacaagct

SEQ ID NO: 144744 - DNA, 310 bp, Arabidopsis thaliana
ggaaaaaataacaatggttattaaaagtttcccgttaagattgaacctatttgggaggggagagaatttttaagagttgagagtatcttatgtcatttgcttatgtactcttttatacaaaattcgcacttgaaaagtgaagatataaacctctaaaacgggaatgtgttttcaaatacacaaagggagagatcgacattatgttaactattattatattatatttaatatttataagaaaaaacttgaatcatttattatttttcccaaaactcctctttttatatggtgatatatggatggaacaaaa

SEQ ID NO: 144745 - DNA, 353 bp, Arabidopsis thaliana
agaggaagaaaaatgggtcgagtctcatctattatctctttctctttgacactcttgagccgtgttaatggctacactgcccaacagtggcccaacgagtgccagctcgatcaactcaatgcgctcgaaccatcccaaatcatcaagagcgagggtggtcgcatcgaggtctgggaccaccatgcaccccagctccgttgctccggctttgcctttgagcgtttcgtcattgagcctcaaggtcttttcttgcccactttcttgaacgccggcaaactcacgtttgttgttcacggaaggggtctaatgagaagaggtattccgggatgcgccgagacgttcatggagtcacc

SEQ ID NO: 144746 - DNA, 372 bp, Arabidopsis thaliana
tctttgagttatttatttccagaagcttcatagtttctggaaaatgctaatccactagcggagataaaagacagatctttaatccactatagaaaccgcgttttctgaaaatgcggttgcgttttccgatgaaatctgccgttttagcgtttgctatctttctggtgtttattccactgttttccgtcggaatacggatgattccgggaagactcaccgccgtatccgccaccgtcggaaatggctttgatctggggtcgttcgtggaagctccggagtacagaaacggcaaggagtgcgtgtctcaatcgttaaacagagagaacttcgtgtcgtcttgcgacgctttgttagttcatgtagctatgacgc

SEQ ID NO: 144747 - DNA, 404 bp, Arabidopsis thaliana
caaaaaccacgcagtcgtgttctgttgaattggtatatttggaaataagaattatcctgctgagagatattgagatgtgaaggagtccatgccatattgagatggaagaagattatagtagagataaaaaagttccaagacacaaaccaccattagctaaattgactttgaaccatcatccatacataaaccgtctaagacagatgggaactggctggtagtctatatataaccaataaagatcacccataaaaagatacaaaaaaagaagaaccgtttcttgaatgatatagtaatagaagctaaggaaaatgcaatgtgggaatcaagcagacttaggaaaatgttgagacagaagttttgaaatcttgaggaacccgacagtgtctttcccactgaagatc

SEQ ID NO: 144748 - DNA, 186 bp, Arabidopsis thaliana
gttctacatttttgtcgttaacagaagttaaaactaataaatatctgccaagaaaaaatcagaacttgagtgaatattatgcttatattgcgcgaaaaaaaatctaattagatatatttttattatacaccaccctatattaacccacccataagagcctacggaaacctatttgtaatttaaaaa

SEQ ID NO: 144749 - DNA, 445 bp, Arabidopsis thaliana
  unsure (1)..(445): unsure at all n locations
cgtccggtcgtgaggcccacttctaagacagnccctcacgagagctgaggtagtggagaacacccacgtagncccacagggtcgaacggccttgagggagaactatctgcagcanntgaggtcccacgagaaccattgtacgaccctgctcgtgctgacgtgtacanagcccagncctatggtcgcgtgacnccagcgtcaacagctatanccttgcccatctttggagtatggtcaggctcagtggccactcgtggcgttctccagggtaatgcgatggtgcttcctaaatacaacatgaacgctaacgagatcttgtactgcactggaggacaaggaaggatccaagtggtcaacgacaacggacagaacgtgttggaccaacaggtgcagaaaggacagctcgtggtcatcccacaagggttcgcatacgttgtccagtccc

SEQ ID NO: 144750 - DNA, 414 bp, Arabidopsis thaliana
  unsure (1)..(414): unsure at all n locations
ccaaggttggatttttcagattggtgggcgaaagacacgaggaagggaacaccagttgtggtgaaaatggaaaatcctaattactctgtagttgaaatcgacggtccagattcggcttttagaccagtggagaagagcagaggcaagaacgctaagcaagtcacttgngttttgcttctcaaagctcatagagctgttggatgtctcacttggctcgccactgtcttttggtctctccttggtgccatcaagaaacggcttagtttcactcacccacttggctctgagaaattaggcagagacagatggcttttcactgccattaagctcttcttagctgtttccttagtgattctcggctttgagattgttgcttattttagaggatggcattactttcaaagccctagtctt

SEQ ID NO: 144751 - DNA, 397 bp, Arabidopsis thaliana
gaaaatggttaagctcagcaatctcctcgttgcaaccttcggggttctcctcgtccttaacggctgccttgcgaggcagtcacttggggttcctcctcagctacagaacgagtgtaacctcgacaacctagatgttctccaagccaccgaaactatcaagagtgaagccggtcagatcgagtactgggaccacaaccaccctcagctccgatgtgttggtgtttccgttgctcgttatgtaattgaacaaggcggtctttacttgcccaccttcttcacttccccaaaaatttcctacgtcgttcaaggaacgggtatcagcggaagagtggtccctggatgtgccgagaccttcatggactcgcagccgatgcaaggacaacaacaaggccaacca

SEQ ID NO: 144752 - DNA, 397 bp, Arabidopsis thaliana
tctcatttgaattcttcttattgtttagattccaggtcaaactgtgatccattatctttgctactaaactaagttcttttctctgatcgaatcaaaaagttttcaactttctaaatttttttagttctaaggaaaaaacctctccgagaatggttttatcggtgaagcaaacactctctccgaaaatcggacttttccgacgaaacccttcatcctcactaggaagatctcctgtttctctctcgtttccatcgacggagcttccaaaacgcaccgttttagccgtgtcaaagccgcttcatctctcttcttctctgagagctaagtctccggtagtgagatgtgaagcttatgaagctgaccgatcagagcctcatccgatcggtgatgatgctgc

SEQ ID NO: 144753 - DNA, 416 bp, Arabidopsis thaliana
cccacgcgtccgaaaattaaaagcaccttacttaattccatatcgttcgggtttttttcttcaaaaaatggcgtcaaagcacctgagcagagaagagcttgatgagaaggcgaagcaaggagagaccgtcgtcccaggtggcaccggtggccacagcctcgaagctcaagagcatcttgctgaaggaaggagcaagggagggcagacgaggaaggagcagctaggacatgaaggttatcaggagatcggtcacaaaggtggagaggcgaggaaggagcagttagggcacgagggttatcaggagatgggtcacaaaggtggagaggcgaggaaggagcagctagggcacgagggttatcaggagatgggacacaaaggaggagaggcgaggaaggagcatctagggcacgagggtt

SEQ ID NO: 144754 - DNA, 359 bp, Arabidopsis thaliana
atgcgctaataccccatggcagaggcgtaagcttgtgaaaatcttaaatgactggagcgtattccatgtgcagatggggattgctgttggtcaaatgatgcagcaagatacatcacgcagttcgaaaaatggggataagtctctactcattttaaaccatatatatggtggattagaagagcaaattaattgggtggcaattcgctttctcatgctgggatttgacctagacctctactcgccaagtgaatattgcatggtatactggtacatgtatattatactcttgaagcttgccgaaagagcacgtttcaggggcttaatcgttgtcaacactgtggaaagaaaagcaaaaagga

SEQ ID NO: 144755 - DNA, 313 bp, Arabidopsis thaliana
agaaaacatacacaaatagcaaaacatggctaacaagctcttcctcgtctgcgcaactctcggcgctctggttcctcctcaccaacgcttccatctaccgcaccgttgtcgaattcgaagaagatgacgccagcaaccccgtaggtccaagacagagatgccagaaggagtttcagcaatcacaacacctaagagcttgccagagatggatgagcaagcaaatgaggcaaggacgtggtggtggtcctttcctctcaagttggactgattcgtgggtcctctgcttggcttccacattcaacacttttttttt

SEQ ID NO: 144756 - DNA, 388 bp, Arabidopsis thaliana
atttcttgttattatccacgaacgaagaaaaacctagaaaacagttgaagaaagaaaatcacaggagaggccatggccggaattggaccgattactcaggattgggaaccagttgtgatccgcaagagagctcctaacgctgcagctaagcgcgacgagaagactgtcaacgccgctcgtcgaagcggcgccgatattgagaccgttcgaaaattcaatgctggatcgaacatggctgcatcaagcggcaccttcttgaacacatagaagctagatgatgatactgagaacttatcttatgatcgtgtgcccactgaattgatgaaagccattattcaagcttagaggggagaatgaattttacttagtcccaacttgtccatctgat

SEQ ID NO: 144757 - DNA, 412 bp, Arabidopsis thaliana
taaagaggaagaaaaatgggtcgagtctcatctattatctctttctctttgacactcttgatcctcttcaatggctacactgcccaacagtggcccaacgagtgccagctcgatcaactcaatgcgctcgaaccatcccaaatcatcaagagcgagggtggtcgcatcgaggtctgggaccaccatgcaccccagctccgttgctccggctttgcctttgagcgtttcgtcattgagcctcagggtcttttcttgcccactttcttgaacgccggcaaactcacgtttgttgttcacggaaggggtctaatgggaagagttattccgggatgcgccgagacgttcatggagtcaccggtatttggagaaagtcaaggtcagggtcagagtcaagggttccgtgacatgcacc

SEQ ID NO: 144758 - DNA, 413 bp, Arabidopsis thaliana
ggttcacagcaacaacaagaacagaaaaacttgtggagcgggttcgacgcacaggtcataggggaagcattgaaaattgacgttcagttggctcagcagcttcagaaccaacaagacagcagaggaaacatcgttcgtgttaagggacctttccaggtcgtgaggccacctctaagacagccctacgagagcgaggagtggagacacccacgtagcccacagggcaacggccttgaggagactatctgcagcatgaggtcccacgagaacattgacgaccctgctcgtgctgacgtgtacaagcccagcctaggtcgcgtgaccagcgtcaacagctataccttgcccatcttggagtatgtcaggctcagtgccactcgtggcgttctccagggtaatgcgatggtgcttcc

SEQ ID NO: 144759 - DNA, 416 bp, Arabidopsis thaliana
cggacgcgtgggcaacaatgactcgctagtattcgttgggtttactacttcagctaagaataacaagccgcagttcttagccggggaggactcggctttgcggatgcttgaccggcaagtattggctgcgtcgcttaatgtgagtagtgtgacgattgatggattgttgggagctcagaaggaagctgttatcttggaatgtcattcttgtgcggaaggagagatagagaagcttaaggtggagatagagaggaagaaaacagatgatgagaggaagaggagacatgatgaaaggaagaaagaagaagaagaggcgaaaagagaagaggaagagaggaggaaacgtgaagaagaagaagagaagaagcggtggccacctcaacaaccaccacaagaagaagaacttagggaacggc

SEQ ID NO: 144760 - DNA, 414 bp, Arabidopsis thaliana
ttaaaatggtttggaccccgaggttatggctaaggctttgaagatggatcttaagacagggcgggagcttcagaaccaagatgacaaccgtggaaacattgtccgagtccaaggcccgttcggtgtcattaggccgcctttgaggggccagagacctcaggaggaggaagaagaagaagaaggacgacacggacgacacggtaatggcttagaggagaccatctgcagcgccaggtgcaccgataacctcgatgatccgtctcgtgctgacgtgtacaagccacagctcggttacatcagcactctcaacagttacgatctccccatccttcgctttatccgtctctcagccctccgtggatctatccgtcaaaacgccatggtgcttccacagtggaacgcaaacgcgaacgc

SEQ ID NO: 144761 - DNA, 414 bp, Arabidopsis thaliana
  unsure (1)..(414): unsure at all n locations
ctttctttcttcctcactataagcgccgntatgttgttcgtttatggtttattcctcaatgacatatgcatagcgattccaaacgtggtgggattcgtactagggctgttgcaaatggttttgtacttggtttacaggaactcaaatgagaaaccagagaagattaattcgtcagaacaacaacttaagagtattgtcgtgatgagtccgttaggtgtgtcggaagtgcacccagttgtgacggaatcggtggacccgctctctgaagccgttcatcatgaggatctgtccaaagttactaaagtggaggagccgtcaattgaaaacggcaagtgctacgtggaggctactcgtcctgaaaccgtttgaagtgtcaatatgtgaagctcaaaatatagctctctctctctctct

SEQ ID NO: 144762 - DNA, 516 bp, Arabidopsis thaliana
  unsure (1)..(516): unsure at all n locations
acgccacgcgtcgcgggcttcctccnnttcttctttccttcggatcccacccgttctcctctctccttttcgcagacctcaatcactgccaaccgcgcgaccgcgtcgatcctcnnccgtcgtcttcttgtcccaaaggaagtnntgtcaaggggacgaagcaannntccatccaatatataccccagcctcgtttgattaacctcaaagctagtgaagggattggggaagttgtatgggaagaatatgatacctnnaggtagaaatctttcgaagaaccatgtgttgctcagaatgggtattatccgaggcaagggatgtttgtgttttgttcaccttgtacacatggcccaagaggcatgtgttctacctggcttttatcatagactccttacccaagtctgacttcttgtcgttagtaccctaaccgagaccattgtccatgnccctcagcaaaaggtgtcttctgctcgtgctgttatgagcgagctcttcggcaaggatactggatgctgc

SEQ ID NO: 144763 - DNA, 377 bp, Arabidopsis thaliana
aacaaaaaaaacctaaagctctcttttctctccagatttcgattcccgaggctcgagagaaaaccgtaaatctcttctccgttcactcaatcaaccaaagatgcgtgagattcttcacatccagggtggtcaatgcggtaaccagatcggagccaagttctgggaagtggtttgcgccgagcacggcatcgatccaaccggaaggtacaccggagactcagatctgcaacttgagcgcatcaacgtttactatcaatgaagcgagttgcggcagattcgttcctcgtgcagtgctcatggatttggagcctgggactatggatagtcttagatctggtccgtactgtcagacctttctacctgttaacttcgtcttt

SEQ ID NO: 144764 - DNA, 411 bp, Arabidopsis thaliana
ttccatttggccggaaacaaccagcagggaggctttggcggttcacagcaacaacaagaacagaaaaacttgtggagcgggttcgacgcacaggtcatagctcaagcattgaaaattgacgttcagttggctcagcagcttcagaaccaacaagacagcagaggaaacatcgttcgtgttaagggacctttccaggtcgtgaggccacctctaagacagccctacgagagcgaggagtggagacacccacgtagcccacagggcaacggccttgaggagactatctgcagcatgaggtcccacgagaacattgacgaccctgctcgtgctgacgtgtacaagcccagcctaggtcgcgtgaccagcgtcaacagctataccttgcccatcttggagtatgtcaggctcagt

SEQ ID NO: 144765 - DNA, 419 bp, Arabidopsis thaliana
aaatggttaagctcagcaatctcctcgttgcaaccttcggggttctcctcgtccttaacggctgccttgcgaggcagtcacttggggttcctcctcagctacagaacgagtgtaacctcgacaacctagatgttctccaagccaccgaaactatcaagagtgaagccggtcagatcgagtactgggaccacaaccaccctcagctccgatgtgttggtgtttccgttgctcgttatgtaattgaacaaggcggtctttacttgcccaccttcttcacttccccaaaaatttcctacgtcgttcaaggaacgggtatcagcggaagagtggtccctggatgtgccgagaccttcatggactcgcagccgatgcaaggacaacaacaaggccaaccatggcaaggacgacagggacaacaa

SEQ ID NO: 144766 - DNA, 304 bp, Arabidopsis thaliana
ctatgatggatagagtctgttccgtattttatctctaatcaacactttagatccttgtacgcggctgcgcgacatcaacagggtcatgcgagggtcagcagcctccgaacgagtgccagctcaaccagctgaatgcgctagagccttcacgacggactgaagagcgagggtggtcgcatatgaggtgaggcaccacctagcgtgttaacgccgtcactgaagcgtctcatatgcacgctacatgaaagagcatacggggctatactagggctacatattcaacaccatgaagctctccttggtg

SEQ ID NO: 144767 - DNA, 395 bp, Arabidopsis thaliana
caaaaagaaaaaggttaagctcagcaatctcctcgttgcaaccttcggggttctcctcgtccttaacggctgccttgcgaggcagtcacttggggttcctcctcagctacagaacgagtgtaacctcgacaacctagatgttctccaagccaccgaaactatcaagagtgaagccggtcagatcgagttctgggaccacaatccaccctcagctccgatgtgttggtgtttccgttgctcgttatgtaattgaacaaggggggtctttacttgcccaccttctttacttccccaaaaatttcctacgtcgttcaaggaacgggtatcagcggaagagtggtccctggatgtgccgagaccttcatggactcgcagccgatgcaaggacaacaaca

SEQ ID NO: 144768 - DNA, 421 bp, Arabidopsis thaliana
acgagaaaatggttaagctcagcaatctcctcgttgcaaccttcggggttctcctcgtccttaacggctgccttgcgaggcagtcacttggggttcctcctcagctacagaacgagtgtaacctcgacaacctagatgttctccaagccaccgaaactatcaagagtgaagccggtcagatcgagtactgggaccacaaccaccctcagctccgatgtgttggtgtttccgttgctcgttatgtaattgaacaaggcggtctttacttgcccaccttgttcacttccccaaaaatctactacgtcggtcaaggaacgggcatcagcggaagagtggtccctggatgtgccgagacctttatggactcgcagccgatgcatggacaacaacatggccatccatggctaggacgacagggtca

SEQ ID NO: 144769 - DNA, 242 bp, Arabidopsis thaliana
cacaaggtcaagtatggctacaaggccgtgagctacagccacagaagaacattttcaatggatttggacccgaggttattgctcaagctttgaagatcgatcttcagacagcgcagcaacttcagaaccaagatgacaaccgtggaaacattgtccgagtccaaggcccgttcggtgtcattaggccgcctttgaggggccagtgacctcaagaggaggaagatgatgaagaaggacgtctt

SEQ ID NO: 144770 - DNA, 428 bp, Arabidopsis thaliana
taaagaggaagaaaaatgggtcgagtctcatctattatctctttctctttgacactcttgatcctcttcaatggctacactgcccaacagtggcccaacgagtgccagctcgatcaactcaatgcgctcgaaccatcccaaatcatcaagagcgagggtggtcgcatcgaggtctgggaccaccatgcaccccagctccgttgctccggctttgcctttgagcgtttcgtcattgagcctcagggtcttttcttgcccactttcttgaacgccggcaaactcacgtttgttgttcacggaaggggtctaatgggaagagttattccgggatgcgccgagacgttcatggagtcaccggtatttggagaaggtcaaggtcagggtcagagtcaagggttccgtgacatgcaccagaaagtagagcacct

SEQ ID NO: 144771 - DNA, 374 bp, Arabidopsis thaliana
aaaatgggtcgagtctcatctattatctctttctctttgacactcttgatcctcttcaatggctacactgcccaacagtggcccaacgagtgccagctcgatcaactcaatgcgctcgaaccatcccaaatcatcaagagcgagggtggtcgcatcgaggtctgggaccaccatgcaccccagctccgttgctccggctttgcctttgagcgtttcgtcattgagcctcagggtcttttcttgcccactttcttgaacgccggcaaactcacgtttgttgttcacggaaggggtctaatgggaagagttattccgggatgcgccgagacgttcatggagtcaccggtatttggagaaggtcaaggtcagggtca

SEQ ID NO: 144772 - DNA, 420 bp, Arabidopsis thaliana
acaaatacaaatagcaaaaaaaatggcaaacaagctcttcctcgtctgcgcaactttcgccctctgcttcctcctcaccaacgcttccatctaccgcactgttgtcgagttcgacgaagatgacgccagcaaccccgtaggtccaagacagagatgccagaaggagtttcagcaatcacaacacctaagagcttgccagagatggatgagcaagcaaatgaggcaaggacgtggtggtggtccttccctcgacgatgagttcgatttcgagggcccccagcagggataccagctactccagcagtgctgcaacgagcttcgccaggaagagccagtttgcgtttgccccaccttgaaacaagctgccagggcagttagcctccagggacagcacggaccattccaatccaggaaaattta

SEQ ID NO: 144773 - DNA, 424 bp, Arabidopsis thaliana
gggaggctttggcggttcacagcaacaacaagaacagaaaaacttgtggagcgggttcgacgcacaggtcatagctcaagcattgaaaattgacgttcagttggctcagcagcttcagaaccaacaagacagcagaggaaacatcgttcgtgttaagggacctttccaggtcgtgaggccacctctaagacagccctacgagagcgaggagtggagacacccacgtagcccacagggcaacggccttgaggagactatctgcagcatgaggtcccacgagaacattgacgaccctgctcgtgctgacgtgtacaagcccagcctaggtcgcgtgaccagcgtcaacagctataccttgcccatcttggagtatgtcaggctcagtgccactcgtggcgttcttcagggtaatgcgatggtgctt

SEQ ID NO: 144774 - DNA, 432 bp, Arabidopsis thaliana
caagaaaacatacacaaatagcaaaacatggctaacaagctcttcctcgtctgcgcaactctcgccctctgcttcctcctcaccaacgcttccatctaccgcaccgttgtcgaattcgaagaagatgacgccagcaaccccgtaggtccaagacagagatgccagaaggagtttcagcaatcacaacacctaagagcttgccagagatggatgagcaagcaaatgaggcaaggacgtggtggtggtccttccctcgacgatgagttcgatttcgagggcccccagcagggataccagctactccagcagtgctgcaacgagcttcgccaggaagagccagtttgcgtttgccccaccttgaaacaagctgccagggcagttagcctccagggacagcacggaccattccaatccaggaaaatttaccagtca

SEQ ID NO: 144775 - DNA, 423 bp, Arabidopsis thaliana
ctaaactgagaaaaaacagcaaagaaaatcagagagatcaaaaaaaagaagaaaaaaaagaacagagattcttttgaactaacgaagacatatagatactgtaggaagcttttcgagacgtagtttcgacgtgagagtatctaatgggacgactcatcagaggagtaaatctcacggtgttgaggcacatattgaagatcttattgtaatcaagaacactcgttgggctaatttaccggctgcgctattacgagatgtgatgaaaaagttggatgaaagcgagagtacttggcctgcacgtaaacaagtcgttgcttgtgctggtgtctgcaagacatggagactaatgtgcaaagatattgtgaaaagtcctgagttctcaggcaaactcacatttccagtttcgttgaaacagcccgggcc

SEQ ID NO: 144776 - DNA, 410 bp, Arabidopsis thaliana
  unsure (1)..(410): unsure at all n locations
gaaaaatctgtaattgatttacctaattgtaaacctgatattgcaccttaagacacgcattgaaacagacagataaatattaagcgtactagaaaaggtaatttactcttttttttagcaatacatacaaattgacgtttcaaccaatagtttctcaaagttcataatcataaatcatttgtcaaaccaagtaaaaataaatcagagaaaaaaaacggtatttgttagtcatacgaaaaatggaaccttccatatgataatttctttttcgttctcatagaaattttctatgtaaagcagagagaaagacgaggaaaattgggtaacataaaaactctttgatgacaaagacagtattttaattcggatnttacctaataaatccatagcgaagaacggtagctcattgt

SEQ ID NO: 144777 - DNA, 422 bp, Arabidopsis thaliana
aagaggaagaaaaatgggtcgagtctcatctattatctctttctctttgacactcttgatcctcttcaatggctacactgcccaacagtggcccaacgagtgccagctcgatcaactcaatgcgctcgaaccatcccaaatcatcaagagcgagggtggtcgcatcgaggtctgggaccaccatgcaccccagctccgttgctccggctttgcctttgagcgtttcgtcattgagcctcaaggtcttttcttgcccactttcttgaacgccggcaaactcacgtttgttgttcacggaaggggtctaatgggaagagttattccgggatgcgccgagacgttcatggagtcaccggtatttggagaaggtcaaggtcagggtcagagtcaagggttccgtgacatgcaccagaaagtagagc

SEQ ID NO: 144778 - DNA, 339 bp, Arabidopsis thaliana
gcacatgtaaggcacggacctttcgcgtattaggcacctgaaccgggaagcggcacaccacatgaaatagctaaggttagaggagacttggcaccatgcgatgcactgaaacctcgatgacccgtcgatgctgacgtgtcaagccatactcgatcatagcacacttaacagtcaatcttctatctagactttcgcttagcgctttgtggctcatcgaaaaacgcttggtgctaccgatggacgtaacgcaaacgcggactctacgtgcaaacggaaggctatatacaaatgggaacgacacgaaaagaggtcgacaagagactcagcggcagtactagt

SEQ ID NO: 144779 - DNA, 430 bp, Arabidopsis thaliana
tggactccatctgtatgacggcttgttcaaggttattccatttgatagtaagggacagctcaaggaagcttttaatatcaggcttgaggaattgcaggttctggatatcaagtttctgtttggatgtgcaaagcccactattgcagtactatatcaggacaacaaagatgctcgtcatgtcaaaacatatgaagtctcgcttaaagataaggattttgtcgagggtccatggtctcagaacagtctcgacaatggtgctgacttgctgattcctgtaccaccaccgctctgtggtgtccttattattggtgaagaaacaattgtctattgcagtgctagtgcattcaaagcaataccaataagaccttccatcactaaagcatatggaagagttgatgttgatggctctagatatcttcttggtgaccat

SEQ ID NO: 144780 - DNA, 423 bp, Arabidopsis thaliana
cttccacagtggaacgcaaacgcgaacgctattctttacgtgacagacggggaagcccaaatccagatcgtaaacgacaatggtaacagagtgtttgacggacaagtctctcaaggacagctcatagccgtaccacaaggtttctcggtggtgaaacgcgcaacaagcaaccgattccagtgggttgagttcaaaacaaacgctaacgcgcaaatcaacactctggcgggacgaacctcagtcttgagaggtttaccacttgaagtcataaccaatgggttccaaatctcacccgaagaagcaaggagggtcaagttcaacacgctcgagaccactttgactcacagcagtggcccagctagctacggaaggccaagagtggctgcagcttaagagcttaaaaccgcggcttaacaatgaacc

SEQ ID NO: 144781 - DNA, 430 bp, Arabidopsis thaliana
  unsure (1)..(430): unsure at all n locations
cacacatagcaaaaaatggcaaacaagttgttcctcgtctgcgcagctctcgctctctgcttcctcctcaccaacgcttccatctaccgcaccgtcgttgagttcgaagaagatgacgccactaaccccataggcccaaaaatgaggaaatgccgcaaggagtttcagaaagaacaacacctaagagcttgccagcaattgatgctccagcaagcaaggcnnggccgtagcgatgagtttgattnnnaagacgacatggaggaacccacagggacaacagcaggaacaacagctattccagcagtgctgcaacgagcttcgccaggaagagccagattgtgtttgccccaccttgaaacaagctgccaaggccgttagactccagggacagcaccaaccaatgcaagtcaggnaaatttaccagacagcc

SEQ ID NO: 144782 - DNA, 426 bp, Arabidopsis thaliana
ctcaagctttgaagatcgatcttcagacagcgcagcaacttcagaaccaagatgacaaccgtggaaacattgtccgagtccaaggcccgttcggtgtcattaggccgcctttgaggggccagagacctcaggaggaggaagaagaagaagaaggacgacatggacgacacggtaatggcttagaggagaccatctgcagcgccaggtgcaccgataacctcgatgacccgtctcgtgctgacgtgtacaagccacagctcggttacatcagcactctcaacagttacgatcttcccatccttcgcttcatccgtctctcagccctccgtggatctatccgtcaaaacgcaatggtgcttccacagtggaacgcatacgcgaacgctattctttacgtgacagacggggaagcccaaatccagatcg

SEQ ID NO: 144783 - DNA, 366 bp, Arabidopsis thaliana
aacaaacaaaaagaaaatggttaagctcagcaatctcctcgttgcaaccttcggggttctcctcgtccttaacggctgccttgcgaggcagtcacttggggttcctcctcagctacagaacgagtgtaacctcgacaacctagatgttctccaagccaccgaaactatcaagagtgaagccggtcagatcgagtactgggaccacaaccaccctcagctccgatgtgttggtgtttccgttgctcgttatgtaattgaacaaggcggtctttactagcccaccttcttcacttccccaaaaatttcctacgtcgttcaaggaacgggtttcagcggaagagtgttccctggatgtgccgagacctt

SEQ ID NO: 144784 - DNA, 356 bp, Arabidopsis thaliana
gaaatataagaaataacaaaatggctcgagtctcttctcttctttctttcttcttaacacttttgatccttttccatggctacgcggctcaacagggtcagcagggtcagcagtttccgaacgagtgccagctcgaccagctcaatgcgctcgagccgtcacacgtactgaagagcgaggctggtcgcatcgaggtgtgggaccaccacgctcctcagctccgttgctcaagtgtctcctttgcacgttacatcatcgagtctaaaggtctctacttgccctctttctttaacaccgcgaagctctctttcgtggctaagggacgaggtcttatgggaaaagtgatccctggatgc

SEQ ID NO: 144785 - DNA, 410 bp, Arabidopsis thaliana
cgcaaacgagttctcttctaatacctgctgcaggattagccaacacaggttttgatgcttcagaagttagacaagccgagacagggcttggtgctacagaagttggatgaaccgagacagggcttggtgctacagaagttggatgagccgagacagggctggatgctgtagaagtaggacgagtcgggacaagtgtttgtacttcagaaattggacgagctgggacaggtcttggtatttcaggggttggacgagctgtgacaggtcttggtgtttcaggggttggacgagctgggacaggtcttggtatttcaggaattggacaagccgggacaggtcttggtgcttcaggagttcgactcggcgggacacgttttggtacttgagaagttgcacgagcaggcttaact

SEQ ID NO: 144786 - DNA, 425 bp, Arabidopsis thaliana
atttctcacattttcgtagccgcaagactcctttcagattcttacttgcagctatgggtaaagagaagtttcacattaacattgtggtcattggtcatgttgattctggaaaatcgaccacaactggtcacttgatctataagcttggtggtattgacaagcgtgtcatcgagaggttcgagaaggaggctgctgagatgaacaagaggtccttcaagtacgcatgggtgttggacaaacttaaggccgagcgtgagcgtggtattaccatcgatatttgctctatggaagttcgagaccaccaagtactactgcacagtcattgatgccccaggacatcgtgatttcatcaaaaacatgattactggtacgctgccagctgattgggctgtgcctatgattgccttcaccactggaggttttga

SEQ ID NO: 144787 - DNA, 411 bp, Arabidopsis thaliana
aagaaaaatgggtcgagtctcatctattatctctttctctttgacactcttgatcctcttcaatggctacactgcccaacagtggcccaacgagtgccagctcgatcaactcaatgcgctcgaaccatcccaaatcatcaagagcgagggtggtcgcatcgaggtctgggaccaccatgcaccccagctccgttgctccggctttgcctttgagcgtttcgtcattgagcctcagggtcttttcttgcccactttcttgaacgccggcaaactcacgtttgttgttcacggaaggggtctaatgggaagagttattccgggatgcgccgagacgttcatggagtcaccggtatttggagaaggtcaaggtcagggtcatgagtcaagggttccgtgacatgcaccagaaag

SEQ ID NO: 144788 - DNA, 427 bp, Arabidopsis thaliana; identical to SEQ ID NO: 130181

SEQ ID NO: 144789 - DNA, 410 bp, Arabidopsis thaliana
ctcgattaagcttgaacttggaggatcaatggccgacgttcgcacacactcgcaccagcttcaagtgcaccctcaacgccagcatgaaggaggcatcaaagtcctttatcctcagagtggcccttcttccactcaggtgctagccgagtttgtcggtgtaccgataggaggaacgctgctgactatagccggtttgacattagccggttcggttataggactaatgctagcattcccgctgtttctcatctttagtccggttattgtaccagcagcctttgtcatcggtctagctatgactggattcctggcttcaggggccataggtctcaccggactatcatccatgtcgcgggtactcaactacatccgtcgggccgggcagcatatcccggatgagcttgaggtag

SEQ ID NO: 144790 - DNA, 416 bp, Arabidopsis thaliana
  unsure (1)..(416): unsure at all n locations
caccagcttcgcatcttcttctccggcttgatcttctctcgtttctagatctccgacgatcggaatatcaaatccgatcgattaattctgtcaatcacacaaaaaccgaaaaccaaaaaaaaaccatggcgtttgagaagatcaaggtggcaaatcccatcgtcgagatggatggtgatgaaatgaccagggttatttggaagtctatcaaggataagcttattactccttttgtggagttggatatcaagtacttcgaccttggtcttcctcaccgtgatgctacggatgacaaagttactattgaaagtgctgaagctactaagaagtacaatgtggcgatcaagtgtgccaccatcactccagatgaaggccgtgtcacggaanttggcttgaagcagatgtggagaagtcca

SEQ ID NO: 144791 - DNA, 420 bp, Arabidopsis thaliana
gtcgcatctttttacgattctttatgaaagatattcagtccatcagaatagaagttaaagagggtgtttctgcccggcgtgtcctttatatggaaattcgaggtcaaggggctattcctttaattcgtactgatgagaattttactacacgagaaattgagcaaaaagctgctgaattggcttacttcttgcgtgtaccaattgaagtattttgaaatgaattaattaaatgctttggcagtaggaagaaaaaacgaaagaatttctttcttttttttttcaattgaatattcatctcttcttttatgctcgtttttttgatatatttgatagaaaagaaaaggagtttatttgtctcgaaattagtattgatcgaaaaaggggggaataacatcccggaaaccccattttttcttgatt

SEQ ID NO: 144792 - DNA, 428 bp, Arabidopsis thaliana
aaacaggaaaacatacacaaatagcaaaacatggctaacaagctcttcctcgtctgcgcaactctcgccctctgcttcctcctcaccaacgcttccatctaccgcaccgttgtcgaattcgaagaagatgacgccagcaaccccgtaggtccaagacagagatgccagaaggagtttcagcaatcacaacacctaagagcttgccagagatggatgagcaagcaaatgaggcaaggacgtggtggtggtccttccctcgacgatgagttcgatttcgagggcccccagcagggataccagctactccagcagtgctgcaacgagcttcgccaggaagagccagtttgcgtttgccccaccttgaaacaagctgccagggcagttagcctccagggacagcacggaccattccaatccaggaaaattta

SEQ ID NO: 144793 - DNA, 403 bp, Arabidopsis thaliana
aagggacctttccaggtcgtgaggccacctctaagacagccctacgagagcgaggagtggagacacccacgtagcccacagggcaacggccttgaggagactatctgcagcatgaggtcccacgagaacattgacgaccctgctcgtgctgacgtgtacaagcccagcctaggtcgcgtgaccagcgtcaacagctataccttgcccatcttggagtatgtcaggctcagtgccactcgtggcgttctccagggtaatgcgatggtgcttcctaaatacaacatgaacgctaacgagatcttgtactgcactggaggacaaggaaggatccaagtggtcaacgacaacggacagaacgtgttggaccaacaggtgcagaagggacagctcgtggtcattccac

SEQ ID NO: 144794 - DNA, 422 bp, Arabidopsis thaliana
catacacacatagcaaaaaatggcaaacaagttgttcctcgtctgcgcagctctcgctctctgcttcctcctcaccaacgcttccatctaccgcaccgtcgttgagttcgaagaagatgacgccactaaccccataggcccaaaaatgaggaaatgccgcaaggagtttcagaaagaacaacacctaagagcttgccagcaattgatgctccagcaagcaaggcaaggccgtagcgatgagtttgatttcgaagacgacatggagaacccacagggacaacagcaggaacaacagctattccagcagtgctgcaacgagcttcgccaggaagagccagattgtgtttgccccaccttgaaacaagctgccaagggccgttgactccagggacagcaccaaccaatgcaagtcaggaaaattt

SEQ ID NO: 144795 - DNA, 397 bp, Arabidopsis thaliana
gagtgctcttagcctttactctatagttttatatcatatcaatcgacatggcgaatgtggaccgtgatcggcgtgtgcatgtagaccgtactgacaaacgtgttcatcagccaaactacgaagatgatgtcggttttggtggctatggcggttatggagctggttctgattataagagtcgcggcccctccactaaccaaatcttggcacttatagcaagagttcccattggtggcacactgctaaccctagctggactcactctagccggttcggtgatcggcttgctagtctccatacccctcttactcctcttcagtccggagattagtccagcggctctcactattgggcttgctgtgacgggaatcttggcttctggtttgtttgggttgac

SEQ ID NO: 144796 - DNA, 418 bp, Arabidopsis thaliana
gcgggttcgacgcacaggtcatagctcaagcattgaaaattgacgttcagttggctcagcagcttcagaaccaacaagacagcagaggaaacatcgttcgtgttaagggacctttccaggtcgtgaggccacctctaagacagccctacgagagcgaggagtggagacacccacgtagcccacagggcaacggccttgaggagactatctgcagcatgaggtcccacgagaacattgacgaccctgctcgtgctgacgtgtacaagcccagcctaggtcgcgtgaccagcgtcaacagctataccttgcccatcttggagtatgtcaggctcagtgccactcgtggcgttctccagggtaatgcgatggtgcttcctaattcaacatgaacgctaacgagatcttgtactggactgga

SEQ ID NO: 144797 - DNA, 399 bp, Arabidopsis thaliana
gggtttttcgcctctttctcaactctcttctcgaaaacctagcagtcgtctctttctcagttctccatgggaaagtctaaatccgccaccaaagttgttgcagagattaaggccactaagcctttgaagaaaggcaagagagagcctgaagatgatattgacaccaaagtgagtcttaagaagcagaagaaagacgtgattgctgctgtccagaaagaaaaagctgtgaagaaggttcctaagaaggttgagagctctgatgattcagattctgaatctgaggaagaggagaaggctaagaaagtcccagccaagaaggctgcttcaagcagtgatgagtcatctgatgactcttcttcagatgatgaaccctgcacccaagaaggccgttgctgctac

SEQ ID NO: 144798 - DNA, 385 bp, Arabidopsis thaliana
ctcgaccgcaaccctagagtgttccatttggccggaaacaaccagcagggaggctttggcggttcacagcaacaacaagaacagaaaaacttgtggagcgggttcgacgcacaggtcatagctcaagcattgaaaattgacgttcagttggctcagcagcttcagaaccaacaagacagcagaggaaacatcgttcgtgttaagggacctttccaggtcgtgaggccacctctaagacagccctacgagagcgaggagtggagacacccacgtagcccacatggcaacggccttgaggagactatctgcagcatgaggtcccacgagaacattgacgaccctgctcgtgctgacgtgtacaagcccagcctaggtcgcgtgacca

SEQ ID NO: 144799 - DNA, 422 bp, Arabidopsis thaliana
cttttaatttgagtgctcttagcctttactctatagttttatatcatatcaatcgacatggcgaatgtggaccgtgatcggcgtgtgcatgtagaccgtactgacaaacgtgttcatcagccaaactacgaagatgatgtcggttttggtggctatggcggttatggtgctggttctgattataagagtcgcggcccctccactaaccaaatcttggcacttatagcaggagttcccattggtggcacactgctaaccctagctggactcactctagccggttcggtgatcggcttgctagtctccatacccctcttcctcctcttcagtccggtgatagtcccggcggctctcactattgggcttgctgagacgggaatcttggcttctggtttgtttgggttgacgggtctgagctcggt

SEQ ID NO: 144800 - DNA, 419 bp, Arabidopsis thaliana
agaaggtggaacatgtgagacgcggagacgtctttgccaacactccaggctctgcccactggatctacaactcaggagaacagccacttgtcatcatcgctcttctcgacatcgccaactaccaaaaccaactcgaccgcaaccctagagtgttccatttggccggaaacaaccagcagggaggctttggcggttcacagcaacaacaagaacagaaaaacttgtggagcgggttcgacgcacaggtcatagctcaagcattgaaaattgacgttcagttggctcagcagcttcagaaccaacaagacagcagaggaaacatcgttcgtgttaagggacctttccaggtcgtgaggccacctctaagacagccctacgagagcgaggagtggagacacccacgtagcccacagggcaac

SEQ ID NO: 144801 - DNA, 424 bp, Arabidopsis thaliana
cacatagcaaaaaatggcaaacaagttgttcctcgtctgcgcagctctcgctctctgcttcctcctcaccaacgcttccatctaccgcaccgtcgttgagttcgaagaagatgacgccactaaccccataggcccaaaaatgaggaaatgccgcaaggagtttcagaaagaacaacacctaagagcttgccagcaattgatgctccagcaagcaaggcaaggccgtagcgatgagtttgatttcgaagacgacatggagaacccacagggacaacagcaggaacaacagctattccagcagtgctgcaacgagcttcgccaggaagagccagattgtgtttgccccaccttgaaacaagctgccaaggccgttagactccagggacagcaccaaccaatgcaagtcaggaaaatttaccagaca

SEQ ID NO: 144802 - DNA, 429 bp, Arabidopsis thaliana
caacgacggacaggaaccacttgtcatcgtcagcgtcttcgatctagccagtcaccagaaccagcttgaccgcaacccaaggccattttacttagccggaaacaacccacaaggtcaagtatggctacaaggccgagagcaacagccacagaagaacattttcaatggatttggacccgaggttattgctcaagctttggaagatcgatcttcagacagcgcagcaacttcagaaccaagatgacaaccgtggaaacattgtccgagtccaaggcccgttcggtgtcattaggccgcctttgaggggccagagacctcaggaggaggaagaagaagaagaaggacgacatggacgacacggtaatggcttagaggagaccatctgcagcgccaggtgcaccgataacctcgatgacccgtctcgtgctg

SEQ ID NO: 144803 - DNA, 379 bp, Arabidopsis thaliana
gaaaacatacacaaatagcaaaacatggctaacaagctcttcctcgtctgcgcaactctcgccctctgcttcctcctcaccaacgcttccatctaccgcaccgttgtcgaattcgaagaagatgacgccagcaaccccgtaggtccaagacagagatgccagaaggagtttcagcaatcacaacacctaagagcttgccagagatggatgagcaagcaaatgaggcaaggacgtggtggtggtccttccctcgacgatgagttcgatttcgagggcccccagcagggataccagctactccagcagtgctgcaacgagcttcgccaggaagagccagtttgcgtttgccccaccttgaaacaagctgccagggcagtta

SEQ ID NO: 144804 - DNA, 402 bp, Arabidopsis thaliana
agaaatgttatatcgttatttccgtcccagcaaatcattttttttccacaagggattgtgatgtctttctatgggatcgcaggtctctttattagttgctatttgtggtgcactattttgtggaatgtgggtagtggttatgatcttttcgaccgaaaagaaggaatagtgcgtatttttcgttggggatttcctggaaaaagtcgtcgcatctttttacgattctttatgaaagatattcagtccatcagaatagaagttaaagagggtgtttctgcccggcgtgtcctttatatggaaattcgaggtcaaggggctattcctttaattcgtactgatgagaattttactacacgagaaattgagcatatagctgctgaattggcttacttcttgcgtgtt

SEQ ID NO: 144805 - DNA, 361 bp, Arabidopsis thaliana
gtggagcacattaggagcggtgataccattgccacaacacccggtgtagcccagtggttctacaacgacggacagcaaccacttgtcatcgtcagcatcttcgatctagccagtcaccagaaccagcttgaccgcaacccaaggccattttacttagccggaaacaacccacaaggtcaagtatggctacaaggacgagagcaacagccacagaagaacatcttcaatggatttggacccgaggttattgctcaagctttgaagattgatctttagacagcgcagcatcttcagaaccaagatgacaaccgtggaaacattgtccgagtccaaggcccgttcggtgtcattaggccgtctt

SEQ ID NO: 144806 - DNA, 427 bp, Arabidopsis thaliana
aagaaaaatgggtcgagtctcatctattatctctttctctttgacactcttgatcctcttcaatggctacactgcccaacagtggcccaacgagtgccagctcgatcaactcaatgcgctcgaaccatcccaaatcatcaagagcgagggtggtcgcatcgaggtctgggaccaccatgcaccccagctccgttgctccggctttgcctttgagcgtttcgtcattgagcctcacggtcttttcttgcccactttcttgaacgccggcaaactcacgtttgttgttcacggaaggggtctaatgggaagagttattccgggatgcgccgagacgttcatggagtcaccggtatttggagaaggtcaaggtcagggtcagagtcaagggttccgcgacatgcaccagaaagtagagcacctacggtgc

SEQ ID NO: 144807 - DNA, 414 bp, Arabidopsis thaliana
aaagaaaatggttaagctcagcaatctcctcgttgcaaccttcggggttctcctcgtccttaacggctgccttgcgaggcagtcacttggggttcctcctcagctacagaacgagtgtaacctcgacaacctagatgttctccaagccaccgaaactatcaagagtgaagccggtcagatcgagtactgggaccacaaccaccctcagctccgatgtgttggtgtttccgttgctcgttatgtcatcgaacaaggcggtctttactcgaccaccttcttcactttcccaaaaatttcctacgtcgttcaaggaacgggtatcagcgcgagactggtccctggataccccgagtccttcatggactcgcatcctgtgcaagggcaacttcctggtcaaccattgcaaggacgtca

SEQ ID NO: 144808 - DNA, 350 bp, Arabidopsis thaliana
aacaaaaagaaaatggttaagctcagcaatctcctcgttgcaaccttcggggttctcctcgtccttaacggctgccttgcgaggcagtcacttggggttcctcctcagctacagaacgagtgtaacctcgacaacctagatgttctccaagccaccgaaactatcaagagtgaagccggtcagatcgagtactgggaccacaaccaccctcagctccgatgtgttggtgtttccgttgctcgttatgtaattgaacaaggcggtctttacttgcccaccttcttcactttcccaaaaatttcctacgtcgttcaaggaacgggtttcatcggtagagtggtccctggatg

SEQ ID NO: 144809 - DNA, 422 bp, Arabidopsis thaliana
cacacatagcaaaaaatggcaaacaagttgttcctcgtctgcgcagctctcgctctctgcttcctcctcaccaacgcttccatctaccgcaccgtcgttgagttcgaagaagatgacgccactaaccccataggcccaaaaatgaggaaatgccgcaaggagtttcagaaagaacaacacctaagagcttgccagcaattgatgctccagcaagcaaggcaaggccgtagcgatgagtttgatttcgaagacgacatggagaacccacagggacaacagcaggaacaacagctattccagcagtgctgcaacgagcttcgccaggaagagccagattgtgtttgccccaccttgaaacaagctgccaaggccgttagactccagggacagcaccaaccaatgcaaggcaggaaaatttacca

SEQ ID NO: 144810 - DNA, 429 bp, Arabidopsis thaliana
agaaaacatacacaaatagcaaaacatggctaacaagctcttcctcgtctgcgcaactctcgccctctgcttcctcctcaccaacgcttccatctaccgcaccgttgtcgaattcgaagaagatgacgccagcaaccccgtaggtccaagacagagatgccagaaggagtttcagcaatcacaacacctaagagcttgccagagatggatgagcaagcaaatgaggcaaggacgtggtggtggtccttccctcgacgatgagttcgatttcgagggcccccagcagggataccagctactccagcagtgctgcaacgagcttcgccaggaagagccagtttgcgtttgccccaccttgaaacaagctgccagggcagttagcctccagggacagcacggaccattccaatccaggaaaatttaccagtc

SEQ ID NO: 144811 - DNA, 420 bp, Arabidopsis thaliana
aaaaagaaaatggttaagctcagcaatctcctcgttgcaaccttcggggttctcctcgtccttaacggctgccttgcgaggcagtcacttggggttcctcctcagctacagaacgagtgtaacctcgacaacctagatgttctccaagccaccgaaactatcaagagtgaagccggtcagatcgagtactgggaccacaaccaccctcagctccgatgtgttggtgtttccgttgctcgttatgtaattgaacaaggcggtctttacttgcccaccttcttcacttccccaaaaatttcctacgtcgttcaaggaacgggtatcagcggaagagtggtccctggatgtgccgagaccttcatggactcgcagccgatgcaaggacaacaacaaggccaaccatggcaaggacgacaggga

SEQ ID NO: 144812 - DNA, 229 bp, Arabidopsis thaliana
tcctcttcaatggctacactgacgaacagtatgccaacgaggagccaggtagctcaactcaacgcgctcgatccatgcccaaccatgacgagcgagggtgcgcagacctaggtctatgaccagcatgcacacgagctacaatgatcacagggtgaccttgagcatcgattcaatggtcctgacgcgctcttgctacccactttcttgaacatcggcaaactgacgttca

SEQ ID NO: 144813 - DNA, 428 bp, Arabidopsis thaliana
cacacatagcaaaaaatggcaaacaagttgttcctcgtctgcgcagctctcgctctctgcttcctcctcaccaacgcttccatctaccgcaccgtcgttgagttcgaagaagatgacgccactaaccccataggcccaaaaatgaggaaatgccgcaaggaggtttcagaaagaacaacacctaagagcttgccagcaattgatgctccagcaagcaaggcaaggccgtagcgatgagtttgatttcgaagacgacatggagaacccacagggacaacagcaggaacaacagctattccagcagtgctgcaacgagcttcgccaggaagagccagattgtgtttgccccaccttgaaacaagctgccaaggccgttagactccagggacagcaccaaccaatgcaagtcaggaaaatttaccagacag

SEQ ID NO: 144814 - DNA, 429 bp, Arabidopsis thaliana
caagatcagaaaaacttgtggagcgggttcgactcacaggtcatagctcaagcattgaaaattgacgttcagttggctcagcagcttcagaaccaacaagacagcagaggaaacatcgttcgtgttaagggacctttccaggtcgtgaggccacctctaagacagccctacgagagcgaggagtggagacacccacgtagcccacagggcaacggccttgaggagactatctgcagcatgaggtcccacgagaacattgacgaccctgctcgtgctgacgtgtacaagcccagcctaggtcgcgtgaccagcgtcaacagctataccttgcccatcttggagtatgtcaggctcagtgccactcgtggcgttctccagggtaatgcgatggtgcttcctaaatacaacatgaacgctaacgagatcttg

SEQ ID NO: 144815 - DNA, 420 bp, Arabidopsis thaliana
agaaaaatgggtcgagtctcatctattatctctttctctttgacactcttgatcctcttcaatggctacactgcccaacagtggcccaacgagtgccagctcgatcaactcaatgcgctcgaaccatcccaaatcatcaagagcgagggtggtcgcatcgaggtctgggaccaccatgcaccccagctccgttgctccggctttgcctttgagcgtttcgtcattgagcctcaaggtcttttcttgcccactttcttgaacgccggcaaactcacgtttgttgttcacggaaggggtctaatgggaagagttattccgggatgcgccgagacgttcatggagtcaccggtatttggagaaggtcaaggtcagggtcagagtcaagggttccgtgacatgcaccagaaagtagagcaccta

SEQ ID NO: 144816 - DNA, 409 bp, Arabidopsis thaliana
ggacaacaaggaagacaaggccaaccatgggaaggacagggacaacagggacaacaaggacgacagggacaacatggccaaccatgggaaggacagggacagcagggacaacaagggttccgtgacatgcaccagaaggtggaacatgtgagacgcggagacgtctttgccaacactccaggctctgcccactggatctacaactcaagagaacagccacttgtcatcatcgctcttctcgacatcgccaactaccaaaaccaactcgaccgcaaccctagagtgttccatttggccggaaacaaccagcagggaggctttggcggttcacagcaacaacaagaacagaaaaacttgtggagcgggttcgacgcacaggtcatagctcaagcattgaaaattgacgttc

SEQ ID NO: 144817 - DNA, 427 bp, Arabidopsis thaliana
caaggtcaaagccagaggttccgtgacatgcaccagaaagtggagcacattaggagcggtgataccattgccacaacacccggtgtagcccagtggttctacaacgacggacagcaaccacttgtcatcgtcagcatcttcgatctagccagtcaccagaaccagcttgaccgcaacccaaggccattttacttagccggaaacaacccacaaggtcaagtatggctacaaggacgagagcaacagccacagaagaacatcttcaatggatttggacccgaggttattgctcaagctttgaagattgatcttcagacagcgcagcaacttcagaaccaagatgacaaccgtggaaacattgtccgagtccaaggcccgttcggtgtcattaggccgcctttgaggggccagagaccttaagaggagg

SEQ ID NO: 144818 - DNA, 419 bp, Arabidopsis thaliana
cagaggaaacatcgttcgtgttaagggacctttccaggtcgtgaggccacctctaagacagccctacgagagcgaggagtggagacacccacgtagcccacagggcaacggccttgaggagactatctgcagcatgaggtcccacgagaacattgacgaccctgctcgtgctgacgtgtacaagcccagcctaggtcgcgtgaccagcgtcaacagctataccttgcccatcttggagtatgtcaggctcagtgccactcgtggcgttctccagggtaatgcgatggtgcttcctaaatacaacatgaacgctaacgagatcttgtactgcactggaggacaaggaaggatccaagtggtcaacgacaacggacagaacgtgttggaccaacaggtgcagaaaggacagctcgtggtca

SEQ ID NO: 144819 - DNA, 429 bp, Arabidopsis thaliana
aacaaaaagaaaatggttaagctcagcaatctcctcgttgcaaccttcggggttctcctcgtccttaacggctgccttgcgaggcagtcacttggggttcctcctcagctacagaacgagtgtaacctcgacaacctagatgttctccaagccaccgaaactatcaagagtgaagccggtcagatcgagtactgggaccacaaccaccctcagctccgatgtgttggtgtttccgttgctcgttatgtaattgaacaaggcggtctttacttgcccaccttcttcacttccccaaaaatttcctacgtcgttcaaggaacgggtatcagcggaagagtggtccctggatgtgccgagaccttcatggactcgcagccgatgcaaggacaacaacaaggccaaccatggcaaggacgacagggacaacaa

SEQ ID NO: 144820 - DNA, 427 bp, Arabidopsis thaliana
aagaggaagaaaaatgggtcgagtctcatctattatctctttctctttgacactcttgatcctcttcaatggctacactgcccaacagtggcccaacgagtgccagctcgatcaactcaatgcgctcgaaccatcccaaatcatcaagagcgagggtggtcgcatcgaggtctgggaccaccatgcaccccagctccgttgctccggctttgcctttgagcgtttcgtcattgagcctcaaggtcttttcttgcccactttcttgaacgccggcaaactcacgtttgttgttcacggaaggggtctaatgggaagagttattccgggatgcgccgagacgttcatggagtcaccggtatttggagaaggtcaaggtcagggtcagagtcaagggttccgtgacatgcaccagaaagtagagcaccta

SEQ ID NO: 144821 - DNA, 432 bp, Arabidopsis thaliana
agaaaacatacacaaatagcaaaacatggctaacaagctcttcctcgtctgcgcaactctcgccctctgcttcctcctcaccaacgcttccatctaccgcaccgttgtcgaattcgaagaagatgacgccagcaaccccgtaggtccaagacagagatgccagaaggagtttcagcaatcacaacacctaagagcttgccagagatggatgagcaagcaaatgaggcaaggacgtggtggtggtccttccctcgacgatgagttcgatttcgagggcccccagcagggataccagctactccagcagtgctgcaacgagcttcgccaggaagagccagtttgcgtttgccccaccttgaaacaagctgccagggcagttagcctccatggacagcacggaccattccaatccaagaaaatttaccagtcagc

SEQ ID NO: 144822 - DNA, 397 bp, Arabidopsis thaliana
gttataaccaatgggtaccagatctctcccgaagaagctaaacgagtaaagtttagcacgattgagaccacactgacccatagcagtccaatgagctacggaaggcctagggcttgaggcttgatgagcgcgtggtggaatagcgtttgaatctaaagttcggtttggtacgacttgtaatatgaaataataatgtacaaagaagttctacgcttaagggaactgttttgttttgagctttgtattaagacgtctagtgtacaacaacgaacgtcgtgtataagcgatcgttgactctgcacatgtaactctttcctgaataaaaaatctttaagtctttaatttctaaaaaaatataaaaaatttataattatttaaatttataaataataataat

SEQ ID NO: 144823 - DNA, 343 bp, Arabidopsis thaliana
aatttttcaaaaaacctttagaattttcatttttttacgattccgatgttaactgtttctccggctcccgtactcatcggaaacacctcaaaggatacttacatggcggcagatttcgcagattttacgacggaagacttgccggactttacgacggtcggggatttttccgatgatcttcttgatggaatcgattactacgacgatcttttcattggtttcgatggagacgatgttttgccggatttggagatagattcggagattcttggggaatattccggtagcggaagagatgaggaacaagaaatggagggtaacacttcgacggcatcggagacat

SEQ ID NO: 144824 - DNA, 351 bp, Arabidopsis thaliana
gagcatataaaaaatgtcttcgataatccatggagctggagctgctacgacgacgttatcgacgtttaattccgtcgattccaagaaactcttcgttgctccttctcgcacaaatctttcagtgaggagccagagatatatagtggctggatctgatgcgagtaagaagagctttggttctggacttagagttcgtcactctcagaaattgattccaaatgctgttgcgacgaaggaggcggttacgtctgcgagcactggacatgaactattgcttttcgaggctcttcaggaaggtctggaagaagagatggacagagatccacatgtatgtgttatgggtgaagatgt

SEQ ID NO: 144825 - DNA, 162 bp, Arabidopsis thaliana
taaagagggaggaaaatggggtcgaggcttattcattattcttttccttttggcccctttggatccttttaatgggttcccctcccaacagtggcccaacgagtgccagctcgatcaactcaatgcgctcgaaccattccaaatcatcaagagcgagggtgg

SEQ ID NO: 144826 - DNA, 418 bp, Arabidopsis thaliana
gtaatcatgcacaaagtgttggcttttcgactgatgggtttgcaacaacaactactatgaggaagttgcatctcatttgggttactgcgagaatgcatatcgagatctataagtaccctgcttggggtgatgtggttgagatagagacttggtgtcagagtgaaggaaggattgggacaaggcgtgattggattcttaaggattctgtcactggtgaagtcactggccgtgctacaagcatgtgggtgatgatgaaccaagacactagacggcttcagaaagtttctgatgatgttcgggacgagtacttggtcttctgtcctcaagaaccgaggttagcatttccggaagagaataacagaaagcttgaagaaaatcccgaaactcgaagatccggctcagtattcaatgattgggc

SEQ ID NO: 144827 - DNA, 405 bp, Arabidopsis thaliana
aaagaaaatggttaagctcagcaatctcctcgttgcaaccttcggggttctcctcgtccttaacggctgccttgcgaggcagtcacttggggttcctcctcagctacagaacgagtgtaacctcgacaacctagatgttctccaagccaccgaaactatcaagagtgaagccggtcagatcgagtactgggaccacaaccaccctcagctccgatgtgttggtgtttccgttgctcgttatgtaattgaacaaggcggtctttacttgcccaccttcttcacttccccaaaaatttcctacgtcgttcaaggaacgggtatcagcggaagagtggtccctggatgtgccgagaccttcatggactcgcaaccgatgcaaggacatcaacaaggccaaccatggca

SEQ ID NO: 144828 - DNA, 364 bp, Arabidopsis thaliana
aaacaaaaagaaaatggttaagctcagcattctcctcgttgcaaccttcggggttctcctcgtccttaacggctgccttgcgaggcagtcacttggggttcctcctcagctacagaacgagtgtaacctcgacaacctagatgttctccaagccaccgaaactatcaagagtgaagccggtcagatcgagtactgggacccacaaccaccctcagctccgatgtgttggtgtttccgttgctcgttatgtaattgaacaaggcggtctttacttgcccaccttcttcactttcccaaaaatttcctacgtcgttcaaggaacgggtttcagcggaaagagtggccctggatgtgccgagacctt

SEQ ID NO: 144829 - DNA, 360 bp, Arabidopsis thaliana
aagaaaaatgggtcgagtctcatctattatctctttctctttgacactcttgatcctcttcaatggctacactgcccaacagtggcccaacgagtgccagctcgatcaactcaatgcgctcgaaccatcccaaatcatcaagagcgagggtggtcgcatcgaggtctgggaccaccatgcaccccagctccgttgctccggctttgcctttgagcgtttcgtcattgagcctcaaggtcttttcttgcccactttcttgaacgccggcaaactcacgtttgttgttcacggaaggggtctaatgggaagaagtattccgggatgcgccgagacgttcatggagtcaccgggttttggaga

SEQ ID NO: 144830 - DNA, 432 bp, Arabidopsis thaliana
aagaaaacatacacaaatagcaaaacatggctaacaagctcttcctcgtctgcgcaactctcgccctctgcttcctcctcaccaacgcttccatctaccgcaccgttgtcgaattcgaagaagatgacgccagcaaccccgttggtccaagacagagatgccagaagggggttcagcaatcacaacacctaaaagcttgcccgagatggatgagccagccaatgaggcaagggcgtggtggtggtccttccctcgacgatgagttcgatttcgagggcccccagcagggataccagctactccagcagtgctgcaacgagcttcgccaggaagagccagtttgcgtttgccccaccttgaaacaagctgccagggcagttagcctccagggacagcacggaccattccaatccaggaaaatttaccagtcag

SEQ ID NO: 144831 - DNA, 424 bp, Arabidopsis thaliana
caacaaacaaaaagaaaatggttaagctcagcaatctcctcgttgcaaccttcggggttctcctcgtccttaacggctgccttgcgaggcagtcacttggggttcctcctcagctacagaacgagtgtaacctcgacaacctagatgttctccaagccaccgaaactatcaagagtgaagccggtcagatcgagtactgggaccacaaccaccctcagctccgatgtgttggtgtttccgttgctcgttatgtaattgaacaaggcggtctttacttgcccaccttcttcacttccccaaaaatttcctacgtcgttcaaggaacgggtatcagcggaagagtggtccctggatgtgccgagaccttcatggactcgcagccgatgcaaggacaacaacaaggccaaccatggcaaggacgtca

SEQ ID NO: 144832 - DNA, 334 bp, Arabidopsis thaliana
  unsure (1)..(334): unsure at all n locations
ctcgccaaaaaccttgaaaccnttaaattttcttaactatggctaagctcattctagttttcgcaactcttgccctcttcatcgctcctagccaacgcatccatctaccgcacagtggtggagttcgaggaagatgatgacgtgtgcaacccacaacaaggtatgtgccatagggagtttatgaagcatcatcaactaagaggttgcaagcaatggatccgcatgaagagctcaacatggaagaatcggattcgaagctgatgactttgagctcactcttgatgtctttctttgtggacgattagaacccaatggttcctcatcaacactcttt

SEQ ID NO: 144833 - DNA, 420 bp, Arabidopsis thaliana
aaacaagaaaacatacacaaatagcaattcatggctaacaagctcttcctcgtctgcgcaactctcgccctctgcttcctcctcaccaacgcttccatctaccgcaccgttgtcgaattcgaagaagatgacgccagcaaccccgtaggtccaagacagagatgccagaaggagtttcagcaatcacaacacctaagagcttgccagagatggatgagcaagcaaatgaggcaaggacgtggtggtggtccttccctcgacgatgagttcgatttcgagggcccccagcagggataccagctactccagcagtgctgcaacgagcttcgccaggaagagccagtttgcgtttgccccaccttgaaacaagctgccagggcagttagcctccatggacagcacggaccattccaatccagg

SEQ ID NO: 144834 - DNA, 405 bp, Arabidopsis thaliana
ggtgataccattgccacaactctctcggtgtagcacagtggttctacaacgacggacaggaaccacttgtcatcgtcagcgtcttcgatctagccagtcaccagaaccagcttgaccgcaacccaaggccattttacttagccggaaacaacccacaaggtcaagtatggctacaaggccgagagcaacagccacagaagaacattttcaatggatttggacccgaggttattgctcaagctttgaagatcgatcttcagacagcgcagcatcttcagaaccaagatgacaaccgtggaaacattgtccgagtccaaggcccgttcggtgtcattaggccgcctttgaggggccagagacctcatgaggaggtaggagaagtagaaggacgtcatggacgacacg

SEQ ID NO: 144835 - DNA, 425 bp, Arabidopsis thaliana
cggacgcgtgggagaaaacatacacaattagcaaaacatggctaacaagctcttcctcgtctgcgcaactctcgccctctgcttcctcctcaccaacgcttccatctaccgcaccgttgtcgaattcgaagaagatgacgccagcaaccccgtaggtccaagacagagatgccagaaggagtttcagcaatcacaacacctaagagcttgccagagatggatgagcaagcaaatgaggcaaggacgtggtggtggtccttccctcgacgatgagttcgatttcgagggcccccagcagggataccagctactccagcagtgctgcaacgagcttcgccaggaagagccagtttgcgtttgccccaccttgaaacaagctgtcagggcagttagcctccagggacagcacggaccatttcaattca

SEQ ID NO: 144836 - DNA, 425 bp, Arabidopsis thaliana
atttgtgtgctcttagcctttactctatagttttatatcatatcaatcgacatggcgaatgtggaccgtgatcggcgtgtgcatgtagaccgtactgacaaacgtgttcatcagccaaactacgaagatgatgtcggttttggtggctatggcggttatggtgctggttctgattataagagtcgcggcccctccactaaccaaatcttggcacttatagcaggagttcccattggtggcacactgctaaccctagctggactcactctagccggttcggtgatcggcttgctagtctccatacccctcttcctcctcttcagtccggtgatagtcccggcggctctcactattgggcttgctgtgacgggaatcttggcttctggtttgtttgggttgacgggtctgagctcggtctcgagggt

SEQ ID NO: 144837 - DNA, 355 bp, Arabidopsis thaliana
ggttaagctcagcaatctcctcgttgcaacctttttggttctcctcgtccttaacggctgccttgcgaggcagtcacttggggttcctcctcagctacagaacgagtgtaacctcgacaacctagatgttctccaagccaccgaaactatcaagagtgaagccggtcagatcgagtactgggaccacaaccaccctcagctccgatgtgttggtgtttccgttgctcgttatgtaattgaacaaggcggtctttacttgcccaccttcttcacttccccaaaaatttcctacgtcgttcaaggaacgggtttcagcggaagagtggtccctggatgtgccgagaccttcatggtc

SEQ ID NO: 144838 - DNA, 415 bp, Arabidopsis thaliana
aaaagaaaatggttaagctcagcaatctcctcgttgcaaccttcggggttctcctcgtccttaacggctgccttgcgaggcagtcacttggggttcctcctcagctacagaacgagtgtaacctcgacaacctagatgttctccaagccaccgaaactatcaagagtgaagccggtcagatcgagtactgggaccacaaccaccctcagctccgatgtgttggtgtttccgttgctcgttatgtaattgaacaaggcggtctttacttgcccaccttcttcacttccccaaaaatttcctacgtcgttcaaggaacgggtatcagcggaagagtggtccctggatgtgccgagaccttcatggactcgcagccgatgcaaggacaacaacaaggccaaccatggcaaggacgaca

SEQ ID NO: 144839 - DNA, 423 bp, Arabidopsis thaliana
aaacaagaaaacatacacaaatagcaaaacatggctaacaagctcttcctcgtctgcgcaactctcgccctctgcttcctcctcaccaacgcttccatctaccgcaccgttgtcgaattcgaagaagatgacgccagcaaccccgtaggtccaagacagagatgccagaaggagtttcagcaatcacaacacctaagagcttgccagagatggatgagcaagcaaatgaggcaaggacgtggtggtggtccttccctcgacgatgagttcgatttcgagggcccccagcagggataccagctactccagcagtgctgcaacgagcttcgccaggaagagccagtttgcgtttgccccaccttgaaacaagctgccagggcagttagcctccagggacagcacggaccattccaatccaggaaa

SEQ ID NO: 144840 - DNA, 401 bp, Arabidopsis thaliana
  unsure (1)..(401): unsure at all n locations
cgaatcgtttttagcctccaagagagagagagaaagagagatctgcatatagagaatgatagaaccgtcgatggagagagagaatggtgctttaacggcggcgacaacaacgacgacggcggtgacttctcctcctccgatggcttcttcaccgcgtcaagctttagttgagagattgaaagattatggacaagaagatattttctttctttgggatgaactttcaccagacgangaaagatttctcgttagagatattgagaatttggatctttcaagaatagatcggatcattagatgttcacttcactctcaaggtttaccggttgcggcgattgaaaccggtccggagaattgggtttcgacagtagatgggtgaacaatggaagatagagagaaat

SEQ ID NO: 144841 - DNA, 416 bp, Arabidopsis thaliana
gaaaaatttgtccacatcctgttgttattttcgattcactttcggaatttcatagctaatttattctcatttaatacaaaatccttaaattaaatttgtacagtacctttgttttgggtatagacaattacatttttgatctgtatcaaatactacacttacaaaatcacaaagtaaaggcagcaattaattttgctttgaattgaaaagctttgagagagtaatcaaatgcttaaatcacgaaaacttacaaatttcaaaattttgtctctccataaattctcttaataaaggctgttgtttttccaatttgaaaattctatttttcaaaatcaagaacaggctatggaatttcaagaagctggttcatcatcaagtagaatcatcttcctttgtttcctctcctatctaaaatc

SEQ ID NO: 144842 - DNA, 391 bp, Arabidopsis thaliana
  unsure (1)..(391): unsure at all n locations
atttgcactcagtctagagacaaagagagagagagatggggtcaaagacggagatgagggagagagacgcaatggctacggtggctccctatgcgccggtcacttaccatcgccgtgctcgtgttgacttggatgatagacttcctaaaccttatatgccaagagcattgcaagcaccagacagagaacacccgtacggaactccaggccataagaattacggacttagtgttcttcaacagcatgtctccttcttcgatatcgatgataatggcatcatttacccttgggagacctactctggactgcgaatgcttggtttcaatatcattgggtcgcttataatagccgctgttatcaacctgacccttagctatgccactcttncggg

SEQ ID NO: 144843 - DNA, 412 bp, Arabidopsis thaliana
cataagaaaaaaaaataatcaaatcctcctcctctgcttcaccaccaaaaagcatatggcttctctcgtcttctccggttaatcaaaatctctccgtgtgaatcgtttgtgaatggtggaaactaatccgatcggtggtaagtttacgctctccctttccatcaaaagggcgagcttttctcttcctctctcgacatcctctgttttcgctttcggatcttgcaaagaaggctggtactttcgctgccttggcctcgacccgtgaacgattcgcccctaaaattcacaacccggaaccctaatttcctaaaaagtggttctttttttattgattctgttacttgtgagatttgctctgttttttgttctctcgatttcgaagatgttgctctacaacaagcagaagaagaac

SEQ ID NO: 144844 - DNA, 336 bp, Arabidopsis thaliana
cggaattccagattcgagccacgacctacgcgctcttgagggcattgccattggaggtcatatcaaatggtttccagatctctcccgaggaagctaggaagatcaagttcaacacacttgagaccactttgacccgcgctgccggtaggcaacaacaacagttgatcgaggagattgtcgaggcttaaatcaaaacgtttttctttttcttaataaagtatggtcagtttgtaatcacgtccctttacctttaacgtacgtggtaaaaatgtgtctgcggcacctcacttgtaataacactttcttctcataaataaaaaggaagtttcgagttac

SEQ ID NO: 144845 - DNA, 71 bp, Arabidopsis thaliana
atgagagggaagataaaagaagttggatttggagtaaggcggtaggtgttgtgaagaaagttctgacagct

SEQ ID NO: 144846 - DNA, 417 bp, Arabidopsis thaliana
gttggctcagcagcttcagaaccaacaagacagcagaggaaacatcgttcgtgttaagggacctttccaggtcgtgaggccacctctaagacagccctacgagagcgaggagtggagacacccacgtagcccacagggcaacggccttgaggagactatctgcagcatgaggtcccacgagaacattgacgaccctgctcgtgctgacgtgtacaagcccagcctaggtcgcgtgaccagcgtcaacagctataccttgcccatcttggagtatgtcaggctcagtgccactcgtggcgttctccagggtaatgcgatggtgcttcctaaatacaacatgaacgctaacgagatcttgtactgcactggaggacaaggaaggatccaagtgtcaacgggttaccttcaccttttttc

SEQ ID NO: 144847 - DNA, 409 bp, Arabidopsis thaliana
cagggacaacaaggacgacagggacaacaaggccaaccatggtaaggacagggacagcagggacaacaagggttccgtgacatgcaccagaaggtggaacatgtgagacgcggagacgtctttgccaacactccaggctctgcccactggatctacaactcaggagaacagccacttgtcatcatcgctcttctcgacatcgccaactaccaaaaccaactcgaccgcaaccctagagtgttccatttggccggaaacaaccagcagggaggctttggcggttcacagcaacaacaagaacagaaaaacttgtggagcgggttcgacgcacaggtcatagctcaagcattgaaaattgacgttcagttggctcagcagcttcagaaccaacatgacagcagaggaaaca

SEQ ID NO: 144848 - DNA, 409 bp, Arabidopsis thaliana
gttcatcttaatcggatgaacagaaacaatcgctgaagcgagttcgtcgcgaaattgtgagatcggagcttccgtgtttctcctcaagtcgcctccgatgaattttctacggagggatgtttccgggaacttctcgaattcaaacaacaactcagatatctaatgtaaataatcagctgaaacagaacaatccagaatctttcattattgtttgctgattttaataatttatcagcattatgcattaaactaattcatattataacattattgcaaataaagcccaaatcctttcattttgtacaatatttaccgcatagttttaattataaataataaacccaattttgtggtgcattcctcattaattacgatttcacatcaaaaatccttaatttcttaaggtctt

SEQ ID NO: 144849 - DNA, 369 bp, Arabidopsis thaliana
atccgtaaaaacgctatggtgctaccgcaatggaacgtaaacgcaaacgcggcactctacgtgacaaacggaaaggctcatatacaaatggtgaacgacaacggagaaagagtgttcgaccaagagatctccagcggacagttactagtcgtgccacaaggcttttcggtcatgaaacatgccataggcgaacagttcgagtggatcgaattcaagacaaacgaaaacgcacaggtcaacacactcgcgggccgtacctcagtcatgagaggtttgccgcttgaggttataaccaatgggtaccagatctctcccgaagaagctaaactagttaagtttagcacgattgagaccacactgacccatatc

SEQ ID NO: 144850 - DNA, 370 bp, Arabidopsis thaliana
atcgaaacagcagctgtgattcactataatggtaacatgaagccttggctaaagctggctattggtaggtataaacctttctggttaaagtttttgaactcgagccatccttatttacaagattgtgtcacagcttaaagcaaaagacgttgagagttgaggctaatcaatatcagaagattcttgatttcttatacactttgaagattcttttttttttggaatattgtagatcaaattcagatttccttctgaagactgttttttgttttttttgggtcggaagagaaaacttattattacacacacattataggttgaatatattacttacagggataatttggtgacctctgtttctacgtttttt

SEQ ID NO: 144851 - DNA, 365 bp, Arabidopsis thaliana
gagaaatcttctgagcgaaattctgacaaaagagatgatggaatgggataatcagcgacaacccaataaccatcactcttctaatcttcaagggatcgacgttaatggcggctccggcgccggaggaggaatgtacgtgaaggtgatgaccgatgagcagtatgaaactctcaggaaacagattgctatttacggcaccatttgtgagcgtcttgttgagatgcataaaactctcactgctcaacaagatcttgcaggagggagaatgggaggactatatgcagacccaatgatgtcatctttaggtcataagatgactgcttgacaaaggtggactcctacgccagtccagctttagattcttg

SEQ ID NO: 144852 - DNA, 413 bp, Arabidopsis thaliana
cacacatagcaaaaaatggcaaacaagttgttcctcgtctgcgcagctctcgctctgtgcttcctcctcaccaacgcttccatctaccgcaccgtcgttgagttcgaagaagatgacgccactaaccccataggcccaaaaatgaggaaatgccgcaaggagtttcagaaagaacaacacctaagagcttgccagcaattgatgctccagcaagcaaggcaaggccgtagcgatgagtttgatttcgaagacgacatggagaacccacagggacaacagcaggaacaacagctattccagcagtgctgcaacgagcttcgccaggaagagccagattgtgtttgccccaccttgaaacaagctgccaaggccgttagactccagggacagcaccaaccaatgcaagtcaggaa

SEQ ID NO: 144853 - DNA, 413 bp, Arabidopsis thaliana
gcccaaaataatctcataaccattaaaaacaaatctcctccttctctccggcgtcgatggaggatctccgtcgtagatttccgactaaaaagaacggagaagaaatctctaatgtcgccgtcgatcctcctcttcgtaaagcctctgacgcgcttcctcttccgttatacctaaccaacacttttttcctctcgctcttcttcgctactgtttattttcttcttagccgatggcgtgagaagatccgtaactcgacgcctcttcacgtcgttgacttatctgagatctgtgctctaatcggtttcgttgcttcgtttatctacctccttggtttctgtggtattgatctcattttccgatcttcttccgatgatgatgtttgggtaacgatgggatgattccatgtaatcaat

SEQ ID NO: 144854 - DNA, 407 bp, Arabidopsis thaliana
tttccggccgtaaccttaattttcgccttcattttcaggcttgaaacggtaaacttgagaggggtccaaagtgtggcaaaagtggtaggaacggtaataacggttggaggagcaatgatcatgactttgtacaaaggtccggccattgagattgtgaaggccgcacataattctttccacggtggttcgagcagcacacccaccggccaacattgggtccttggaaccatagccattatgggcagtatctctacatgggctgctttcttcattttacagtcatacacattaaaagtctatccagctgagctatcactagtaacgttgatatgtgggatagggacgatcctaaacgctattgcttcgctaataatggttcgtgacccgagtgcatggaaaatcggcat

SEQ ID NO: 144855 - DNA, 376 bp, Arabidopsis thaliana
ctcgccaaaaaccttgaaacctttaaaaaatctaaaactatggctaagctcattctcggttgggcaactcttgccctcgggatgctcctaaccaacgcatccatctaccgcacagtggtggagttcgaggaagatgatgacgtgagcaacccacaacaaggtaagtgccagatggagtttatgtagcatcaacaactaataggttgcaagcaattgatccccatgaaagcttatcaaggaaaaatcgtttcctatacttatgcttttttgctcactctttaattatatctttaagtccggtgtttacttaatttctttctttatcttcattatatttctttaataaaattattttaatttaattcaattgtaaatt

SEQ ID NO: 144856 - DNA, 422 bp, Arabidopsis thaliana
  unsure (1)..(422): unsure at all n locations
gaaaaacttgtggagcgggttcgacgcacaggtcatagctcaagcattgaaaattgacgttcagttggctcagcagcttcagaaccaacaagacagcagaggaaacatcgttcgtgttaagggacctttccaggtcgtgaggccacctctaagacagccctacgagagcgaggagtggagacacccacgtagcccacagggcaacggccttgaggagactatctgcagcatgaggtcccacgagaacattgacgaccctgctcgtgctgacgtgtacaagcccagcctaggtcgcgtgaccagcgtcaacagctataccttgcccatcttggagtatgtcaggctcagtgccactcgtggcgttctccagggtaatgcgatggtgcttnctaaatacaacatgaacgctaacgagatcttgt

SEQ ID NO: 144857 - DNA, 354 bp, Arabidopsis thaliana
aagaaggggactacattattcggttatggttacgatttccgtcaaagcaataggagcgatctacttatactaggtctgaagaagaagctggaaactgcatataaacgttcaggggggagaaaagtcactatcatctcccattcaatgggaggacttatggtttcatgtttcatgtatctccatccggaggcattttccaagtatgtaaataaatggattacaattgcaacacctttccaaggagcaccagggtgcatcaatgattcaatcttgactggagtgcaatttgtggaagggttagaaagtttcttttttgttttaagttgtacgatgttccaactgttggtcgaatgc

SEQ ID NO: 144858 - DNA, 355 bp, Arabidopsis thaliana
atcttaaacccttattccctaaacatctaatttggttccttctcccacaatccgcagagatttgttgttttgagaagaagtaagagggtggtgaagaagatttgcttgatcggcgataatggcgggtcggaacatagagaagatggcatctatcgatgctcagcttcggcaactcgatcctgctcaagtccgagaagaccataagcttgctgagtacgatgctcttctccttgatcgctttctcgacattctccaggatttacacggcgaggatctccgtgaaacggttcaagagttatacgagctttctgctgagtatgaatggaagcgtgagcctagcaagcttgaggagcta

SEQ ID NO: 144859 - DNA, 387 bp, Arabidopsis thaliana
ccctttcttccttttgaatctctccttcttcttcttcatccccaaattcgaaaccctaacgctaaaactcagtttcaaaatggctgaaccaatcaccaaggagcagccttctccacctgctccggaccctaattccacctacccttctccgtccgattttgattccatctcgatccctccgttcgatgatcatttcttcgatcagactccgattgtggaactaatgtccgatctggggtttcccgatggtgaattcgagctcactttcgacggtatggacgatctttactttcctgctgagaatgagtcgttttttattcctatcaatacgttcaatcaagaacagtttggtgattttacttcggagtctgaaagttctggaatttc

SEQ ID NO: 144860 - DNA, 421 bp, Arabidopsis thaliana
caagatcaagtgctctctttgattcaaaacattatctttctgaaattcaaaggttgaataacattcagtacagacaaaaactctttaagtcaaataatcaaaacaggatatttgctacatcacctgaaaaccaaacatagactgaagccagtctagaatgtcttcatcgagtttcttcttgtgacctgctgtccatggtaatccccttgtatttctaagagcggctacagcagcttgtatctacagaacagtattcaaacatattatgtggactgaaagacaataaaacagaaaaatagaagacaagctgagaatctggataacctcaggcaatctcattattgcctgattctgactatcagggtcaaggggaagtatattgtaaggcacgtaaatctgggtcttctcttccaccttattg

SEQ ID NO: 144861 - DNA, 404 bp, Arabidopsis thaliana
gctgggtaaaaaaaattcggaggacgacgaaagagaaaacgagtgtttcagtcactgccccacggagctctcggaaatttgtcttccccttgtcgtcgtctccctatctcctgcttcttcttcgttttcgtcttctttatcaaggaatgctgtttaattggaatcaacaatggagaatttgacggaaatagaatcaacgatggagagtttaacggaaatggagagcgagagagttgaacagggtaccgataaggaaattggaagtggagagcaaaggcaggatgatgtaaaggaaacggaggatgagaattctggagagagagtcggagaggaagctcctgtcagggaacatgaagattctccatgtctcattgttattgaagaaggtactttcctagctttcc

SEQ ID NO: 144862 - DNA, 419 bp, Arabidopsis thaliana
caaaatcttaaaaactttctctcaattctctctaccgtgatcaagatgcagatctgggttaagactctcaccggaaagacaatcaccctcgaggtggaaagctccgacaccatcgacaacgttaaggccaagatccaggataaggagggcattcctccggatcagcagaggcttattttcgccggcaagcagctagaggatggccgtacgttggctgattacaatatccagaaggaatccaccctccacttggtcctcaggctccgtggtggtatgcagattttcgttaaaaccctaacgggaaagacgattactcttgaggtggagagttctgacaccatcgacaacgtcaaggccaagatccaagacaaagagggtattcctccggaccagcagaggctgatcttcgccggaaagca

SEQ ID NO: 144863 - DNA, 421 bp, Arabidopsis thaliana
cgacaacggacagaacgtgttggaccaacaggtgcagaagggacagctcgtggtcatcccacgagggttcgcatacgttgtccagtcccacggaaacaagtgcagaagggacagctcgtggtcataccacaagggttcgcatacgttgttcagtcccacggaaacaagttcgagtggatctctttcaaaactaatgaaaacgcaatgatcagcactttggcgggtagaacctcgctcttgagggcattgccattggaggccatatcaaatggtttgcagatctctcccgaggaagctaggaagatcaagttcaacacacttgagaccactttgacccgcgctgccggtaggcaacaacaacaagtgatcgaggagattgtcgaggcttaaaataaaccgttttttttttctaaaaaagaat

SEQ ID NO: 144864 - DNA, 323 bp, Arabidopsis thaliana
  unsure (1)..(323): unsure at all n locations
caccaacataatctctttaccattcaaaacataatttttccttctctcccacgtcggttgacaatcaaaagcagcaatttcccactaaatcaaaccgtcaaaaaaccttatacgttactttacctgatatctattcataaacgcgctgccacgctataatgtcttcatttactaactaacagtaacctgctctccattgttatccactcgggtttgtaacatcttatacgatggcgtgagaagatccaaaactcgacacctcttcacgtngttgacttatctgagatctctgctctaatcggacaagctcttctctatctacc

SEQ ID NO: 144865 - DNA, 423 bp, Arabidopsis thaliana
  unsure (1)..(423): unsure at all n locations
gaaaaacaagaagctaaaaatgtctatcctttcgtttcctcacactttctttaacatctctgcttcactcttctacactatccttatatccagtttagttctactgatcctcacgcgccggagtgctaaatcaaagatcgtgaagcttcctccaggtcctccggggtggccggtggttggaaacctcttccaattcgcgcgctccgggaagcagttttacgagtacgttgacgatgtaaggaaaaaatacggtcctatctacacgttgaggatgggaagtcgaacaatgatcataatctctgattcagctctcgtccacgacgttctgattcaacgtggaccaatgttcgcaacccgacccaccgagaattcgacccggaccatcttcagctncaacactttcacccgtaaacgcttcagcgt

SEQ ID NO: 144866 - DNA, 314 bp, Arabidopsis thaliana
cataagaaaaaaatgccaaccaggtggttcttgttctgcccagctctcgctctctgcttccgcctcaccaacgcttgcatctaccgcaccgtcgttgagttcgaagaagatgacgccactaaccccataggcccaaaaatgaggaaatgccgcaaggagtttcagaaagaacaacacctaagagcttgccagcaattgatgctccagcaagcaaggcaaaggccgtagcgatgaagttgatttcgaagacgacatggagaactccacagggacaaacagcagggaacaacaagctatttccagcaggtgcttgc

SEQ ID NO: 144867 - DNA, 400 bp, Arabidopsis thaliana
gttactttcattagtgacttctatttaccgaatgattaaattgcatatacgggtaacttgcaggtatcaaggagtctgatactggtttagctcctctcagtaagcaaatgatgcaagaggggcaacctctccaggtgggttatgtttcctgttttagatatatcccgatcgatctcctcatggatatcttttcgagagttcctgcaaagtctatagctaggtttcgttgcgtatccaaactctgggaatccatactttgtcgtcctgatttcaaggagttgttcatgactatgtcttcgattcgtccaccgttgcttcttttcaccttccaagatgatgatggcaaattggtcttcttctcttcacctcaccctcagattccatgttacgagaatacgtt

SEQ ID NO: 144868 - DNA, 403 bp, Arabidopsis thaliana
  unsure (1)..(403): unsure at all n locations
ctcagatctctccctccctctttctccgatctcagatccattcaacaatctccaaagaagatggaaccagtctcttcatggggtaacacctctctcgtctccgtagatccagagatccacgacctaatcgagaaggagaaacgtcggcaatgtcgaggaatcgaacttatcgcttccgagaatttcacttccttcgccgtcatcgaagctctcggaagtgccttaaccaacaaatactccgaaggtattcctggtaatcgttattacggaggtaacgaattcatcgatgagatcgagaatctttgccgttcaagagctctcgaagctttccattgtgatccagcagcgtggggcgttaatgttcagccgtattctggatcntccggcgaattcgctgcttaca

SEQ ID NO: 144869 - DNA, 369 bp, Arabidopsis thaliana
aaaaagaaaaaaaaaaatcaaaacagaagcgagcgaagaggacggagggagaggatcgttcttccctctttctcttatctactttctcttctaaatctctaatcttttgaaaccctaaatcaaagttttgtttttttttatcaactggggaagaagaaaggtgtaacctttatataaccatggattccggtgacgcgacatctttgcttttgacgaaaattcgaagcttggagccagattatgctcctaagattattgggtatttgcttttacatgattttggtgatagagacttgatgcatctggctcgtggacctgaatcgattttgcagtcgactatttcgaaagtgaagagtctcttggggattt

SEQ ID NO: 144870 - DNA, 240 bp, Arabidopsis thaliana
  unsure (1)..(240): unsure at all n locations
ccattagaggccacttttggctgagtttctttccacgttcgtcttcgctttgctggagaaggctcaatcctcgctctagacaagntgtattgggacacggcggcttacacggggacatacacgcctggagggttagttctggtggcgttagctcatgcattggccttgttcgcggctggttctgcagccatcaatgtcctctggtggccacgttaacctcgctggcactttatgctgctc

SEQ ID NO: 144871 - DNA, 383 bp, Arabidopsis thaliana
ctctttacgatcgatggaactataaatatataaagagaacgaagaacactggtaagaacttaaaaccaatgattcgccatatgttctcctctctgactcacagattcgcatggcggattccacacttcgtctacggcgcaacgtggacgttgtttctgacgttaacggtggctatcatctcgcttgcaccggaattcgctttcgtgtcggcgattttcccgtcttcttctgaggtgttctcgcggcggtgcggttcttatgcagccatattggttccgctggatctttcctcggaggtcttgtgtttaccggcgaatcttttccggaggtcgaagatggtcctcgttgtgccttcggtttttgtaactttgttgtttcttttt

SEQ ID NO: 144872 - DNA, 419 bp, Arabidopsis thaliana
ggcctctgcttcaaggaggttactgaggagagagacgatctcctgtttcagccacgccgtgaggaaactctggtccaccgttggatctccttcttttgctcagagactcagagatctccccaaagacttcccctctaccaacgccaaacgtgacgcctctctgcttattgggaaaacgcctcttgtgttcctcaacaaagtcactgaaggttgtgaagcgtatgttgcagccaaacaagaacatttccagccaacttgtagcattaaagacagaccagctatagccatgattgcagatgcagagaagaaaaaactaatcatccctggaaaaacaacactgatagagcctacttcaggaaacatgggaatcagtttggctttcatggctgctatgaaagggtacaggattataatgacga

SEQ ID NO: 144873 - DNA, 416 bp, Arabidopsis thaliana
gtgaagctaactatgttccatggccgtggtggcacagtcggaagaggaggtgggggtactcatcttgctatattgtctcagccaccagatacagttaatggctctcttcgagtcacggttcagggtgaagtcattgagcaatcatttggggaggcacacttatgctttagaacacttcaacgtttcacagcagctactctagagcacggaatgaaccctccgatttcaccaaaacccgagtggcgtgctttgcttgatgaaatggcggttgttgcaactgaggaataccgatctgtcgttttccaagaacctcgattcgtcgagtatttccgcctcgctactccggagctggagtatggacgtgtgaatattggaagtagaccttcaaagcgaaaaccaagcggtgggatcgaatc

SEQ ID NO: 144874 - DNA, 445 bp, Arabidopsis thaliana
  unsure (1)..(445): unsure at all n locations
ccttgggtttcaccttggaagccctagtccagccaaagttccccctaccctttgtgtttctgaaagagcctgtgctgtgccaaccgacccttacaagtttggtctgaacgggtctggcggccgtctccctatgctaagattcttggaattccaacatgcagattgacgtgatttgattcaagaaaatattggtggaacagtaaacctcgaattaagttccatatccagggtgacatatnctgttgatgaaaccttcatcagaatcaaaaagagcttgtcccacttccagagttggaagtcaaggcgcttgccatagttccgttgaaccagaaacctaagcgtactgagctagcccagaggagaactaggagacccttctctgtgacagaggtagaagctttttgttcaagcagttgaggaactcgggactggaagatggcgtgat

SEQ ID NO: 144875 - DNA, 422 bp, Arabidopsis thaliana
tctttctcctgaaccatggcggcggcatcaacatcaacaacaacatcttcttcgatctgcgggtccaccaaaccatctccttcctcctccaaatcaccattaccaatctccagattctccctcccattctccctaaaccccaacaaatcatccttctccttccgccgccgcggtatcaaatccagctctccctcctccatctccgccgtgctcaacacaaccaccaatgtcacaaccactccctctccaaccaaacctaccaaacccgaaacattcatctcccgattcgctccagatcaaccccgcaaaggcgctgatatcctcgtcgaagctttagaacgtcaaggcgtagaaaccgtattcgcttaccctggaggtgcatcaatggagattcaccaagccttaacccgctctttctcaat

SEQ ID NO: 144876 - DNA, 423 bp, Arabidopsis thaliana
atcagattttaacctaaatggaaccaggctcaaaatgagtaagcttaaaagtgagggcggtggtgaagccatcactactatcacagggaaatccgaggcaaagaaacgtaactttgtcgagactattgagctccagatcggtctgaagaactatgaccctcaaaaggacaagcgtttcagtggatctgtcaagttaccacatatcccccgtcctaaaatgaagatctgcatgctcggagatgcccagcatgttgaagaggctgagaagatggggttggaaaacaatgatgttgagtctctaaaaaagcttaacaagaacaagaaactcgtcaagaagcttgcaaagaaataccatgctttcttggcctctgagtctgtcattaagcagattcctcgtcttcttggtcctggtcttaacaaggc

SEQ ID NO: 144877 - DNA, 421 bp, Arabidopsis thaliana
  unsure (1)..(421): unsure at all n locations
aaacanaaagaaaatggttaagctcagcaatctcctcgttgcaaccttcggggttctcctcgtccttaacggctgccttgcgaggcagtcacttggggttcctcctcagctacagaacgagtgtaacctcgacaacctagatgttctccaagccaccgaaactatcaagagtgaagccggtcagatcgagtactgggaccacaaccaccctcagctccgatgtgttggtgtttccgttgctcgttatgtaattgaacaaggcggtctttacttgcccaccttcttcacttccccaaaaatttcctacgtcgttcaaggaacgggtatcagcggaagagtggtccctggatgtgccgagaccttcatggactcgcagccgatgcaaggacaacaacaaggccaaccatggcaaggacgacag

SEQ ID NO: 144878 - DNA, 424 bp, Arabidopsis thaliana
atcaaaattttttttttctttaaaaacttcgaagcgatttttgattaacagactatggaggtggaatcattcatggacgaccttttgaacttctctgtaccggaagaggaagaagacgacgacgaacatacgcaaccaccgaggaatattactcgccggaaaactggattacggccaacagactccttcggtctctttaataccgacgaccttggagtggttgaagaagaggatttggaatggatttcaaacaaaaatgcttttccggtgattgaaacattcgtcggtgtattaccgtcggagcatttttctataacgtctcttctggaaagagaagcgactgaggtaaaacagctgagtccggtttcagtacttgagacgagtagccatagctccacaacgactacctcaaacagtagcggcg

SEQ ID NO: 144879 - DNA, 393 bp, Arabidopsis thaliana
ggaagaaaaatgggtcgagtctcatctattatctctttctctttgacactcttgatcctcttcaatggctacactgcccaacagtggcccaacgagtgccagctcgatcaactcaatgcgctcgaaccatcccaaatcatcaagagcgagggtggtcgcatcgaggtctgggaccaccatgcaccccagctccgttgcttcggctttgcctttgagcgtttcgtcattgagcctcagggtcttttcttgcccacttttcttgaacgccggcaaactcacgtttgttgttcacggaaggggtctaatgggaagagatattccgggatgcgccgagacgttcatggagtcaccggtattttggagaagggcaaggtcagggtcagagtcaagggt

SEQ ID NO: 144880 - DNA, 413 bp, Arabidopsis thaliana
  unsure (1)..(413): unsure at all n locations
cttaaggccttaaaaataaatgtcgagccggctaacaacctcaagaccagcaaggtaacgggggcaaccatcgtcagggcaacggaccttttcgggtcattaaggcacccttggaacgccgcgaaaggcggccacaaccacaatgaaatactaatgggttagaggggactttgtgcaccatgcgaagcactgaaaacctcgatgacccgtcggatgctgacgtgtacaagccatcactcggattcattagcacacttaacagctacaatctttctatcctcagacttttncgccttagcgctcttcgtgggctcatccgtaaaaacgctatggtgctacccgaatggaacgtaaacgcaaacgcggcactctacgtgacaaacgggaaggctcatttacaaatggtgaacgac

SEQ ID NO: 144881 - DNA, 421 bp, Arabidopsis thaliana
tgacaccattgcaacaccatctggtgtagctcaatggttctacaacaatggaaatgagcctctcattcttgttgcagccgcggatctcgccagcaaccagaaccagcttgaccgcaaccttagaccatttttgatagccggaaacaacccacaagggcaggaatggctacaaggccgaaagcaacagaagcaaaacaacatcttcaatggcttcgcacctgagatcttggctcaagccttcaagatcaatgtcgagacggctcagcagctccagaaccagcaagataaccgtggcaacatcgtcaaggtcaacggacctttcggcgtcattaggccacccttgagacgcggcgaaggcggccaacaaccacatgaaatagctaatggtttagaggagactttgtgcaccatgcgatgcact

SEQ ID NO: 144882 - DNA, 416 bp, Arabidopsis thaliana
cttgcatgaatgaccagaaggataagttgtggcctatgttggcgaagcttggtgtgtcaatgaagaatgatgagaaggagcttatgggtaaacctctaatgaagcgtgttatgcagacttggctccctgcaagtactgcactacttgagatgatgatctttcatttgccatctccccacactgcccagaggtaccgtgttgagaatctgtatgaaggtcctcttgatgatcagtatgcaaatgccatcaggaactgtgaccccaatggacctctcatgctctacgtatccaagatgattccagcctctgacaagggtagattctttgccttcggtcgtgtctttgctggtaaggtttctactggtatgaaggtcagaatcatgggtcccaactatattcctggtgagaagaaggat

SEQ ID NO: 144883 - DNA, 423 bp, Arabidopsis thaliana
cagaaaactaaagaaaaaaaatatgcaatcggcgaaacagaagataagcgatatggctagtacagccaaggagaagatggtgatatgtcaagcaaaagctgatgagaaggcagagcgggcgatggcgaggacgaaagaggagaaagagatagcgcaccaacggagaaaggcgaaggaagcagaagcgaatatggatatgcacatggctaaagcggctcatgcggaagacaagcttatggctaagcaatctcactaccatgttactgatcatggtccccacgtgcctcaacaagcgcctgtaccggctcccgcaccggttatgggacacggttacgggcataatcctaccggagttacctcagtgcctcctctgacctatcatccgacttatcctccgacgggacatcataatcatcatcacta

SEQ ID NO: 144884 - DNA, 420 bp, Arabidopsis thaliana
  unsure (1)..(420): unsure at all n locations
ntcggccaaaataaccaggaaaaccccgttattaaattttaaagctgacctgttttgactggcactatgctttactcatagcaggcagctcatctttgctctttccaatagtatgggacaagtcctacagagcggggagctagagtaaataaacaagctaggttcaactatctgacgatcatgtgttttcatcagtccttaccggaagtggaaagcatggtgactgcatgtaagcagaattgaagtgtttaatacattctgtcgttgtcttactaccaacatggtctgcaacttctttccaattgccaaacccgtatgtcgcaatggcctaacacagtcaatttacttcccaatagtcagatggaatctctatatagacatgggagtgtacaatcagaaacgattaatgattacctcaag

SEQ ID NO: 144885 - DNA, 420 bp, Arabidopsis thaliana
caaaaagaaaatggttaagctcagcaatctcctcgttgcaaccttcggggttctccgcgtccttaacggctgccttgcgaggcagtcacttggggttcctcctcagctacagaacgagtgtaacctcgacaacctagatgttctccaagccaccgaaactatcaagagtgaagccggtcagatcgagtactgggaccacaaccaccctcagctccgatgtgttggtgtttccgttgctcgttatgtaattgaacaaggcggtctttacttgcccaccttcttcacttccccaaaaatttcctacgtcgttcaaggaacgggtatcagcggaagagtggtccctggatgtgccgagacctttatggactcgcagccgatgcaaggacaacaacaaggccaaccattgcaaggacgacaggg

SEQ ID NO: 144886 - DNA, 410 bp, Arabidopsis thaliana
cggacgcgtgggtgcagccttagatgcttcaattgtgaattatagtattgagcagagggtttttacctatggttcccgtattacagatcaatcctactacactaatacaatatacgaataggaggcataggggaagaagcactacgccgagaaatcaacaacacgaaaactttcttaaaaatgattccctttctttcttcttcttcgttgggattgggactaattaaaatggttggaacaataaacatccatctcgttcgtattttggatacccgtataaccattgaagactgttgaagtgactaattcctggaaacttatgggcgttgagaacaaagaaatttttagagtttccttttttatttttatctagcatgaacccacttggtaggtagaaaagatcttttgca

SEQ ID NO: 144887 - DNA, 323 bp, Arabidopsis thaliana
gcataagcttttgttttctcttctctccgtcgtctcactctcatttctcctcttcttccatggcgccgaggcacgccagcgagaggcgccgtttccaaacgcctgccatttcagccaaatcaacagcctcgcgcccgctcaggcgacgaagttcgaagccggtcagatggaagtatgggaccacatgagccctgagctccgatgcgccggtgtaacggtggctcgcatcacccttcagcccaattccattttcttgcccgctttctttagcccacctgcccttgcttacgttgtccaaggagaaggagttatggggacgattg

SEQ ID NO: 144888 - DNA, 244 bp, Arabidopsis thaliana
gtaatttgaaaaatgaacaattctttttgtaaggaaaacttttatatagtagacgtttactatatagaaactagttgaactaacttcgtgcaattgcataataatggtgtgaaatagagggtgcaaaactcaataaacatttcgacgtaccaagagttcgaaacaataagcaaaatagatttttttgcttcagactaatttgtacaatgaatggttaatataccattgaagcttttattaattc

SEQ ID NO: 144889 - DNA, 419 bp, Arabidopsis thaliana
gacctgatgttaccggtgctgtgactactgtcacaactatgcaagtgagattatcattaagtctattactttaacaagattgctatgatgttctcttttgatttatattaacttggtttcgctatggatttcaggcgatcaacgacaagattctgtcgttgaaatatgaagactacacggctgagatagaaactgctgatgctcaggagtctcatgagagaggtgttattgtgctggttacaggacgcttaaccgggaacgataatgttaggaagaagtttagtcaatcttttttcttggctccacaagacaaaggatactttgtcttaaacgacgtgtttcgattccttgaggagaaagaggtgactgcacaagcccgctctgttcccatcaatggaaccactagggatgttcaggct

SEQ ID NO: 144890 - DNA, 402 bp, Arabidopsis thaliana
gcaatctcctcgttgcaaccttcggggttctcctcgtccttaacggctgccttgcgaggcagtcacttggggttcctcctcagctacagaacgagtgtaacctcgacaacctagatgttctccaagccaccgaaactatcaagagtgaagccggtcagatcgagtactgggaccacaaccaccctcagctccgatgtgttggtgtttccgttgctcgttatgtaattgaacaaggcggtctttacttgcccaccttcttcacttccccaaaaatttcctacgtcgttcaaggaacggttatcagcggaagagtggtccctggatgtgccgagaccttcatggactcgcagccgatgcaaggacaacaacaaggccatccatggcaaggtcgacagggtcatc

SEQ ID NO: 144891 - DNA, 337 bp, Arabidopsis thaliana
attttcgtagccgcaagactcctttcagattcttacttgcagctatgggtaaagagaagtggcacattaacattgtggtcattggtcatgttgattctggaaaatcgaccacaactggtcacttgatctataagcttggtggtattgacaagcgtgtcatcgagaggttcgagaaggaggctgctgagatgaacaagaggtccttcaagtacgcatgggtgttggacaaacataaggccgagcgtgagcgtggtattaccatcgatattgctttatggaaagtcgagaccaccaagtactactgcacagtcatttgatgccccatgaccttcttgat

SEQ ID NO: 144892 - DNA, 392 bp, Arabidopsis thaliana
cacaaacgagtaagaatacaaatacaaatagcaaaaaaaatggcaaacaagctcttcctcgtctgcgcaactttcgccctctgcttcctcctcaccaacgcttccatctaccgcactgttgtcgagttcgacgaagatgacgccagcaaccccatgggcccaagacagaaatgtcagaaggagtttcagcaatcacagcacctaagagcttgccagaaattgatgcgcatgcaaatgaggcaaggccgtggtggtggtccctccctcgacgatgagttcgatttgtaagacgacatcgagaacccacaatgcccccagcagtgacaccagatcctccagcagtgctgcagcgagcttcgccaggaatagccagtttgtgtttgccccatctt

SEQ ID NO: 144893 - DNA, 401 bp, Arabidopsis thaliana
  unsure (1)..(401): unsure at all n locations
accaaccttttcttttttttttttcctttctttttaactcctcctccccggagccggggtttttcctggccgttttccacgaccactttttttgttgggacacatgcccaccatcgtacaccctggctggttcgtaactacgtcccataacccgtccgtcgctaggatcagaaactcatctttctcagtccgatccgtaacccgcacttccggctccgaaatgacgtacggtttaaaataattgtctcctatgggctcgggcatggctaaaacgctaaaactctgcaccgcccagtatatcactcgtcctctgctcttggattcgaccagctcancggacgataggctgtcattttcaacgtaacagagtaaaatcactaatcaacaatcagaagagtaga

SEQ ID NO: 144894 - DNA, 419 bp, Arabidopsis thaliana
cggacgcgtgggggtgcttccacagtggaacgcaaacgcgaacgccattctttacgtgacagacggggaagcccaaatccagatcgtaaacgacaatggtaacagagtgtttgacggacaagtctctcaaggacagctcatagccgtaccacaaggtttctcggtggtgaaacgcgcaacaagcaaccgattccagtgggttgagttcaaaacaaacgcaaacgcgcaaatcaacactcttgcgggacgaacctcagtcttgagaggtttaccacttgaagttataaccaatgggtttcaaatctcacctgaagaagcaaggagggtcaagttcaacacgctcgagaccactttgactcacagcagtggcccagctagctacggaaggccaagggtggctgcagcttaagagcttaaaa

SEQ ID NO: 144895 - DNA, 402 bp, Arabidopsis thaliana
aagaaaaatgggtcgagtctcatctattatctctttctctttgacactcttgatcctcttcaatggctacactgcccaacagtggcccaacgagtgccagctcgatcaactcaatgcgctcgaaccatcccaaatcatcaagagcgagggtggtcgcatcgaggtctgggaccaccatgcaccccagctccgttgctccggctttgcctttgagcgtttcgtcattgagcctcagggtcttttcttgcccactttcttgaacgccggcaaactcacgtttgttgttcacggaaggggtctaatgggaagagttattccgggatgcgccgagacgttcatggagtcaccggtatttggagaaggtcaaggtcagggtcagagtcaagggttccgtgacatgca

SEQ ID NO: 144896 - DNA, 392 bp, Arabidopsis thaliana
cacacataccgtgatctaaaaacctgaatttcaacatgtcacacagcaatcaacagaagtttgaatagagcaagaaagcaccttgaggcttgaagtgatcagacaaactctctttccagaaaacacaatactttcttcattgaattaataatttacacaaaccaagcatcattccaacaattcccattgcatccatcataaacgcaagaacaaatcttttccttttgtgccctaaatttagaatccagattccaatttccaacctcatttcttagccttagagaatctaagacaccgatatttctcaccactcacagtaatttccagagcaccatcttgattatcctgattcgacgcagtccccataagaacactcttctccttctccagat

SEQ ID NO: 144897 - DNA, 420 bp, Arabidopsis thaliana
gacagggacaacagggacaacaaggactacagggacaacaaggccaaccatgggaaggacagggacagcagggacaacaagggttccgtgacatgcaccagaaggtggaacatgtgagacgcggagacgtctttgccaacactccaggctctgcccactggatctacaactcaggagaacagccacttgtcatcatcgctcttctcgacatcgccaactaccaaaaccaactcgaccgcaaccctagagtgttccatttggccggaaacaaccagcagggaggctttggcggttcacagcaacaacaagaacagaaaaacttgtggagcgggttcgacgcacaggtcatagctcaagcattgaaaattgacgttcagttggctcagcagcttcagaaccaacaagacagcagaggaaaca

SEQ ID NO: 144898 - DNA, 423 bp, Arabidopsis thaliana
gagtaagaatacaaatacaaatagcaaaaaaaatggcaaacaagctcttcctcgtctgcgcaactttcgccctctgcttcctcctcaccaacgcttccatctaccgcactgttgtcgagttcgacgaagatgacgccagcaaccccatgggcccaagacagaaatgtcagaaggagtttcagcaatcacagcacctaagagcttgccagaaattgatgcgcatgcaaatgaggcaaggccgtggtggtggtccctccctcgacgatgagttcgatttggaagacgacatcgagaacccacaaggcccccagcagggacaccagatcctccagcagtgctgcagcgagcttcgccaggaagagccagtttgtgtttgccccaccttgagacaagctgccagggccgttagcctccagggacaac

SEQ ID NO: 144899 - DNA, 399 bp, Arabidopsis thaliana
aaagaaaatggttaagctcagcaatctcctcgttgcaaccttcggggttctgctcgtccttaacggctgccttgcgaggcagtcacttggggttcctcctcagctacagaacgagtgtaacctcgacaacctagatgttctccaagccaccgaaactatcaagagtgaagccggtcagatcgagtactgggaccacaaccaccctcagctccgatgtgttggtgtttccgttgctcgttatgtaattgaacaaggcggtctttacttgcccaccttcttcacttccccaaaaatttcctacgtcgttcaaggaacggttatcagcggaagagtggtccctggatgtgccgagactctcatggactcgcagtcgatgcaaggacaacaacaaggtcaacc

SEQ ID NO: 144900 - DNA, 384 bp, Arabidopsis thaliana
cggacgcgtggggtggaatgctttacgtctactatcccgaggactcaattggtggtggtttgaacaatatatacgagtttaggggtcttatatcaagaaagcaggattatcctgctgattctctttctgacaatcaaaagggttacgtcgatggactggtgaggaaagcctatgaaaactgggatcaggttgttgagtatgacaggcagtcacttatgaacttcaatcaagttagcaaaacagatgccattaactactctatgccaatttcagttccaagccaaccatctactttttattcagacgtaactgttgaagcatataatcagagtccggctttaaagtttcccggtcaatctcagctagctgatactcaatacatgc

SEQ ID NO: 144901 - DNA, 370 bp, Arabidopsis thaliana
caaaaagaaaatggttaagctcagcaatctcctcgttgcaaccttcggggttctcctcgtccgtaacggctgccttgcgaggcagtcacttggggtttctcctcagctacagaacgagtgtaacctcgacaacctagatgttctccaagccaccgaaactatcaagagtgaagccggtcagatcgagtactgggaccacaaccaccctcagctcccatgtgttggtgtttccgttgctcgttatgtaattgaacaaggcgggctttacttgcccaccttcttcaacttcccaaaaatttcctacgtcgttcaagaacgggtatcagcggaagagtggtccctggatgtgccgagaccttcatggactcgc

SEQ ID NO: 144902 - DNA, 426 bp, Arabidopsis thaliana
ttttaacttgctgtttttcacaccaggaaaattgaagtcttgtctagctacttttgctctggcagtgttagtaacacaaggaagcatttttagtttgtgtttggcctcctctgcttctacaaactctgttcctaattggtttcatcattggccgccgtttaaatggggaccaaaatttccatattctccacctaaaccgccgccaatcgagaaatatcctccaccggtgcagtatccaccaccgatcaagaagtatccaccgccaccatacgagcatccaccggtgaagtatccaccaccgatcaagacttaccctcatccgccggtgaagtatcctccaccagaacagtatccaccgccgattaagaagtatcctccaccagaacagtatccaccgccgattaagaagtatccttcaccagaaca

SEQ ID NO: 144903 - DNA, 366 bp, Arabidopsis thaliana
aagaggaagaaaaatgggtcgagtctcatctattatctctttctctttgacactctggatcctcttcaatggctacactgcccaacagtggcccaacgagtgccagctcgatcaactcaatgcgctcgaaccatcccaaatcatcaagagcgagggtggtcgcatcgaggtctgggaccaccatgcaccccagctccgttgctccggctttgcctttgagcgtttcgtcattgagcctcagggtcttttcttgcccactttcttgaacgccggcaaactcacgtttgttgttcacggaaggggtctaatgggaagaggtatttccgggatgcgccgagacgttcatggagtcaccggtttttggag

SEQ ID NO: 144904 - DNA, 413 bp, Arabidopsis thaliana
atggattcagactttgttcctccttctgtttcttttcagctcccggttatcgattgctctgaccaaaacctaaaaccaggaagctcaaagtgggatgaagtgaaggctgatgtccttaaagctctagaagactacggttgtttcgaagctttctttgacaaattgtcagtggagcttaatagatctgtttttgaagctatggaagaccttttcgagttgcctattccgaccaaacagagaaacgtgtcttcaaaacccttccatggatatctttgtcataatctttacgagagtttggggatcgatgatgctaatgttttggagaaagtcaacgactttactcaacaattatggcctgatcatgggaacaagagtattagtgagacgatacacctgttttcggagcaattagt

SEQ ID NO: 144905 - DNA, 262 bp, Arabidopsis thaliana
gtggggtcagtttgggataacgtcaaacatatagattctaaagaaaagatagggtgtagaattcttagaaacagaaaaataaaataaaagttctaataggatacattgtatagtagtgaatgtaattagataagtttatctaaaaacttgagaacatacgaaaatgtattgatttttttttttttgggacaaacgcgaaaatgtattgatttgattgtaattataggaacatttacgaaactaaaatatcatgaattttttt

SEQ ID NO: 144906 - DNA, 417 bp, Arabidopsis thaliana
  unsure (1)..(417): unsure at all n locations
ctaaatattccgagttcttgatttttttttacttcaggncaaaatgggagggtacgcgagagcggttgcgtgttcggcctttgtgtcgtttctgctgtttttcactgcttattctaagagaaatgatggaacattcagagttggcctgaaaaaactgaagttggatcctaacaaccgactcgcaacacgctttggttccaagcaagaagaggccttgagatcttctttgcgttcgtacaacaacaatcttggtggtgattctggagatgctgatattgtcccgctcaagaattacttggatgctcagtactatggtgagattgctattggtactccaccgcataagttcactgtcatttttgataccggaagctctaacctttgggtgccatcaggaaaatgttttttctcgctgtc

SEQ ID NO: 144907 - DNA, 345 bp, Arabidopsis thaliana
aaaacatacacaaatagcaaaacatggctaacaagctcttcctcgtctgcgcaactgtcgccctctgcttcctcctcaccaacgcttccatctaccgcaccgttgtcgaattcgaagaagatgacgccagcaaccccgtaggtccaagacagagatgccagaaggagtttcagcaatcacaacacctaagagcttgccagagatggatgagcaagcaaatgaggcaaggacgtggtggtggtccttccctcgacgatgagttcgatttcgagggcccccagcagggataccagctactccagcagtgctgcaacgagcttcgccaggaagagccagtttgcgttt

SEQ ID NO: 144908 - DNA, 392 bp, Arabidopsis thaliana
caaaaagaaaatggctaagctcagcaatctccttgttgcaaccttcggggttctcctggtccttaacggctgccttgcgaggcagtcacttggggttcctcctcagctacagaacgagtgtaacctcgacaacctagatgttctccaagccaccgaaactatcaagagtgaagccggtcagatcgagtactgggaccacaaccaccctcagctccgatgtgttggcgtttacgttgctcgttatgtaattgaacaaggcggtctttacttgcccacctgtttcacttccccaaaaatttactacgtcgttcaaggaacgggtatcaccggaagagtggtccctggatgtgccgagaccttcatggactcgcagtcgatgcaaggacaacaac

SEQ ID NO: 144909 - DNA, 406 bp, Arabidopsis thaliana
atgaattccattaagtttcccatacttgatcgaacaacaaaaaattccgttatttcaactacgttaaatgatctttcaaattggtcaagactttccagcctatggccgcttctttatggtaccagttgttgtttcattgaatttgcctcattaataggctcccgatttgactttgatcgttatgggttagtaccaagatcgagtcctagacaggcggaccttattttaacagcaggtacagtaacaatgaaaatggctccttctttagtgcgattatatgaacaaatgcctgaaccgaagtatgttattgctatgggagcctgtacaattacaggggggatgttcagtaccgattcttatagtactgttcgaggagttgataagctaattcctgtagatgtctatt

SEQ ID NO: 144910 - DNA, 324 bp, Arabidopsis thaliana
  unsure (1)..(324): unsure at all n locations
ctctgcttttcaattccttaaatcccttcctctnctggcgtctccagacccccgcttccgtctccgtcttacctccnttccctctccttcaaacttcactccgaccacctcgtctctatcttcgcttcctccgccctcaaatgctcatcccccgccgagtacccgtcgcgtttcgttagaaacgttgctgtatcttcggattttgaggtggaggaagatgatatgttcgctgacggtgacgattcagcgcctgtggagcgtaactccttctctcctgaccttaagctcttntgtggaacccttcttttaacgttgatagcgctc

SEQ ID NO: 144911 - DNA, 419 bp, Arabidopsis thaliana
agaaaacatacacaaatagcaaaacatggctaacaagctcttcctcgtctgcgcagctctcgccctctgcttcctcctcaccaacgcttccatctaccgcaccgttgtcgaattcgaagaagatgacgccagcaaccccgtaggtccaagacagagatgccagaaggagtttcagcaatcacaacacctaagagcttgccagagatggatgagcaagcaaatgaggcaaggacgtggtggtggtccttccctcgacgatgagttcgatttcgagggcccccagcagggataccagctactccagcagtgctgcaacgagcttcgccaggaagagccagtttgcgtttgccccaccttgaaacaagctgccagggcagttagcctccagggacagcacggaccattccaatccaggaaaa

SEQ ID NO: 144912 - DNA, 420 bp, Arabidopsis thaliana
acacacatagcaaaaaatggcaaacaagttgttcctcgtctgcgcagctcgcgcgctctgcttcctcctcaccaacgcttccatctaccgcaccgtcgttgagttcgaagaagatgacgccactaaccccataagcccaaaaatgaggaaatgccgcaaggagtttcagaaagaacaacacctaagagcttgccagcaattgatgctccagcaagcaaggcaaggccgtagcgatgagtttgatttcgaagacgacatggagaacccacagggacaacagcaggaacaacagctattccagcagtgctgcaacgagcttcgccaggaagagccagattgtgtttgccccaccttgaaacaagctgccaaggccgttagactccagggacagcaccaaccaatgcaagtcaggaaaattta

SEQ ID NO: 144913 - DNA, 421 bp, Arabidopsis thaliana
ggaagaaaaatgggtcgagtctcatctattatctctttctctttgacactcttgatgctcttcaatggctacactgcccaacagtggcccaacgagtgccagctcgatcaactcaatgcgctcgaaccatcccaaatcatcaagagcgagggtggtcgcatcgaggtctgggaccaccatgcaccccagctccgttgctccggctttgcctttgagcgtttcgtcattgagcctcagggtcttttcttgcccactttcttgaacgccggcaaactcacgtttgttgttcacggaaggggtctaatgggaagagttattccgggatgcgccgagacgttcatggagtcaccggtatttggagaaggtcaaggtcagggtcagagtcaagggttccgtgacatgcaccagaaagtagagcacc

SEQ ID NO: 144914 - DNA, 398 bp, Arabidopsis thaliana
ctcaatttcattctctcttctctctccaatttcacaacaatgggagtcaaaagttgcgttgaaggtgggattgcctctgtaatcgccggttgctctactcaccctctcgatctaatcaaggttcgtcttcagcttcacggtgaagcaccttccaccaccaccgtcactctcctccgtccagctctcgctttccccaattcttctcctgcagctttcctggaaacgacttcttcagtccccaaagtaggaccgatctcactcggaatcaacatagtcaaatcggaaggcgccgccgcgttattctcaggagtctccgctacacttctccgtcagacgttatattccaccaccaggatgggtctatacgaagtgcttaagaacaaatggactgatcctga

SEQ ID NO: 144915 - DNA, 348 bp, Arabidopsis thaliana
cttggtgaatcgattacaattttgatttgattcagatatttgaagggttcttactagaatttgaattggggatctttgaatttcgatcaggcttttagagaggtagggaacattgaattgagatctgggtcaacttttggttttgttggggattagttgttttaagagatcgaagaaaggaggaaactttttgattcggtaaccatggatcgagtggttggtggtaagcctaaagcttggacgtgatactaggaagttggtacctcttggaggactttttctatgatgttatatgtcaatgctgtaaaaaaagtttctaatattcttgtaccttttgtagctagccag

SEQ ID NO: 144916 - DNA, 394 bp, Arabidopsis thaliana
  unsure (1)..(394): unsure at all n locations
taattttaatatttaaggaattttgctgaaacaaaaaaaaaaactaaaacactgatatatgtgacttgtaacctatatgcaggttttgtgaatactcgcctgaaaacaccagtaactggtgcaagtcaccgattgtaatggtgttcagagaggaagagacgaaagatggaaggaaaaacatgcgttacacagatgacattggagatctatgcattttcatttcgaagggagaggatttctgcgtcaaggctagctcttgccctggactccaacctaactccatctctttacatggccgtttgtttgcgattcttaatctcacgaaaagaaccatgggttgctacgaatatccccaaggcataccaaaaaggattccctatntaccctactggct

SEQ ID NO: 144917 - DNA, 413 bp, Arabidopsis thaliana
gacccacgcgtccggaaagaaggaatctaaatcggaatttgcgtgctccatcaatggcttcgatcttgggtcgcaggtgactgaatactatacgcgctcgacatctctttttgtcacggcaagctttacagggatctcatatgtctagactgcagtcccgcggtatatcttatggcagcaacaaagatgatgaagaagcagagcaactttctaaggaaatctgcaaggactggaatactgtctgtgaacggagcatcaacaccctgttcctcacagaaatggtcccgcggttggacgtgaccctcaagtacttctttgatccaaaagttactatcaattatccatttgagaagggtcctctgagccctcgcttccgtggtgaacatgctcttcgaagatatcctaccggggaa

SEQ ID NO: 144918 - DNA, 403 bp, Arabidopsis thaliana
cggacgcgtgggtaaagaggaagaaaaatgggtcgagtctcatctattatctcttgctctttgacactcttgatcctcttcaatggctacactgcccaacagtggcccaacgagtgccagctcgatcaactcaatgcgctcgaaccatcccaaatcatcaagagcgagggtggtcgcatcgaggtctgggaccaccatgcaccccagctccgttgctccggctttgcctttgagcgtttcgtcattgagcctcagggtcttttcttgcccactttcttgaacgccggcaaactcacgtttgttgttcacggaaggggtctaatgggaagagttattccgggatgcgccgagacgttcatggagtcaccggtatttggagaaggtcaaggtcagggtcagagtc

SEQ ID NO: 144919 - DNA, 404 bp, Arabidopsis thaliana
gttcaaatactattaaaatttgacaatttcggtttttggactacaaggatttaaagctcatatttggagttgtaattacaggtgagtatgagatgggcttatgaacaaggagtgagcatggtagtgaagagctttaccaaagagagattagaagagaatctcaagatatttgattggtctttgacagaggatgagacacagagaatttcaactgagattcctcagttcagaaacgtccacggagaggtttatacctctaagaaaggtcccataaaatctgttgccgagatgtgggacggggagatctgatcactttgtgtgaaaatagcctagtgaaacggcaaaattatcattcgtcacaatgattttcttgtcattctctctaataatgaataatgaataat

SEQ ID NO: 144920 - DNA, 388 bp, Arabidopsis thaliana
aaacaagaaaacatacacaaatagcaaaacatggctaacaagctcttcctcgtctgcgcaactctcgccctctgcttcctcctcaccaacgcttccatctaccgcaccgttgtcgaattcgaagaagatgacgccagcaaccccgtaggtccaagacagagatgccagaaggagtttcagcaatcacaacacctaagagcttgccagagatggatgagcaagcaaatgaggcaaggacgtggtggtggtccttccctcgacgatgagttcgatttcgagggcccccagcagggataccagctactccagcagtgctgcaacgagcttcgccaggaagagccagtttgcgtttgccccaccttgaaacaagctgccagggcagttagcc

SEQ ID NO: 144921 - DNA, 395 bp, Arabidopsis thaliana
cttctctctctctctagattcgaaaaaatggcgaaactggtgatgttgttggttctctgtatcttaccggcgatagccatggcggcaaggaggggaaatattggaaagaatacaatggtggttcaaggtagcacctactgtgacatttgcaaattcggcttcgagactcctgaatcctcctacttcatccccggtgcaacggtgaagctatcatgcaaagacaggaagacaatggaagaggtttacacagacaaagctgtatcagacaaagaaggaaagtataagttcattgtccacgacgatcacagagaccagatgtgcgatgttttgcttgtgaaaagctcggataaaacctgctctaaaatctccgttggacgtgagaagtctcgtgtgat

SEQ ID NO: 144922 - DNA, 398 bp, Arabidopsis thaliana
ctctttcccggtttcttcgtctccagcattttcgcgtgttgtaacctaatccaaagcttacccattgatggaataacatcatcacgacgcgtcaaaattctgtatcggaggaccgagagatctccatctcctgtccagattcgattcccaccaatcccaatttcgtgaaattcgttagggttttagtttgaatctcatctcatcagatcgagtcgacccaggattaggaagaagaaaagcgatgaagatggcgacgaatggccggtttttcacaatcgggctagtcgcgtcttggtactcatcgaacattggtgtattgttgctgaacaagtacttgcttagcaattacggattcaagtacccgatctttctcaccatgtgtcacatgacggcttgtt

SEQ ID NO: 144923 - DNA, 372 bp, Arabidopsis thaliana
gctaaacattgttagagagtttgtagagagcgataatggcgatgaggggctgcacggggttttcgatccttgtgtagtctttgtgcgcttcgtctattagaagcgaagagacggtgacgaaggagttcgtgttgaccttggatcacactaacttcaccgataccatcaacaaacacgatttcatcggtgtggagttctacgccccatggtgtggacactgtaagcagcttgctcctgagtatgagaaggctgcgtcagatttgagcagttacgtcccaccagtggttcttgctaagatttgatccaatgtggaaacatacagagtatttgcatcttaatactaggttcatggtttccctactattaatattt

SEQ ID NO: 144924 - DNA, 362 bp, Arabidopsis thaliana
cgtccgaaaagaaaatggttaagctcagcaatctcctcgttgcaaccttcggggttctcctggtccttaacggctgccttgcgaggcagtcacttggggttcctcctcagctacagaacgagtgtaacctcgacaacctagatgttctccaagccaccgaaactatcaagagtgaagccggtcagatcgagtactgggaccacaaccaccctcagctccgatgtgttggtgtttccgttgctcgttatgtaattgaacaaggcggtctttacttgcccaccttcttcacttccccaaaaatttgctacgtcgttcaaggaacgggtatcagcgcaagagtggttcctggatgtgccgagacc

SEQ ID NO: 144925 - DNA, 341 bp, Arabidopsis thaliana
aaacttttcagagagaaagaaactttcttctccgatcaaagttcaaatcgccgtccggttacttttccagcatcaatcggctttcatagcggtggtggctggctcagagcggtgttcctttaccgcattttactttttgtttttaggaataatcccctccactttctttgaattcaaatccaaatcaaattttcttagccatgagtgttgtcttcataaggttttgcctctagtttcatcatttgtggttcagatctaagatgggggagatatagtttctcttttattttggtttggtaaatcagtggtttacatatttttcctcttttatagttgtgaca

SEQ ID NO: 144926 - DNA, 400 bp, Arabidopsis thaliana
aacaaaaagaaaatggttaagctcagcaatctcctcgttgcaaccttcggggttctcctcgtccttaacggctgccttgcgaggcagtcacttggggttcctcctcagctacagaacgagtgtaacctcgacaacctagatgttctccaagccaccgaaactatcaagagtgaagccggtcagatcgagtactgggaccacaaccaccctcagctccgatgtgttggtgtttccgttgctcgttatgtaattgaacaaggcggtctttacttgcccaccttcttcactttcccaaaaattttctacgtcgttcaaggaacgggtatcagcggaagagtggtccctggatgtgccgagaccttcatggactcgcagccgatgcaaggacatcaacaaggcc

SEQ ID NO: 144927 - DNA, 400 bp, Arabidopsis thaliana
agaaataacaaaatggctcgagtctcttctcttctttctttcttcttaacacttttgatccttttccatggctacgcggctcaacagggtcagcagggtcagcagtttccgaacgagtgccagctcgaccagctcaatgcgctcgagccgtcacacgtactgaagagcgaggctggtcgcatcgaggtgtgggaccaccacgctcctcagctccgttgctcaggtgtctcctttgcacgttacatcatcgagtctaagggtctctacttgccctctttctttaacaccgcgaagctctctttcgtggctaagggacgaggtcttatgggaaaagtgatccctggatgcgccgaaacattccaagactcatcagagtttcaaccacgcttcgaaggtcaag

SEQ ID NO: 144928 - DNA, 401 bp, Arabidopsis thaliana
gtcttgcactccatgccacctcaaaagatcgagatcttcaaatctatggaaaactgggccgaggagaaccttctgattcacctcaaggatgtggagaagtcttggcaaccccaggatttcttgcctgaccctgcatcagatgggtttgaagatcaggtaagagagttaagagagagggctagagagctccctgatgattactttgttgttttggtgggggacatgatcacagaagaagcacttccgacctatcaaactatgttgaacactttggatggagttagggatgaaacaggtgctagtcctacttcatgggctatttggaccagagcttggactgcagaagaaaaccgacatggcgatcttctgaataaatacctttacttgtctggtcgcgttga

SEQ ID NO: 144929 - DNA, 392 bp, Arabidopsis thaliana
  unsure (1)..(392): unsure at all n locations
ancagcagaggaaacatcgttcgtgttaagggacctttccaggtcgtgaggccggctctaagacagccctacgagagcgaggagtggagacacccacgtagcccacagggcaacggccttgaggagactatctgcagcatgaggtcccacgagaacattgacgaccctgctcgtgctgacgtgtacaagcccagcctaggtcgcgtgaccagcgtcaacagctataccttgcccatcttggagtatgtcaggctcagtgccactcgtggcgttctccagggtaatgcgatggtgcttcctaaatacaacatgaacgctaacgagatcttgtactgcactggaggacaaggaaggatccaagtggtcaacgacaacggacagaacgtgttgga

SEQ ID NO: 144930 - DNA, 237 bp, Arabidopsis thaliana
caaaaagaaaatggttaagctcagcaatctcctcgttgcaaccttcgggggtctcgtcgtccttaacggctgccttgcgaggcagtcacttggggttcctcctcagctacagaacgagtgtaacctcgacaacctagatgttctccaagccaccgaaactatcaagagtgaagccggtcagatcgagtactgggaccacaaccaccctcagcttcgatgtgttggtgtttccgttgc

SEQ ID NO: 144931 - DNA, 395 bp, Arabidopsis thaliana; identical to SEQ ID NO: 130191

SEQ ID NO: 144932 - DNA, 355 bp, Arabidopsis thaliana
caaacttgtctgagattgttactatcatacttgaagattatgtcaaatctcaaatgggattgactaatgtattcaatgcatctggattgagtaagttcttgttaccaatctcgagaatgccgaaagacggtccaaactggccaacggttgatgatatggtgaagcagaaccaaggctctggggttttacactccaagaaggaaagaagcttctgaaggtgttgcttaccagtggaattacatggttgaaaatcaatatggtaatgatggaatgaaggatggatcatgctcgagtcgatctgaatcttcttcactagataccatgtctcggtctttggtgtttcagaactactttg

SEQ ID NO: 144933 - DNA, 400 bp, Arabidopsis thaliana
atcatcacaaacgagtaagaatacaaatacaaatagcaaaaaaatggcaaacaagctcttcctcgtctgcgcaactttcgccctctgcttcctcctcaccaacgcttccatctaccgcactgttgtcgagttcgacgaagatgacgccagcaaccccatgggcccaagacagaaatgtcagaaggagtttcagcaatcacagcacctaagagcttgccagaaattgatgcgcatgcaaatgaggcaaggccgtggtggtggtccctccctcgacgatgagttcgatttggaagacgacatcgagaacccacaaggcccccagcagggacaccagatcctccagcagtgctgcagcgagcttcgccaggaagagccagtttgtgtttgccccaccttgaga

SEQ ID NO: 144934 - DNA, 120 bp, Arabidopsis thaliana
ctttaagtctttaaaaattttttattcaggaaagagttacatgtgcagagtcaacgatcgcttatacacgacgttcgttgttgtacactagacgtcctaatacaaaatctttaagtcttt

SEQ ID NO: 144935 - DNA, 399 bp, Arabidopsis thaliana
aatcaataaagaggaagaaaaatgggtcgagtctcatctattatctctttctctttgacactcttgatcctcttcaatggctacactgcccaacagtggcccaacgagtgccagctcgatcaactcaatgcgctcgaaccatcccaaatcatcaagagcgagggtggtcgcatcgaggtctgggaccaccatgcaccccagctccgttgctccggctttgcctttgagcgtttcgtcattgagcctcagggtcttttcttgcccactttcttgaacgccggcaaactcacgtttgttgttcacggaaggggtctaatgggaagagttattccgggatgcgccgagacgttcatggagtcaccggtatttggagaaggtcaaggtcagggtcagagtcaa

SEQ ID NO: 144936 - DNA, 403 bp, Arabidopsis thaliana
aaaacccatatgagatacagaagaataggctattctcttttttaaattacgttgaccgggagatgttgaagctgcataaattatttggattgtaccgactaccaacaaccaaggagaaaacatagaatgagcgtggggtaataattccatattgattcgaaccaacccataggctcccatttttaataagattccagcgagaagcatacaggtactgtaatgtgcctcaccgtgggtgtcaggtaaccaagtatgtaaaggtataatcggtgatttgacggcaaaagcaataagaaatccaatataaaatagtatttcaagtgtaacaggataggatttattagctaagagttctaaatttaatgttggttcgttcgaaccatataaacttatacctaaaact

SEQ ID NO: 144937 - DNA, 402 bp, Arabidopsis thaliana
cgcacaggaagtcctttcaacaatggcccgaaacatactgagacggagctatacgggcaaaaatcggctggcaatgctttctcactctaccaagctcctgatgaagccatgtaatattaagtaaagtatcagtctaaaacacagcagtaataaatcgaagtacgagccaagaaacataaatcttactggtgatgacattcaagtgacatacctaatgtgcagaacctttgtgttaaaagcgcgcgaagttccaatatgtttcgaacatattgacgcttttctaacttgctttgctgtttcctttggaatcctgcaggtttcttgatttgcactaaactcggaacataagagcacacaagtgggcaacgtcttttattaaccggttctccgagatcaacttgt

SEQ ID NO: 144938 - DNA, 402 bp, Arabidopsis thaliana
agttaagagatccagccatggataagagctccctcgtctctgatttcctctcctttctcaatgcttttcccaccgcttttcatgccgtcgacgagtcaaagagaccgcttttgaaggctgggtatgaacagatttcagagagagatgattggaaactcgaagccggcaaaaaatacttcttcaccagagattactccactattgttggctttgccattggtcacaaatacgtagctggaaacgggttccatattattggagctcatactgatagtccgtgcctcaaattgaaacctgtatccaagataactaaaggtggatgcttggaggttggtgttcaaacatatggaggtggactgtggtacacctggtttgatcgtgacttgacttgtgcaagacgtg

SEQ ID NO: 144939 - DNA, 313 bp, Arabidopsis thaliana
gtttcattgaaaatttcaagaaccctagttaataacgataatgggttcgagagttgtggcttccttctttgttttcttaatcttcacggtcatcacattgcctcccacgatccaagcttgcactccttgtactcgtcctcatcctccggttccgaaacctccacaacacggcggtggtggaggtggtggtagcaagccgcctccacatcacggtggaaaaggtggttggtaacccccaccccacggtggtaaaggtggaggaccgccttatcatttttgaggaggaggtggtggttgtattttactttctatt

SEQ ID NO: 144940 - DNA, 322 bp, Arabidopsis thaliana
ggcccgttcggtgtcattaggccgcctttgaggggccagagacctcagggggaggaagaagaagaagaaggacgacacggacgacacggtaatggcttagaggagaccatctgtagcgccaggtgcaccgataacctcgatgatccgtctcgtgctgacgtgtacaagccacagctcggttacatcatcactctcaacagttacgatctccctatccttcgcttcattcgtctattagtcctccgtggatctattcgtcaaaactcaatggtgctttcacagtggaacgcgttcgttaacgccattctttacttgacagatt

SEQ ID NO: 144941 - DNA, 397 bp, Arabidopsis thaliana
caaaaagaaaatggttaagctcagcaatctcctcgttgcaaccttcggggttctcctcgtccttaacggctgccttgcgaggcagtcacttggggttcctcctcagctacagaacgagtgtaacctcgacaacctagatgttctccaagccaccgaaactatcaagagtgaagccggtcagatcgagtactgggaccacaaccaccctcagctccgatgtgttggtgtttccgttgctcgttatgtaattgaacaaggcggtctttacttgcccaccttcttcacttccccaaaaatttcctacgtcgttcaaggaacgggtatcagcggaagagtggtccctggatgtgccgagaccttcatggactcgcagccgatgcaaggacaacaacaaggc

SEQ ID NO: 144942 - DNA, 398 bp, Arabidopsis thaliana
gaatcccttgcctgtgcctccaaagagggcagagaataaggcgtccattttctcctgggggtttgctgagtttgaagctagggctgttttgagttgggtaggagatgaaccactgctcagaagctcctttatctcattcacaagcttttcatgagcattttcagggatcttgctattgccattctcatgcacttgttctggtgccttcttcacctcagctactggctttttttcttcaactgtagacagcatcaccatttcagctgttaccgcgctgagctgttctttcatacgtttctcagcagcctccctggaagtatctgtttgccactggacatcgtcatcatcttcttcactgtctgcttggtcattttcatcagacaggcttcgaggtggag

SEQ ID NO: 144943 - DNA, 390 bp, Arabidopsis thaliana
caaaaagaaaatggttaagctcagcaatctcctcgttgcaaccttcggggttctcgtcgtccttaacggctgccttgcgaggcagtcacttggggttcctcctcagctacagaacgagtgtaacctcgacaacctagatgttctccaagccaccgaaactatcaagagtgaagccggtcagatcgagtactgggaccacaaccaccctcagctccgatgtgttggtgtttccgttgctcgttatgtaattgaacaaggcggtctttacttgcccacctttttcactttcccaaaaatttcttacgtcgttcaaggaacgggtattatcttgaagattgtactctggatgtgccgagaccttttttgtttctcttattcttttcaaggtct

SEQ ID NO: 144944 - DNA, 399 bp, Arabidopsis thaliana
gaacttcaacaacaaggaatttgttgagcccaccaaaattcaacgatgggttgttgtcaatttctctgctcgctgtaatgtacgtcaagttgttgatgatctgataaaaattggaggatcaaaaggaattgaaattgcttctccctttcaagtgtttgaggagggtaatcaattccgccgtgctcctcctatgattcgtgttgagaacatgtttaaggacatccaatcgaaactccctggtgtcccacaattcatactatgtgtgctccctgacaaaaagaacagtgatctctatggtccatggaagaaaaaaaacttaactgaatttggcattgttactcaatgcatggctccaacgcggcaacctaatgatcagtatcttactaacttacttctgaa

SEQ ID NO: 144945 - DNA, 401 bp, Arabidopsis thaliana
  unsure (1)..(401): unsure at all n locations
cccacgcgtncgcccacgcgtncgcccacgcgtccgcccacgcgtccgaacatttgcccgaaaaaccctagaatcccaaaatagaatccctaaaagagaaagaaagcaaaaatggaggacacgaagccaccattgggaggtaacaacaatcctcagcagcagcagcaacaacaacaacttctctatcaacaccaactacaacaacaacagagacaacaacaaatgcttctattgcagcaattgcaaaaacaacaacagcaacaagcagcaatgtctagattcccgtcgaacattgacgtgcatctccggccaccggggttgattcagaaccgacccattaatcctccgcctcagcagaatcctacccctaaccctaatttgggacagcagacaccgaattt

SEQ ID NO: 144946 - DNA, 404 bp, Arabidopsis thaliana
cggacgcgtgggacctgataaggcatcaccttccttcagcattccaccattggcctagtaaacaaaacaaaacataaatacataaaaggttcaacatctaaaacaggaaaaagaagaagataacccatattctatgttaaacatgcatatacccttggttgtgcatccgacgaatcctgacccgcccctttgagaggaaggcctggaggtgcctctcccttcgctgcagcagcctgcacaggtgatttaattaaggattaatgacgggtcacaacgccaaacagaacacatacaatttcaatatcttgactttttgaacataaacgccttaataagaaaatgaagtgtatagcatgtcggaaggacaatagcaagcacaggcactaaaaacatcgactagttga

SEQ ID NO: 144947 - DNA, 388 bp, Arabidopsis thaliana
caaaagaaaaggttaagctcaccaatctcctcgtggcaaccttcggggttctcctcgtccttaacggctgccttgcgaggcagtcacttggggttcctcctcagctacagaacgagtgtaacctcgacaacctagatgttctccaagccaccgaaactatcaagagtgaagccggtcagatcgagtactgggaccacaaccaccctcagctacgatgtgttggtgtgtccgttgctcgatatgtaattgaacaaggcggactttacttgcccaccttcttcacttgctcaacaatttcctacgtcgttcaaggaacgggtatcagcggaagagtgtgccctggatgtgccgagaccttcatggactcgcagccgattcaaggacaaca

SEQ ID NO: 144948 - DNA, 392 bp, Arabidopsis thaliana
agaaaaatgggtcgagtctcatctattatctctttctctttgacactcttgatcctcttcaatggctacactgcccaacagtggcccaacgagtgccagctcgatcaactcaatgcgctcgaaccatcccaaatcatcaagagcgagggtggtcgcatcgaggtctgggaccaccatgcaccccagctccgttgctccggctttgcctttgagcgtttcgtcattgagcctcagggtcttttcttgcccactttcttgaacgccggcaaactcacgtttgttgttcacggaaggggtctaatgggaagagttattccgggatgcgccgagacgttcatggagtcaccggtatttggagaaggtcaaggttagggtcagagttaagggttccg

SEQ ID NO: 144949 - DNA, 380 bp, Arabidopsis thaliana
atgaactggccaagcaagcattgatattggagcatacatcttaggcctggaacctgagcaaaccaaggaaaagatcttcactcctaactgactcagatctaatggacagacatcagaatcgctctttctctctaaagacttaaacaccataatgccctcttcttgccgacaaagttagcctgaaaaaatcatgtttttatgctaactttgaccaacaaactctactctataacccacattgaccaaatgcgtgagatgtatgagacactaaactgattgcatggctcaatacgactcaagctttttcataccccatcccgataatctctggacagacagcagagactgcactcagcatgagcaatcattatcacgctcat

SEQ ID NO: 144950 - DNA, 392 bp, Arabidopsis thaliana
cgggactttgcaatatttgattgatcacaattcggtaaattccgtttactataggagttccaagggaattcattaaaggaatgtttccaataaaaattctttgttcttgcatattcctactggttttccaaattaatcccgcggatacatataattcagaagaatatgtaagtgattcatagacagcatctcgttcttttatcagaggttctaccaattgatatgtttccacaaataattgaaattcaatttcgtgatctatatcttcaatttttggaaacttagcaagttcttctattaaaccctgatcaataaaccgataaaacccttcaaattgtatctgattaaatccggttattgcagatgttccctctttttcattcccaagcatc

SEQ ID NO: 144951 - DNA, 359 bp, Arabidopsis thaliana
caaaaagaaaatggttaagctcagcaatctcctcgttgcaaccttcggggttctcctcgtccttaacggctgccttgcgaggcagtcacttggggttcctcctcagctacagaacgagtgtaacctcgacaacctagatgttctccaagccaccgaaactatcaagagtgaagccggtcagatcgagtactgggaccacaaccaccctcagctccgatgtgttggtgtttccgatgctcgatatgtaatagaacaaggcggcctttacttgcccaccttcttcacttccgcaaaaatttcctacgtcggtcaaggaactggtatcagcgtcagagtggatcctggatgtgccacgacct

SEQ ID NO: 144952 - DNA, 398 bp, Arabidopsis thaliana
gcttctcctatcttctacaagtacaaccctgtgaagacaatcaagaccaatgtcattggcacactgaacatgctaggtcttgccaagcgtgttggagcaaggattttgcttacctcaacctcggaggtatatggagatcctcttatccatccccagcccgagagctattggggaaatgtcaacccaattggtgttaggagctgttatgatgaaggcaagcgtgttgctgagaccttgatgtttgactaccacaggcagcatggaattgaaatccgcattgccagaatcttcaacacttatggtccacgcatgaacattgatgatggacgtgttgtaagcaactttattgcccaagcactccgtggtgaggcattgactgttcagaaaccagggacaca

SEQ ID NO: 144953 - DNA, 398 bp, Arabidopsis thaliana
tttttcttctttcataactattagaaacaaacataaattaaatcaaaggttcattagttttaaccccccacaaaaaaacatgggtagtgcaaaatcagccatgctgatcctcttagtagcaatggtcatcgcatcatgtgccacggccattgatatgtccgtggttttctacgacgataacaaccgtctccatagcgttttcgatgctgaggcctcgttaatcttcgagtcatggatggtcaaacatgggaaagtgtacgggtccgttgccgagaaggaacggcgtttgacgatttttgaggacaaccttcgttttatcaataaccggaacgctgagaatctcagttatcggcttggtttgaccgggtttgcggatttatcttttcatgagtataaag

SEQ ID NO: 144954 - DNA, 374 bp, Arabidopsis thaliana
gtctcttctcttctttcttttttcttaacacttttgatccttttccatggctacgcggctcaacagggtcggcagggtcagcagtttccgaacgagtgccagctcgaccagctcaatgcgctcgagccgtcacacgtactgaagagcgaggctggtcgcatcgaggtgtgggaccacctcgctccttagctccgttgctcaggtgtctcctttgcacgtaacatcatcgagtctaagggtctctacttgcccactttctttaacaccgagaagctcatttatatttgcttagggacatgcatctctagggaaaagtgatctggtatctgcgcgggaacattccaagtctcaacattatttcaaccacgctttta

SEQ ID NO: 144955 - DNA, 397 bp, Arabidopsis thaliana
atggcttcataaaatactcaacctctccggtcattcagtaacagttttgatgttcatacctgaacatgccaagcctcaggatcgttctcactaacagtaggagtatcagaaactcctaatatatctggaatcctatcaatccttaacaacgcatcgtcataggaagtcttaaacttcttgatcccgctaggctttgcagccttcaaccatctctcttcgaagttggtcagaacatcatatgcagccgggccatcaatcttactgtgtaagtcatgccacggttctcttggacattctgaaagattttcctgttgaaataataacatttgtttcagtacacaatcctattcagaataaaaagattgggtaccagatcattatttaagtaagagctcaa

SEQ ID NO: 144956 - DNA, 404 bp, Arabidopsis thaliana
  unsure (1)..(404): unsure at all n locations
gtaagcctcaaaagattctgcaaacagagaggaacaatcgccacgaaagaagcttaagagactttttggtttcatttgtttagtgggcaaccaaaaagtcaagaccttttgctttccagttcgaagaatctggcgtgttcaggtggattgattcttgcgatctgacccttctcatgattagtttccgatcttcgaatagaccaactgcgagattctcatctataactccgntttcctattcgatttcttatctctttctaccatccaacgtgttcttcatacgttacttcaattgctctcgatttcgcctcaaaatctgatcctctagtagcttgaagcaacccaaagtctcgttctttacgttcaattaggtcattttgaaaccctgttcttagaattaggaa

SEQ ID NO: 144957 - DNA, 391 bp, Arabidopsis thaliana
aaagaaaatggttaagctcagcaatctcctcgttgcaaccttcggggttcgcctcgtccttaacggctgccttgcgaggcagtcacttggggttcctcctcagctacagaacgagtgtaacctcgacaacctagatgttctccaagccaccgaaactatcaagagtgaagccggtcagatcgagtactgggaccacaaccaccctcagctccgatgtgttggtgtttccgttgctcgttatgtaattgaacaaggcggtctttacttgcccaccttcttcacttccccaaaaatttcctacgtcgttcaaggaacgggtatcagcggaagagtggtccctggatgtgccgagaccttcatggactcgcagccgatgcaaggtcatcaacat

SEQ ID NO: 144958 - DNA, 393 bp, Arabidopsis thaliana
cccaaatatgcataagcttttgttttctcttctctccgtcgtctcactctcatttgtcctcttcttccatggcgccgaggcacgccagcgagaggcgccgtttccaaacgcctgccatttcagccaaatcaacagcctcgcgcccgctcaggcgacgaagttcgaagccggtcagatggaagtatgggaccacatgagccctgagctccgatgcgccggtgtaacggtggctcgcatcacccttcagcccaattccattttcttgcccgctttctttagcccacctgcccttgcttacgttgtccaaggagaaggagttatggggacgattgcttctggttgtcctgagacttttgcagaagttgaaggatcatcaggaagaggaggaggagg

SEQ ID NO: 144959 - DNA, 397 bp, Arabidopsis thaliana
gaaaacagaagaaactatggcaactcaagccgccggaatcttcagccccgccataacaaccactacttccgccgtcaagaaactccacctcttctcatcaagccaccgtcccaagtctctctccttcaccaaaaccgccatccgcgccgagaaaacagagtcctcctctgctgccccagccgtgaaagaagctccagttggattcactcccccgcagctagacccaaacacaccatcaccaatcttcgccggaagcacaggaggtctcctccgtaaagcacaagtagaggaattttacgtgatcacatggaactcaccgaaagaacaaatctttgagatgccaacaggaggagctgcgataatgagagaaggaccgaatctattgaaactggcgagg

SEQ ID NO: 144960 - DNA, 398 bp, Arabidopsis thaliana
aaacaacaagaaaaaatggcaataaccaacaaattaatcataacacttcttctccttatctccatagctgtcgtccactgcttatccttccgtgtggagatcgacgagttcgagccaccacagcaaggagaacaagaaggtccccgtcgccgtcctggtggtggctctggcgagggatgggaggaagagtcgacgaatcatccataccacttcaggaagcggagtttcagtgattggttccagtcaaaggaaggttttgtgagagtgctgcctaagttcacaaaacatgcaccggctctctttcgaggaatcgagaactacagattctcgttggtggagatggagccaacaactttctttgtgcctcaccatttggatgccgatgctgtttttatagt

SEQ ID NO: 144961 - DNA, 404 bp, Arabidopsis thaliana
aaaaatgggtcgagtctcatctattatctctttctctttgacactcttgatcctcttcaatggctacactgcccaacagtggcccaacgagtgccagctcgatcaactcaatgcgctcgaaccatcccaaatcatcaagagcgagggtggtcgcatcgaggtctgggaccaccatgcaccccagctccgttgctccggctttgcctttgagcgtttcgtcattgagcctcagggtcttttcttgcccactttcttgaacgccggcaaactcacgtttgttgttcacggaaggggtctaatgggaagagttattccgggatgcgccgagacgttcatggagtcaccggtatttggagaaggtcaaggtcagggtcagagtcaagggttccgtgacatgcaccagt

SEQ ID NO: 144962 - DNA, 316 bp, Arabidopsis thaliana
aacaaaaagaaaatggttaagctcagcaatctcctcgttgcaaccttcggggttctcctcgtccttaacggctgccttgcgaggcagtcacttggggttcctcctcagctacagaacgagtgtaacctcgacaacctagatgttctccaagccaccgaaactatcaagagtgaagccggtcagatcgagtactgggaccacaaccaccctcagctccgatgtgttggtgtttccgttgctcgttatgtaattgaacaaggcggtctatacttgcccacctgttttacttgggcaaaaaatttctacgtcttttaat

SEQ ID NO: 144963 - DNA, 404 bp, Arabidopsis thaliana
aagaaaatggttaagctcagcaatctcctcgttgcaaccttcggggttctcctcggccttaacggctgccttgcgaggcagtcacttggggttcctcctcagctacagaacgagtgtaacctcgacaacctagatgttctccaagccaccgaaactatcaagagtgaagccggtcagatcgagtactgggaccacaaccaccctcagctccgatgtgttggtgtttccgttgctcgttatgtaattgaacaaggcggtctttacttgcccaccttcttcacttccccaaaaatttcctacgtcgttcaaggaacgggtatcagcggaagagtggtccctggatgtgccgagaccttcatggactcgcagccgatgcaaggacaacaacaaggccaaccatggca

SEQ ID NO: 144964 - DNA, 394 bp, Arabidopsis thaliana
gtgctcttagcctttactctatagttttatatcatatcaatcgacatggcgaatgtggaccgtgatcggcgtgtgcatgtagaccgtactgacaaacgtgttcatcagccaaactacgaagatgatgtcggttttggtggctatggcggttatggtgctggttctgattataagagtcgcggcccctccactaaccaaatcttggcacttatagcacgagttcccattggtggcacactgctaaccctagctggactcactctagccggttcggtgatcggcttgctagtctccatacccctcttcctcctcttcagtccggtgatagtcccggcggttctcactattgggcttgctgtgacgggaatctaggcttctggtttgtttgggttga

SEQ ID NO: 144965 - DNA, 355 bp, Arabidopsis thaliana
cccacgcgtccgatttatatatatgtaataatatatagatactagcattattcctgtgcttaaaataaaagttgacatacaagcactcaatttgatctatttcttgatttccccgtgaattgtatgtttataacaatagggacagaattttctcaattccaatcgactaggggtgttatgccgattcttttgagtaatatatctggaaattcccgcggcttctttcttaatatcatttcgaacacaactggtacattccaaaataattgttactcgaacatctttacccttggccatgaaacctcctttggatttatgattcacctcaatcttctattttaattttaggatccag

SEQ ID NO: 144966 - DNA, 401 bp, Arabidopsis thaliana
ggttattgctcaagctttgaagattgatcttcagacagcgcagcaacttcagaaccaagatgacaaccgtggaaacattgtccgagtccaaggcccgttcggtgtcattaggccgcctttgaggggccagagacctcaggaggaggaagaagaagaagaaggacgacacggacgacacggtaatggcttagaggagaccatctgcagcgccaggtgcaccgataacctcgatgatccgtctcgtgctgacgtgtacaagccacagctcggttacatcagcactctcaacagttacgatctccccatccttcgcttcatccgtctctcagcccttcgtggatctatccgtcaaaacgcaatggtgcttccacagtggaacgcaaacgcgaacgccattcttt

SEQ ID NO: 144967 - DNA, 371 bp, Arabidopsis thaliana
atcatcaaaatgctatttctcacttgcatgtctcttgcatcccaaatacaagtcgtctcgtggcaagcacatatgagaagaatggaaaagctgccgcaattcattacggcactggtgcaattgctggtttttttagtaatgatgccgtcacagttggcgatttagttgtcaaggatcaggagtttatcgaggcaaccaaggagcctggtataacatttgttgtagctaaatttgatggtatccttggtcttggattccaagagatctctgttggaaaagctgctcctgtttggtacaacatgctcaagcaaggccttatcaaggagccggctttgttattttgtcttaaccgtcatgcatttgaagaagaa

SEQ ID NO: 144968 - DNA, 391 bp, Arabidopsis thaliana
ccatttcttaaatttctctccctaaatattccgagttcttgatttttgataacttgaggtcaaaatgggagtatactcgagagcggttgcgttttcggtctttgtgtcgtttctgctgtttttcactgcttattctaagagaaatgatggaacattcagagttggcctgaaaaaactgaagttggatcctaacaaccgactcgcaacacgctttggttccaagcaagaagaggccttgagatcttctttgcgttcgtacaacaacaatcttggtggtgattctggagatgctgatattgtcccgctcaagaattacttggatgctcagtactatggtgagattgctattggtactccaccgcagaagttcactgtcatttttgataccgga

SEQ ID NO: 144969 - DNA, 393 bp, Arabidopsis thaliana
gcggtctttacttgcccaccttcttcacttccccaaaaatttcctacgtcggtcaaggaacgggtatcagcggaagagtggtccctggatgtgccgagaccttcatggactcgcagccgatgcaaggacaacaacaaggccaaccatggcaaggacgacagggacaacaaggccaaccatgggaaggacagggacaacagggacaacaaggaagacaaggccaaccatgggaaggacagggacaacagggacaacaaggacgacagggacaacaaggccaaccatgggaaggacagggacagcagggacaacaagggttccgtgacatgcaccagaaggtggaacatgtgagacgcggagacttctttgccaacactccaagctctgcccact

SEQ ID NO: 144970 - DNA, 391 bp, Arabidopsis thaliana
aaaaagaaaatggttaagctcagcaatctcctcgttgcaaccttcggggttctccgggtccttaacggctgccttgcgaggcagtcacttggggttcctcctcagctacagaacgagtgtaacctcgacaacctagatgttctccaagccaccgaaactatcaagagtgaagccggtcagatcgagtactgggaccacaaccaccctcagctccgatgtgttggtgtttccgttgctcgttatgtaattgaacaaggcggtctttacttgcccaccttcttcacttccccaaaaattttctacgtcgttcaaggaacgggtatcagcggaagagtggtccctggatgtgccgagacctttatggactcgcagccgatgcaaggacaacaac

SEQ ID NO: 144971 - DNA, 400 bp, Arabidopsis thaliana
attgagtgaaaatattttttttaaaatggttgtggtgaacaaaacgaaggtcttattgcttcttctctctctatgtctcaccctcgacctctcctccgcacaactccgccgtaacttctacgccggaagttgtcctaacgtcgaacaaatcgttagaaacgccgtacagaaaaaagtccaacaaactttcaccaccattcccgccactctacgcctctatttccatgattgtttcgtcaatgggtgtgatgcatcagtgatgatagcgtcaacaaataataataaggcggagaaggatcatgaggaaaatttatcgttggccggagatggattctacaccgtcgttaaagctaaagaagctcttgacgctgacccaaattgtcgtaaccaaatttcttgc

SEQ ID NO: 144972 - DNA, 405 bp, Arabidopsis thaliana
cacaagtaattaactaacaacaaatggcgaacaagctcttcctcgtctgcgcagctctcgccctgtgtttcatcctcaccaacgcttccgtctatcgcacggttgtcgagttcgacgaagatgacgccagtaaccccataggcccaatacagaaatgtcagaaggagtttcagcaagaacagcacctaagagcttgccagagatggatgcgcaagcaaatgtggcaaggacgtggtggtggtccttccctcgacgatgagttcgatatggaagacgacatcgagaacccgcagagacgacagctactccagaagtgctgcagcgagcttcgccaagaagagccagtttgcgtttgccccaccttgagacaagctgccaaggtcgttagattccagggacagtaac

SEQ ID NO: 144973 - DNA, 402 bp, Arabidopsis thaliana
atgcgactcagccagatcttggtcttaccatccttccaaggaaaaggactcggaagctatcttatggaggtagtaaacaacgtggccataacagaaaacgtttacgatttgacagttgaggagccatctgaaaagttccaacacatccgcacttgcatagacataaaccgcttgcgcagtttcgatccaatcaaaccagacattgattcagctgttcagactctcacaaaaggaaagctatcaaagaaagctcagatacctcgattcaccccgcctctgaacgccattgagaaagtccgcgaatctctgaagatcaacaagaaacagttcctcaaatgctgggagattttgatataccttgctcttgatcctattgacaagtacatggaagattacacatca

SEQ ID NO: 144974 - DNA, 408 bp, Arabidopsis thaliana
gaaaatggttaagctcagcaatctcctcgttgcaaccttcggggttctcctcgtccttaacggctgccttgcgaggcagtcacttggggttcctcctcagctacagaacgagtgtaacctcgacaacctagatgttctccaagccaccgaaactatcaagagtgaagccggtcagatcgagtactgggaccacaaccaccctcagctccgatgtgttggtgtttccgttgctcgttatgtaattgaacaaggcggtctttacttgcccaccttcttcacttccccaaaaatttcctacgtcgttcaaggaacgggtatcagcggaagagtggtccctggatgtgccgagaccttcatggactcgcagccgatgcaaggacaacaacaaggccaaccatggcaaggacg

SEQ ID NO: 144975 - DNA, 412 bp, Arabidopsis thaliana
ctttaagcctctcaacgtgttttttatatatattttgaaaatcttttacgccttaagaggatctacgataattaaaaaaaaaaatggcaacggaatgcattgcaacggtccctcaaatattcagtgaaaacaaaaccaaagaggattcttcgatcttcgatgcaaagctccttaatcagcactcacaccacatacctcaacagttcgtatggcccgaccacgagaaaccttctacggatgttcaacctctccaagtcccactcatagacctagccggtttcctctccggcgactcgtgcttggcatcggaggctactagactcgtctcaaaggctgcaacgaaacatggctttttcctaatcactaaccatggtgtcgttgagagcctcttgtctcgtgcctatctgcatat

SEQ ID NO: 144976 - DNA, 397 bp, Arabidopsis thaliana
cacacatagcaaaaaatggcaaacaagttgttcctcgtctgcccagctctgggtctctgcttcctcggcaccaacgcttccatctaccgcaccgtcgttgagttcgaagaagatgacgccactaaccccataggcccaaaaatgaggaaatgccgcaaggagtttcagaaagaacaacacctaagagcttgccagcaattgatgctccagcaagcaaggcaaggccgtagcgatgagtttgatttcgaagacgacatggagaacccacagggacaacagcaggaacaacagctattccagcagtgctgcaacgagcttcgccaggaagagccagattgtgtttgccccaccttgaaacaagctgccaaggccgttagactccagggacagcaccaac

SEQ ID NO: 144977 - DNA, 361 bp, Arabidopsis thaliana
ccaaaaccaactcgaccgcaaccctagagtgttccatttggccggaaacaaccagcagggaggctttggcggttcacagcaacaacaagaacagaaaaacttgtggagcgggttcgacgcacaggtcatagctcaagcattgaaaattgacgttcagttggctcagcagcttcagaaccaacaagacagcagaggaaacatcgttcgtgttaagggacctttccaggtcgtgaggccacctctaagacagccctactagagcgaggagtggagacacccacgtagcccacagggcaacggcctttgggagactatctgcagcatgaggtcccacgagaacattgacgaccctgctcgtgct

SEQ ID NO: 144978 - DNA, 395 bp, Arabidopsis thaliana
aaatttcctacgtcgttcaaggaacgggtatcagcggaagagtggtccctggatgtgccgagaccttcatggactcgcagccgatgcaaggacaacaacaaggccaaccatggcaaggacgacagggacaacaaggccaaccatgggaaggacagggacaacagggacaacaaggaagacaaggccaaccatgggaaggacagggacaacagggacaacaaggacgacagggacaacaaggccaaccatgggaaggacagggacagcagggacaacaagggttccgtgacatgcaccagaaggtggaacatgtgagacgcggagacgtctttgccaacactccaggctctgcccactggatctacaactcaggagaacagccacttgtcattatc

SEQ ID NO: 144979 - DNA, 320 bp, Arabidopsis thaliana
aatcgtccgaaaaaagaaaatggttaagctcagcaatctcctcgttgcaaccttcggggttctcctcgtccttaacggctgccttgcgaggcagccacttggggttcctcctcagctacagaacgagtgtaacctctacaacctagatgttctccaagccaccgaaactatcaagagtgaagccggtcagatcgagtactgggaccacaaccaccctcagctccgatgtgttggtgtttccgttgctcgttatgtaattgaacaaggcggtctttacttgtccaccttttttactttcccaaaaatttcctacttcgttc

SEQ ID NO: 144980 - DNA, 381 bp, Arabidopsis thaliana
aatgaagtcttgtctagctacttttgctctcgcagtgttagtaacacaaggaagcatttttagtttgtgtttggcctcctctgcttctacaaactctgttcctaattggtttcatcattggccgccgtttaaatggggaccaaaatttccatattctccacctaaaccgccgccaatcgagaaatatcctccaccggtgcagtatccaccaccgatcaagaagtatccaccgccaccatacgagcatccaccggtgaagtatccaccaccgatcaagacttaccctcatccgccggtgaagtatcctccaccagaacagtatccaccgccgattaagaagtattcttcaccagaacagtatccaccgccgatttagaagta

SEQ ID NO: 144981 - DNA, 401 bp, Arabidopsis thaliana
atttttagggttttttcagtatctcgcgaggttttacatagatttctccattatggattcgatgatgaatcagaagactgttttggctgtgacggatgatgtggtgttacctgttagctctgttttagctataatgaaagagcttggaaaggaagtgattgagagttttgatcctctgattattactcaagcatccacaataaatcagtttcctttggatgcttcctctgtggaggcggtgctagccatttccaaaacatctgatttcccaagtgataaaatatgtggtgagttctcaagaatcttgaagcctggtggtacggtttttgtgtgcaaagttttggagggtgaaacgggagaaattcaacagaccattcaaaggagagtgacattggctggtt

SEQ ID NO: 144982 - DNA, 395 bp, Arabidopsis thaliana
caatcatctgtccttggggatccgacattaatcctctcatacctactaattgatgtacttgagatgcatttcccctagctcccgaaaaagacatcatatggactggattgaaggggtccgtcatcctaaaattaggattcatttcttgtcgcaaatattcacttgtagcataccatatctcaatagattggcgtaatttttctaccgcatgtacattcccataatgatggtgtttttccaaaatccaactttgttgttcagcatcttggacaagccagcccttaaaaggtatcgttaaaagatcatcaattcctaatgaaatggatgtagcagtggcttgctggaaacccagagtctttacttgatctaggatgtgtgatgtatatgccatcccc

SEQ ID NO: 144983 - DNA, 408 bp, Arabidopsis thaliana
  unsure (1)..(408): unsure at all n locations
atctcgcagaaaagattcatcccatctttaacccttgttgctttacagtaaccattaatgagtgtattaaacgttgagcagctcttggatacctttctcgcctgagctagtttgttctgcttgcagagtccatggatcattgagttataggttatagtatcggggactagacctctacggatcatctctgcatataatttttcagccctacctaacgagctgaatctgatcatcatattgtaagtttgaacatcaggttgcaatccactgatgaggagattagtgaatatattccctgcttcgtcaaacttaccagccttgcacagtccatggatgatgatgttataaccagctgtatccatatccatgttactctcccgcatgaccttaaacatnttcaaagccttt

SEQ ID NO: 144984 - DNA, 296 bp, Arabidopsis thaliana
ctctatttgctcatctccctcgatttcgaacccctaatcttgagatggcgggcggagaagaagctctcgaaccctatgagggatattaaggtccagaagctagttcttaacatctctgttggtgagagtggtgatcgtctcactcgtgcctccaaggttcgttctttctttccccttaagagtactcactatatggcttaggaaatttatttgagactttacgtcttagctactctgaaatgggttggttaggtacatagatcataggtgctgtatacagagttttggttttttgt

SEQ ID NO: 144985 - DNA, 396 bp, Arabidopsis thaliana
attctctcttcctcatatatttccaaaacaatacctttcttcttctctcttcagaagaaacgagagattcgagtgatgttttatgaactactactagtgtttttttccgtgaagtaaagagaaacggtaactttttctatttgttttcaagaaaagccaaagaaaaaaagaatttttaatatactctgttttttgcaatgattttgttttgtgaaatttttctcggagaagaaagtaatttagaagacggagagtggcaaaacgaaatataaaaaaaaaagttttcaatttcttttaagaaaaaaaaaagctttttcccttcttaaaacccttcctctgtttcagaaacagagacataagaagaaaatagatcacaagctaattgcgttctcttct

SEQ ID NO: 144986 - DNA, 391 bp, Arabidopsis thaliana
atgttctccaagccaccgaaactatcaagagtgaagccggtcagatcgagtactgggaccacaaccaccctcagctccgatgtgttggtgtttccgttgctcgttatgtaattgaacaaggcggtctttacttgcccaccttcttcacttccccaaaaatttcctacgtcgttcaaggaacgggtatcagcggaagagtggtccctggatgtgccgagacctttatggactcgcagccgttgcaaggacaacaacaaggccaaccatggcaaggacgacaggtacaacatggccaaccatgggaaggacagggacaacagggacaacacggaagacatggccaaccatgggaaggacagggacaacagggtcaacaaggacgtcagggaca

SEQ ID NO: 144987 - DNA, 429 bp, Arabidopsis thaliana
aaatcctcggatacaatggagaacacttcaacaagagtcttgtaagggaaattacaatggacaataaaaacgtatatcaaaacatatatagagaaccagccaaggaagaagaagagattaggaattagacaaattaatcccattactatccctaagccaacaatgaaccaaaaatgtttcatcaccatttcaaatttatggtcaggcgttggataaaaaagatgggaaattgcaatgaggccaatgatggacgacatggtaaagaagaaaacctccacaacttttcccaacccgagtgtcataacacagataaacaccacaaatgccagttccgaccacgctctttcagcaggactacactcttctggaggaggactagaggaggatggcatccaaccccacatctcctctactttgatcgatgcaccg

SEQ ID NO: 144988 - DNA, 427 bp, Arabidopsis thaliana
cactaatctccaagagttgaatcttcgtcgttgtacaagtctggtgagaatccattcttctattgagaatgcgaccaatctccggagcttcactctctgtgattgctcaaatcttgtggagcttccctcttttgggaatgcaacgaaacttgagatactagatcttgaaaattgttcgagtcttgtgaagctcccaccatctatcaatgccaataatctccaggtattgtctctaagaaattgttcacgtgttgtggagctccccgctatcgagaatgcgactaatctccgtgaattgaagctccaaaattgctcaagtctaatagagctccctttttctattggaactgccacaaatctgaagcaattgaaaattagcggatgctcaagtcttgtgaaactcccatcctctattgaaaaactcacc

SEQ ID NO: 144989 - DNA, 407 bp, Arabidopsis thaliana
gccacttgtcatcatcgctcttctcgacatcgccaactaccaaaaccaactcgaccgcaaccctagagtgttccatttggccggaaacaaccagcagggaggctttggcggttcacagcaacaacaagaacagaaaaacttgtggagcgggttcgacgcacaggtcatagctcaagcattgaaaattgacgttcagttggctcagcagcttcagaaccaacaagacagcagaggaaacatcgttcgtgttaagggacctttccaggtcgtgaggccacctctaagacagccctacgagagcgaggagtggagacacccacgtagcccacagggcaacggccttgaggagactatctgcagcatgaggtcccacgagaacattgacgaccctgctcgtgctgacgtgt

SEQ ID NO: 144990 - DNA, 311 bp, Arabidopsis thaliana
aaactaataaaacggccaggatccgaaactatctaagaatacactaggaaataagttataatctgagggacttcgcctacattcacttatacattccttgaaatataccaagtacaaacgccaaaatatatagtaccgataagtttcttctacgcgatgcgagatgataccaaagcttacccattctggagtccatgcaggtaaagcaaaaggttcaggtttgaacaatggatcagcgtcacactgtagccagccagtggacaaatcctgcatcatgattcaaagatttactaataactccctaaaagatc

SEQ ID NO: 144991 - DNA, 387 bp, Arabidopsis thaliana
gataaaaatggctcgagtctcttctcttctttctttctccttaacacttttgatccttttccatggctacgcggctcaacagggtcagcagggtcagcagtttccgaacgagtgccagctcgaccagctcaatgcgctcgagccttcacacgtactgaagagcgaggctggtcgcatcgaggtgtgggaccaccacgctcctcagctccgttgctcaggtgtctcctttgcacgttacatcatcgagtctaagggtctctacttgccctctttctttaacaccgcgaagctctccttcgtgggtaaagggacgaggtcttatgggaaaagtgatccctggatgcgccgaaacattccaagactcatcaaagtttcaaccacgcttcg

SEQ ID NO: 144992 - DNA, 398 bp, Arabidopsis thaliana
gcgaaatataagaaataacaaaatggctcgagtctcttctcttctttctttcttcttaacacttttgatccttttccatggctacgcggctcaacagggtcagcagggtcagcagtttccgaacgagtgccagctcgaccagctcaatgcgctcgagccgtcacacgtactgaagagcgaggctggtcgcatcgaggtgtgggaccaccacgctcctcagctccgttgctcaggtgtctcctttgcacggtacatcatcgagtctaagggtctctacttgccctctttctttaacaccgcgaagctctctttcgtggctaagggacgaggtcttatgggaaaagtgatccctggatgcgccgaaacattccaagactcatcagagttccaaccacgct

SEQ ID NO: 144993 - DNA, 387 bp, Arabidopsis thaliana
aacaaacaaaaagaaaatggttaagctcagcaatctcctcgttgcaaccttcggggggcttcttggccttaacggttgccttgcgaggcaacaattttttttttttttattattttttgaacgagtgttttttttaccatcttatttttttcttgctgttatattgtattttatttcttttgttttttttatttagttttttttttcatctatattttttattttcgattattattttttttctttttgattgttttatatttttcaattaatattttttttttttatttagattacttttttctttttttcaattctttttattttttttattatttcttttttttttttgatttctttatcgtatttaaattttttatattattt

SEQ ID NO: 144994 - DNA, 374 bp, Arabidopsis thaliana
cggacgcgtgggaaagaaaatggttaagctcagcaatctcctcgttgcaaccttcggggttctcctcgtccttaacggctgccttgcgaggcagtcacttggggttcctcctcagctacagaacgagtgtaacctcgacaacctagatgttctccaagccaccgaaactatcaagagtgaagccggtcagatcgagtactgggaccacaaccaccctcagctccgatgtgttggtgtttccgtagctcgttatgtaattgaacaaggcggtctttacttgcccaccttcttcactttcccaaaaatttcctacgtcgttcaaggtatcggttttatcggaagagtggtccctgtgatgtgccgtgtccttcatg

SEQ ID NO: 144995 - DNA, 414 bp, Arabidopsis thaliana
ctcatctctctcatttcgaaaccatggttgagccggcgaatactgttggtcttccggtgaacccgactccgttgctgaaagatgagctcgatatcgtgattccgactatcagaaacctcgatttcctcgagatgtggaggccttttcttcagccttaccatctgatcatcgtccaggacggagatccatcgaagaagatccatgtccctgaaggttacgactacgagctctacaacaggaacgacattaaccgaatcctcggacctaaggcttcttgtatctcgtttaaagattctgcttgccgacgctttgggtacatggtgtctaagaagaagtatatctttaccattgatgacgattgcttcgttgccaaagatccatcaggcaaagcagtgaacgctcttgagcaacaca

SEQ ID NO: 144996 - DNA, 370 bp, Arabidopsis thaliana
aattgcttttctccgtcactgagtaccttgcctctcgagctcccaatcttaagaggattgagcttaaggcaagatggtaagaatcagtgttcttaacgatgctctcaagagcatgtacaatgctgagaaacgaggcaagaggcaggtcatgatcaggccttcctccaaagtgattatcaagtttctgattgtcatgcagaagcacggttacattggtgagtttgagtatgtcgatgaccacagatctggcaagatcgtcgttgaattgaacggaaggttgaacaagtgtggtagtatcagcccacgttttgatgttggtgtcaaggaaattgaagggttggcttgcccgttggttccttctagacagttt

SEQ ID NO: 144997 - DNA, 418 bp, Arabidopsis thaliana
cagggacaacagggacaacaaggacgacagggacaacaaggccaaccatgggaaggacagggacagcagggacaacaagggttccgtgacatgcaccagaaggtggaacatgtgagacgcggagacgtctttgccaacactccaggctctgcccactggatctacaactcaggagaacagccacttgtcatcatcgctcttctcgacatcgccaactaccaaaaccaactcgaccgcaaccctagagtgttccatttggccggaaacaaccagcagggaggctttggcggttcacagcaacaacaagaacagaaaaacttgtggagcgggttcgacgcacaggtcatagctcaagcattgaaaattgacgttcagttggctcagcagcttcagaaccaacaagacagcagaggaaaca

SEQ ID NO: 144998 - DNA, 319 bp, Arabidopsis thaliana
caaaaagaaaatggttaagctcagcaatctcctcgttgcaaccttcggggttctcctcgtccttaacggctgccttgcgaggcagtcacttggggttcctcctcagctacagaacgagtgtaacctcgacaacctagatgttctccaagccaccgaaactatcaagagtgaagccggtcagatcgagtactgggaccacaaccaccctcagctccgatgtgttggtgtttccgttgctcgatatgtaattgaacatggcggtctttacttgaccaccttttttacttcctcaaaaatttccttcgtcgatcaaggtact

SEQ ID NO: 144999 - DNA, 426 bp, Arabidopsis thaliana
tgctgctgcttcttcacaagaggttgaagaatgtcagctccgaaatcgggtggtgatccactaccacatccgccgaaagaacagcttccagatatctcttactgcattacaagtcctcctccatggcctgaggctgttctgcttgggtttcaacactaccttgtgatgcttggaacaacagttctgattccatcggctcttgttccacaaatgggaggtagaaatgaagagaaggcaaagctgatccagacaatactgtttgtagctggattgaacacattgctccaaactgtgtttggaactagattacctgctgttattggagcatcttatacatttgtcccagttactatctcaatcatgctttctgggagattcaatgacgttgcagatccagttgagcgatttaagaggataattcgggca

SEQ ID NO: 145000 - DNA, 345 bp, Arabidopsis thaliana
cggtcgaccacgcgtccgaacaaaaagaaaatggttaagctcagcaatctcctcgttgcaaccttcggggttctcctcgtccttaacggctgccttgcgaggcagtcacttggggttcctcctcagctacagaacgagtgtaacctcgacaacctagatgttcttcaagccaccgaaactatcaagagtgaagccggtcagatcgagtactgggaccacaaccaccctcagcttcgatgtgttggtgtttccgttgctcgttatgtaattgaacaaggcggtctttacttgcccacctttttcactttcccaaaaatcttctacgtcgttcaaggaacgggtatt

SEQ ID NO: 145001 - DNA, 369 bp, Arabidopsis thaliana
aaaaatggctcgagtctcttctcttctttctttctccttaacacttttgatccttttccatggctacgcggctcaacagggtcagcagggtcagcagtttccgaacgagtgccagctcgaccagctcaatgcgctcgagccttcacacgtactgaagagcgaggctggtcgcatcgaggtgtgggaccaccacgctcctcagctccgttgctcaggtgtctcctttgcacgttacatcatcgagtctaagggtctctacttgccctctttctttaacaccgcgaagctctccttcgtggctaaaggacgaggtcttatgggaaaagtgatcccttgatgcgccgtaacattccaagacttatcagagtt

SEQ ID NO: 145002 - DNA, 429 bp, Arabidopsis thaliana
aaacaaaaagaaaatggttaagctcagcaatctcctcgttgcaaccttcggggttctcctcgtccttaacggctgccttgcgaggcagtcacttggggttcctcctcagctacagaacgagtgtaacctcgacaacctagatgttctccaagccaccgaaactatcaagagtgaagccggtcagatcgagtactgggaccacaaccaccctcagctccgatgtgttggtgtttccgttgctcgttatgtaattgaacaaggcggtctttacttgcccaccttcttcacttccccaaaaatttcctacgtcgttcaaggaacgggtatcagcggaagagtggtccctggatgtgccgagaccttcatggacttgcagccgatgcaaggacaacaacaaggccaaccatggcaaggacgacagggacaaca

SEQ ID NO: 145003 - DNA, 429 bp, Arabidopsis thaliana
cttggagtatgtcaggctcagtgccactcgtggcgttctccagggtaatgcgatggtgcttcctaaatacaacatgaacgctaacgagatcttgtactgcactggaggacaaggaaggatccaagtggtcaacgacaacggacagaacgtgttggaccaacaggtgcagaagggacagctcgtggtcatcccacaagggttcgcatacgttgtccagtcccacggaaacaagttcgagtggatctctttcaaaactaaatgaaaacgcaatgatcagcactttggcgggtagaacctcgctcttgagggcattgccattggaggtcatatcaaatggttttcagatctctcccgagggagctaggaagatcaagttcaacacacttgagaccactttgacccgcgctgtcggttggcaacaacaacagt

SEQ ID NO: 145004 - DNA, 426 bp, Arabidopsis thaliana
aaaagaaaatggttaagctcagcaatctcctcgttgcaaccttcggggttctcctcgtccttaacggctgccttgcgaggcagtcacttggggttcctcctcagctacagaacgagtgtaacctcgacaacctagatgttctccaagccaccgaaactatcaagagtgaagccggtcagatcgagtactgggaccacaaccaccctcagctccgatgtgttggtgtttccgttgctcgttatgtaattgaacaaggcggtctttacttgcccaccttcttcacttccccaaaaatttcctacgtcgttcaaggaacgggtatcagcggaagagtggtccctggatgtgccgagaccttcatggactcgcagccgatgcaaggacaacaacaaggccaaccatggcaaggacgacagggacaacaag

SEQ ID NO: 145005 - DNA, 298 bp, Arabidopsis thaliana
ccgcaaccctagagtgttccatttggccggaaacaaccagcagggaggctttggcggttcacagcaacaacaagaacagaaaaacttgtggagcgggttcgacgcacaggtcatagctcaagcattgaaaattgacgttcagttggctcagcagcttcagaaccaacaagacagcagaggaaacatcgttcgtgttaagggacctttccaggtcgtgaggccacctctaagacagccctacgagagcgaggagtggagacacccacgtagcccacagggcaacgggccttgaagagac

SEQ ID NO: 145006 - DNA, 359 bp, Arabidopsis thaliana
cggacgcgtgggcggacgcgtgggcggacgcgtgggcggacgcgtgggtccaggtgtacacacacacgctaaaaaaaaccaaggaagaagaagaacttctgccatgtagtatcatacgaaatcttaaatgctatatatatattttcaactttcatttttaaattactatacaacttggtgtcaattaattcaaaaactacacttcattgttcgtttttaagatcttaattactactctctaactttttttaatctattttctagaaaatacattttgttacaatagattaaaatatgttttatatgaataatttattaatgtatattattaatgtattggaaaattcaaaatacaaaca

SEQ ID NO: 145007 - DNA, 437 bp, Arabidopsis thaliana
cacacatagcaaaaaatggcaaacaagttgttcctcgtctgcgcagctctcgctctctgcttcctcctcaccaacgcttccatctaccgcaccgtcgttgagttcgaagaagatgacgccactaaccccataggcccaaaaatgaggaaatgccgcaaggagtttcagaaagaacaacacctaagagcttgccagcaattgatgctccagcaagcaaggcaaggccgtagcgatgagtttgatttcgaagacgacatggagaacccacagggacaacagcaggaacaacagctattccagcagtgctgcaacgagcttcgccaggaagagccagattgtgtttgccccaccttgaaacaagctgccaaggccgttagactccagggacagcaccaaccaatgcaagtcaggaaaatttaccagacagccaagcactt

SEQ ID NO: 145008 - DNA, 423 bp, Arabidopsis thaliana
aaacatacacaagtaattaactaacaacaaatggcgaacaagctcttcctcgtctgcgcagctctcgccctgtgtttcatcctcaccaacgcttccgtctatcgcacggttgtcgagttcgacgaagatgacgccagtaaccccataggcccaatacagaaatgtcagaaggagtttcagcaagaacagcacctaagagcttgccagagatggatgcgcacgcaaatgtggcaaggacgtggtggtggtccttccctcgacgatgagttcgatatggaagacgacatcgagaacccgcagagacgacagctactccagaagtgctgcagcgagctttgcccagaaaagccagtttgcgtttgccccaccttgagacaagctgccaaggccgtttgattccagggacagcaacaccaaccagag

SEQ ID NO: 145009 - DNA, 424 bp, Arabidopsis thaliana
  unsure (1)..(424): unsure at all n locations
gtttgattagatatacccgttttactgttttctttgtccgagtgaaagtctgaagctttatatcttatgatgcttatggagagctctttgttctgttgtgtgctctattcctgataaaaccatgtgatgcttgctggttgatagcttcaattgattgggcctttccgttaattcgggatgttagcaactagcacagtaattgcaggtgaaggtggtgtcatggagttgatgttaatgagtgctttgccaagtcacttcttcaagataagagaacttctatcctttgttgaatcaggctctgggtgttattttcttcattntcttgatattgttgatattagtacaagaacacgctgaatctgacagacatattttcatggctagctagcttctcgccgctcatcatgtgtgcccaagttacact

SEQ ID NO: 145010 - DNA, 404 bp, Arabidopsis thaliana
cggacgcgtgggaaaatacatcatcgttttcttcttaattaatagaatggtcaaataaaaaatcgtctccaatctttttctctctctggatttgccaataaattggggataaccagctaccaaactcattctcacaaagtcataacagtcgtttaaagtctgatccttttttatctttctttagtgtgtgaaaagagaaatacagttatggcggagatctcgggaaacggtggtgatgctagagactgtgctgaggtggtttttcttatggaagaatgacgtactacatcttcatcatgttatttatatacccttgttgttacatgatcttcttctttctaacgtccgacccattttttactaaagcttgatttttgtttgtttagaaaacatttttttttttt

SEQ ID NO: 145011 - DNA, 385 bp, Arabidopsis thaliana
aagaggaagaaaaatgggtcgagtctcatctattatctctttctctttgacactcttgatcctcttcaatggctacactgcccaacagtggcccaacgagtgccagctcgatcaactcaatgcgctcgaaccatcccaaatcatcaagagcgagggtggtcgcatcgaggtctgggaccaccatgcaccccagctccgttgctccggttttgtctttgagcgtttcgtcattgagcctcagggtcttttcttgcccactttcttgaacgccggcaaactcacgtttgttgttcacggaaggggtctaatgggaagagttattccgggatgcgccgagacgttcatggagtcaccggtatttggagaaggtcaaggtcagggtcag

SEQ ID NO: 145012 - DNA, 405 bp, Arabidopsis thaliana
atttctcattagcttacaatggcggatacacaccgtgtcgaccgtactgatagacactttcaatttcagtcgccctatgaaggcggccgaggtcaaggtcagtatgaaggtgaccgtggttacggtggtggcggttacaagagcatgatgcctgaaagtggcccatctagtacccaagtattgtccctgttgattggagtccctgtcgtcggttcgctacttgccttggctggattacttttagctggttcggtgatcggcttaatggttgctttaccactatttctcctcttcagcccggttatagtcccagcggctctaactatcgggcttgcaatgacaggctttttagcctcggggatgttcggtctaaccgggcttagcttaatcttatgggtcatgaac

SEQ ID NO: 145013 - DNA, 424 bp, Arabidopsis thaliana
aagaaaatggttaagctcagcaatctcctcgttgcaaccttcggggttctcctcgtccttaacggctgccttgcgaggcagtcacttggggttcctcctcagctacagaacgagtgtaacctcgacaacctagatgttctccaagccaccgaaactatcaagagtgaagccggtcagatcgagtactgggaccacaaccaccctcagctccgatgtgttggtgtttccgttgctcgttatgtaattgaacaaggcggtctttacttgcccaccttcttcacttccccaaaaatttcctacgtcgttcaaggaacgggtatcagcggaagagtggtccctggatgtgccgagaccttcatggactcgcagccgatgcaaggacaacaacaaggccaaccatggcaaggacgacagggacaacaag

SEQ ID NO: 145014 - DNA, 425 bp, Arabidopsis thaliana
aaagaaaatggttaagctcagcaatctcctcgttgcaaccttcggggttctcctcgtccttaacggctgccttgcgaggcagtcacttggggttcctcctcagctacagaacgagtgtaacctcgacaacctagatgttctccaagccaccgaaactatcaagagtgaagccggtcagatcgagtactgggaccacaaccaccctcagctccgatgtgttggtgtttccgttgctcgttatgtaattgaacaaggcggtctttacttgcccaccttcttcacttccccaaaaatttcctacgtcgttcaaggaacgggtatcagcggaagagtggtccctggatgtgccgagaccttcatggactcgcagccgatgcaaggacaacaacaaggccaaccatggcaaggacgacagggacaacaag

SEQ ID NO: 145015 - DNA, 437 bp, Arabidopsis thaliana
aacaaacaaaaagaaaatggttaagctcagcaatctcctcgttgcaaccttcggggttctcctcgtccttaacggctgccttgcgaggcagtcacttggggttcctcctcagctacagaacgagtgtaacctcgacaacctagatgttctccaagccaccgaaactatcaagagtgaagccggtcagatcgagtactgggaccacaaccaccctcagctccgatgtgttggtgtttccgttgctcgttatgtaattgaacaaggcggtctttacttgcccaccttcttcacttccccaaaaatttcctacgtcgttcaaggaacgggtatcagcggaagagtggtccctggatgtgccgagaccttcatggactcgcagccgatgcaaggacaacaacaaggccaaccatggcaaggacgacagggacaacaaggcc

SEQ ID NO: 145016 - DNA, 407 bp, Arabidopsis thaliana
caaacgcgaacgctattctttacgtgacagacggggaagcccaaatccagatcgtaaacgacaatggtaacagagtgtttgacggacaagtctctcaaggacagctcatagccgtaccacaaggtttctcggtggtgaaacgcgcaacaagcaaccgattccagtgggttgagttcaaaacaaacgctaacgcgcaaatcaacactctggcgggacgaacctcagtcttgagaggtttaccacttgaagtcataaccaatgggttccaaatctcacccgaagaagcaaggagggtcaagttcaacacgctcgagaccactttgactcacagcagtggcccagctagctacggaaggccaagagtggctgcagcttaagagcttaaaaccgcggcttaacaatgaacc

SEQ ID NO: 145017 - DNA, 433 bp, Arabidopsis thaliana
  unsure (1)..(433): unsure at all n locations
aaaattacattctctttgcctttgcctatcgcttaattctgcttttattaccagagaaagcaagaatatataagaatcagaaattgggtgaagaagaatggtcttgattactaagatgtctctctctttctacatcattcatcttctcattttctccttgatttccacttgtgttgtctccaaccaggccgaggataatcttcttcaaggcctaaacagctaccgaactgctcaaagagttccttcatttgccaagaatgagaaggctgattgtgtggctgatgagatcgccgacaagctcgaagatcagccatgcacaaaccacaccacagcgagcacggttactcctggctcggtacctccacggctgacgaactaccaggacattctctctgaatgcanaatcgacccaaacactacccgtgacggattg

SEQ ID NO: 145018 - DNA, 385 bp, Arabidopsis thaliana
cgctaccatggctaagtcttgctatttcagaccagctcttcttcttctgttagttcttttggttcatgccgagtcacgcggtcggttcgagccaaagattcttatgccgacagaggaagctaacccggctgaccaagacgaagatggtgtcggtacaagatgggcggttctcgtcgctggttcttctggatatggaaactacagacaccaggctgacgtgtgtcacgcatatcaaatactaagaaaaggaggtttaaaggaagagaacatagtcgctttgatgtatgatgatatcgcaaaccacccacttaatcctcgaccgggtactctcatcaaccatcctgacggtgacgatgtttacgccggagtccttaaggactatact

SEQ ID NO: 145019 - DNA, 427 bp, Arabidopsis thaliana
caacaacaaatacttttacgaaaaaagcttttaaaacttatctagtttcgtttgatacacatttgaagaaagaaatggcatccaaccaacagagctacaaagctggtgagaccagaggcaaggcccaggagaagactggacaagctatgggaacgatgagggacaaggctgaggagggccgggacaagacttctcaaacggcccaaacagcccaacagaaggcccatgagacagcccagtcagctaaagataagacatctcaaactgcccaagcggctcagcagaaggcccatgaaacggcccagtcagcaaaagagaagacatctcaaactgcccaaacggcacagcaaaaggcccatgagacgactcaagcagcaaaagaaaagacatctcaagctggcgacaaagctcgcgaggccaaggacaa

SEQ ID NO: 145020 - DNA, 389 bp, Arabidopsis thaliana
ccaccttcttcactttcccaaaaattttctacgtcgttcaaggaacgggtatcagcggaagagtggtccctggatgtgccgagaccttcatggactcgcagccgatgcaaggacaacaacaaggccaaccatggcaaggacgacagggacaacaaggccaaccatgggaaggacagggacaacagggacaacaaggaagacaaggccaaccatgggaaggacagggacaacagggacaacaaggacgacagggacaacaaggccaaccatgggaaggacagggacagcagggacaacaagggttccgtgacatgcaccagaaggtggaacatgtgagacgcggagacgtctttgccaacactccaagctctgtccactggatctacaac

SEQ ID NO: 145021 - DNA, 396 bp, Arabidopsis thaliana
cggacgcgtgggttcacgagctgtttttttattcctctcttatttttcaaggagtaacattatatatttacgtttttattaattcccctatcccaaaccattaggtatttaaggtttattgtagtctcactctcaggccgatcaaatgggacttattcaattatgattccactttaactaaaaaaaaaatcgcgtaacaaaacattattctaacgttccaccgatttttagttttgcctttcagctgtcaacttttattttatttttgtctttatcctgctttaattgaattcgtctctacaactacaacgttcaatttctgtagtaataatatgcttaaaaaggcattggacatttctttgaaaaatatacttttttttaaccatttttttcttt

SEQ ID NO: 145022 - DNA, 430 bp, Arabidopsis thaliana
taaagaggaagaaaaatgggtcgagtctcatctattatctctttctctttgacactcttgatcctcttcaatggctacactgcccaacagtggcccaacgagtgccagctcgatcaactcaatgcgctcgaaccatcccaaatcatcaagagcgagggtggtcgcatcgaggtctgggaccaccatgcaccccagctccgttgctccggctttgcctttgagcgtttcgtcattgagcctcagggtcttttcttgcccactttcttgaacgccggcaaactcacgtttgttgttcacggaaggggtctaatgggaagagttattccgggatgcgccgagacgttcatggagtcaccggtatttggagaaagtcaaggtcagggtcagagtcaagggttccgtgacatgcaccagaaagtagagcacctac

SEQ ID NO: 145023 - DNA, 419 bp, Arabidopsis thaliana
ggtcttcttggccatggatacttgtgctctagtaatccatcagtctctgtctcgcatcaaactttctcctcccaaatcttcttcttcttcttcttcttcttcttcttctgctttctcccctgaatccttaccgatcagacggatcgagctgtgtttccgaggagctatatgtgccgccgtacaaagaaactacgaagaaacgacctcctccgtggaagaggcagaggaagatgatgagtcatcatcatcgtacggagaagtgaacaagatcattggaagccgaacggcgggggaaggagccatggagtaccttatcgagtggaaggacggccattctccgtcgtgggttccatcgagctacatcgcagcagacgtagtgtcggagtacgagacaccctggtggacggcagctagaaaag

SEQ ID NO: 145024 - DNA, 426 bp, Arabidopsis thaliana
cttgctttagaatgcttagaaattcggttttgtctttatcttggtatggatgactatgaagcggctcttcgtgatattcaggctgctcttacgctgtgtcctgattatagaatgttcgatgggaaagtagctgggaggcagctccagacgcttgtgtatgagcatgtcgagaattggacaaccgcagattgttggatgcagctatatgagaaatggtctaatgttgatgatataggttctctttctgtaatctatcagatgctcgaatccgatgcttgcaaaggtgttctctacttcaggcaatctttgcttctcctaaggttgaattgtccagaagcagcgatgcgcagtttacagttagcccgcgagcatgcctcaagtgaccacgagcgtctagtttacgaaggatggatcttgtatgataca

SEQ ID NO: 145025 - DNA, 430 bp, Arabidopsis thaliana
atcagtcatcactacgaatggatcttacgtttgatcatagttttgtgaaggttaatggaatcactatgcacgtcgccgagaaaagcccctccgtcgccgggaacggagctatccgacctccggtgatactattcctccacggatttccagaactttggtacacgtggcggcatcagatggtggcactatcttcgttaggttaccggactatagcgccggaccttcgtggttacggagacaccgacgcgccggagagtgtggacgcgtacacaagtctccacgtggttggagatctgattggattgatcgacgccgtggttggagatcgggaaaaggtgttcgtagtgggacatgattggggcgctattatcgcttggcatctttgtttttttcgaccggattgggtttaagctttggtttacatgagtgt

SEQ ID NO: 145026 - DNA, 428 bp, Arabidopsis thaliana
aagaaaacatacacatatagcaaaacatggctaacaagctcttcctcgtctgcgcaactctcgccctctgcttcctcctcaccaacgcttccatctaccgcaccgttgtcgaattcgaagaagatgacgccagcaaccccgtaggtccaagacagagatgccagaaggagtttcagcaatcacaacacctaagagcttgccagagatggatgagcaagcaaatgaggcaaggacgtggtggtggtccttccctcgacgatgagttcgatttcgagggcccccagcagggataccagctactccagcagtgctgcaacgagcttcgccaggaagagccagtttgcgtttgccccaccttgaaacaagctgccagggcagttagcctccagggacagcacggaccattccaatccaggaaaatttaccag

SEQ ID NO: 145027 - DNA, 343 bp, Arabidopsis thaliana
ggccacctctaagacagccctacgagagcgaggagtggagacacccacgtagcccacagggcaacggccttgaggagactatctgcagcatgaggtcccacgagaacattgacgaccctgctcgtgctgacgtgtacaagcccagcctaggtcgcgtgaccagcgtcaacagctataccttgcccatcttggagtatgtcaggctcagtgccactcgtggcgttctccagggtaatgcgatggtgcttcctaaatacaacatgaacgctaacgagatcttgtactgcactggaggacaaggaaggatccaagtggtcaacgacaacggacagaacgtgttgga

SEQ ID NO: 145028 - DNA, 292 bp, Arabidopsis thaliana
tcgaacaaacaaaaagaaaatggttaagctcagcaatctcctcgttgcaaccttcggggttctcctcgtccttaacggctgccttgcgaggcagtcacttggggttcctcctcagctacagaacgagtgtaacctcgacaacctagatgttctccaagccaccgaaactttcaagagtgaagccggtcagatcgagtactgggaccacatccacccttaactccgatgtgttggtgtttccgttgctcgttatgtaatttaacatggcggtctatacttgctcacttttttt

SEQ ID NO: 145029 - DNA, 421 bp, Arabidopsis thaliana
accaactcgaccgcaaccctagagtgttccatttggccggaaacaaccagcagggaggctttggcggttcacagcaacaacaagaacagaaaaacttgtggagcgggttcgacgcacaggtcatagctcaagcattgaaaattgacgttcagttggctcagcagcttcagaaccaacaagacagcagaggaaacatcgttcgtgttaagggacctttccaggtcgtgaggccacctctaagacagccctacgagagcgaggagtggagacacccacgtagcccacagggcaacggccttgaggagactatctgcagcatgaggtcccacgagaacattgacgaccctgctcgtgctgacgtgtacaagcccagcctaggtcgcgtgaccagcgttaacagctttaccttgcccatcttgga

SEQ ID NO: 145030 - DNA, 428 bp, Arabidopsis thaliana
ccacagtggaacgcaaacgcgaacgccattctttacgtgacagacggggaagcccaaatccagatcgtaaacgacaatggtaacagagtgtttgacggacaagtctctcaaggacagctcatagccgtaccacaaggtttctcggtggtgaaacgcgcaacaagcaaccgattccagtgggttgagttcaaaacaaacgcaaacgcgcaaatcaacactcttgcgggacgaacctcagtcttgagaggtttaccacttgaagttataaccaatgggttccaaatctcacctgaagaagcaaggagggtcaagttcaacacgctcgagaccactttgactcacagcagtggcccagctagctacggaaggccaagggtggctgcagcttaagagcttaaaaccgcggctcaacaatgaacctctagtac

SEQ ID NO: 145031 - DNA, 414 bp, Arabidopsis thaliana
atcacaaacacacacaaatctctgaagtaaaatgacgttcccttctctttctgtctcatttctcttctttgccttcatattcgttacgcatgcattcgacctcagcatcatccagatgcaacagggaacatgtccgtacacggtggttgtcatgacaagctgtctttctccggagtcgacaagagatcagatcagcattgtttttggcgatgccgacggtaacaaggtgtatgcaccgaaactagggggtttggtaagaggaccagggggtttggggaagtgttcaacgaacacattccaagtcagaggtcaatgttttgaatgaccctatctgctctctctatatcaaccggaatggacccgacggttgggttccggagtccatttgagatctactcataaggttcattgtcc

SEQ ID NO: 145032 - DNA, 426 bp, Arabidopsis thaliana
ctctatatacccccttttaatttgtgtgctcttagcctttactctatagttttatatcatatcaatcgacatggcgaatgtggaccgtgatcggcgtgtgcatgtagaccgtactgacaaacgtgttcatcagccaaactacgaagatgatgtcggttttggtggctatggcggttatggtgctggttctgattataagagtcgcggcccctccactaaccaaatcttggcacttatagcaggagttcccattggtggcacactgctaaccctagctggactcactctagccggttcggtgatcggcttgctagtctccatacccctcttcctcctcttcagtccggtgatagtcccggcggctctcactattgggcttgctgtgacgggaatcttggcttctggtttgtttgggttgacgggtct

SEQ ID NO: 145033 - DNA, 365 bp, Arabidopsis thaliana
agaaaacatacacaaatagcaaaacatggctaacaagctcttcctcgtctgcgcagctctcgccctctgcttcctcctcaccaacgcttccatctaccgcaccgttgtcgaattcgaagaagatgacgccagcaaccccgtaggtccaagacagagatgccagaaggagtttcagcaatcacaacacctaagagcttgccagagatggatgagcaagcaaatgaggcaaggacgtggtggtggtccttccctcgacgatgagttcgatttcgagggcccccagcagggataccagctactccagcagtgctgcaacgagcttcgccaggaagagccagtttgcgtttggcccaccttgaaacaag

SEQ ID NO: 145034 - DNA, 381 bp, Arabidopsis thaliana
agaaaatggttaagctcagcaatctcctcgttgcaaccttcggggttctcctcgtccttaacggctgccttgcgaggcagtcacttggggttcctcctcagctacagaacgagtgtaacctcgacaacctagatgttctccaagccaccgaaactatcaagagtgaagccggtcagatcgagtactgggaccacaaccaccctcagctccgatgtgttggtgtttccgttgctcgttatgtaattgaacaaggcggtcttttacttgcccaccttcttcactttctcaaaaatttcctacgtcgttcaaggaacgggtatcagcggaagagtggtccctggatgttccgtgacctttatgtacttttagtctttgctaggt

SEQ ID NO: 145035 - DNA, 419 bp, Arabidopsis thaliana
aaaaagaaaatggttaagctcagcaatctcctcgttgcaaccttcggggttctcctcgtccttaacggctgccttgcgaggcagtcacttggggttcctcctcagctacagaacgagtgtaaccccgacaacctagatgttctccaagccaccgaaactatcaagagtgaagccggtcagatcgagtactgggaccacaaccaccctcagctccgatgtgttggtgtttccgctgctcgttatgttattgaacaaggcggtctttacttgcccaccttcttctcttccccaaatatttcctacattatttaatgaacggttttcattctatattgtttgtcctttttttttcccatttccttaatttaattcttatattctctcgtttgtcaacttctttttcattcttttttttttat

SEQ ID NO: 145036 - DNA, 393 bp, Arabidopsis thaliana
aagaggaagaaaaatgggtcgagtctcatctattatctctttctctttgacactcttgatcctcttcaatggctacactgcccaacagtggcccaacgagtgccagctcgatcaactcaatgcgctcgaaccatcccaaatcatcaagagcgagggtggtcgcatcgaggtctgggaccaccatgcaccccagctccgttgctccggctttgcctttgagcgtttcgtcattgagcctcagggtcttttcttgcccactttcttgaacgccggcaaactcacgtttgttgttcacggaaggggtctaatgggaagagttattccgggatgcgccgagacgttcatggagtcaccggtttttggagaaggtcaaggtcagggtcagagtcaagg

SEQ ID NO: 145037 - DNA, 463 bp, Arabidopsis thaliana
caagtttaactaagtgaaaagtctatggcggagacaacgagttggatcccagtatggtttcctctgatggtgttgggatgttttggtctgaattggtttatcagtattgtaattgctttgtttttcattataccttttcttttttctctatcatgtcttttatctttccaccaattctttttttttttctcccccctttttttttctctctcctataattttttttttttttactcttcatttttttttttttccttccctattttttttttctttttttctacttttttttttttttcttttctatttttttttctttttaaatattatttttttttcttttacaatttttttttttcttctttcattcttttttttttcttataaattttttttttttttctcctcataatattctttttttcaacttcttttcttatttttctataatattttttttttt

SEQ ID NO: 145038 - DNA, 321 bp, Arabidopsis thaliana
caacaaacaaaaagaaaatggttaagctcagcaatctcctcgttgcaaccttcggggttctcctcgtccttaacggctgccttgcgaggcagtcacttggggttcctcctcagctacagaacgagtgtaacctcgacatcctagatgttctccaagccaccgaaactattaagagtgaagccggtcagatcgagttctgggaccacatccaccctcagcttctatgttgtggtgttttcttttttttttaagaatattatattttgtctcaatttttttttttttcctgtttattcttttctttttaaacaaatatttttt

SEQ ID NO: 145039 - DNA, 332 bp, Arabidopsis thaliana
aacaaacaaaaagaaaatggttaagctcagcaatctcctcgttgcgaaccttcggggttctcctcgtccttaacggctgccttgcgaggcagtcacttggggttcctcctcagctacagaacgagtgtaacctcgacaacctagatgttctccaagccaccgaaactatcaagagtgaagccggtcagatcgagtactgggaccacaaccacccttagctccgatgtgttggtgtttccgttgctcgttatgtaattgaacaaggcggacattactttgtccacctttatcactttcctaaaattttccttcttcgttcaaggtacggttat

SEQ ID NO: 145040 - DNA, 423 bp, Arabidopsis thaliana
  unsure (1)..(423): unsure at all n locations
gcgggttcgacgcacaggtcatagctcaagcattgaaaattgacgttcagttggctgagcagcttcagaaccaacaagacagcanaggaaacatcgttcgtgttaagggacctttccaggtcgtgaggccacctctaagacagccctacgagagcgaggagtggagacacccacgtagcccacagggcaacggccttgaggagactatctgcagcatgaggtcccacgagaacattgacgaccctgctcgtgctgacgtgtacaagcccagcctatgtcgcgtgaccagcgtcaacagctataccttgcccatcttggagtatgtcaggctcagtgccactcgtggggttctccagggtaatgcgatggtgcttcctaaatacaacatgaacgctaacgagatcttgtactgcactggaggac

SEQ ID NO: 145041 - DNA, 425 bp, Arabidopsis thaliana
agacagcagaggaaacatcgttcgtgttaagggacctttccaggtcgtgaggccacctctaagacagccctacgagagcgaggagtggagacacccacgtagcccacagggcaacggccttgaggagactatctgcagcatgaggtcccacgagaacattgacgaccctgctcgtgctgacgtgtacaagcccagcctaggtcgcgtgaccagcgtcaacagctataccttgcccatcttggagtatgtcaggctcagtgccactcgtggcgttctccagggtaatgcgatggtgcttcctaaatacaacatgaacgctaacgagatcttgtactgcactggaggacaaggaaggatccaagtggtcaacgacaacggacagaacgtgttggaccaacaggtgcagaaaggacagctcgtggtca

SEQ ID NO: 145042 - DNA, 426 bp, Arabidopsis thaliana
aaaatgacgttcccttctctttctgtctcatttctcttctttgccttcatattcgttacgcatgcattcgacctcagcatcatccagatgcaacagggaacatgtccgtacacggtggttgtcatgacaagctgtctttctccggagtcgacaagagatcagatcagcattgtttttggcgatgccgacggtaacaaggtgtatgcaccgaaactagggggtttggtaagaggaccagggggtttggggaagtgttcaacgaacacattccaagtcagaggtcaatgtttgaatgaccctatctgctctctctatatcaaccggaatggacccgacggttgggtcccggagtccattgagatctactcagaaggctcaaagtccgtttaattcgatttcagcaagagcgtccctcaactaaacact

SEQ ID NO: 145043 - DNA, 452 bp, Arabidopsis thaliana
  unsure (1)..(452): unsure at all n locations
cgggcgaccacgcgtncgcgttgaccaaatctctcactctcaccagccaaatctctccaacttcctctttctctccacccaaatctcgccggcgatcgtcactgacgaatctgattcgtccccaacactcaacgggaggtagaagaatggcgactcctgttgatccacctaatggaattaggaatcaagggaagcattacttctcaatgtggcaaacacttttcgagatcgataccaaatacgtgcctatcaaaccgataggccgaggcgcgtacggtgtggtttgctcttcggttaacagagagagtaatgagagagtggcgatcaagaagatccacaatgtgtttgagaataagattgatgcgttgaggactcttagggagctcaagcttctacgtcatcttcgacatgagaatgtggttgctcttaaagatgtaatgatggctaatcat

SEQ ID NO: 145044 - DNA, 439 bp, Arabidopsis thaliana
ccgaaagcaacagaagcaaaacaacatcttcaatggcttcgcacctgagatcttggctcaagccttcaagatcaatgtcgagacggctcaacagctccagaaccagcaagataaccgtggcaacatcgtcaaggtcaacggacctttcggcgtcattaggccacccttgagacgcggcgaaggcggccaacaaccacatgaaatagctaatggtttagaggagactttgtgcaccatgcgatgcactgaaaacctcgatgacccgtcggatgctgacgtgtacaagccatcactcggatacattagcacacttaacagctacaatcttcctatcctcagacttctccgccttagcgctcttcgtggctccatccgtaaaaacgctatggtgctaccgcaatggaacgtaaacgcaaacgcggcactctacgtgacaaac

SEQ ID NO: 145045 - DNA, 438 bp, Arabidopsis thaliana
agaaaacatacacaaatagcaaaacatggctaacaagctcttcctcgtctgcgcaactctcgccctctgcttcctcctcaccaacgcttccatctaccgcaccgttgtcgaattcgaagaagatgacgccagcaaccccgtaggtccaagacagagatgccagaaggagtttcagcaatcacaacacctaagagctgccagagatggatgagcaagcaaatgaggcaaggacgtggtggtggtccttccctcgacgatgagttcgatttcgagggcccccagcagggataccagctactccagcagtgctgcaacgagcttcgccaggaagagccagtttgcgtttgccccaccttgaaacaagctgccagggcagttagcctccagggacagcacggaccattccaatccaggaaaaattaccagtcagctaagtac

SEQ ID NO: 145046 - DNA, 435 bp, Arabidopsis thaliana
ttctcactaacagagagaaaaagcaaaagcaaaaatggctcgatctttcgctattgctgtgatctggatcgtcctcatcgccggcgttactggtcaagctccgacttcaccaccaaccgctacaccagctccaccaactccaacaactcctccaccagcagcaactcctcctcctgtctcagcaccaccaccagtcacaacatctcctcctccagtcaccactgctcctcctccagcaaatccaccaccaccagtctcttctcctcctcctgcttctcctccaccagctactcctcctccagtcgcttctcctcctcctcccgttgcttctcctccaccagcaactcctcctcccgtcactactcctcccccagctcctctagctttccctcctgctcaagttccagctccagcaccgaccacgaagccagattc

SEQ ID NO: 145047 - DNA, 440 bp, Arabidopsis thaliana
gttaagctcagcaatctcctcgttgcaaccttcggggttctcctcgtccttaacggctgccttgcgaggcagtcacttggggttcctcctcagctacagaacgagtgtaacctcgacaacctagatgttctccaagccaccgaaactatcaagagtgaagccggtcagatcgagtactgggaccacaaccaccctcagctccgatgtgttggtgtttccgttgctcgttatgtaattgaacaaggcggtctttacttgcccaccttcttcacttccccaaaaattttctacgtcgttcaaggaacgggtatcagcggaagagtggtccctggatgtgccgagaccttcatggactcgcagccgatgcaaggacaacaacaaggccaaccatggcaaggacgacagggacaacaaggccaaccatgggaaggacagggaca

SEQ ID NO: 145048 - DNA, 433 bp, Arabidopsis thaliana
cacacatagcaaaaaatggcaaacaagttgttcctcgtctgcgcagctctcgctctctgcttcctcctcaccaacgcttccatctaccgcaccgtcgttgagttcgaagaagatgacgccactaaccccataggcccaaaaatgaggaaatgccgcaaggagtttcagaaagaacaacacctaagagcttgccagcaattgatgctccagcaagcaaggcaaggccgtagcgatgagtttgatttcgaagacgacatggagaacccacagggacaacagcaggaacaacagctattccagcagtgctgcaacgagcttcgccaggaagagccagattgtgtttgccccaccttgaaacaagctgccaaggccgttagactccagggacagcaccaaccaatgcaagtcaggaaaatttaccagacagccaagc

SEQ ID NO: 145049 - DNA, 426 bp, Arabidopsis thaliana
agaaaaatgggtcgagtctcatctattatctctttctctttgacactcttgatcctcttcaatggctacactgcccaacagtggcccaacgagtgccagctcgatcaactcaatgcgctcgaaccatcccaaatcatcaagagcgagggtggtcgcatcgaggtctgggaccaccatgcaccccagctccgttgctccggctttgcctttgagcgtttcgtcattgagcctcagggtcttttcttgcccactttcttgaacgccggcaaactcacgtttgttgttcacggaaggggtctaatgggaagagttattccgggatgcgccgagacgttcatggagtcaccggtatttggagaaggtcaaggtcagggtcagagtcaagggttccgtgacatgcaccagaaagtagagcacctacggtgc

SEQ ID NO: 145050 - DNA, 427 bp, Arabidopsis thaliana
agaggaagaaaaatgggtcgagtctcatctattatctctttctctttgacactcttgatcctcttcaatggctacactgcccaacagtggcccaacgagtgccagctcgatcaactcaatgcgctcgaaccatcccaaatcatcaagagcgagggtggtcgcatcgaggtctgggaccaccatgcaccccagctccgttgctccggctttgcctttgagcgtttcgtcattgagccttagggtcttttcttgcccactttcttgaacgccggcaaactcacgtttgttgttcacggaaggggtctaatgggaagagttattccgggatgcgccgagacgttcatggagtcaccggtatttggagaaggtcaaggtcagggtcagagtcaagggttccgtgacatgcaccaaaaagtagagcacctac

SEQ ID NO: 145051 - DNA, 440 bp, Arabidopsis thaliana; identical to SEQ ID NO: 130203

SEQ ID NO: 145052 - DNA, 428 bp, Arabidopsis thaliana
agagaaacggccgaatcttcataaattccgccatctgttaagctcaatcgccgcctaaactccggcgactctctcgaagatatttggtgattgaggtgactcggaagagagtgagagagagagatggatgatagaggaggatcgttcgtagcagtgagaaggatttcacaaggtctagaacgaggaagtgtttatcattcttcttctgctgaggttgtagctggatcggcagcgtggttaggccgtggcctttcctgtgtttgtgttcagggtagagacggtgaccctcgtccttcatttgatctaacgcctgctcaggaggaatgcctgcagaggttgcaaagccgcattgatgttgcctatgacagctcaatacctcagcatcaggaagctctaaaggatctttggaaacttgcatttcctgaaga

SEQ ID NO: 145053 - DNA, 431 bp, Arabidopsis thaliana
aaaccaactcgaccgcaaccctagagtgttccatttggccggaaacaaccagcagggaggctttggcggttcacagcaacaacaagaacagaaaaacttgtggagcgggttcgacgcacaggtcatagctcaagcattgaaaattgacgttcagttggctcagcagcttcagaaccaacaagacagcagaggaaacatcgttcgtgttaagggacctttccaggtcgtgaggccacctctaagacagccctacgagagcgaggagtggagacacccacgtagcccacagggcaacggccttgaggagactatctgcagcatgaggtcccacgagaacattgacgaccctgctcgtgctgacgtgtacaagcccagcctaggtcgcgtgaccagcgtcaacagctataccttgcccatcttggagtatgtca

SEQ ID NO: 145054 - DNA, 410 bp, Arabidopsis thaliana
tcagcatcttcgatctagccagtcaccagaaccagcttgaccgcaacccaaggccattttacttagccggaaacaacccacaaggtcaagtatggctacaaggacgagagcaacagccacagaagaacatcttcaatggatttggacccgaggttattgctcaagctttgaagattgatcttcagacagcgcagcaacttcagaaccaagatgacaaccgtggaaacattgtccgagtccaaggcccgttcggtgtcattaggccgcctttgaggggccagagacctcatgaggaggaagaagaagaagaatgacgacacggactacacggtaatggcttagaggagaccatctgcagcgccaggtgcaccgataacctcgatgatccgtctcgtgctgacgtgtacaag

SEQ ID NO: 145055 - DNA, 439 bp, Arabidopsis thaliana
aacaaaatggctcgagtctcttctcttctttctttcttcttaacacttttgatccttttccatggctacgcggctcaacagggtcagcagggtcagcagtttccgaacgagtgccagctcgaccagctcaatgcgctcgagccgtcacacgtactgaagagcgaggctggtcgcatcgaggtgtgggaccaccacgctcctcagctccgttgctcaggtgtctcctttgcacgttacatcatcgagtctaagggtctctacttgccctctttctttaacaccgcgaagctctctttcgtggctaagggacgaggtcttatgggaaaagtgatccctggatgcgccgaaacattccaagactcatcagagttccaaccacgcttcgaaggtcaaggtcaaagccagaggttccgtgacatgcaccagaaagtggagcaca

SEQ ID NO: 145056 - DNA, 370 bp, Arabidopsis thaliana
cggacgcgtgggcggacgcgtgggtacacaaatagcaaaacatggctaacaagctcttcctcgtctgcgcaactctcgccctctgcttcctcctcaccaacgcttccatctaccgcaccgttgtcgaattcgaagaagatgacgccagcaaccccgtaggtccaagacagagatgccagaaggagtttcagcaatcacaacacctaagagcttgccagagatggatgagcaagcaaatgaggcaaggacgtggtggtggtccttccctcgacgatgagttcgatttcgagggcccccagcagggataccagctactccagcagtgctgtaacgagcttcgccaggaagagccagtttgcgtttgccccac

SEQ ID NO: 145057 - DNA, 438 bp, Arabidopsis thaliana
gcaaatgaggcaaggacgtggtggtggtccttccctcgacgatgagttcgatttcgagggcccccagcagggataccagctactccagcagtgctgcaacgagcttcgccaggaagagccagtttgcgtttgccccaccttgaaacaagctgccagggcagttagcctccagggacagcacggaccattccaatccaggaaaatttaccagtcagctaagtacttgcctaacatttgcaagatccagcaagttggtgaatgtcccttccagaccaccatccctttcttccctccttactactagagtccaagcccggcctagcacgatgatcatgagtgttgctattgatgtatgttaatactatacacagtcatcgtgtgtgttttataaaactgtaagcttaggatgtttgaggctaatgtaattagcactacacc

SEQ ID NO: 145058 - DNA, 444 bp, Arabidopsis thaliana
atctaatccaaaaaatcaaaagatgaatgccacaaagtttgttgtgcttctcgtgattggcgttttgtgtgccattgtcaccgcaaggcaggtcaaagatttgtccacggagaccaaattaggggcctctcttccaaaaactactaccaaaggcattggagctcagctttctgcaactggcacaacttacagcaccagcagtgtcgttagctatgctaatggttttaacaatcccaaaggtccaggggccaattcattcgaaagtgccaacacatttaccagcggacaagtcactgccaagggtcgcaaggcaagagtttcttctgcaagtgcttctgccgctgaaggcgatgctgcagctgcagtgactcgcaaagctgctgctgcacgtgcaaagggtaaggtagcttccgcatcaagggtcaagggttcctctgagaagat

SEQ ID NO: 145059 - DNA, 396 bp, Arabidopsis thaliana
cacaaacacacacaaatctctgaagtaaaatgacgttcccttctgtttctgtctcatttctcttctttgccttcatattcgttacgcatgcattcgacctcagcatcatccagatgcaacagggaacatgtccgtacacggtggttgtcatgacaagctgtctttctccggagtcgacaagagatcagatcagcattgtttttggcgatgccgacggtaacaaggtgtatgcaccgaaactagggggtttggtaagaggaccagggggtttggggaagtgttcaacgaacacattctttgtcagaggtcaatgtttgaatgaccctatctgctctctttatatcaaccggaatggacccaacggttgattcccggatgtcattgtgatctactcat

SEQ ID NO: 145060 - DNA, 426 bp, Arabidopsis thaliana
cggaaagagtctgttgaatcaaccaataaagagagaaaacggaagaagcctaaacacgacgaagaagaagtcccgaatgagactgagaaacccgagaagaagaagaaaaagaagagagagggaaagtctaaaaagaaagaaactgagacggaattttcaggagctgagctatatgttacatttggtcctggttcaagtttgcctaaaaaggaagatctgattgaaatatatgaaaaatttggagctttggacaaagagagaactgatacggtcgacaacaacttctctgcccatgtggctttcttggatgtagctgatggagaaaaagcctttgaatcctcactagagaaatgtccgtttacttctaattcgacggtgaaattcaaactcaagtattcaaatgagagaacagaggagaagaaaact

SEQ ID NO: 145061 - DNA, 236 bp, Arabidopsis thaliana
aaaaaaaataaaaatcgcacgtttcttcttcttcttcttcttgtctctcgcaacaaatctgaattagggtttttgagaaatcttcatttcgtgattttgaaatttatttgtatttgattttgttggtgctttggaatcatctgcaaccaccatgatttctgattcgatcaccaacgcttctgctacttcagctccaaccgccagggatttcggatataagaaatggacgaacaggt

SEQ ID NO: 145062 - DNA, 388 bp, Arabidopsis thaliana
cgaccctgctcgtgctgacgtgtacatgcccagcctaggtcgcgtgaccagcgtcgacagctataccttgcccatcttggagtatgtcaggctcagtgccactcgtggcgttctccagggtaatgcgatggtgcttcctaaatacaacatgaacgctaacgagatcttgtactgcactggaggacaaggaaggatccaagtggtcaacgacaacggacagaacgtgttggaccaacaggtgcagaagggacagctcgtggtcatcccacaagggttcgcatacgttgtccagtcccacggaaacatgttcgagtggatctctttcaaaactaatgaaaacgcactgatcagcactttggcgggtagaaccttgctcttgagggcattg

SEQ ID NO: 145063 - DNA, 382 bp, Arabidopsis thaliana
gacagacaaggaagcccaaatccagatcgttatcgtcaatggtaacagagtgtttgacggacaagtctctcaaggacagctcatagccgtaccacaaggtttctcggtggtgaaacgcgcaacaagcaaccgattccagtgggttgagttcaaaacaaacgctaacgcgcaaatcaacactctggcgggacgaacctcagtcttgagaggtttaccacttgaagtcataaccaatgggttccaaatctcacccgaagaagcaaggagggtcaagttcaacacgctcgagaccactttgactcacagcagtggcccagctagctacggaaggccaagagtggctgcagcttaagagcttaaaaccgcggcttaacaatgaacc

SEQ ID NO: 145064 - DNA, 155 bp, Arabidopsis thaliana
acgactcaccagttctccgtcacaggtagagcagctttattctctcatcggagcgcctcaccggtggcagacggtgtcgttgttcctctcctataacctccatcaatcaccatctctttacacaaagctctaaccaaaatcttctagagatgggg

SEQ ID NO: 145065 - DNA, 330 bp, Arabidopsis thaliana
ccctagagtgttccatttggccggaaacaaccagcagggaggctttggcggttcacagcagcaacaagaacagaaaaacttgtggagcgggttcgacgcacaggtcatagctcaagcattgaaaattgacgttcagttggctcagcagcttcagaaccaacaagacagcagaggaaacatcgttcgtgttaagggacctttccaggtcgtgaggccacctctaagacagccctacgagagcgaggagtggtgacacccacgtagcccacagggcatcggccttgaggagactatctgcagcatgaggtcccacgagaacattgacgtccc

SEQ ID NO: 145066 - DNA, 418 bp, Arabidopsis thaliana
  unsure (1)..(418): unsure at all n locations
agaaaaatgggtcgagtctcatctattatctctttctctttgacactcttgatcctcttcaatggctacactgcccaacagtggcccaacgagtgccagctcgatcaactcaatgcgctcgaaccatcccaaatcatcaagagcgagggtggtcgcatcgaggtctgggaccaccatgcaccccagctccgttgctccggctttgcctttgagcgtttcgtcattgagcctcagggtcttttcttgcccactttcttgaacgccggcaaactcacgtttgttgttcacggaaggggtctaatgggaagagttattccgggatgcgccgagacgttcatggagtcaccggnttttggagaaggtcaaggtcagggtcagagtcaagggttccgagacatgcaccagatagtagagcacc

SEQ ID NO: 145067 - DNA, 306 bp, Arabidopsis thaliana
aacaaaaagaaaatggttaagctcagcaatctcctcgttgcaaccttcggggttctcctcgtccttaacggctgccttgcgaggcagtcacttggggttcctcctcagctacagaacgagtgtaacctcgacaacctagatgttctccaagccaccgaaactatcaagagtgaagccggtcagatcgagtactgggaccacaaccaccctcagctccgatgtgttggtgtttccagcgctcgttatgtaattgaacaaggcggtctttacttgcccaccttttttacttccccaaaaattttccta

SEQ ID NO: 145068 - DNA, 366 bp, Arabidopsis thaliana
tcagacccacccgtgcgaaaaaagaaagtggttaagctcagcaatctcctcgttgcaaccttcggggttctcctcgtccttaacggctgccttgcgaggcagtcacttggggttcctcctcagctacagaacgagtgtaacctcgacaacctagatgttctccaagccaccgaaactatcaagagtgaagccggtcagatcgagtactgggaccacaaccaccctcagctccgatgtgttggagtttccgttgctcgatatgtaattgaacaaggcggtctttacttgcccaccttttttacttccccaaaaatttcctacgtcgttcaaggaacgggttttagcggtagagtggtccctggatgt

SEQ ID NO: 145069 - DNA, 360 bp, Arabidopsis thaliana
aaaataggaagaaagaagagtcaagtcactaaaataactttcacagtctttgattcgaagatctttgtcgccgagagatatccactctgatttgagttctgaactattctctggaggaggttgaggtctgaaatcatggaacatcttggttagagtgtggaattttagctgatttgatctttgattcatctgtgatcatattatctatgaagatggacaaaaagactatagtttggtctagaagagacctaacgattgaggattatcctgcattaatctctattgctcacgaagggatcagttattcctggccttcattttggtgtacttgattaatgatggggctgtttttttttcctt

SEQ ID NO: 145070 - DNA, 254 bp, Arabidopsis thaliana
aacaaaaagaaaataggttaagctcagcaatctcctcgttgcaaccttcggggttctgctcgtccttaacggctgccttgcgaggcagtcacttggggttcctcctcagctacagaacgagtgtaacctcgacatcctagatgttctccaagccaccgaaactatcaagagtgaagccggtcagatcgagtactgagaccacaaccaccctcagctccgatgtagtggggattccgtatttcgttttgttattt

SEQ ID NO: 145071 - DNA, 426 bp, Arabidopsis thaliana
cttgttgcagccgcggatctcgccagcaaccagaaccagcttgaccgcaaccttagaccatttttgatagccggaaacaacccataagggcaggaatggctacaaggccgaaagcaacagaagcaaaacaacatcttcaatggcttcgcacctgagatcttggctcaagccttcaagatcaatgtcgagacggctcagcagctccagaaccagcaagataaccgtggcaacatcgtcaaggtcaacggacctttcggcgtcattaggccacccttgagacgcggcgaaagcggccaacaaccacatgaaatagctaatggtttagaggagactttgtgcaccatgcgatgcactgaaaacctcgatgacccgtcggatgctgacgtgtacaagccatcactcggatacattagcacacttaacagt

SEQ ID NO: 145072 - DNA, 291 bp, Arabidopsis thaliana
aatcaataaagaggaagaaaaatgggtcgagtctcatctattatctctttctcttggacactcttgatcctcttcaatggctacactgcccaacagtggcccaacgagtgccagctcgatcaactcaatgcgctcgaaccatcccaaatcatcaagagcgagggtggtcgcatcgaggtctgggaccaccatgcaccccagctccgttgctcctgctttgccttagtgcgtttcgttatttgatcctcagggtctattcttgcccatttttttgactcctgcttactcacg

SEQ ID NO: 145073 - DNA, 362 bp, Arabidopsis thaliana
atctcctcttgcaaaccaacgtaaaacactaactaagagatcaatatggctggagtgatgaagttggcatgcatggtcttggcttgcatgattgtggccggtccaatcacagcgaacgcgcttatgagttgtggcaccgtcaacggcaacctggcagggtgcattgcctacttgacccgaggtgctccacttacccaagggtgctgcaacggcgttactaaccttaataacatggccagtacaaccccagaccgtcagcaagcttgccgttgccttcaatctgccgctaaagccgtttgtcctggtctcaacactgcccgtgcagttggactttctagcgcatgcaaagtcaatattcctta

SEQ ID NO: 145074 - DNA, 301 bp, Arabidopsis thaliana
caaggcgacgttttgatcaggcgatgatgagtatcccaatggagttaatgtctatcagaaaccctaattccaccttgctctatagagctcactctcgtccgcctgtgaagctctgtgctccacctcgttctctcctccctagccgacgccatttcagtgctcctcgagctgttgtttcgtatccaggaatacgtttcggctttacctcgccggaagtcttgcttaatcgatccgtcgttgctttcgctgcatcccacgaggattcgggagaatcaggtgttgaggtggggaaggagaagag

SEQ ID NO: 145075 - DNA, 418 bp, Arabidopsis thaliana
gcaaaaaatggcaaacaagttgttcctcgtctgcgcagctctcgctctctgcttcctcctgaccaacgcttccatctaccgcaccgtcgttgagttcgaagaagatgacgccactaaccccataggcccaaaaatgaggaaatgccgcaaggagtttcagaaagaacaacacctaagagcttgccagcaattgatgctccagcaagcaaggcaaggccgtagcgatgagtttgatttcgaagacgacatggagaacccacagggacaacagcaggaacaacagctattccagcagtgctgcaacgagcttcgccaggaagagccagattgtgtttgccccaccttgaaacaagctgccaaggccgttagactccagggacagcaccaaccattgcaaggcaggaaaatttaccagaca

SEQ ID NO: 145076 - DNA, 311 bp, Arabidopsis thaliana
atcatatcaatcgacatggcgaatgtggaccgtgatcggcgtgtgcatgtagaccgtacggacaaacgtgttcatgcaggcaaactacttagatgatgtcggctctggcaacttcagcggacacgcttatgagttgtggcacctgttacttgatccttgcaagtttcattgcctaattattcccgaggtgttttcacttattccaaagtttatgctaatgcgtttttttatccttattataacttgtctatggttaatactttttttctgttaatttttttttattagttttttaactttaattttcttta

SEQ ID NO: 145077 - DNA, 241 bp, Arabidopsis thaliana
ctcatctattatctctttctctttgactctcttgatcctcttcaatggctacactgcccaacagtggcccaacgagtgccagctcgatcaactcaatgcgctcgaaccatcccaaatcatcaagagcgagggtggtcgcatcgaggtctgggaccaccatgcaccccagctccgttgctccggctttgcctttgagcgtttcgacattgagcctcaaggtcttattttgcccactttcttg

SEQ ID NO: 145078 - DNA, 244 bp, Arabidopsis thaliana
aacaaaaagaaaatggttaagctcagcaatctcctcgtgcaaccttcggggttctctcgtccttaacggctgccttgcaggcatcacttgggttcctcctcagctacagaacgagtgtaacctcgacaacctagatgttctcaagccaccgaaactatcaagagtgaagccggcagatcgagtactgggaccacaaccaccctcagctcgatgtgttggtgtttcagtgctcgctatgtatttg

SEQ ID NO: 145079 - DNA, 258 bp, Arabidopsis thaliana
aacatacacaaatagcaaaacatggctaacaagctcttcctcgtctgcgcaactctcgccctctgcttcctcctcaccaacgcttccatctaccgcaccgttgtcgaattcgaagaagatgacgccagcaaccccgtaggtccaagacagagatgccagaaggagtttcagcaatcacaacacctaagagcttgccagagatggatgagcaagcaaatgaggcatggacgtggaggtggtccttcccttgacgatgag

SEQ ID NO: 145080 - DNA, 284 bp, Arabidopsis thaliana
aaagaaaatggttaagctcagcaatctcctcgttgcaaccttcggggttctcctggtccttaacggctgccttgcgaggcagtcacttggggttcctcctcagctacagaacgagtgtaacctcgacaacctagatgttctccaagccaccgaaactatcaagagtgaagccggtcagatcgagtactgtgaccacaaccaccctcagctccgatgtgttggtgttcccgtagctcgttttgtaattgaacatggctgtttttacttgcccacctttttcactt

SEQ ID NO: 145081 - DNA, 376 bp, Arabidopsis thaliana
ccttgacctttctgtttcccttcgagcattttctctctctaactatcctctctctttctagtgtttgtttgatcctctgcgtactctgttcttcttctctcttcagataaaacaagtcctgcaaaattaagacctgatgtcttatcgattgctaagtgtggataaggaggaactggttacatcaccttgtttgaaagaacgtaactacttgggtctctctgattgttcctctgttgatagctcaactattcccaatgttgttgggaagagcaatctcaatttctaagctactgaactgaggctaggtcttcctgagtctcaatctcctgagagagagactgatttcgagttgctgagtccgagatcacccgatgag

SEQ ID NO: 145082 - DNA, 407 bp, Arabidopsis thaliana
cttcaatggctacactgcccaacagtggcccaacgagtgccagctcgatcaactcaatgcgctcgaaccatcccaaatcatcaagagcgagggtggtcgcatcgaggtctgggaccaccatgcaccccagctccgttgctccggctttgcctttgagcgtttcgtcattgagcctcagggtcttttcttgcccactttcttgaacgccggcaaactcacgtttgttgttcacggaaggggtctaatgggaagagttattccgggatgcgccgagacgttcatggagtcaccggtatttggagaaggtcaaggtcagggtcagagtcaagggttccgtgacatgcaccagaaagtagagcacctacggtgcggggacaccattgcaacaccatctggggtagctcaat

SEQ ID NO: 145083 - DNA, 393 bp, Arabidopsis thaliana
cttcagacagcgcagcaacttcagaaccaagatgacaaccgtggaaacattgtccgagtccaaggcccgttcggtgtcattaggccgcctttgaggggccagagacctcaggaggaggaagaagaagaagaaggacgacacggacgacacggtaatggcttagaggagaccatctgcagcgccaggtgcaccgataacctcgatgatccgtctcgtgctgacgtgtacaagccacagctcggttacatcagcactctcaacagttacgatctccccatccttcgcttcatccgtctctcagccctccgtggatctatccgtcaaaacgcaatggtgcttccacagtggaacgcatacgcgaacgccattctttacgtgacagacggtgaagcc

SEQ ID NO: 145084 - DNA, 384 bp, Arabidopsis thaliana
caacaatggaaatgagcctctcattcttgttgcagccgcggatctcgccagcaaccagaaccagcttgaccgcaaccttagaccatttttgatagccggaaacaacccacaagggcaggaatggctacaaggccgaaagcaacagaagcaaaacaacatcttcaatggcttcgcacctgagatcttggctcaagccttcaagatcaatgtcgagacggctcagcagctccagaaccagcaagataaccgtggcaacatcgtcaaggtcaacggacctttcggcgtcattaggccacccttgagacgcggcgaatgcggccaacaaccacatgaaatagctaatggtttagaggagactttgtgcaccatgcgatgcactgaaaa

SEQ ID NO: 145085 - DNA, 420 bp, Arabidopsis thaliana
atttttcataagcataatcactcaaccaaatactgatattctaatttctaagttaatctggttccaaagaattttatattcgtctcccaccaagtatagcatttgcttttattttctgtgagagaaaaatacccttaaacacccctaaaccggcacctttattatcagattactttgcacaactttagtttcccgttcgaactataactccaacccagaatggcaaccgtccaaaagttacccaaaaaaggttataaaagatttcatttcctaatatatggtctagggagaaagaaacaattagataccaaagagggctcgtaaggagaaaaacaaaacgtgtgttagcacagcatggaaattgtctgacctttttaatattttgcagtaaactattagttccattgctctgcatcatat

SEQ ID NO: 145086 - DNA, 281 bp, Arabidopsis thaliana
caacaaacaaaaagaaaatggttaagctcagcaatctcctcgttgcaaccttcggggttctcctcgtccttaacggctgccttgcgaggcagtcacttggggttcctcctcagctacagaacgagtgtaacctcgacaacctagatgttctccaagccaccgaaactatcaagagtgaagccggtcagatcgagtactgggaccacaaccaccctcagctccgatgtgttggtgtttccgttgctcgttatgtaattgtacaaggcggtctttacttgccc

SEQ ID NO: 145087 - DNA, 289 bp, Arabidopsis thaliana
cttaaacactctggtcaaaatgggagtatactcgagagcggttgcgttttcggtctttgtgtcgtttctgctgtttttcactgcttattctaagagaaatgatggaacattcagagttggcctgaaaaaactgaagttggatcctaacaaccgactcgcaacacgctttggttccaagcaagaagaggccttgagatcttctttgcgttcgtacaacaacaatcttggtggtgattctggagatgctgttattgtcccgctcaagtattactttggatgctcattacta

SEQ ID NO: 145088 - DNA, 351 bp, Arabidopsis thaliana
gacgagagaccctctcaaatctcaagctcctttccttccttccttcgatctacactctcagattctctctctctctctttcctctctctttgtcttctctcaggttttgtaatggcggaatcttccaaagtcgttcatgttcgtaatgttggtcatgagatttctgaaaatgatttgcttcagctttttcaaccatttggtgttataactaagcttgtgatgctcagggcaaagaatcaggctcttctccaaatgcaagatgtttcttctgcagttagagctcttcagttttgtactaatgttcagccaactataagaggttggattgtgtttgttcaattctttttttcc

SEQ ID NO: 145089 - DNA, 394 bp, Arabidopsis thaliana
atcatcatcactcgccggctaatggccacaacgatgacacgtgtctccgtcggcgtcgtcctctttgttctcttagtctcgctggttgccgtctccgccgcgagaagcggtcctgatgatgttatcaaactcccttcgcaggcttctcgcttcttccgtcctgctgaaaacgacgacgattctaactccggtactaggtgggctgttctagtcgccggatctagcggatattggaattacaggcatcaggctgatatatgccatgcctatcaacttctgaggaaaggtggattgaaagaggagaatattgtggtattcatgtatgatgatattgctaacaattacgagaatccaaggcctggaaccattatcaacagccctcatggataagatg

SEQ ID NO: 145090 - DNA, 416 bp, Arabidopsis thaliana
aacagccacagaagaacattttcaatggatttggacccgaggttattgctcaagctttgaagatcgatcttcagacagcgcagcaacttcagaaccaagatgacaaccgtggaaacattgtccgagtccaaggcccgttcggtgtcattaggccgcctttgaggggccagagacctcaggaggaggaagaagaagaagaaggacgacatggacgacacggtaatggcttagaggagaccatctgcagcgccaggtgcaccgataacctcgatgacccgtctcgtgctgacgtgtacaagccacagctcggttacatcagcactctcaacagttacgatctccccatccttcgcttcatccgtctctcagccctccgtggatctatccgtcaaaacgcaatggtgctttcacagtgg

SEQ ID NO: 145091 - DNA, 381 bp, Arabidopsis thaliana
caaaaagaaaatggttaagctcagcaatctcctcgttgcaaccttcggggttctcctcgtccttaacggctgccttgcgaggcagtcacttggggttcctcctcagctacagaacgagtgtaacctcgacaacctagatgttctccaagccaccgaaactatcaagagtgaagccggtcagatcgagtactgggaccacaaccaccctcagctccgatgtgttggtgtttccgttgctcgttatgtaattgaacaaggcggtctttacttgcccaccttcttcacttccccaaaaatttcctacgtcagtcaaggaacgggtatcagcggaagagtggtccctggatgtgccgagaccttcatggactcgcagccgatgca

SEQ ID NO: 145092 - DNA, 367 bp, Arabidopsis thaliana
caagaaaacatacacaaatagcaaaacatggctaacaagctcttcctcgtctgcgcaactctcgccctctgcttcctcctcaccaacgcttccatctaccgcaccgttgtcgaattcgaagaagatgacgccagcaaccccgtaggtccaagacagagatgccagaaggagtttcagcaatcacaacacctaagagcttgccagagatggatgagcaagcaaatgaggcaaggacgtggtggtggtccttccctcgacgatgagttcgatttcgagggcccccagcagggataccagcttcttccagcattgcttgtatcgagttttgccaagaaagagccagtttgcggttgccccaccttgaaac

SEQ ID NO: 145093 - DNA, 399 bp, Arabidopsis thaliana
cacatacagacattctaatttctaattataaaacacaatatcaaaagatatgaatgcacacagagtctgctgtgcttctcgtgactagcgttctgtgtgccattgtcaccgcctggcatgtcgatgaagtgtctattgagaccaacctatgcacctctttctctaaaactactaccaagggcattggagctcatctctctgctgctgagtttacttccagcggtcacgatgtctattgctctgctactggtatcaacattgccaacagtccatacactcttgaatccgatatgtgctgcacaagcaccattgaacacatcattgcaatgggccgcaaggctagagtctcttctgcaagtgcttctaccgccaaaggtgacgcttcatctgcagagactc

SEQ ID NO: 145094 - DNA, 277 bp, Arabidopsis thaliana
aaaaagaaaatggttaagctcagcaatctcctcgttgcaaccttcggggttctcctcgtccttaacggctgccttgcgaggcagtcacttggggttcctcctcagctacagaacgagtgtaacctcgacaacctagatgttctccaagccaccgaaactatcaagagtgaagccggtcagatcgagtactgggaccacaaccaccctcagctccgatgtgttggtgtttccgttgctcgttatgtaattgaacatggcgtgctttactttgcccacc

SEQ ID NO: 145095 - DNA, 405 bp, Arabidopsis thaliana
ggaagaaaaatgggtcgagtctcatctattatctctttctctttgacactcttgatcctcttcaatggctacactgcccaacagtggcccaacgagtgccagctcgatcaactcaatgcgctcgaaccatcccaaatcatcaagagcgagggtggtcgcatcgaggtctgggaccaccatgcaccccagctccgttgctccggctttgcctttgagcgtttcgtcattgagcctcatggtcttttcttgcccactttcttgaacgccggcaaactcacgtttgttgttcacggaaggggtctaatgggaagagttattccgggatgcgccgagacgttcatggagtcaccggtatttggagaaggtctaggtcagggtcagagtcaagggttccgtgacatgcac

SEQ ID NO: 145096 - DNA, 422 bp, Arabidopsis thaliana
gttcctcgtctgcgcagctctcgctctctgcttcctcctcaccaacgcttccatctaccgcaccgtcgttgagttcgaagaagatgacgccactaaccccataggcccaaaaatgaggaaatgccgcaaggagtttcagaaagaacaacacctaagagcttgccagcaattgatgctccagcaagcaaggcaaggccgtagcgatgagtttgatttcgaagacgacatggagaacccacagggacaacagcaggaacaacagctattccagcagtgctgcaacgagcttcgccaggaagagccagattgtgtttgccccaccttgaaacaagctgccaaggccgttagactccagggacagcaccaaccaatgcaagtcaggaaaatttaccagacagccaagcacttgcccaacgtttgcg

SEQ ID NO: 145097 - DNA, 279 bp, Arabidopsis thaliana
ggtctctgtccgtacgacgtcgaatatctagattgttcgacggcgatgggagctgggagagaagtcagcgtatcgctagatggagtcagagacaaaaacttgatgcagcttaagatactcaacacggttttgttcccggttcgttacaacgactagtactacgccgatgcaatcgctgtcggcgtattcaccaagcttgcatatttcagtgacatatgtgttggagctatcgcctgtcggctggtgatgattgatagtggtgccatgcgagtttatatt

SEQ ID NO: 145098 - DNA, 418 bp, Arabidopsis thaliana
cagcacttcacaacttctcatgaacaagtagaaaaaaaagagcaagactaataagccatataagagacaacatgaacaacctagacgagatcaagatcgagagcaagacctgcctcaacgatcaagaacaagaagtcaaaatagacaacatgcacatgagcgaccaagacaagaacaagatcgaaatcaagaacaagagtggcctcggcgaaaagtggccagaacccatcgtccgagtccaatctctagccgagagcaacctcactagtctccctgaccgttacatcaagccgccgtctcaacgccctcaaaccaccatcatcgaccaccaaccggaagtagctgacataaatataccgatcatagacctagacagtctattctctggcaatgaagacgacaagaagaagatatccga

SEQ ID NO: 145099 - DNA, 261 bp, Arabidopsis thaliana
gtccttgtagaggaaaagtaattaaatggctgcttcaacttcctctttcactctcgggtatttcaccacactgggtactctccctttgtagttagtcccttttaatctaatacctaatttttaattttcttctaatttcattatattatttatttttaatttgagttatctcatttttcttccattcatcttttattattacatatattatactttcaaattatattttattttttatatacatgtgctcttttattttat

SEQ ID NO: 145100 - DNA, 418 bp, Arabidopsis thaliana
cttctctctaatacgagaagaaaaaggcgaaaacctcgccaatccgattacgcgaaaaatcaaaggtttttggatatggcgtcgaagcggatcttgaaggaattgaaggatctccagaaggatccacctacatcatgtagcgcaggtcctgttgctgaagacatgtttcactggcaggcaacgataatgggtccttcagagagtccttatgctggaggtgttttccttgtaaccatccatttccctccggattacccattcaagcctcctaaggtggcctttatgaccaaggtgttccatcccaacattaacagcaacggttgcatttgcctcgacattctgaaggagcagtggagtcctgcgctcaccatttccaaagtgctgctatcgatctgttctttgttaaccgttccaaacc

SEQ ID NO: 145101 - DNA, 281 bp, Arabidopsis thaliana
caagaacagaaaaacttgtggagcgggttcgtcgcacaggtcatagctcaagcattgaaaattgacgttcagttggctcagcatcttctgaaccatcttgtcagctgttgtatcatcgttcgtgtttagggaccttttcaggtcgtttggttctttttattacagctcttcttgagcgatgtttggtgtcaccctcttttccttcttgttttttgtcttgtgttgactttctttcttttttgttgttatcatttatttacattttttttttctttttgttt

SEQ ID NO: 145102 - DNA, 264 bp, Arabidopsis thaliana
tcggctacaaggccgagagcaacagccacagaagtacattttcaatggatttggacccgagggtgtagctcaagctttgaagatcgatcttcatacagctcagcaacttcagtaccaagatgacaaccgaggaaacattgtccgagtccaaggcccgttcggtgtcattaggccgcctttgaggggccagagacctcaggaggaggatgtatttcaatattgactacatggtcttcacggttttgttctatatgtatactcatt

SEQ ID NO: 145103 - DNA, 409 bp, Arabidopsis thaliana
gcgggttcgacgcacaggtcatagctcaagcattgaaaattgacgttcagttggctcagcagcttcagaaccaacaagacagcagaggaaacatcgttcgtgttaagggacctttccaggtcgtgaggccacctctaagacagccctacgagagcgaggagtggagacacccacgtagcccacagggcaacggccttgaggagactatctgctgcatgaggtcccacgagaacattgacgaccctgctcgtgctgacgtgtacaagcccagcctaggtcgcgtgaccagcgtcaacagctataccttgcccatcttggagtatgtcaggctcagtgccactcgtggcgttctccagggtaatgcgatggtgcttcctaatttctacttgaacgcttacgagatcttgta

SEQ ID NO: 145104 - DNA, 408 bp, Arabidopsis thaliana
aagttagcggatgcataccagaacgcaaggccgagatatccgatcgattggttcacgaaacttgctgctcgaaccggtcagcacaaatcagcttgggatgttggtactggcaacggtcaagcagctattggtgtaagcttcttccatcttgttccaaaagtttccactttcttatgtactctgcttcacttagatctctcaaacgatgttgttttaatccctctagaagaacacaattatggatttattagctttagttgagaggagagaagaagatgaatggcttctttctaatgaatttatgatttaattagagcatatatttattttcaatctgtactattaacgtcttatgttagtgatgattttgaatgtagtcctattataatcttttcacattttgtgatt

SEQ ID NO: 145105 - DNA, 387 bp, Arabidopsis thaliana
aacagaagcaaaacaacatcttcaatggcttcgcacctgagatcttggctcaagccttcaagatcaatgtcgagacggctcagcagctccagaaccagcaagataaccgtggcaacatcgtcaaggtcaacggacctttcggcgtcattaggccacccttgagacgcggcgaaagcggccaacaaccacatgaaatagctaatggtttagaggagactttgtgcaccatgcgatgcactgaaaacctcgatgacccgtcggatgctgacgtgtacaagccatcactcggatacattagcacacttaacagctacaatcttcctatccttagacttctccggcttagcgctcttcggggctccatccgtaaaaacgctttggtgctac

SEQ ID NO: 145106 - DNA, 412 bp, Arabidopsis thaliana
ggcggttcacagcaacaacaagaacagaaaaacttgtggagcgggttcgacgcacaggtcatagctcaagcattgaaaattgacgttcagttggctcagcagcttcagaaccaacaagacagcagaggaaacatcgttcgtgttaagggacctttccaggtcgtgaggccacctctaagacagccctacgagagcgaggagtggtgacacccacgtagcccacagggcaacggccttgaggagactatctgcagcatgaggtcccacgagaacattgacgaccctgctcgtgctgacgtgtacaagcccagcctaggtcgcgtgaccagcgtcaacagctataccttgcccatcttggagtatgtcaggctcagtgccactcgtggcgttctccagggtaatgcgatggtgc

SEQ ID NO: 145107 - DNA, 298 bp, Arabidopsis thaliana
ccaaatatgcataagcttttgttttctcttctctccgtcgtctcactctcatttctcctcttcttccatggcgccgaggcacgccagcgagaggcgccgtttccaaacgcctgccatttcagccaaatcaacagcctcgcgcccgctcaggcgacgaagttcgaagccggtcagatggaagtatgggaccacatgagccctgagctccgatgcgccggtgtaacggtggctcgcatcacccttcagcccaattccattttcttggccgctttctttaacccaccctgcccttgcttta

SEQ ID NO: 145108 - DNA, 184 bp, Arabidopsis thaliana
caaggattcccttagtaacggcgagcgaaccgggtagagcccagcttgaaaatcggacgtcttcggcgttcgaattgtagtctggagaagcgtcctcagcgacagaccgttcctatgttccctggaaaggggcgccagatagggtgtgagccccgttgtgccctgtccttgttgtatcactagg

SEQ ID NO: 145109 - DNA, 267 bp, Arabidopsis thaliana
caaagaaagagtttttttaactagcttagctcaaagagtttgcttaagacaagaagaacatggcgtcttaccagaaccgtccaggaggtcaggccactgacgagtacggtaacccgatccagcagcagtatgacgagtacggaaatccgatgggaggaggaggatacggaactggtggtggtggaggagctacaggtggccttggatactgtacatgtggccaagggttctgttcatgtgtccattgttacggatccgttggtctta

SEQ ID NO: 145110 - DNA, 371 bp, Arabidopsis thaliana
ggaagcatcctttctgtcttcagtttatcctcaggtttttcttcatcccatttcaattatgggtaaaatcatgcctaggcattaacttattttcttgttccttaaggtttaccttgatttcggcttggcggttccaaagcttagtgtccatggtatggtttcttcagttaaagagctccttgacttagcatcaataaagaaggtaaaatgtattttacttgcattatctttgttattgttcatgagtaaccataagatattattgcaggttatgttcatctctgatggtgatgcatgttctgagaccttctattttaggtagctctagtttttacctcttttttataagttgtaacttatcttatttttgt

SEQ ID NO: 145111 - DNA, 258 bp, Arabidopsis thaliana
tctcaacaaactcgagtaatacctcttcgcctgaaaaaaaaatacagagaccaccactcacaggtcataatcgtaatagcaaagtgataaccaaatagtttgctccaccaagccttacatcgtttcaagtggatatctgttagcattcccataggtagatcgggcggatccaatccaagctccatcaacgcgttactgcatagaaacgcccaatatcatatcaccctcacatagagaaggtttcttgttagaatttga

SEQ ID NO: 145112 - DNA, 214 bp, Arabidopsis thaliana
atttctcacattttcgtagccgcaagactcctttcagattcttacttgcagctatgggtaaagagaagtttcacattaacattgtggtcattggtcatgttgattctggaaaatcgaccacaactggtcacttgatctataagcttggtggtattgacaagcgtgtcatcgagaggttcgatttggaggctgctgatatgtacaagaggttctt

SEQ ID NO: 145113 - DNA, 319 bp, Arabidopsis thaliana
ggagaacagccacttgtcatcatcgctcttctcgacatcgccaactaccaaaaccaactcgaccgcaaccctagagtgttccatttggccggaaacaaccagcagggaggctttggcggttcacagcaacaacaagaacagaaaaacttgtggagcgggttcgacgcacaggtcatagctcaagcattgaaaattgacgttcagttggctcagcagcttcagaaccaacaagacagcagaggaaacatcgttcgtgttaagggacctttccaggtcgtgaggccacctctaagacagccctacgagagcgaggagtgga

SEQ ID NO: 145114 - DNA, 414 bp, Arabidopsis thaliana
accaaaaccaactcgaccgcaaccctagagtgttccatttggccggaaacaaccagcagggaggctttggcggttcacagcaacaacaagaacagaaaaacttgtggagcgggttcgacgcacaggtcatagctcaagcattgaaaattgacgttcagttggctcagcagcttcagaaccaacaagacagcagaggaaacatcgttcgtgttaagggacctttccaggtcgtgaggccacctctaagacagccctacgagagcgaggagtggagacacccacgtagcccacatggcaacggccttgaggagactatctgcagcatgaggtcccacgagaacattgacgaccctgctcgtgctgacgtgtacaagcccagcctaggtcgcgtgaccagcgtcaacagctatacct

SEQ ID NO: 145115 - DNA, 417 bp, Arabidopsis thaliana
aaaaagaaaatggttaagctcagcaatctcctcgttgcaaccttcggggttctcctcgtccttaacggctgccttgcgaggcagtcacttggggttcctcctcagctacagaacgagtgtaacctcgacaacctagatgttctccaagccaccgaaactatcaagagtgaagccggtcagatcgagtactgggaccacaaccaccctcagctccgatgtgttggtgtttccgttgctcgttatgtaattgaacaaggcggtctttacttgcccaccttcttcacttccccaaaaatttcctacgtcgttcaaggaacgggtatcagcggaagagtggtccctggatgtgccgagaccttcatggactcgcagccgatgcaaggacaacatcaaggccaaccatggcaaggacgacag

SEQ ID NO: 145116 - DNA, 379 bp, Arabidopsis thaliana
ggttaagctcagcaatctcctcgttgcaaccttcggggttctcctcgtccttaacggctgccttgcgaggcagtcacttggggttcctcctcagctacagaacgagtgtaacctcgacaacctagatgttctccaagccaccgaaactatcaagagtgaagccggtcagatcgagtactgggaccacaaccaccctcagctccgatgtgttggtgtttccgttgctcgttatgtaatagaacaaggcggtctttacttgcccaccttcttcacttccccaaaaatttcctacgtcgttcaaggaacgggtatcagcggaagagtggtccctggatgtgccgagacctttatggacttgcagccggtgcaaggccaacat

SEQ ID NO: 145117 - DNA, 420 bp, Arabidopsis thaliana
aactaaaggtgatgtggtaagaatcccttctggtgtcaccaactttatcaccaacactaaccagacggttcctctccgcctcgcccagatcaccgtccctgtcaacaatcccggcaactacaaggattacttccctgctgcatcccaatttcagcaatcctacttcaatgggtttaccaaagaagtcctctctaccagtttcaacgtgccggaagaattgctagggagattggttacgagatcaaaagaaattggtcaagggattatccgaagaatttctccagaccaaatcaaggaacttgctgagcacgctacatctccttcaaacaaacacatagccaaaaaagaaaaggaggaagacaaagacctaagaacgttgtggactcctttcaatctctttgcaatagatccaatctactc

SEQ ID NO: 145118 - DNA, 389 bp, Arabidopsis thaliana
agaagaagagccacacactcacaaattaaaatgagagagagagagagagacagagagagagagagattctgcggaggagcttcttcttcgttgggtgttcatcgctattaacgttatcgcccctacgtgagctccatctccagatacatgcctgcatgtcgaagacttccacctaaggctttggagctcaaatcggtaaccgacaccacaaagcgagtgccgtgcgagaaaccggctttcttagtgggagatccgattccagcagtccagacgcatttggtcacacacgtgatttctcgattacccatcctaccttttcatttgtcatcttttatattccttatgccttttactaccgtcgtcaccaatttacttcttatttttttcct

SEQ ID NO: 145119 - DNA, 421 bp, Arabidopsis thaliana
atacacacatagcaaaaaatggcaaacaagttgttcctcgtctgcgcagctctcgctctctgcttcctcctcaccaacgcttccatctaccgcaccgtcgttgagttcgaagaagatgacgccactaaccccataggcccaaaaatgaggaaatgccgcaaggagtttcagaaagaacaacacctaagagcttgccagcaattgatgctccagcaagcaaggcaaggccgtagcgatgagtttgatttcgaagacgacatggagaacccacagggacaacagcaggaacaacagctattccagcagtgctgcaacgagcttcgccaggaagagccagattgtgtttgccccaccttgaaacaagctgccaaggccgttagactccagggacagcaccaaccaatgcaagtcaggaaaattt

SEQ ID NO: 145120 - DNA, 174 bp, Arabidopsis thaliana
aaaagatcttcctatgttatactattaaattcttgacgatgaatcgattttatagctccgatattgttattcatgatatttctttcattcgatatcatcgcaatctaattcatctgagtaagtttacaagcgaaagatttctcatctctatgggattaaatcccgagatattcc

SEQ ID NO: 145121 - DNA, 346 bp, Arabidopsis thaliana
agaggaagaaaaatgggtcgagtctcatctattatctctttctctttgacactcttgatcctcttcaatggctacactgcccaacagtggcccaacgagtgccagctcgatcaactcaatgcgctcgaaccatcccaaatcatcaagagcgagggtggtcgcatcgaggtctgggaccaccatgcaccccagctccgttgctccggctttgcctttgagcgtttcgtcattgagcctcaaggtcttttcttgcccactttcttgaacgccggcaaactcacgtttgttgttcacggtaggggtctaatgggaagagttattccgggatgcgcctagacgttcatgg

SEQ ID NO: 145122 - DNA, 405 bp, Arabidopsis thaliana
atccctggatgcgccgaaacattccaagactcatcagagttccaaccacgcttcgaaggtcaaggtcaaagccagaggttccgtgacatgcaccagaaagtggagcacattaggagcggtgataccattgccacaacacccggtgtagcccagtggttctacaacgacggacagcaaccacttgtcatcgtcagcatcttcgatctagccagtcaccagaaccagcttgaccgcaacccaaggccattttacttagccggaaacaacccacaaggtcaagtatggctacatggacgagagcaacagccacagaagaacatcttcaatggatttggacccgaggttattgctcaagctttgaagattgatctttaaacagcgcagcatcttcagaaccaagatgac

SEQ ID NO: 145123 - DNA, 357 bp, Arabidopsis thaliana
cagacaatttaattccaaaaaataaaacacaaaatcaaaagatatgaatgccacaaagtttgctgtgcttctcgtgattagcgttttgtgtgccattgtcaccgcaaggcatgtcgaagaagtgtctaaagagaccaaattaggcacctctcttccaaaaactactaccaaaggcattggagctcagctttctgctgctggtattacttccagcagtagtgatgtctatagctctgctactggtttcaacaatcccaaaggtccagacgcttatggatacgaaagtggctacacaagtaccatcggacaagtcattgcaaagggtcgcaaggcaagagtttcttttgcaagtgcttt

SEQ ID NO: 145124 - DNA, 391 bp, Arabidopsis thaliana
agctactccagcagtgctgcaacgagcttcgccaggaagagccagtttgcgtttgccccaccttgaaacaagctgccagggcagttagcctccagggacagcacggaccattccaatccaggaaaatttaccagtcagctaagtacttgcctaacatttgcaagatccagcaagttggtgaatgtcccttccagaccaccatccctttcttccctccttactactagagtccaagcccggcctagcacgatgatcatgagtgttgctattgatgtatgttaatactatacacagtcatcgtgtgtgttttataaaactgtaagcttaggatgtttgaggctaatgtaattagcactacaccgtaataaatgagagggttactttatgtttt

SEQ ID NO: 145125 - DNA, 387 bp, Arabidopsis thaliana
aaacaaacacattcacattcttctttcttctcaaaaaaaaaaaaaaaaacactagttcatttacatcaaaatgatcactgcagctctacacgaacctcagattcacaaaccaaccgatacatccgtcgtctccgatgatgtgcttcctcattctcctcctacgcctcgcattttccggtcaaagcttccggacattgacatccctaaccacctccctctccacacttactgcttcgaaaaactctcatctgtttccgacaagccttgtctcatcgttggctccaccgggaaaagctacacctacggcgaaacacacctaatctgtcggagagtcgcttccggggtatacaagttaggtatcagaaaaggtgacgtcatcatgatcct

SEQ ID NO: 145126 - DNA, 386 bp, Arabidopsis thaliana
attttctcttcttcttctccaagaaaacactgaagaagaaatggggttccttaagccaaccatggcgattctttttctagcgatggtcgccgtttcatcagccgtggacatgtcaatcatctcctacgacgagaaacatggcgtctccaccaccggtggccgtagcgaagccgaggttatgagtatctacgaggcatggttggtgaaacacggcaaggctcagagccagaactctcttgttgagaaagatcgacggttcgagatctttaaagacaatcttcgtttcgtcgatgaacataacgagaagaatcttagttatagattgagtttgactcgttttgcggatcttactaacgatgagtatagatccaagtatcttggagctt

SEQ ID NO: 145127 - DNA, 406 bp, Arabidopsis thaliana
caaccttcgccggaaataatggctttcccgcgatttctttctctcctcgccgtcgtcactctctctcttttcctcaccaccactgatgcttcctctcgctctctatccactccacctaaaacgaacgtactcgacgtcgtttcatctctccagcaaacacaaactatcctctcactcgacccgactcgttcctcactcaccaccaccaaacccgaatccctatccgacccggttttcttcaattcatcttcaccactatctctagagcttcactctcgagacactttcgtcgcgtcacagcacaaagactacaaaagcttaacactcagtcgactcgagcgcgactcatcccgagtcgccggaatcgtcgcgaagatcccgttcgccgtcgaaagagtcgatagat

SEQ ID NO: 145128 - DNA, 312 bp, Arabidopsis thaliana
tgctcgtgctgacgtgtacaagcccagcctatttcgcgtgaccagcgtcaacagctatacgttgcccatcttggagtatgtcaggctcagtgccactcgtggcgttctccagggtaatgcgatggtgcttcctaaatacaacatgaacgctaacgagatcttgtgctgcactggaggacaaggaaggatccaagtggtcatcgtcaacggacagaacgggttggaccaacaggtgcagattggtcagctcgtggtcatcccacaagggatcgcttactttgtccagtcccacggaaacaagttcgagtggtt

SEQ ID NO: 145129 - DNA, 443 bp, Arabidopsis thaliana
  unsure (1)..(443): unsure at all n locations
ncgcaggacgcccgtgggaggaagaaataataaccattttgggagaagtgttcttcgcttaatcccttcaagagtgtagaccctgagatatcacatacacataaacatatctcacttcgaaattncctttgactcatcatcatcaccatagtggagaagaatcgtctcctctcagctcaaaaccctagccgccgatgtcgtcgctgcttctcctcgtcgatcgatagccgccaccaccagacctgtcggtttctatctcgccgccaatcgatcagccatttccgcatcttctttcgttatccctcgtcgtttcagctccgattcaagagagactcctgcgacgaagaaggtggaggatgtaatgcccattgcgactggacacgagaaggaagagcttgaagctgaacttgagggaaggaggctggatgatattgacttccctg

SEQ ID NO: 145130 - DNA, 374 bp, Arabidopsis thaliana
ctcaagcattgaaaattgacgttcagttggctcagcagcttcagaaccaacaagacagcagaggaaacatcgttcgtgttaagggacctttccaggtcgtgaggccacctctaagacagccctacgagagcgaggagtggagacacccacgtagcccacagggcaacggccttgaggagactatctgcagcatgaggtcccacgagaacattgacgaccctgctcgtgctgacgtgtacaagcccagcctatgtcgcgtgaccagcgtcaacagctataccttgcccatcttggagtatgtcaggctcagtgccactcgtggcgttctccagggtatgcgatggtgcttcctaatacaacatggacgcttacga

SEQ ID NO: 145131 - DNA, 400 bp, Arabidopsis thaliana
tctctatatacccccttttaatttgtgtgctcttagcctttactctatagttttatatcatatcaatcgacatggcgaatgtggaccgtgatcggcgtgtgcatgtagaccgtactgacaaacgtgttcatcagccaaactacgaagatgatgtcggttttggtggctatggcggttatggtgctggttctgattataagagtcgcggcccctccactaaccaaatcttggcacttatagcaggagttcccattggtggcacactgctaaccctagctggactcactctagccggttcggtgatcggcttgctagtctccatacccctcttcctccttttcaatccggtgatagtcccggcgggtcttacttttgggcttgctgtgacgggaatcttggc

SEQ ID NO: 145132 - DNA, 418 bp, Arabidopsis thaliana
tacacacatagcaaaaaatggcaaacaagttgttcctagtctgcgcagctctcgctctctgcttcctccttaccaacgcttccatctaccgcaccgtcgttgagttcgaagaagatgacgccactaaccccataggcccaaaaatgtggtaatgccgcaaggagtttcagaaagaacaacacctaagagcttgccagcaatagatgctccagcaagcaaggcaaggccgtagcgatgagtttgattccgaagacgacatggagaacccacagggacaacagcaggaacaacagctattccagcagagctgcaacgagcttcgccaggaagagccagattgtgtttgccccaccttgaaacaagctgccaaggccgttagactccagggacagcaccaaccaatgcaagtcaggaaaat

SEQ ID NO: 145133 - DNA, 363 bp, Arabidopsis thaliana
gccggaaacaacccacaagggcaggaatggctacaaggccgaaagcaacagaagcaaaacaacatcttcaatggcttcgcacctgagatcttggctcaagccttcaagatcaatgtcgagacggctcagcagctccagaaccagcaagataaccgtggcaacatcgtcaaggtcaacggacctttcggcgtcattaggccacccttgagacgcggcgaatgcggccaacaaccacatgaaatagctaatggtttagaggagactttgtgcaccatgcgatgcactgaaatcctcgatgacccgtcggatgctgacgtgtacaagccatcactcggattcattagcacacttaacagctacaat

SEQ ID NO: 145134 - DNA, 360 bp, Arabidopsis thaliana
gacttatctctatatacccccttttaatttgtggtgctcttagcctttactctataggtgtatatcatatcaatcgacatggcgaatgtggaccgtgatcggcgtgtgcatgtagaccgtactgacaaacgtgttcatcagccaaactacgaagatgatgtcggttttggtggctatggcggttatggtgctggttctgattataagagtcgcggcccctccactaaccaaatcttggcacttatagcaggagttcccattggtggcacactgctaaccctagctggactcactctagccggttcggtgatcggcttgctagtcttcatacccctatttcttctttttagaacggtgata

SEQ ID NO: 145135 - DNA, 343 bp, Arabidopsis thaliana
aaaccaccaggaaaaattggcattaaccaccaaattaatcataccacttcttctccttatctccatagctgtcgtccactgcttatccttccgtgtggagatcgacgagttcgagccaccacagcaaggagaacaagaaggtccccgtcgccgtcctggtggtggctctggcgagggatgggaggaagagtcgacgaatcatccataccacttcaggaagcggagtttcagtgattggttccagtcaaaggaaggttttgtgagagtgctgcctaagttcacaaaacatgcaccggcttctcttccgaggaatcgagaactacagattctcgttggtggagat

SEQ ID NO: 145136 - DNA, 409 bp, Arabidopsis thaliana
aaaaacctctttactctctcctcaaaaactcaaaggagcaaaaaaaagagaagaagaatcaaaatcccacacaatggcaacacactcttccttcaccgcaacaacacctctctttctcatcgttcttctatccctatcctccgtctcagttctcggcgcatctcaccaccacgcaacggcgccggctccgtctgtagactgttcgactctcatactcaacatggctgactgtttatccttcgtttcgagcggaggcacggtggcgaaaccggaaggtacatgttgctctggtcttaagacggtgcttaaagctgactctcagtgtctatgtgaagcgtttaagagcagtgcttctcttggagttactttgaatatcactaaggcttctactcttcccgccgcatgcaag

SEQ ID NO: 145137 - DNA, 449 bp, Arabidopsis thaliana
  unsure (1)..(449): unsure at all n locations
cggaacggaagggccgacccgaccgacccgtcagcatctccttgttgcaaacttcggggttctcctcgtccttaacggctgccttgcgaggcagtcacttggggttcctcctcagctacagaacgagtgtaacctcgacaacctagatgttctccaagccaccgaaactatcaagagtgaagccggtcagatcgagtactgggaccacaaccaccctcagctccgatgtgttggtgtttccgttgctcgttatgtaattgaacaaggcggtctttacttgcccaccttcttcacttccccaaaaatttcctacgtcgttcaaggttcatacatgataattacccttccaataaaattaatgtatatatcatgtctaattaatgaagatataatcgattcaccatatgataactctnttttttcctctctacctaaanataatttacagg

SEQ ID NO: 145138 - DNA, 361 bp, Arabidopsis thaliana
ctttgtgataaaactaagtaagaaatagcataaaagtaaaagggaatgtccagtgaggagttgaggctgctttcgcgcgacgatagacaaccatgggaagttgccgcgaaagtatacgatggcaggtcaaggcgttaagaaagacatctctcctcctcttgaatggtacaacgttccagaaggtacaaaaacgctagctttggtggtggaagacatcgatgcgcctgatcctagtgccccgctggtgccatggacggcgtgggttgatgtcgacataccaccatacatgaaaggcctaccgtacggatatttcggcaatgcggatcagactaccggtatttgggaagggaacaacgatcac

SEQ ID NO: 145139 - DNA, 272 bp, Arabidopsis thaliana
gcgaatgtggaccgtgatcggcgtgtgcatgtagaccgtactgacaaacgtgttcatcagccaaactacgaagatgatgtcggttttggtggctatggcggttatggtgctggttctgattataagagtcgcggccccttcactaaccaaatcttggcacttatagcaggagtttccattggtggcacactgctaaccctagctggactcactttagccggttcggttgacggcttgctagtctctattcccctttttttccttcttcagtc

SEQ ID NO: 145140 - DNA, 353 bp, Arabidopsis thaliana
caaacgagtaagaatacaaatacaaatagcaaaaaaaatggcaaacaagctcttcctcgtctgcgcaactttcgccctctgcttcctcctcaccaacgcttccatctaccgcactgttgtcgagttcgacgaagatgacgccagcaaccccatgggcccaagacagaaatgtcagaaggagtttcagcaatcacagcacctaagagcttgccagaaattgatgcgcatgcaaatgaggcaaggccgtggtggtggtccctccctcgacgatgagttcgatttggaagacgacatcgagaacccacaaggcccccagcagggacaccagatcctccagcagtgctgcagcgagc

SEQ ID NO: 145141 - DNA, 334 bp, Arabidopsis thaliana
  unsure (1)..(334): unsure at all n locations
cgaacgagaaaaattgaatttgattaattcaacttataaaactttgaaacaattagaaaattacaaaaatgaaaccattctttttgagcaacaaagaacaattaatcaagtccgcgaacgggttttccaacaagctttacaaggagctataggaaccctaaatagttgtttgagtaatgagttacatttacgtactattaatgcaaatattgggatgtttggtacgatgaaaggaaataactgattaattatttccttacgattattataggcattatttttttttcttccaacaaangaatcaggacaatactcatggtaaccattaaagccg

SEQ ID NO: 145142 - DNA, 471 bp, Arabidopsis thaliana
ccggaacggaagtgccgaccagacccacgcgtccggtcaccggtatttggagaaggtcaaggtcagggtcagagtcaagggttccgtgacatgcaccagaaagtagagcacctacggtgcggtgacaccattgcaacaccatctggtgtagctcaatggttctacaacaatggaaatgagcctctcattcttgttgcagccgcggatctcgccagcaaccagaaccagcttgaccgcaaccttagaccatttttgatagccggaaacaacccacaagggcaggaatggctacaaggccgaaagcaacagaagcaaaacaacatcttcaatggcttcgcacctgagatcttggctcaagccttcaagatcaatgtcgagacggctcatcagctccagaaccagcaagataaccgtggcaacatcgtcaaggtcaacggacctttcggcgtcattaggccacccttgagacgc

SEQ ID NO: 145143 - DNA, 237 bp, Arabidopsis thaliana
gttcatcagccaaactacgaagatgatgtcggttttggtggctatggcgggtatggtgctggttctgattatgagagtaccggcccctccactaaccaaatcttggcacttatagcaggagttcccattggcggcacactgctaaccctagctggactcactctagccggttcggggatcggcttgctagtgttcatacccctcttaatcttctctatatcggtggatatcaaacca

SEQ ID NO: 145144 - DNA, 285 bp, Arabidopsis thaliana
agaaaatggttaagctcagcaatctcctcgttgcaaccttcggggttctcctcgggcttaacggctgccttgcgaggcagtcacttggggttcctcctcagctacagaacgagtgtaacctcgacaacctagatgttctccaagccaccgaaactatcaagagtgaagccggtcagatcgagtactgggaccacaaccaccctcagcttcgatgtgttggtgcttccgtcgcatcgctatcttaattcgacaagggctgtttttacttccccctccatcttccat

SEQ ID NO: 145145 - DNA, 392 bp, Arabidopsis thaliana
gtccgttcggaataaccccccttttgctggattattaccaatataatcataaaaagctaattgtggaggaattttcgcccaagcttctgataaactttgattttcagccagtccagcactaactcttcgatatatttcttgttgaaaggatccctgatcccattgataacgagtaggaccaaataattcgatgggagtagttgcagaaccataccacatagttccagcaacaacaaaagctgcaaaaaagacagcagcaatactactggaaaggacggtttcaatattgcccatacgtaatcctttgtatagacgttgaggcggacgaacactaagatggaataagcccgctaatatacccaacgtccctgctgcaatatgatgagaggcta

SEQ ID NO: 145146 - DNA, 378 bp, Arabidopsis thaliana
tccagagaatcgctgatccttcacacgcaagctaatgaagcctctcactaatggcgatctggtcaaatccccaactctgatcaagatctccgccttagttttcgtcaccgtcgctttcttctacttaggcaagcattggtccgacgatggctaccaacagctcgtcttcttctcctcttccacctccggtagctcgatcccggaggtctccgtttcaccgaatagtaacagagtctttaatttatcagcgataattcctactaaccatacccagattgaaatccccgccacaatacaacaacaacctccgtcggtggtggcggacacggagaaggttaaggtggaagctaatccttctccttctccaccttcttttct

SEQ ID NO: 145147 - DNA, 354 bp, Arabidopsis thaliana
aaattccggggccgcccacacccgtccgaccattcgttcctttcgtttttttcaaacccaaaaccaaagctgctcctaaaaaggttgggaagccgaaaagcaaggttgaggatggcatctttggaacgtctggtgggataggtttcacaaaggcgaatgagctattcgttggtcgtgttgctatgatcggtttcgctgcatcgttgcttggtgaggcgttgacgggaaaagggatattagctcagctaaatctggagacagggataccgatttacgaagcagagccattgcttctcttcttcatcttgatcactctgttgggagccattggagctctcggagacagacgaaaat

SEQ ID NO: 145148 - DNA, 100 bp, Arabidopsis thaliana
  unsure (1)..(100): unsure at all n locations
ggcgaaggggaccgggatcggcgggggcatgtagaccgtactgacaaacggggggatgagccaaactacgaagaggatgtcggntttggtggctatggcg

SEQ ID NO: 145149 - DNA, 378 bp, Arabidopsis thaliana
ctcagatctctccctccctctttctccgatctcagatccattcaacaatctccaaagaagatggaaccagtctcttcatggggtaacacctctctcgtctccgtagatccagagatccacgacctaatcgagaaggagaaacgtcggcaatgtcgaggaatcgaacttatcgcttccgagaatttcacttccttcgccgtcatcgaagctctcggaagtgccttaaccaacaaatactccgaaggtattcctggtaatcgttattacggaggtaacgaattcatcgatgagatcgagaatctttgccgttcaagagctctcgaagctttccattgtgatccagcagcgtggggcgttaatgttcagccgtattctgga

SEQ ID NO: 145150 - DNA, 254 bp, Arabidopsis thaliana
ctcacaacaaggaatacatggttatccaatttcagatccattcaaccatctacaacgaggacggaaccagcatcttggtgggccaacacaaggtctggtacacgtagatccacagagccacgacctaattcacaaggaggaacgtcatctgtgtcgcggaatcgaacttatcgattccgagaattttacttacttcgtcgacatcgaagctcatcgaagtgccgtaaccaacaaatactctcgaaggtattcct

SEQ ID NO: 145151 - DNA, 368 bp, Arabidopsis thaliana
cgaccctgctcgtgctgacgtgtacaagcccagcctaggtcgcgtgaccagcgtcaacagctataccttgcccatcttggagtatgtcaggctcagtgccactcgtggcgttctccagggtaatgcgatggtgcttcctaaatacaacatgaacgctaacgagatcttgtactgcactggaggacaaggaaggatccaagtggtcaacgacaacggacagaacgtgttggaccaacaggtgcagaagggacagctcgtggtcatcccacaagggttcgcatacgttgtccagtcccacggaaacaagttcgagtggatctctttcaaaactaatgaaaacgcaatgatcagcactttggcgggtagaa

SEQ ID NO: 145152 - DNA, 395 bp, Arabidopsis thaliana
aacagtatgaaccggatttgtaacaggagtagatcaaacaaacttaagtttcagagatttcaaagtcaaacaaaactttaacttctataaacctctaatctctctatagaggtttcgatgcaaattttagagatgaacacaaagaaaaataagcaaggcattgatgataatagcaggccttcctaacacaggagttccctccaaaacattgtaaatacatgagcactaattcataattctatggatacgccaattacattcacccagatccagaagacagggaatatcatcggccttacctgaacagcatcctttgagtaataacgaccatcaccagagaccacaagtgtggcaacctgcacatatgaacaataaacactcatgaatttttcgaa

SEQ ID NO: 145153 - DNA, 354 bp, Arabidopsis thaliana
cacgtatcttctaatcatagaccttatatatttggtaaagaaattgatacatacagattgtgaacatcatgtctccctcaagggactctttggtggacgctcttagtatgaaaggaggaacaggagaccatagttatgctactaattcacattatcagagaagtgttttctatgagatacaacctttggtcatagagaacgtaagagaaatgctactgaaaaatgggtttcctggttgcatcaaagtggcagacttgggttgttctactgaacaaaacacggtgttggccatgttcgcaatcgcctacacgatcatggagtcataccaacaaacgagtacaaacccacccggaa

SEQ ID NO: 145154 - DNA, 354 bp, Arabidopsis thaliana
catagcaaaaaatggcaaacaagttgttcctcgtctgcgcagctctcgctctctgcttcctcctcaccaacgcttccatctaccgcaccgtcgttgagttcgaagaagatgacgccactaaccccataggcccaaaaatgaggaaatgccgcaaggagtttcagaaagaacaacacctaagagcttgccagcaattgatgctccagcaagcaaggcaaggccgtagcgatgagtttgatttcgaagacgacatggagaacccacagggacaacagcaggaacaacagctattccagcagtgctgcaacgagcttcgccaggaagagccagattgtgtttgccccaccttgaaac

SEQ ID NO: 145155 - DNA, 202 bp, Arabidopsis thaliana
caaatatgcataagcttttgatttctcttctctccggcgcctcactctcatttcggctcttcttccatggcgccgaggcacgccagcgagaggcgccgtttccaaacgcctgccatttcagccaaatcaacagcctcgcgcccgctcacgcgacgaagttcgaagccggacagatggaagtatgggaccacatgagccctga

SEQ ID NO: 145156 - DNA, 395 bp, Arabidopsis thaliana
ctgaattaagcaaaagagaacaggaaggaaacataagctttcaatacagaagagacatgaatagctagataatggtaaacaggcactttaccctccacgtccttcagtgccgaaatcctcagaaaatataaattgcacgttccttatgtactgccttgaccatagcggctcaaatataaggtttgagaatcgaagaacagataagttctcgactagctcctttcctaggtaatggtctatcctgtaagaacacattttcattatcatatcagccaagcaaccaatagtatcatcattgcaacaaaatatcatatcagccaagcatccaatagtattatcattgcaacaaaacaaagctataagtgcatttatttgtcacctaaaaattggatctt

SEQ ID NO: 145157 - DNA, 393 bp, Arabidopsis thaliana
gaaacaaccagcagggaggctttggcggttcacagcaccaccaggaacagaaaaacttggggagcgggttcgacgcacaggtcatagctcaagcattgaaaattgacgttcagttggctcagcagcttcagaaccaacaagacagcagaggaaacatcgttcgtgttaagggacctttccaggtcgtgaggccacctctaagacagccctacgagagcgaggagtggagacacccacgtagcccacagggcaacggccttgaggagactatctgcagcatgaggtcccacgagaacattgacgaccctgctcgtgctgacgtgtacaagcccagcctaggtcgcgtgaccagcgtcaacagctataccttgcccatcttggagtatgtcaggc

SEQ ID NO: 145158 - DNA, 336 bp, Arabidopsis thaliana
gcaaagaggcagagaagatctccagtttattatacctttgcataaagctcaacaggacgacggaactccgggtcttccaataaggtcttgtcagttggaagtttcaacaagccctctgattctcctttcagcagttccctggtaccaaaacagtaaataatcatggataaccgatcatgtaaaaaagtatctgtttgctgcttttatttcttggagacacaaacagaaaagattaaaaaaatgcacaaagaaaatctctgaggataaagaaatgaaaattacacgaagtaggagttgtcaaacttcagcggctcttgggtccatggtccatcaaag

SEQ ID NO: 145159 - DNA, 394 bp, Arabidopsis thaliana
tctagtaatcaattggaaggatgataaagaaatagtttgagtataaggaagatgtttaagtgaatttaagtttggtttggaataagagcttcggagaaatgtacataagttttctcaaagaagtaaagatcttacataacgatgacatgtaaacatttgagcttcaaatacaatgatcattatattgttttgcagattggcgattgcattgaattagaaaccaaaaaaaaaataaaaaaaaaattatatgttctttacttcatttgtatggtccacttttagatcctttacttcgtcgtgctctctacttttggaatttcctttgcttttctcctcttcatctactacataaaatcaaaaatgaaaacatcttttttttactcaatatttactc

SEQ ID NO: 145160 - DNA, 397 bp, Arabidopsis thaliana
ctcaggagaacagccacttgtcatcatcgctcttctcgacatcgccaactaccaaaaccaactcgaccgcaaccctagagtgttccatttggccggaaacaaccagcagggaggctttggcggttcacagcaacaacaagaacagaaaaacttgtggagcgggttcgacgcacaggtcatagctcaagcattgaaaattgacgttcagttggctcagcagcttcagaaccaacaagacagcagaggaaacatcgttcgtgttaagggacctttccaggtcgtgaggccacctctaagacagccctacgagagcgaggagtggagacacccacgtagcccacagggcaacggccttgaggagactatctgcagcatgaggtcccacgagaacattgac

SEQ ID NO: 145161 - DNA, 297 bp, Arabidopsis thaliana
caagcgagtatgaatccaaatacaactcgctaaaacaatggcaaacaagctcttcgtacgtctgcgcaacattgcgccctatgcttccttctcaccaacagcttccatttaccgcactggtgtgctagttcgacgaagatgacgcccgcaaccccatgcgcccaagacagaaatgccagaaggagtttcagcaatcacagcacctaagagcttgccagaaattgatgcgcatgcaaatgaggcaaggccgtggtggaggtccctccctcgacgatgagttcgatttggaagacgaca

SEQ ID NO: 145162 - DNA, 336 bp, Arabidopsis thaliana
  unsure (1)..(336): unsure at all n locations
ggatggtgagttttgccgtttgggctctctttgctgctttactctcacagcagcgggtttgcttctgatgctggcgtaaggtttgaggatgccaaaacatactacttatctcctccctctggctcacatggaactcctccatcacacacccctccttcttctaactgtggaagtccaccttacgacccttctccttcaactacttctcacccttcacctgcatcacatactccaactccttccactccatcacacactccaactccacacactncatcacacacgccaactgcacacaccccttcttgtaactgtggaagttcacctttccaccct

SEQ ID NO: 145163 - DNA, 345 bp, Arabidopsis thaliana
cttccacacacccactcatggcgtctcgaagagttttatcatctcttctccgttcatcttccggtagatctgccgccaaattagtcaaccgaaaccccaggcttccttctccttcacccgcgcgtcacgccgctccatgtagctacctcctcggccgcgtcgccgagtatgcgacctcttcaccggcaagctctgctgcgccatcctctgctcctgctaaggatgaggggaaaaagacctatgattacggtggcaaaggtgcgatcgggcgtgtttgtcaagtcatcggtgccattgtcgatgtgagattcgaggatcaggaaaggattgcttccgatcatgaca

SEQ ID NO: 145164 - DNA, 389 bp, Arabidopsis thaliana
atctttatttaaatcgctgccgtttctttgactctttttctttctttatcctcccaagtaaacaaaacgtaaacaaaacaggtatgaaagctataattgtaaaccacgatcaaatttatggaagcattggtttatacatttctcttagtatccactttagggataatttttttcgctatttttttcgggaaccacctaaaatttcaactaaaaaatgaaataatttttcattatcttcattaacgtaatcagcctccaaatatttggaggctgattacgttaactagtccccgtgttcctcgaatggatctcttagttgttgagagggttgcccaaaggcagtatatagagcatacccagtaaacttacaagtacccagatataaagat

SEQ ID NO: 145165 - DNA, 361 bp, Arabidopsis thaliana
aagaaaatggttaagctcagcaatcttctcgttgcaaccttcggggttctcctcgtgcttaacggctgccttgcgaggcagtcacttggggttcctcctcagctacagaacgagtgtaacctcgacaacctagatgttctccaagccaccgaaactatcaagagtgaagccggtcagatcgagtactgggaccacaaccaccctcagctccgatgtgttggtgttttcgatgctcgttatgtaattgaacaaggcggcctttacttgcccacctttttcactttccccaaaaattttctacgtcgttcaagggacgggtattagcggaagagtggtccctggatgttccgggaccttcatg

SEQ ID NO: 145166 - DNA, 291 bp, Arabidopsis thaliana
caatctcagaatcatcttctttctctttcggaacaaaaatgacgtctcctctttcagatctcctaaaccttgatctatcagacaccaagaaaatcatcgctgaatacatatggatcgggggctctggaagggattttagaggcaaggccgggccattacaaggaccggtaggggttccaccaaggtttccaaatgggacctccatgggtctaggaccggtccagctggccgagatgattggggaggcattctttattcttaagccatatttaagggcccattcaagaaggg

SEQ ID NO: 145167 - DNA, 257 bp, Arabidopsis thaliana
cttaacaccgcgaagctctccttcgtggctaaaggacgaggtcttatgggaaaagtgagccctggatgcgccggagcattccaagactcatcagagttgcaaccacgcttcgaaggtcaaggtcaaagccagaggttccgtgacatgcaccaaaaagtggagcacatttggagcggggataccattggcacaacacccggtgtattccagcggttctacataaactgacaacaaacacttgtcatcggtaggatctt

SEQ ID NO: 145168 - DNA, 305 bp, Arabidopsis thaliana
caaaaagaaaatggttaagctcagcaatctcctcgttgcaaccttcggggttctcctcgtccttaacggctgccttgcgaggcagtcacttggggttcctcctcagctacagaacgagtgtaacctcgacaacctagatgttctccaagccaccgaaactatcaagagtgaagccggtcagatcgagtactgggaccacaaccaccctcagctccgatgtgttggtgtttccgttgctcgttatgtaattgaacaaggcggtctttacttgcccaccttcttcactttcccaaaaatttcctacg

SEQ ID NO: 145169 - DNA, 310 bp, Arabidopsis thaliana
cttcttctttatccattaaggtttgatcctctcacttaaattaggattatatatggctacatctgctagaagagcatatggattcgggagagctgacgaggcgactcacccggactccattagagccactttggctgagtttctttccacgttcgtcttcgtctttgctggagaaggctcaatcctcgctctagacaagttgtattgggacacggcggctcacacggggacaaacacgcctggagggttagttctggtggcgttagctcatgcattggccttgttcgcggctgtttctgcagccatcaat

SEQ ID NO: 145170 - DNA, 353 bp, Arabidopsis thaliana
aagaaagatagagaaaaaaaatgggaggcaaaggtgtgatgatggtggcgatactttgcctttgggcactctctgcaacatctgaagcagtaacagaggctgagccaggtttgatgatgaacttctacaaggacacgtgtcctcaggccgaagacatcgtccgtgaacaagtcaaactcctctacaaacgccacaagaacaccgctttctcttggctccgtaacatcttccatgactgcgccgttgagtcatgtgatgcgtcgcttttgctggattcgacaagaagagagctaggagagaaagaacacgacaggagcttcggacttagaaactttaggtacatcgaggagatc

SEQ ID NO: 145171 - DNA, 260 bp, Arabidopsis thaliana
aacaaaaagaaaatggctaagctcagcaatctcctcggtgcaaccttcggggttctcctcgtccttaacggctgccttgcgaggcagtcacttggggttcctcctcagctacagaacgagtgtaacctcgacaacctagatgttctgcaagccaccgaaactatcaagagtgaagccggtcagatcgagtactgagaccacagccaccctcagctccgatgtgttggtggttccgttgctcgtttgtaattgaacaaggc

SEQ ID NO: 145172 - DNA, 353 bp, Arabidopsis thaliana
  unsure (1)..(353): unsure at all n locations
atcacaaacgagtaagaatacaaatacaaatagcaaaaaaaatggcaaacaagctcttcctcgtctgcgcaactttcgccctctgcttcctcctcaccaacgcttccatctaccgcactgttgtcgagttcgacgaagatgacgccagcaaccccatgggcccaagacagaaatgtcagaaggagtttcagcaatcacagcacctaagagcttgccagaaattgatgcgcatgcaaatgaggcaaggccgtggtggtggtccctccctcgacgatgagttcgatttggaagacgacatcgagaacccacaaggccctcagcagggacaccagatcctncagcagtgctgcagc

SEQ ID NO: 145173 - DNA, 380 bp, Arabidopsis thaliana
gtcgaatctgaaatctgttttcaagcaagacttaccccctcaagtgggttccgttgttcaggttcttttcaacaccaccaagcatcagtaaaactactgctttctttatccaagcgtgcccataaatagaaggtgctaaggaacgagcaaggagatcaaatgcatcatctcttcgtgcaatatttttaatgttatctaggtcttgcttagtgtatataggtgcatttgcttctttattgagcagagcgatattattggctatgaggatagtcctacacagaaagaactcggtcaagactatcagagtgaaaacatcttgaactaacagatgtgtaagaaaaacgcacctaaagactccatttacactacctttgtttttt

SEQ ID NO: 145174 - DNA, 219 bp, Arabidopsis thaliana
aacaaaaagaaaacggttaagctcagcaatcttctcgttgcaaccttcagggttctcccgatccttatccgctgccgtggcgaggcaatcacttggtgttcctcctcagctacagaacgagtgtaacctcgacaacctagatgtttctccaagccacccaaactatcaagagtgtagccggtcagatcgagtacttgtgaccacaaccacccttagctt

SEQ ID NO: 145175 - DNA, 370 bp, Arabidopsis thaliana
cggggcggaccaagccttccgaaggaacaacaaggccaaccatggaaaggacagggacaacagggacaacaaggaagagaaggccaaccatgggaaggacagggacaacagggacaacaaggacgacagggacaacaaggccaaccatgggaaggacagggacagcagggacaacaagggttccgtgacatgcaccagaaggtggaacatgtgagacgcggagacgtctttgccaacactccaggctctgcccactggatctacaactcaagagaacagccacttgtcatcatcgctcttctcgacatcgccaactacccaaaccaactcgaccgcaaccctagaggtgtttcatttggcccggaaacaa

SEQ ID NO: 145176 - DNA, 307 bp, Arabidopsis thaliana
aaaaaacaccaaggtcaaccagggtactgcttaggtacatcagaacacatcaatgaaagacggggacaacatatgggtaggacacggtacaacaaaaaacaacaagcgactaacagggtacaccaagactcaaccatacacatcgacaagcaacagctagtgacaacaatgggatgccgccacatgcactataaggcataacatgtgaaactccgagacgtctttatcaacacttcaggctctgtccactggatctacaacttatgaaaacagccacttgtaatcatcgctcttctacatattcaca

SEQ ID NO: 145177 - DNA, 365 bp, Arabidopsis thaliana
atttttctcttcttcctcttctgaaaaattagggtttgagttcttcttctaatcgatcagaaagatgggtggaggaaacgcacagaaatcagccatggctcgtgccaaaaacttggagaaggctaaggctgcaggaaaaggtagccaattggaagctaacaagaaagctatgtcgattcagtgcaaggtttgtatgcaaacattcatctgcacgacatcggaagtgaaatgcagggagcacgcggaggcgaagcatccgaaagccgatgttgtcgcttgtttcccttaccttcaggaagtgatgaaagcttattatctcaactataaaggattccaatgtataacggatgggatcctcatctttc

SEQ ID NO: 145178 - DNA, 405 bp, Arabidopsis thaliana
gttgaaacctttaagagaagatctaattaataagaaagaggaggaaaaaaaaggatggggggctcagtttccatgggggcgtctctcgctccgtacttagtctctgcgatactactcttctttctcatcgagcagctctggtacctcgtcaagaaacgtaacctacctggtcctctctttgtccctccgatcatcggaaacgccatttcactcgtccgtgatcctacttgcttctggttcacgcaatccgacacggcaggcactttccctggccttggtgttaactacctcatcggcagattcatcatctacattagagacacagagcttcctcatcaaatattcttcaaccgttcgtttgcaagctttcaaccctttaggacatccttttggcaaacaactatt

SEQ ID NO: 145179 - DNA, 361 bp, Arabidopsis thaliana
cgttagataatcagttaacgattgttaacaattagtttttttggcctggtcaacgaatgtttatagtttaaacggttggtcaacgatatcttcatgtttaaaatggccgcatgtaaagttgaggtataaaatggccacaatttgaaagttggggtattaaacgacatttttcccaaacttacaactaaaatagtaagatagaaggaaaacgatttaaaccaaaattaaccgaatacaaacagatttctttatttttgaatatcttttgatagagaactatcgaagatgtccgcgacaaactaaagaaaatgattcctcttataaagatgagtaactgtcatacaatttcaaattctaacct

SEQ ID NO: 145180 - DNA, 284 bp, Arabidopsis thaliana
gttttggcgggattttgcggttttggcgggaaacatgattttacggttttgcggggaaatatgattttatgagtttggcgggaaaacatgattttgctgttttggcgtaaaaataagatttttgcggttttgacgaaaaatagattttgcggttccggcgggaaaatataatttttgcggttttggcaaaaaaacatgattttgcggttttggcgaaaaatataattttatgattttgacgggaaaacatgatttttacggtatggtgcgaaaaaatgattttg

SEQ ID NO: 145181 - DNA, 209 bp, Arabidopsis thaliana
  unsure (1)..(209): unsure at all n locations
caaaaagaaaatggttaagctcagcaatctcctcgttgcaaccttcggggttcgcctcgtccttaacggctgccttgcgaggcantcacttggggttcctcctcagctacagaacgagtgtaacctcgacaacctagatgttctccaagccaccgaaactatcaagagtgaagccggtcagatcgagtactgggaccacaaccacccta

SEQ ID NO: 145182 - DNA, 354 bp, Arabidopsis thaliana
caaaaagaaaatggttaagctcagcaatctcctcgttgcaaccttcggggttctcctcgtccttaacggctgccttgcgaggcagtcacttggggttcctcctcagctacagaacgagtgtaacctcgacaacctagatgttctccaagccaccgaaactatcaagagtgaagccggtcagatcgagtactgggaccacaaccaccctcagctccgatgtgttggtgtttccgttgctcgttatgtaattgaacaaggcggtctttacttgcccaccttcttcacttccccaaaaatttcctacgtcgttcaaggaacgggtatcagcggaagagtggtccctggatgtgccga

SEQ ID NO: 145183 - DNA, 385 bp, Arabidopsis thaliana
aagcgttggtgaggaggaagcagagggcgagaaggagtttcagcaatcacaacacctaagagcttgccagagatggatgagcaagcaaatgaggcaaggacgtggtggtggtccttccctcgacgatgagttcgatttcgagggcccccagcagggataccagctactccagcagtgctgcaacgagcttcgccaggaagagccagtttgcgtttgccccaccttgaaacaagctgccagggcagttagcctccagggacagcacggaccattccaatccaggaaaatttaccagtcagctaagtacttgcctaacatttgcaagatccagcaagttggtgaatgtcccttcagaccaccatccctttcttccttcctactacta

SEQ ID NO: 145184 - DNA, 372 bp, Arabidopsis thaliana
atcccggaataactcttcccattagaccccttccgtgaacaacagaagcaaaacagcatcttcaatggcttcgcacctgagatcttggctcaagccttcaagatcaatgtcgagacggctcagcagctccagaaccagcaagataaccgtggcaacatcgtcaaggtcaacggacctttcggcgtcattaggccacccttgagacgcggcgaaggcggccaacaaccacatgaaatagctaatggtttagaggagactttgtgcaccatgcgatgcactgaaaacctcgatgacccgtcggatgctgacgtgtacaagccatcactcggatacattagcacacttaacagctacaatcttctatcctcagac

SEQ ID NO: 145185 - DNA, 324 bp, Arabidopsis thaliana
aaccaatgggaaggaaaaagttggagactttatttaacctccctgacctaagggacgtcgaattgcctaaggaagtggactaccttttccgcaacaaggggattccttgtgttgaattcgagttagagcacggatttgtgtaccgtgagcacggaaacactcccggatactacgatggacggtactggacaatgtggaagctttcattgttcggatgcaccgactccgctcaagtgttgaaggaagttgaagaatgcaagaaggagtacccgggcgccttcattaggatcatcggattcgacaacacccgtcaagttcaatgca

SEQ ID NO: 145186 - DNA, 214 bp, Arabidopsis thaliana
tgcggttgagtcagaaatggaggtcctctcacggttaagacgtgatgcagaagagaagctggaggatttgatgagtaacaaggcagagataacctttgagaaagagagggttttcaatcttcgaaaagaagctgaagaagagagccagcggatttcaaagttgcagtatgaattggaagttgaacgaaaagccttgtccatggtcagatcgtgg

SEQ ID NO: 145187 - DNA, 389 bp, Arabidopsis thaliana
cgtccgaaacgatttttatgttgcagtccttgaacagttgactctcttttcaagaatcgtggcgggggacctccgagcctgggcgatcaacttcccattcttttaaatgacgagagattcatcaaggaacagctcattaaagccatggcctcgaaagaattttctttttccttctgttgtgattgtcattgttgggataatcgtggcgtttacttatcagtccaagttgaaaccacctccgccgaagctatgtggctcctccggtggtccaccgatcacagcgccgcggataaagcttcaagatgggaggtatttggcttacaaagagcatggacttccaagagagaaagctaaccgcatattcgtattcatccatggatcccgattgt

SEQ ID NO: 145188 - DNA, 382 bp, Arabidopsis thaliana
gggagattgcagcgccagaaagtccgtgtatcccgaaataggatattagattctgctgcaaaagttatggagatgtattctagccagaaagctgtgcttgaagtagaatattttggtgaagttggtactggtctaggccctacccttgagttttacacacttctaagccatgatctgcaaaaggcttccctagggatgtggagatcaagttctggtgacaaggtatctatgcaaattgatagagatgagattgaagacggaaaaccatctgcagctaacagagatatagttctggcaccacttgggttggtttctcgaccttggccctcaacagctgacatatgtgaaggtgtcagttcataacgtcatgatattccgcttt

SEQ ID NO: 145189 - DNA, 379 bp, Arabidopsis thaliana
agaaaaatgggtcgagtctcatctattatctctttctctttgacactcttgatccgcttcaatggctacactgcccaacagtggcccaacgagtgccagctcgatcaactcaatgcgctcgaaccatcccaaatcatcaagagcgagggtggtcgcatcgaggtctgggaccaccatgcaccccagctccgttgctccggctttgcctttgagcgtttcgtcattgagcctcagggtcttttcttgcccactttcttgaacgccggcaaactcacgtttcgtgttcacggaaggggtctaatgggaagagttattccgggatgcgccgagaacgtcatggagtcaccggtatttggagaaggtcaaggtcagggtcaga

SEQ ID NO: 145190 - DNA, 390 bp, Arabidopsis thaliana
ctttatccattaaggtttgatcctctcacttaaattaggattatatatggctacagctgctagaagagcatagggattcgggagagctgacgaggcgactcacccggactccattagagccactttggctgagtttctttccacgttcgtcttcgtctttgctggagaaggctcaatcctcgctctagacaagttgtattgggacacggcggctcacacggggacaaacacgcctggagggttagttctggtggcgttagctcatgcattggccttgttcgcggctgggtctgcagccatcaatgactctggtggccacgtcaaccccgctgtcacttttggtgctctaatcggaggcaggatcttggtcattccagcttattactattg

SEQ ID NO: 145191 - DNA, 406 bp, Arabidopsis thaliana
  unsure (1)..(406): unsure at all n locations
gagataacgagaacaagaaagaaagagaagattatatacatagaaaaggagagatcaaatggagtgggagaaatggtacttagatgcggttcttgtgccaagtgctttacttatgatgtttggttaccacatctatttgtggtataaggttcgaaccgatcctttctgcaccattgttggtacaaattcccgcgcccgtcgatcttgggtagcagccatcatgaaggacaacgagaagaagaacatcttagcggtacaaacactacgaaacacgataatgggagggacgttaatggcaaccacttgcattctnctctgcgcaggtctcgctgccgtnttaagcagtacttatagcattcaagaaacctttaaacgacgccgtatatggagctcatggtgacttcac

SEQ ID NO: 145192 - DNA, 294 bp, Arabidopsis thaliana
cggacgcgtgggcaataaagaggaagaaaaatgggtcgagtctcatctattatctctttctctttgacactcttgatcctcttcaatggctacactgcccaacagtggcccaacgagtgccagctcgatcaactcaatgcgctcgaaccatcccaaatcatcaagagcgagggtggtcgcatcgaggtctgggaccaccatgcaccccagctccgttgctccggctttgcctttgagcgtttcgtcattgagccttagggtcttttcttgcccactttcttgaacgccggcaaa

SEQ ID NO: 145193 - DNA, 434 bp, Arabidopsis thaliana
ctgtattcgaaaaaattcgtaacaaaatttaacatattttttttattatgagaacaaatcctactacttcaaatccagaggtttcgatacgtgaaaaaaaaaacctgggacgtatcgcccaaatcattggtccggtactggatgtagccttccccccgggcaaaatgcctaatatttacaatgctctggtggttaagggtcgagatactcttggtcaagaaattaatgtgacttgtgaagtacagcaattattaggaaataatcgagttagagctgtagctatgagtgcgacagagggtttaaagagaggaatggacgtggttgatatgggaaatcctctaagtgttccagtcggcggagcgactctaggacgaattttcaacgtgcttggggaacccgttgataatttaggtcctgtcgatactcgcacaaca

SEQ ID NO: 145194 - DNA, 315 bp, Arabidopsis thaliana
atcattacaaacgagtaagaatacaaatacaaatagcaaaaaaaatggcaaacaagcgggtcctcgtctgcgcaactttcgccctctgcttcctcctcaccaacgcttacatctaccgcactgttgtcgagttcgacgaagatgaccccagcaaccccatgggcccaagacagaaatgtcagaaggagtttgagcaatcacagcacctaagagcttgccagaaattgatgcgcatgcaaacgaggcaaggccgtggtggtggtccctacctcgacgatgagttcgattcggaagacgacatagagaacccacaag

SEQ ID NO: 145195 - DNA, 406 bp, Arabidopsis thaliana
cgccataaccagtacttcggtggcgtcggagacggcaaaacattgaacacaaaggccttccagagcgccgtagatcatctcagccaatactcatccgacggtggagctcagctctttgtccccgccggaaaatggctcaccggaagtttcagcctcacaagccatttcactttgtttcttcacaaagacgctactcttctcgctgctcaagacttagaagaatacccagttctaaaagctttgccttcttacggaagaggacgtgacgccgccggtggaagattcgctagtcttgtcttcgggactaatctctccgacgtaatcataaccggaaacaatggtacaatcgatggtcgaggatcgttttggtggcagaagtttcacggtggtaaactcaaatacactc

SEQ ID NO: 145196 - DNA, 276 bp, Arabidopsis thaliana
caaacgagtaagaatacaaatacaaatagcaaaaaaaatggcaaacaagctcggggctcgtctgcgcaacggttcgccctctgcttcctcctcaccaacgcttccatctaccgcactgttgtcgagttcgacgaagatgacgccagcaaccccatgggcccaagacagaaatgtcagaaggagtttcagcaatcacagcacctaagagcttgccagaaattgatgcgcatgcaaatgaggcaaggccgaggtggtgatcccttcctcgacgatgag

SEQ ID NO: 145197 - DNA, 316 bp, Arabidopsis thaliana
gcgtttgccccaccttgaaacaagctgccagggcagttagcctccagggacagcacggaccattccaatccaggaaaatttaccagtcagctaagtacttgcctaacatttgcaagatccagcaagttggtgaatgtcccttccagaccaccatccctttcttccctccttactactagagtccaagcccggcctagcacgatgatcatgagtgttgctattgatgtatgttaatactatacacagtcatcgtgtgtgttttataaaactgtaagcttaggatgtttgaggctaatgtaattagcactacacccgt

SEQ ID NO: 145198 - DNA, 408 bp, Arabidopsis thaliana
agaacagccacttgtcatcatcgctcttctcgacatcgccaactaccaaaaccaagtcgaccgcaaccctagagtgttccatttggccggaaacaaccagcagggaggctttggcggttcacagcaacaacaagaacagaaaaacttgtggagcgggttcgacgcacaggtcatagctcaagcattgaaaattgacgttcagttggctcagcagcttcagaaccaacaagacagcagaggaaacatcgttcgtgttaagggacctttccaggtcgtgaggccacctctaagacagccctacgagagcgaggagtggagacacccacgtagcccacagggcaacggccttgaggagactatctgcagcatgagggcccacgagaacattgacgaccctgctcgtgctga

SEQ ID NO: 145199 - DNA, 436 bp, Arabidopsis thaliana
tacacacatagcaaaaaatggcaaacaagttgttcctcgtctgcgcagctctcggggtctgcttcctcctcaccaacgcttccatctaccgcaccgtcgttgagttcgaagaagatgacgccactaaccccataggcccaaaaatgaggaaatgccgcaaggagtttcagaaagaacaacacctaagagcttgccagcaattgatgctccagcaagcaaggcaaggccgtagcgatgagtttgatttcgaagacgacatggagaacccacagggacaacagcaggaacaacagctattccagcagtgctgcaacgagcttcgccaggaagagccagattgtgtttgccccaccttgaaacaagctgccaaggccgttagacttcagggacagcaccaaccaatgcaagtcaggaaaatttacccgacagccaagca

SEQ ID NO: 145200 - DNA, 431 bp, Arabidopsis thaliana
aaagaatcgttccacataactaaaggtgatgtggtaagaatcccttctggtgtcaccaactttatcaccaacactaaccagacggttcctctccgcctcgcccagatcaccgtccctgtcaacaatcccggcaactacaaggattacttccctgctgcatcccaatttcagcaatcctacttcaatgggtttaccaaagaagtcctctctaccagtttcaacgtgccggaagaattgctagggagattggttacgagatcaaaagaaattggtcaagggattatccgaagaatttctccagaccaaatcaaggaacttgctgagcacgctacatcttcttcaaacaaacacaaagccaaaaaagaaaagggggaagaccaagacctaagaacgtgtggactccttttcatctctttgcaatagatccaatc

SEQ ID NO: 145201 - DNA, 251 bp, Arabidopsis thaliana
aggaagacaaggccaaccatgggaaggacagggacaacagggacaacaaggacgacagggacaacaaggccaaccatgggaaggacagggacagcagggacaacaagggttccgtgacatgcaccagaaggtggaacatgtgagacgcggagacgtctttgccaacactccaggctctgcccactggatctacaactcaagagaacagccacttgtcatcatcgctcttctcgacatcgccaactaccaaa

SEQ ID NO: 145202 - DNA, 264 bp, Arabidopsis thaliana
tcggttgataagaacatttgaaatcacttgagcactttaagaaaaggagaagtgaagagatatgcggatgagatccaaacgtggtttgcatcgagcaacattaaggatagaaaatctttgtaatttgttttttaaaaagtttgcattttgcattcacatgtataaatgtttcttttttctttgaatataatctagattcaaaaaaggtataatatatatatatatatatatatatatatatatatatatatatatattgtgtct

SEQ ID NO: 145203 - DNA, 417 bp, Arabidopsis thaliana
aacctctctactctctcctcaaaaactcataagagcaaaaaaaagagaagaagaatcaaggtcccacacaatggcaacacactcttccttcaccgcaacaacacctctctttctcatcgttcttctatccctatcctccgtctcaggtctcggcgcatctcaccaccacgcaacggcgccggctacgtctgtagactgttcgactctcatactcaacatggctgactgtttatccttcgtttcgagcggaggcacggtggcgaaaccggaaggtacatgttgctctggtcttaagacggtgcttaaagctgactctcagtgtctatgtgaagcgtttaagagcagtgcttcttttggaggtactctgaatattactaaagcttctactcttcccggcgcatgcaaagcttacgctcc

SEQ ID NO: 145204 - DNA, 249 bp, Arabidopsis thaliana
aaaatggttaagctcagcaatctcctcgttgcaaccttcggggttctcctcgtcgttaacggctgccttgcgaggcagtcacttggggttcctcctcagctacagaacgagtgtaacctcgacaacctagatgttctccaagccaccgaaactatcaagagtgaagccggtcagatcgagtactgggaccacaaccaccctcagctccgatgtgttggtgttttcgtagctcgttatgtgattgaacaa

SEQ ID NO: 145205 - DNA, 427 bp, Arabidopsis thaliana
acgatccccttttatccgagaaggatctatccaaatctttgtttgtcgaatctcgtcgcatggctaccattgctcctgctgctgatcaagctacagatctgttgcagaaactatccttggactcgccagcaaaagcttcagagatccctgagcctaacaagaagactgccgtctaccagtatggaggcgttgatgttcatggtcaagttccttcttatgatcgatctttgacaccaatgcttcccagtgatgctgctgacccttcagtttgctatgttcctaatccttacaatccctaccagtattacaatgtatatgggagtggtcaagagtggactgactacccagcttacacaaatcctgagggtgttgacatgaattctggaattatggagagaatgggactgttgtgtatcctcaggggtat

SEQ ID NO: 145206 - DNA, 99 bp, Arabidopsis thaliana
tcggacagatagcgaatactaatttgttaagaatgaatcgaattgaagctatagggggattatttgagggagtggagtatacggagatcgggattcaat

SEQ ID NO: 145207 - DNA, 330 bp, Arabidopsis thaliana
caacaaacaaaaagaaaatggttaagctcagcaatctcctcgttgcaaccttcggggttctcctcgtccttaacggctgccttgcgaggcagtcacttggggttcctcctcagctacagaacgagtgtaacctcgacaacctagatgttctccaagccaccgaaactatcaagagtgaacccggtcagatcgacgactgagaccacaaccaccctcagctccgatgcgttggagttgctcgggagattgattacgagatcaaaagaaattggtacagggattatttgaacaatttctccagaccaaatcaaggaactttgctgagcacgc

SEQ ID NO: 145208 - DNA, 439 bp, Arabidopsis thaliana
cggacgcgtgggtgaagattgatctttagacagcgcagcaacttcagaaccaagatgacaaccgtggaaacattgtccgagtccaaggcccgttcggtgtcattaggccgcctttgaggggccagagacctcaggaggaggaagaagaagaagaaggacgacacggacgacacggtaatggcttagaggagaccatctgcagcgccaggtgcaccgataacctcgatgatccgtctcgtgctgacgtgtacaagccacagctcggttacatcagcactctcaacagttacgatctccccatccttcgctttattccgctctcaacccttcgtggatctattcgtcaaaacgcaatggtgcttccacagtggaacgcaaacgcgaacgccattctttacgtgacagacggggaagtccaaatccagatcgtaaccacaat

SEQ ID NO: 145209 - DNA, 401 bp, Arabidopsis thaliana
tacaactcaggagaacagccacttgttatcatcgctcttctcgacatcgccaactaccaaaaccaactcgaccgcaaccctagagtgttccatttggccggaaacaaccagcagggaggctttggcggttcacagcaacaacaagaacagaaaaacttgtggagcgggttcgacgcacaggtcatagctcaagcattgaaaattgacgttcagttggctcagcagcttcagaaccaacaagacagcagaggaaacatcgttcgtgttaagggacctttccaggtcgtgaggccacctctaagacagccctactagagcgaggagtggagacacccacgttgcccacagggcaacggccttgaggagactattttgcccatgtggttccacgagaacattgt

SEQ ID NO: 145210 - DNA, 419 bp, Arabidopsis thaliana
aagaaaatggttaagctcagcaatctcctcgttgcaaccttcggggttctcctcgggcttaacggctgccttgcgaggcagtcacttggggttcctcctcagctacagaacgagtgtaacctcgacaacctagatgttctccaagccaccgaaactatcaagagtgaagccggtcagatcgagtactgggaccacaaccaccctcagctccgatgtgttggtgtttccgttgctcgttatgtaattgaacaaggcggtctttacttgcccaccttcttcacttccccaaaaatttcctacgtcgttcaaggaacgggtatcagcggaagagtggtccctggatgtgccgagaccttcatggactcgcagtcgatgcaaggtcaacatcatggtcaaccatggctaggacgactgggaca

SEQ ID NO: 145211 - DNA, 413 bp, Arabidopsis thaliana
aagaaataacaaaatggctcgagtctcttctcttctttctttcttcttaacactttggatccttttccatggctacgcggctcaacagggtcagcagggtcagcagtttccgaacgagtgccagctcgaccagctcaatgcgctcgagccgtcacacgtactgaagagcgaggctggtcgcatcgaggtgtgggaccaccacgctcctcagctccgttgctcaggtgtctcctttgcacgttacatcatcgagtctaagggtctctacttgccctctttctttaacaccgcgaagctctctttcgtggctaagggacgaggtcttatgggaaaagtgatccctggatgcgccgaaacattccaagactcatcagagttccaaccacgcttcgaaggtcaaggtcaaagccaga

SEQ ID NO: 145212 - DNA, 242 bp, Arabidopsis thaliana
aaaagaaaaagggagcgccgagacacacaaggacgcgcagccgaggcaagggcaacaacaaggcgcaaccaagaggaaggacgacagggacaacaaggccaaccacgggaaggacagggacaacagggacaacaaggaagacaaggccaaccaagggaaggacagggacaacagggacaacaaggacgacagggacaacaaggccaaccaagggaaggacagggacagcagggacaacaagg

SEQ ID NO: 145213 - DNA, 378 bp, Arabidopsis thaliana
aatcataaaggaactggatgcagccccctatctcctcgttgcaaccttcggggttcttccgggtccttaacggctgccttgcgaggcagacacttggggtttcttctcagctacagaacgagtgtaacctcgacaacctagacgtcatgaacagcaacatctttatcgcgggttcaacgcacaagatatagctcatgcactgcaaatagacgttcagttgggtcatcaggctttagaaccaacatgtcagtagatgaaacattgttcgtgttaagggaccttttcaggtcgtgaggccatctctaattcagtcctacttagagccaggtgtggggacacccacttagcccacagggcaacggtcttgtggagactatt

SEQ ID NO: 145214 - DNA, 418 bp, Arabidopsis thaliana
cttggctcaagccttcaagatcaatgttgtgacggctcatcagctccagaaccagcatgatgaccgtggcaacatcgtcaaggtcaacggacctttcggcgtcattaggccacccttgagacgcggcgaaggcggccaacaaccacatgaaatagctaatggtttagaggagactttgtgcaccatgcgatgcactgaaaacctcgatgacccgtcggatgctgacgtgtacaagccatcactcggatacattagcacacttaacagctacaatcttcctatcctcagacttctccgacttagcgctcttcgtggctgcatccggaaaaacgctatggtgctaccgcaatggaacgtaaacgcaaacgcggcactctacgtgacaaacggaaaggctcatatacaaatggtgaacgac

SEQ ID NO: 145215 - DNA, 298 bp, Arabidopsis thaliana
caaaaagaaaatggttaagctcatcaatctcctcgttgcaaccttcggggttctcctcgtccttaacggctgccttgcgaggcagacacttgaggttcctcctcagctacagaacgagtgtaacctcgacaacctagatgttctccaagccaccgaaactatcaagagtgaagccggtcagatcgagtactgtgaccacaaccaccctcagcttcgatgtgttggcgtctccgttgctcggtatgtaattgaacaaggcggtctttacttgcccaccttctttactttcccaaaaatt

SEQ ID NO: 145216 - DNA, 359 bp, Arabidopsis thaliana
caaaaagaaaatggttaagctcagcaatctcctcgttgcaaccttcggggttctcctcgaccttaacggctgccttgcgaggcagtcacttggggttcctcctcagctacagaacgagtgtaacctcgacaacctagatgttcttcaagccaccgaaactatcaagagtgaagccggtcagatcgagtactgggaccacaaccaccctcagctccgatgtgttggtgtttccgttgctcgttatgtaattgaacaaggcggtctttacttgcccaccttcttcactttcccaaaaattttctacgtcgttcaaggaacgggtatcagcggaagagtggtccctggatgtgccgagacct

SEQ ID NO: 145217 - DNA, 379 bp, Arabidopsis thaliana
gggacctttccaggtcgtgaggccacctctaagacagccctacgagagcgaggagtggagacacccacgtagcccacagggcaacggccttgaggagactatctgcagcatgaggtcccacgagaacattgacgaccctgctcgtgctgacgtgtacaagcccagcctaggtcgcgtgaccagcgtcaacagctataccttgcccatcttggagtatgtcaggctcagtgccactcgtggcgttctccagggtaatgcgatggtgcttcctaaatacaacatgaacgctaacgagatcttgtactgcactggaggacaaggaaggatccaagtggtcaacgacaacggacagaacgtgttggaccaacaggtgcagaag

SEQ ID NO: 145218 - DNA, 411 bp, Arabidopsis thaliana
taagctcagcaatctcctcgttgcaaccttcggggttctcctcgtccttaacggctgccttgcgaggcagtcacttggggttcctcctcagctacagaacgagtgtaacctcgacaacctagatgttctccaagccaccgaaactatcaagagtgaagccggtcagatcgagtactgggaccacaaccaccctcagctccgatgtgttggtgtttccgctgctcgctatgtaattgaacaaggcggactttacttgcccaccttcttcacttccccaaaaatttcctacgtcgttcaaggaacgggtatcagcggaagagtggtccctggatgtgccgagaccttcatggactcccagccgatgcaaggacaacaacatggccaaccatggcaaggacgacagggacaaca

SEQ ID NO: 145219 - DNA, 422 bp, Arabidopsis thaliana
cacacatagcaaaaaatggcaaacaagttgttcctcgtctgcgcagctctcgctctctgcttcctcctcaccaacgcttccatctaccgcaccgtcgttgagttcgaagaagatgacgccactaaccccataggcccaaaaatgaggaaatgccgcaaggagtttcagaaagaacaacacctaagagcttgccagcaattgatgctccagcaagcaaggcaaggccgtagcgatgagtttgatttcgaagacgacatggagaacccacagggacaacagcaggaacaacagctattccagcagtgctgcaacgagcttcgccaggaagagccagattgtgtttgccccaccttgaaacaagctgccaaggccgttagactccagggacagcaccaaccaatgcaagtcaggaaaatttacca

SEQ ID NO: 145220 - DNA, 191 bp, Arabidopsis thaliana
ctcctcgatgcaaccttcggggtttttctttttcttaacggctgccttgctaggcagtcggtaggtgttcctcctcagctacaaaactagtgtaacctcaacaacctagatgttctccaagccaccgaatctatcaagagtgtagccggtcatattcagttctgttgaccacaaccaccctcagcttcgat

SEQ ID NO: 145221 - DNA, 411 bp, Arabidopsis thaliana
gttcctacattcgttttctgagggatcatcagatcttgtttggagaaccagaagataaactgaaagaacctgctgcttgaacaaatcagtacacataaatggaagaataaaacaactttgctaatccacgataatattaccttgcaggcaaactttatttgctgattatcctcgtttcctgagaacgaattacaaccaggaccagcaagaatgcaaggttcgtattcctgaggtgtaattttgggcagacacaaagcacctcggtgagtcggtttctctaactgcggactatccaatgcctttcgagagtttattttgataaacgatgctgatgtcaacacaaagctattttgctttctaagaaacaataaagcaagggactgaagatgagtttgtcacttaatgacaagc

SEQ ID NO: 145222 - DNA, 312 bp, Arabidopsis thaliana
cacatagcaaaaaatggcaaacaagttgttttttgtttgcgctcctcgtccttaacgggtgccttgttaggcaggtacttggggttcctcctcagctacagaacgagtgtaacctcgacaacctagatgttctccaagccaccgaaactatcaagagtgaagccggtcagatcgagtactgggaccacaaccacccttagctccgatgtgttggtgtttccgctgctcgttatgtaattgaacaaggcggtctttacttgcccaccttatttacttacccaaaaatttcctacgtcgttcaaggaacgggta

SEQ ID NO: 145223 - DNA, 406 bp, Arabidopsis thaliana
caaactcacgtttgttgttcacggaaggggtctaatgggaagagttattccgggatgcgccgagacgttcatggagtcaccggtatttggagaaggtcaaggtcagggtcagagtcaagggttccgtgacatgcaccagaaagtagagcacctacggtgcggtgacaccattgcaacaccatctggtgtagctcaatggttctacaacaatggaaatgagcctctcattcttgttgcagccgcggatctcgccagcaaccagaaccagcttgaccgcaaccttagaccatttttgatagccggaaacaacccacaagggcaggaatggctacatggccgaaagcaacagaagcaaaacaacatttttaatggcttcgcacctgatatcttgtctcaagccttcaag

SEQ ID NO: 145224 - DNA, 417 bp, Arabidopsis thaliana
caaaaaatggcaaacaagttgttccttgtttgtgcagctctcgctctctgcttcctcctgaccaacgcttccatctaccgcaccgtcgttgagttcgaagaagatgacgccactaaccccataggcccaaaaatgaggaaatgccgcaaggagtttcagaaagaacaacacctaagagcttgccagcaattgatgctccagcaagcaaggcaaggccgtagcgatgagtttgatttcgaagacgacatggagaacccacagggacaacagcaggaacaacagctattccagcagtgctgcaacgagcttcgccaggaagagccagattgtgtttgccccaccttgaaacaagctgccaaggccgttagacttcagggacagcaccaaccaatgcatgttaggaaaatttaccagaca

SEQ ID NO: 145225 - DNA, 408 bp, Arabidopsis thaliana
cacaaatagcaaaacatggctaacaagctcttcctcgtctgcgcaactctcgccctgtgctttctcctcaccaacgcttccatctaccgcaccgttgtcgaattcgaagaagatgacgccagcacccccgtaggtccaagacagagatgccagaaggagtttcagcaatcacaacacctaagagcttgccagagatggatgagcaagcaaatgaggcatggacgtggagggggtcctttcctaaacgatgagggccatgtcgagggcccctagcagggataccagttacttcagcagggctgcaacgagcttccacaggaagagccaggttgtgttggcccctcttgcaacaagctggcagggtatgtagcctacagggacagtacggaccattccatattaggaaaa

SEQ ID NO: 145226 - DNA, 418 bp, Arabidopsis thaliana
caaaaatgttaacataacaagtatgttactgggaaaaaatcacgtttctcgactaaattgaatggtaaaaataaaatcattcaaaataataaaatttactatcattcattgggatcataaatagctttgctgttttcataaataccatttcattgctatgaaatacaatgttttccactttataaacttgttgcgatgcctattctagtgattttctgattttttttctcatttgcaatgttgtgagcaaaaaagcgaacaaggctaaaccgaaaagaaaacaaggaaagattaaagatggatttgtaaaacttaagggaaacttcctctagtgcacattctcttgtttaagacatcactcaggtttacatcattttcaaggtttccttaaacaatttggcgacgagtttaaatatat

SEQ ID NO: 145227 - DNA, 375 bp, Arabidopsis thaliana
caaccagcagggaggctttggcggttcacagcaacaacaagaacagaaaaacttgtggagcgggttcgacgcacaggtcatagctcaagcattgaaaattgacgttcagttggctcagcagcttcagaaccaacaagacagcagaggaaacatcgttcgtgttaagggacctttccaggtcgtgaggccacctctaagacagccctactagagcgaggagtggagacacccacgtagcccacagggcaacggccttgaggagactatctgcagcatgaggtcccacgagaacattgacgaccctgctcgtgctgacgtgtacaagcccagcctaggtcgtgtgatcagtgttaacagctttaccttgtccatttt

SEQ ID NO: 145228 - DNA, 338 bp, Arabidopsis thaliana
cggacgcgtgggtcacaaacgagtaagaattctaatactaatagcaaaaaaaatggcaaacaagctcttcctcgtctgcgcaactttctaccgcaccgtccttgtgaccaacgattacgactaccctaccgccatagagccaaaaaagagggaatgccgcaaggagattgaccaaggacaacaactaagagcttggcagcaattgatgcttcagctagcaaggcagggccgtatcgatgagtttgatttcgaagacgacatggagaacccacagggtcaacagcagtgacaacaggtatttcaagcagtgctgaacgagctttgccaggaagagccag

SEQ ID NO: 145229 - DNA, 419 bp, Arabidopsis thaliana
gcaatctcctcgttgcaaccttcggggttctcctcgtccttaacggctgccttgcgaggcagtcacttggggttcctcctcagctacagaacgagtgtaacctcgacaacctagatgttctccaagccaccgaaactatcaagagtgaagccggtcagatcgagtactgggaccacaaccaccctcagctccgatgtgttggtgtttccgttgctcgttatgtaattgaacaaggcggtctttacttgcccaccttcttcacttccccaaaaatttcctacgtcgttcaaggaacgggtatcagcggaagagtggtccctggatgtgccgagaccttcatggactcgcagccgatgcaaggacaacaacaaggccaaccatggcaaggacgacagggacaacaaggccaaccatgggaa

SEQ ID NO: 145230 - DNA, 364 bp, Arabidopsis thaliana
agaaaatggttaagctcagcaatctcctcgttgcaaccttcggggttctcctcgtgctgaacggctgccttgcgaggcagtcacttggggttcctcctcagctacagaacgagtgtaacctcgacaacctagatgttctccaagccaccgaaactatcaagagtgaagccggtcatatcgagtactgggaccacaaccaccctcagctccgatgtgttggtgtttccgttgctcgttatgttatttaacaaggctgtctttacttgcccacctttttcactttctcaaaaatttttctacgttcgttaaggaacgtatattagctgaatgagtgttctcttgatgtgctttgaccttttatttt

SEQ ID NO: 145231 - DNA, 323 bp, Arabidopsis thaliana
ggcaaattacatttgtgtcacttaataattagacgaagttgtttttgtaggcatatgcttctcttcagcttactcagatgcagggaggagtaacgtcatagacaaaaactaaccacgtgcatgtcatagtaccatgaaatctaacaaacatgcatttttatgaaaaatatgcattcagatctcgcttcatgtagtttgactatcaacaatcgcattgtaaatgatttccacttaagctaaataattgaccgtcacagtcatacacaaatgttatgacaacagggttttaccaatggaaagaggagatttatatgaaatacgtt

SEQ ID NO: 145232 - DNA, 374 bp, Arabidopsis thaliana; identical to SEQ ID NO: 130215

SEQ ID NO: 145233 - DNA, 426 bp, Arabidopsis thaliana
agaaaaatgggtcgagtctcatctattatctctttctctttgacactcttgatcctgttcaatggctacactgcccaacagtggcccaacgagtgccagctcgatcaactcaatgcgctcgaaccatcccaaatcatcaagagcgagggtggtcgcatcgaggtctgggaccaccatgcaccccagctccgttgctccggctttgcctttgagcgtttcgtcattgagcctcagggtcttttcttgcccactttcttgaacgccggcaaactcacgtttgttgttcacggaaggggtctaatgggaagagttatttcgggatgcgccgagacgttcatggagtcaccggtatttggagaaggtcaaggtcagggtcagagtcaagggttccgtgacatgcaccagaaagtagagcacctacggtgc

SEQ ID NO: 145234 - DNA, 250 bp, Arabidopsis thaliana
gaaaatggttaagctcagcaatcttcttgttgcaaccttcggggttctcctcggggcttaacggctgccttgcgaggcagtcactttggggttcctcctcagctacagaacgagtgtaaccttgacaacctagatgttctcaaagccaccgaaactataaagagtgatgcctgccaaatcgtgtactgtgaccacacccacccatagttcatatgtgattggttatcccgttcttttttattaaaatctt

SEQ ID NO: 145235 - DNA, 206 bp, Arabidopsis thaliana
  unsure (1)..(206): unsure at all n locations
acaaaacaaaacacacccaanaangcaaaagccacggggagcaacgcaaaccgacggggggggacncaanacaccggggggggcaagacgacgacgcacgccagcgagaggcgccgnaaccaaacgccagccaaaacagacaaaacaacagccacgcgcccgcacaggcgacgaaggaagaagccggncagaaggaaagaagggac

SEQ ID NO: 145236 - DNA, 378 bp, Arabidopsis thaliana
ggtaaaaacaatttctcattagcttacaatggcggatacacaccgtgtcgaccgtactgggagacactttcaatgggaggcgccctatgaaggcggccgtggtcaaggtcagtatgaaggagaccgtggatacggtggtggtggttacatgagcatgatgtctgaaagtggcccatctagtacccatgttttgttcctgttgaatggagtccctgtcgttggttcttttcttgccttggctggattacttttagtttgtgcggtgatcggtttaatggtagtttttccactattttgttttgtttaaaaccggttatagtttaaatttggagttttaagatccaaagatatgtgattttcgttaaggttttattaaga

SEQ ID NO: 145237 - DNA, 419 bp, Arabidopsis thaliana
agaagaagaaggacgacatggacgacacggttatggcttagaggagaccatctgcagcgccaggtgcaccgataacctcgatgacccgtctcgtgctgacgtgtacaagccacagctcggttacatcagcactctcaacagttacgatctccccatccttcgcttcatccgtctctcagccctccgtggatctatccgtcaaaacgcaatggtgcttccacagtggaacgcaaacgcgaacgctattctttacgtgacagacggggaagcccaaatccagatcgtaaacgacaatggtaacagagtgtttgacggacaagtctctcaaggacagctcatagccgtaccacaaggtttcttggtggtgaaacgcgcaacaagcaaccgattccagtgggttgagttcaaaacaaacgcta

SEQ ID NO: 145238 - DNA, 205 bp, Arabidopsis thaliana
ggttaagctcagcaatctcctcgttgcaaccttcggggttctccttgtccttaacggctgccttgcgaggcagtcacttggggttccttctcagctacagaacgaggggtaccttgacaacccagatggtctccagccaccggaactatcaagagtggagccgggcagatcgagtactgggaccacaaccacccttagcttcgat

SEQ ID NO: 145239 - DNA, 379 bp, Arabidopsis thaliana
ggttaagctcagcaatctcctcgttgcaaccttcggggttctcctcgtccttaacggctgccttgcgaggcagtcacttggggttcctcctcagctacagaacgagtgtaacctcgacaacctagatgttctccaagccaccgaaactatcaagagtgaagccggtcagatcgagtactgggaccacaaccaccctcagctccgatgtgttggtgtttccgttgctcgttatgtaattgaacaaggcggtctttacttgcccaccttcttcactttcccaaaaatttcctacgtcgttcaaggaacgggtatcagcggaagagtggtccctggatgtgccgagacctttatggactcgcagccgatgcaaggacaacaa

SEQ ID NO: 145240 - DNA, 424 bp, Arabidopsis thaliana
gcaccagaaggtggaacatgtgagacgcggagacgtctttgccaacactccaggctctgcccactggatctacaactcaggagaacagccacttgtcatcatcgctcttctcgacatcgccaactaccaaaaccaactcgaccgcaaccctagagtgttccatttggccggaaacaaccagcagggaggctttggcggttcacagcaacaacaagaacagaaaaacttgtggagcgggttcgacgcacaggtcatagctcaagcattgaaaattgacgttcagttggctcagcagcttcagaaccaacaagacagcagaggaaacatcgttcgtgttaagggacctttccaggtcgtgaggccacctctaagacagccctacgagagcgaggagtggagacacccacgtagcccacagggcaac

SEQ ID NO: 145241 - DNA, 419 bp, Arabidopsis thaliana
gttttctcttctctccgtcgtctcactctcatttctcctcttcttccatggcgccgaggcacgccagcgagaggcgccgtttccaaacgcctgccatttcagccaaatcaacagcctcgcgcccgctcaggcgacgaagttcgaagccggtcagatggaagtatgggaccacatgagccctgagctccgatgcgccggtgtaacggtggctcgcatcacccttcagcccaattccattttcttgcccgctttctttagcccacctgcccttgcttacgttgtccaaggagaaggagttatggggacgattgcttctggttgtcctgagacttttgcagaagttgaaggatcatcaggaagaggaggaggaggagacccgggtcgacgttttgaggacatgcaccagaagttggagaatt

SEQ ID NO: 145242 - DNA, 352 bp, Arabidopsis thaliana
caccactctctctctaatctatctattcgagaatggccaagatgggcttgaaacgggacccggctactactaaccagacccacaataatgccaaggagattcgttacagaggcgttaggaagcgtccttggggccgttatgccgccgagatccgagatccgggcaagaaaacccgcgtctggcttggcactttcgatacggctgaagaggcggcgcgtgcttacgatacggcggcgcgtgattttcgtggtgctaaggctaagaccaatttcccaacttttctcgagctgagtgaccagatggttcctaccggttttgtgcgcagccctatccagagcatctcgcttgattg

SEQ ID NO: 145243 - DNA, 290 bp, Arabidopsis thaliana
caacaaacaaaaagaaaatgggtaagctcattactctcctcgctgcaacctttggggttgtgctggttcttaacggttgccttgagaggcaaagacttggggttcctcctcagctacagaacgagtgtaacctcgacaacctagatgttcttcaagccaccgaaactatcaagagtgaagccggtcagatcgagtactgggaccacatccaccctcaacttcgaagtgttggtgtttccgttgctcgttatgtaattgaacaaggcggtctttacttgcccaccttcttc

SEQ ID NO: 145244 - DNA, 389 bp, Arabidopsis thaliana
aaaaatggctcgagtctcttctcttctttctttctccttaacacttttgatccttttccatggctacgcggctcaacagggtcagcagggtcagcagtttccgaacgagtgccagctcgaccagctcaatgcgctcgagccttcacacgtactgaagagcgaggctggtcgcatcgaggtgtgggaccaccacgctcctcagctccgttgctcaggtgtctcctttgcacgttacatcatcgagtctaagggtctctacttgccctctttctttaacaccgcgaagctctccttcgtggctaaaggacgaggtcttatgggaaaagtgatccttggatgcgcccgaacattccaagactcatcagagtttcaaccacgctttgaaggtc

SEQ ID NO: 145245 - DNA, 282 bp, Arabidopsis thaliana
cttcagacttctacgtcttagcgctcttctttgctccatccgtaataacacattggtgggggggtaatggaacggaggcgccaactcctaactcctcgtatcaaacggaaaggctcatattacatatggtgaacgacaacggataaagagtgtttgaccaagatatctccagcggacagctactagtcgtgccacaaggctcttttgtcatgaaacatgccttatgcgaacatgtcgagtggattgaatttcaagacaaacgaatacgcacaggtcaacaca

SEQ ID NO: 145246 - DNA, 424 bp, Arabidopsis thaliana
gtaattaactaacaacaaatggcgaacaagctcttcctcgtctgcgcagctctcgccctgtgtttcatcctcaccaacgctttcgtctatcgcacggttgtcgagttcgacgaagatgacgccagtaaccccataggcccaatacagaaatgtcagaaggagtttcagcaagaacagcacctaagagcttgccagagatggatgcgcaagcaaatgtggcaaggacgtggtggtggtccttccctcgacgatgagttcgatatggaagacgacatcgagaacccgcagagacgacagctactccagaagtgctgcagcgagcttcgccaagaagagccagtttgcgtttgccccaccttgagacaagctgccaaggccgttagattccagggacagcaacaccaaccagagcaagtcaggaaaa

SEQ ID NO: 145247 - DNA, 350 bp, Arabidopsis thaliana
aaggaagcgaagaagaagaagactttatacactctcgacgctattgatttcgtctgtgcagttttgtttctctatcagttagttttaaagatgagttcttcagagagtgtggaaaacgagtgcatgtgttgggctgcaagagatccatctggtcttctttctcctcatactatcactcgcaggtctgttacaactgacgatgtttcactcacaatcactcattgtggagtgtgttacgctgatgttatctggagtagaaaccaacatggagactccaagtacccttttggttcctgggcatgagattgctggaatagtgactaaggttgtgtctaaagttcaactgattc

SEQ ID NO: 145248 - DNA, 411 bp, Arabidopsis thaliana
gcaaaaaatggcaaacaagttgttcctcgtctgcgcagctctcgctctctgcttggtcctcaccaacgcttgcatctaccgcaccgtcgttgagttcgaagaagatgacgccactaaccccataagcccaaaaatgaggaaatgccgcaaggagtttcagaaagaacaacacctaagagcttgccagcaattgatgctccagcaagcaaggcaaggccgtagcgatgagtttgatttcgaagacgacatggagaacccacagggacaacagcaggaacaacagctattccagcagtgctgcaacgagcttcgccaggaagagccagattgtgtttgccccaccttgaaacaagctgccaaggccgttagactccagggacagcaccaaccaatgcaagtcaggaaaattta

SEQ ID NO: 145249 - DNA, 425 bp, Arabidopsis thaliana
caaaaaatggcaaacaagttgttcctcgtctgcgcagctctcgctctctgcttcctcctcaccaacgcttccatctaccgcaccgtcgttgagttcgaagaagatgacgccactaaccccataggcccaaaaatgaggaaatgccgcaaggagtttcagaaagaacaacacctaagagcttgccagcaattgatgctccagcaagcaaggcaaggccgtagcgatgagtttgatttcgaagacgacatggagaacccacagggacaacagcaggaacaacagctattccagcagtgctgcaacgagcttcgccaggaagagccagattgtgtttgccccaccttgaaacaagctgccaaggccgttagactccagggacagcaccaaccaatgcaagtcaggaaaatttaccagacagccaagca

SEQ ID NO: 145250 - DNA, 415 bp, Arabidopsis thaliana
cccacgcgtccgcggacgcgtgttccacgccaactccacacacccctccttgtaagtgtggaagtccaccttcccacccttccacgcctttacaccctttcactccttcgcacccaacgccatcacaccctccttttggtggatattactcatcttcttcaccaagaactgcggttgttgtgactccaccatcacccattgttgatccaggcacacccatcattggaggaagcccaccaactcctatcattgacccaggcactcctggaactcctttcattcctgctcctttcccaccaatcactggaacatgcgattactggagaaaccaccctacattgatatggggcttgcttggatggtggggaactgttggaggagcttttggtacagtcagtattcccagttgcattcc

SEQ ID NO: 145251 - DNA, 220 bp, Arabidopsis thaliana
caaaaagaaaatggttaagctcagcaatctcctcgttgcaaccttcggggttctggtggtccttaacggctgccttgcgaggcagtcacttggggttcctcctcagctacagaacgagtgtaacctcgacaacctagatgttctccaagccaccgaaactatcaagagtgaagccgttcagatcgagtactggtaccacaaccacccttagctccgatgt

SEQ ID NO: 145252 - DNA, 341 bp, Arabidopsis thaliana
cggacgcgtgggagaaaacatacacaaatagtaaaacatggctaacaagctcttcctcgggtgcgcaactctcgccctctgctttctccttaccaacgctttcatctaccgcaccgttgtcgaattcgaagaagatgacgccagcaaccccgtatgtccaagacagagatgccagaaggagtttcagcaatcacaacacctaagagcttgccagagatggatgagcaagcaaatgaggcaaggacgtggtggaggtccttccctcgacgatgagttcgatttcgagggcccccagcagggattccatttacttcagcattgtccgaactagctttgtcagg

SEQ ID NO: 145253 - DNA, 424 bp, Arabidopsis thaliana
agtgaaggatcaatctcatatctagccatattggatactgcccttgagcaagcctgctgaacacgtaaagaccctggactggagctcaatgttcttataatcgacggcatgagagtgtctatatgaggagcaatgttgtctacatgagcacgagcatggtgtgcaaagagagatacagtgtgaccaccagactccaacccaatctctttgacatcagaaagttgtgcaacaaaaacatgaaccacctttgcatccaaatcttttacaatcgatctcaaattgctcattgcagtcttgtgggaatctggatctttgtcaagattagccaactcttgtctaaatgccgaaccaagatttattcccattctccccctcctggttcctctgaaaagcataaaaagccacaatgatgaattcagtaagc

SEQ ID NO: 145254 - DNA, 419 bp, Arabidopsis thaliana
caccaccgacttttacgcggcggcggttcttcggccataatcggtggcagaatcacactcacagctttcgcttccactatcgcactcttcctcttcactctctccttcttcttcgcttcagattctaacgattctcctgatctccttcttcccggtgttgagtactctaatggagtcggatctagaagatccatgttggatatcaaatcggatccgcttaagccacggttgattcagatccggaaacaagctgatgatcatcggtcattagcattagcttatgcttcttacgcgagaaagcttaagctcgagaattcgaaactcgtcaggatcttcgctgatctttcgaggaaatacacggatctgattaacaaaccgacgtatcgagctttgtatgattctgatggagcctcgattga

SEQ ID NO: 145255 - DNA, 281 bp, Arabidopsis thaliana
gcgagcaataatgacggtttctcaatctcttgtcccttttgccataattgctttggtcctttcctttgtcaatgcttatgatccaagtccactccaagacttctgtgttgccattgatgacctaaaaggcgtttttgtgaatggtaggttttgttaagaccctaagcgagtcgatgcaaaatattttttctttttaggtctcaatttgcccgggtacaccattattctagttgtttcttatgtgactcactgttaatgttttttagattctttgtttttat

SEQ ID NO: 145256 - DNA, 423 bp, Arabidopsis thaliana
aaaacatacacacatagcaaaaaatggcaaacaagttgttcctcgtctgcgcagctgtcgctctctgcttcctcctcaccaacgcttccatctaccgcaccgtcgttgagttcgaagaagatgacgccactaaccccataggcccaaaaatgaggaaatgccgcaaggagtttcagaaagaacaacacctaagagcttgccagcaattgatgctccagcaagcaaggcaaggccgtagcgatgagtttgatttcgaagacgacatggagaacccacagggacaacagcaggaacaacagctattccagcagtgctgcaacgagcttcgccaggaagagccagattgtgtttgccccaccttgaaacaagctgccaaggccgttagactccagggacagcaccaaccaatgcaagtcaggaaaa

SEQ ID NO: 145257 - DNA, 179 bp, Arabidopsis thaliana
aaaacatacacacatagcaaaaaatggcaaacaagttgttcctcgtctgcgcagctctcgctctctgcttcctcctcaccaacgcttccatctaccgcaccgtcgttgagttcgaagaagatgacgccactaaccccataggcccaaaaatgaggaaatgccgcaaggagtttcagaaa

SEQ ID NO: 145258 - DNA, 336 bp, Arabidopsis thaliana
cgtcgctagaagaatatagtaattatatttttgcaggatttgttgaataacataagggaacactgcatttgcaaatattattgtgacatctttcatctaattacaatcaaattatttttttatgaaagcgactgaaagttacatgaacgtagcaaaaataaatttggcttagatattttggaatacatattgtgtcatcatccgaatcattttgacaaaaaataactcttctatatgctttatctatttatgatattttggtaatttccaggcaaaagataatctaaaatcacgagttagttctggaccattttcttgaatattttctgtaacttc

SEQ ID NO: 145259 - DNA, 411 bp, Arabidopsis thaliana
cgacaacggacagaacgtgttggaccaacaggtgcagaagggacagctcgtggtcatcccacaagggttcgcatacgttgtccagtcccacggaaacaagttcgagtggatctctttcaaaactaatgaaaacgcaatgatcagcactttggcgggtagaacctcgctcttgagggcattgccattggaggtcatatcaaatggtttccagatctctcccgaggaagctaggaagatcaagttcaacacacttgagaccactttgacccgcgctgccggtaggcaacaacaacagttgatcgaggagattgtcgaggcttaaatcaaaacgtttttctttttcttaataaagtatggtcagttagtaatcacgttcctttacctttaacgtacgtgtaaaatatgtgtttg

SEQ ID NO: 145260 - DNA, 363 bp, Arabidopsis thaliana
agaaaacatacacaaatagcaaaacatggctaacaagctcttcctcgtctgcgcaactctcgccctctgcttcctcctcaccaacgcttccatctaccgcaccgttgtcgaattcgaagaagatgacgccagcaaccccgtaggtccaagacagagatgccagaaggagtttcagcaatcacaacacctaagagcttgccagagatggatgagcaagcaaatgaggcaaggacgtggtggtggtccttccctcgacgatgagttcgatttcgagggcccccatcagggataccagcttcttcagcagtgctgtaacgagcttatccaggaagagccagtttgcgtttgccccaccttgaaaca

SEQ ID NO: 145261 - DNA, 420 bp, Arabidopsis thaliana
caacaaacaaaaagaaaatggttaagctcagcaatctcctcgttgcaaccttcggggttctcctcgtccttaacggctgccttgcgaggcagtcacttggggttcctcctcagctacagaacgagtgtaacctcgacaacctagatgttctccaagccaccgaaactatcaagagtgaagccggtcagatcgagtactgggaccacaaccaccctcagctccgatgtgttggtgtttccgttgctcgttatgtaattgaacaaggcggtctttacttgcccaccttcttcacttccccaaaaatttcctacgtcgttcaaggaacgggtatcagcggaagagtggtccctggatgtgccgagaccttcatggactcgcagccgatgcaaggacaacaacaaggccaaccatggcaaggac

SEQ ID NO: 145262 - DNA, 427 bp, Arabidopsis thaliana
ctccgctgaaataaccaaacccgatgatttaactcgtcccgatggaatcatccacggaatcgaacgtcttttaatcccacgttctgttcaagaagatttcaaccgccgtcgtagtctccgttcaatcgctgccgtattaccggaaggagcaccggaggttgatccaagaactcaccgtctcaagaaaaagccagcaccaattcccgccggagctccaccggttcttccggtttacgacgcaatgtcacctggtccgtcactagctccggctccggcaccaggaccgggtgggccacgccaccatttcaacggagaggctcaagttaaagattttatccacacgcttcttcattacggtggctacaatgaaatggcagatattctcgttaatctcacttctttagccaccgagatgggtcggctcgtg

SEQ ID NO: 145263 - DNA, 354 bp, Arabidopsis thaliana
tctgagcgggtttacgcacaggtcatagttaagcattgaaaattgacgttcagttggctagcagcttcagaaccaacaagacagcataggaaacattgttcgtgttaagggaccttttcaggtcgtgaggccacctctaagacagtcctactagtgcgaggagtgtagacacccacgtagcccacagggcaacggccttgaggagactatttgtagcatgaggtcccacgtgaacattgacgaccctgcttgtgctgtcgtgtacaagctcagtctaggttgtgttaccagcgtttacagctataccttgtccattcttggagtttttcaatgctcagtgccactcgtggtgtt

SEQ ID NO: 145264 - DNA, 280 bp, Arabidopsis thaliana
tcgcatgagaacagccacttgtcatcatcgctctttttgacatcgccaactaccaaaaccaagggggaccgtaaccctagagtgttccatatggcctgaaacaaccagcagggaggctttggcggttcacagtatcaacatgaacagaaaatcttgtggagcgggtttgacgcacaggtcatagctcaagcattgaaaatttgcgtttagttggctcatcagcttcagaaccaacatgacagcataggaaacatctgtttgtgtttagggactctttcag

SEQ ID NO: 145265 - DNA, 424 bp, Arabidopsis thaliana
caataaagaggaagaaaaatgggtcgagtctcatctattatctctttctctttgacactcttgatcctcttcaatggctacactgcccaacagtggcccaacgagtgccagctcgatcaactcaatgcgctcgaaccatcccaaatcatcaagagcgagggtggtcgcatcgaggtctgggaccaccatgcaccccagctccgttgctccggctttgcctttgagcgtttcgtcattgagcctcagggtcttttcttgcccactttcttgaacgccggcaaactcacgtttgttgttcacggaaggggtctaatgggaagagttattccgggatgcgccgagacgttcatggagtcaccggtatttggagaaggtcaaggtcagggtcagagtcaagggttccgtgacatgcaccagaaagtag

SEQ ID NO: 145266 - DNA, 273 bp, Arabidopsis thaliana
acgcgtccgctcttattaaatacacaaatagcctatcttttttaacaagctctttctcttctgcgcagctgttgtcctctgctggctcctcaccaacgcttccatctaccgcaccgttgtcgaattcgaagaagatgactccagctaccccgtatgttcaagacagagatgccagaaggagtttcagcaatcacaacacctaatagcttgccagagatggatgagctagcaaatgatgcaaggacgtggcggtggtcctttcctcgacgatga

SEQ ID NO: 145267 - DNA, 428 bp, Arabidopsis thaliana
cacacatagcaaaaaatggcaaacaagttgttcctcgtctgcgcagctctcgctctgtgcttcctcctcaccaacgcttccatctaccgcaccgtcgttgagttcgaagaagatgacgccactaaccccataggcccaaaaatgaggaaatgccgcaaggagtttcagaaagaacaacacctaagagcttgccagcaattgatgctccagcaagcaaggcaaggccgtagcgatgagtttgatttcgaagacgacatggagaacccacagggacaacagcaggaacaacagctattccagcagtgctgcaacgagcttcgccaggaagagccagattgtgtttgccccaccttgtaacaagctgtcaaggccgttagactccagggacagcaccaaccaatgcaagtcaggaaaaattaccagacagg

SEQ ID NO: 145268 - DNA, 422 bp, Arabidopsis thaliana
agaaataacaaaatggctcgagtctcttctcttctttctttcttcttaacactttggatccttttccatggctacgcggctcaacagggtcagcagggtcagcagtttccgaacgagtgccagctcgaccagctcaatgcgctcgagccgtcacacgtactgaagagcgaggctggtcgcatcgaggtgtgggaccaccacgctcctcagctccgttgctcaggtgtctcctttgcacgttacatcatcgagtctaagggtctctacttgccctctttctttaacaccgcgaagctctctttcgtggctaagggacgaggtcttatgggaaaagtgatccctggatgcgccgaaacattccaagactcatcagagttccaaccacgcttcgaaggtcaaggtcaaagccagaggttccgtga

SEQ ID NO: 145269 - DNA, 326 bp, Arabidopsis thaliana
gtttgttttgtgtagctctgatgaattgttatgagtctttattccagctgccattgctggagctaccgctgctgttttgtttgttccggcaacagttgtgtttgtcttttcgatatcataacctgcgttaagagatattcacagatcataagttaggaaacagagggttttagtgatatataacacacgtaagaggaaacttacagtcaaactttttccaagctaagacgagtttctttctgtcgaatactacacgatacccggtcatgtagttttctgtttcattaagagtaaacaatgtcattatttaattggatgttccatga

SEQ ID NO: 145270 - DNA, 419 bp, Arabidopsis thaliana
ctaaaaccaaaaacaaatactatgatagtaggaaatgatcaataagacgagactcaaagagtaataatctcactcttaaaactcgtctttgcagatgcaagataagtaagaaaacaattaggttcaaatatttgagtactaaattatttgagaaagagcaatgaaattattgaaaataagttacggtacaataactatgtctatgaattcttcattatgcccagaaccataatcatatagcttagctttgttcctttagtttaaagtgatctgttgagaaacataaggaatgcatattttgttgagttaggatataacttcattgtttaactttttctaatatatgcctttcttggtaaggagaacctttaacaatgtttttgatttctctgtaagtttatgactttactgatcatttt

SEQ ID NO: 145271 - DNA, 228 bp, Arabidopsis thaliana
gtgctcttagcctttactctatagttttatatcatatcaatcgacatggcgaatggggaccgtgatcggcgtgtgcatgtataccgtactgacaaacgtgttcatcagccaaactacgaagatgatgtctgctttggtggcttattgttggtttggtgctgtttcttattataagagtctcggtctcttcactaaccaatattttgatttttatagtaggagtttcta

SEQ ID NO: 145272 - DNA, 390 bp, Arabidopsis thaliana
gtgctcttagcctttactctatagttttatatcatatcaatcgacatggcgaatgtggaccgtgatcggcgtgtgcatgtagaccgtactgacaaacgtgttcatcagccaaactacgaagatgatgtcggttttggtggctatggcggttatggtgctggttctgattataagagtcgcggcccctccactaaccaaatcttggcacttattgcaggagtttccattggtggcacactgttaaccctagctggtctcactctagccggttcggtgattggcttgcttgttttcatacccctttttcttcttttcagttccggttatatgtcccggcggtctcttattattgggcttgctgtgacgggtaaatttggcttttggtatgtt

SEQ ID NO: 145273 - DNA, 415 bp, Arabidopsis thaliana
gaaaaaacaacagatccgaattttatctttaatcagccggaaaaaatggagaaagcgatcgagagacaacgcgttcttcttgagcatctccgaccttcttcttcttcttcgcacaattacgaggcttctctatctgcttctgcttgcttggctggggacagtgctgcatatcagaggacctctctctatggagatgatgttgtcattgtcgcggcacataggactccactatgcaagtccaaacgtggcaatttcaaggatacatatcccgatgatttgctcgcacctgttttgagggcattgatagagaagacgaatctaaacccaagtgaagtaggtgacattgttgtgggtactggtttggcacctggatctcagagagccagtgaatgcaggaaggctgccgtctatgctg

SEQ ID NO: 145274 - DNA, 291 bp, Arabidopsis thaliana
aaaaagaaaaaggttaagctcagcaatctcctcgttgcaaccttcggggttctcctcgtccttaacggctgccttgcgaggcagtcacttggggttcctcctcagctacagaacgagtgtaacctcgacaacctagatgttctccaagccaccgtaactatcaagagtgaagccggtcagatcgagtactgggaccacaaccaccctcagctccgatgtgttggtgtttccgcagctcgttatgtaattgaacatggcggtctttacttgcccaccttttttactttccca

SEQ ID NO: 145275 - DNA, 308 bp, Arabidopsis thaliana
catctcctcttgcaaaccaacgtaaaacactaactaagagatcaatatggctggagtgatgaagttggcatgcatggtcttggcttgcatgattgtggccggtccaatcacagcgaacgcgcttatgagttgtggcaccgtcaacggcaacctggcagggtgcattgcctacttgacccgaggtgctccacttacccaagggtgctgcaacggcgttactaaccttaaaaacatggccagttcatccccagaccgtcagcaagcttgccgttgccttcaatctgccgttaaagccgttggtcccggtc

SEQ ID NO: 145276 - DNA, 424 bp, Arabidopsis thaliana
cttgttcttcttcttcctcttcattttactttctcttcccgatttctctctgtccgattcaccttttcctccgatctcggtctccttagattccggaataatcccctcaaggcttggcttagtaatcgtcgttttctccgccatgagttccaatacggcgtcgtccagcgcgggggcagccggatcgggagattcttccgccgctaggaagaattcaaagcgacccaagtattcgaagttcacacagcaggagcttccagcttgcaagccaattctaacccctggttgggtcatttcgacatttttgatagtcagtgttatctttattccccttggagttatctcccttttcgcttcccaggatgttgaggagatcagtgatcggtatgatactgagtgcattccggcacctgctaggactaac

SEQ ID NO: 145277 - DNA, 413 bp, Arabidopsis thaliana
caagcaattaccagtcaaaagaaggtagaatacccttcaataaaggaaatcaaaccttggcagtgttgaaagccacaatgtctacagtctggcaatatactcactgaccaaggtggtaaagtatatgactggccattaaatttcacatgtgcagatttatgctcatcaatgtttgcgaaaaatgcatcgcacacctttcctccagtctcaccatctccatgataaatgtgtgcctgaaatttgcgttatttacaaataagaaatctggaatcttaagcatgtttaatataaaaccttattttcattcttgaaagggaatcaattaacaggccccgtatttttgttcagtaagataaaatcacattttatacggtacattttaaaagaagccacccctatatatgggcatttga

SEQ ID NO: 145278 - DNA, 83 bp, Arabidopsis thaliana
taagaacctctccaaaaaccctaatttgtcatcatcactttcacaatcttcttcattgatttctctcttccaaatctcccaaa

SEQ ID NO: 145279 - DNA, 241 bp, Arabidopsis thaliana
ctcccatctaaaaataacccgacccatttacgcgacccaaaccggatcaacccgcagtggatgagccaagcttcgtaatccaatccaaagaagcagaatccggcgtcgtacaacctcggcgtacgggcatataagttgttgcgccggtagcggaaccatggcagggcgccgcgcctacttggtccgaggtgctccacgtacccatgggtggtgttacgtgcatcaggtcggatcttcttag

SEQ ID NO: 145280 - DNA, 146 bp, Arabidopsis thaliana
aaagctgtagcaaccgatgctggggcaaactttatcaatatttcaatgtccagcattacttcaaagaggtttggtgagggagagaatttcgcttattcttttttttctctttctagtattatttttttctctcttcattttttttt

SEQ ID NO: 145281 - DNA, 377 bp, Arabidopsis thaliana
aaaaagaaaaaggttaagctcagcaatctcctcgttgcaaccttcggggttctcctcgtccttaacggctgccttgcgaggcagtcacttggggttcctcctcagctacagaacgagtgtaacctcgacaacctagatgttctccaagccaccgaaactatcaagagtgaagccggtcagatcgagtactgggaccacaaccaccctcagctccgatgtgttggtgtttccgttgctcgttatgtaattgaacaatgcggtttttacttgctcaccttttttattttcccaaatatattctacgttgtttaaggatctggtattatgctaatgataggttcctggttgtgccgtatacttttattgtacttgcagtt

SEQ ID NO: 145282 - DNA, 359 bp, Arabidopsis thaliana
gacgaaacagaacctgggagagaaagccagaataaccaatctcacaccgagagatagagagggaggtagagctctagctctgcataaaagaaggattcattcatcatatccagaaatggctctaaagcttaaccctctggatgcatctcagccttacaaattcccttcctcgactcgtccgccaactttttttttcaaatctcccaagttcctctgccttgctttttcttctccggctctcagctccggccccaaggaggttgagagtttgaagaaaccatttacgccccccagggaagagcatgttcaagtcttgcacttcatgccaccttaaaagatcgagatcttcaaatcttatg

SEQ ID NO: 145283 - DNA, 346 bp, Arabidopsis thaliana
caaaaagaaaatggttaagctcagcaatctcctcgttgcaaccttcggggttctcgtggtccttaacggctgccttgcgaggcagtcacttggggttcctcctcagctacagaacgagtgtaacctcgacaacctagatgttctccaagccaccgaaactatcaagagtgaagccggtcagatcgagtactgggaccacaaccaccctcagctccgatgtgttggtgtttccgtcgctcgttatgtaaatgaacaaggcggtcttcacttgtccacctttttcactttcccataaagttccttctttgttcaagtgaacggtttttatttgaagaatggttcctgg

SEQ ID NO: 145284 - DNA, 298 bp, Arabidopsis thaliana
caaaaagaaaatggttaagctcagcaatctcctcgttgcaaccttcggggttctcctcgtccttaacggctgccttgcgaggcagtcacttggggttcctcctcagctacagaacgagtgtaacctcgacaacctagatgttctccaagccaccgaaactatcaagagtgaagccggtcagatcgagtactgggaccacaaccaccctcagctccgatgtgttggtgtttccgtcgctcgttatgtaattgtacaaggcggtctttactttgcccacctttttttcttatcccaaaaa

SEQ ID NO: 145285 - DNA, 194 bp, Arabidopsis thaliana
aagaaaatggttaagctcagcaatctcctcgttgcaaccttcggagttctcctagagcttaacggctgcctggcgaggcagtcactcagtgttccttcttatttacataacgaatgtaacctcgacatcctatatagatttcaagccaccctaactatcaatcatgaatccatttcatatttaactacttaatt

SEQ ID NO: 145286 - DNA, 386 bp, Arabidopsis thaliana
ggaaggctaacatggctgcaagatattacaaggaaattgctgagtattatgaatctgatcaagaggtcgagcaagctattgcttactttgaaaaggcagctgaattctttcagaatgaagaagggaccacttctgcaaaccagtgcaatctaaaggttgcgcaatatgccgcccagctggagcagtatgagaaggcaatcaagatttatgaagacataacacgccattcactcaacaataacttgctcaagtatggaggtaaaggccatcttctcactgcttgcatgtgccacttatgcaaagcccgttgtgttttcatcactaacgctctggagaagtatcatgatctggttccaacttttactggaacacgggaatgcaggttt

SEQ ID NO: 145287 - DNA, 413 bp, Arabidopsis thaliana
gaaatattctcagttacgcatcgtcctcttaagagatcttttttattatcttgggaagtagagagaaatggcgggtcggggaaaacaacttggatctggtgcagcgaagaagtctacttctcgtagtagcaaggctgggcttcaattccctgttggtcgtatcgctcgatttttgaaagccggtaagtacgccgagcgtgttggtgccggagctccggtctatctcgccgccgttcttgaatacctcgccgctgaggtacttgagcttgctgggatcgcaccttgagacaacaagaagacccgtattgtttcacgacacattcagcttgctgtgaggaatgatgaggagctaagcaagctacttggagatgggacaattgctaatggaggagggatgcctaacattcacaatc

SEQ ID NO: 145288 - DNA, 138 bp, Arabidopsis thaliana
aaacaaaacacacccaaatatgcataagcttttgttttctcttctctccgtcgactgactcggatttctcctcttgtgtcatggcgccgaggcacgccagcgagtggcgacgttttcaaacggctgtcttttgagtca

SEQ ID NO: 145289 - DNA, 310 bp, Arabidopsis thaliana
gggacctttccaggtcgtgaggccacctctaagacagccctacgagagcgaggagtggaggcacccacgtagcccacagggcaacggccttgaggagactatctgcagcatgaggtcccacgagaacattgacgaccctgctcgtgctgacgtgtacaagcccagcctaggtcgcgtgaccagcgtcaacagctataccttgcccatcttggagtatgtcaggctcagtgccactcgtggcgttctccagggtaatgcgatggtgctttctaaatacaacatgaacgctaacgagatctttgtctgcact

SEQ ID NO: 145290 - DNA, 264 bp, Arabidopsis thaliana
gggtcagcagggtcagcagtttccgaacgagtgccagctcgaccagctcaatgcgctcgagccttcacacgtactgaagagcgaggctggtcgcattgaggtgtgggaccaccacgcttctcagctccgttgcttaggagtctcctttgcacgttacatcatcgagtctaagggtctctacttgccctctttctttaacaccgcgaagctctccttcgtggctaaaggacgaggtcttatggtaaaagtgattcctggttgctc

SEQ ID NO: 145291 - DNA, 399 bp, Arabidopsis thaliana
gaaaatggttaagctcagcaatctcctcgttgcaaccttcggggttctcctcgtccttaacggctgccttgcgaggcagtcacttggggttcctcctcagctacagaacgagtgtaacctcgacaacctagatgttctccaagccaccgaaactatcaagagtgaagccggtcagatcgagtactgggaccacaaccaccctcagctccgatgtgttggtgtttccgttgctcgttatgtaattgaacaaggcggtctttacttgcccaccttcttcacttccccaaaaatttcctacgtcgttcaaggaacgggtatcagcggaagagtggtccctggatgtgccgagaccttcatggactcgcagtcgatgcaaggacaacaaacttggccaaccat

SEQ ID NO: 145292 - DNA, 327 bp, Arabidopsis thaliana
atacacacatagcaaaaaatggcaaacaagttgttcctcgtctgcgcagctctcgctctctgcttcctcctcaccaacgcttccatctaccgcaccgtcgttgagttcgaagaagatgacgccactaaccccataggcccaaaaatgaggaaatgccgcaaggagtttcagaaagaacatcacctaagagcttgccagcaattgatgctccagcaagcaaggcaaggccggagcgatgagtttgatttcgaagacgacatggagaatcctcaggggcatcagcatgaacatcagctattccagcagtgctgcttcgagcttcttcag

SEQ ID NO: 145293 - DNA, 326 bp, Arabidopsis thaliana
tcgattttcatttaaatagaggccagaagctctatggaaaaatcgtgggtcaattttatgttttagtaagggagaaatggaattcagatttaagctattttttgcactggataggtttgctctggtgcaagactactattaggaggaccagtattatggagggaatttcttatgtcagtgtggtttagtttcttagttttcttgtgcgttttagttgtttgattttttttttttttgtctttttttttttgtttttttttttgtttttttttttttttttatttttttttttactagttgttttattttttttttttttttttttt

SEQ ID NO: 145294 - DNA, 357 bp, Arabidopsis thaliana
acatagcaaaaaatggcaaacaagttgttcctcgtctgcgcagctctcgctctctggttcctcctcaccaacgctttcatctaccgcaccgtcgttgagttcgaagaagatgacgccactaaccccataggcccaaaaatgaggaaatgccgcaaggagtttcagaaagaacaacacctaagagcttgccagcaattgatgcttcagcaagcaaggcaaggccgtagcgatgagtttgatttcgaagacgacatggagaacccacagggacaacaggaggaacaacagctattccagcagtgcttgatcgagcttcgtcaggaagagccagattgtgtttccccaccttgaaacaag

SEQ ID NO: 145295 - DNA, 352 bp, Arabidopsis thaliana
gtgacatgcaccagaaggtggaacatgtgagacgcggagacgtctttgccaacactgcaggctctgcccactggatctacaactcaagagaacagccacttgtcatcatcgctcttctcgacatcgccaactaccaaaaccaactcgaccgcaaccctagagtgttccatttggccggaaacaaccagcagggaggctttggcggttcacagcaacaacaagaacagaaaaacttgtggagcgggttcgacgcacaggtcatagctcaagcattgaaaattgacgttcaattggctcagcagcttcagaaccaacaagacagctgaggaaacatcgttcgggtttagggacc

SEQ ID NO: 145296 - DNA, 273 bp, Arabidopsis thaliana
ggaaaagagagagatttggtaaaaatgcagtcgatgaaagaaacagcttcgaatattgcagcttctgcaaaatctggcatggacaaaaccaaagctaccttggaggaaaaggcggagaagatgaagacacgagaccctgttcagaaacagatggctacacaggttaaagaagataagatcaatcaagctgagatgcagaagagagaaacgcgtcagcacaacgcggccatgaaagaagcggctggagccggaaccggtttaggtttggtgtcg

SEQ ID NO: 145297 - DNA, 363 bp, Arabidopsis thaliana
agaaaaatatcaaataaattccctatatatagcttcacataatgcaagtgagaaaccacacagagctagaaatataagaaataacaaaatggctcgagtctcttctcttctttctttcttcttaacacttttgatccttttccatggctacgcggctcaacagggtcagcagggtcagcagtttccgaacgagtgccagctcgaccagctcaatgcgctcgagccgtcacacgtactgatgagcgaggctggtcgcatcgaggtgtgggaccaccacgctcctcatctccgttgctcaggtgtcttcctttgcacgtacattatcgagtctaaagggctctactagccctctatctttaacac

SEQ ID NO: 145298 - DNA, 296 bp, Arabidopsis thaliana
aacaaaaaagaaatggttaagctcagcaatctcctcgttgcaaccttcggggttctcctcgggcttaacggctgccttgcgaggcagtcacttgggggtccttctcagctacagaacgagtgtaacctcgacaacctagatgttctccaagccaccgaaactatcaagagtgaagccggtcagatcgagtactgggaccacaaccaccctcaattccgatgtgttgggggtttccgtgcttcgtaatgtaattgaacaaggggggttttttcttgccccaccttttttcatttttc

SEQ ID NO: 145299 - DNA, 226 bp, Arabidopsis thaliana
aagatccagcaagttggtgaatgtcccttccagaccaccatcccttttttccttcttactactagagtccaagcccggcctagcacgatgatcatgagtgttgctattgatgtatggtaatactatacacaggcatcgggggtgttttataaaactagaagcttaagatgtttgaagctaatgtaattagcactacaccggaaataaatgagagggtttctttaaa

SEQ ID NO: 145300 - DNA, 182 bp, Arabidopsis thaliana
gtttcagcaatcacagcacctaagagcttgccagaaattgatgcgcatgcaaatgaggcaaggccgaggaggtggtccctccctcgacgatgagttcgatttggaagacgacatcgagaacccacaaggcccccatcagggacaccagattcttcagcagtgttgcagcgagcttttccagg

SEQ ID NO: 145301 - DNA, 278 bp, Arabidopsis thaliana
gtagaaaaccctatccggcttgaaggagacatcatcgaggctattgaggatcaagaaggattcagacttttacgcttcctgatctttcttacgattatggcgcattggaaccggccattaatggagaaatcatgcagattcatcaccagaagcattaacagggctatgttactaattacaataatgctcttgagcaggttgatcaaactgtgaacaaaggagatgcttccactggttgtaagtgcagagcgccatcaaattcaacggcggaggtcatg

SEQ ID NO: 145302 - DNA, 74 bp, Arabidopsis thaliana
gtaagcttaagatgtttgagagctaatgtaattagcactacaccgtaataaatgagaggtttactttatgtttt

SEQ ID NO: 145303 - DNA, 356 bp, Arabidopsis thaliana
catgtctccctcaagggactctttggtggacgctcttagtatgaaaggaggaacaggagaccatagttatgctactaattcacattatcagagaagtgttttctatgagatacaacctttggtcatagagaacgtaagagaaatgctactgaaaaatgggtttcctggttgcatcaaagtggcagacttgggttgttctactggacaaaacacggtgttggccatgtccgcaatcgcctacacgatcatggagtcataccaacaaacgagtaaaaacccaccagaaatcgattgttatttgaactattctttcatagaacgatttcaataccaccttcaagttgtttcattctttc

SEQ ID NO: 145304 - DNA, 226 bp, Arabidopsis thaliana
caaaaagaaaatggttaagctcagcaatctcctcgttgcaaccttcggggttctcctcgtccttaacggctgccttgcgaggcagtcacttggggttcctcctcagctacagaacgagtgtaacctcgacaacctagatgttctccaagccaccgtaactatcaagagtgaagccggtcatgatcgagtactgggacctcatccaccctcagctccgatgtgttgg

SEQ ID NO: 145305 - DNA, 323 bp, Arabidopsis thaliana
attatctctttctctttgacactcttgatcctcttcaatggctacactgcccaacagtggcccaacgagtgccagctcgatcaactcaatgcgctcgaaccatcccaaatcatcaagagcgagggtggtcgcatcgaggtctgggaccaccatgcaccccagctccgttgctccggctttgcctttgagcgtttcgtcattgagcctcaaggtcttttcttgcccactttcttgaacgccggcaaactcacgtttgttgttcacggaaggggtctaatgggaagagttattccgggatgcgccgagacgttcatggagtcacc

SEQ ID NO: 145306 - DNA, 427 bp, Arabidopsis thaliana
ccgagtccaaggcccgttcggtgtcattaggccgcctttgaggggccagagacctgaggaggaggaagaagaagaagaaggacgacatggacgacacggtaatggcttagaggagaccatctgcagcgccaggtgcaccgataacctcgatgacccgtctcgtgctgacgtgtacaagccacagcttggttacatcagcactctcaacagttacgatctccccatccttcgcttcatccgtctctcagccctccgaggatctatccgtcaaaacgcaatggtgcttccacagtggaacgcatacgcgaacgctattctttacgtgacagacggggaagcccaaatccagatcgtaaacgacaatggtaacagagtgtttgacggacaagtctctcaaggacagcttatagccgtaccacaaggtttc

SEQ ID NO: 145307 - DNA, 272 bp, Arabidopsis thaliana
gcattgtcgttgataaagtctccaacttgctctgcgaatggggaaacataatacttataaaggctgacaaatccttattgtgcattaccgagaaggatatggaaagcaagttagatatgctgttcaagaaaaacctagacacagtagctattaatcttgtccagagtcaacatgccgatgctgctgctactgccaatgtgatgaggaagtatggagatcatttatatgggaaacaagaactttgacgaagctatggtacagtactatttaca

SEQ ID NO: 145308 - DNA, 245 bp, Arabidopsis thaliana
ccagtagttattcttggtaccattgcctgtaacgtaggcttagcggttttagaaccatcaatgattggtgaacctgcggatccttttgcaactcctttggaaatattacctgaatggtatttctttcctgtatttcaaatacttcgtacagtgcctaacaaattattgggtgttcttttaatggtttcagtaccagcgggattattaaccagtccctttttggaaaatgttaataaggttcaaaa

SEQ ID NO: 145309 - DNA, 410 bp, Arabidopsis thaliana
aagaggaagaaaaatgggtcgagtctcatctattatctctttctctttgacactcttgatcctcttcaatggctacactgcccaacagaggcccaacgagtgccagctcgatcaactcaatgcgctcgaaccatcccaaatcatcaagagcgagggtggtcgcatcgaggtctgggaccaccatgcaccccagctccgttgctccggctttgcctttgagcgtttcgtcattgagcctcagggtcttttcttgcccactttcttgaacgccggcaaactcacgtttgttgttcacggaaggggtctaatgggaagaagtattccgggatgcgccgagacgttcatggagtcaccggtattaggagaaggtcaaggtcagggtcagagtcaagggttccgtgacatgcacc

SEQ ID NO: 145310 - DNA, 429 bp, Arabidopsis thaliana
attgcaacaccatctggtgtagctcaatggttctacaacaatggaaatgagcctctcattcttgttgcagccgcggatctcgccagcaaccagaaccagcttgaccgcaaccttagaccatttttgatagccggaaacaacccacaagggcaggaatggctacaaggccgaaagcaacagaagcaaaacaacatcttcaatggcttcgcacctgagatcttggctcaagccttcaagatcaatgtcgagacggctcagcagctccagaaccagcaagataaccgtggcaacatcgtcaaggtcaacggacctttcggcgtcattaggccacccttgagacgcggcgaaagcggccaacaaccacatgaaatagctaatggtttagaggagactttgtgcaccatgcgatgcactgaaaacctcgatgac

SEQ ID NO: 145311 - DNA, 431 bp, Arabidopsis thaliana
cggacgcgtgggccggtgggtagtccatggacttgtcctggagatgaagagttctacaatgcatcaatcatatggggagtgattggtccagggagaatgtttaccaaagaaggtatctatcccgggttgaactggctctttcttatcgggctacttgttccaggtcctttctgagtcctatcgtagatgttcccatagttgaattggctttaatacatttccattgtgcttttatcttttttgtttttgtttcatgcctcatgctttgtgtattctatttctgttcttgattcattgggtgatgtttgattctttaatttcctcatttttttgtttgttctttttcgtattttctctatttccttatttcattcctcctatttcttttgttattttattgattctatttatttttcatattcatattcttt

SEQ ID NO: 145312 - DNA, 427 bp, Arabidopsis thaliana
cgcggagacgtctttgccaactctccaggctctgcccactggatctacaactcaggagaacagccacttgtcatcatcgctcttctcgacatcgccaactaccaaaaccaactcgaccgcaaccctagagtgttccatttggccggaaacaaccagcagggaggctttggcggttcacagcaacaacaagaacagaaaaacttgtggagcgggttcgacgcacaggtcatagctcaagcattgaaaattgacgttcagttggctcagcagcttcagaaccaacaagacagcagaggaaacatcgttcgtgttaagggacctttccaggtcgtgaggccacctctaagacagccctacgagagcgaggagtggagacacccacgtagcccacagggcaacggccttgaggagactatctgcaacatga

SEQ ID NO: 145313 - DNA, 298 bp, Arabidopsis thaliana
cgtgtacaagccacaagctcggttacattatcactctcaacagttacgatcttcccattctgggcttcatccgtctctcagccctccgtggatctatccgtcaaaacgcaatggtgctttcacagtggaatcgcatacacgaacgcctttcttttcgtgtctgacggataagcccaaatccagatcgttaacgacaatggttacagagtgtttgacggacaaggtctttaagggacagctcatagccgtaccacaagggtttttcggtggtgaaacgcgcaacatgcatccgttttca

SEQ ID NO: 145314 - DNA, 374 bp, Arabidopsis thaliana
aaaaacctctcttaacgaggaaaaacaacaacatggcccctggtttctcttctctttcgaatctatcttcttcttttatccaatcctttcctatttttattctcaccttctcctcgtttttcccgaaactgttcttttgccctcttctctcaattttaatccaccaaacaaatcgaacagtgttcgataacttttagattgcaagtcctgtttttgatttggtcgggagaaagaaaactagggttttgatgggaactgatacagttatgtctggacgagtaaggaaagatctatcaaaaacgaatccatatgggaatattcctgctaattcacgtaagaagatccaacgacggagtaagaaaaccctaatctgt

SEQ ID NO: 145315 - DNA, 351 bp, Arabidopsis thaliana
tgttaagggacctttccaggtcgtgaggccacctctaagacagccctacgagagcgaggagtggagacacccacgtagcccacagggcaacggccttgaggagactatctgcagcatgaggtcccacgagaacattgacgaccctgctcgtgctgacgtgtacaagcccagcctaggtcgcgtgaccagcggcaacagctataccttgcccatcttggagtattgcaggctcagtgccactcgtggcgttctccagggtaatgcgatggtgctttctaaatacaacatgaacgctaacgagatctttgtctgcactggaggacaaggaaggatccaagtggtcaacgacaa

SEQ ID NO: 145316 - DNA, 335 bp, Arabidopsis thaliana
aaaacatacacacatagcaaaaaatggcaaacaagttgttcctcgtctgcgcagctctcgctctctgcttcctcctcaccaacgcttccatctaccgcaccgtcgttgagttcgaagaagatgacgccactaaccccataggcccaaaaatgaggaaatgccgcaaggagtttcagaaagaacaacacctaagagcttgccagcaattgatgctccagcaagcaaggcaaggccgtagcgatgagtttgatttcgtagacgacatggagaacccacagggacaacagcaggaacaacagctattccagcagtgctgcaacgagctttgccaggaa

SEQ ID NO: 145317 - DNA, 397 bp, Arabidopsis thaliana
agcaaaacatggctaacaagctcttcctcgtctgcgcaactctcgccctctgcttgctcctcaccaacgcttccatctaccgcaccgttgtcgaattcgaagaagatgacgccagcaaccccgtaggtccaagacagagatgccagaaggagtttcagcaatcacaacacctaagagcttgccagagatggatgagcaagcatatgaggcaaggacgtggtggtggtccttccctcgacgatgagttcgatttcgagggcccccagcagggataccagctactccagcagtgctgcaacgagctttgccaggaagagccaagttgctgttgccccaccttgtaacatgctggcagtgcagtttgccttcaaggacagtatggaccattttcaattca

SEQ ID NO: 145318 - DNA, 172 bp, Arabidopsis thaliana
tatctgcagcatgaggtcccacgagaacattgacgaccctgctcgtgctgacgtgtacaagcccagcctaggtcgcgtgaccagcgtcaacagctataccttgcccatcttggagtatgtcaggctcattgccactcgttgctgttctcagggttatgcgatttgtgctttc

SEQ ID NO: 145319 - DNA, 187 bp, Arabidopsis thaliana
aagaaaatggttaagctcagcaatctcctcgttgcaaccttcggggttctcctcgtgcttaacggctgccttgcgaggcagtcacttgttgttccttctcagttacagaacgagtgtaacctcgtcaacctatatgttttccatgccatcgtatctatctagtgtgttgccgttcttattttgtttc

SEQ ID NO: 145320 - DNA, 399 bp, Arabidopsis thaliana
ggccaaccatgggaaggacagggacagcagggacaacaagggttccgtgacatgcaccagaaggtggaacatgtgagacgcggagacgtctttgccaacactccaggctctgcccactggatctacaactcaggagaacagccacttgtcatcatcgctcttttcgacatcgccaactaccaaaaccaactcgaccgcaaccctagagtgttccatttggccggaaacaaccagcagggaggctttggcggttcactgcaacaacaagaatcagataaacttgtggagcgggttcgacgcacaggtcatagctcaagcattgaaaattgacgttcagttggctcagcagcttcagaaccaacaagacagcagagggaacattcgtcgtgttaagggacc

SEQ ID NO: 145321 - DNA, 423 bp, Arabidopsis thaliana
agaaatataagaaataacattttggctcgagtctcttctcttctttctttcttcttaacacttttgatccttttccatggctacgcggctcaacagggtcagcagggtcagcagtttccgaacgagtgccagctcgaccagctcaatgcgctcgagccgtcacacgtactgaagagcgaggctggtcgcatcgaggtgtgggaccaccacgctcctcagctccgttgctcaggtgtctcctttgcacgttacatcatcgagtctaagggtctcttcttgccctttttctttaacaccgcgaagctctctttcgcggcttttggacgagggcttttgggaaaagggatccctggatgcgccgaaacatttcaagactcatcatagtttcaaccactctttgtaggcaaggccaaactcagatgg

SEQ ID NO: 145322 - DNA, 428 bp, Arabidopsis thaliana
gagatcttggctcaagccttcaagatcaatgtcgagacggctcagcagctccagaaccagcaagataaccgtggcaacatcgtcaaggtcaacggacctttcggcgtcattaggccacccttgagacgcggcgaaggcggccaacaaccacatgaaatagcttggtttagaggagactttgtgcaccatgcgatgcactgaaaacctcgatgacccgtcggatgctgacgtgtacaagccatcactcggatacattagcacacttaacagctacaatcttcctatcctcagacttctccgccttagcgctcttcgtggctccatccgtaaaaacgctatggtgctaccgcaatggaacgtaaacgcaaacgcggcactctacgtgacatacggaaaggctcatatacaaatggtgaacgacaacggag

SEQ ID NO: 145323 - DNA, 395 bp, Arabidopsis thaliana
atcaaaatcaacgccaccaagtctatgataggtcactgcctcggtgcagctggaggtctagaagccatcgccaccgtgaaggctatcaacactggatggctgcattctttcatcaaccaatttaacccagaacaagctgtggactttgacacggtcccaaacgagaagaagcaacacgaggttgatgttgccatatcaaactcgttcgggttcggtggacacaactcggtagtcgccttctctgccttcaaaccctgatttcttcataccttttagattctctgccctatcgagtactatcatcatccatcatccatcaccaccacttgcagcttcttggttcacaagttggagctcttcctctggccttttgcgagttcttcattccccgtttc

SEQ ID NO: 145324 - DNA, 193 bp, Arabidopsis thaliana
ataaagaggaagaaatatgggtcgagtctcatctattatctctttctttttgacactcttgagcctcttcaaaggctgcactgcccaacagtggcccaacgagtgccatctcgatcaactcaaagcgctcgaaccatcccaattcatcaagagcgagggtggtcgctcctaggtctggaaccaccatgctccc

SEQ ID NO: 145325 - DNA, 310 bp, Arabidopsis thaliana
agaaacatacacatatagcataacatgtctaacaagctcttcctcgtctgcgcaactctcgccctctgcttcctcctcaccaacgcttccatctaccgcaccgttgtcgaattcgaagaagatgacgccagcaaccccgtaggtccaagacagagatgccagaaggagtttcagcaatcacaacacctaagagcttgccagagatggatgagcaagcaaatgaggcaaggacgtggtggtggtccttccctcgacgatgagttcgatttcgagggcccccagcagggataccagctacttcagcagtgct

SEQ ID NO: 145326 - DNA, 314 bp, Arabidopsis thaliana
tcggtcgagaccgcttatcagctccagaaccagctagataaccgtggcaacatcttcaaggtcaacggaccttttggcgtcattaggccacccttgagacgcggcgaatgcggccaacaaccacatgaaatagctaatggtttaagaggagactttgtgcaccatgcgatgcactgaaaacctcgatgacccgtcggatgctgacgtgtacaagccatcactcggatacattagcacacttaacagctacaatctttctatcctcagacttctccggcttaacgctttttcgggcttcatccgtaaaaacgcta

SEQ ID NO: 145327 - DNA, 295 bp, Arabidopsis thaliana
gttccattgattcattgtactatatatggtaacttaaagtaataaatttacagtcttggacgtgatgtaattagttaaaatataatatggtaactatttctatatcctatcagaatcaaaataaatttagattctgtgactaagctgacgggaaaggttaaaaaaatacagatagagagttttggcgttaattacaccggagtgaaactttgttcctacttaaaacgtactttaactaatttaattctatccaaaagatatgtgtattttgcttaagtattgtagataattcacc

SEQ ID NO: 145328 - DNA, 377 bp, Arabidopsis thaliana
tcggcgggttcgacgcacaagtcatagctcaagcattgaaaattgacgttcaggtggcgtgagcagcttcagaaccaacaagacatcataggtaacatcgttcgtgttaagggacctttccaggtcgtgaggccacctctaagacagccctactagaagcgggagtggagacacccacgtagcccacagggcaacggccttgaggagactatctgcagcatgaggtcccacgagaacattgacgaccctgctcgtgctgacgtgtacaagcccagcctatgtcgcgtgaccagcgtcaacagctttaccttgcccatcttggagtatgtcaggctcagtgccactcgtggcgttcttcagggtattgcgatggggct

SEQ ID NO: 145329 - DNA, 329 bp, Arabidopsis thaliana
ctaaaacgttaacgcagtctgacgctaataacggcggaggtttctccgttccacgttattgcgccgagacgattttcccgcggcttgattactcggcggagccaccggttcaaaccgtgattgctaaagacatccacggcgagacttggaaattccggcatatttacagaggaacaccttgccgtcatcttctaaccaccggttggagcactttcgttaaccagaagaaactaatcgccggagactcaatcgtcttcctccgttctgaatccggtgacctctgtgttggaatccggcgcgcttaacacggcggtctcggatttaacgta

SEQ ID NO: 145330 - DNA, 421 bp, Arabidopsis thaliana
ctctctctctctgataaaatcttaaacccacctcgagatcatagtcttcatcaattagccataaaaaagcacaatgctttcttcaatcaaaccatcttcgtcttccttctccaccgctatctccggcagcgtaaggcggtcaattcctacgacgctcaatttttctcctttacccatcatcaaaaactgccataaccaaagctttcactctaatgttgtctcccatcaaaagcctctacacatttcatctgcttcgaatttcaaacgtgaggtcaaagtcgaagcttacgaggcagatcgatcccgtccactggacatcaacatcgagcttcccgatgaacaatccgcgcagaaactgaaaatcggaatctacttcgcaacttggtgggcacttaacgttgtcttcaacatctacaacaag

SEQ ID NO: 145331 - DNA, 393 bp, Arabidopsis thaliana
tcgaagaggaagaaaaatgggtcgagtctcatctattatctctttctctttgacactcttgatggtcttcaatggctacactgcccaacagtggcccaacgagtgccagctcgatcaactcaatgcgctcgaaccatcccaaatcatcaagagcgagggtggtcgcatcgaggtctgggaccaccatgcaccccagctccgttgctccggctttgcctttgagcgtttcgtcattgagcctcaaggtcttttcttgcccactttcttgaacgccggcaaactcacgtttgtagttcacggtaggggtctaatgggaagagttatttcaggatgcgccgagacgttcatggtgtcaccggtatttgtagaaaggtaaggtctgggtcatagtta

SEQ ID NO: 145332 - DNA, 410 bp, Arabidopsis thaliana
cttcttcaactctttgagttatttatttccagaagcttcatagtttctggaaaatgctaatccactagcggaataaaagacagatctttaatccactatagaaaccgcgttttctgaaaatgcggttgcgttttccgatgaaatctgccgttttagcgtttgctatctttctggtgtttattccactgttttccgtcggaatacggatgattccgggaagactcaccgccgtatccgccaccgtcggaaatggctttgatctggggtcgttcgtggaagctccggagtacagaaacggcaaggagtgcgtgtctcaatcgttaaacagagagaacttcgagtcgtcttgcgacgcttcgttagttaatgtagctatgacccttgactcatagacttacgtggctcaatcg

SEQ ID NO: 145333 - DNA, 406 bp, Arabidopsis thaliana
ggaagaaaaatgggtcgagtctcatctattatctctttctctttgacactcttgatcctcttcaatggctacactgcccaacagtggcccaacgagtgccagctcgatcaactcaatgcgctcgaaccatcccaaatcatcaagagcgagggtggtcgcatcgaggtctgggaccaccatgcaccccagctccgttgctccggctttgcctttgagcgtttcgtcattgagcctcagggtcttttcttgcccactttcttgaacgccggcaaactcacgtttgttgttcacggaaggggtctaatgggaagagttattccgggatgcgccgagacgttcatggagtcaccggtatttggagaaagtcaaggtcagggtcagagtcaagggttccgtgacatgcacc

SEQ ID NO: 145334 - DNA, 314 bp, Arabidopsis thaliana
ggctcaacagggtcagcagggtcagcagtttccgaacgagtgccagctcgaccagctcaatgcgctcgagccgtcacacgtactgaagagcgaggctggtcgcatcgaggtgtgggaccaccacgctcctcagctccgttgctcaagtgtctcctttgcacgtttcatcatcgagtctaagggtctctacttgccctctttctttaacaccgcgaagctctctttcgtggcttagggacgaggtctttatgggataagttatccctgtttgctccttaacattctaagacccttcatagttccaaccattcttt

SEQ ID NO: 145335 - DNA, 362 bp, Arabidopsis thaliana
attctgttttcgaacatttacaccctcaagaatcgccgccatgtgtggaggagctataatatccgatttcattccaccgccgaggtctcgccgtgttactagcgagtttatttggccggatctgaagaagaatttgaaaggatcgaagaaaagctcgaagaatcgttcgaatttcttcgattttgacgctgagttcgaagctgatttccaaggtttcaaagatgattcgtctatcgattgcgattatgatttcgacgtcggtgatgttttcgccgatgtgaaaccattcgttttcactttgacttcaaaacccgccgtcttcgccgttgcgggaggttcagtttttggtaagaaaagttact

SEQ ID NO: 145336 - DNA, 424 bp, Arabidopsis thaliana
gttccgtgacatgcaccagaaagtggagcacattaggagcggtgataccattgccacaacagccggtgtagcccagtggttctacaacgacggacagcatccacttgtcatcgtcagcatcttcgatctagccagtcaccagatccagcttgaccgcaacccaaggccattttacttagccggaaacaacccacaaggtcaagtatggctacaaggacgagagcaacagccacagaagaacatcttcaatggatttggacccgaggttattgctcaagctttgaagatagatcttcagacagcgcagcaacttcagaaccaagatgactaccgtggaaacattgtccgagtccaaggcccgttcggtgtcattaggccgtccttgaggggccagagaccctaggaggaggtagaagatgaagaa

SEQ ID NO: 145337 - DNA, 418 bp, Arabidopsis thaliana
agaaaaacttgtggagcgggttcgacgcacaggtcatagctcaagcattgaaaattgacgttcagttggctcagcagcttcagaaccaacaagacagcagaggaaacatcgttcgtgttaagggacctttccaggtcgtgaggccacctctaagacagccctacgagagcgaggagtggagacacccacgtagcccacagggcaacggccttgaggagactatctgcagcatgaggtcccacgagaacattgacgaccctgctcgtgctgacgtgtacaagcccagcctaagtcgcgtgaccagcgtcaacagctataccttgcccatcttggagtatgtcaagctcagtgccactcgtggcgttctccagggtaatgcgatggtgcttcctaaatacaacatgaacgcttacgagat

SEQ ID NO: 145338 - DNA, 417 bp, Arabidopsis thaliana
gccagatctgcttctttttcgctgcgtcgtcgagaggtctctctttgaggaagctaattccttcttcttcttcaccatccgtttcaagaataacaatggaaggaagcggtggtgacagtggttcgacggctacgcctgtacaaaagaaagtacatgaggcatggagggtttaccaatattatctggacaagactacacctcattcaactaacaggtggatcggaacacttgttgtctttcttatctactgtttgagggtttactctattcacggattctacatcatctcctatggtcttggaatctacctcctgaatctgcttatcgggtttttgtctcctcttgttgatcctgagctcgaggtatctgatggagctactctgcctactcgaggttctgatgagttcaagccattta

SEQ ID NO: 145339 - DNA, 426 bp, Arabidopsis thaliana
tcgcgaagatgacgccagcaaccccatgggcccaagacagaaatgtcagaaggagtttgagcaatcacagcacctaagagcttgccagaaattgatgcgcatgcaaatgaggcaaggccgtggtggtggtccctccctcgacgatgagttcgatttggaagacgacatcgagaacccacatggcccccagctgggacaccagatcctccagcagtgctgcagcgagcttcgccaggaagagccagtttgtgtttgccccaccttgagacaagctgccagggccgttagcctccagggacaacacggaccattccaatccaggaaaatttacaagacagcttagtacttgcctaacatttgcaagatccagcaagttggtgaatgcccctttcagaccaccatccctttctttcctccttactaata

SEQ ID NO: 145340 - DNA, 403 bp, Arabidopsis thaliana
gctgatgatattcggactgcaatacaaaatgcaactggtcccagatctgcattatttgttccagatgttccatttgaagttcttgtcaggaggcaaatatctcgtttattagatcccagccttcagtgcgctaggttcatcttcgatgagctagtaaagattagtcatcagtgtatgatgaaagagttacagcggtttccagtcctgcaaaagcgcatggatgaggttattgggaactttctgcgagaaggtcttgaaccttcgcaggcaatgatccgagatcttattgaaatggagatggattatataaacacctcacacccaaattttatcgggggaactaaagccggggagcaagcaatgcatacagtcaaatcttctaggattccgcatcctggtgcgc

SEQ ID NO: 145341 - DNA, 425 bp, Arabidopsis thaliana
gtaaacataaatattatgttactataacctagtaaaatatgcatgcctgatgcatgttaatatgtccatttctatatttaaacatgactcttgaaacgtgtgtgtagaacgcaatggtgcttccacagtggaacgcaaacgcgaacgctattctttacgtgacagacggggaagcccaaatccagatcgtaaacgacaatggttacagagtgtttgacggacaagtctctcaaggacaagctatagccgtaccacaaggtttctcggtggtgaaacgcgcaacaagcaaccgattccagtgggttgagttcaaaacaaacgcttacgcgcaaattaacactctggcgggacgaacctcagtcttgagaggtttaccacttgtagtcataaccaatggggttcaaatctcacccgaagaagcaagg

SEQ ID NO: 145342 - DNA, 128 bp, Arabidopsis thaliana
gtcttatgggaaaagtgatccctggatgcgccgaaacattccaagactcatcagagtgccaaccacgcttcgaaggtcaaggtcaaagccagaggttccgtgacatgcaccataaagtggagctcatt

SEQ ID NO: 145343 - DNA, 426 bp, Arabidopsis thaliana
cacacatagcaaaaaatggcaaacaagttgttcctcgtctgcgcagctctcgctctctgcttcctcctcaccaacgcttccatctaccgcaccgtcgttgagttcgaagaagatgacgccactaaccccataggcccaaaaatgaggaaatgccgcaaggagtttcagaaagaacaacacctaagagcttgccagcaattgatgctccagcaagcaaggcaaggccgtagcgatgagtttgatttcgaagacgacatggagaacccacagggacaacagcaggaacaacagctattccagcagtgctgcaacgagcttcgccaggaagagccagattgtgtttgccccaccttgaaacaagctgccaaggccgttagactccagggacagcaccaaccaatgcaagtcaggaaaatttaccagaca

SEQ ID NO: 145344 - DNA, 418 bp, Arabidopsis thaliana
gcccagcctaggtcgcgtgaccagcgtcaacagctataccttgcccatcttggagtatgtcaggctcagtgccactcgtggcgttctccagggtaatgcgatggtgcttcctaaatacaacatgaacgctaacgagatcttgtactgcactggaggacaaggaaggatccaagtggtcaacgacaacggacagaacgtgttggaccaacaggtgcagaagggacagctcgtggtcatcccacaagggttcgcatacgttgtccagtcccacggaaacaagttcgagtggatctctttcaaaactaatgaaaacgcaatgatcagcactttggcgggtagaacctcgctcttgagggcattgccattggaggtcatatcaaatggtttccagatctcttccgaggaagctaggaagatc

SEQ ID NO: 145345 - DNA, 421 bp, Arabidopsis thaliana
tcgagaaaaatgggtcgagtctcatctattatctctttctctttgacactcttgatcctcttcaatggctacactgcccaacagtggcccaacgagtgccagctcgatcaactcaatgcgctcgaaccatcccaaatcatcaagagcgagggtggtcgcatcgaggtctgggaccaccatgcaccccagctccgttgctccggctttgcctttgagcgtttcgtcattgagcctcagggtcttttcttgcccactttcttgaacgccggcaaactcacgtttgttgttcacggaaggggtctaatgggaagagttattccgggatgcgccgagacgttcatggagtcaccggtatttggagaaggtcaaggtcagggtcagagtcaagggttccgtgacatgcaccagaaagtagagcacc

SEQ ID NO: 145346 - DNA, 333 bp, Arabidopsis thaliana
cctttactcactctctctctctctctctaaaaacagagctcaacaataatgatccactaaaaaagattctcttttctcttcttctccggtgatttacttacttaacaatcatggcgtcgtcggagggattagcaagcgttgatccttggtcattccgtcaaaacttcaacatcgattcgtggctactctctgattccttctcacacgacagtgatatactcgctaaagctctttacagatccatctccacttccaccgaatcatctcctctttctccttcatctttcttcgactctttaaccgccgccgtcgatttttttccttctcaaactc

SEQ ID NO: 145347 - DNA, 367 bp, Arabidopsis thaliana
acggcaaacatggcacgtaggattgaagaatcatctaaagaggctcaatgctcctaagcattggatgcttgacaaacttggtggcgccttggattctaaaacattttgtgcacactcacaagcgtagggcagtgtaatgctgatggtgctgatcttaatgcaacagggtgaactatgctttgacttaccgtgaagttatttctatcttgatgcaaaggcatatccaaggtgatggcaaagtcaggactgacaagacttaccctgctggctttatggatgttgtatccatccccaagaccaatgagaactttcgtcttctttaccatacctagggatggtttctgtttttattcatctaggtttgtgg

SEQ ID NO: 145348 - DNA, 411 bp, Arabidopsis thaliana
aatttgtgtgctcttagcctttactctatagttttatatcatatcaatcgacatggcgaatgtggaccgtgatcggcgtgtgcatgtagaccgtactgacaaacgtgttcatcagccaaactacgaagatgatgtcggttttggtggctatggcggttatggtgctggttctgattataagagtcgcggcccctccactaaccaaatcttggcacttatagcaggagttcccattggtggcacactgctaaccctagctggactcactctagccggttcggtgatcggtttgctagtctccatacccctcttcctcctcttcagttcggtgatagttccggcggctttcactattggtcttgctgtgacgggaatcttgctttttggttttgtttggtttttctggttttt

SEQ ID NO: 145349 - DNA, 376 bp, Arabidopsis thaliana
cttagcctttactctatagttttatatcatatcaatcgacatggcgaatgtggaccgtgatcggcgtgtgcatgtagaccgtactgacaaacgtgttcatcagccaaactacgaagatgatgtcggttttggtggctatggcggttatggtgctggttctgattataagagtcgcggcccctccactaaccaaatcttggcacttatagcaggagttcccattggtggcacactgctaaccctagctggactcactctagccggttcggtgatcgggttgctagtctacatacccctcttgctactcttcagtccggtgatagtcccggcggctttcactattgggcttgctgtgacgggaatcttggtttttggt

SEQ ID NO: 145350 - DNA, 412 bp, Arabidopsis thaliana
acggtacgagcggggcctgcggattcgacgcacaggtcatagctcaagcattgaaaattgacgttcagttggctcagcagcttcagaaccaacaagacagcagaggaaacatcgttcgtgttaagggacctttccaggtcgtgaggccacctctaagacagccctacgagagcgaggagtggagacacccacgtagcccacagggcaacggccttgaggagactatctgcagcatgaggtcccacgagaacattgacgaccctgctcgtgctgacgtgtacaagcccagcctaggtcgcgtgatcagcgtcaacagttataccttgcccatctgggagtatgccaggctcagtgccactcgtggcgttctccagggtaatgcgatggtgcttcctaaatacaacatgaacgc

SEQ ID NO: 145351 - DNA, 169 bp, Arabidopsis thaliana
tcggaagaaatgattaagctcgaagatcataaacataccgagaacattctgagtacgtggagctctgatgataatgtcagtcctcataggagtaaccctaacctgatcaccagagtaaccattcttcgttagactttttgtaagaaccttatatcaactcagtgttatt

SEQ ID NO: 145352 - DNA, 423 bp, Arabidopsis thaliana
gtcttatgggaaaagtgatccctggatgcgccgaaacattccaagactcatcagaggtgcaaccacgcttcgaaggtcaaggtcaaagccagaggttccgtgacatgcaccagaaagtggagcacattaggagcggtgataccattgccacaacacccggtgtagcacagtggttctacaacgacggacaggaaccacttgtcatcgtcagcgtcttcgatctagccagtcaccagaaccagcttgaccgcaacccaaggccattttacttagccggaaacaacccacaaggtcaagtatggctacaaggccgagagcaacagccacagaagaacattttcaatggatttggacccgaggttattgctcaagctttgaagatcgatcttcagacagcgcagcaacttcagaaccaagatgaca

SEQ ID NO: 145353 - DNA, 422 bp, Arabidopsis thaliana
gaaaaacttgtggagcgggttcgacgcacaggtcatagctcaagcattgaaaattgacgttcagttggctcagcagcttcagaaccaacaagacagcagaggaaacatcgttcgtgttaagggacctttccaggtcgtgaggccacctctaagacagccctacgagagcgaggagtggagacacccacgtagcccacagggcaacggccttgaggagactatctgcagcatgaggtcccacgagaacattgacgaccctgctcgtgctgacgtgtacaagcccagcctaggtcgcgtgaccagcgtcaacagctataccttgcccatcttggagtatgtcaggctcagtgccactcgtggcgttctccagggtaatgcgatggtgcttcctaaatacaacatgaacgctaacgagatcttgt

SEQ ID NO: 145354 - DNA, 416 bp, Arabidopsis thaliana
atcatcacaaacgagtaagaatacaaatacaaatagcaaaaaaaatggcaaacaagctcttcctcgtctgcgcaactttcgccctctgcttcctcctcaccaacgcttccatctaccgcactgttgtcgagttcgacgaagatgacgccagcaaccccatgggcccaagacagaaatgtcagaaggagtttcagcaatcacagcacctaagagcttgccagaaattgatgcgcatgcaaatgaggcaaggccgtggtggtggtccctccctcgacgatgagttcgatttggaagacgacatcgagaacccacaaggcccccagcagggacaccagatcctccagcagtgctgcagcgagcttcgccaggaagagccagtttgtgtttgccccaccttgagacaagctgccagggcc

SEQ ID NO: 145355 - DNA, 416 bp, Arabidopsis thaliana
ctcatcagagttccaaccacgcttcgaaggtcaaggtcaaagccagaggttccgtgacatgcaccagaaagtggagcacattaggagcggtgataccattgccacaacacccggtgtagcacagtggttctacaacgacggacaggaaccacttgtcatcgtcagcgtcttcgatctagccagtcaccagaaccagcttgaccgcaacccaaggccattttacttagccggaaacaacccacaaggtcaagtatggctacaaggccgagagcaacagccacagaagaacattttcaatggatttggacccgaggttattgctcaagctttgaagatcgatcttcagacagcgcagcaacttcagaaccaagatgacaaccgtggaaacattgtccgagtccaaggcccgttcggtg

SEQ ID NO: 145356 - DNA, 322 bp, Arabidopsis thaliana
aagaaaacatacacaaatagcaaaacatggctaacaagctcttcctcgtctgcgcaactctcgccctctgcttcctcctcaccaacgcttccatctaccgcaccgttgtcgaattcgaagaagatgacgccagcaaccccgtaggtccaagacagagatgccagaaggagtttcagcaatcacaacacctaagagcttgccagagatggatgagcaagcaaatgaggcaaggacgtggtggtggtccttccctcgacgatgagttcgatttcgagggcccccagcagggataccagctactccagcagtgctgcaacgagct

SEQ ID NO: 145357 - DNA, 415 bp, Arabidopsis thaliana
atgaagagaaatcctccaagctctccctcagttgtccattcccattcatgtcctgaagttgtgttgcttcctttgtagttgattttatgaagtggtgaatattggaaacagctgcttccaaatcttgttgattggtgttcttctgctccttttcgctgttttggatatccacatgtttctctagagtttcatcagtaacttcaaaaagacgacttgacattcgtttggttgatgatccttgcatctcttggatcgaaaatcttgcggcttcaacgattttctcaatgctaatgccctcttgagattcaaatatcctgttgatttttgagcggagaaccactaacagctgatcaagtgttgttgcatcctcctctggctcactggacttactagaggactggttttccacaaattt

SEQ ID NO: 145358 - DNA, 378 bp, Arabidopsis thaliana
caaggccattttacttagccggaaacaacccacaaggtcaagtatggctacaaggccgagagcaacagccacagaagaacattttcaatggatttggacccgaggttattgctcaagctttgaagatcgatcttcagacagcgcagcaacttcagaaccaagatgacaaccgtggaaacattgtccgagtccaaggcccgttcggtgtcattaggccgcctttgaggggccagagacctcaggaggaggaagaagaagaagaaggacgacatggacgacacggtaatggcttagaggagaccatctgcagcgccaggtgcaccgataacctcgatgacccgtctcgtgctgacgtgtacaagccacagcttggttaca

SEQ ID NO: 145359 - DNA, 325 bp, Arabidopsis thaliana
aacaaaacaacaagaaaaaatggcaataacttacaaattaatcataacacttcttctcctgatctccatagctgtcgtccactgcttatccttccgtgtggagatcgacgagttcgagccaccacagcaaggagaacaagaaggtccccgtcgccgtcctggtggtggctctggcgagggatgggaggaagagtcgacgaatcatccataccacttcaggaagcggagtttcagtgattggttccagtcaaaggaaggttttgtgagagtgctgcctaagttcacaaaacatgcaccggctctcttccgaggaatcgagatctac

SEQ ID NO: 145360 - DNA, 413 bp, Arabidopsis thaliana
acattttcgtagccgcaagactcctttcagattcttacttgcagctatgggtaaagagaagtttcacattaacattgtggtcattggtcatgttgattctggaaaatcgaccacaactggtcacttgatctataagcttggtggtattgacaagcgtgtcatcgagaggttcgagaaggaggctgctgagatgaacaagaggtccttcaagtacgcatgggtgttggacaaacttaaggccgagcgtgagcgtggtattaccatcgatattgctctatggaagttcgagaccaccaagtactactgcacagtcattgatgccccaggacatcgtgatttcatcaagaacatgattactggtacctcccaggctgattgtgctgttcttatcattgactccaccactggaggtt

SEQ ID NO: 145361 - DNA, 383 bp, Arabidopsis thaliana
  unsure (1)..(383): unsure at all n locations
gtaannaacgggcccggccacccgtccgtaaaaaatatttttgtcattcaccaaatttttcttcgacccatcatttagtttcttcggcatttctttttctcgtccactttcttagccccttcaaattttaatctcacaactcgaaatgcttccttacccatggcaaaaccggtcaatacttgcaaacgttttcgctacgccccaagacaagatctagtataataccaaagtgtcacggacttcaaacatcttcaaacctcaggctgaatacctattccctcagattgcaagactaagatctgcacacttgttcaaatatccagacgcacatgttataagtctttgaatatgcgacacatcttaacccattcctgcagtgatca

SEQ ID NO: 145362 - DNA, 304 bp, Arabidopsis thaliana
cgcgtgcgaaacaaccaataaggtcatgattggttcttttcccaaatgctacttccgccgccgccgggggttaatggatttggacccgaggttattgttcaagctttgaagatcgatcttcacacagcagcagcaccattcagaaccaatatgacaaccgtggaaccatcgtccgagtgctaaggacacttggtcaaatgaggcccgaaacatgggttcttactaatcactaaccatggggtggatgagagcctctacgttcgcgcctatctgcatatggactctttatttaaggccccggctt

SEQ ID NO: 145363 - DNA, 428 bp, Arabidopsis thaliana
caagtaattaactaacaacaaatggcgaacaagctcttcctcgtctgcgcagctctcgccctgtgtttcatcctcaccaacgcttccgtctatcgcacggttgtcgagttcgacgaagatgacgccagtaaccccataggcccaatacagaaatgtcagaaggagtttcagcaagaacagcacctaagagcttgccagagatggatgcgcaagcaaatgtggcaaggacgtggtggtggtccttccctcgacgatgagttcgatatggaagacgacatcgagaacccgcagagacgacagctactccagaagtgctgcagcgagcttcgccaagaagagccagtttgcgtttgccccaccttgagacaagctgccaaggccgttagattccagggacagcaacaccaaccagagcaagtcaggaaaat

SEQ ID NO: 145364 - DNA, 411 bp, Arabidopsis thaliana
gccataatcaagtgtcagggtctgcttacaacttctggaagcatggtggtaaatatggagtggggaaatttttggtcctctcatttgcctagaacttcgtatgacattgacttggatgcagagagttcaaatgcaaatgatatgggatttgagaagatgatatcaggaatgtatctgggtgacattgttcgtagagtaattctccgcatgtcagaagattctgatatctttggacccatctcgcccgtgttatctgagccttacgttctaagaacaaattcagtctcagccatacatgaagatgacacacctgagttacaagaagtagcaagaatcttgaaagacataggggtattagatgtaccactgaaggtgagaaaactagtggtgaaaatatgcgatgtggttaca

SEQ ID NO: 145365 - DNA, 410 bp, Arabidopsis thaliana
gctcgattaatcaactactccaatagtccaactcccacatcacatgctttgtaatcatctatatatagaagaaacaggttaatttgtatgtgtatcttataatattttcactaacgaacaaattgagcaatcatcatcatcattaattcttcatacgtaagaagaagatagaaggagagaaaacaacaagaaatatagctggaagattcgtcacatgcagtttagttggtagaataaaacactttatatttgggagttttacaaaagccaatagaaatcttttttttttttttatgaatattggtatatgagttttaatagatgggtcatgaaacctaatgggtatttcgaagtacaaaaacataattcttaatggacttcattctttagatcagaatctccaatcctac

SEQ ID NO: 145366 - DNA, 386 bp, Arabidopsis thaliana
aacgattgttattattctctttcgcaagttcagtatgaggatatgttcgactttgtgttttctttctgtttatgattcctctactatttttttgccagccaatcctcttctttaatcatctgtgttctgtgctgttataataggtattaaatatgctttgctgttgggtagaagacccaaactcagaggctttcaagttgcacctaccaagaatccatgactttctctggttagctgaagatggaatgaagatgcagctattgacagggttataacggaagccagctatgggatacaggttttgctattcaagcgattttggcaactaacctcgtcgaagaatatgggcccgttttggaaaaagcacattcatttgtcaagaattt

SEQ ID NO: 145367 - DNA, 411 bp, Arabidopsis thaliana
ccccactccctcctttatcgcaactaaccccaaatcctactcccgccgccgccgtctcttccgctattccggcgccagttaagagcgtagccgttcagcaaccgatcgatggatctccacgcgccgttgctactgataccggaggtattcctgagccacttgcggctgttcccggcgctaagcttcgtcttatgtgcagttttggtggccacatcatgcctcgtccacacgacaaatcgttgacgtactccggcggcgagactcgtattgtggttgttgatcgacgtgcgtcactgtcttcgctccgatctcgtctctctagtatgcttctcaacggccggtcctttactctcaagtaccagcttcctagcgaagatctcgattcaatcgtaaccattactaccgatgaag

SEQ ID NO: 145368 - DNA, 418 bp, Arabidopsis thaliana
cttcgatcttcgatgcaaagctccttaatcagcactcacaccacatacctcaacagttcgtatggcccgaccacgagaaaccttctacggatgttcaacctctccaagtcccactcatagacctagccggtttcctctccggcgactcgtgcttggcatcggaggctactagactcgtctcaaaggctgcaacgaaacatggcttcttcctaatcactaaccatggtgtcgatgagagcctcttgtctcgtgcctatctgcatatggactctttctttaaggccccggcttgtgagaagcagaaggctcagaggaagtggggtgagagctccggttacgctagtagtttcgtcgggagattctcctcaaagctcccgtggaaggagactctgtcgtttaagttctctcccgaggagaa

SEQ ID NO: 145369 - DNA, 340 bp, Arabidopsis thaliana
ggcgaccacgcttccggtaacggctatcagcggatgagtggttttttttagtgccgagacctttatggactcgggggacgattcaaggacaacaacaaggccaatcatggtaaggacgacaggtacaacaaggccaaccatgggaaggacagggacaacagggacaacatggatgacaaggtcaaccatgtgaaggacaggtacaacagggacaacaaggacgacagggacaacaaggccaaccattgtaaggacaggtacagcatggacaacaagggtttcgtgacatgcaccataaagtgttacatgtgagacgcgtagaccttctttgccaacactt

SEQ ID NO: 145370 - DNA, 271 bp, Arabidopsis thaliana
ataaacacctgtttcttccacttagctccatggaacaatatgctactactgaaacatggaagaattgaaatcttagatcaaaacactatgtatggatggtatgaactgcctaaacaagaattcttgaacagcgaacaaccggagctattactcactacatcaaaaaaatttccattaataaaagatggaaatccattggaaaatcaaaaatacgcatgtcggattaaattgttgttgctatctgttccaataacgaatcaactgaataact

SEQ ID NO: 145371 - DNA, 360 bp, Arabidopsis thaliana
acaaaaagaaaatggttaagctcagcaatctcctcgttgcaaccttcggggttctgctcgtccttaacggctgccttgcgaggcagtcacttggggttcctcctcagctacagaacgagtgtaacctcgacaacctagatgttctccaagccaccgaaactatcaagagtgaagccggtcagatcgagtactgggaccacaaccaccctcagctccgatgtgttggtgtttccgttgctcgttatgtaattgaacaaggcggtctttacttgcccaccttcttcacttgcccaaaaatctcctacgtcgttcaaggaacgggtatcagcggaagagaggtccctggatgtgccgtgacct

SEQ ID NO: 145372 - DNA, 331 bp, Arabidopsis thaliana
tgtacgcgtgggcgacacggacgacactttttaggttcaggacatcatgtaccagcgggcaggggctacccataccctgggatcatccgtctcgtgctgacgtgtacaagccacagctcggttacatcagcactttcaacagcaacgatcttcgcatacttagcttcattcgtatttcatccctccgtggatctatccgtcaaaacgcaatggtgctgtcacagtggaacgcatactcgaacgccattctttacgtgacagacggggaagcccaaattcagatcgtaaacgacaatggtaacagagtgtttgacgtccaagtttttttaag

SEQ ID NO: 145373 - DNA, 397 bp, Arabidopsis thaliana
caaaggggtcattagaaaatctgaattcgttaggattatcactagggctctttattctcttggatatgataaaaccggggctatgttggaggaagaatccggtatctctctgcacaattccaccattaagctgtttctgcagcaggttaaggacggcaaatgggatcaaagtgttaaaacattgcacagaatcggtttccctgatgagaaggctgtcaaggctgcgtctttcttgctcctagagcaaaagttcttggagtttctcaaagttgaaaagatagctgatgcgctacgcaccttaaggaatgagatggcgcctcttcgtattaatacaaagcgtgttcatgagctcgcttcctcccttatatcaccttcaagctttatatcacataccact

SEQ ID NO: 145374 - DNA, 440 bp, Arabidopsis thaliana
  unsure (1)..(440): unsure at all n locations
cgtccccgatctctttcgtcttaaaatcggatgccgagtagcgtttttcggaaccctttgtgacgcgcgagcgaagaaagggagttcggacgaatcttctcggtctaaacgattccggcgcgcgttcggttcgattcgtgtacgatcccggcgatcgttacgtgctttcgaacgcgatatctgagggtttttctcggtggatacanagaggagataaacgttagcaatcgattatgcgatgggccttgtgttcgtgattctttgagacgtttaacacactgtaattgttgatccagtgattgggaaatcgaggttgcttgttactccgagtgttaaggagaaagctaaggagattgctgagacgtggaagaagagtttggaagagagaggaaggatagagaatgtgaagactcctgatgttcataccgttttgcagcatc

SEQ ID NO: 145375 - DNA, 399 bp, Arabidopsis thaliana
aaacaaacacattcacattcttctttcttctcaaaaaaaaaaaaaaaaacacttgttcatttacatcaaaatgatcactgcagctctacacgaacctcagattcacaaaccaaccgatacatccgtcgtctccgatgatgtgcttcctcattctcctcctacgcctcgcattttccggtcaaagcttccggacattgacatccctaaccacctccctctccacacttactgcttcgaaaaactctcatctgtttccgacaagccttgtctcatcgttggctccaccgggaaaagctacacctacggcgaaacacacctaatctgtcggagagtcgcttccgggttatacaagttaggtatcagaaaaggtgacgtcatcatgatccttctccaaaactc

SEQ ID NO: 145376 - DNA, 421 bp, Arabidopsis thaliana
gccacacactcacaaattaaaaagagagagagagagagagacagagagagagagagattctgcggaggagcttcttcttcgtagggtgttcatcgttattaacgttatcgcccctacgtcagctccatctccagaaacatgggtgcaggtggaagaatgccggttcctacttcttccaagaaatcggaaaccgacaccacaaagcgtgtgccgtgcgagaaaccgcctttctcggtgggagatctgaagaaagcaatcccgccgcattgtttcaaacgctcaatccctcgctctttctcctaccttatcagtgacatcattatagcctcatgcttctactacgtcgccaccaattacttctctctcctccctcagcctctctcttacttggcttggccactctattgggcctctcaaggct

SEQ ID NO: 145377 - DNA, 385 bp, Arabidopsis thaliana
  unsure (1)..(385): unsure at all n locations
cttggaggatcaatggccgacgttcgcacacactcgcaccagcttcaagtgcaccctcaacgccagcatgaaggaggcatcaaagtcctttatcctcagagtggcccttcttccactcaggtgctagccgtgtttgtcggtgtaccgataggaggaacgctgctgactatagccggtttgacattagccggttcggttataggactaatgctagcattcccgttgtttctcatctttagtccggttattgtaccagcagcctttgtcatcggtctagctatgactggattcctggcttcaggggccataggtctcaccggactatcatccatgtcgtgggtactcaactacatccgccgggccgggcagcatatnccggaggagc

SEQ ID NO: 145378 - DNA, 390 bp, Arabidopsis thaliana
cttgtatacttcatggtgccattcactcatggcaattataagcctctgcttattagctcaggcttaccagcatgcgagtgtcgtgattcaatcattggtagaagaagacattaacgtcaaatttctagtacagcttgataaattgatccggcttctggaaactccaatctttacttaccttagattgcagcttctggaaccaggaaggtacacatggttgctgaaaacactttatggtcttcttatgttacttcctcagcaaagtgcggcgttcaagatacttaggacaagactcaaaactgtgccaacgtactcattcagtactggaaaccaaataggcagagcaacttcaggagttcctttctctcagtataagcatcaaaacgagga

SEQ ID NO: 145379 - DNA, 280 bp, Arabidopsis thaliana
caaaatgttattttgggggcaaaaagtttgccagccagtactcttagcaaccatttagaacagcggttgttcaagaaactgaagcaggaaagacaagagagggctagacttcaaggaaaaagctatgaggaggtcccgggagccgactcgcttgtaatcagagttgtagcatctgtcgacaaaatattagaagtaaagccacgtttccttgacattttccgtgaagataattatttcatcagaattcccttataagtctaaggccattctgttgtttcag

SEQ ID NO: 145380 - DNA, 413 bp, Arabidopsis thaliana
cacacatagcaaaaaatggcaaacaagttgttcctcgtctgcgcagctctcgctctctgcttcctcctcaccaacgcttccatctaccgcaccgtcgttgagttcgaagaagatgacgccactaaccccataggcccaaaaatgaggaaatgccgcaaggagtttcagaaagaacaacacctaagagcttgccagcaattgatgctccagcaagcaaggcaaggccgtagcgatgagtttgatttcgaagacgacatggagaacccacagggacaacagcaggaacaacagctattccagcagtgctgcaacgagcttcgccaggaagagccagattgtgtttgccccaccttgaaacaagctgccaaggccgttagactccagggacagcaccaaccaatgcaagtcaggaa

SEQ ID NO: 145381 - DNA, 413 bp, Arabidopsis thaliana
aaacatacacacatagcaaaaaatggcaaacaagttgttcctcgtctgcgcagctctcgctctctgcttcctcctcaccaacgcttccatctaccgcaccgtcgttgagttcgaagaagatgacgccactaaccccataggcccaaaaatgaggaaatgccgcaaggagtttcagaaagaacaacacctaagagcttgccagcaattgatgctccagcaagcaaggcaaggccgtagcgatgagtttgatttcgaagacgacatggagaacccacagggacaacagcaggaacaacagctattccagcagtgctgcaacgagcttcgccaggaagagccagattgtgtttgccccaccttgaaacaagctgccaaggccgttagactccagggacagcaccaaccaatgcaag

SEQ ID NO: 145382 - DNA, 397 bp, Arabidopsis thaliana
cgctcatcgcttactgaaaccagaaacaagtttagggtttttgcggaggtttcaaagttaacaatggcggaagagcacaagcacgaggaatcgatcatggagaagatctctgagaagatccatggtcacgatgactcttcttcttcttcttccgattcggatgacgataagaactctgcgtctctcaaaaccaagatttatcgtcttttcggaagagaacagcctcttcacaagcttttcggtggcggaaaacctgccgacattttcctgtggaggaacaagaaggtatcaggaggagtattgggtgctgcaactgtttcctggatcttattcgagttacttgagtacaatcttctcacactcttcggccacatttcaattcttgctctcgcagtat

SEQ ID NO: 145383 - DNA, 246 bp, Arabidopsis thaliana
  unsure (1)..(246): unsure at all n locations
gacacacatagcaaaaaaggcaaacagttgtcctcgtctgcgcagctctcgcgcttgcttcctcctcaccaacgcttcatctnaccgaccgtcgtgagttcgaagaagatgacgccactaaccccataggcccaaaaatgaggaaatgccgcaaggagtttcagaaagaacaacacctaagagcttgccagcaattgatgctccagcaagcaaggcaaggccgtatcgatgagtttgattcctaag

SEQ ID NO: 145384 - DNA, 172 bp, Arabidopsis thaliana
aacaattgtggtcattggtcatgttgattctggaaaatcgaccacaactggtcacttgatctataagcttggtggtattgacaagcgtgtcattgagaggtttgagaaggaggttgctgagatgaacaagaagtccttcaagtacacatgggtgttggacaaaactaaggtc

SEQ ID NO: 145385 - DNA, 361 bp, Arabidopsis thaliana
tccggaaaagcacatagcaaaaaacacaactaatttgaagcatcgtatgggcaggacacagccgattatgaacagtgagagccgttttggtagagctagagacgctaatattaaacccatttgggccaaacagctcattagcagccaaaggtggaagtggacagaatatttgcacactctatgactcaggcccagctagttcaagctgacaactcacaccatgctgaccaagcacagccgttagatggtcacacgttttggtttgtctctgtttcgtgtgcaatagatccctgtgacacaaaccacaacgttaatgttgcgtcttctgtcaaatgaaacatcacaattagaaggaaagagg

SEQ ID NO: 145386 - DNA, 416 bp, Arabidopsis thaliana
caaaaagaaaatggttaagctcagcaatctcctcgtgcaaccttcggggttctcctcgtccttaacggctgccttgcgaggcagtcacttggggttcctcctcagctacagaacgagtgtaacctcgacaacctagatgttctccaagccaccgaaactatcaagagtgaagccggtcagatcgagtactgggaccacaaccaccctcagctccgatgtgttggtgtttccgttgctcgttatgtaattgaacaaggcggtctttacttgcccaccttcttcacttccccaaaaatttcctacgtcgttcaaggaacgggtatcagcggaagagtggtccctggatgtgccgagaccttcatggactcgcagccgatgcaaggacaacaacaaggccaaccatggtaaggacgaca

SEQ ID NO: 145387 - DNA, 407 bp, Arabidopsis thaliana
  unsure (1)..(407): unsure at all n locations
gacaaatttagtcaaaccaaaaaaaaaaaaaaaacgaaagcgcannncctnaggagaaaagaaattcttcgcttcttcttcngtgtaatcatgacaacctcaaaaagactagcagacaggaagattgagaaattcgacaagaacatattgaaaagaggatttgttcctgannnaaccaccaagaagggtaaggattaccctgtnggnnccatcctcctcggcttctttgtctttgttgtcattggatcatctctcttccagatcatcaggaccgcaactagtggaggaatggcttaaacccaatcacatttaannnggaagattgcaattctcaaattgatgaatcatcactttcttctcttctgacttggctctttttttcccttatactggagaatgtgactact

SEQ ID NO: 145388 - DNA, 379 bp, Arabidopsis thaliana
agaaactgatccatccaaaatactatcttgtcttcactcttcaaaattcctgtcattaccctctcgaaccctttctcttttcgaatctccacttttttttctatcttctgcttcttcttcttctctcttcaatgattccactctcacaaaatctccatgactacaaaacgcatagacagagatttcccatcttccgacgatccttcctccgctaaacgccgtatcgaattccccgaagaaacactcgaaaacgacggtgctgccgcaatcaaactccttagcttactcctccaatgcgccgaatacgtagctactgatcatctccgtgaagcttcaacacttttattcgaaatctccgagatatgttcttcgttcgggt

SEQ ID NO: 145389 - DNA, 415 bp, Arabidopsis thaliana
atttctcacattttcgtagccgcaagactcctttcagattcttacttgcagctatgggtaaagagaagtttcacattaacattgtggtcattggtcatgttgattctggaaaatcgaccacaactggtcacttgatctataagcttggtggtattgacaagcgtgtcatcgagaggttcgagaaggaggctgctgagatgaacaagaggtccttcaagtacgcatgggtgttggacaaacttaaggccgagcgtgagcgtggtattaccatcgatattgctctatggaagttcgagaccaccaagtactactgcacagtcattgatgccccaggacatcgtgatttcatcaagaacatgattactggtacctcccaggctgattgtgctgttcttatcattgactccaccactgg

SEQ ID NO: 145390 - DNA, 419 bp, Arabidopsis thaliana
cacacatagcaaaaaatggcaaacaagttgttcctcgtctgcgcagctctcgctctctgcttcctcctcaccaacgcttccatctaccgcaccgtcgttgagttcgaagaagatgacgccactaaccccataggcccaaaaatgaggaaatgccgcaaggagtttcagaaagaacaacacctaagagcttgccagcaattgatgctccagcaagcaaggcaaggccgtagcgatgagtttgatttcgaagacgacatggagaacccacagggacaacagcaggaacaacagctattccagcagtgctgcaacgagcttcgccaggaagagccagattgtgtttgccccaccttgaaacaagctgccaaggccgttagactccagggacagcaccaaccaatgcaagtcaggaaaattta

SEQ ID NO: 145391 - DNA, 398 bp, Arabidopsis thaliana
cgagagttttggcttccttctttgttttcttaatcttcacggtcatcacattgcctcccacgatccaagcttgcactccttgtactcgtcctcatcctccggttccgaaacctccacaacacggcggtggtggaggtggtggtagcaagccgcctccacatcacggtggaaaaggtggtggtaaacccccaccccacggtggaaaaggtggaggaccgccgcatcatggtggaggaggaggaggaggagggaaatcaccgccggttgttagacctcctcccgtagtggtgaggccaccgccaatcataagacctcctccggtcgtctatccaccaccaattgtgaggccatcgccaatcacaagacctcccattataatcccttccaattcaaccacc

SEQ ID NO: 145392 - DNA, 266 bp, Arabidopsis thaliana
cacacatagcaaaaaatggcaaacaagttgttttttgtttgggcggttttggttttggggttttttaccaacgcttgcatctaccgcaccgacgttgagttcgaagaagatgacgccactaaccccataggcccaaaaatgaggaaatgccgcaaggagtttcagaaagaacaacacctaagagcttgccagcaattgatgctccagcaagcaaggcaaggcccgagcgatgagtttgatttcgaagaccgcatggagaacccaca

SEQ ID NO: 145393 - DNA, 380 bp, Arabidopsis thaliana
gggtcggtcgacgcgtccgcacccatagcaaaaaatggcaaacaagttgttcctcgtctgcgcagctctcgctctctgcttcctcctcaccaacgcttgcatctaccgcaccgtcgttgagttcgaagaagatgacgccactaaccccataggcccaaaaatgaggaaatgccgcaaggagtttcagaaagaacaacacctaagagcttgccagcaattgatgctccagcaagcaaggcaaggccgtagcgatgagtttgatttcgaagacgacatggagaacccacagggacaacagcaggaacaacagctattccagcagtgctgcaacgagcttcgccaggaagagccagattgtgtttgccccaccttgaaacaag

SEQ ID NO: 145394 - DNA, 324 bp, Arabidopsis thaliana
attataagttatataatcatataatattttgtgttcgattagtgtaacaaaaatggggttagagaggaaagtgtacggtttggttatggtatctttggtacttatggctattgcaacgatgtgttgtgtccaagctacgatcgacgaagaagcggctaaggatgaatcatggactgattgggcaaaggagaagatcggtctcaagcacgaagacaacatccaacccactcacaccaccacgaccgttcaagacgacgcttggagagcgagtcaaaatgcctaggacgcataggaggcggttaaactcaaagcagaggttgcggt

SEQ ID NO: 145395 - DNA, 404 bp, Arabidopsis thaliana
ggaagaaaaatgggtcgagtctcatctattatctctttctctttgacactcttgatcctcttcaatggctacactgcccaacagtggcccaacgagtgccagctcgatcaactcaatgcgctcgaaccatcccaaatcatcaagagcgagggtggtcgcatcgaggtctgggaccaccatgcaccccagctccgttgctccggctttgcctttgagcgtttcgtcattgagcctcagggtcttttcttgcccactttcttgaacgccggcaaactcacgtttgttgttcacggaaggggtctaatgggaagagttattccgggatgcgccgagacgttcatggagtcaccggtatttggagaaagtcaaggtcagggtcagagtcaagggttccgtgacatgca

SEQ ID NO: 145396 - DNA, 422 bp, Arabidopsis thaliana
gtacggctttggctcggattcgtccgtcttctttcttcttagccgagtacttcggtagattagttggaacgattgatgattttgagttaattgaatgttcggcgtatgagtggtgatcggatagctagtgttcgtaggctccatgctcgcgcatcgaactacctaccacctatccttctcagttaattcacgggcgatgttacgctcgatgatgagttccggggcctgtgtttcgtacctaatttgaaggaattgttgagtttggtttacacctttgcccgcggcttctccttcgtggggaagtcgtgggcacaaacatcggcgcttgttcacctctcgtcatcgcatttgttgccttgctcgcattggtgaatgagttgcgggttgaaatctcggatgcggaaaaagtgtcgacggtgact

SEQ ID NO: 145397 - DNA, 145 bp, Arabidopsis thaliana
gacctctcagcagccaacaacagttatcaaagcttaagccgttttagggttttatccttttgcagagatccaatcatgggcgatggtggaccaaaaggtgctggtggtggaggttccaagaagaggacgtttaagaaggttggct

SEQ ID NO: 145398 - DNA, 413 bp, Arabidopsis thaliana
ccgaggttattgctcaagctttgaagattgatcttcagacagcgcagcaacttcagaaccaagatgacaaccgtggaaacattgtccgagtccaaggcccgttcggtgtcattaggccgcctttgaggggccagagacctcaggaggaggaagaagaagaagaaggacgacacggacgacacggtaatggcttagaggagaccatctgcagcgccaggtgcaccgataacctcgatgatccgtctcgtgctgacgtgtacaagccacagctcggttacatcagcactctcaacagttacgatctccccatccttcgcttcatccgtctctcagccctccgtggatctatccgtcaaaacgcaatggtgcttccacagtggaacgcaaacgcgaacgccattctttacgtgaca

SEQ ID NO: 145399 - DNA, 407 bp, Arabidopsis thaliana
ggcgaatgtggaccgtgatcggcgtgtgcatgtagaccgtactgacaaacgtgttcatcagccaaactacgaagatgatgtcggttttggtggctatggcggttatggtgctggttctgattataagagtcgcggcccctccactaaccaaatcttggcacttatagcaggagttcccattggtggcacactgctaaccctagctggactcactctagccggttcggtgatcggcttgctagtctccatacccctcttcctcctcttcagtccggtgatagtcccggcggctctcactattgggcttgctgtgacgggaatcttggcttctggtttgtttgggttgacgggtctgagctcggtctcgtgggtcctcaactacctcccggggacgagtgatacagtgc

SEQ ID NO: 145400 - DNA, 412 bp, Arabidopsis thaliana
ctcattaaagggagaccgggacatcctatacgggttatgaagaacttgagaacctgtgatgattgccacgctttctccaagtttgtttccagtcttacttcgacagaaatcatcatgcgagacaagaacaggtttcaccacttcaggaatggtgtctgctcttgcaaagagttctggtgacttcacttactggtgctcttattattaaaagaggtctgatgagaaatgcatccacagattttaaatgtatctgaagctttgaatagtatcaaaagaccagttgatccaaaaccaagttcctgatccactaaacttgcatatggcaacaaatcgtgaagcttttgtttaatcttctgcacaagtcagaagcctgaataaggagctaagtcaatcacactatactcattaatgc

SEQ ID NO: 145401 - DNA, 316 bp, Arabidopsis thaliana
caaaaagaaaatggttaagctcagcaatctcctcgttgcaaccttcggggttctcctcgtccttaacggctgccttgcgaggcagtcacttggggttcctcctcagctacagaacgagtgtaacctcgacaacctagatgttctccaagccaccgaaactatcaagagtgaagccggtcagatcgagtactgggaccacaaccaccctcagctccgatgtgttggtgtttccgttgctcgttatgtaattgaacaaggcggtctttacttgcccaccttcttcacttccccaaaaattttctacgtcgttcaagga

SEQ ID NO: 145402 - DNA, 344 bp, Arabidopsis thaliana
gttgctcgttatgtaattgaacaaggcggtctttacttgcccaccttcttcactggcccaaaaatttcctacgtcgttcaaggaacgggtatcagcggaagagtggtccctggatgtgccgagaccttcatggactcgcagccgatgcaaggacaacaacaaggccaaccatggcaaggacgacagggacaacaaggccaaccatgggaaggacagggacaacagggacaacaaggaagacaaggccaaccatgggaaggacagggacaacagggacaacaaggacgacagggacaacaaggccaaccatgggaaggacagggacagcagggacaacaagggtt

SEQ ID NO: 145403 - DNA, 409 bp, Arabidopsis thaliana
ctctgctccgtcatctcaattccggctcagattcggacaacctgagctctctttatgcatctccgacatcgggaggcaccggtggttctgttttctctcatcttgttcaagctccagaggatcctattcttggggtgacagttgcatacaacaaagatcctagcccagttaagctgaatttaggagttggtgcttaccgaactgaggagggaaaacctttggttcttaatgttgtgaggaaagctgagcagcagcttatcaatgacagaacaagaatcaaggagtatcttcccattgttggattggttgagttcaacaagttaagcgctaagctcatactaggcgctgacagtcctgctattcgggagaatcggattaccaccgtggagtgtttgtctggtactggttc

SEQ ID NO: 145404 - DNA, 314 bp, Arabidopsis thaliana
accggaacggaagtcccgacccgagcgacgcgaggatcagatgctagctaaattgagcacatgttcagaaatgagtaagcttcagagtgagggcgatcgtgaagccatcactactatcacagggaaatccgaggcaaagaaacgtaactttgtcgagactattgagctccagatcggtctgaagaactacgactgttatatggacaagcatttgattggatagctttagtttctaagtgtcagcgtcggtccagcagagtgctttctgcgttggtgtttctaacgatttctacgcattttaccgtttcaccgga

SEQ ID NO: 145405 - DNA, 290 bp, Arabidopsis thaliana
  unsure (1)..(290): unsure at all n locations
agaagaagacgccaccaaccccaaaggcccaaaaacgaggaaacgccgcaaggaggcncagaaagaacaacaccnaagagcnggccagcaanggaagcnccagcaagcaaggcaaggccgnagcgaagaggaagaanncgaagacgacacggagaacccacagggacaacagcaggaacaacagggaggccagcagggccgcaacgagccaagccaggaagagccagaacgcggcgggcccaccggaaacaagcngccaaggccggaagacnccagggacagcaccaacc

SEQ ID NO: 145406 - DNA, 424 bp, Arabidopsis thaliana
cttctctttgcgcagtcaatttgctacaacttagaaaatggcggcggctacttcatccatcgctccttctctttcatgcccatctccttcttcttcatccaaaaccctttggtcttccaaagccagaaccttggctctacccaatatcggtttcctctcgtcttcttccaagtctctgaggtcgcttactgccaccgtcgctggaaatggcgccactggatcctcccttgccgctcgcatggtttcttcgtctgcggtcaaagcccctgtttctctcgattttgagacatctgtcttcaaaaaggagaaagtttctcttgctggttacgaagagtacattgtgagaggaggaagagacttgttcaagcatctcccagatgctttcaaggggattaagcagattggtgtgattggctggggatct

SEQ ID NO: 145407 - DNA, 424 bp, Arabidopsis thaliana
ggaagaaaaatgggtcgagtctcatctattatctctttctctttgacactcttgatcctcttcaatggctacactgcccaacagtggcccaacgagtgccagctcgatcaactcaatgcgctcgaaccatcccaaatcatcaagagcgagggtggtcgcatcgaggtctgggaccaccatgcaccccagctccgttgctccggctttgcctttgagcgtttcgtcattgagcctcagggtcttttcttgcccactttcttgaacgccggcaaactcacgtttgttgttcacggaaggggtctaatgggaagagttattccgggatgcgccgagacgttcatggagtcaccggtatttggagaaggtcaaggtcagggtcagagtcaagggttccgtgacatgcaccagaaagtagagcacctac

SEQ ID NO: 145408 - DNA, 422 bp, Arabidopsis thaliana
gtaaaataaaaaagcaaaagagagaaattgaaaaaaaaaagaaagaaaaataatcctctcttgtttcgggtagggtttcgtttttgtttcatcgataaactcaaaggagatggattcaacaaatggtaacggagctgatcttgaatcagcaaatggggcaaacgggagtggggttactgaggcattaccacctcctccaccagttatacctccaaatgtggaaccagttcgtgttaaaactgaacttgctgagaagaaggggccagttcgagttcctatggctcgaaaaggatttggaacaaggggccaaaagatccccttgttaacaaatcatttcaaagtcgatgtggctaatcttcagggtcatttcttccactacagtgtggctctattctatgatgatggtcgtcctgttgaacaaa

SEQ ID NO: 145409 - DNA, 272 bp, Arabidopsis thaliana
ggtgcttccacagtggaacgctaactttcacaccacgtcgttctttacggttggagggagcccaaatccagatcgtaaacgacaatggtaacagagtgtttgacggacaagtctttcggggacacattgaaagttctaccacacggtatctcggtggtgaaaccggcgattagaatttcaggaatctgtgttgggtcataacatacgccaacgcgcaaattaacactcttgcgggacgaacctcagtcttgagaggtttaccacttgaagta

SEQ ID NO: 145410 - DNA, 355 bp, Arabidopsis thaliana
aagaggaagaaaaatgggtcgagtctcatctattatctctttctctttgacactcttgaggctcttcaatggctacactgcccaacagtggcccaacgagtgccagctcgatcaactcaatgcgctcgaaccatcccaaatcatcaagagcgagggtggtcgcatcgaggtctgggaccaccatgcaccccagctccgttgctccggctttgcctttgagcgtttcgtcattgagcctcagggtcttttcttgcccactttcttgaacgccggcaaactcacgtttgttgttcacggaaggggtctaatgggaagagttattccgggatgcgccgagacgttcatggagtcaccg

SEQ ID NO: 145411 - DNA, 430 bp, Arabidopsis thaliana
ctcacttccttttttctttgtgagtttcgagaatatccctattcataggtctgagatccacatctatgaattgaaaggtccgaacgatcaactctgcaatcagttgttagaatcaataggtcttcaaatcgttcatttgaaaaagttgaaaccctttttattggatgatcataatacttctcaaaaatcgaaattcttgatcaatggaggaacaatatcaccatttttgttcaataaaataccaaagtggatgattgactcattccatactagaaagaatcgcaggaaatcttttgataacacggattcagcctatttctcaatcgtatcccacgatcaagacaattggctgaatcccgtgaaaccatttcagagaagttcattgatatcttctttttctaaagcaaatcgacttcgattcttgaataat

SEQ ID NO: 145412 - DNA, 425 bp, Arabidopsis thaliana
caaaaagaaaatggttaagctcagcattctcctcgttgcaaccttcggggttctcctcgtccttaacggctgccttgcgaggcagtcacttggggttcctcctcagctacagaacgagtgtaacctcgacaacctagatgttctccaagccaccgaaactatcaagagtgaagccggtcagatcgagtactgggaccacaaccaccctcagctccgatgtgttggtgtttccgttgctcgttatgtaattgaacaaggcggtctttacttgcccaccttcttcacttccccaaaaatttcctacgtcgttcaaggaacgggtatcagcggaagagtggtccctggatgtgccgagaccttcatggactcgcagccgatgcaaggacaacaacaaggccaaccatggcaaggacgacagggacaac

SEQ ID NO: 145413 - DNA, 430 bp, Arabidopsis thaliana
aaaaagaaaatggttaagctcagcaatctcctcgttgcaaccttcggggttctcctcgtccttaacggctgccttgcgaggcagtcacttggggttcctcctcagctacagaacgagtgtaacctcgacaacctagatgttctccaagccaccgaaactatcaagagtgaagccggtcagatcgagtactgggaccacaaccaccctcagctccgatgtgttggtgtttccgttgctcgttatgtaattgaacaaggcggtctttacttgcccaccttcttcacttccccaaaaatttcctacgtcgttcaaggaacgggtatcagcggaagagtggtccctggatgtgccgagaccttcatggactcgcagccgatgcaaggacaacaacaaggccaaccatggcaaggacgacagggacaacaaggcc

SEQ ID NO: 145414 - DNA, 407 bp, Arabidopsis thaliana
ggtgcttccacagtggaacgcaaacgcgaacgccattctttacgtgacagacggggaagcccaaatccagatcgtaaacgacaatggtaacagagtgtttgacggacaagtctctcaaggacagctcatagccgtaccacaaggtttctcggtggtgaaacgcgcaacaagcaaccgattccagtgggttgagttcaaaacaaacgcaaacgcgcaaatcaacactcttgcgggacgaacctcagtcttgagaggtttaccacttgaagttataaccaatgggttccaaatctcacctgaagaagcaaggagggtcaagttcaacacgctcgagaccactttgactcacagcagtggcccagctagctacggaaggccaagggtgctgcagcttaagagcttaaaac

SEQ ID NO: 145415 - DNA, 410 bp, Arabidopsis thaliana
agtacatcaagatttggtacaaaccaaaccaaatgcgtggttatgtctggttagagaaaccagttactgaagaagacgaagaagacgaaattagcctcccgccggtgaaaatctccggcgacacatcgaagtttccgtataaaaacaaacaaggacacagatcggcgattagaatttcaagaatcgttacggagacacttaaattaggactcaaagatgtgagatggttcgttatgggagacgatgatacagtctttgtcgccgagaatctaatcagagttttgagaaaatacgatcataatcaaatgtattacatcggcagtttatcggagagtcatcttcagaacatttatttctcttatggaatggcttatggcggtggagggattgctataagttatccattagcg

SEQ ID NO: 145416 - DNA, 412 bp, Arabidopsis thaliana
catacacaagtaattaactaacaacaaatggcgaacaagctcttcctcgtctgcgcagctgtcgccctgtgtttcatcctcaccaacgcttccgtctatcgcacggttgtcgagttcgacgaagatgacgccagtaaccccataggcccaatacagaaatgtcagaaggagtttcagcaagaacagcacctaagagcttgccagagatggatgcgcaagcaaatgtggcaaggacgtggtggtggtccttccctcgacgatgagttcgatatggaagacgacatcgagaacccgcagagacgacagctactccagaagtgctgcagcgagcttcgccaagaagagccagtttgcgtttgccccaccttgagacaagctgccaaggccgttagattccagggacagcaacacc

SEQ ID NO: 145417 - DNA, 384 bp, Arabidopsis thaliana
gaaacatactgaaagggatcttgcattgggaatcggtattgcatcactgatatgctgcatttggtatatgcggctatcaggcgagatagtaggatgggtcccatactattcacagaatgctggtactcctatctactttgcatttggagacagcgggatgcatagggcaagggacatcttaaccactggggcaataactgctctatgtgcgagtttgttggggtcccttctggctcagccacgaatattcatggccatggctagggatggattgccgccagttttattttcagaaattagcccaccaactcaagtaccactgaaaagcacaatagctattggcgttcttgcccctgcactcgcattgtttatggatgttgcaca

SEQ ID NO: 145418 - DNA, 423 bp, Arabidopsis thaliana
atcatcacaaacgagtaagaatacaaatacaaatagcaaaaaaaatggcaaacaagctcttcctcgtctgcgcaactttcgccctctgcttcctcctcaccaacgcttccatctaccgcactgttgtcgagttcgacgaagatgacgccagcaaccccatgggcccaagacagaaatgtcagaaggagtttcagcaatcacagcacctaagagcttgccagaaattgatgcgcatgcaaatgaggcaaggccgtggtggtggtccctccctcgacgatgagttcgatttggaagacgacatcgagaacccacaaggcccccagcagggacaccagatcctccagcagtgctgcagcgagcttcgccaggaagagccagtttgtgtttgccccaccttgagacaagctgccagggccgttagcc

SEQ ID NO: 145419 - DNA, 365 bp, Arabidopsis thaliana
gtctcgttcaggtgctcgcaacgcacttaatcagcctcagaagaagattggtagtcgtatgacggcatgccaattggcttctaaaggacctgtctttggtggagctcctatcgctgctgcagctgtttcagcgcctgctcagcattcgaactcggagcatactcagaaaaagatttatgttagtaatgtcggagcagagcttgatccacagaagttgctgatgtttttctcaaagtttggagaaattgaagaaggtcctttgggtcttgataagtatactgggagacctaaaggtttctgtctctttgtttataagtcgcctgaaagcgccaagagggctttggaggagccacacaagacttttg

SEQ ID NO: 145420 - DNA, 406 bp, Arabidopsis thaliana
  unsure (1)..(406): unsure at all n locations
ccattctctctactcagagctcctcttctccgatcaaaaaccctcgagcttttaacaatggagaccagcatcgcgtgctactcacgtgggatccttcccccaaaacgtctcttctcaacgatcctctacattggtctctcctccttccttctccacatcctccagcttcaagcgtctaaaatcgagctcaatcttcggagattcactacgactagcatcaaaatcgcaacttaaagccgcaaaggctaagagtaatggtgcttcaactgtgaccaaatgtgaaattggccaaagcttggaagagtttttggcacaagcaactcctgacaagggattgagaactttgctgatgtgtatgggagaagcattgagaacaatagcttntaaagttagaacagcttcttgc

SEQ ID NO: 145421 - DNA, 428 bp, Arabidopsis thaliana
gttacttgtttcagttcccgatgatcaattcttagtttttttggcttgttttcttcgtttctctttcatcaggcctttggagttttgtgttaccattttcgctcgcgtcattactggtgttagggttttcttcaaaagcttcttaatccgtcgaaattgctcttttctctccctcattacagagataaatggcttcaaagattattgctggcaagccggatgataccgagtatgaaatcattgaaggtgagtctgagagcgctttagcagcggggacaagcccttggatgaattcatcaacgttgaagcttcgacatcgaattggaagaggtcccttcggtgatgtttggctggctactcatcatcagtcaactgaggactatgatgagcatcatgaagtggccatcaaaatgctttatcccatcaag

SEQ ID NO: 145422 - DNA, 427 bp, Arabidopsis thaliana
caagaatggtaacgcctttgacgatgacattgttgcaatatacaggatgaatattccatgcaggcgaatcgatgattgtgatgttcgagatctgaacgttttgagagaagatgatctcgattgtgtaaggtcttgtgatccccttaaatccaccactgcgatacttcacccaccagtactttccttgcccgttgatcgttccgttgttacctaaccaaataaattccatcaattctagtctttatacgtaaaatacattcttaagatcttatatcattgattcttggtcgttaaagcaccaaactgttgctactaattcattaaattgttgtattattaatttggttaaccttaccggtgataacaacatcagttaggtttgtgccagagattagactagcaaatgttggtcctgctgcatctcttc

SEQ ID NO: 145423 - DNA, 365 bp, Arabidopsis thaliana
ggactatcacacaaaatacttcaatattttatgaaatttgacataaaatctcactaaatgaccatttttttttttaatggccacttaaaatttgttttgattcttctaaaaatccaccaaatgaccagacgtcttttaaaatctctcgaaatctaaaatccacaaaatcttacctaagttcaatacacccctttttttttgtgataagtgtaaacacacaaaaaataacatatataaatggatatggatgctaacataaaagttcacattatatttatatattaatttattaactcatctcaaaataaagtacataatatattattcaatctatgaatttaatttgattatcatgtaatttgggg

SEQ ID NO: 145424 - DNA, 301 bp, Arabidopsis thaliana
gttgcaacctttgaaaaatggaacctatggctaagctgaggctcgctttcggaactcttgccctgtgcatgctgctagcccacgcatgcatctaccggacagtggtggtgttcgaggctgatgatgacgtgagcaacccacagcacggtgagtgccatagggagtctatcaagcacaagcccctaataggttgcgtgccctggatccgcaggagtgctcagcacggaagaatcggttacaaagctgatgactctgagctcactcttgatgtcgatcttgaggaccatgcgaaccccatggg

SEQ ID NO: 145425 - DNA, 426 bp, Arabidopsis thaliana
gcattgaagacgttcgtccaaacggtggaatcaagaaattcaaatcttctgtctactcaaactgctccaagaggccatcctgagtaccagcgtgcaccgatcttcataatatagttatagctttctttactttccagtttataattttcttctttcaaagctccttttctgctggttcccggatccaatcgttctctcctcctactacaagtcctgtcgctcacacaacaaggcgagatggccttatctgcaatcggtttcgaaggttacgagaaacggctcgaggtgactttctttgagccaagcatctttcaagactccaagggactgggactccgtgctctgatcaagtcccagcttgatgaaattcttacacctgctgcatgcacgatcgtttcatctctctccaacgatcaattggactct

SEQ ID NO: 145426 - DNA, 331 bp, Arabidopsis thaliana
aagctctcctctcttctctctccaaaatctttcagagaggagagcttgataatcgttttgtctccggtttgatccggatttgtttatattctcgtctctatgcgagatcaataatttccgattacatatcggatcttctgttaccggctatgaccggtcttttctcctgttttaacggaacttgatctctatcctcatcggtgctcacccatcgatcttaaacgtttctttcaaagattttggtggcttcatttcttcgtggattaacatcttcgtcaccttcgattgcttaagacgcaagagcaaaaatggactttagacttcatcaaga

SEQ ID NO: 145427 - DNA, 427 bp, Arabidopsis thaliana
tcacaaacgagtaagaatacaaatacaaatagcaaaaaaaatggcaaacaagctcttcctcgtctgcgcaactttcgccctctgcttcctcctcaccaacgcttccatctaccgcactgttgtcgagttcgacgaagatgacgccagcaaccccatgggcccaagacagaaatgtcagaaggagtttcagcaatcacagcacctaagagcttgccagaaattgatgcgcatgcaaatgaggcaaggccgtggtggtggtccctccctcgacgatgagttcgatttggaagacgacatcgagaacccacaaggcccccagcagggacaccagatcctccagcagtgctgcagcgagcttcgccaggaagagccagtttgtgtttgccccaccttgagacaagctgccagggccgttagcctccaggga

SEQ ID NO: 145428 - DNA, 424 bp, Arabidopsis thaliana
cctcctcaaacaacaatggcgacgacggttacactcaaatccttcaccggacttcgtcaatcatcaacggagcaaacaaacttcgtctctcatgtaccgtcatcactttctctccctcaacgacggacctctctccgagtaaccgcagccagagccactcccaaactctccaaccgtaaactccgtgtcgccgtcatcggtggtggaccagcaggcggggcagctgcagagactctagcacaaggaggaatcgagacgattctcatcgagcgtaagatggacaattgcaagccttgcggtggcgcgattcctctctgtatggtcggagaattcaacttgccgttggatattattgatcggagagtgacgaagatgaagatgatttcgccgtcgaacattgctgttgatattggtcgtacgctta

SEQ ID NO: 145429 - DNA, 427 bp, Arabidopsis thaliana
ttcaatttttggaaacttagcaagttcttctattaaaccctgatcaataaaccgataaaacccttcaaattgtatctgattaaatccgggtattgcagatgttccctctttttcatccccaagcatcttttttgaatttcccatttatccgtttattgaaaaaatcccatcccatttctcattcttcaccgaatcatatccatagaattcgatctagcaataatggaatttctattctgtttactgaatcacatgaaattttatccaactccaagatatatggaatgtattaaatacgtatgaagggagactatattcaattggaattttttataagaaatagatccaaatggaacagaattgagaaataccgctggaacttacggagttttgtaaagactagaaaaaaaagtaatttcattttcac

SEQ ID NO: 145430 - DNA, 431 bp, Arabidopsis thaliana
ctctcttctctatccactctcagccggaaaatttttccttgattcattacgacagagagaaccatgccggcgaaacagaggacccctaaggtcaacagaaaccctgatctgatcaggggtgttggtaaatactcgagatcccagatgtaccataagagaggtttgtgggctatcaaggccaaaaatggaggcgttttcccacgtcacgacgctaaatctaaggttgatgctccggtggagcagccaccgaagttctatccagctgaagatgttaagaaacctcttcccaacaggcgcacggcaaaaccaaccaagctcagagctagcattactccaggtacagtgttgattatccttgctggtaggttcaagggaaagagagttgtcttccttaagcagcttgcctatggtttgcttctttggactggacc

SEQ ID NO: 145431 - DNA, 294 bp, Arabidopsis thaliana
gcgggttcgatggcaaacaagctctttctcgtatgcgcaactggggccctttggttactcctcaccaacgctagcatataccgaactgctgtcgtgatcgacgacgatgacgccagaaaccccatgtgcccaagacagaaatgtgagaaggagtttcagctaccacagcacctaagagcttccctttcattgtggtaatggatacgtggccccgataccttggcggacagagttttgaatagttcatgcggagacacatcggcacccacaaggcccccagaggccaccatatct

SEQ ID NO: 145432 - DNA, 425 bp, Arabidopsis thaliana
agcgtcttcgatctagccagtcaccataaccagcttgaccgcaacccaaggccaggttacttagccggaaacaacccacaaggtcaagtatggctacaaggccgagagcaacagccacagaagaacattttcaatggatttggacccgaggttattgctcaagctttgaagatcgatcttcagacagcgcagcaacttcagaaccaagatgacaaccgtggaaacattgtccgagtccaaggcccgttcggtgtcattaggccgcctttgaggggccagagacctcaggaggaggaagaagaagaagaaggacgacatggacgacacggtaatggcttagaggagaccatctgcagcgccaggtgcaccgataacctcgatgacccgtctcgtgctgacgtgtacaagccacagctcggttacat

SEQ ID NO: 145433 - DNA, 423 bp, Arabidopsis thaliana
catcctaataattttcaaagctttaattctaagaaataatatctacaagaaaatattatctcatgtatttcttcttcctccttgatttttaatctgatttttaacctttggatttggaaaattatatcttcttctgtcccaaatctatttttaggtttgtcaaaacgattattttgtttaataatcgtaataggtatggagactaccggagaagttgttaaaacaaccaccgggagcgacggaggcgttacggtggtgagatccaacgcgccgtcagacttccacatggctccgaggtcagaaacttcaaacacacctcccaactccgtcgctcctcctcctcctccaccgccgcaaaactcctttactccgtcggcggctatggatggtttctcaagcggaccgataaagaagagacgtggg

SEQ ID NO: 145434 - DNA, 428 bp, Arabidopsis thaliana
cacacatagcaaaaaatggcaaacaagttgttcctcgtctgcgcagctctcgctctctgcttcctcctcaccaacgcttccatctaccgcaccgtcgttgagttcgaagaagatgacgccactaaccccataggcccaaaaatgaggaaatgccgcaaggagtttcagaaagaacaacacctaagagcttgccagcaattgatgctccagcaagcaaggcaaggccgcagcgatgagtttgatttcgaagacgacatggagaacccacagggacaacagcaggaacaacagctattccagcagtgctgcaacgagcttcgccaggaagagccagattgtgtttgccccaccttgaaacaagctgccaaggccgttagactccagggacagcaccaaccaatgcaagtcaggaaaatttaccagacagc

SEQ ID NO: 145435 - DNA, 345 bp, Arabidopsis thaliana
gaatacatggagaatcacagctgccttcagaaagatacgacgtcggcagccaaattagacgtcgaaactggaaacctccggcagagagatgaaacgaagccgttttatgcaaactcactgacgccacgtgagatggaatctcttgttgcgatctgcgataccttcatatcctccatcgacgactctggagtaggacacgtggatgattgcgtcgctggatatttctccgcctccgcttctcagaccggaactcccgaccgcgtggcgaggttgatgagtgagaggcttcaccacccaaagaagtggatactaagagctggattgggttactctctacttggatcg

SEQ ID NO: 145436 - DNA, 418 bp, Arabidopsis thaliana
gttacaaccccgacaaaatcccatttgtgcccatctctggattcgagggtgacaacatgattgagaggtccaccaacctagactggtacaagggaccaactcttcttgaggctcttgaccagatcaacgagcccaagaggccatcagacaagccccttcgtctcccacttcaggatgtctacaagattggtggtattggaacggtgccagtgggacgtgttgagactggtatgatcaagcctggtatggttgtgacctttgctcccacagggttgaccactgaggtcaagtctgttgagatgcaccacgagtctcttcttgaggcacttccaggtgacaacgttgggttcaatgttaagaatgttgctgtcaaggatcttaagagagggtacgtcgcatccaactccaaggatgaccc

SEQ ID NO: 145437 - DNA, 427 bp, Arabidopsis thaliana
ggaagaaaaatgggtcgagtctcatctattatctctttctctttgacactcttgatcctcttcaatggctacactgcccaacagtggcccaacgagtgccagctcgatcaactcaatgcgctcgaaccatcccaaatcatcaagagcgagggtggtcgcatcgaggtctgggaccaccatgcaccccagctccgttgctccggctttgcctttgagcgtttcgtcattgagcctcagggtcttttcttgcccactttcttgaacgccggcaaactcacgtttgttgttcacggaaggggtctaatgggaagagttattccgggatgcgccgagacgttcatggagtcaccggtatttggagaaggtcaaggtcagggtcagagtcaagggttccgagacatgcaccagaaagtagagcacctaccgt

SEQ ID NO: 145438 - DNA, 425 bp, Arabidopsis thaliana
caaaaagaaaatgggtaagcttagcaatctcctcgttgcaaccttcgggggtctcctcgtccttaacgggtgccttgcgaggcagtcacttggggttcctcctcagctacagaacgagtgtaacctcgacaacctagatgttctccaagccaccgaaactatcaagagtgaagccggtcagatcgagtactgggaccacaaccaccctcagctccgatgtgttggtgtttccgttgctcgttatgtaattgaacaaggcggtctttacttgcccaccttcttcacttccccaaaaatttcctacgtcgttcaaggaacgggtatcagcggaagagtggtccctggatgtgccgagaccttcatggactcgcagccgatgcaaggacaacaacaaggccaaccatggcaaggacgacagggacaac

SEQ ID NO: 145439 - DNA, 428 bp, Arabidopsis thaliana
ctctctctacacactttttcagattccatcatcacttgttcttttcacacccaataaaaacttgcatctttcttctaaattgttgatgatcgcttctcatatttgaccctagagacaacatcatttctaccgacaaagatttgatatcgaatccaacaagtgaaagatgggtctatcaagtcttcctggtccatcagaaggaatgttatgtgtgatattagttaatacagcattatcgatctccattgtcaaaggcattgtaagatcattccttggcatagtaggaatcagtctctcgccgtcttcatcctcgccttcttcggtgacggtatcttcagagaattcatcaacttcagagccatttgatttccgggtctgccaaccagagagttaccttgaggagttcaggaaccggactccgatactgg

SEQ ID NO: 145440 - DNA, 404 bp, Arabidopsis thaliana
tgaacacactcgatgtgcaaaacatatcgatagtaaaatcggtaaaaatgagcatattcaggttaagaaaacatatagagataagtgtacctgatgtttctgcagttgggacagtagacacttggacagctttcacagatccaaatgttgtcttcagactcaagtacttcactggcctttgtccaagcaatgatctttgattgtatggtatcagtaagcttccagatcttactctactaaggtctactgccgagattttaattgtaggtacttctaggctacctgtaacatacgtcatacgccaaggtcttataatgggaaatcagcctaatctagacagtgtttaatagaatgactaaataagcacttatctttaatttgatcccttactttttaaaattgag

SEQ ID NO: 145441 - DNA, 390 bp, Arabidopsis thaliana
gttttctcttctctccgtcgtctcactctcatttctcctcttcttccatggcgccgaggcacgccagcgagaggcgccgtttccaaacgcctgccatttcagccaaatcaacagcctcgcgcccgctcaggcgacgaagttcgaagccggtcagatggaagtatgggaccacatgagccctgagctccgatgcgccggtgtaacggtggctcgcatcacccttcagcccaattccattttcttgcccgctttctttagcccacctgcccttgcttacgttgtccaaggagaaggagttatggggacgattgcttctggttgtcctgagacttttgcagaagttgaaggatcatcatgaagaggaggaggaggtgacccgggtcgacgttt

SEQ ID NO: 145442 - DNA, 432 bp, Arabidopsis thaliana
  unsure (1)..(432): unsure at all n locations
aagaaaacatacacaaatagcaaaacatggctaacaagctcttcctcgtctgcgcaactctcgccctctgcttcctcctcaccaacgcttccatctaccgcaccgttgtcgaattcgaagaagatgacgccagcaaccccgtaggtccaagacagagatgccagaaggagtttcagcaatcacaacacctaagagcttgccagagatggatgagcaagcaaatgaggcaaggacgtggtggtggtccttccctcgacgatgagttcgatttcgagggcccccagcagggataccagctactccagcagtgctgcaacgagcttcgccaggaagagccagtttgcgtttgccccaccttgaaacaagctgccagggcagttagcctccagggacagcacggaccattccaatccaggaaaatntaccagtcag

SEQ ID NO: 145443 - DNA, 281 bp, Arabidopsis thaliana
ggcaaaagcaataagaaatccaatatataattgtatttcaagtgtaacaggataggatttattagctaagagttctaaatttaatgttggttcgttcgaaccatataaacttatacctaaaactcctattaataaaaaaatagaacttcctgccgtgtacaaaataaatattgtagcctaatacaaacgtttcttttcacctcacatggctataagtccattgacgtgatgtattcgtaactcgcactgtaatttaacaagtcggactttacttgcccacc

SEQ ID NO: 145444 - DNA, 421 bp, Arabidopsis thaliana
cagatcgtaatgaatacaaaataagatttatggctacacaaactgttgaagatagttctagatctggtccaagaagcactactgtagggaagttattgaaaccattgaattccgaatatggtaaagtagctcccggatggggaacgacccctttgatgggtgttgcaatggctctatttgcggtattcctatctattattttggagatttataattcttctgttctactggatggaatttcagtgaattagactgagaagaatcttgaagttctagcttttagctcgatacaaaaaagtaaagtatgcaggtctaacaattttagcctattctcctttggtagttcgaccgcgaaatatttttctgcattgtatatttccggaatatgagtaaagtttatgattggttcgaagaacgtctt

SEQ ID NO: 145445 - DNA, 342 bp, Arabidopsis thaliana
ggaggaatagcggctgatttaccttatggttggatagataaatgcttggatgtgtttgtgattattttttaacagaggttgttgaatatcaaaaactcattacacgaaatactatttttttagaacgggttgaaggagtagggattattgttggggaagaaggaattaattgctctttatgcggtataattatttatgctttttgagatcttatattttctatgttctactgatttggtattacattgatgttttattgtgtcgatatttgtatttttctttttgaatttgggtacataatttttatttttatacttttatcttttttagtttattttattt

SEQ ID NO: 145446 - DNA, 425 bp, Arabidopsis thaliana
  unsure (1)..(425): unsure at all n locations
aaaaatgggtcgggtctcatcaataatctttttctttttgccactctggatcctcttcaatggctacactgcccaacaggggcccaacgagtgccagctcgatcaactcaatgcgctcgaaccatcccaaatcatcaagagcgagggtggtcgcatcgaggtctgggaccaccatgcaccccagctccgttgctccggctttgcctttgagcgtttcgtcattgagcctcagggtcttttcttgcccactttcttgaacgccggcaaactcacgtttgttgttcacggaaggggtctaatgggaagagttattccgggatgcgccgagacgttcatggagtcaccggtatttggagaaggtcaaggtcagggtcagagtcaagggttccgtgacatgcanccagaagtagagcacctacggtgcg

SEQ ID NO: 145447 - DNA, 425 bp, Arabidopsis thaliana
gtgagagaagaaagatagagaaaaaaaatgggaggcaaaggtgtgatgatggtggcgatactttgcctttgggcactctctgcaacatctgaagcagtaacagaggctgagccaggtttgatgatgaacttctacaaggacacgtgtcctcaggccgaagacatcgtccgtgaacaagtcaaactcctctacaaacgccacaagaacaccgctttctcttggctccgtaacatcttccatgactgcgccgttgagtcatgtgatgcgtcgcttttgctggattcgacaagaagagagctaggagagaaagaacacgacaggagcttcggacttagaaactttaggtacatcgaggagatcaaggaagctctcgagagggagtgtcctggtgttgtctcatgttctgacattctcgtcttgtccgc

SEQ ID NO: 145448 - DNA, 427 bp, Arabidopsis thaliana
ctccaagccaccgaaactatcaagagtgaagccggtcagatcgagtactgggaccacaaccaccctcagctccgatgtgttggtgtttccgacgctcgctatgtaattgaacaaggcggtctttacttgcccaccttcttcacttgcccaaaaatttcctacgtcgttcaaggaacgggtatcagcggaagagtggtccctggatgtgcctagaccttcatggactctcagcctatgcaaggacaacagcaaggtcaaccatggcaaggacgactgggacaacatggtcaaccatgggaaggacagggacaacagggacaacaaggaagacaaggccaaccatgggaaggacaggttcaacagggacaacaaggacgacagggacaacagggccaaccatggtaaggacagggacagcagggacaac

SEQ ID NO: 145449 - DNA, 407 bp, Arabidopsis thaliana
cttggggttactgctcagctacagaacgagtgtaacctcgacaacctagatgttctccaagccaccgaaactatcaagagtgaagccggtcagatcgagtactgggaccacaaccaccctcagctccgatgtgttggtgttaccgttgctcgttatgtaattgaacaaggcggtctttacttgcccaccttcttcacttccccaaaaatttcctacgtcgttcaaggaacggctatcagcggaagagtggtccctggatgtgccgagaccttcatggactcgcaggcgatgcaaggacaacaacaaggccaaccatggcaaggacgacagggacaacaaggccaaccatgggaaggacaggggcgacagggacaacaaggaagacaaggcccaccatgggaaggaca

SEQ ID NO: 145450 - DNA, 425 bp, Arabidopsis thaliana
aaaaccttgaaacctttaaaaaatcgaaactatggctaagctcattctcgttttcgcaactcttgccctcttcatcctcctagccaacgcatccatctaccgcacagtggtggagttcgaggaagatgatgacgtgagcaacccacaacaaggtaagtgccagagggagtttatgaagcatcagcaactaagaggttgcaagcaatggatccgcaagagagctcaacaaggaagaatcggatacgaagctgatgactttgagctcactcttgatgtcgatcttgaggacgatgagaacccaatggggcctcaacaacagtcatctcttaaaatgtgttgtaatgaattaaggcaagtggacaagatgtgtgtgtgtcctacactgaaaaaggcggctcaacaagtcagattccagggaatgcatg

SEQ ID NO: 145451 - DNA, 426 bp, Arabidopsis thaliana
cgagaaaacgaaaaccctagtttcagaggcatctccagacaccgaaaatggcggaaggactcgttttgaagggcaccatgcgtgcacacactgacatggtgacggcaatcgccaccccaatcgataacgcagacatcatcgtctcagcttcccgcgacaaatccatcattttgtggaaactcaccaaggacgacaaagcctacggtgtagctcagaggcgtctcactggtcactctcacttcgttgaggatgttgttctctcctccgatggacaattcgcgctttccggcagctgggacggcgagctccgtctttgggatcttgctgctggtgtctccactcgtagattcgttggacacaccaaggacgtgctcttcggcgccttttcactcgacaaccgtcagatcgtctctgcatctcgtgacc

SEQ ID NO: 145452 - DNA, 260 bp, Arabidopsis thaliana
caaaaagaaaatggttaagctcagcaatcttctcgttgcaaccttcggggttctgcgtggtccttaacggctgccttgcgaggcagtcacttggggttcctcctcagctacagaacgagtgtaacctcgacaacctagatgttctccaagccaccgaaactatcaagagtgaagccggtcagatcgagtactgggaccacaaccaccctcagctccgatgtgtaggtgtttacgatgctcggtatgtaaatgaactaggc

SEQ ID NO: 145453 - DNA, 435 bp, Arabidopsis thaliana
cacaaacgagtaagaatacaaatacaaatagcaaaaaaaatggcaaacaagctcttcctcgtctgcgcaactttcgccctctgcttcctcctcaccaacgcttccatctaccgcactgttgtcgagttcgacgaagatgacgccagcaaccccatgggcccaagacagaaatgtcagaaggagtttcagcaatcacagcacctaagagcttgccagaaattgatgcgcatgcaaatgaggcaaggccgtggtggtggtccctccctcgacgatgagttcgatttggaagacgacatcgagaacccacaaggcccccagcagggacaccagatcctccagcagtgctgcagcgagcttcgccaggaagagccagtttgtgtttgccccaccttgagacaagctgccagggccgttagccttcagggacaacacggg

SEQ ID NO: 145454 - DNA, 419 bp, Arabidopsis thaliana
gaaaatggttaagctcagcaatctcctcgttgcaaccttcggggttctcctcgtgcttaacggctgccttgcgaggcagtcacttggggttcctcctcagctacagaacgagtgtaacctcgacaacctagatgttctccaagccaccgaaactatcaagagtgaagccggtcagatcgagtactgggaccacaaccaccctcagctccgatgtgttggtgtttccgttgctcgttatgtaattgaacaaggcggtctttacttgcccaccttcttcacttccccaaaaatttcctacgtcgttcaaggaacgggtatcagcggaagagtggtccctggatgtgccgagaccttcatggactcgcagccgatgcaaggacaacaacaaggccaaccatggcaaggacgacagggacaac

SEQ ID NO: 145455 - DNA, 410 bp, Arabidopsis thaliana
aacaaacaaaaagaaaatggttaagctcagcaatctcctcgttgcaaccttcggggttctcctcgtccttaacggctgccttgcgaggcagtcacttggggttcctcctcagctacagaacgagtgtaacctcgacaacctagatgttctccaagccaccgaaactatcaagagtgaagccggtcagatcgagtactgggaccacaaccaccctcagctccgatgtgttggtgtttccgttgctcgttatgtaattgaacaaggcggtctttacttgcccaccttcttcacttccccaaaaatttcctacgtcgttcaaggaacgggtatcagcggaagagtggtccctggatgtgccgagaccttcatggactcgcagccgatgcaaggacaacaacaaggccaaccat

SEQ ID NO: 145456 - DNA, 426 bp, Arabidopsis thaliana
gaaaaaaataagaaccaaagaaaacgaaataatgaaagaacacgtgggtttagggatctaataagaatctctttcttaaaatcaatagaaagagagaagaaaaagggtttgggctctattgagtatgacacttttatatcaatgaaaagcgacgatgtgttgtatatgagatatggaatgatcttctcatctcaaatccctattcgttttttaacatcatcattctcttttccaccattctttctactttcaaacaatgtatcctaccttttttcttcttcttggtacatactctattacttttactttctttttttttgtatttcaaaaaccatgcatcttctaaacaatgttatcggttgagttaagtttccgaaattacattaccgccactattatatttttctaactttggtatacaatata

SEQ ID NO: 145457 - DNA, 418 bp, Arabidopsis thaliana
aaaagattcaatagaaaaaacgaaatttcattttctttcaattgggctttaattatgaaaccaaagttatactagttgcttcttcttctactttaaagtgtgtgattcttcttctatctttttaatcaaaagtatttctttttctatcgtccaccacattattctatggcatcttctaggcatgaatatttattttcacttattcgaaatccagattaattatgttcgcttcagatcggtttatctgaattgaacactagtttgtgagattttgctgaacaaaaattatattctgaagtgcaaaatgatggtggaaacgaaattgaaccttcaagcacctttgtgatgatgaggtcttagtcttcggagaaacagaacagaatatcgtgaatgtcagacagagttatgaaacacaaaa

SEQ ID NO: 145458 - DNA, 423 bp, Arabidopsis thaliana
agaaaatggttaagctcagcaatctcctcgttgcaaccttcggggttctcctcgtccttaacggctgccttgcgaggcagtcacttggggttcctcctcagctacagaacgagtgtaacctcgacaacctagatgttctccaagccaccgaaactatcaagagtgaagccggtcagatcgagtactgggaccacaaccaccctcagctccgatgtgttggtgtttccgttgctcgttatgtaattgaacaaggcggtctttacttgcccaccttcttcacttccccaaaaatttcctacgtcgttcaaggaacgggtatcagcggaagagtggtccctggatgtgccgagaccttcatggactcgcagccgatgcaaggacaacaacaaggccaaccatggcaaggacgacagggacaacaag

SEQ ID NO: 145459 - DNA, 299 bp, Arabidopsis thaliana
aaagaaaatggttaagctcagcaatcttctttttgcaaccttcggggttctcctcgtccttaacggctgccttgcgaggcagtcacttggggttcctcctcagctacagaacgagtgtaacctcgacaacctagatgttctccaagccaccgaaactatcaagagtgaagccggtcagatcgagtactgggaccacaaccaccctcagctccgatgtgttggtgtttccgtcgctcgttatgtaattgaacaaggctgtctttacttgctcacctttatcacttactcaaaaattttct

SEQ ID NO: 145460 - DNA, 427 bp, Arabidopsis thaliana
aaatggttaagctcagcaatctcctcgttgcaaccttcggggttctcctcgtccttaacggctgccttgcgaggcagtcacttggggttcctcctcagctacagaacgagtgtaacctcgacaacctagatgttctccaagccaccgaaactatcaagagtgaagccggtcagatcgagtactgggaccacaaccaccctcagctccgatgtgttggtgtttccgttgctcgttatgtaattgaacaaggcggtctttacttgcccaccttcttcacttccccaaaaatttcctacgtcgttcaaggaacgggtatcagcggaagagtggtccctggatgtgccgagaccttcatggactcgcagccgatgcaaggacaacaacaaggtcaaccatggcaaggacgacagggacaacaaggccaacc

SEQ ID NO: 145461 - DNA, 381 bp, Arabidopsis thaliana
cactttattcctaatctctcttttcctctacaacaattgcattgcgcatcactatacattcacggttagggaagttccatatacgaaactgtgtagcacgaaggctattttaaccggtaatagtgagtttcctggaccgattataaaggttcacaaaggcgacactatttatgttaacggtgaaaaccgagctagtgaaaacatcacaatgcattggcatggtgtcgagcaaacgagaaatgcgcggtcagatggtcctgaatacatcacacaatgcccgattcgacccgggttagattttttgtacagagtcatattttgcatcgaagacactactgtttggtggcacgcgcatagctcttggacacgtgcaactgtaca

SEQ ID NO: 145462 - DNA, 295 bp, Arabidopsis thaliana
gaaggactggagtttgatttcaaggagatgcctgtcggaggagcagccttggatttggttggagttccattgccggaggaaactttcacggctgcaaaactatctgatgccattcttcttggagctattggagggtacaaatgggacaagaatgagaaacatctgagacctgagatggctctgttttaccttagaagagatctcaaagtctttgctaatttgagacctgctacagttttgccacagctagttgatgcttccacactgaataaagaagtagcagaaggtgttgata

SEQ ID NO: 145463 - DNA, 422 bp, Arabidopsis thaliana
gaaggcaatgctcgaagatcgtttgttgaagaaaaccaaacgaagcagagtaacaatggcttcgacggtgggattagcaccgggactctcccggaaattgaagaaggtattggactgtcgtacagatagtccggatctggtggcgtcgcttaacgctttatcctcattctacgacgagaacagtgctcacgcacggcgaaatctcagatcgacgatcgagaaacgagcgcttcagatcaacagtgagttccttaacgcggctgattcgactcagatcgcattggatcgcgtggaggaggaagtgaatgctttagctgattgttgcgataagattgcggcggcgctaagtagtttcgcggctaccactagcgatattattagtactactgagaggctaaagcaagagcttgaggttactactc

SEQ ID NO: 145464 - DNA, 425 bp, Arabidopsis thaliana
atgatgagagagtcgaggcaagtgatcaaatcagaaggtggagagatgagagttgtgttatcaccaagaggaaggatcattgagaagccaatgcacattgggtttctaacaatggaacctaagaccctctttgtccctcagtatcttgactcaagccttctcatctttattcgtcaaggtgaagcaacccttggagtgatatgcaaagacgaattcggagagaggaaactgaaagcaggagacatctactggattccggctggttctgtcttttatttacataacacaggcctaggtcaacgccttcatgtcatttgcagcattgatccaacgcagagtctcggcttcgaaaccttccaacctttctatataggtggagggccttcgtctgttctagctggatttgatcctcacactttaacttt

SEQ ID NO: 145465 - DNA, 428 bp, Arabidopsis thaliana
gtaccactaagcgtggcctatctatcccaccacttctaaagctggctggtgagctctctctgagtgtcaagtctgtgaagtacactcgcggctccttcctctgccccggaggccagccttttcctcaccgcagcttctctgaagaagtctctgttcttgatgggcactttactcagctgggcttgaacagcgtagcctacttgatgggcaatgatgatgagactaagaaatggcatgtctatgctgcctctgcccaggactccagcaactgcaacaacaatgtctacactctcgagatgtgcatgactggtctggacagagagaaagctgctgtcttctacatggatgaagctgacaagactgggtcaatgactgataactctggaatcagaaagatccttcccaagtctgagatctgcgactttgaa

SEQ ID NO: 145466 - DNA, 433 bp, Arabidopsis thaliana
gctcagcaatctgctcgttgcaaccttctgggttctgctaccccttaacggctgccttgccaggcagtcacttggggttcctcctcagttacagaacgagtgtaacctagacaacctagatgttctccaagccaccgaaactatcaagagtgaagccctgtagatcgagtactgggaccacaaccaccctgagctccgatgtgttggtgtttccgatgctcggtatgtaatggaacaaggtggtctttactagcccaccttctttacttgcccaaaaatttcctacgtcgatcaaggaacgggtatcagcggaagagtggttcctggatgtgccgagaccttcattgactcgcagccgatgcaaggacaacaacaaggccaaccatggcacggacgacagggacaacagggccaaccatgggacggacacggt

SEQ ID NO: 145467 - DNA, 372 bp, Arabidopsis thaliana
cggaaacaagttcgagtggatctctttcaaaactaatgaaaacgcaatgatcagcactttggcgggtagaacctcgctcttgagggcattgccattggaggtcatatcaaatggtttccagatctctcccgaggaagctaggaagatcaagttcaacacacttgagaccactttgacccgcgctgccggtaggcaacaacaacagttgatcgaggagattgtcgaggcttaaatcaaaacgtttttctttttcttaataaagtatggtcagtttgtaatcacgtccctttacctttaacgtacgtgtaaaatatgtgtctgcggcacctcacttgtaataacactttcttctcataaataaaagggaagttt

SEQ ID NO: 145468 - DNA, 433 bp, Arabidopsis thaliana
aagaaaaatgggtcgagtctcatctattatctatctctctttgacactcttgatcctattgaatggctacactgcccaacagtggcccaacgagtgccagctcgatcaactcaatgcgctcgaaccatcccaaatcatcaagagcgagggtggtcgcatcgaggtctgggaccaccatgcaccccagctacgatgctccggctttgcctttgagcgtttcgtcattgagcctcagggtcttttcttgcccactttcttgaacgccggcaaactcacgtttgttgttcacggaaggggtctaatgggaagagttattccgggatgcgccgagacgttcatggagtcaccggtatttggagaaggtcaaggtcagggtcagagtcaagggttccgtgacatgcaccagaaagtagagcacctactgtgcggtgac

SEQ ID NO: 145469 - DNA, 436 bp, Arabidopsis thaliana
cacaagtaattaactaacaacaaatggcgaacaagctcttcctcgtctgcgcagctctcgccctgtgtttcatcctcaccaacgcttccgtctatcgcacggttgtcgagttcgacgaagatgacgccagtaaccccataggcccaatacagaaatgtcagaaggagtttcagcaagaacagcacctaagagcttgccagagatggatgcgcaagcaaatgtggcaaggacgtggtggtggtccttccctcgacgatgagttcgatatggaagacgacatcgagaacccgcagagacgacagctactccagaagtgctgcagcgagcttcgccaagaagagccagtttgcgtttgccccaccttgagacaagctgccaaggccgttagattccagggacagcaacaccaaccagagcaagtcaggaaaatttacca

SEQ ID NO: 145470 - DNA, 429 bp, Arabidopsis thaliana
gcataaggcaacgccatccaactttagctgcttcagcgattaattgcctaagcgtcacgccactctcaaccgtcaaagtcatggccttcgcatcggcttgcaccgtgtggtttagaaactttgtgctaatgaacaatccgtcgtttccatcagtgcacgtgagcttagggatgctatgggaatatcgagtggttacacgcattttccgtccggctttagtagctgcagcgacgatagatacaagctcggcttcagttgttgggtaagccacgttggcggctctacacgtggagcggtctgggaaggctcctaatgaattggtgactatacagttcgtgtttcctgacacacatttaacaggatcttcgggtggtgttgagattaccgtgtgcacaagtgttaataaacaatataacccggaagggtgcg

SEQ ID NO: 145471 - DNA, 424 bp, Arabidopsis thaliana
gtttaggaaagctctgaaattagggtttttcgtctgcgatcacgatccttcaattactttgcgataatggagaagataagacaaccaacacatgcaggctcttggtataccgataatcctacaaaattgtcatctgatcttgaagaatggcttaatgcaactggtttgaccaaatctcctgatgtacgaggcgtcattgcaccacacgcaggttattcgtactccggtcgtgcagctgcctatgcttttgcaaacattgatcctactaacatttcacggatatttcttcttggtccatctcaccacttttatactccaaaatgtgccctttcgactgcaacagtttataaaacccccattggaaatctacctgttgatgtggagatgattaaggagatacgagctatgggaaaatttggaatga

SEQ ID NO: 145472 - DNA, 426 bp, Arabidopsis thaliana
cgttgacggaaaatttgggagagaatattctcgatggggaaaggaggaggttgtgttccgagcaagaagaagaagccggccaccaccggcgatggtcccggaatcgatgatgataacgacgctactaatgctccgatccaaattgacgatgatcaaaccaccattgacggcgatcgaacaacggcgacgaatactgcaggaacaacaacaccagcgattactactacggctgctaagatctcgtcaccgctcaagatcttcgtcgtgttctattcgatgtacggacatgtggagagcttagcgaagaggatgaaaaagggagtggatagcgtcgaaggagtggaggcgacgttgtacagagttccggagacgctttcgcaagaagttgttgagcagatgaaggcgccgggtaaggatttggagatt

SEQ ID NO: 145473 - DNA, 395 bp, Arabidopsis thaliana
aaaatggttaagctcagcaatctccttgttgcaaccttcggggttctcctcgtccttaacggctgccttgcgaggcagtcacttggggttcctcctcagctacagaacgagtgtaacctcgacaacctagatgttctccaagccaccgaaactatcaagagtgaagccggtcagatcgagtactgggaccacaaccaccctcagctccgatgtgttggtgtttccgttgctcgctatgtaattgaacaaggcggtctttacttgcccaccttcttcacttccccaaaaatttcctacgtcgttcaaggaacgggtttcagcggaagagtggtcccttgatgtgccgagaccttcatggacttgcagccgatgcaggacaacaacaaggcccacca

SEQ ID NO: 145474 - DNA, 346 bp, Arabidopsis thaliana
cataaagaaaatggttaagcttagctatctcctcgttgcaaccttcgggggtctcctcgtccttaacggctgccttgcgaggcactcacttggggttccttctcagctacagaacgagtgtgacctcgacaacctagatgttctccaagccaccgaaactatcaagagtgaagccggtcagatcgagtactgggaccacaaccaccctgagctccgatgtgttggtgtacccgatgctcgctatgtaattgaacaaggcgggctttacttgcccaccttcttcacttccccaaaaatttcctacgtcgttcaaggaacgggtatcagcggaagagtggcccctgga

SEQ ID NO: 145475 - DNA, 366 bp, Arabidopsis thaliana
atacacacatagcaaaaaatggcaaacaagctgttcctcgtctgcgcaggtctcgctctctgcttcctcctcaccaacgcttccatctaccgcaccgtcgttgagttcgaagaagatgacgccactaaccccataggcccaaaaatgaggaaatgccgcaaggagtttcagaaagaacaacacctaagagcttgccagcaattgatgctccagcaagcaaggcaaggccgtagcgatgagtttgatttcgaagacgacatggagaacccacagggacaacagcaggaacaacagctattccagccgtgctgcaacgagcttcgccaggaagagccagattgttgttgccccaccttgaaacaagct

SEQ ID NO: 145476 - DNA, 437 bp, Arabidopsis thaliana
caaaaagaaaatggttaagctcagcaatctcctcgttgcaaccttcggggttctcctcgtccttaacggctgccttgcgaggcagtcacttggggttcctcctcagctacagaacgagtgtaacctcgacaacctagatgttctccaagccaccgaaactatcaagagtgaagccggtcagatcgagtactgggaccacaaccaccctcagctccgatgtgttggtgtttccgttgctcgttatgtaattgaacaaggcggtctttacttgcccaccttcttcacttccccaaaaatttcctacgtcgttcaaagaacgggtatcagcggaagagtggtccctggatgtgccgagaccttcattgactcgcaagcgatgcaaggacaacaacaaggccaaccatggcaaggacgacagggacaacaaggccaaccat

SEQ ID NO: 145477 - DNA, 419 bp, Arabidopsis thaliana
aatcagtgtgctcttagcctttactctatagttttatatcatatcaatcgacatggcgaatgtggaccgtgatcggcgtgtgcatgtagaccgaactgacaaacgtgttgatcagccaaactaccaagatgatgtcggctattgaaggctatggcggttatggggctggttctgattataagagtagcgggcatttcactaaccaaatcttggcacttatagcaagagttaccatatggtggcacactgataaccgtagctggactcactctagccggttcggtgaacggattgctagtgtgcatacccctcttactcctattcagtccggagatagtcctagcggctctaactattgggcttgctgtgacgggaatcttggcttgtggatcgattgggttgacgggtctgagctcggt

SEQ ID NO: 145478 - DNA, 435 bp, Arabidopsis thaliana
cttccccaaaaatttcctacgtcgttcaaggaacgggtatcagcggaagagtggtccctggatgtgccgagaccttcatggactcgcagccgatgcaaggacaacaacaaggccaaccatggcaaggacgacagggacaacaaggccaaccatgggaaggacagggacaacagggacaacaaggaagacaaggccaaccatgggaaggacagggacaacagggacaacaaggacgacagggacaacaaggccaaccatgggaaggacagggacagcagggacaacaagggttccgtgacatgcaccagaaggtggaacatgtgagacgcggagacgtctttgccaacactccaggctctgcccactggatctacaactcaggagaacagccacttgtcatcatcgctcttctcgacatcgccaactaccaaaacc

SEQ ID NO: 145479 - DNA, 419 bp, Arabidopsis thaliana
gaacgacaacggagaaagagtgttcttccaagagatctccagcggacagttactagtcgtgccacaaggcttttcggtcatgaaacatgccataggcgaacagttcgagtggatcgaattcaagacaaacgaaaacgcacaggtcaacacactcgcgggccgtacctcagtcatgagaggtttgccgcttgaggttataaccaatgggtaccagatctctcccgaagaagctaaacgagtaaagtttagcacgattgagaccacactgacccatagcagtccaatgagctacggaaggcctagggcttgaggcttgatgagcgcgtggtggaatagcgtttgaatctaaagttcggtttggtacgacttgtaatatgaaataataatgtacaaagaagttctacgcttaagggaacttg

SEQ ID NO: 145480 - DNA, 423 bp, Arabidopsis thaliana
cctaaattacttaaaaagatctctcttatttgaattcttcttattgtttagattccaggtcaaactgtgatccattatctttgctactaaactaagttcttttctctgatcgaatcaaaaagttttcaactttctaaatttttttagttctaaggaaaaaacctctccgagaatggttttatcggtgaagcaaacactctctccgaaaatcggacttttccgacgaaacccttcatcctcactaggaagatctcctgtttctctctcgtttccatcgacggagcttccaaaacgcaccgttttagccgtgtcaaagccgcttcatctctcttcttctctgagagctaagtctccggtagtgagatgtgaagcttatgaagctgaccgatcagagcctcatccgatcggtgatgatgctgcggc

SEQ ID NO: 145481 - DNA, 432 bp, Arabidopsis thaliana
gtcttatgggaaaagtgatccctggatgcgccgaaacattccaagactcatcagagttccaaccacgcttcgaaggtcaaggtcaaagccagaggttccgtgacatgcaccagaaagtggagcacattaggagcggtgataccattgccacaacacccggtgtagcccagtggttctacaacgacggacagcaaccacttgtcatcgtcagcatcttcgatctagccagtcaccagaaccagcttgaccgcaacccaaggccattttacttagccggaaacaacccacaaggtcaagtatggctacaaggacgagagcaacagccacagaagaacatcttcaatggatttggacccgaggttattgctcaagctttgaagattgatcttcagacagcgcagcaacttcagaaccaagatgacaaccgtggaa

SEQ ID NO: 145482 - DNA, 404 bp, Arabidopsis thaliana
agaagaagaaaagaaaaagaagagaaatgacagagaagaaagagatggaagtggtgaaagggctcaacgtggagagatacatgggccgttggtacgagattgcttctttcccatcaaggtttcagccaaagaacggcgtcgacactcgcgccacctacacccttaaccccgacggtaccatacacgtcttgaacgaaacgtggagcaacgggaagaggggttttatcgaaggcagcgcctataaggccgatcctaaaagcgacgaagccaagctcaaagtcaagttctatgtccctcctttcctccccatcattcccgtcaccggagactactgggtgctctacatcgatcctgactaccagcacgctctcattggccagccttccaggagttatctctggata

SEQ ID NO: 145483 - DNA, 427 bp, Arabidopsis thaliana
acagggacaacagggacaacaaggacgacagggacaacaaggccaaccatgggaaggacagggacagcagggacaacaagggttccgtgacatgcaccagaaggtggaacatgtgagacgcggagacgtctttgccaacactccaggctctgcccactggatctacaactcaggagaacagccacttgtcatcatcgctcttctcgacatcgccaactaccaaaaccaactcgaccgcaaccctagagtgttccatttggccggaaacaaccagcagggaggctttggcggttcacagcaacaacaagaacagaaaaacttgtggagcgggttcgacgcacaggtcatagctcaagcattgaaaattgacgttcagttggctcagcagcttcagaaccaacaagacagcagaggaaacatcgttcgt

SEQ ID NO: 145484 - DNA, 432 bp, Arabidopsis thaliana
aacaagaaaacatacacaaatagcaaaacatggctaacaagctcttcctcgtctgcgcaactctcgccctctgcttcctcctcaccaacgcttccatctaccgcaccgttgtcgaattcgaagaagatgacgccagcaaccccgtaggtccaagacagagatgccagaaggagtttcagcaatcacaacacctaagagcttgccagagatggatgagcaagcaaatgaggcaaggacgtggtggtggtccttccctcgacgatgagttcgatttcgagggcccccagcagggataccagctactccagcagtgctgcaacgagcttcgccaggaagagccagtttgcgtttgccccaccttgaaacaagctgccagggcagttagcctccagggacagcacggaccattccaatccaggaaaatttaccagt

SEQ ID NO: 145485 - DNA, 244 bp, Arabidopsis thaliana
caaaaagaaattggtcgacctgactaatctacttgttgcaaccttcgaggttatcttcgggcttaacgggtgacttgctaggcagcaacttgaagtgcctccttacgtgcctaacgtgtggagcttggacaacctagacgtattgcaagcgatcgaagctgtcaagagtgcatacgcgcagatcgagttctgtgaccacaaccacagtcagttccgatgggaaccaaatctcgctgctcgttgt

SEQ ID NO: 145486 - DNA, 433 bp, Arabidopsis thaliana
aaatgacatcatacattgattgataaaacaagatacataaatattcaaactttgataaatttgaagtatccagagatcacaaaaacctaaaatccaaaaattctgctgcattgattatatgtatttaagctcaaaatacaaatcaataacagtaagagatctagatcgaaacataacaagtacagaaaatcaaatcgtgatagattcagataaatatccaatttcacgaaaccctagatatcaaaaagaacctataaagcttctcaattcccagattagatctagcacgaagcaattcacaattaagcatcggaaaacaatccgaaatctcaatcaaggaacacgaagagacgcgagaacagatcgagaatggagaaaaaagaaaaaggcctcacatttgccaagcggagaggataaagagagaagcgaagag

SEQ ID NO: 145487 - DNA, 398 bp, Arabidopsis thaliana
gttggctcagcagcttcagaaccaacaagacagcacaggaaacatcgttcgtgttaagggacctttccaggtcgtgaggccacctctaagacagccctacgagagcgaggagtggagacacccacgtagcccacagggcaacggccttgaggagactatctgcagcatgaggtcccacgagaacattgacgaccctgctcgtgctgacgtgtacaagcccagcctaggtcgcgtgaccagcgtcaacagctataccttgcccatcttggagtatgtcaggctcagtgccactcgtggcgttctccagggtaatgcgatggtgcttcctaaatacaacatgcacgctaacgcgatcttgtactgcactggaggacaaggaaggatccaagtggtcaacg

SEQ ID NO: 145488 - DNA, 430 bp, Arabidopsis thaliana
gcaaaaaatggcaaacaagttgttcctcgtctgcgcagctctcgctctctgcttcctcctcaccaacgcttccatctaccgcaccgtcgttgagttcgaagaagatgacgccactaaccccataggcccaaaaatgaggaaatgccgcaaggagtttcagaaagaacaacacctaagagcttgccagcaattgatgctccagcaagcaaggcaaggccgtagcgatgagtttgatttcgaagacgacatggagaacccacagggacaacagcaggaacaacagctattccagcagtgctgcaacgagcttcgccaggaagagccagattgtgtttgccccaccttgaaacaagctgccaaggccgttagactccagggacagcaccaaccaatgcaagtcaggaaaatttaccagacagccaagcacttg

SEQ ID NO: 145489 - DNA, 434 bp, Arabidopsis thaliana
  unsure (1)..(434): unsure at all n locations
cacaaacgagtaagaatacaaatacaaatagcaaaaaaaatggcaaacaagctcttcctcgtctgcgcaactttcgccctctgcttcctcctcaccaacgcttccatctaccgcactgttgtcgagttcgacgaagatgacgccagcaaccccatgggcccaagacagaaatgtcagaaggagtttcagcaatcacagcacctaagagcttgccagaaattgatgcgcatgcaaatgaggcaaggccgtggtggtggtccctccctcgacgatgagttcgatttggaagacgacatcgagaacccacaaggcccccagcagggacaccagatcctccagcagtgctgcagcgagcttcgccaggaagagccagtttgtgtttgccccaccttgagacaagctgccagggccgttagcctncagggacaacacgg

SEQ ID NO: 145490 - DNA, 427 bp, Arabidopsis thaliana
ctctctctctctttctttctcagattaatcgctgagaagaagcaaccacctggagacggcggagatggcagggtacagagtggaagatgactacgattacctcttcaaagttgttcttataggcgattctggagttggcaaatccaatctcctttccagattcactaaaaacgagttcaatctagagtctaaatccaccattggcgtcgaattcgccactcgtaccttaaaagtcgatggcaaagtcgttaaagctcagatttgggacactgctggtcaggagaggtaccgtgccatcactagtgcatattaccgtggagccgtgggtgcactcctagtatatgatgtaactcgccgtgcaacatttgagaacgtagatcggtggttaaaggagctcaagaaccacacagatccaaacattgtagtg

SEQ ID NO: 145491 - DNA, 298 bp, Arabidopsis thaliana
tatgaatccaataaccccaaatttatgaagattttagattaccttttataaatcttaaatgaataacacaaaactttaacatactttaaaaaaatcttgattgcataacaagagatttacatgacactttaagtaactaaaactcttttcaaatcataaacaaataacaccacctaaatcttttacaaggattctattatctcggcaattatttgatatattttacccaaataatcaaccctgactaaaaataaatacaagccaaattctcttcgttgtttttttatcacacgcctct

SEQ ID NO: 145492 - DNA, 377 bp, Arabidopsis thaliana
gaaaggttttgcatttgcaacctttctcaaattgggttctgtgcatttccttgcactttggataataggaactaaatctctttctctggttcatcaatggcggatcaaacgaagaagagatacgttacaagcgaggatttgaaaaaacacaacaaacctggagatttatggatttcgattcaaggtaaagtttacgacgtttccgattgggttaaatctcatcccggaggcgaagcagcgattctcaatctcgccggccaagacgtcaccgacgcgttcatcgcttaccatcccggaaccgcatggcaccacttagaaaagcttcacaatggctatcacgtgagagaccaccacgtgtcagacgtctcacgtgacta

SEQ ID NO: 145493 - DNA, 231 bp, Arabidopsis thaliana
gagtaactgggactcacaaccactcctcagcttccgatgtgttcggtgttatccgtcgctcgttatgtaatatgaacaaggcgtgtctttacttgcccaccttcttcactttcccaaaaatttcctacgtcgttcaaggaacgggtatcagcggaagagtggtccctggatgtgccgagaccttcatggactcgcagccgatgcaaggacaacaacaaggccaaccatggc

SEQ ID NO: 145494 - DNA, 397 bp, Arabidopsis thaliana
ctctggcagacaacagagactcggcattatctctcttctcgacatcgccaactaccaaaaccaactcgaccgcaaccctagagtgttccatttggccggaaacaaccagcagggaggctttggcggttcacagcaacaacaagaacagaaaaacttgtggagcgggttcgacgcacaggtcatagctcaagcattgaaaattgacgttcagttggctcagcagcttcagaaccaacaagacagcagaggaaacatctgtcgtgttaagggaccttttcaggtcgtgaggccacctctaagacagccctactagagcgaggagtggagacacccacgtagcccacagggcaacggtctttgggagactatctgcagcatgaggtcccaccagacattg

SEQ ID NO: 145495 - DNA, 423 bp, Arabidopsis thaliana
aaagaaaatggttaagctcagcaatctcctcgttgcaaccttcggggttctcctcgtccttaacggctgccttgcgaggcagtcacttggggttcctcctcagctacagaacgagtgtaacctcgacaacctagatgttctccaagccaccgaaactatcaagagtgaagccggtcagatcgagtactgggaccacaaccaccctcagctccgatgtgttggtgtttccgttgctcgttatgtaattgaacaaggcggtctttacttgcccaccttcttcacttccccaaaaatttcctacgtcgttcaaggaacgggtatcagcggaagagtggtccctggatgtgccgagaccttcatggactcgcagccgatgcaaggacaacaacaaggccaaccatggcaaggacgacagggacaaca

SEQ ID NO: 145496 - DNA, 401 bp, Arabidopsis thaliana
caacaaacaaaaagaaaatggttaagctcagcaatctcctcgttgcaaccttcggggttctcctcgtccttaacggctgccttgcgaggcagtcacttggggttcctcctcagctacagaacgagtgtaacctcgacaacctagatgttctccaagccaccgaaactatcaagagtgaagccggtcagatcgagtactgggaccacaaccaccctcagctccgatgtgttggtgtttccgttgctcgttatgtaattgaacaagacggtctttacttgcccaccttcttcacttccccaaaaatttcctacgtcgttcaaggaacgggtatcagcggaagagtggtccctggatgtgccgagaccttcatggactcgcagccgatgcaaggacaacaacaa

SEQ ID NO: 145497 - DNA, 414 bp, Arabidopsis thaliana
cacatagcaaaaaatggcaaacaagttgttcctcgtctgcgcagctctcgctctctgcttgctcctcaccaacgcttccatctaccgcaccgtcgttgagttcgaagaagatgacgccactaaccccataggcccaaaaatgaggaaatgccgcaaggagtttcagaaagaacaacacctaagagcttgccagcaattgatgctccagcaagcaaggcaaggccgtagcgatgagtttgatttcgaagacgacatggagaacccacagggacaacagcaggaacaacagctattccagcagtgctgcaacgagcttcgccaggaagagccagattgtgtttgccccaccttgaaacaagctgccaaggccgttagacttcagggacagcaccaaccaatgcaagtcaggaaaat

SEQ ID NO: 145498 - DNA, 421 bp, Arabidopsis thaliana
ggaagaaaaatgggtcgagtctcatctattatctctttctctttgacactcttgatcctcttcaatggctacactgcccaacagtggcccaacgagtgccagctcgatcaactcaatgcgctcgaaccatcccaaatcatcaagagcgagggtggtcgcatcgaggtctgggaccaccatgcaccccagctccgttgctccggctttgcctttgagcgtttcgtcattgagcctcagggtcttttcttgcccactttcttgaacgccggcaaactcacgtttgttgttcacggaaggggtctaatgggaagagttattccgggatgcgccgagacgttcatggagtcaccggtatttggagaaggtcaaggtcagggtcagagtcaaggtgttcgtgacatgcaccagaaagttgagcacc

SEQ ID NO: 145499 - DNA, 425 bp, Arabidopsis thaliana
aggagaacagccacttgtcatcatcgctcttctcgacatcgccaactaccaaaaccaactcgaccgcaaccctagagtgttccatttggccggaaacaaccagcagggaggctttggcggttcacagcaacaacaagaacagaaaaacttgtggagcgggttcgacgcacaggtcatagctcaagcattgaaaattgacgttcagttggctcagcagcttcagaaccaacaagacagcagaggaaacatcgttcgtgttaagggacctttccaggtcgtgaggccacctctaagacagccctacgagagcgaggagtggagacacccacgtagcccacagggcaacggccttgaggagactatctgcagcatgaggtcccacgagaacattgacgaccctgctcgtgctgacgtgtacaagccca

SEQ ID NO: 145500 - DNA, 369 bp, Arabidopsis thaliana
tcacaaacgagtaagaatacaaatacaaatagcaaaaaaaatggcaaacaagctcttcctcgtctgcgcaactttcgccctctgcttcctcctcaccaacgcttccatctaccgcactgttgtcgagttcgacgaagatgacgccagcaaccccatgggcccaagacagaaatgtcagaaggagtttcagcaatcacagcacctaagagcttgccagaaattgatgcgcatgcaaatgaggcaaggccgtggtggtggtccctccctcgacgatgagttcgatttggaagacgacatcgagaacccacaaggcccccagcagggacaccagatcctccagcagtgctgcagcgagcttcgccaggaaga

SEQ ID NO: 145501 - DNA, 428 bp, Arabidopsis thaliana
gaaaacatacacaaatagcaaaacatggctaacaagctcttcctcgtctgcgcaactctcgccctctgcttcctcctcaccaacgcttccatctaccgcaccgttgtcgaattcgaagaagatgacgccagcaaccccgtaggtccaagacagagatgccagaaggagtttcagcaatcacaacacctaagagcttgccagagatggatgagcaagcaaatgaggcaaggacgtggtggtggtccttccctcgacgatgagttcgatttcgagggcccccagcagggataccagctactccagcagtgctgcaacgagcttcgccaggaagagccagtttgcgtttgccccaccttgaaacaagctgccagggcagttagcctccagggacagcacggaccattccaatccaggaaaatttaccagtc

SEQ ID NO: 145502 - DNA, 421 bp, Arabidopsis thaliana
ctaaaattctgcccttctatccaaaggatgggggggcagaggcctttggtgtccactccagtcaagaattggagcctcacaatcactagccaatatgcttttctcgcatgcctttcttcgttcatggttcgatattctggtgtcctaggcgtagaggaacaacaccaatccatcccgaacttggtggttaaactctactgcggtgacgatactgtaggggaggtcctgcggaaaaatagctcgacgccaggatgatgaaaagcttaacacctctcattcttattactttttcatattgaaaaaaaaatgaaaaatgaaaaggttgtcttattcaaaaccccaattatgaaatcattccacttcacaccccggaacgcaccgttcttatagagagaaaggcactttcacattcgaaatggct

SEQ ID NO: 145503 - DNA, 415 bp, Arabidopsis thaliana
ctcgccaaaaaccttgaaacctttaaaaaatcgaaactatggctaagctcattctcgttttcgcaactcttgccctcttcatcctcctagccaacgcatccatctaccgcacagtggtggagttcgaggaagatgatgacgtgagcaacccacaacaaggtaagtgccagagggagtttatgaagcatcagcaactaagaggttgcaagcaatggatccgcaagagagctcaacaaggaagaatcggatacgaagctgatgactttgagctcactcttgatgtcgatcttgaggacgatgagaacccaatggggcctcaacaacagtcatctcttaaaatgtgttgtaatgaaataaggcaagtggacacgatgtgtgtgtgtcctacactgaaaaaggcggctcaacaagtcag

SEQ ID NO: 145504 - DNA, 447 bp, Arabidopsis thaliana
ccggaacggaagggccgacccgaccgtccgctactctctcctcaaaaactcaaaagagcaaaaaaaagagaagaagaatcaaaatcccacacaatggcaacacactcttccttcaccgcaacaacacctctctttctcatcgatcttctatccctatcctccgtctcagatctcggcgcatctcaccaccacgcaacggcgccggctccgtctgtagactgttcgactctcatactcaacatggctgactgtttatccttcgtttcgagcggaggcacggtggcgaaaccggaaggtacatgttgctctggtcttaagacggtgcttaaagctgactctcagtgtctatgtgaagcgtttaagagcagtgcttctcttggagttactttgaatatcactaaggcttttactcttcccgccgcatgcaagcttcacgctccttctatc

SEQ ID NO: 145505 - DNA, 177 bp, Arabidopsis thaliana
cggacgcgtgggcggacgcgtgggacaaaaagaaaatggttaagctcagcaatctcctcgctgcaaccttaggcgttctcctcacccttaacggatgtctcgcgaggaaggcacttgtagctctctcctcaggtacagaacgagtgtcacctcaccaacctacatgttctccaagct

SEQ ID NO: 145506 - DNA, 422 bp, Arabidopsis thaliana
caaacacaagattacacctacaattagcagatgaatgccccaacaagcgttgtgcttcttgtgattggcgttttgtgtgccattgtcaccgcaaggcaggtcaaagatttgtccacggagaccaaattaggggcctctcttccaaaaactactaccaaaggcattggagctcagctttctgcaactggcacaacttacagcaccagcagccggagatggtatcctaagcggattaacaatgccaaaggtgcaggggccaatgcatacgaaagtgccaacacatttaccagcggacaagtcactgccaagggtcgcaaggcaagagtttcttctacaagtgcttctgccgctgaaggcgatgctgcagctgcagtgactcgcaaagctgctgctgcacgtgcaaagggtaaggtagctttcgc

SEQ ID NO: 145507 - DNA, 401 bp, Arabidopsis thaliana
caacaaacaaaaagaaaatggttaagctcagcaatctcctcgttgcaaccttcggggttctcctcgtccttaacggctgccttgcgaggcagtcacttggggttcctcctcagctacagaacgagtgtaacctcgacaacctagatgttctccaagccaccgaaactatcaagagtgaagccggtcagatcgagtactgggaccacaaccaccctcagctccgatgtgttggtgtttccgttgctcgttatgtaattgaacaaggcggtctttacttgcccaccttcttcacttccccaaaaatttcctacgtcgttcaaggaacgggtatcagcggaagagtggtccctggatgtgccgagaccttcatggactcgcagtcgatgcatggacaacaacaa

SEQ ID NO: 145508 - DNA, 422 bp, Arabidopsis thaliana
gtgaagccaggagttggttctgatcttaacaaggagatcttctatgtgccgcaacggccttatatggcagtaggaacacttcgtgaccagttaatatatcctcttacttctggccaagagagtgaactgctcactgagattggaatggtggagctattgaaaaatgttgatctagaatatttattggatcgctaccaacctgaaaaagaggttaattggggtgatgaattatctcttggagagcaacagagattgggtatggccagactattctaccacaaacccaaatttgcaattctagatgaatgcacaagtgctgtcacaactgatatggaagaacgctttgccgctaaggttcgagctatgggaacttcttgcataacaatctcccatcgtccagcgcttggtgcattccatgatgt

SEQ ID NO: 145509 - DNA, 402 bp, Arabidopsis thaliana
atcatcacaaacgagtaagaatacaaatacaaatagcaaaaaaaatggcaaacaagctcttcctcgtctgcgcaactttcgccctctgcttcctcctcaccaacgcttccatctaccgcactgttgtcgagttcgacgaagatgacgccagcaaccccatgggcccaagacagaaatgtcagaaggagtttcagcaatcacagcacctaagagcttgccagaaattgatgcgcatgcaaatgaggcaaggccgtggtggtggtccctccctcgacgatgagttcgatttggaagacgacatcgagaacccacaaggcccccagcagggacaccagatcctccagcagtgctgcagcgagcttcgccaggaagagccagtttgtgtttgccccaccttgagac

SEQ ID NO: 145510 - DNA, 411 bp, Arabidopsis thaliana
aaatagcaaaacatggctaacaagctcttcctcgtctgcgcaactctcgccctctgcttcctcctcaccaacgcttccatctaccgcaccgttgtcgaattcgaagaagatgacgccagcaaccccgtaggtccaagacagagatgccagaaggagtttcagcaatcacaacacctaagagcttgccagagatggatgagcaagcaaatgaggcaaggacgtggtggtggtccttccctcgacgatgagttcgatttcgagggcccccagcagggataccagctactccagcagtgctgcaacgagcttcgccaggaagagccagtttgcgtttgccccaccttgaaacaagctgccagggcagttagccttcagggacagcacggaccattccaatccaggaaaatttac

SEQ ID NO: 145511 - DNA, 419 bp, Arabidopsis thaliana
gggacaacaaggacgacagggacaacaaggccaaccatgggaaggacagggacagcagggacaacaagggttccgtgacatgcaccagaaggtggaacatgtgagacgcggagacgtctttgccaacactccaggctctgcccactggatctacaactcaggagaacagccacttgtcatcatcgctcttctcgacatcgccaactaccaaaaccaactcgaccgcaaccctagagtgttccatttggccggaaacaaccagcagggaggctttggcggttcacagcaacaacaagaacagaaaaacttgtggagcgggttcgacgcacaggtcatagctcaagcattgaaaattgacgttcagttggctcagcagcttcagaaccaacaagacagcagaggaaacatcgttcgtgtta

SEQ ID NO: 145512 - DNA, 425 bp, Arabidopsis thaliana
gctaaccctagctggactcactctagccggttcggtgatcggcttgctagtctccatacccctcttcctcctcttcagtccggtgatagtcccggcggctctcactattgggcttgctgtgacgggaatcttggcttctggtttgtttgggttgacgggtctgagctcggtctcgtgggtcctcaactacctccgtgggacgagtgatacagtgccagagcaattggactacgctaaacggcgtatggctgatgcggtaagctatgctggtatgaagggaaaagagatgggtcagtatgtgcaagataaggcgcatgaggctcgtgagactgagttcatgactgagacccatgagccgggtaaggccaggagaggctcataagctaatataaattgcgggagtcagttggaaaggcgataaatgt

SEQ ID NO: 145513 - DNA, 386 bp, Arabidopsis thaliana
aactcacaactctgctttttctgaacctaccaattccgtcgaatctcaagaagacgagggtacttctcatgaagaagttccagcagaaggagaagatacagaaggtcttaacatagatgattgcatgcgagaagaagcttcagttgaaacgaatcttgatgattccgttgcttcaccgtgtggtggagatactactgatctctcgcttgtaccttacgctcctactcgaggagaggatggttcttgttgaggataatggaatggagctgctgaagatgcatgataatgttcaggggaaaactgaaactccggattgggaaagtttgattgcagatgcttcatgagctgttaatctttgactcaccttgggcttttggggcttttag

SEQ ID NO: 145514 - DNA, 379 bp, Arabidopsis thaliana
tgaaactcttgagagcaaatttgtgtgttttgtctctgcatctgccctacgttattatcttttggatgcttgtgggtgagatgactgatttttacttgagggggatagagacccattttatctctctcgttctattttagtctttctttctatgtacaattgctgaatgtgtggtttacacacccgttaccttctaaacatgttctatcaaacaaatcttcgagtttttcggttttttccatgtcttcttgcaggtggtgtttcgcgataagaatccgaaagatataatctaccttaaataatatccactctgtgaatctatttacagagaacaaattgaagcaaagaactaaagatataatctagggtcaagtctcga

SEQ ID NO: 145515 - DNA, 403 bp, Arabidopsis thaliana
atcgctcttctcgacatcgccaactaccaaaaccaactcgaccgcaaccctagagtgttccatttggccggaaacaaccagcagggaggctttggcggttcacagcaacaacaagaacagaaaaacttgtggagcgggttcgacgcacaggtcatagctcaagcattgaaaattgacgttcagttggctcagcagcttcagaaccaacaagacagcagaggaaacatcgttcgtgttaagggacctttccaggtcgtgaggccacctctaagacagccctacgagagcgaggagtggagacacccacgtagcccacagggcaacggccttgaggagactatctgcagcatgaggtcccacgagaacattgacgaccctgctcgtgctgacgtgtacaagccca

SEQ ID NO: 145516 - DNA, 364 bp, Arabidopsis thaliana
gaaaatggttaagctcagcaatctcctcgttgcaaccttcggggttctcctcgtgcttaacggctgccttgcgaggcagtcacttggggttcctcctcagctacagaacgagtgtaacctcgacaacctagatgttctccaagccaccgaaactatcaagagtgaagccggtcagatcgagtactgggaccacaaccaccctcagctccgatgtgttggtgtttccgttgctcgttatgtaaatgaacaaggcggtctttactgtccacctttttcactttcgcagagagtgtctacgtctgtcaaggaaccggttttatcgtgagagtggtccctggttgttccgagtcctttatggactttc

SEQ ID NO: 145517 - DNA, 422 bp, Arabidopsis thaliana
gtttttgtctgctcaccaaatcaaaccaatttctcctgatagccaaagtttttgtccccaacaagaaactcatgcaacattcttcacccactagctaactaacgacttccattcttattaatctctctcaattcttcatttctgagattcatcgctctctcttctctttgtcacaatgaatttcaattcttcttacaatctcactttcaatgacgttttcttctcttcttcttcctccggtgaccctatggtttcacggaggctgtttctcttgagagatgttcagattcttgagctccttattgccattttcgtctttgtcgcaatacatgccttgcgtcagaagaaataccaaggtctttccgcgtggccgtttcttgggatgcttccttctctagcttttggcctcagaggaaacatat

SEQ ID NO: 145518 - DNA, 402 bp, Arabidopsis thaliana
ccgagtccaaggcccgttcggtgtcattaggccgcctttgaggggccagagacctcaggaggaggaagaagaagaagaaggacgacatggacgacacggtaatggcttagaggagaccatctgcagcgccaggtgcaccgataacctcgatgacccgtctcgtgctgacgtgtacaagccacagctcggttacatcagcactctcaacagttacgatctccccatccttcgcttcatccgtctatcagccctccgtggatctatccgtcaaaacgcaatggtgcttccacagtggaacgcaaacgcgaacgctattctttacgtgacagacggggaagcccaaattcagatcgtcaacgacaatggtaacagagtgtttgacggacaagtcttttaaggaca

SEQ ID NO: 145519 - DNA, 346 bp, Arabidopsis thaliana
gtaagaatacaaatacaaatagcaaaaaaaatggcaaacaagctcttcctcgtctgcgcaactttcgccctctgcttcctcctcaccaacgcttccatctaccgcactgttgtcgagttcgacgaagatgacgccagcaaccccatgggcccaagacagaaatgtcagaaggagtttcagcaatcacagcacctaagagcttgccagaaattgatgcgcatgcaaatgaggcaaggccgtggtggtggtccctccctcgacgatgagttcgatttggaagacgacatcgagaacccacaaggcccccagcagggacaccagatcctccagcagtgctgcagcgagc

SEQ ID NO: 145520 - DNA, 426 bp, Arabidopsis thaliana
gcaaaaaatggcaaacaagttgttcctcgtctgcgcagctctcgctctctgcttcctcctcaccaacgcttccatctaccgcaccgtcgttgagttcgaagaagatgacgccactaaccccataggcccaaaaatgaggaaatgccgcaaggagtttcagaaagaacaacacctaagagcttgccagcaattgatgctccagcaagcaaggcaaggccgtagcgatgagtttgatttcgaagacgacatggagaacccacagggacaacagcaggaacaacagctattccagcagtgctgcaacgagcttcgccaggaagagccagattgtgtttgccccaccttgaaacaagctgccaaggccgttagactccagggacagcaccaaccaatgcaagtcaggaaaatttaccagacagccaagca

SEQ ID NO: 145521 - DNA, 410 bp, Arabidopsis thaliana
atcacacaccattttcacaacatcgtacttatcgccttcctctctctctcaatacctctgtcaatttctggatccaccatgcaagctcttcaatcttcatctctccgggcttctcctccaaacccacttcgcttaccatcaaatcgtcaatcacatcagctaattaccaatgcgagacctttgcgaagacaacaacgttccttcatctccgcatcagcatccactgtctccgctcctaaacgcgaaacagatccgaagaaacgagttgtcattactggtatgggtctcgtctctgtgtttggtaacgatgttgatgcttactacgagaaattgttgtctggtgagagtggaatcagtttgattgatcgtttcgatgctttcaagttccctactcgattccgtgggcagat

SEQ ID NO: 145522 - DNA, 234 bp, Arabidopsis thaliana
cggacgcgtgggagcgaacagagaatgtcgtctgtcttgcggttgttggggcggagaatctgtaatccagcggcggagaaagtgcgtttgagcagtaacctaagcggtggtggagatttaacaatcttaaatggacataaagcgggtcaagacttattcaaagatactctaaaatgctaagacataacgcaagagaaagaaggcctacacaaataagttaacaaggagttcaag

SEQ ID NO: 145523 - DNA, 377 bp, Arabidopsis thaliana
catttgcaaaaaacttctctctgaatctcagtgagttctcataaaatgagagggatggtgagttttgccgtttgggctctctttgctgctttactctcacagcagctctttgcttctgttgcttccgtaaggtttgaggatgccaaaacatactacttatctcctccctctggctcacatggaactcctccatcacacacgccttcttcttctaactgtggaagtccaccttacgacccttcttcttcaactccttctcacccttcaccttcatcacatacttcaactccttccactccattatacactccaacttcacacactccattacacacgccaaccttcacacaacccccttcttgtaactgtgggaagtt

SEQ ID NO: 145524 - DNA, 393 bp, Arabidopsis thaliana
gggtcgagtctcatctattatctctttctctttgacactcttgatcctcttcaatggctacactgcccaacagtggcccaacgagtgccagctcgatcaactcaatgcgctcgaaccatcccaaatcatcaagagcgagggtggtcgcatcgaggtctgggaccaccatgcaccccagctccgttgctccggctttgcctttgagcgtttcgtcattgagcctcagggtcttttcttgcccactttcttgaacgccggcaaactcacgtttgttgttcacggaaggggtctaatgggaagagttattccgggatgcgccgagacgttcatggagtcaccggtatttggagaaggtcaaggtcagggtcagagtcaagggttccgtgacatgca

SEQ ID NO: 145525 - DNA, 334 bp, Arabidopsis thaliana
aaaaagaaaatggttaagctcagcaatctcctcgttgcaaccttcggggttctcctcgtgcttaacggctgccttgcgaggcagtcacttggggttcctcctcagctacagaacgagtgtaacctcgacaacctagatgttctccaagccaccgaaactatcaagagtgaagccggtcagatcgagtactgggaccacaaccaccctcagctccgatgtgttggtgttttcgttgctcgttatgtaattgaacaaggcggtctttacttgcccaccttctttactttcgcaaaaattttctacgtcgttcaaggaacgggtattagctgaagag

SEQ ID NO: 145526 - DNA, 405 bp, Arabidopsis thaliana
gttttctcatatgaatctcttatctccagctattggagatcccatttcggtaccgactcaagatatgcttattggactctatgtattaacgagcggcactcgtcgaggtatttgtgcaaacagatataatccatgtaatcgaaaaaactatcaaaatgaaagaatttacgaaacaaactataagtatacgaaagaaccctttttttgcaattcctatgatgcaattggagcttatcgacagaaaaaaatcaatttagatagtcctttgtggcttcggtggcaattagatcaacgcgttattgcttcaagagaagttcctatcgaagttcactatgaatcttttggtaactatcatgagatttatgcacactatctaatagtaagaagtgtaaaaaaagaaaattt

SEQ ID NO: 145527 - DNA, 368 bp, Arabidopsis thaliana
  unsure (1)..(368): unsure at all n locations
gcggatcagcatgaaagaatccaacctcaagaagctgctttaatgaacaggataagccctgcgaaccagaccaatacaaggttcttaacaaaacatctacacctatctctcagaataacaaagttcaatccacagattcatttgccactttgtgaggaatggacgataatttataattaggtaacagttattttgttacctgatcgatcaagtcccttctatcaagggaagcccttttcagcttaatttcatctgttaattttatgccatcgatccattccattgtgagcactgctgtgcgtgtaaaattccagtaaattttagggactntgatgttctctgctctgtgattcctggacatattccta

SEQ ID NO: 145528 - DNA, 426 bp, Arabidopsis thaliana
caagtaattaactaacaacaaatggcgaacaagctcttcctcgtctgcgcagctctcgccctgtgtttcatcctcaccaacgcttccgtctatcgcacggttgtcgagttcgacgaagatgacgccagtaaccccataggcccaatacagaaatgtcagaaggagtttcagcaagaacagcacctaagagcttgccagagatggatgcgcaagcaaatgtggcaaggacgtggtggtggtccttccctcgacgatgagttcgatatggaagacgacatcgagaacccgcagagacgacagctactccagaagtgctgcagcgagcttcgccaagaagagccagtttgcgtttgccccaccttgagacaagctgccaaggccgttagattccagggacagcaacaccaaccagagcaagtaggaaaa

SEQ ID NO: 145529 - DNA, 419 bp, Arabidopsis thaliana
  unsure (1)..(419): unsure at all n locations
ctctcctcttcaggttttcaagaagcttactacgtttttgaagtctctgggagttaaagctgtgtttgatactagctgcagtagagatttggtacttattgaatcttgtaatgagtttgtgagccgttataagcaagctaattctgatgatggtgaaaattctcaatcccctctccctgtgctttcctctgcctgtcctggttggatttgttatgctgaaaagcagcttggctcatatgttctgccgtatgtgtcttctgttaagagtcctcagcaagctattggagctgcgatcaaacaccatctgtgtcaagcattaggactcaggctgcatgaggtgtaccatgtgactgtgatgccctgttatgataagaaactcgaggcagcaagagatgattttgtctntgatgatggaacac

SEQ ID NO: 145530 - DNA, 148 bp, Arabidopsis thaliana
ctaaaatatccaccgttgacaagaaaacgtagtctaataatatccaccggcgatatttggccaactcattttttttttttttttatgttgttagctagtttttcatgcgatcaccttctaagctaagagttcgtggcttacttccttt

SEQ ID NO: 145531 - DNA, 424 bp, Arabidopsis thaliana
aaccaccctcagctccgatgtgttggtgtttccgttgctcgttatgtaattgaacaaggcggtctttacttgcccaccttcttcacttccccaaaaatttcctacgtcgttcaaggaacgggtatcagcggaagagtggtccctggatgtgccgagaccttcatggactcgcagccgatgcaaggacaacaacaaggccaaccatggcaaggacgacagggacaacaaggccaaccatgggaaggacagggacaacagggacaacaaggaagacaaggccaaccatgggaaggacagggacaacagggacaacaaggacgacagggacaacaaggccaaccatgggaaggacagggacagcagggacaacaagggttccgtgacatgcaccagaaggtggaacatgtgagacgcggagacgtct

SEQ ID NO: 145532 - DNA, 430 bp, Arabidopsis thaliana
agaaaccatccacaaatagcaaaacatggctaacaagctcttcctcgtctgcgcaactctcgccctctgcttcctcctcaccaacgcttccatctaccgcaccgttgtcgaattcgaagaagatgacgccagcaaccccgtaggtccaagacagagatgccagaaggagtttcagcaatcacaacacctaagagcttgccagagatggatgagcaagcaaatgaggcaaggacgtggtggtggtccttccctcgacgatgagttcgatttcgagggcccccagcagggataccagctactccagcagtgctgcaacgagcttcgccaggaagagccagtttgcgtttgccccaccttgaaacaagctgccagggcagttagcctccagggacagcacggaccattccaatccaggaaaaattaccagtca

SEQ ID NO: 145533 - DNA, 430 bp, Arabidopsis thaliana
aaacgaggtaagaatacaaatacaaatagcataaaaaatggcaaacaagctcttcctcgtctgcgcaactttcgccctctgcttcctcctcaccaacgcttccatctaccgcactgttgtcgagttcgacgaagatgacgccagcaaccccatgggcccaagacagaaatgtcagaaggagtttcagcaatcacagcacctaagagcttgccagaaattgatgcgcatgcaaatgaggcaaggccgtggtggtggtccctccctcgacgatgagttcgatttggaagacgacatcgagaacccacaaggcccccagcagggacaccagatcctccagcagtgctgcagcgagcttcgccaggaagagccagtttgtgtttgccccaccttgagacaagctgccagggcccgtagccttcagggacaacac

SEQ ID NO: 145534 - DNA, 419 bp, Arabidopsis thaliana
ttcaggtgcgattctatgtcaaatctctattttcaaggacatgcttgatcaggttctactcttctccttcttcttcttcactggtatggtttctaggacatgcttgatcaggttctactcttctccttcttcttcttcactggtatggtttctcgtctttagcttaatttgagctgtgatcgaatgacactgatcaatcgggaaatcgaagtaaaacacaagagatgcttacgaaacaggaactggataatctttggttaaccaaattggaagtttaggaaatgaccaactcttctctcttctctttgaacaagcctttttgcataattttggatgtgatcttctcttttaagttttaacataatgaaataatctacgttgaagttagcaacattagaaaatttgatcctttggagaat

SEQ ID NO: 145535 - DNA, 434 bp, Arabidopsis thaliana
cggacgcgtgggttcttcaccacattattttcactgagcgcataacatttttgagacaagagactctctctctctctcttctctctttctctccccctctctccggcgatggttgttgctatggaccaacgcaccaatgtgaacggagatcccggcgccggagaccggaagaaagaagaaaggtttgatccgagtgcacaaccaccgttcaagatcggagatataagggcggcgattcctaagcactgttgggttaagagtcctttgagatcaatgagttacgtcgtcagagacattatcgccgtcgcggctttggccatcgctgccgtgtatgttgatagctggttcctttggcctctttattgggccgcccaaggaacacttttctgggccatctttgttctcggccacgactgtggacatgggagtttctc

SEQ ID NO: 145536 - DNA, 427 bp, Arabidopsis thaliana
aacaaaaagaaaatggttaagctcagcaatctcctcgttgcaaccttcggggttctcctcgtccttaacggctgccttgcgaggcagtcacttggggttcctcctcagctacagaacgagtgtaacctcgacaacctagatgttctccaagccaccgaaactatcaagagtgaagccggtcagatcgagtactgggaccacaaccaccctcagctccgatgtgttggtgtttccgatgctcgttatgtaattgaacaaggcggtctttacttgcccaccttcttcacttgcccaaaaatctcctacgtcgttcaaggaacgggtatcagcggaagagtgggccctggatgtgccgagacctttatggactcgcagccgatgcaaggacaacaacaaggccaaccatggcaaggacgacaggaacaac

SEQ ID NO: 145537 - DNA, 389 bp, Arabidopsis thaliana
aaactttttaggtccaaagatcgagagagaagagaagattttgaattttttttgttttataaagtttcgtcttaagcgatcgatttgttgtgcgaaagattgaaactttttggtaagataattgtgttgtgtggttggatcgtggaggtgggtcttctttcgaatggcgcaacaagggcagggaagcatggaccctgccgctctcgatgatatcattcgtcgtttgttggattacagaaaccctaagcctggtaccaaacaggctatgctcaacgagtctgagatccgtcagctttgcatcttctctagagagattttttttaacagcctaacctttttgagctcgaagcttctatcaagatctgcggtgatatttatggacaatactt

SEQ ID NO: 145538 - DNA, 425 bp, Arabidopsis thaliana
aaacaagatttctgcatgcaccattgcggaaatcatggaaaaccctgttccgatggtcttgaaccatctttgcatggatatagaagcatgagtaaccaagttctgtaattttcttggccaacagctcaacacgattaacagagttgcaaaagataatggattggtttatttggagctgcaatagataaaacaatatttcctttaaaagatacatcaagtagccagaaaataaaacattggggttttaagactgtaacaaaactctgaccttagagaatagcgtgttaaggcagtgcaccttctgtctctcttcaacaaaagcataatattgggtaacacccataagtgtgagctgatccatgagattgataatgtaaggcttcttgagataccgatccttgaaagacttcacagtgacaggaaat

SEQ ID NO: 145539 - DNA, 425 bp, Arabidopsis thaliana
cagagttcaaaattctcgaggggcttcggtttttcctgccacgatgaacttacagtcgaaggaaactcatccgaaacaaagcaataatccctttgaattcggactcatctcttcggattcgttacttaatccgtcgcataaacaagcctcgtatgcaacctcttccaaaggctttggatcgtatcttgacttcggcaaccaagccaagcacgcggggaatcacaacaatgtcgattcttggcccgaagagctgaaatcggattggactcagctctcaatgtcaatccctatggctccatcttcccctgttcaagataaacttgcactctcacctttaaggttatcgcgtgagtttgaccccgcgatccacatgggattaggcgtcaacaccgagtttcttgaccccggaaaaagacgaataactg

SEQ ID NO: 145540 - DNA, 353 bp, Arabidopsis thaliana
  unsure (1)..(353): unsure at all n locations
cccacgcgtccgggcccatctagtacccaagtattgtccctgttgattggagtccctgtcgtcggttcgctacttgccttggctggattacttctagctggttcggtgatcggctaaatggttgctntaccactatttctcctcttcagcccggttatagtcccagcggctctaactatcgggcttgcaatgacaggctttttagcctcggggatgttcggtctaaccgggcttagctcaatctcatgggtcatgaactatcttcgtgggacaaggaggactgtgcctgagcaattggagtatgctaagaggagaatggctgatgcggttgcttacgcaggacaaaagggcaa

SEQ ID NO: 145541 - DNA, 399 bp, Arabidopsis thaliana
atcacaaacgagtaagaatacaaatacaaatagcaaaaaaaatggcaaacaagctcttcctcgtctgcgcaactttcgccctctgcttcctcctcaccaacgcttccatctaccgcactgttgtcgagttcgacgaagatgacgccagcaaccccatgggcccaagacagaaatgtcagaaggagtttcagcaatcacagcacctaagagcttgccagaaattgatgcgcatgcaaatgaggcaaggccgtggtggtggtccctccctcgacgatgagttcgatttggaagacgacatcgagaacccacaaggcccccagcagggacaccagatcctccagcagtgctgcagcgagcttcgccaggaagagccagtttgtgtttgccccaccttgagac

SEQ ID NO: 145542 - DNA, 395 bp, Arabidopsis thaliana
cggacgcgtgggcggacgcgtgggaaaagaaaatggttaagctcagcaatctcctcgttgcaaccttcggggttctcctcgtccttaacggctgccttgcgaggcagtcacttggggttcctcctcagctacagaacgagtgtaacctcgacaacctagatgttctccaagccaccgaaactatcaagagtgaagccggtcagatcgagtactgggaccacaaccaccctcagctccgatgtgttggtgtttccgttgctcgttatgtaattgaacaaggcggtctttacttgcccaccttcttcacttccccaaaaatttcctacgtcgttcaaggaacgggtatcagcggaagagtggtccctggatgtgccgagaccttcatggactcgcag

SEQ ID NO: 145543 - DNA, 424 bp, Arabidopsis thaliana
aagaggaagaaaaatgggtcgagtctcatctattatctctttctctttgacactcttgatcctcttcaatggctacactgcccaacagtggcccaacgagtgccagctcgatcaactcaatgcgctcgaaccatcccaaatcatcaagagcgagggtggtcgcatcgaggtctgggaccaccatgcaccccagctccgttgctccggctttgcctttgagcgtttcgtcattgagcctcagggtcttttcttgcccactttcttgaacgccggcaaactcacgtttgttgttcacggaaggggtctaatgggaagagttattccgggatgcgccgagacgttcatggagtcaccggtatttggagaaggtcaaggtcagggtcagagtcaagggttccgtgacatgcaccagaaagtagagcac

SEQ ID NO: 145544 - DNA, 425 bp, Arabidopsis thaliana
gaagataaaaatggctcgagtctcttctcttctttctttctccttaacacttttgatccttttccatggctacgcggctcaacagggtcagcagggtcagcagtttccgaacgagtgccagctcgaccagctcaatgcgctcgagccttcacacgtactgaagagcgaggctggtcgcatcgaggtgtgggaccaccacgctcctcagctccgttgctcaggtgtctcctttgcacgttacatcatcgagtctaagggtctctacttgccctctttctttaacaccgcgaagctctccttcgtggctaaaggacgaggtcttatgggaaaagtgatccctggatgcgccgaaacattccaagactcatcagagttccaaccacgcttcgaggtcaaggtcaaagccagaggttccgtgacatgca

SEQ ID NO: 145545 - DNA, 429 bp, Arabidopsis thaliana
cttcatcaagtttctcgaggagagtgaagaatttggttttaattattctttgattaccctttttgtggtgtggttttcgttatttcgaggagtgataataataccgttatgagtcatcactttacatgtgtttgatcaattactcttaattcactttctgggtttcttcctttgaatctctcctcgaagaaaagaaaagaaaaatgaaggaggaacaaacaagatctctgtttggaatctctttgtctgataaaccaacttggcaacagtttctcatttgcacttctggtttcttttttggttatctcgttaacggtgtttgcgaggttcgtttctctcttttttgcaatttgattcgagaattttgatacataatcaatcaacgttaatgtttttggttgttctttgtcataattccacatacccagc

SEQ ID NO: 145546 - DNA, 359 bp, Arabidopsis thaliana
caaaaagaaaatggttaagctcagcaatctcctcgttgcaaccttcggggttctcctcgtgcttaacggctgccttgcgaggcagtcacttggggttcctcctcagctacagaacgagtgtaacctcgacaacctagatgttctccaagccaccgaaactatcaagagtgaagccggtcagatcgagtactgggaccacaaccaccctcagctccgatgtgttggtgtttccgttgctcgttatgtaattgaacaaggcggtctttacttgcccaccttcttcacttccccaaaaattttctacgtcgtacaaggaacgggtatcagcggaagagtggtccctggatgtgctcagacct

SEQ ID NO: 145547 - DNA, 431 bp, Arabidopsis thaliana
cggacgcgtgggcgacggacaggaaccacttgtcatcgtcagcgtcttcgatctagccagtcaccagaaccagcttgaccgcaacccaaggccattttacttagccggaaacaacccacaaggtcaagtatggctacaaggccgagagcaacagccacagaagaacattttcaatggatttggacccgaggttattgctcaagctttgaagatcgatcttcagacagcgcagcaacttcagaaccaagatgacaaccgtggaaacattgtccgagtccaaggcccgttcggtgtcattaggccgcctttgaggggccagagacctcaggaggaggaagaagaagaagaaggacgacatggacgacacggtaatggcttagaggagaccatctgcagcgccaggtgcaccgataaccttgatgacccgtctc

SEQ ID NO: 145548 - DNA, 367 bp, Arabidopsis thaliana
aagaaaatggttaagctcagcaatctcctcgttgcaaccttcggggttctcctcgtccttaacggctgccttgcgaggcagtcacttggggttcctcctcagctacagaacgagtgtaacctcgacaacctagatgttctccaagccaccgaaactatcaagagtgaagccggtcagatcgagtactgggaccacaaccaccctcagctccgatgtgttggtgtttccgttgctcgttatgtaattgaacaaggcggtctttacttgcccaccttcttcacttccccaaaaattttctacgtcgttcaaggaacgggtatcagcggaagagtggtccctggatgtgccgagaccttcattgacttgt

SEQ ID NO: 145549 - DNA, 417 bp, Arabidopsis thaliana
cactacacgagcgtgcaccagccttcatcagtgactggctatggtacagctcaggggtactacaacaggatgtatcagaacaagttatatggtcagtatggtagcacagggagatctgctttgggttatggttcatctgggtatgattcaagaacaaatggaagaggatgggcggccacagacaacaaatacagaagctggggcaggggtaacagttactattacggaaatgagaacaatgtagatggtttgaatgaacttaacaggggacctagagctaagggcacaaagaaccagaagggaaatctagatgatagcttagaggttaaggagcagactggagaatcaaatgtaactgaggttggggaggcggataacacatgtgttgttcctgacagagaacagtacaataaagaa

SEQ ID NO: 145550 - DNA, 412 bp, Arabidopsis thaliana
cttttgatccttttccatggctacgcggctcaacagggtcagcagggtcagcagtttccgaacgagtgccagctcgaccagctcaatgcgctcgagccgtcacacgtactgaagagcgaggctggtcgcatcgaggtgtgggaccaccacgctcctcagctccgttgctcaggtgtctcctttgcacgttacatcatcgagtctaagggtctctacttgccctctttctttaacaccgcgaagctctctttcgtggctaagggacgaggtcttatgggaaaagtgatccctggatgcgccgaaacattccaagactcatcagagttccaaccacgcttcgaaggtcaaggtcaaagccagaggttccgtgacatggcaccagaagtggagcacattaggagcggtgatacca

SEQ ID NO: 145551 - DNA, 409 bp, Arabidopsis thaliana
atttttgatagccggaaacaacccacatgggcaggaatggctacaaggccgaaagcaacagaagcaaaacaacatcttcaatggcttcgcacctgagatcttggctcaagccttcaagatcaatgtcgagacggctcatcagctccagaaccagcatgataaccgtggcaacattctcaaggtcaacggacctttcggcgtcattaggccacccttgagacgcggcgaaggcggccaacaaccacatgaaatagctaaaggtttagaggagactttgtgcaccatgcgatgcactgtaaaccttgatgacccgtctgatgctgacgtgtacaagccatcacttggatacatttgcacacttaacagctacatttcttctatcctcagacttcttcgccttagcgctttt

SEQ ID NO: 145552 - DNA, 426 bp, Arabidopsis thaliana
gggaaggacagggacaacagggacaacaaggacgacagggacaacaaggccaaccatgggaaggacagggacagcagggacaacaagggttccgtgacatgcaccagaaggtggaacatgtgagacgcggagacgtctttgccaacactccaggctctgcccactggatctacaactcaggagaacagccacttgtcatcatcggtcttctcgacattgtcaactaccaaaaccaacttgaccgcaaccctagagtgttccatttggccggaaacaaccagcagggaggctttggcggttcacagcaacaacaagaacagaaaaacttgtggagcgggttcgacgcacaggtcatagctcaagcattgaaaattgacgttcagttggctcaacagcttcagaaccaacaagacagcagaggaaaca

SEQ ID NO: 145553 - DNA, 426 bp, Arabidopsis thaliana
  unsure (1)..(426): unsure at all n locations
ccggaanggaagggccgacccagcgcgacccgaaaaagaaaacgtacaagctcagcaatctcttcgttgcaaccttcggggttctcctcgtccttaacggctgccttgcgaggcagtcacttggggttcctcctcagctacagaacgagtgtaacctcgacaacctagatgttctccaagccaccgaaactatcaagagtgaagccggtcagatcgagtactgggaccacaaccaccctcagctccgatgtgttggtgtttccgttgctcgttatgtaattgaacaaggcggtctttacttgcccaccttcttcacttgcccaaaaatttcctacgtcgttcaaggaacgggtatcagcggaagagtggtccctggatgtgccgagaccttcatggactcgcaggcgatgcaaggacaacaacaag

SEQ ID NO: 145554 - DNA, 432 bp, Arabidopsis thaliana
cggggcggaccaacccgtccgttttaattttaaaggactgcgccttttacttcagggaaaaaggttcgggcttcggaaactatggcagcattccctaacctaaactctgatgctggattgaagaagctcgacgaggcattttttaactcgcagttacattactggataccaggcttcaaaggatggatatcaccgtctttgcagctcttgcaaagcccccaacttcacagtatgtgaacgcttctcgttggtacaatcacattgatgccctcttgaggatctctggtgtctctgctgaaggaagcggtgtcattgttgagggatcagctcctatcactgaggaggctgttgctactccccctgcagctgattctaaggatgctgccgctgatgaaaaagatgatgatgatgttgaccttttccgagaggaga

SEQ ID NO: 145555 - DNA, 381 bp, Arabidopsis thaliana
aaacgagtaagaatacaaatacaaatagcaaaaaaaatggcaaacaagctcttcctcgtctgcgcaactttcgccctctgcttcctcctcaccaacgcttccatctaccgcactgttgtcgagttcgacgaagatgacgccagcaaccccatgggcccaagacagaaatgtcagaaggagtttcagcaatcacagcacctaagagcttgccagaaattgatgcgcatgcaaatgaggcaaggccgtggtggtggtcccttcctcgacgatgagttcgatttggaagacgacatcgagaacccacaaggcccccagcagggacaccagatcctccagcagtgctgcagcgagctttgtcaggaagagccagtttgtgtttgc

SEQ ID NO: 145556 - DNA, 153 bp, Arabidopsis thaliana
  unsure (1)..(153): unsure at all n locations
agagtaatnnagaaaancaaaacgtggcttttcgtcaaaaccaangcnnanagagagagcgtgaagaaagcanaggcgcccccctccgaganaccancganaccaactagggttaggcaaccaggtgttgataccctcgaagaaggagaagaa

SEQ ID NO: 145557 - DNA, 337 bp, Arabidopsis thaliana
  unsure (1)..(337): unsure at all n locations
agaaaacatacacaaanagcaaaacattgcgtgcaagctcnnccnagncagcccaacgcaaggcctcagcgaaagnctgaccaacgcccccacctaccgcaccgnngtcgaattcgaagaagaagacgccagcaaccccgtaggtccaagacagagaagccagaaggagtttcagcaatcacaacacctaagagcttgccagagatggatgagcaagcaaatgaggcaaggacgtggaggtnggccttccctcgacgaagagttcgatttcgagggcccccagcagggataccagctactccagcagagctgcaacgagcttcgccaggaagagcca

SEQ ID NO: 145558 - DNA, 384 bp, Arabidopsis thaliana
  unsure (1)..(384): unsure at all n locations
aaaccggcgaccacgcgtcgacatgactatatcgagaaaaaggttcctggttttggnaaagnggngagagggcaggagccttcggatacatcgcctcaccgctcgccaagggcctacttagccgtggctacactgttaaggccttcgtccgtgatcccagtgatccgaaaaagacacaacacttagtttcactagaaggtgcaaaggaaagacttcacttgttcaaagcagaccttttggaacaaggttctttcgactctgctattgatggttgccatggagttttccacactgcttctccattttntaatgatgccaaagacccacaggctgaacttattgatcctgcggtcaaggagacgcttaacgttttgaattcgtgcg

SEQ ID NO: 145559 - DNA, 263 bp, Arabidopsis thaliana
ccaacgagtgccagctcgatcaactcaatgcgctcgaaccatcccaaatcatcaagagcgagggtggtcgcatcgaggtctgggaccaccatgcaccccagctccgttgctccggctttgcctttgagcgtttcgtcattgagcctcaaggtcttttcttgcccactttcttgaacgccgagcaactcacgtttgttggtcacggaaggagtctaaagggaagagttattccgggatgcgccgagacgttcatggagtcaccg

SEQ ID NO: 145560 - DNA, 386 bp, Arabidopsis thaliana
  unsure (1)..(386): unsure at all n locations
ggacgagagggacaacaaggccaaccaagggctgggtggttttcagggacaacannnnnggcgaggttgcattagaaggtggcacatccnacacgcggngacgnctntgccaacactccaggctctgcccactggatctacaactcaagagaacagccacttgtcatcatcgcttttctcgacatcgccaactaccaaaaccaactcgaccgcaaccctagagtgttccatttggccggaaacaaccagcatggaggctttggcggttcacagcaacaacaagaacagaaaaacttgtggagcgggttcgacgcacaggtcatagctcaagcattgaaaattgacgntcagttggcttagcagcttcagaaccaacaagacagcag

SEQ ID NO: 145561 - DNA, 368 bp, Arabidopsis thaliana
  unsure (1)..(368): unsure at all n locations
cgcgtccggncaggggcagagtcaagggttccgagaccttcnctccatagtagagcaccnacngngcgaggaacggcagagcaacaccatagggcgccccccaacggnncnacaacaanggaaatgagcctctcattcttagggcagccgcggatctcgccagcaaccagaaccagctagaccgcaaccttagaccattttagatagccggaaacaacccacaagggcaggaaaggctacaaggccgaaagcaacagaagcaaaacaacatcttcaaaggctgcgcaccagagatcttggcgcaagccttcaagatcaaagtcgagacggctcagcagctccagaaccagcaagataaccgtggcaac

SEQ ID NO: 145562 - DNA, 178 bp, Arabidopsis thaliana
  unsure (1)..(178): unsure at all n locations
acgccacnaaccccataggcccaaaaaagaggaaaagccgcaaggagnnncagaaagaacaacaccnaagagcnngccagcaatagaagcgccagcaagcaaggcaaggccgnaacgacgagnnagaaaacgaagacgacacggagaacccacagggacaacagcaggaacaacagcc

SEQ ID NO: 145563 - DNA, 357 bp, Arabidopsis thaliana
  unsure (1)..(357): unsure at all n locations
tgacttatcgcttcncnngctgactgggaatctggttgagttgaagcttctcctccattagagttttctatggaagagacaatctctgtgctttgatgggacaggtctagggacggtttggggataagagagagacgacaaagagggcatgttgtgtgtgatgtgagccatagatcaatacattccatgtgaaaagtgtgcccacatgatggcatttgttggagtttctcttctgcttagtagtccccaagacacactgaacatctgtttttaagtactcatagtcaaaatcaggtgattcataatcatactttcttatgttttagctattcaaacaagaaaataacccaaaagcag

SEQ ID NO: 145564 - DNA, 405 bp, Arabidopsis thaliana
  unsure (1)..(405): unsure at all n locations
gcagcgagctagcagcacaacgcagattcgttgccttttcncagnnacagaannagaggcagtgttctttgccgnagagaaactcccaaccggaagggggagagatgtgaaggttcgtgctttcgaggacgcagaccatcgtacctatgttgatctcaaggataagtggaagacgctggtccacacggcaaggatatctccacaacagcggagaggagagccggtgccacaggaacttctggaccgtgttttgaaggcacacgcttactggtcacaacacctaatgcatcaactgcagactgagccaccatccacttaggtagaggctctctaatctgaacaggttcttggtctaaagaacctttgtggattattatgatgatccatattggaagattctgacat

SEQ ID NO: 145565 - DNA, 327 bp, Arabidopsis thaliana
  unsure (1)..(327): unsure at all n locations
gacgacagggacaacaaggccaaccctggcctggtcagggacagcagggacaacaagaggggcgngacaagcaccagaaggaggcccacccgagacgcggagacgncnnngccaacacgccaggcaccgcccaccgaancnacaacacaggagaacagccacncgccaccagcgcgcaacgcgacagcgccaacnaccaaaaccaacncgaccgcaacccnagagaggggcannaggccggaaacaaccagcagggaggcnnnggcggnncacagcaacaacaagaacagaaaaacccggggagcgggngcgacgcacaggncacag

SEQ ID NO: 145566 - DNA, 367 bp, Arabidopsis thaliana
  unsure (1)..(367): unsure at all n locations
gaganncaacagcagcttaccaatgaggntaagctcttcaaccgttggagctttgatgacgtttcggttacggatattagtcttgtggactacattggtgttcagccatcgaagcacgcaacttttgttccccatactgctggacgatactctgtgaagaggttcagaaaggcgcagtgcccaattgttgagaggctcactaactctctcatgatgcacggaagaaacaatggtaagaaagtgatggctgtcaggatcgtcaagcatgccatggagattattcacctcttgtctgacttggacccgattaaagttatcattgatgccattgttaacagtggtccacgtgaagatgctaccaggattg

SEQ ID NO: 145567 - DNA, 113 bp, Arabidopsis thaliana
  unsure (1)..(113): unsure at all n locations
ccccccnccncagcnacagaacgagggnaaccncgacaaccaagangnncnccaagccaccgaaacnancaagagagaagccggccagaacgagnacagggaccacaaccacc

SEQ ID NO: 145568 - DNA, 430 bp, Arabidopsis thaliana
  unsure (1)..(430): unsure at all n locations
gcccagcctatgtcgcgagaccagcgtcctttgcttttccnagcccancnagaaggaggggaggctctttgccactcgaggcagcctccaaggnaangcganggngcttcctaaatacaacatgaacgctaacgagatcttgtactgcactggaggacaaggaaggatccaagtggtcaacgacaacggacagaacgtgttggaccaacaggagcagaaaggacagctcgaggtcatcccacaagggttcgcatacgtagtccagtcccacggaaacaagttcgagtggatctctttcaaaactaatgaaaacgcaatgatcagcactttggcgggtagaacctcgcttctgagggcattgccataggaggtcatatcaaataggttccagatccctcccgaggagctaggaagatcaagttcaacacac

SEQ ID NO: 145569 - DNA, 317 bp, Arabidopsis thaliana
  unsure (1)..(317): unsure at all n locations
cgggccgacccacgcgnccgcacaaacacaancnaancccaaaaactcnttccgaaagccacaaagnnagnagaggggcggggganaggcgaanaggcgccaccctcaccgcaaggcaggncaaagatttgtccacggagaccaaattaggggcctctcttccaaaaactactaccaaaggcataggagctcagctttctgcaacaggcacaacttacagcaccagcagagtcgttagctaagctaaaggttttaacaatcccaaaggtccaggggccaaagcattcgaaagagccaacacatttaccagcggacaa

SEQ ID NO: 145570 - DNA, 286 bp, Arabidopsis thaliana
  unsure (1)..(286): unsure at all n locations
gtccacgcgnccgaagaaaaaagggncgagccncaacaacatctccttctctttgacacncnagaccncnggagagctacacttcccaacagaggcccacccagcgccagcncgancaactcaaagcgctcgaaccatcccaaatcatcaagagcgagggaggtcgcatcgaggtctgggaccaccatgcaccccagctccgtagctccggctttgcctttgagcgtttcgtcattgagcctcaaggacttttctagcccactttctagaacgccggcaaactcac

SEQ ID NO: 145571 - DNA, 155 bp, Arabidopsis thaliana
  unsure (1)..(155): unsure at all n locations
acgagacangancncacgcncacaagncnggagacgaacaaaagaagggaaannngcggaagcacaaagcagaaaggaaacnnccagaancngaacagncncagaagaaggcaaagccngaaaacgangacggacgnncngncaacggcgccgga

SEQ ID NO: 145572 - DNA, 439 bp, Arabidopsis thaliana
  unsure (1)..(439): unsure at all n locations
ccggccgacccacgcgccgcaaaaagaaaatggnaagccagcttccgtccgtttcaaccnncggggnncnccggggaggtaacggttgacttgcgaggcagccactcggggnncctnctaagntacagaacgagagtaacctcgacaacctagatgttctccaagccaccgaaactatcaagagtgaagccggtcagatcgagtactgggaccacaaccaccctcagctccgatgtgttggagtttccgttgctcgttatgtaattgaacaaggcggtctttacttgcccaccttcttcacttccccaaaaatttcctacgtcgttcaaggaacgggtatcagcggaagagagagccctggatgtgccgagaccttcatggactcgcaacccgtgcaaggacaacaacaaggccaaccatggcaaggacgacagggaca

SEQ ID NO: 145573 - DNA, 130 bp, Arabidopsis thaliana
  unsure (1)..(130): unsure at all n locations
cgcggcggaacagcccccagcagggncagcagnnnnccgaacgagagccagctcgaccagctcaaagcgctcgagccgtcacacgtacagaagagcgaggctggtcgcatcgaggagagggaccaccacg

SEQ ID NO: 145574 - DNA, 228 bp, Arabidopsis thaliana
  unsure (1)..(228): unsure at all n locations
ctccgtcttacctagatccttcgtcaatttccgcgctttgaatgcaaagctttcctcttctcagctttctcttcgttataaccaacgatcaataccttccctctctgtgaggtggtcagtgtctggtggaaatggaactgctggaaagagaacgactcttcatgatctatatgagaaggaaggtcagagtccttggtatgataatctntgccgccagcacagatcttc

SEQ ID NO: 145575 - DNA, 232 bp, Arabidopsis thaliana
cgcgagaatagagaactctcgggagaatcgaagactgcatcaaagaagcacttgttagtacatctgaaaattctgaataggctagttagaaatagccccaggactataagaaaaaggagtatcccgaacctacaccgaggtatagacggtgattctcaaatatcacagaacagaatgtgatacgatgagatagaatgcaatagaaacaaaaacacagggaacgggtgaccga

SEQ ID NO: 145576 - DNA, 102 bp, Arabidopsis thaliana
  unsure (1)..(102): unsure at all n locations
agcagnttccgaacgagagccagcccgaccagctcaaagcgctcgagccttcacacgtactgaagagcgaggctggtcgcaccgaggtgtgggaccaccacg

SEQ ID NO: 145577 - DNA, 436 bp, Arabidopsis thaliana
  unsure (1)..(436): unsure at all n locations
gacccacgcgnccgacaaacgagtaagaaacaaaaccttggtcattttaggcaaacagccnaggcagcggctcttttaacgccctctgctccctccncaccaacgcttccatctaccgcactgttgtcgagttcgacgaagatgacgccagcaaccccatgggcccaagacagaaatgtcagaaggagtttcagcaatcacagcacctaagagcttgccagaaattgatgcgcatgcaaatgaggcaaggccgaggtggtgagccctccctcgacgatgagttcgatttggaagacgacatcgagaacccacaaggcccccagcagggacaccagatcctccagcagtgctgcagcgagcttcgccaggaagagccagtttgagtttgccccaccttgagacaagctgccaaggccggtagcctccaggacaacac

SEQ ID NO: 145578 - DNA, 98 bp, Arabidopsis thaliana
acacaccagttatacacttagtctacacttgttgttatgctgctagtgccagtgacaccgacagagacatcaaaagacgaggccgtttcttgtacaat

SEQ ID NO: 145579 - DNA, 182 bp, Arabidopsis thaliana
  unsure (1)..(182): unsure at all n locations
gcgtccgctctgcgaggctccatccgnaaaaacgctccggtgccactcgcaaaggaacgnaaacgcaagcgcggcgctctacgagacaaacggaaaggctcacacacaaanggtgaacgacaacggagaaagagagttcgaccaagagatctccagcggacagttactagtcgagccacaag

SEQ ID NO: 145580 - DNA, 208 bp, Arabidopsis thaliana
gaagaagatgacgccactaaccccataggcccaaaaatgaggaaatgccgcaaggagtttcagaaagaacaacacctaagagcttgccagcaattgatgctccagcaagcaaggcaaggccgtagcgatgagtttgatttcgaagacgacatggagaacccacagggacaacagcaggaacaacagctatttcagcagtgctgcaacg

SEQ ID NO: 145581 - DNA, 231 bp, Arabidopsis thaliana
  unsure (1)..(231): unsure at all n locations
acaccatangatgcgtatactgcttctaccattacatccattatccaagaccaatatgcactagcatgtgctatcacaggaagctgaaactatgtaaatacaactctatcaggaaaactatgaaccaagaaatactctttatccgactctacattctctaggatcattaaggggccgcgcagaacatgcatacacactagatcaaagcaacccataccgtggaaaactata

SEQ ID NO: 145582 - DNA, 290 bp, Arabidopsis thaliana
  unsure (1)..(290): unsure at all n locations
gacaggcaaaaaaaggcaaacaagnagacctcgctcgcgcagcncncgcncncngcnnaggggcggaccaacagcgaaacaacgaccgcaccgncccccagnncgaagaagaagaccccacnaaccccaaaggcccaaaaaagaggaaaagccgcaaggagnnncagaaagaacaacaccnaagagcnngccagcaanagaggcnccagcaagcaaggcaaggccgnagcgangagnnagannncgaagacgacacggagaacccacagggacaacagcaggaacaacag

SEQ ID NO: 145583 - DNA, 111 bp, Arabidopsis thaliana
cagctacagaacgagtgtaacctcgacaacctagatgttctccaagccaccgaaactatcaagagtagaagccggcagatcgagtactgggaccacaaccaccctcagctc

SEQ ID NO: 145584 - DNA, 289 bp, Arabidopsis thaliana
  unsure (1)..(289): unsure at all n locations
acagagcaaaaaaaggcaaacaaggcgtccgctcgtctgcgcagcncncgcncacagagggagccgcaccaacgagnncagcgaccgcaccgncgnngagnncgaagaagaagacgccacnaaccccaaaggcccaaaaaagaggaaaagccgcaaggagnnncagaaagaacaacaccnaagagcnggccagcaanagaagcnccagcaagcaaggcaaggccgnagcgangagggggannncgaagacgacagggagaacccacagggacaacagcaggaacaacag

SEQ ID NO: 145585 - DNA, 317 bp, Arabidopsis thaliana
  unsure (1)..(317): unsure at all n locations
ttttcactcgganacattaggagagtttacttttacaatcttcctatcctcacactnctccgncttagcgctcttcgtggctccatccgtaaaaacgctatggtgctaccgcaatggatcgtaaacgcatacgcggcactctacgtgacaaacggaaaggctcatatacaaatggtgaacgacaacggagaaagagtgttcgaccaagagatctccagcggacagttactagtcgtgccacaaggcttttcggtcatgaaacatgccataggcgaacagttcgagtggatcgaattcaagacatacgaatacgcaca

SEQ ID NO: 145586 - DNA, 269 bp, Arabidopsis thaliana
  unsure (1)..(269): unsure at all n locations
gccaagaggagaccancngcagcgcctggcgtcccgataaccgcgacganccgncaggagcggacgagaacaagccacagcccccccacaccagcacgcgcaacagnnacaancnccccacccgncgcaccaaccgacccncagcccnccgcggaacaacccgncaaaacacaaagaagccgccacagaggaacgcaaacgcgaacgccacncnnnacgngacagacggggaagcccaaanccagaacgnaaacgacaacaggaacaga

SEQ ID NO: 145587 - DNA, 317 bp, Arabidopsis thaliana
  unsure (1)..(317): unsure at all n locations
ggcatgcgtccaaacccccaacgaatacagncgcacgctaatacaatcgaggattatgcaaggtaggtgatttcttgttttcatatatccataatgcatacataggagcaagaggttcttagggtagcttaatcttaagtgtgtatgatatgttatgtaggcaaagttcttgtggatgggagaagagttattaaagctggaatgcctgtatctactactgcagctataaagatcacagctgaagttccaaaatttgtatgtaggtgattattcctcgagttgccctatctttctacagtttctttatggtttaagac

SEQ ID NO: 145588 - DNA, 91 bp, Arabidopsis thaliana
  unsure (1)..(91): unsure at all n locations
ccagctngancaactcaaagcgctcgaaccatcccaaatcatcaagagcgagggaggtcgcatcgaggtcagggaccaccatgcaccccag

SEQ ID NO: 145589 - DNA, 434 bp, Arabidopsis thaliana
  unsure (1)..(434): unsure at all n locations
aaacaataggcattagcanaaacacctcccctccttttaancaaaagnannnnagaggcggcatcatgttgacgtcaggtacatacctcacagaagntcctctgaaagggtcagcgaagaaccactacaagaggtggaagagcgaaaaccaactcttccctgacgccattggccatcatatccaaggtgtcaccgttcacgagggcgactgggactcccacggngccatcaagtcctggaactacacatgcgatgggaagcaagaggtgttcaaggagaagagggagttagacgaccagaagatggcggtgacgtttagagggctggatggtcatgtgatggagcagcttaaggtgtatgacgtcatcttccagttccgccctaagtctcaggaaggttgcgtctgcaaagtcactatgttttgggagaagcgc

SEQ ID NO: 145590 - DNA, 186 bp, Arabidopsis thaliana
  unsure (1)..(186): unsure at all n locations
gaagaagangacgccacnaaccccaaaggcccaaaaaagaggaaaagccgcaaggagnnncagaaagaacaacaccnaagagcnngccagcaanagangcnccagcaagcaaggcaaggccgnagcgangagggggannncgaagacgacagggagaacccacagggacaacagcaggaacaacag

SEQ ID NO: 145591 - DNA, 93 bp, Arabidopsis thaliana
  unsure (1)..(93): unsure at all n locations
cgaacgagngccagcncgaccagcncaaagcgcccgagccnncacacgnacagaagagcgaggcnaggcgcancgaggagngggaccaccacg

SEQ ID NO: 145592 - DNA, 393 bp, Arabidopsis thaliana
  unsure (1)..(393): unsure at all n locations
aggcacccacccggggttcctnctaagttacagaacgagtgtaacctcgacaacctagatgttctccaagccaccgaaactatcaagagtgaagccggtcagatcgagtactgggaccacaaccaccctcagctccgatgtgtaggagtttccgttgctcgttatgtaatagaacaaggcggtctttacttgcccaccatcttcactttcccaaaaaatacctacggcgttcaaggaacgaggatcagcggaagagtggtccctggatgtgccgagacctttatggactcgcaagcgatgcaaggacaacaacaaggcccaccatgggcagggcgacagggacatctaggccaaccatgggaaggacagggacaacaggggcaacaaggaaga

SEQ ID NO: 145593 - DNA, 294 bp, Arabidopsis thaliana
atctcgacaccccacaaaggactctggagatcggcatggagtatagaactgtttctggtgttgctggaccataggtcattcttgacaaagtgaagggtccaaagtaccaggagattgttaatattcgcttaggagatggatcaacgagacgtggtcaggttttggaagtagatggcgagaaagcagttgtgcaggtttttgaaggaacatctggaattgacaacaagtttacaaccgtgcaattcacaggagaggttttgaaaacacctgtatcattggacatgcttgggcgca

SEQ ID NO: 145594 - DNA, 358 bp, Arabidopsis thaliana
  unsure (1)..(358): unsure at all n locations
gggccgacccacgcgnccgcggacgcgagggaaacanacacacactgccctctatttcaaacaagnngnnnccnagagggagcggcacttgctatntgatccctcctcaccaacgctnccatctaccgcaccgncgttgagttcgaagaagatgacgccactaaccccataggcccaaaaatgaggaaatgccgcaaggagtttcagaaagaacaacacctaagagcttgccagcaatagatgcttcagcaagcaaggcaaggccgtagcgatgaagttgatttcgaagacgacatggagaacccacagggacaacagcaggaacaacagctattccagcagagctgcaacgagcttc

SEQ ID NO: 145595 - DNA, 102 bp, Arabidopsis thaliana
  unsure (1)..(102): unsure at all n locations
cagaacgagngnaaccncgacaacccagaagnncnccaagccaccgaaaccancaagagagaagccggncagaacgagnacagggaccacaaccacccncag

SEQ ID NO: 145596 - DNA, 149 bp, Arabidopsis thaliana
  unsure (1)..(149): unsure at all n locations
gcacagagcaaaaaaaggcaaacaagnagncctccgtctgcgcagcncncgcncncggcnnaggccggaccaacgcnngcaacgaccgcacccgcccagagnncgaagaagaagacgccacnaaccccanaggcccaaaaaggaggaaa

SEQ ID NO: 145597 - DNA, 275 bp, Arabidopsis thaliana
  unsure (1)..(275): unsure at all n locations
cggagacaacaagggnnccgagacaagcaccccctggtcgtacatgngagacgcnnanaccgaggagcgaacacaacaagctcagcccaccgcacccacaactcaggagaacagccacttgtcatcatcactcgtctagacatcgccaactaccaaaaccaactcgaccgcaaccctagagagttccatgtggccggaaacaaccagcaggaaggctttggcggctcacagcaacaacaagaacagaaaaactcgtggagcgggttcgacgcaca

SEQ ID NO: 145598 - DNA, 222 bp, Arabidopsis thaliana
  unsure (1)..(222): unsure at all n locations
ccccccccncctcagctacagaacgagtgtaacctcgacaacctagatgttctccaagccaccgaaactatcaagagtgaagccggtcagatcgagtactgggaccacaaccaccctcagctccgatgtgttggtgtttccgttgctcgttatgtaattgaacaaggcggtctttacttgcccaccttcttcacttccccaaaaatttcctacgtcgttcaa

SEQ ID NO: 145599 - DNA, 102 bp, Arabidopsis thaliana
  unsure (1)..(102): unsure at all n locations
agcnacagaacgaggagaaccncgacaaccnagaagnncnccaagccaccgaaaccancaagagagaagccaggcagaacgagnaccgngaccacaaccacc

SEQ ID NO: 145600 - DNA, 117 bp, Arabidopsis thaliana
  unsure (1)..(117): unsure at all n locations
ggatctcgccagcaaccagaaagagcggtgaccggaaccgtagaccacggcccaccacccggaaacancccacaagggcaggaatggctacaaggccgaaagcaacagaagcaaaac

SEQ ID NO: 145601 - DNA, 277 bp, Arabidopsis thaliana
ccaaagggttccatctctcacctgaagaagcaaggagggtcaagttcaacacgctcgagaccactttgactcacagcagtggcccagctagctacggaaggccaagggtggctgcagcttaagagcttaaaaccgcggctcaacaatgaacctctagtactgtaaaaggaagttaaatagtacgaagtaataataataatgtacgaacatgtgacaagttttgttgaggtttacctgtaaaatgccacttcttttctgaataaatcttttttcgatc

SEQ ID NO: 145602 - DNA, 286 bp, Arabidopsis thaliana
  unsure (1)..(286): unsure at all n locations
ggagaacaaaaaaaacnaaacccatccctctttcncncnaggcnncnncgaggaagagtgctcggcagaaaaagccggccccccccgccccgcgggnnnagctaanaaaaaacnnncaatcttcctgaaatctttcaaaaccccgaaaagggacctcgtagctctaagctctctctctgtaggaggccgacccatctcaaatcaactcacaacgaagcttctgatctagataacggaacggacgatttgccgtcgtttacggaggttagttncgaccaactacgag

SEQ ID NO: 145603 - DNA, 469 bp, Arabidopsis thaliana
  unsure (1)..(469): unsure at all n locations
cgcgnncggaaaaggggtatagctcagcaatcnccncgngggtgggtttttttttctccncgcccaaacgggtggcttgcgaggcagtcacttgcgcccctcctcagctacagaacgagtgtaacctcgacaacctagatgttctccaagccaccgaaactatcaagagtgaagccggtcagatcgagtactgggaccacaaccaccctcagctccgatgtgttggtgtttccgttgctcgttatgtaattgaacaaggcggtctttacttgcccaccttcttcacttccccaaaaatttcctacgtcgttcaaggaacgggtatcagcggaagagtggtccctggatgtgccgagaccttcatggactcgcagccgatgcaaggacaacaacaaggccaaccatggcaaggacgacagggacaacanggncaccatgggaggacaggacaacaggnacacaggaagac

SEQ ID NO: 145604 - DNA, 348 bp, Arabidopsis thaliana
  unsure (1)..(348): unsure at all n locations
agaaaagcggttcgagtcgcaccgaatttggttgtgttttcgacacggcgganccncagcaggggcttttttgcccaacagtggcccacctagtgccagctcgatcaactcaatgcgctcgaaccatcccaaatcatcaagagcgagggtggtcgcatcgaggtctgggaccaccatgcacaccagctacggtgctcacactctgccttagagcgtatcggcattgagcctcagggtctgttcttgcccactttcttgaacgccggcaaactcacgtttgttgatcacggaaggggtctaatgggaagagatattccgggatgcaccgagacgttcatggagtcaccg

SEQ ID NO: 145605 - DNA, 183 bp, Arabidopsis thaliana
  unsure (1)..(183): unsure at all n locations
cacaaacatacaatttaattccaaaagattgttgcattttaaagangaacgccacaaagaggggggggcttcacgngannagcgcccccgccgccancgncaccgcaaggcangncgaagaagcgncnaaagagaccaaannaggcaccncncnnccaaaaaggaccaccaaaggcannggag

SEQ ID NO: 145606 - DNA, 457 bp, Arabidopsis thaliana
  unsure (1)..(457): unsure at all n locations
aaaaaccgggccggcccacgcgtccgctacaaggcttagagcaacagccacagaggatagttttttggannggacccnagttggggcttttctttgaagatcgatcttccacagcgcagcaacttcagaaccaagatgacaaccgtggaaacattgtccgagtccaaggcccgttcggtgtcattaggccgcctttgaggggccagagacctcaggaggaggaagaagaagaagaaggacgacatggacgacacggtaatggcttagaggagaccatctgcagcgccaggtgcaccgataacctcgatgacccgtctcgtgctgacgtgtacaagccacagctcggttacatcagcactctcaacagttacgatctccccatccttcgcttcatccgtctctcagccctccgtggatctatccgtcaaaacgcaatggtgctttcacagtggaacgc

SEQ ID NO: 145607 - DNA, 409 bp, Arabidopsis thaliana
  unsure (1)..(409): unsure at all n locations
agccgccgngggtaggctgtgtctccnccgcgcagaggtgggcttttaacggaaaccacactaacggcgtcnccattgacggaaccctagacaacaacaaccgtcgcgtcggagatacaaacactcacatggatatatctgctaagaaaactgacaacggctacgccaatggtgtcggaggaggaggatggagaagcaaagcgtcgttcacgacgtggacggcgcgtgatatcgtctacgtggtgagataccattggataccgtgcatgttcgctgccggacttctgttcttcatgggcgtggagtacacgcttcagatgattcccgcgagatctgagccgttcgatcttgggtttgtggtcacgcgctctttgaatcgcgtattagcattctcaccggatcttaacac

SEQ ID NO: 145608 - DNA, 397 bp, Arabidopsis thaliana
  unsure (1)..(397): unsure at all n locations
accaaagaacnggagcggggagatgtatangngtttcccacccgttcgatacattttcatgcgaatattggggagacaaatgccgttgtgatttctgcgggtgggagccaagaccccggtaggatcataataggtgatgcggttttcggatcaaaacctttgattgatcccaaggttttggctaaagcttttgcgttggactacaacaaagtgaaatatcttcaggcagtgttttcttgatgacatactagcttaagagaataatgataaaatatagttatgcgaaataatccaatgattatatagatatatatgtatgaagtaggacgtaaataacaaaaaatgtgtggaaaaatatatgtaagatgtcatgtgcttattaattaaaacaatttgt

SEQ ID NO: 145609 - DNA, 266 bp, Arabidopsis thaliana
acaggaaagaactcaaaaacaactaaatcagcccagatatcggggtcatttccttcatcggtatctggacgcacgttgacatcaaagaagacaaacgtatgatccctttcaatagctttccctaaagcccaacaatgcaaatttatttctctcctatgagagcggccttcctcgtttttccatttgcaaacacaactaatgccaaaatcagtatcatcacagtaaccctcggaaaatgcgacttgcaccagcatagcaaagcccac

SEQ ID NO: 145610 - DNA, 393 bp, Arabidopsis thaliana
  unsure (1)..(393): unsure at all n locations
aacaagcncnnccacgggcgcgcaactttcgccctctgcttcctcctcaccaacgcttccatctaccgcactgttgtcgagttcgacgaagatgacgccagcaaccccatgggcccaagacagaaatgtcagaaggagtttcagcaatcacagcacctaagagcttgccagaaattgatgcgcatgcaaatgaggcaaggccgtggtggtggtccctccctcgacgatgagttcgatttggaagacgacatcgagaacccacaaggcccccagcagggacaccagatcctccagcagtgctgcagcgagcttcgccaggaagagccagtttgtgtttgccccaccttgagacaagctgccagggccgttagccttcagggacaacacggacca

SEQ ID NO: 145611 - DNA, 349 bp, Arabidopsis thaliana
gagttcgaagaagatgacgccactaaccccataggcccaaaaatgaggaaatgccgcaaggagtttcagaaagaacaacacctaagagcttgccagcaattgatgctccagcaagcaaggcaaggccgtagcgatgagtttgatttcgaagacgacatggagaacccacagggacaacagcaggaacaacagctattccagcagtgcttgaacgagcttcgccaggaagagccagattgtgtttgccccaccttgaaacaagctgccaaggccgttagacttcagggacagcaccaaccaatgcaagttaggaaaatttaccagacagccaaacacttgcccaacgttt

SEQ ID NO: 145612 - DNA, 324 bp, Arabidopsis thaliana
  unsure (1)..(324): unsure at all n locations
agaagccctagatnnngncaaaaggcgtggtcngatttttaaaccanggccggaangggacggagaactcaggaangggagccggcgccgacccgnaagaaacccgcnaacgccgcngccaagcgcgacgagaaaacngncaacgccgcncgncganccggcgccganancgagaccgncagaaaanncaaggcnggaaccaacaaggcggcancaagcggcacaacncngaacacaaaaangcnngangangacacngagaaccnnacncangaacgngngccnacngagcnaaagaaagccannangcaagccaggacagac

SEQ ID NO: 145613 - DNA, 128 bp, Arabidopsis thaliana
  unsure (1)..(128): unsure at all n locations
aacagggncagcagggncagcagnnnccgaacgagggccagcncgaccagcncaacgcgcncgagccgncacacgnaccgaagagcgaggcnggncgcancgaggggggggaccaccacgcnccncag

SEQ ID NO: 145614 - DNA, 466 bp, Arabidopsis thaliana
  unsure (1)..(466): unsure at all n locations
gccacgcgtcgaagaaaaggtaagctcagcaacncccgggtagcctttggggnncnccncgnccnnaacgggggccttgcgaggcagncactcggccccccaccncagcnacagaacgagngnaaccncgacaaccnagangnncnccaagccaccgaaaccatcaagagtgaagccggtcagatcgagtactgggaccacaaccaccctcagctccgatgtgttggtgtttccgttgctcgttatgtaattgaacaaggcggtctttacttgcccaccttcttcacttccccaaaaatttcctacgtcgttcaaggaacgggtatcagcggaagagtggtccctggatgtgccgagaccttcatggactcgcagccgatgcaaggacaacaacaaggccaaccatggcaaggacgacagggacaacaaggccaaccatgggaaggacagggacaacaggggacac

SEQ ID NO: 145615 - DNA, 401 bp, Arabidopsis thaliana
  unsure (1)..(401): unsure at all n locations
gaaataacaatatggcncgaggcncntnnngttgttctttcnncnnaacactnnngaacctgggccatttctacgcggctcaacaccgcgtcagcagggtcagcagtttccgaacgagtgccagctcgaccagctcaatgcgctcgagccgtcacacgtactgaagagcgaggctggtcgcatcgaggtgtgggaccaccacgctcctcagctccgttgctcaggtgtctcctttgcacgttacatcatcgagtctaagggtctctacttgccctctttctttaacaccgcgaagctctctttcgtggctaagggacgaggtcttatgggaaaagtgatccctggatgcgccgaaacattccaagactcatcagagtttcaaccacgcttcgaaggtcaag

SEQ ID NO: 145616 - DNA, 204 bp, Arabidopsis thaliana
  unsure (1)..(204): unsure at all n locations
gaaaagggntaagcncagcaancnccttgngtggaccttcggggnnncncccccgaccaagcgggcngcctttggaaggcagtcacggccccgctcctcctcagctacagaacgagtgtaacctcgacaacctagatgttctccaagccaccgaaactatcaagagtgaagnccggcagatcgagtactgggaccacaaccacc

SEQ ID NO: 145617 - DNA, 307 bp, Arabidopsis thaliana
  unsure (1)..(307): unsure at all n locations
ggaaaaaccgggccgacccacgcgnccgagaagagcgggancgacgnncaacgcctgggttgtttgtatgnngcaacaaanangacgaaggcgagaagagcaggcttctgacgcccaccaccagagggttacgcaaaggcagcactgcgttttggaggctatgaagcgcaatgcacaccgtactggcctcacgctctcatgggtgcagttgtctctgcatcgcccgaaagcgtttttgaatcatttaacatcaagagatgcctccagatccggaagaagggtctccaaaaagactccatgaagaaag

SEQ ID NO: 145618 - DNA, 367 bp, Arabidopsis thaliana
  unsure (1)..(367): unsure at all n locations
agggaccacatccaccaacagcacccaagngngtgnggtttttaggcaagggaagacaangagcggggacgtaatccacangaaaaccacccccacaaacgcaaaaaaaccanacgnaccacaaggcacggggaacagcgaaagaangangcanacananaccaagaccnggaccaacccgcaggcaaagcaaggacaacaacaaggccgaccaaggcggggacgacagggacaacaaggccaaccaagggaaggccagcgacaacagggacgacaaggaagacaaggccaaccaagggaaggacaggcacaacagggacaacaaggacgacagggacaacanggccaaccacgggaaggacaggga

SEQ ID NO: 145619 - DNA, 404 bp, Arabidopsis thaliana
  unsure (1)..(404): unsure at all n locations
aaacaaccagcagggaggctttggcggncagggtggcattttgnaacagaaaaacnngnggagcggggtcgacgcacaggncatagctcacgcattgaaaattgacgttcagttggctcagcagcttcagaaccaacaagacagcagaggaaacatcgttcgtgttaagggacctttccaggtcgtgaggccacctctaagacagccctacgagagcgaggagtggagacacccacgtagcccacagggcaacggccttgaggagactatctgcagcatgaggtcccacgagaacattgacgaccctgctcgtgctgacgtgtacaagcccagcctaggtcgcgtgaccagcgtcaacagctataccttgcccatcttggagtatgtcaagctcagtgccactc

SEQ ID NO: 145620 - DNA, 331 bp, Arabidopsis thaliana
  unsure (1)..(331): unsure at all n locations
acttcaccaccaaccgntacaccagctccaccaactccaacaactcctccaccagcagcaactcctcctcctgtctcagcaccaccaccagtcacaacatctcctcctccagtcaccactgctcctcctccagcaaatccaccaccaccagtctcttctcctcctcctgcttctccttcaccagctactcctcctccagtcgcttctcctcctcctcccgttgcttctcctccaccagcaactccttctcccgtcactactcctcccccagcttctctagcttcccctcctgctcaagttccagcttccagcaccgaccacgaagccagat

SEQ ID NO: 145621 - DNA, 365 bp, Arabidopsis thaliana
  unsure (1)..(365): unsure at all n locations
caaccagcagggaggctnnggcggnncacagggttggtttgttcagaaaaacnngnggagcgggtgcggacgcataggtcatagctcacgcctcgaaaatcgacgttcagttggctcagcagcttcagaaccaacaagacagcagaggaaacatcgttcgtgttaagggacctttccaggtcgtgaggccacctctaagacagccctacgagagcgaggagtggagacacccacgtagcccacagggcaacggccttgaggagactatctgcagcatgaggtcccacgagaacattgacgaccctgctcgtgctgacgtgtacaagcccagcctaggtcgcgtgaccagcgtcaacagctatacc

SEQ ID NO: 145622 - DNA, 378 bp, Arabidopsis thaliana
  unsure (1)..(378): unsure at all n locations
ccagaggttctttgacatgcaccagattggttgttctttggagcggnganaccanggccagaacactttgagtagcccagcggttctacaacgacggacagcaaccacttgtcatcgtcagcatcttcgatctagccagtcaccagaaccagcttgaccgcaacccaaggccattttacttagccggaaacaacccacaaggtcaagtatggctacaaggacgagagcaacagccacagaagaacatcttcaatggatttggacccgaggttattgctcaagcnttgaagattgatcttcagacagcgcagcaacttcagaaccaagatgacaacccgggaaacattgtccgagtccaaggcccgttcggtgtcatta

SEQ ID NO: 145623 - DNA, 254 bp, Arabidopsis thaliana
  unsure (1)..(254): unsure at all n locations
cgaaaaaccctagcacagctccgagatgggtgggtttttatgggagacnccggcgaagccggcgggcgtaaaccaaacgccgcgcgcccaagcacgcgcnaaagnncagaacagagccaangnncnncagcnnaagcngangggncagagccacccnaccggcnnaacaaacaancncnngaagcnnnnngagccacgnccgccannggagnacaaaccaccaccagagaagagaaagggcccgccnnanacag

SEQ ID NO: 145624 - DNA, 433 bp, Arabidopsis thaliana
  unsure (1)..(433): unsure at all n locations
ccacgcgtccgggagaccatctgcatcgccaggtgcaccgagggtcnggattatccgncncgngcngacgngggcgggccacagcgcggnnacatcagcactctcaacaggnacgancnccccanccnncgcttcatccgtctctcagccctccgtggatctatccgtcaaaacgcaatggtgcttccacagtggaacgcaaacgcgaacgccattctttacgtgacagacggggaagcccaaatccagatcgtaaacgacaatggtaacagagtgtttgacggacaagtctctcaaggacagctcatagccgtaccacaaggtttctcggtggtgaaacgcgcaacaggcaaccgattccagtgggttgagttcaaaacaaacgcaaacgcgcanatcaacactcttgcgggacgaacctcagtcttgagag

SEQ ID NO: 145625 - DNA, 361 bp, Arabidopsis thaliana
  unsure (1)..(361): unsure at all n locations
nacacacatagcaaaaaagggcaaacaggggtcngntttttctgcgcagcncncgctctgtgcgtcctttttaccaacgcttccatctaccgcaccgncgttgagttcgaagaagatgacgccactaaccccataggcccaaaaatgaggaaatgccgcaaggagtttcagaaagaacaacacctaagagcttgccagcaattgatgctccagcaagcaaggcaaggccgtagcgatgagtttgatttcgaagacgacatggagaacccacagggacaacagcaggaacaacagctattccagcagtgctgcaacgagcttcgccaggaagagccagattgtgtttgccccaccttgaaac

SEQ ID NO: 145626 - DNA, 473 bp, Arabidopsis thaliana
  unsure (1)..(473): unsure at all n locations
aaaaccgggccgagccacgcgaccggctcagcaatctcctcgntgcaaccttgggtggnttttttgnccnnaacggcngccaggcggcgcagttactaggggttcctcctcacctacagaacgagtgtaacctcgacaacctagatgttctccaagccaccgaaactatcaagagtgaagccggtcagatcgagtactgggaccacaaccaccctcagctccgatgtgttggtgtttccgttgctcgntatgtaattgaacaaggcggnctttacttgcccaccttcttcacttccccaaaaatttcctacgtcgttcaaggaacgggtatcagcggaagagtggtccctggatgtgccgagaccttcatggactcgcagccgatgcaaggacaacaacanggccaaccatggcaaggacgacagggacaacaaggccaccatgggaaggacagggacacagggacaacaagg

SEQ ID NO: 145627 - DNA, 257 bp, Arabidopsis thaliana
  unsure (1)..(257): unsure at all n locations
ccgaaacagagaggaggacagggaagagaagggggtagggagaaagggnnnaaagagaggnaagagggaggagggtaggatggagtcacgaacaccacaaggaaaagtggggtcagaagagttaataacgggagatgatgaagagaggaagaagacgaaggagaagaagagaagagagagcacgtggtctctgcctccgccacactccacaccttctccattggtntttttcgatcccttntggtaggaggcgccga

SEQ ID NO: 145628 - DNA, 272 bp, Arabidopsis thaliana
  unsure (1)..(272): unsure at all n locations
gcagcaaacgccagagtgggattgtggcnnagcncnncacaagcaggcgcccagccaangcaggggcccccnacaacanccnccagccagcnannaaccaggncaacaagangcgngagagnaaaggnancgnngncggncnaggnancggcggcggncncgcagcgncagggcnnnggacnccaccnccggaggcnnangcngcggcagaagcggcggcggcnagnncagacagcagaggacagnngngggggangggggngacaccggca

SEQ ID NO: 145629 - DNA, 364 bp, Arabidopsis thaliana
  unsure (1)..(364): unsure at all n locations
gccagactgcattccgacacnagagatttgttatttttgaaannaananaanagacggaaggaaggaagcataaacgaagaaatactgaaacgncaaacgannagaacataancnncagaanaaaggggacaanacagagagcaaaaagncnaaannnccaacaananatatggtatgtaaagagcggtgaaattctgacctgaggataattcatgcacccaaccatgaaattgccatcctgcaaagaaagggaatagaacgtttaacctgtggttcccattaacaatagggagaacagagaaaatatttgtcagacagaatatatgatacccggttctttctgagtgccatatctgattcatt

SEQ ID NO: 145630 - DNA, 291 bp, Arabidopsis thaliana
  unsure (1)..(291): unsure at all n locations
ggagtatgttatgctcagngccacacgnggtangnnttttggcaangcganggngcnggcggggnacaacaggaacgcnaacgagcacctccacngcacnggaggacaaggaagganccaagnggncaacgacaacggacagaacgngnnggaccaacaggngcagaagggacagcncgnggncancccacaagggancgcaaacgccgnccagncccacggaaacaagnncgagnggancgcnnncaaaacgaacgaaaacgcaangancagcacnnncggcgggagaac

SEQ ID NO: 145631 - DNA, 422 bp, Arabidopsis thaliana
  unsure (1)..(422): unsure at all n locations
aaaacagggccgcccaacgcgnccggggaaggacagggacaacagggacaacaagggggtagangttcaaccangggaaggacaggggcgggagggacaacaaggacgacagggacaacaaggccaaccangggaaggacagggacagcagggacaacaagggnnccgngacangcaccagaaggnggaacaagngagacgcggagacgncnnngccaacacnccaggcncngcccacnggancaacaacncaggagaacagccacnngncancaacgcncnncncgacaacgccaacnaccaaaaccaacncgaccgcaacccaagagggggccaaaaggccggaaacaaccagcagggaggcnnnggcggnncacagcaacaacaagaacagaaaaacnngnggagcgggnncgacgcac

SEQ ID NO: 145632 - DNA, 444 bp, Arabidopsis thaliana
  unsure (1)..(444): unsure at all n locations
aaaaccgggccgacccacgcgnccggaacagaaattctcgnggagcgggnnncggattggttttatagcncaagcanngaaaaggcgcgggcttttggctcancaggttcccatccaacaagacagcagaggaaacatcgttcgtgttaagggacctttccaggtcgtgaggccacctctaagacagccctacgagagcgaggagtggagacacccacgtagcccacagggcaacggccttgaggagactatctgcagcatgaggtcccacgagaacattgacgaccctgctcgtgctgacgtgtacaagcccagcctaggtcgcgtgaccagcgtcaacagctataccttgcccatcttggagtatgtcaggctcagtgccactcgtggcgttctccagggtaatgcgatggtgcttctaaatacaacatgaaacgctacgag

SEQ ID NO: 145633 - DNA, 111 bp, Arabidopsis thaliana
  unsure (1)..(111): unsure at all n locations
agcagggncagcagnnnccgaacgagggccagcncgaccagcncaangcgcncgagccgncacacgnaccgaagagcgaggcnggncgcancgaggngngggaccaccacg

SEQ ID NO: 145634 - DNA, 481 bp, Arabidopsis thaliana
  unsure (1)..(481): unsure at all n locations
aaaaccgggccgccacgcgccgaagaagacgttaagccacaacttttgttgtattttggggncnccncnccnaggggctgtcttgcgaggcagtcactccccttcctcctcagctacagaacgagtgtaacctcgacaacctagatgttctccaagccaccgaaactatcaagagtgaagccggtcagatcgagtactgggaccacaaccaccctcagctccgatgtgttggtgtttccgttgctcgttatgtaattgaacaaggcggtctttacttgcccaccttcttcacttccccaaaaatttcctacgtcgttcaaggaacgggtatcagcggaagagtggtccctggatgtgccgagaccttcatggactcgcagccgatgcaaggacaacaacaaggccaaccatggcaaggacgacagggacaacaaggccaaccatgggaaggacagggacaacagggacaacaggtaagaca

SEQ ID NO: 145635 - DNA, 412 bp, Arabidopsis thaliana
  unsure (1)..(412): unsure at all n locations
caccaagcgagtctagacctngagnagngggggtggcgtttttcccngcnagancaaccaagcccgggtccactgggannccggggataacaccgnncnccnganccaaagaaaaancaganccaaactgaaacagtaagttccatttgggtcatgtcaagagcttcaactctgcaactcttggacccaatgactaagactagagctggagtttgctttttccgagacggaccatgaggagatcgacgaagggtttgccatcagaggttttctggtagagggtttcctcgaagagtataacaccagagaggcaagggtaactgccaggggaagtgaagaggagctcacggtaagcttggcggttggactcagtgttctcaacattgatttcggcgaatcgtttcccaatggt

SEQ ID NO: 145636 - DNA, 373 bp, Arabidopsis thaliana
ggatatggaagcttacgtcgccgctttggcgttaagagtatggtttaccagaagtactagaataaaatacggctatatatcttagctgatattaccatgtatttgtttttgtctcaatgctttgtcttattttcatatcatatgttgtattgatgtgctaaaactatgataatagtaccttattagtcatcttctttctagatatctcctccaacgcatacgaacgtaataataatatgtgaagagttttataactattaagtaaccaataatattaagttcctagttttggagtgacattatttaaaaaataatattaacgaagaaacatgctaatgattttctccttaacccaaaaaaaaatctctatcat

SEQ ID NO: 145637 - DNA, 378 bp, Arabidopsis thaliana
  unsure (1)..(378): unsure at all n locations
ctcctcctaangtcgcggttgttccctcttcttcttcttcttcttcggccgcttcttccgccattgatttcctctctctctgtactcgtctcaaaacaactccaagagctggatggattaagagagatgtgaaagatccagaatctatagcggatcacatgtatcggatgggtcttatggctctaatttcttcagatatccccggtgttaacagagacaaatgcatgaaaatggcgattgttcatgatattgcagaagccattgtaggagacattacacctttctggtgggatatctaaagaagagaaaaaccgaagagaaagcgaagcacttgagcacatgtgcaaactcttgggtggaggcgaaagagcaaaagaa

SEQ ID NO: 145638 - DNA, 363 bp, Arabidopsis thaliana
aacccgaagcttccaacaaaccagctaacatttgcattatcaagaaatagtaaaagctatgaatgttaccccaataaccaactccaaacagagaagtaaacaatccagttcctatcattccaacagtcaagaagatcctaagattcatcctatcccccaaatgtccagcgaaatacattccgaaagcgtaaaccgcaagaaacgcaacatcgatctcaccgagcaaaaccgtaccatcaggaccattgaaaggagcccaaccaccttcttcttttacagaggaaccaaacgaagtaaatctcaaaagaagtgagtttagtcctgtatctggagattgaggatcaagagcacttttgacaatac

SEQ ID NO: 145639 - DNA, 355 bp, Arabidopsis thaliana
  unsure (1)..(355): unsure at all n locations
aacgcttgcactgtcccgcaccgccgntgagttcgaagaagatgacgccactaaccccataggcccaaaaatgaggaaatgccgcaaggagtttcagaaagaacaacacctaagagcttgccagcaattgatgctccagcaagcaaggcaaggccgtagcgatgagtttgatttcgaagacgacatggagaacccacagggacaacagcaggaacaacagctattccagcagtgctgcaacgagcttcgccaggaagagccagattgtgtttgccccaccttgaaacaagctgccaaggccgttagacttcagggacagcaccaaccaatgcaagtcaggaaaatttaccagaca

SEQ ID NO: 145640 - DNA, 457 bp, Arabidopsis thaliana
  unsure (1)..(457): unsure at all n locations
aacaaaaagataatggttaagcncagcagggttgnnttttcaaccnncggggnacnccgcggccntaacggcggccnngcgaggcacccaccaggggngccnccncagcnacagaacgagngnaaccncgacaaccnagangnncnccaagccaccgaaaccancaagagngaagccggncagaacgagnaccgggaccacaaccacccncagcnccgangngnnggngnnnccgnngcncgnnangnaanngaacaaggcggncnnnacnngcccaccnncnncacnnccccaaaaannnccaacgncgnncaaggaacgggnancagcggaagagnnggccccggangngccgagaccnncanggacncgcaaccgangcaaggacaacaacaaggccaaccanggcaaggacgacagggacaacanggcccaacaagggaaggacagggacaac

SEQ ID NO: 145641 - DNA, 451 bp, Arabidopsis thaliana
  unsure (1)..(451): unsure at all n locations
cggacgcgtgtgagcaaccccanngggcggtggagttttgtcagaaggagnnacagcgagggcagcatctaagagcttgccagaccttgatgcgcatgcaaatgaggcaaggccgtggtggtggtccctccctcgacgatgagttcgatttggaagacgacatcgagaacccacaaggcccccagcagggacaccagatcctccagcagtgctgcagcgagcttcgccaggaagagccagtttgtgtttgccccaccttgagacaagctgccagggccgttagccttcagggacaacacggaccattccaatccaggaaaatttacaagacagctaagtacttgcctaacatttgcaagatccagcaagttggtgaatgcccctttcagaccaccatccctttctcccttcttactaatagattccaaacaaaacccttgagcgtatgaaa

SEQ ID NO: 145642 - DNA, 379 bp, Arabidopsis thaliana
  unsure (1)..(379): unsure at all n locations
tacactgcccaacagnggcccaacgagcgccagctcgancaacncaangcgctcgaaccatcccaaatcatcaagagcgagggtggtcgcatcgaggtctgggaccaccatgcaccccagctccgttgctccggctttgcctttgagcgtttcgtcattgagcctcagggtcttttcttgcccactttcttgaacgccggcaaactcacgtttgttgttcacggaaggggtctaatgggaagagttattccgggatgcgccgagacgttcatggagtcaccggtatttggagaaggtcaaggtcagggtcagagtcaagggttccgtgacatgcaccagaaagtagagcacctacggtgcggtgacaccattgcaacac

SEQ ID NO: 145643 - DNA, 365 bp, Arabidopsis thaliana
  unsure (1)..(365): unsure at all n locations
aaaaccgggccgacccacgcgnacgggacggcagggacaacaaggacgacaggggtangatggtttnaccangggaaggacaggggcgggagggacaacaagggnnccgcgccacgcaccagaagggggaacangngagacgcggagacgncnnngccaacacnccaggcncngcccacgggancnacaacncaggagaacagccacnngncancancgcncnncncgacancgccaacnaccaaaaccaacncgaccgcaacccnagagggggccannnggccggaaacaaccagcagggaggcnnnggcggnncacagcaacaacaagaacagaaaaacngggggagcgggnncaacgcacag

SEQ ID NO: 145644 - DNA, 429 bp, Arabidopsis thaliana
  unsure (1)..(429): unsure at all n locations
ggaaaaaccgggccgacccacgcgncacgccgggggaaggctagacagancnngtttcttgtttttatcccaccgnnnaggnngagacgcacactttaaatggtattaaggtcacaccacctgnnccaagtggagcttccactggtatctatgaggctcttgagctgagggatggaggatctgactaccttggaaagggtgtatctaaggctgttggcaatgtgaacaacatcatcgggccagcacttattggaaaggacccaactcagcagactgctattgacaacttcatggtccatgaacttgacggaacccaaaacgagtgggggtggtgcaagcaaaagcttggagccaatgcgattcttgctgtgtctcttgctgtctgcaaagctggggctgttgtcagcggcatttctctatacaagcaca

SEQ ID NO: 145645 - DNA, 456 bp, Arabidopsis thaliana
  unsure (1)..(456): unsure at all n locations
cggacgcgggggncacaaacgagnaagaannggtagcatttttgcaaaaaaaanggcaaacaggcgcgtttttgtctgcgcaactttcgccctctgcttcctcctcaccaacgcttccatctaccgcactgttgtcgagttcgacgaagatgacgccagcaaccccatgggcccaagacagaaatgtcagaaggagtttcagcaatcacagcacctaagagcttgccagaaattgatgcgcatgcaaatgaggcaaggccgtggtggtggtccctccctcgacgatgagttcgatttggaagacgacatcgagaacccacaaggcccccagcagggacaccagatccttcagcagtgctgcagcgagcttcgccaggaagagccagtttgtgtttgccccaccttgagacaagctgccagggccgttagccttcagggacaacacggaccatttca

SEQ ID NO: 145646 - DNA, 452 bp, Arabidopsis thaliana
  unsure (1)..(452): unsure at all n locations
aagaagacaatcaancgagaaaggcaanggatgaattttttggcggaggaccgcnaggggagcttctgagaaacactacacgacgcggaggaacgaaaaccacgtcttccaggatgccgtcggccaccacatccaaggttgcactatgcatgacggtgactgggactcccacggctccatcagatcatggaatatcacatgcgatggaaagccggaagtcttcaaggagaagagagagatagacgacgaaaagatggcgttgacgttgaaagggctagagggtcaagcgatggagaagtacaagaagtatgaggttatctaccagttcattcccaagtcgaaggaaggctgcgtctgcaaaatcactctcatatgggaaaagcgcaacgaanactccctcgaacccatcaactacatgaaagttgtcaagagcttagttgctgacatggacg

SEQ ID NO: 145647 - DNA, 138 bp, Arabidopsis thaliana
  unsure (1)..(138): unsure at all n locations
aacaaganacaggacagatattttctcaaggatcgccacctacgctttctagcacaagagagatgtatgttaaagctacatatggtactgcatattatgtggtaaaataaataaagttctataaatggttgttcacat

SEQ ID NO: 145648 - DNA, 421 bp, Arabidopsis thaliana
  unsure (1)..(421): unsure at all n locations
caaaaagaatttggntaagcncagcaagggtcngtttttccnncgnggncnccacggcgcaacttttgcctngcgaggcagtcactccgggttcctcctcagctacagaacgagtgtaacctcgacaacctagatgttctccaagccaccgaaactatcaagagtgaagccggtcagatcgagtactgggaccacaaccaccctcagctccgatgtgttggtgtttccgttgctcgttatgtaattgaacaaggcggtctttacttgcccaccttctttacttccccaaaaatttcctacgtcgttcaaggaacgggtatcagcggaagagtggtccctggatgtgccgagacctttatggactcgcagccgatgcaaggacaacaacaaggccaaccatggcaaggacgacagggacaac

SEQ ID NO: 145649 - DNA, 269 bp, Arabidopsis thaliana
  unsure (1)..(269): unsure at all n locations
gaaaattgacgttcagnnggcncagcatgttcagatctttacaagacagcanaggaaacaggcgggcgtgttaaggggaccnnnccagcgccgcgacggccaccncnaagacagcccnacgagagcgaggagnggagacacccacgnagcccacagggcaacggccnngaggagaccancngcagcangaggncccacgagaacanngacgacccngcncgngccgacgngnacaagcccagccnaggncgcgngaccagcgncaacag

SEQ ID NO: 145650 - DNA, 442 bp, Arabidopsis thaliana
  unsure (1)..(442): unsure at all n locations
accggnnttgaaaaaccgggccgacccacgcgnccgaaacagacactcatagcaaaaaaggctggtcggttttttcgcngcgcacacaaggtgcggctttctgctcaccaacgctcccatctaccgcaccgncgttgagttcgaagaagatgacgccactaaccccataggcccaaaaatgaggaaatgccgcaaggagtttcagaaagaacaacacctaagagcttgccagcaattgatgctccagcaagcaaggcaaggccgtagcgatgagtttgatttcgaagacgacatggagaacccacagggacaacagcaggaacaacagctattccagcagtgctgcaacgagcttcgccaggaagagccagattgtgtttgccccaccttgaaacaagctgccaaggccgttagactccagggacagcaccaaccaatgcaa

SEQ ID NO: 145651 - DNA, 235 bp, Arabidopsis thaliana
ccacaaggctttgcggccccgaaacacgccataggcgaacagttcgagtggatcgaattcaagacaaacgaaaacgcacaggtcaacacactcgcgggccgtacctcagtcatgagaggttcgccgcttgaggttataaccaatgggtaccagatctctcccgaagaagctaaacgagtaaagtttagcacgattgagaccacactgacccatagcagtccaatgagctacggaa

SEQ ID NO: 145652 - DNA, 393 bp, Arabidopsis thaliana
  unsure (1)..(393): unsure at all n locations
aaaaccgggccgacccacgcgnccgcgcgaggaagttngaacccggaggatttttctttttttttcgcacacacncgcaccagctgggggtgctccctcaacgccagcatgaacgaggcatcaaagtcctttatcctcagagtggcccttcttccactcaggtgctagccgtgtttgtcggtgtaccgataggaggaacgctgctgactatagccggtttgacattagccggttcggttataggactaatgctagcattcccgttgtttctcatctttagtccggttattgtaccagcagcctttgtcatcggtctagctatgactggattcctggcttcaggggccataggtctcaccggactatcatncatgtcgtgggtactcaactaca

SEQ ID NO: 145653 - DNA, 199 bp, Arabidopsis thaliana
  unsure (1)..(199): unsure at all n locations
aagataaaaatggctcgaggcncnnctgggttggntttctccnnaacacnnnnganccggggccanggctacgcggcncaacaggcccagcacggncagcagnnnccgaacgagggccagcncgaccagcncaangcgcncgagccnncacacgnaccgaagagcgaggcnggncgcancgaggggggggaccaccacg

SEQ ID NO: 145654 - DNA, 487 bp, Arabidopsis thaliana
  unsure (1)..(487): unsure at all n locations
aaaaccgggccggcccacgcgtccgcaaaaagaatttggnnaagcncagcatttgctggtttttccnncggggncnccgcgccggaacttttgccttgcgaggcagccactccgggnncctcctcagctacagaacgagtgtaacctcgacaacctagatgttctccaagccaccgaaactatcaagagtgaagccggtcagatcgagtactgggaccacaaccaccctcagctccgatgtgttggtgtttccgttgctcgttatgtaattgaacaaggcggtctttacttgcccaccttcttcacttccccaaaaatttcctacgttcgtcaaggaacgggtatcagcggaagagtggtccctggatgtgccgagaccttcatggacttgcagccgatgcaaggacaacaacaaggccaaccatggcaaggacgacagggacaacaaggccaaccatgggaaggacagggacacagggacaacaag

SEQ ID NO: 145655 - DNA, 277 bp, Arabidopsis thaliana
  unsure (1)..(277): unsure at all n locations
ccaccgaaacnancaagacgngnnnagccggcagaacgagnacccgggaccacaanccacccncagcnccgaggggnnggngnnnccgncgcncgnnangnaanngaacaaggcggncnnnacnngcccaccnncnncacnnccccaaaaannnccaacgncgnncaaggaacgggnancagcggaagagnnggcccnggangngccgagaccnncanggacncgcagccgangcaaggacaacaacaaggccaaccaaggcaaggacgacagggac

SEQ ID NO: 145656 - DNA, 326 bp, Arabidopsis thaliana
  unsure (1)..(326): unsure at all n locations
ggaaaagcgagccctggangcgccgaaacagggtagatttattagagnnccaaccacgcggcgaggggcaagggcaaagccagagggccccgcacacgcaccagaaagnggagcacaaaaggagcggnganaccanngccacaacacccggngnagcacagnggnncnacaacgacggacaggaaccacnngncancgncagcgncnncgancaagccagncaccagaaccagcnngaccgcaacccaaggccannnaacnnagccggaaacaacccacaaggncaagnanggcnacaaggccgagagcaacagccacagaagaac

SEQ ID NO: 145657 - DNA, 379 bp, Arabidopsis thaliana
ttgcgaggcagcactcgccctcctcctcagctacagaacgagtgtaacctcgacaacctagatgttctccaagccaccgaaactatcaagagtgaagccggtcagatcgagtactgggaccacaaccaccctcagctccgatgtgttggtgtttccgttgctcgttatgtaattgaacaaggcggtctttacttgcccaccttcttcacttccccaaaaatttcctacgtcgttcaaggaacgggtatcagcggaagagtggtccctggatgtgccgagaccttcatggactcgcagccgatgcaaggacaacaacaaggccaaccatggcaaggacgacagggacaacaaggccaaccatgggaaggacagggacaac

SEQ ID NO: 145658 - DNA, 404 bp, Arabidopsis thaliana
  unsure (1)..(404): unsure at all n locations
ccacgcgnccgggagacgatttgcagcgccaggggcatggttcgncttttganccgncncgngcngacggcgacgagttttagctcggttacatccccactctcaacaggtacgatctccccatccttcgcttcatccgtctctcagccctccgtggatctatccgtcaaaacgcaatggtgcttccacagtggaacgcaaacgcgaacgccattctttacgtgacagacggggaagcccaaatccagatcgtaaacgacaatggtaacagagtgtttgacggacaagtctctcaaggacagctcatagccgtaccacagggtttctcgggggtgaaacgcgcaacaggcaaccgattccagtgggttgagttcaaaacaaacgcanacgcgcanatcaacact

SEQ ID NO: 145659 - DNA, 257 bp, Arabidopsis thaliana
  unsure (1)..(257): unsure at all n locations
caacagcggcccaacaagngccagcncgancaacncaangcgcncgaaccancccaaancancaagagcgagggnggncgcancgaggncngggaccaccangcaccccagcnccgnggcnccggcnnggccnnngagcgnnncgncanngagccncagggncnnnncnggcccacnnncnngaacgccggcaaacncacgnnngnggggcacggaaggggncnaangggaagagggannccgggangcgccgagac

SEQ ID NO: 145660 - DNA, 454 bp, Arabidopsis thaliana
  unsure (1)..(454): unsure at all n locations
ccgggccgacgcacgcgtccgaaacggttaagtctagcaatcnccnttttttctttttttttgttctccncgnccnnaacgggtgcctttcgaggcagtcacttggcgttcctcctcagctacagaacgagtgtaacctcgacaacctagatgttctccaagccaccgaaactatcaagagtgaagccggtcagatcgagtactgggaccacaaccaccctcagctccgatgtgttggtgtttccgttgctcgttatgtaattgaacaaggcggtctttacttgcccaccttcttcactttcccaaaaatttcctacgtcgttcaaggaacgggtatcagcggaagagtggtccctggatgtgccgagaccttcatggactcgcagccgatgcaaggacaacaacaaggccaaccatggcagggacgacagggacaacaggctcaccatgggag

SEQ ID NO: 145661 - DNA, 422 bp, Arabidopsis thaliana
  unsure (1)..(422): unsure at all n locations
aacactccaggcncngcccangggtgggtctttttaggagaacagccacaagggggagggttcttctcgacatcgccaactaccaaaaccaactcgaccgcaaccctagagtgttccatttggccggaaacaaccagcagggaggctttggcggttcacagcaacaacaagaacagaaaaacttgtggagcgggttcgacgcacaggtcatagctcaagcattgaaaattgacgttcagttggctcagcagcttcagaaccaacaagacagcagaggaaacatcgttcgtgttaagggacctttccaggtcgtgaggccacctctaagacagccctacgagagcgaggagtggagacacccacgtagcccacagggcaacggccttgaggagactatctgcagcatgaggtcccacgagaac

SEQ ID NO: 145662 - DNA, 357 bp, Arabidopsis thaliana
  unsure (1)..(357): unsure at all n locations
cgggccgacccacgcgnccgnggncaacgacaacggacagaacgngnngggggtggngtttttgaagggacagcncgaggggaggcgacaaggggncgcanaccgcgcccacccccacggaaacaagnncgagnggancncnnncaaaacnaangaaaacgcaangancagcacnnnnggcgggagaaccncgcncnngagggcanngccannggaggncanancaaanggnnnccagaacncncccgaggaagcnaggaagaacaagnncaacacacnngagaccacnnngacccgcgcccgccggaggcaacaacaacagnngancgaggagaaagncgaggcnnaaancaaaac

SEQ ID NO: 145663 - DNA, 357 bp, Arabidopsis thaliana
  unsure (1)..(357): unsure at all n locations
aacgctttcctctaccgcaccgnngncnaattcnaagaagatgacgccagcaaccccgtaggtccaagacagagatgccagaaggagtttcagcaatcacaacacctaagagcttgccagagatggatgagcaagcaaatgaggcaaggacgtggtggtggtccttccctcgacgatgagttcgatttcgagggcccccagcagggataccagctactccagcagtgctgcaacgagctttgccaggaagagccagtttgcgtttgccccaccttgaaacaagctgccagggcagttagccttcaaggacagcacggaccattccaatccaggaaaatttaccagtcagctaagtac

SEQ ID NO: 145664 - DNA, 421 bp, Arabidopsis thaliana
  unsure (1)..(421): unsure at all n locations
caaccacccttagctccgangngnnggngggttggtttttcgnangnaanngaacaaggggggcgttttttgaccaccttctgcacttccccaaaaatttcctacgtcgttcaaggaacgggtatcagcggaagagtggtccctggatgtgccgagaccttcatggactcgcagccgatgcaaggacaacaacaaggccaaccatggcaaggacgacagggacaacaaggccaaccatgggaaggacagggacaacagggacaacanggaagacaaggccaaccatgggaaggacagggacaacagggacaacagggacgacagggacaacaaggccaaccatgggaaggacagggacagcagggacaacaagggtttcgtgacatgcaccagaaggtggaacatgtgagacgcggagacg

SEQ ID NO: 145665 - DNA, 190 bp, Arabidopsis thaliana
  unsure (1)..(190): unsure at all n locations
gaggacaaggaagganccaagnggncaacgacaacggacagaacgngnnggaccaacaggngcagaagggacagcncgnggncancccacaagggnncgcanacgnngnccagncccacggaaacaagnncgagnggancncnnncaaaacnaangaaaacgcaaggancagcacnnnnggcgggagaac

SEQ ID NO: 145666 - DNA, 423 bp, Arabidopsis thaliana
  unsure (1)..(423): unsure at all n locations
caaccggcgtttgaaataanggcnnnntttgcttgntttttcncnccncgccgncaacacgcgggctcttttgcggaccaccactgcctcccccctctcgctctctatccactccacctaaaacgaacgtactcgacgtcgtttcatctctccagcaaacacaaactatcctctcactcgacccgactcgttcctcactcaccaccaccaaacccgaatccctatccgacccggttttcttcaattcatcttcaccactatctctagagcttcactctcgagacactntcgtcgcgtcacagcacaaagactacaaaagcttaacactcagtcgactcgagcgcgactcatcccgagtcgccggaatcgtcgcgaagatccgtttcgccgtcgaaagagtcgatagatccgatctcaaacccg

SEQ ID NO: 145667 - DNA, 307 bp, Arabidopsis thaliana
  unsure (1)..(307): unsure at all n locations
ggtctttgngtcgnttctgctgtttttcactgcttattctaagagaaatgatggaacattcagagttggcctgaaaaaactgaagttggatcctaacaaccgactcgcaacacgctttggttccaagcaagaagaggccttgagatcttctttgcgttcgtacaacaacaatcttggtggtgattctggagatgctgatattgtcccgctcaagaattacttggatgctcagtactatggtgagattgctattggtacttcaacgcagaagttactgtcatttttgataccggaagtctaacctttg

SEQ ID NO: 145668 - DNA, 316 bp, Arabidopsis thaliana
cggctcaacagggtcaccaccctcagcagtttccgaacgagtgccagctcgaccagctcaatgcgctcgagccttcacacgtactgaagagcgaggctggtcgcatcgaggtgtgggaccaccacgctcctcagctccgttgctcaggtgtctcctttgcacgttacatcatcgagtctaagggtctctacttgccctctttctttaacaccgcgaagctctccttcgtggctaaaggacgaggtcttatgggaaaagtgatccctggatgcgccgaaacattccaagactcatcagaagtccaaccacgcttcga

SEQ ID NO: 145669 - DNA, 335 bp, Arabidopsis thaliana
ggatcgagatggagcttttcgctgatacaaccccaaacacggcggagaatttccgtgctctctgtaccggcgagaaaggaatgggaaagctaggtaagccacttcacttcaaaggatcgatcttccaccgtgtgattcccggattcatgtgtcaaggaggtgatttcaccgccaagaacggaaccggtggtgaatcgatctacggtgctaagttcaaggacgagaactttatcaagaagcatacaggagctgggattcttttaaaggctaactttggtcctaacactaacggatctcagttctttatctgtaccgataagacgtcgtggttagat

SEQ ID NO: 145670 - DNA, 275 bp, Arabidopsis thaliana
  unsure (1)..(275): unsure at all n locations
gcccganngnacacggggacggaagggccacaaccacaaccacaccccaccgnanggacccaannnngggggnngagaggggaagagaaacanaagcaacncaagaaacncnnggagacnaaacaaggagccccncaagaacaacaanacagnncagggnggncnnggaggaanancgnaagaacgannnnggancnaacagaagaaaagaanaaagggncaggaacnncngaaggggaggacncgnacaacannnanganaagaaagaaaaacc

SEQ ID NO: 145671 - DNA, 347 bp, Arabidopsis thaliana
  unsure (1)..(347): unsure at all n locations
acanncaccaggggggggtacttgtgagacgcggcgacccctttcccaacactccaggctctgcccactggatctacaactcaggagaacagccacttgtcatcatcgctcttctcgacatcgccaactaccaaaaccaactcgaccgcaaccctagagtgttccatttggccggaaacaaccagcagggaggctttggcggttcacagcaacaacaagaacagaaaaacttgtggagcgggttcgacgcacaggtcatagctcaagcattgaaaattgacgttcagttggctcagcagcttcagaaccaacaagacagcagaggaaacatcgttcgtgttaaggga

SEQ ID NO: 145672 - DNA, 352 bp, Arabidopsis thaliana
  unsure (1)..(352): unsure at all n locations
ggaaaaaccgggccgacccacgcgaccgaaaacagacacacatagcaaaaaanggnnggtttgttgttccncgncngcgcagaacagcgcgggcggcttgcgaaaaaccaacgcgcccaccaaccgcaccgnngntgagttcgaagaagacgacgccactaaccccataggcccaaaaatgaggaaatgccgcaaggagtttcagaaagaacaacacctaagagctcgccagcaattgatgctccagcaagcaaggcaaggccgtagcgatgagtttgatttcgaagacgacatggagaacccacagggacaacagcaggaacaacagctattccagcagtgctgcaacgag

SEQ ID NO: 145673 - DNA, 74 bp, Arabidopsis thaliana
ctctcacaaaaataaagtaccattggaaaaaatccttgttagtgaaataagaaatgaaataaatatgttttctt

SEQ ID NO: 145674 - DNA, 331 bp, Arabidopsis thaliana
  unsure (1)..(331): unsure at all n locations
cacgcgnacgagcgcagcaatttcagaaccaagangacaacataagtaactttttccgagnccaaggcccgggcggngttattaggccgcctgggagcggccacacacctcaggaggaggaagaagaagaagaaggacgacatggacgacacggtaatggcttagaggagaccatctgcagcgccaggtgcaccgataacctcgatgacccgtctcgtgctgacgtgtacaagccacagctcgngtacatcagcactctcaacagttacgatctccccatccttcgcttcatccgtctcttagccctccgtggatctattccgtcaaaacg

SEQ ID NO: 145675 - DNA, 445 bp, Arabidopsis thaliana
  unsure (1)..(445): unsure at all n locations
acacatagcataaaanggcaaacaagaagatttaattttgcgcagcncncgcncncggggggggcctcttcaacgcttccatgtaccccaccgccgctgagttcgaagaagatgacgccactaaccccataggcccaaaaatgaggaaatgccgcaaggagtttcagaaagaacaacacctaagagcttgccagcaattgatgctccagcaagcaaggcaaggccgtagcgatgagtttgatttcgaagacgacatggagaacccacagggacaacagcaggaacaacagctattccagcagtgctgcaacgagcttcgccaggaagagccagattgtgtttgccccaccttgaaacaagctgccaaggccgttagactccagggacagcaccaaccaatgcaagtcaggaaaatttaccagacagncaagcacttgcccaacgt

SEQ ID NO: 145676 - DNA, 447 bp, Arabidopsis thaliana
  unsure (1)..(447): unsure at all n locations
ccaacactccaggcncngcccacaagtttanatttttcaggagaacagccacnggggaggagttttctgagcgacatggcgaactaccaaaaccaactcgaccgcaaccctagagtgttccatttggccggaaacaaccagcagggaggctntggcggttcacagcaacaacaagaacagaaaaacttgtggagcgggttcgacgcacaggtcatagctcaagcattgaaaattgacgttcagttggctcagcagcttcagaaccaacaagacagcagaggaaacatcgttcgtgttaagggacctttccaggtcgtgaggccacctctaagacagccctacgagagcgaggagtggagacacccacgtagcccacagggcaacggccttgaggagactatctgcagcatgaggtcccacgagaacattgacgaccctgctcgtgct

SEQ ID NO: 145677 - DNA, 448 bp, Arabidopsis thaliana
  unsure (1)..(448): unsure at all n locations
aaaaaccgggccgacccacgcgnccggaggagaccatcngcagcgccaggngcaccantttcctttttgacccgncncgngcagacggggggcgttcatagctcggntacatcaccactctcaacagttacgatctccccatccttcgcttcatccgtctctcagccctccgtggatctatccgtcaaaacgcaatggtgcttccacagtggaacgcaaacgcgaacgctattctttacgtgacagacggggaagcccaaatccagatcgtaaacgacaatggtaacagagtgtttgacggacaagtctctcaaggacagctcatagccgtaccacaaggtttctcggtggtgaaacgcgcaacaagcaaccgattccagtgggttgagttcaaaacaaacgctaacgcgcaaatcaacactctggcgggacgaacctcagacttgag

SEQ ID NO: 145678 - DNA, 328 bp, Arabidopsis thaliana
  unsure (1)..(328): unsure at all n locations
cggaaacggggatcagcggaagagnggncccngaatgnaacgagaccnncanggacncgcagccggggcaaggacaacaacaagggcggcccccacaaggacgacagggacaacaaggccaaccatgggaaggacagggacaacagggacaacaaggaagacaaggccaaccatgggaaggacagggacaacagggacaacaaggacgacagggacaacaaggccaaccatgggaaggacagggacagcagggacaacaagggttccgtgacatgcaccagaaggtggaacatgtgagacgcggagaacgctttgccaacactccagg

SEQ ID NO: 145679 - DNA, 171 bp, Arabidopsis thaliana
  unsure (1)..(171): unsure at all n locations
gcannnaaccagccaggcaaccanangcngcgacccgcannaaangcngggccacnngncgaagnaaaaagnacancaaanccanangaagnnnncccaagagcaganngnanccanngggcaaananaggnncgancaagannngnnnnncgggagnaccaaaagcaagc

SEQ ID NO: 145680 - DNA, 260 bp, Arabidopsis thaliana
  unsure (1)..(260): unsure at all n locations
cggaaacaacccaaaataaaagtttttctacaaggccnanagcagcaggacagaagaacannngcaacggcccccgacccgagggganggcncaagcnnngaagaacgancnncagacagcgcagcaaccccagaaccaagaggacaaccgnggaaacannngccgagnccaaggcccgnncgggggcannaggccgccnnngaggggccagagaccncangaggaggaagaagaagaagaaggacgacanggacgacac

SEQ ID NO: 145681 - DNA, 201 bp, Arabidopsis thaliana
  unsure (1)..(201): unsure at all n locations
aagaaacaaaatggctcgaggcncnnaaaatanatttttcnncnnaacacnnnngancgggggccatggctacgcggcncaacacgcccacgcagggncagcagnnnccgaacgagggccagcncgaccagcncaangcgcncgagccgncacacgnaccgaagagcgaggcnggncgcancgaggggngggaccaccacg

SEQ ID NO: 145682 - DNA, 239 bp, Arabidopsis thaliana
  unsure (1)..(239): unsure at all n locations
cggnnttgaaaaaccgggccgagccacgcgtccgaaaagggctatgctcagcaancnccttaattannctttttgggnncnccncgnccaaagagcggggccttgcgaggcagncactcgcccccccaccncagcnacagaacgagngnaaccncgacaaccnagangnncnccaagccaccgaaaccancaagagngaagccggncagaacgagnaccgggaccacaaccacccncag

SEQ ID NO: 145683 - DNA, 161 bp, Arabidopsis thaliana
  unsure (1)..(161): unsure at all n locations
gggagagcggcccacccaacncacccggaccccannagagccacnnnggcggagnnncnnnccacgnncgncnncgncnnngcgggagaaggcncaanccncgcncnagacaagnngnanggggacacggcggcncacacggggacaaacacgccnggagg

SEQ ID NO: 145684 - DNA, 346 bp, Arabidopsis thaliana
ccagtgctgctccctctcgctctctatccactccacctaaaacgaacgtactcgacgtcgtttcatctctccagcaaacacaaactatcctctcactcgacccgactcgttcctcactcaccaccaccaaacccgaatccctatccgacccggttttcttcaattcatcttcaccactatctctagagcttcactctcgagacactttcgtcgcgtcacagcacaaagactacaaaagcttaacactcagtcgactcgagcgcgactcatcccgagtcgccggaatcgtcgcgaagatccgtttcgccgtcgaaggagtcgatagaaccgatctcaacccgtttac

SEQ ID NO: 145685 - DNA, 351 bp, Arabidopsis thaliana
tgcgaggcagtcactctgcccttcctcctcagctacagaacgagtgtaacctcgacaacctagatgttctccaagccaccgaaactatcaagagtgaagccggtcagatcgagtactgggaccacaaccaccctcagctccgatgtgttggtgtttccgttgctcgttatgtaattgaacaaggcggtctttacttgcccaccttcttcacttccccaaaaatttcctacgtcgttcaaggaacgggtatcagcggaagagtggtccctggatgtgccgagaccttcatggactcgcagccgatgcaaggacaacaacaaggccaaccatggcaaggacgacagggacaac

SEQ ID NO: 145686 - DNA, 247 bp, Arabidopsis thaliana
  unsure (1)..(247): unsure at all n locations
cgcaagggngcttccacagaggaacgcaaataanaacttttagncnnnacgngacagacgggggggcccaaagggagancgggagacccaacggnaacagagngnnngacggacaagacncncaaggacagcgcanagccgnaccacaaggnnncnncggggngaaacgcgcaacaagcaaccgannccagagggnggagggcaaaacaaacgcnaacgcgcaaancaacacncnggcgggacgaac

SEQ ID NO: 145687 - DNA, 370 bp, Arabidopsis thaliana
  unsure (1)..(370): unsure at all n locations
caactgaccataaacacaancnaancannttcnaaattttttaangccacaanaanagggcggctttttttgaggggngttttgtcttccatagacaccgcaaggcangtcaaagatttgtccacggagaccaaattaggggcctctcttccaaaaactactaccaaaggcattggagctcagctttctgcaactggcacaacttacagcaccagcagtgtcgttagctatgctaatggttttaacaatcccaaaggtccaggggccaattcattctaaagtgccaacacatttaccagcggacaagtcactgccaagggtcgcaaggcaagagtttcttctgaagtgcttttgccgctgaaggcgattc

SEQ ID NO: 145688 - DNA, 110 bp, Arabidopsis thaliana
  unsure (1)..(110): unsure at all n locations
accgggaccacaaccaccctcagctccgatgtgttggtgtttccgttgctcgntatgtaattgaacaaggcggtctttacttgcccaccttcttcacttccccaaaaatt

SEQ ID NO: 145689 - DNA, 107 bp, Arabidopsis thaliana
  unsure (1)..(107): unsure at all n locations
agcaacagaacgagggnaaccncgacaaccnagangnncnccaagccaccgaaaccancaagagngaagccggncagaacgagnacngggaccacaaccacccncag

SEQ ID NO: 145690 - DNA, 466 bp, Arabidopsis thaliana
  unsure (1)..(466): unsure at all n locations
ggaaanaccgggccgagcccacgcgnccgnacacagatagcaaaaaagggcaaacaagttgnnctttttcttcgcagcncncgctctggtgtnccttttgaggaacgctggcagtccccgcaccgncgttgagttcgaagaagatgacgccactaaccccataggcccaaaaatgaggaaatgccgcaaggagtttcagaaagaacaacacctaagagcttgccagcaattgatgctccagcaagcaaggcaaggccgtagcgatgagtttgatttcgaagacgacatggagaacccacagggacaacagcaggaacaacagctattccagcagtgctgcaacgagcttcgccaggaagagccagattgtgtttgccccaccttgaaacaagctgccaaggccgttagactccagggacagcaccaaccaatgcatgtcaggaaaatttaccagacagccaagcac

SEQ ID NO: 145691 - DNA, 430 bp, Arabidopsis thaliana
  unsure (1)..(430): unsure at all n locations
cacgcgnccgaaacagagnnaacccaaaaaacagagcaaaaataaaattttantctcaagaaaccncactaaggagggggttatcggcaagagacacaggttacactccggtgcaaggtcnnaccgacgacgaagctgcctctcttcgccatgcaactagccagtgcttccgttcttccgatggctttaaaatccgccttagagcttgaccttcttgagattatggccaagaatggttctcccatgtctcctaccgagatcgcttctaaacttccgaccaaaaatcctgaagctccggtcatgctcgaccgtatcctccgtcttcttacgtcttactccgtcttaacctgctccaaccgtaaactttccggtgatggcgttgaacggatttacgggcttggtccggtttgcaagtatttgaccaagaacg

SEQ ID NO: 145692 - DNA, 458 bp, Arabidopsis thaliana
  unsure (1)..(458): unsure at all n locations
gcaaacgcacgtttgnngncacggaaggggaatanaggttttganannccgggangcgcggaggcgttcatggagtcaccggtctttccagaaggtcaaggtcagggtcagagtcaagggttccgtgacatgcaccagaaagtagagcacctacggtgcggtgacaccattgcaacaccatctggtgtagctcaatggttctacaacaatggaaatgagcctctcattcttgttgcagccgcggatctcgccagcaaccagaaccagcttgaccgcaaccttagaccatttttgatagccggaaacaacccacaagggcaggaatggctacaaggccgaaagcaacagaagcaaaacaacatcttcaatggcttcgcacctgagatcttggctcaagccttcaagatcaatgtcgagacggctcagcagcttcagaaccagcaagataaccgtggcaa

SEQ ID NO: 145693 - DNA, 324 bp, Arabidopsis thaliana
  unsure (1)..(324): unsure at all n locations
cggccangcgggggggtttttccgggcaacggactccactcctccgctgccttcccagccacccgcaaggctaacaacgacattacttccatcacaagcaacggcggaagagttaactgcatgcaggtgtggcctccgattggaaagaagaagtttgagactctctcttaccttcctgaccttaccgattccgaattggctaaggaagttgactaccttatccgcaacaagtggattccttgtgttgaattcgaagtggagcacggatttgtgtaccgtgagcacggtaactcacccggatactatgatggacggaactggaca

SEQ ID NO: 145694 - DNA, 249 bp, Arabidopsis thaliana
  unsure (1)..(249): unsure at all n locations
accgcaccgccgnngagnncgaagaagaagacgccacnaaccccanaggcccaaaaaggaggaaaggccgcaaggaggggcagaaagaacaacaccnaagagcnngccagcaanggangcnccagcaagcaaggcaaggccgnagcgangagggggannncgaagacgacanggagaacccacagggacaacagcaggaacaacagcnannccagcagngcngcaacgagcnncgccaggaagagccag

SEQ ID NO: 145695 - DNA, 276 bp, Arabidopsis thaliana
  unsure (1)..(276): unsure at all n locations
cacgcgnccggacagaaggggcagagaaaagagaannaaangaagaagtaanggagaaggcagnncaaaaagggccaaaaagggacccaaggcgccacgacagccaacgaagaccggaaccnncaaggnngacacggcagcnncagccgnacaaagcnncgcnccgannaaccaaanccaccaacancncngcgcgnnncaaaacaaagcanangacangacccgacaagnggaggcacaccaaaacngnggncacaacaacgaagacangcgcca

SEQ ID NO: 145696 - DNA, 409 bp, Arabidopsis thaliana
  unsure (1)..(409): unsure at all n locations
ctgaacttgcaaaancaagagntttaataaatttcntacctaaacnaaaccatacgcaagagactatattaacatgcatttatcacaattcaataacatataacattcaatgatgtaatgctattacaattcatcttaccaaatcagagaaacaaatcatatatatgaaagttggtcaacgctctccatatgattgccacatcatcacacaagaaaatgacatatgtcattctacattatttaacaaaaagtttagcataactaattgagggaaaatgaaaagtcttctattgtgttaaattttccattaatatcacttttaactaccttttaaaactttaaaaatacaaatcatgctagtataaacctatttacaacttatcatatgcattttattttattttggcta

SEQ ID NO: 145697 - DNA, 331 bp, Arabidopsis thaliana
  unsure (1)..(331): unsure at all n locations
cacatagcaataaanggcaaacacggagaattaatttttgcagcncccgcncncngcggcggcctcaccaacgcanccatctaccgcaccgccgnngagnncgaagaagaagacgccacnaaccccacaggcccaaaaacgaggaaaggccgcaaggaganacagaaagaacaacaccaaagagcnggccagcaanggaagcnccagcaagcaaggcaaggaccgagcgangagacagaanncgaagacgacanggagaacccacagggacaacagcaggaacaacagcnanngcagcagggcngcaacgagcancgccaggaagagccag

SEQ ID NO: 145698 - DNA, 416 bp, Arabidopsis thaliana
  unsure (1)..(416): unsure at all n locations
cggaanaaccgggccgacgcacgcgnccggaaaagggttaagctcagcaancncctaagtaanacttttttgggnncnccncnnccaggacggctgctttgcgaggcagtgacgtccccttcctcctcagctacagaacgagtgtaacctcgacaacctagatgttctccaagccaccgaaactatcaagagtgaagccggtcagatcgagtactgggaccacaaccaccctcagctccgatgtgtnggtgtttccgttgctcgttatgtaattgaacaaggcggtctttacttgcccaccttcttcacttccccaaaaatttcctacgtcgttcaaggaacgggtattaagcggagagtggtccctggatgtgccgagaccttatggacttgagccgtgcaggacaacaacaggc

SEQ ID NO: 145699 - DNA, 241 bp, Arabidopsis thaliana
  unsure (1)..(241): unsure at all n locations
gggtcaagtncaacacgcgcgagaccactttgactcacagcagcggcccagctagctacggaaggccaagggtggctgcagcttaagagcttaaaaccgcggctcaacaatgaacctctagtactgtaaaaggaagttaaatagtacgaagtaataataataatgtacgaacatgtgacaggttttgttgaggtttacctgtaaaatgccactccttttctgaataaatcttttttcgatc

SEQ ID NO: 145700 - DNA, 434 bp, Arabidopsis thaliana
  unsure (1)..(434): unsure at all n locations
cggacgcgtgggctcacgcgagaactaaatanagatttacannangacccaannggcgctctctggcgggcanncggcgctcgcgcggacctttgtcgaaaaatatcaatcccagaatttcgcttcattatggattataaactcccagatctgctactctctatctccgattttgtgatttttcaaaccctagatttctccggaagagtttatttttttctctgtaactaaaccgagatttttttttcaaaattccgacattaccctaggttgtgtattaccgtagaaaaccctagttcctttgtggtattcttggtgtacagatcccttccttagtcagagtttttggttattagtgtntagagggttgcgatgaacaatcgaggaaggtaccctcctggaattggcgctggccgtggagcctttaaccctaa

SEQ ID NO: 145701 - DNA, 448 bp, Arabidopsis thaliana
  unsure (1)..(448): unsure at all n locations
aagaagatggttaagcgcagcaancnaaaatttacttttttccgggnnccccacacccggagcggctgtcgggagaggcaggcactccccgaccctcctcagctacagaacgagacgtaacctcgacaacctagatgttctccaagccaccgaaactatcaagagagaagccggccagatcgagtactgggaccacaaccaccctcagctccgacgtgtgggcgattccggggctcgttatggaaatgaacaaggcggtcgttactcgcccaccttctgcactggcccaaaaattacctacgccgtccaaggaacgggtatcagcggaagagtggaccctggatgtgccgagacccacaaggactcgcagtcgatgcaaggacaacaacaaggccaaccatgggaaggacgacaggaacaacatggccaaccacggggaggacaggga

SEQ ID NO: 145702 - DNA, 317 bp, Arabidopsis thaliana
  unsure (1)..(317): unsure at all n locations
ccgggcggaccaacgcgnccgggaagaaaaaggggccgagncacaaaaaataattctttcccnnggacacncnaaagcggcgggaatggcaacacngccgaacagccgcccaacgagngccagcncgancaacacaaggcgcacgaaccancccaaaacaacaagagcgagggnggacgcaccgagggcngggaccaccangcaccccagcnccgaagcaacggcnnagcccaggagcgnnncgacanagagccacagggncanaaccggcccacanncnagaacgccggcaaacacacgnngggggcacacggaag

SEQ ID NO: 145703 - DNA, 389 bp, Arabidopsis thaliana
  unsure (1)..(389): unsure at all n locations
gcgcccagcgccggaaaacatacacaaatgcaaaacaggcaactagctctttctcgncngcgcaactctcggcggggctttctcctcaccaacgcttccatctaccgcaccgttgtcgaattcgaagaagatgacgccagcaaccccgtaggtccaagacagagatgccagaaggagtttcagcaatcacaacacctaagagcttgccagagatggatgagcaagcaaatgaggcaaggacgtggtggtggtccttccctcgacgatgagttcgatttcgagggcccccagcagggataccagctactccagcagtgctgcaacgagcttcgccaggaagagccagtttgcgtttgccccaccttgaaacaagctgccagggcagttag

SEQ ID NO: 145704 - DNA, 300 bp, Arabidopsis thaliana
  unsure (1)..(300): unsure at all n locations
ccccgcacaaaaagaggcnacggangngaggaaagcnaaagcaacagaaacggcgangggaagaacagcncnganncacnggcnncgcncccaancccgacgncncncnnccnccaccnncacnncagganancancaccggncaanagcaggancanggncancancagngaacccgaagggcagaaaccaggnnccancccnaagccagagaagcngggcancaaaaggagcaaagacnagagaggacgangangagcacaagancagcancggaccccaagagaagaaagaagaaga

SEQ ID NO: 145705 - DNA, 264 bp, Arabidopsis thaliana
  unsure (1)..(264): unsure at all n locations
aagagagggggnttcatgcttgcagcgcagaactcatagttctgaccatcaaagactgcaaccagttgagaggactgcaagttcaacgccatgatcaatcggagagttcaatctcaacagacgaccataccctcgatacagtagctgctccgctcatcaacgtccatttcgccgcctttagccgtcaacgttctctggttctgttgccgtacaaaattcttaaaggttaattagataagacctaaaacgcgacgtgtaagctgc

SEQ ID NO: 145706 - DNA, 406 bp, Arabidopsis thaliana
  unsure (1)..(406): unsure at all n locations
ttattctctctcgcaaaggnngaatantttttacagagaggagannngagagggggggttttaatggcggnttcacgtgctttcgttggttgtccaaagcttgagactttattgaatcaccataatctatctccttcttcttcttcttcgtcctctgtttcacagacaccattgggtcttaatggggttcgtgttcttccgaagaacaatagaaccagacgaggtttgatccaaaaagctcgttgtgagctctctgcttcttctgattctgcgtctaatgcagctagcatctctgctcttgaacaactcaagaactctgcagctgatcgatatacaaaggaaagaagcagtattngtgtgattggacttagtattcacacagctcctgttgagatgcgtgagaagc

SEQ ID NO: 145707 - DNA, 385 bp, Arabidopsis thaliana
  unsure (1)..(385): unsure at all n locations
gaaaaccgggcgagccacgcgtccgcaaaaagaaattggtagcnagcaaaaatacgtttttccnncggggnncccacggcggaacttctgcctngcgaggcagtcacttgaggttcctcctcagctacagaacgagtgtaacctcgacaacctagatgttctccaagccaccgaaactatcaagagtgaagccggtcagatcgagtactgggaccacaaccaccctcagctccgatgtgttggtgtttccggtgctcgttatgtaattgaacaaggcggnctttacttgcccaccttcttcacttacccaaaaatttcctacgtcgttcaaggaacgggtatcagcggaagagtggtccctggatgtgccgagacctttatggac

SEQ ID NO: 145708 - DNA, 280 bp, Arabidopsis thaliana
  unsure (1)..(280): unsure at all n locations
actaggggcccctnctaaaatacagaacgagtgtaacctcgacaacctagatgttctccaagccaccgaaactatcaagagtgaagccggtcagatcgagtactgggaccacaaccaccctcagctccgatgtgttggtgtttccgttgctcgttatgtaattgaacaaggcggtctttacttgcccaccttctacactttcccaaaaatttcctacgtcgctcaaggaaccggtatcagcacaagagtggttcctggatgcgccgagaacctcatggac

SEQ ID NO: 145709 - DNA, 457 bp, Arabidopsis thaliana
  unsure (1)..(457): unsure at all n locations
aaagaacgtaaaagccccnaaacggataagtacatatttcttacgccnnaccanggcgggacgctactactgagttaaaagggccccctcggtttaattcctgactgagccggtagtaaataaaatctatatatatatatatattaaatatatatacaatagacgcatagtggttagtagctcatttgggaactagaaatgagaatttgaattgacttcaaatttacttaacggggtattttttgcttttttaatattggatttgataaatatccatgcaatgaatttttttttaatagcctagcgcatcgaacgaaattaatttgatttatacatgtactcagcaagttgacatacacccaagatattttatcttgacatgtgatgaagagatacggaatatcctctgaacaataattttctaaaaaaaaaaaaagcaaatttttgataacttaac

SEQ ID NO: 145710 - DNA, 419 bp, Arabidopsis thaliana
  unsure (1)..(419): unsure at all n locations
cagnagaaaagaagnagccnnatttttggacacgcaggagaccacccaaaaagttggnctaatttctctatacctgtgtcctcagctaccaactcaatctgatttcttaaacatgtcaaccgatcgatggttgtcttgggagaaacacctttgagttggcgctgaagatcagactgaacaggaacacggaactgtagaacaaacactacagattcttgaatgatcctcttcttgttcttccttcccacaacagcaatagtagattgagcacaccccatgctctctatctctctctctctctctctgctatgatcttatgctcacaaaatcatcctacacaacattgacatatatatatgtcaaaataaggatgttatggaacaacctgaagcagatagatccggataattctgaagctc

SEQ ID NO: 145711 - DNA, 465 bp, Arabidopsis thaliana
  unsure (1)..(465): unsure at all n locations
aaaaccgggccgacccacgcgtcagaaaaatgggtcgagnctcaacataatanatcttttgacacncnngnccncggaggggcatactgaccaacagtggcccaaccagtgccagctcgatcaactcaatgcgctcgaaccatcccaaatcatcaagagcgagggtggtcgcatcgaggtctgggaccaccatgcaccccagctccgttgctccggctttgcctttgagcgtttcgtcattgagcctcagggtcttttcttgcccactttcttgaacgccggcaaactcacgtttgttgttcacggaaggggtctaatgggaagagttattccgggatgcgccgagacgttcatggagtcaccggtatttggagaaggtcaaggtcagggtcagagtcaagggtnccgtgacatgcacctagaagtagagcacctacggtgccgtgacaccattgcacaccatct

SEQ ID NO: 145712 - DNA, 477 bp, Arabidopsis thaliana
  unsure (1)..(477): unsure at all n locations
aagaaaaatgggncgagncncaacnaaaataaatttctcnnngacacncnngancctggggagatggtttcactgcccaacagtggcccaacgagtgccagctcgatcaactcaatgcgctcgaaccatcccaaatcatcaagagcgagggtggtcgcatcgaggtctgggaccaccatgcaccccagctccgttgctccggctttgcctttgagcgtttcgtcattgagcctcagggtcttttcttgcccactttcttgaacgccggcaaactcacgtttgttgttcacggaaggggtctaatgggaagagttattccgggatgcgccgagacgttcatggagtcaccggtatttggagaaggtcaaggtcagggtcagagtcaagggttccgtgacatgcaccagaaagtagagcacctacggtgcggtgacaccattgcaacaccatctggtgtagctcaatggttctacaaca

SEQ ID NO: 145713 - DNA, 357 bp, Arabidopsis thaliana
gctttgagcatcatccaactgactgagagatgcttgaagactcacatatagtcatagtcttggaagtgctttcagcgacattctgttgtgcaaaacctgctcgcgcatcgataggcagtacatccaagcaaaggatgatggttattaatacatccgaatgttattttatgatgtcctcttttatattagaaatttagaatcattaacgctaatatgaacgtgatctttattattttattagacataacttacatataaacataaaatattcttacatacttgactttgaaatacaacaagcacaactaacatagtaaaacgtctttgatcttaacaagtcaccgaacttggatatgt

SEQ ID NO: 145714 - DNA, 229 bp, Arabidopsis thaliana
  unsure (1)..(229): unsure at all n locations
accaacaagacancaggggagacatcgggcgagnnaagggacccccccaggacgngaggccaccncnaagacagcccnacgagagcgaggagnggagacacccacgnagcccacagggcaacggccnngaggagaccancngcagcangaggncccacgagaacanngacgacccngcncgngccgacgngnacaagcccagccaaggncgcgngaccagcgncaacag

SEQ ID NO: 145715 - DNA, 276 bp, Arabidopsis thaliana
  unsure (1)..(276): unsure at all n locations
tcaacaggggcacgcccgccagcaggnnccgaacgagngccagcncgaccagcncaangcgcncgagccnncacacgnacngaagagcgaggcnggncgcancgaggngngggaccaccacgcnccncagcnccgnngcncaggngncnccnnngcacgnnacancancgagncnaagggncncaacnngcccncnnncnnnaacaccgcgaagcncnccnncgnggcnaaaggacgaggncnnangggaaaagggancccnggangcgccgaaac

SEQ ID NO: 145716 - DNA, 367 bp, Arabidopsis thaliana
  unsure (1)..(367): unsure at all n locations
acagaacgagngnaaccncgacaaccaagangnacnccaagccaccgaaacaaacaagagggaagccggncagaacgagnacggggaccacaaccacccncagcnccgangngnnnggagancacgagcacgacacgaaacagaacaaggcggacanaacnggcccaccaacaacacnnccccaaaaaannccaacgacgaacaaggaacgggnaacagcggaagagaggaccccggaagggccgagaccancaaggacacgcagccgaggcaaggacaacaacaaggccaaccanggcaaggacgacagggacaacaaggccaaccaagggaaggacagggacaacagggacaacaaggaagacaa

SEQ ID NO: 145717 - DNA, 246 bp, Arabidopsis thaliana
  unsure (1)..(246): unsure at all n locations
agaaccaagangacaaccgnggaaacaaagnccgagnccaaggcccgnncggngncannaggccgccnnngaggggccagagaccncaggaggaggaagaagaagaagaaggacgacanggacgacacgngaanggcnnagaggagaccancngcagcgccaggnngcaccgaaaccncgangacccgncncgngccgacgngnacaagccacagcncggnnacancagcacncncaacagnnacg

SEQ ID NO: 145718 - DNA, 400 bp, Arabidopsis thaliana
  unsure (1)..(400): unsure at all n locations
ctcttcgagtcgctgncgcnggngctgaagtaatatttcgtgccnccnncnncgnnnncttgcgcaagtcgccgagatttccctgacggatcaacgacggcgtctcctggacgccattccaggggtagtttcgtaaaatcatctgttcctgttgcttcttcgctgcctggtattgggatggattctatggctgctgctaaatctagtagtgttcctgctagtggtttaaccactgtctccgtcgttaccatgcctcctggactttctgagaaggctagtggaatggaggtgcagagtgaccagaagaagccattgaaagagaaaaccactaaagctgagagacgagctattcaagaagctcaaagagctgctaaagctgctgcaaaagctgatggtggga

SEQ ID NO: 145719 - DNA, 365 bp, Arabidopsis thaliana
  unsure (1)..(365): unsure at all n locations
gaanaaccgggccgagccacgcgnccgaaacagacacacanagcaaaaaagggtaaatanaatttttcncgncngcgcagcacacgggggcggcttgcggcggaccaacgcgcccacccaccgcaccgncgnngagnncgaagaagaagacgccacnaaccccanaggcccaaaaangaggaaangccgcaaggagnnncagaaagaacaacaccnaagagcnngccagcaanngangcnccagcaagcaaggcaaggccgnagcgangagnnngannncgaagacgacanggagaacccacagggacaacagcaggaacaacagcnannccagcagngcngcaacgagcnncgccaggaagagc

SEQ ID NO: 145720 - DNA, 362 bp, Arabidopsis thaliana
  unsure (1)..(362): unsure at all n locations
ttttgcaaccnncnaagaacggcncgtttttaacggctgacttgcgcctcacccactnggggttcctnctaagntacagaacgagtgtaacctcgacaacctagatgttctccaagccaccgaaactatcaagagtgaagccggtcagatcgagtactgggaccacaaccaccctcagctccgatgtgttggtgtttccgatgctcgatatgtaattgaacaaggcggtctttacttgcccaccttcttcactttcccaaaaatttcctacgtcgttcaaggaacgggtatcagcggaagagtggtccctggatgtgccgagaccttcatggactcgcagtcgatgcaaggacaacaacaag

SEQ ID NO: 145721 - DNA, 265 bp, Arabidopsis thaliana
  unsure (1)..(265): unsure at all n locations
agcanntaccgaacgagtgccagcgcgaccagctcaatgcgctcgagccagcacacgaactgaagagcgaggcaggacgcaacgaggagagggaccaccacgcccctcagcaccgtggcccaggcgaaacccaagcacgagacatcagcgagtacaaggggcgccacgagcccgcggacgaaaacaccgcaaaacacaccatcagggcaaaaggacgaggtccacaaagaaaaagagaaccctggaggcgccgaaacataccaag

SEQ ID NO: 145722 - DNA, 427 bp, Arabidopsis thaliana
  unsure (1)..(427): unsure at all n locations
ncaagagtgaagccggncagancgagaactaagacttttaaccacccncagcnccnaggggggggtgttttcgaggctcgttatgtccttcaacaaggcggtctttacttgcccaccttcttcacttccccaaaaatttcctacgtcgttcaaggaacgggtatcagcggaagagtggtccctggatgtgccgagaccttcatggactcgcagccgatgcaaggacaacaacaaggccaaccatggcaaggacgacagggacaacaaggccaaccatgggaaggacagggacaacagggacaacaaggaagacaaggccaaccatgggaaggacagggacaacagggacaacaaggacgacagggacaacaaggccaaccatgggaaggacagggacagcagggacaacaagggtttcgtgacatgc

SEQ ID NO: 145723 - DNA, 397 bp, Arabidopsis thaliana
  unsure (1)..(397): unsure at all n locations
agacatcttaaaancnncncagacaaataaatttttagaaaaaacatgnctggctgggggggaagctgaggnngnggatctcgcctgcaagngcggcaatggttgcggaggttgcaaaaggtactctgacttggagaacaccgccaccgagactcttgtcctcggtgttgctccggcgatgaactctcagtacgaggcttccggcgagactttcgttgctgagaatgatgcctgcaaatgcggatctgactgcaagtgcaacccttgtacctgcaaatgaagaacttcataaaccctaagtctgtaataacctaatgttatgttaggtttgcttatatgtaataattggctgattttccggtagttttgccggcgacgttggtctttctcttcttct

SEQ ID NO: 145724 - DNA, 464 bp, Arabidopsis thaliana
  unsure (1)..(464): unsure at all n locations
cggcacatgaatangaaangcangaataagtaaacttttaaaancngccgnnccaaagggaggaggtaacaaagctactgggccacccactgctacnaacncaccgcccccccaaggcaaactggtgctcgctgtttcaccaggggctgttacaccaggtgctaaagcatgggtattttgtatccattgagcaaagactggttgtaattgtatagcagtatctgaaaacatatcttgtggacgccctaaagcactcatggtatcattatgaatatacaaaccaaaactgtggaagcctagaaatatacatacccagttgagatgtgatatgattgcatcgcgatgcctcaggacacgatctaataaatcgttatatcgattagttggatcatagtcttttaccataaaaatggctgcatgcgcagcagcaccaactatgagaaattcaccaatccacatgtgat

SEQ ID NO: 145725 - DNA, 321 bp, Arabidopsis thaliana
  unsure (1)..(321): unsure at all n locations
gcacgaggaggaaaaangccagcgggtaaatangtttttgcgagaacgagggancngggggggaggccattcaggaagaaggggtacattccactctcgacttacctgagaaccttcaaggtcggcgattacgtcgatgtgaaggtgaatggtgcgatccacaagggtatgcctcacaagttctaccacggtcgtactggtcgtatctggaacgtcactaaacgtgccgtcggtgttgaagtcaacaaacagattggcaacaggatcataaggaagaggattcatgtgcgtgtggagcatgtgcagcaatcaagatgtgct

SEQ ID NO: 145726 - DNA, 158 bp, Arabidopsis thaliana
  unsure (1)..(158): unsure at all n locations
atcacattacctnccacgatccaagcttgcactccttgtactcgtactcatcctccggctccgaaacctccacaacacggcagtggttgaggcggtggtagcaagcctacttcacatcacagtggaaaaggtggcggtaaacccccaccccactgtgg

SEQ ID NO: 145727 - DNA, 139 bp, Arabidopsis thaliana
  unsure (1)..(139): unsure at all n locations
aaacaaaccgaggaggggttctgcaggagcnagaagccccccggagaaaacccnncagaannnggangaaacaagnagcncacaagcgagagaggacgcanngagagcncncnacaaccncncaancaaacaaccaaac

SEQ ID NO: 145728 - DNA, 299 bp, Arabidopsis thaliana
atgacccgtgggatgctcacctatacaagccatcactcggatacattagcacacttaacagctacaatcttcctatcctcagacttctccgccttagcgctcttcgtggctccatccgtaaaaacgctatggtgctaccgcaatggaacgtaaacgcaaacgcggcactctacgtgacaaacggaaaggctcatatacaaatggtgaacgacaacggagaaagagtgttcgaccaagagatctccagcggacagttactagtcgtgccacaaggctttttcggtcatgaaacatgccat

SEQ ID NO: 145729 - DNA, 273 bp, Arabidopsis thaliana
  unsure (1)..(273): unsure at all n locations
cagcngacccaaccaggccattttgtgagccgggggcgcccacaaggtcaagtatggctacaaggacgagagcaacagccacagaagaacatcttaatggatttggnacccgggtattgctcaagctttgagattgatcttcagacagcgcacaacttagaaccaagatgacaaccgtggaacatttccgagtccaagcccgttcgggtcataggccgctttgagggcagagactaggaggggagagaagagaagacgcacggacacacggat

SEQ ID NO: 145730 - DNA, 152 bp, Arabidopsis thaliana
aaggtcagtatgaaggtgaccgtggttacagtgttggcggtttcaagagtatgatgcctgaaagtggtccatctagtacccaagtattgatcctgttgattggagtccctgacgttggttcgctacttgtcttggctggattacttctagct

SEQ ID NO: 145731 - DNA, 193 bp, Arabidopsis thaliana
  unsure (1)..(193): unsure at all n locations
cagcagnnnccgaacgagngccagcncgaccagcncaangcgcncgagccnncacacgnaccgaagagcgaggcaggncgcaacgaggngngggaccaccacgcaccacagcnccgangcncaggagacncccaagcacgnnacaacaacgagacaaaggggcacaacccgcccaccaacgagaacaccgcga

SEQ ID NO: 145732 - DNA, 394 bp, Arabidopsis thaliana
  unsure (1)..(394): unsure at all n locations
gaaaaaccggggcgggccacgcgtccgcaaacgagcaagaanacaaanacaaataaattanaanttttgcaaacaagcncnnccacggccgcgcaacttggggccncggcgcgccccccaccaacgcnnccancnaccgcacgggggncgagnncgacgaagangacgccagcaaccccangggcccaagacagaaangncagaaggaggggcagcaancacagcaccnaagagcnggccagaaanggangcgcangcaaangaggcaaggccgnggnggnnggcccncccncgacgangagnncgannnggaagacgacancgagaacccacaaggcccccagcagggacanccagaccnccagcagggcngcagcgagcnncgccaggaaga

SEQ ID NO: 145733 - DNA, 339 bp, Arabidopsis thaliana
  unsure (1)..(339): unsure at all n locations
cggacgcgngggcgccaaaaaccnngaaacttttttttttttgaaacnanggctaagctcatggtcggtttcgcaactcttgccctcttcatcctcctagccaacgcatccatctaccgcacagtggtggagttcgaggaagatgatgacgtgagcaacccacaacaaggtaagtgccagagggagtttatgaagcatcagcaactaagaggttgcaagcaatggatccgcaagagagctcaacaaggaagaatcggatacgaagctgatgactttgagctcactcttgatgtcgatcttgaggacgatgagaacccaatggggcctcaacaacagtca

SEQ ID NO: 145734 - DNA, 423 bp, Arabidopsis thaliana
  unsure (1)..(423): unsure at all n locations
aaaanggcaaacaaattttnnatttncngcgcagcncncacncggggggggcttttgaaggacgcgggcggtccccccacacccgttgagttcgaagaagatgacgccactaaccccataggcccaaaaatgaggaaatgccgcaaggagtttcagaaagaacaacacctaagagcttgccagcaattgatgctccagcaagcaaggcaaggccgtagcgatgagtttgatttcgaagacgacatggagaacccacagggacaacagcaggaacaacagctattccagcagtgctgcaacgagcttcgccaggaagagccagattgtgtttgccccaccttgaaacaagctgccaaggccgttagactccagggacagcaccaaccaatgcaagtcaggaaaatttaccagacagncaagcac

SEQ ID NO: 145735 - DNA, 436 bp, Arabidopsis thaliana
  unsure (1)..(436): unsure at all n locations
cgcgtncgctcgccaaaaaccngaaaccnnaaaaataaaaactatggctaagcncanncncgggggggcaactcttgccctcttcatggtcctagccaacgcatccatctaccgcacagtggtggagttcgaggaagatgatgacgtgagcaacccacaacaaggtaagtgccagagggagtttatgaagcatcagcaactaagaggttgcaagcaatggatccgcaagagagctcaacaaggaagaatcggatacgaagctgatgactttgagctcactcttgatgtcgatcttgaggacgatgagaacccaatggggcctcaacaacagtcatctcttaaaatgtgttgtaatgaattaaggcaagtggacaagatgtgtgtgtgtcctacactgaaaaaggcggctcaacaagtcagattccagggaatgcat

SEQ ID NO: 145736 - DNA, 281 bp, Arabidopsis thaliana
  unsure (1)..(281): unsure at all n locations
cggaanaaccgggccgaccgacgcgnccggnnggctcagcagcttcagaaccaacaagacaataaagttttacancgnnncgngnnaagggacgcgggccaggtcgagaggccacctctaacacagcccnacgagagcgaggagnggagacacccacgnagcccacagggcaacggccnngaggagactancngcagcangaggncccacgagaacanngacgacccngcncgngccgacgngnacaagcccagccnaggncgcgngaccagcgncaacag

SEQ ID NO: 145737 - DNA, 470 bp, Arabidopsis thaliana
  unsure (1)..(470): unsure at all n locations
acgcgtccgnnctgggngcttggttttgngnnnnagnntagatagaatatgggacagannccgaggnnncggtgtnggattaatatgttggtcctctcgttggccatcaacttcagcttgattctaaagattttgaagggtgatagagaacgaggagattcatgggacagaacagcgtatgttagcatatggcccgtggtatccaccacggcttcagaatcttcttcgttgtcttcagcatcttgcaactatagcaagattgaagaagacgatgatagaattatcaatctcaaatttggtgatccaacggtgtatgagagatattggcaggaaaatggagaggtgacaacaatggtgatacctggatggcaatctcttagctatttttcagatgaaaacaacctctgttggtttcttgagccagagcttgccaaagagattgtgagggtgcataaggttgttgggaatgc

SEQ ID NO: 145738 - DNA, 358 bp, Arabidopsis thaliana
  unsure (1)..(358): unsure at all n locations
gagttcnacaaaaatgacgccagtaaccccataggcccaatacagaaatgtcagaaggagtttcagcaagaacagcacctaagagcttgccagagatggatgcgcaagcaaatgtggcaaggacgtggtggtggtccttccctcgacgatgagttcgatatggaagacgacatcgagaacccgcagagacgacagctactccagaagtgctgcagcgagcttcgccaagaagagccagtttgcgtttgccccaccttgagacaagctgccaaggccgttagattccagggacagcaacaccaaccagagcaagtcaaggaaatttaccaggcagctaagtacttgcctacatttgcaa

SEQ ID NO: 145739 - DNA, 253 bp, Arabidopsis thaliana
acaacacttgtcctctttgtcgatcctctgtctccatctcctccaccaaaacctctgttgatgacgacaacgaccatccagattctcctcaaacgtcaccggtttgattcaaacccccgaaggaaataagcaaatacacaagttttgttagtgaatagatcgatacaagatgtaaatcttaattttgctgatacaagatatcaaaatgtaatccatcacattatatatattggttacacagattcattcatat

SEQ ID NO: 145740 - DNA, 382 bp, Arabidopsis thaliana
aacgaaagcaagggcgcaccgttgttgtcagagtggtcatgtcatgagagggatgtgttggagctgtgaaaagagttcttgggaaaatggaaggttagattatttttcttattttggctattgatgttatgatctgtatcaaaatgctttgaacccacttgtcttacggtaaacatatagattcatcggaaaagattgtcgatatcgcggaatctgcaatgttttctatcttttctaaagcatggaacatcactctcttcactcggttattttggttcaggcgtggagtcatttgacgttgatataaaggagcagaaagtgacggtgaaaggcaacgtgcagccagacgcagttttacagaccgtgacgaaaactggaaaga

SEQ ID NO: 145741 - DNA, 407 bp, Arabidopsis thaliana
ctagattttttcttgctgacaagagaactcaaccatacaacattttcagtggatcccatttatctcaaagaaaaaatgatgaactaaggtctttgttttttgtggtcactaaagtgtagtgtggggttagccaaagggcaagtaaaatacagtccaaatacacaaacaccactcaccactgaatttacacattatttttcctttcttgttccgtacaggttttcgtatcaacaaaaaatataaattatcctaaaataattaatcgtagaacaacaaaggattgcaaacgattaccacataaatagtactgcgccgaacactttgtgttcatagatcaatactatgtatcttttgttttctattttttaaataatttttttttttatttttaattattttttatattt

SEQ ID NO: 145742 - DNA, 434 bp, Arabidopsis thaliana
caagaaaacatacacaaatagcaaaacatggctaacaagctcttcctcgtctgcgcaactctcgccctctgcttcctcctcaccaacgcttccatctaccgcaccgttgtcgaattcgaagaagatgacgccagcaaccccgtaggtccaagacagagatgccagaaggagtttcagcaatcacaacacctaagagcttgccagagatggatgagcaagcaaatgaggcaaggacgtggtggtggtccttccctcgacgatgagttcgatttcgagggcccccagcagggataccagctactccagcagtgctgcaacgagcttcgccaggaagagccagtttgcgtttgccccaccttgaaacaagctgccagggcagttagcctccatggacagcacggaccattccaatccaggaaaatttaccagtcagc

SEQ ID NO: 145743 - DNA, 431 bp, Arabidopsis thaliana
gaatcacactgagaaaaaatctatttcctttgactgtgaacagtttctttttaagtttgtcttgttgccttggtttggtggtagtggtagtggtttcaaatggagtctctttgaagccaatgtctctgtatagtttagtttgttagggttttgtttttgtacacttgcttaagctttgtacttctagtgagtttgttgtatatgcttgcttatgttaatcttataacaccgatttgtgtttcttgcttctttctcacacacagagtttatcttcaaaggacccaaaagagagtgttttagaactctaatctcaagcaatgcatactccaaaacctatgcctggatcgttggaagtgcctcagaagaaatctcctgcatcaacttctaaaactgcctggtagctcaagactttaaattcccaccctgtttcg

SEQ ID NO: 145744 - DNA, 372 bp, Arabidopsis thaliana
agctacttgaagatatagctaatttttctaagctgtaagggtgatgacaagtggtcaaatgcttaaccgaatgaagaaatcgattagagtaccaattgttcctttgtttcatgtgcttcctgaaaaatatgcatttgtttcctatataaatgaaaaagccaaaaaaaaaaggcagagaaatttgcctgaactatttttgttcttgggatttttaattcatgctttgagtgggaccttatcattggggctttagaatgggagaaagatgcttctacgcaaatggatggtctctcccatgaacaggttggaaataaagccattacagaacaaggtctctttatctctttcctgcttgctttgctcccactttgt

SEQ ID NO: 145745 - DNA, 407 bp, Arabidopsis thaliana
cttctcttacatctctatcttcttaagttctttcctttgttcttcgatttgatcaccaactctcacatatttcgaaatcgtcacactttgttgcgtgtcgtcttctctctctcataattcttgagtttcacgtctcaagatttgatcacttctgccaattttccagattgatctctctaattatggcttccatgagtttcgccttgaatcgcttctctggactctcctctaaaaccaccttatcagctgacttcaatccatcctctcgccggagttttctaccgccgactagagttggacttaagatctcttccgccgccgaatcggagcctgatctcagtgtcactgtaaatggcctgaaaatgcccatacctttcgtgatcgggtcgggtccaccgggtaccaac

SEQ ID NO: 145746 - DNA, 392 bp, Arabidopsis thaliana
caaaaagaaaatggttaagctcagcaatctcctcgttgcaaccttcggggttctcctcgtccttaacggctgccttgcgaggcagtcacttggggttcctcctcagctacagaacgagtgtaacctcgacaacctagatgttctccaagccaccgaaactatcaagagtgaagccggtcagatcgagtactgggaccacaaccaccctcagctccgatgtgttggtgtttccgttgctcgttatgtaattgaacaaggcggtctttacttgcccaccttcttcacttccccaaaaatttcctacgtcgttcaaggaacgggtatcaagcggagagtggtccctggatgtgccgagacctttattgactcgcagccgatgcaaggacaacaac

SEQ ID NO: 145747 - DNA, 424 bp, Arabidopsis thaliana
cacatagcaaaaaatggcaaacaagttgttcctcgtctgcgcagctctcgctctctgcttcctcctcaccaacgcttccatctaccgcaccgtcgttgagttcgaagaagatgacgccactaaccccataggcccaaaaatgaggaaatgccgcaaggagtttcagaaagaacaacacctaagagcttgccagcaattgatgctccagcaagcaaggcaaggccgtagcgatgagtttgatttcgaagacgacatggagaacccacagggacaacagctggaacaacagctattccagcagtgctgcaacgagcttcgccaggaagagccagattgtgtttgccccaccttgaaacaagctgccaaggccgttagactccagggacagcaccaaccaatgcaagtcaggaaaatttaccagaca

SEQ ID NO: 145748 - DNA, 436 bp, Arabidopsis thaliana
aatttgtgtgctcttagcctttactctatagttttatatcatatcaatcgacatggcgaatgtggaccgtgatcggcgtgtgcatgtagaccgtactgacaaacgtgttcatcagccaaactacgaagatgatgtcggttttggtggctatggcggttatggtgctggttctgattataagagtcgcggcccctccactaaccaaatcttggcacttatagcaggagttcccattggtggcacactgctaaccctagctggactcactctagccggttcggtgatcggcttgctagtctccatacccctcttcctcctcttcagtccggtgatagtcccggcggctctcactattgggcttgctgtgacgggaatcttggcttctggtttgtttgggttgacgggtctgagctcggtctcgtgggtcctcaactac

SEQ ID NO: 145749 - DNA, 377 bp, Arabidopsis thaliana
ctattatccatagaacaatatatattttttactatcaaaacaaccacccacagacatgacattcaaaatgtataatttcctttttatatagaagcaaaatattattttttttgtcaaacagaagcataatattctttaaatgtattttcaactctacaaaaatatttttacaaaaatatcaccggaatagaaattaaaaacaaagattctttaatcaatatcgggctatattaatcatttttataattggattaatattttcttaattgttagcactatcagatgagttctaactgttttttgcatgaaagactcggttcatgtgcagatcacgctttgcttattttgtaattcacttcactgattttgtgaaaaat

SEQ ID NO: 145750 - DNA, 407 bp, Arabidopsis thaliana
gggacaacaaggccaaccatgggaaggacagggacagcagggacaacaagggttccgtgacatgcaccagaaggtggaacatgtgagacgcggagacgtctttgccaacactccaggctctgcccactggatctacaactcaagagaacagccacttgtcatcatcgctcttctcgacatcgccaactaccaaaaccaactcgaccgcaaccctagagtgttccatttggccggaaacaaccagcagggaggctttggcggttcacagcaacaacaagaacagaaaaacttgtggagcgggttcgacgcacaggtcatagctcaagcattgaaaattgacgttcagttggctcagcagcttcagaaccaacaagacagcagaggaaacatcgttcgtgttaagggac

SEQ ID NO: 145751 - DNA, 431 bp, Arabidopsis thaliana
accagcgtcaacagctataccttgcccatcttggagtatgtcaggctcagtgccactcgtggcgttctccagggtaatgcgatggtgcttcctaaatacaacatgaacgcttacgagatcttgtactgcactggaggacaaggaaggatccaagtggtcaacgacaacggacagaacgtgttggaccaacaggtgcagaagggacagctcgtggtcatcccacaagggttcgcatacgttgtccagtcccacggaaacaagttcgagtggatctctttcaaaactaatgaaaacgcaatgatcagcactttggcgggtagaacctcgctcttgagggcattgccattggaggtcatatcaaatggtttccagatctctcccgaggaagcttggaagatcaagttcaacacacttgagaccactttgtcccg

SEQ ID NO: 145752 - DNA, 394 bp, Arabidopsis thaliana
gttgtttttggcaatcaccgaggttataacttattacttggctatttttttatgtgtcttgaaatgggaaaaactatagttacattgttacagaggcaacctcaattacataaagtaggtgagaggtagatcaaaggctacaaagaagagcattaatattgagtcattgggtagttgtggagtgttgagtagtaaatgtaacaaatattgtaaaatatctccttggaatgaggatcggagaatggttggtcatttggtctaagtaagaaattctgatcgcgtgataaagtaataagaatcgttgttagttttttttacaaggacacattaaactttagttaagcatttttgtataaccactacatttctttactaaagatatttacattcttat

SEQ ID NO: 145753 - DNA, 433 bp, Arabidopsis thaliana
gagattctgatcgacgaaaactaatctctctcctttttcttctcatctccttactagagatctctgtcttcgataatttgtttcaatcactgagaaaatggcggccgtaggagtagattcgaggcgtcctgagacagcgatggaggaaacctgtaacgtgaaaggagcggcggcgaaacaaggggaagggcttaagcagtactatctccagcacatccatgagctccagcgccagcttcgacagaagactaataacctcaatcgccttgaagctcaaaggaatgaactcaattctcgagtgagaatgctcagagaagagttacagctccttcaagaacctgggtcctatgtgggagaagtggtaaaagttatgggaaagaacaaggtcttggttaaggttcatccagaggggaagtatgttgttgatattgac

SEQ ID NO: 145754 - DNA, 158 bp, Arabidopsis thaliana
ggaagggattcgagaccttatcctcaatgccatcaagatcggctatcgccatctcgactgtgctgctgattataggaatgagaccgaagttggtgatgctcttacagaagcattcaagactggtctggttaagaaggaggatctcttcattacaacca

SEQ ID NO: 145755 - DNA, 433 bp, Arabidopsis thaliana
gaaaaaatggcaataaccaacaaattaatcattacacttcttctccttatctccatagctgtcgtccactgcttatccttccgtgtggagatcgacgagttcgagccaccacagcaaggagaacaagaaggtccccgtcgccgtcctggtggtggctctggcgagggatgggaggaagagtcgacgaatcatccataccacttcaagaagcggagtttcagtgattggttccagtcaaaggaaggttttgtgagagtgctgcctaagttcacaaaacatgcaccggctctcttccgaggaatcgagaactacagattctcgttggtggagatggagccaacaactttctttgtgcctcaccatttggatgccgatgctgtttttatagtcctacaaagtaaaggagtgatcgagtttgtgacggataaaacaa

SEQ ID NO: 145756 - DNA, 439 bp, Arabidopsis thaliana
ctagattataagttatataatcatataatattttgagttcgattagtgtaacaaaaatggggttagagaggaaagtgtacggtttggttatggtatctttggtacttatggctattgcaacgatgtgttgtgtccaagctacgatcgacgaagaagcggctaaagatgaatcatggactgattgggcaaaggagaagatcggtctcaagcacgaagacaacatccaacccactcacaccaccacgaccgttcaagacgacgcttggagagcgagtcaaaaagccgaggacgcaaaggaggcggctaaacgcaaagcagatgaagcggttggagccgcgaaagagaaagcgggttcggcatacgagacagctaaatcgaaagttggggagggtttgggttctgtgaaagacaaggcctcgcagagttacgactcagctgg

SEQ ID NO: 145757 - DNA, 439 bp, Arabidopsis thaliana
ccaggctctgcccactggatctacaactcatgagaacagccacttgtcatcatcgctcttctcgacatcgccaactaccaaaaccaactcgaccgcaaccctagagtgttccatttggccggaaacaaccagcagggaggctttggcggttcacagcaacaacaagaacagaaaaacttgtggagcgggttcgacgcacaggtcatagctcaagcattgaaaattgacgttcagttggctcagcagcttcagaaccaacaagacagcagaggaaacatcgttcgtgttaaaggacctttccaggtcgtgaggccacctctaagacagccctacgagagcgaggagtggagacacccacgtagcccacagggcaacggccttgaggagactatctgcagcatgaggtcccacgagaacattgacgaccctgctcgagctg

SEQ ID NO: 145758 - DNA, 434 bp, Arabidopsis thaliana
ctagttgcagccgcggatctcgccattttcttttaaccagcttgaccgcaaccttagaccatttttgatagccggaaacaacccacaagggcaggaatggctacaaggccgtaagcaacagaagcaaaacaacatcttcaatggcttcgcacctgagatcttggctcaagccttcaagatcaatgtcgagacagctcagcagctccagaaccagcaagataaccgtggcaacatcgtcaaggtcaacggacctttcggcgtcattaggccacccttgagacgcggcgaaagcggtcatcaaccacatgaaatagctaatggattagaggagactctgtgcaccatgcgatgcactgaaaacctcgatgacccgtcggatgctgacgtgtacaagccatcacttcgatacattagcacacttaacagctacaatc

SEQ ID NO: 145759 - DNA, 234 bp, Arabidopsis thaliana
ctccagcattgaccggttaggatcgtaatattcctacagtttatcatagaaagaaaacgctttgttgaatcagattcggaatcaagataagccatcaaaaattatgagaagatccacagagcaccaatttatgatagataaacaagtggaggaacacgtttagaaaaacaagccgcgttcttaccttacaagttaaggacatgtcggcatacacgctcagaaggttacttctgc

SEQ ID NO: 145760 - DNA, 415 bp, Arabidopsis thaliana
gacgtcggagcgtgaagggcactctcatgaaaagcgcgttagagaagaattaacgtcaagacccgagacgcaacttcactcggtcgtggctaattctccgattaggttttcgattctcttcgtcttcgtctctgaagcgaccaaaaaccctaattctatcaattcgaaatcttcaatttcacatgggtgaacattcaccttctcaaccatcatctcatactcttcctccaaaccaaccggaatcacccaatcacgaaacccctaatccaattccaccggaaaccaacgatgacgactccgcctcatccgcctcatccgccggagtttctggctcaatcgtctcatcaaccaccattgaagcaccacaagtcactgaattaggcaatgtatcgtctccacctttcaagatccctct

SEQ ID NO: 145761 - DNA, 417 bp, Arabidopsis thaliana
ctcttcttcttcttcaagccgcggctttagatccctacttctctcgacacttatagagtttcagtcatggccgcctccgcagaaatcgacgctgagattcaacagcagcttaccaatgaggttaagctcttcaaccgttggagctttgatgacgtttcggttacggatattagtcttgtggactacattggtgttcagccatcgaagcacgcaacttttgttccccatactgctggacgatactctgtgaagaggttcagaaaggcgcagtgcccaattgttgagaggctcactaactctctcatgatgcacggaagaaacaatggtaagaagttgatggctgtcaggatcgtcaagcatgccatggagattattcacctcttgtctgacttgaacccgattcaagttatcattgat

SEQ ID NO: 145762 - DNA, 399 bp, Arabidopsis thaliana
ccaagatagacaggcgttctggtaaggagatttgaaaagagcccaagtttttgaagaatggtgacgctggtatggttaagatgaccccaaccaagcccatggttgttgagactttctccgagtacccacctttgggacgtttcgctgttagggacatgaggcagaccgttgctgttggtgttattaaaagcgtggacaagaaggacccaactggagccaaagtcaccaaggctgcagtgaagaagggtgccaaatgatgagactttcgttatgatcgactctcttatgagtttctttggttcttaaaactttgatggcggttgaagccttttcttttttctctttatttctgagactttctctctccctcctttttgatatctttgagacttttattat

SEQ ID NO: 145763 - DNA, 421 bp, Arabidopsis thaliana
ctcagaactcaaaaaaaaaaaacatccaacaccaaagacaatggagatgagtttgcgtctcgcttcatcttcaacctcaaacccaatttgtctactaaaccctggaaaaaaccttaatttcccaatccgaaaccatagaatccctaaaacttcgaaacccttttgcgttaggtcttcaatgagcttgtctaaaccacccagacaaaccttatctagtaactgggatgtatctagcttctccattgattccgttgctcaatctccttcaagactcccaagtttcgaagaactcgataccaccaacatgttgctccgtcaaagaatcgtctttttgggctctcaggttgatgatatgacggcggatctggttataagtcagctattgttactagttgctgaggactcagaaagagacattacg

SEQ ID NO: 145764 - DNA, 432 bp, Arabidopsis thaliana
aacaaaaagaaaaaggttaagctcagcaatctcctcgttgcaaccttcggggttctcctcgtccttaacggctgccttgcgaggcagtcacttggggttcctcctcagctacagaacgagtgtaacctcgacaacctagatgttctccaagccaccgaaactatcaagagtgaagccggtcagatcgagtactgggaccacaaccaccctcagctccgatgtgttggtgtttccgttgctcgttatgtaattgaacaaggcggtctttacttgcccaccttcttcacttccccaaaaatttcctacgtcgttcaaggaacgggtatcagcggaagagtggtccctggatgtgccgagaccttcatggactcgcagccgatgcaaggacaacaacaaggccaaccatggcaaggacgacagggacaacaaggc

SEQ ID NO: 145765 - DNA, 436 bp, Arabidopsis thaliana
caaaacaaaacacacccaaatatgcataagcttttgttttctcttctctccgtcgtctcactctcatttctcctcttcttccatggcgccgaggcacgccagcgagaggcgccgtttccaaacgcctgccatttcagccaaatcaacagcctcgcgcccgctcaggcgacgaagttcgaagccggtcagatggaagtatgggaccacatgagccctgagctccgatgcgccggtgtaacggtggctcgcatcacccttcagcccaattccattttcttgcccgctttctttagcccacctgcccttgcttacgttgtccaaggagaaggagttatggggacgattgcttctggttgtcctgagacttttgcagaagttgaaggatcatcaagaagaggaggaggaggagacccgggtcgacgttttgaggacatgc

SEQ ID NO: 145766 - DNA, 373 bp, Arabidopsis thaliana
gttgaacatactcccttggaaggtgttgttgttgataagaaagaagagaaacccccaacggcgttgagttctgagctagttaaaaaagtggaagaagatgtacccgtttcttctgggatttcaaggggtatggatgctgtaagcattgatagacctataactgaaatggtcaataatattgcgtttaatcatatggaccaaaaagatataaagaagattaagcaggattttgatacttctgtgggagctgttaaggatgcctcatccggtttggactcatctgtaacttaaggtaaagatgaacctggggaggggaattctgaaaatattgtaatcatggtacggttctcatgattaagagcttcttcaggat

SEQ ID NO: 145767 - DNA, 391 bp, Arabidopsis thaliana
caaaaagaaaatggttaagctcagcaatctcctcgttgcaaccttcggggttctcctaggccttaacggctgccttgcgaggcagtcacttggggttcctcctcagctacagaacgagtgtaacctcgacaacctagatgttctccaagccaccgaaactatcaagagtgaagccggtcagatcgagtactgggaccacaaccaccctcagctccgatgtgtcggtgtttccgttgctcgttatgtaattgaacaaagaggtctatacttgcccaccttcttcacttccccaaaaatttcctacgtcgttcaaggaacgggtatcatctgaagagtggtccctggatgtgccgagaccttcatggactcgcaagcgatgctaggacaacaa

SEQ ID NO: 145768 - DNA, 431 bp, Arabidopsis thaliana
aagaaaacatacacaaatagcaaaacatggctaacaagctcttcctcgtctgcgcaactctcgccctctgcttcctcctcaccaacgcttccatctaccgcaccgttgtcgaattcgaagaagatgacgccagcaaccccgtaggtccaagacagagatgccagaaggagtttcagcaatcacaacacctaagagcttgccagagatggatgagcaagcaaatgaggcaaggacgtggtggtggtccttccctcgacgatgagttcgatttcgagggcccccagcagggataccagctactccagcagtgctgcaacgagcttcgccaggaagagccagtttgcgtttgccccaccttgaaacaagctgccagggcagttagcctccagggacagcacggaccattccaatccaggaaaatttaccagtca

SEQ ID NO: 145769 - DNA, 437 bp, Arabidopsis thaliana
attggaatcatcaagattggaattttgcagagctcaatgaaacagaacataatgaatttgctttaccaagaaacgtatgcgatttcgatcttcctcactgagaacaaactgcattttcaattgaacatttccatagccattgaatgaaagtttctcttccaagaaaccactctctattatcattcttgtctctatctctacctccaaaaaccctcaaattcagaaaatctaataaaaccactaatttgatctctagagttgtaaaaagaacacacctttctgtaatatttggtttccattaacatctaacagagtaacaatcaaattctctcggagcctcgtaactggactgtgccacattgaatccaagaagaaacaataaactgtcaaaatttctcaaaaagttccaaactttagaaattcaaaaggatcagtag

SEQ ID NO: 145770 - DNA, 440 bp, Arabidopsis thaliana
agaggaagaaaaatgggtcgagtctcatctattatctctttctctttgacactcttgatcctcttcaatggctacactgcccaacagtggcccaacgagtgccagctcgatcaactcaatgcgctcgaaccatcccaaatcatcaagagcgagggtggtcgcatcgaggtctgggaccaccatgcaccccagctccgttgctccggctttgcctttgagcgtttcgtcattgagcctcagggtcttttcttgcccactttcttgaacgccggcaaactcacgtttgttgttcacggaaggggtctaatgggaagagttattccgggatgcgccgagacgttcatggagtcaccggtatttggagaaagtcaaggtcagggtcagagtcaagggttccgtgacatgcaccagatagtagagcacctacggtgcggtgacac

SEQ ID NO: 145771 - DNA, 420 bp, Arabidopsis thaliana
acaaaaagaaaatggttaagctcagcaatctcctcgttgcaaccttcggggttctcctcgtccttaacggctgccttgcgaggcagtcacttggggttcctcctcagctacagaacgagtgtaacctcgacaacctagatgttctccaagccaccgaaactatcaagagtgaagccggtcagatcgagtactgggaccacaaccaccctcagctccgatgtgttggtgtttccgttgctcgttatgtaattgaacaaggcggtctttacttgcccaccttcttcactttcccaaaaatttcctacgtcgttcaaggaacgggtatcagcggaagagtggtccctggatgtgccgagaccttcatggactcgcaaccgatgcaaggacaacaacaaggccaaccatggctaggacgacagg

SEQ ID NO: 145772 - DNA, 429 bp, Arabidopsis thaliana
cgccatcacaccctccttctggtggatattactcatctcctccaccaagaactccggttgttgtgactccaccatcacccattgttgatccaggcacacccatcattggaggaagcccaccaactcctatcattgacccaggcactcctggaactcctttcattcatgttccagtgattggtgggaaaggagcaggaacatgcgattactggagaaaccaccctacattgatatggggcttgcttggatggtggggaactgttggaggagcttttggtacagtcagtattcccagtagcattccagggtttgatcctcacatgaaccttcttcaggcactttccaacacccgctctgatcccattggtgctctctaccgtgaaggcacagcttcttggttaaactccatggtcaaccataagttccctt

SEQ ID NO: 145773 - DNA, 433 bp, Arabidopsis thaliana
gtggaacgcaaacgcgaacgctattctttacgtgacagacggggaagcccaaatccagatcgtaaacgacaatggtaacagagtgtttgacggacaagtctctcaaggacagctcatagccgtaccacaaggtttctcggtggtgaaacgcgcaacatgcaaccgattccagtgggttgagttcaaaacaaacgctaacgcgcaaatcaacactctggcgggacgaacctcagtcttgagaggtttaccacttgaagtcataaccaatgggttccaaatctcacccgaagaagcaaggagggtcaagttcaacacgctcgagaccactttgactcacagcagttgcccagctagctacggaaggccaagagtggctgcagcttaagagcttaaaaccgcggcttaacattgaaccgctactgtaaaaggaagt

SEQ ID NO: 145774 - DNA, 424 bp, Arabidopsis thaliana
caaaaaggctcgagtctcttctcttctttctttcttcttaacacttttgatccttttccatggctacgcggctcaacagggtcagcagggtcagcagtttccgaacgagtgccagctcgaccagctcaatgcgctcgagccgtcacacgtactgaagagcgaggctggtcgcatcgaggtgtgggaccaccacgctcctcagctccgttgctcaggtgtctcctttgcacgttacatcatcgagtctaagggtctctacttgccctctttctttaacaccgcgaagctctctttcgtggctaaaggacgaggtcttatgggaaaagtgatccctggatgcgccgaaacattccaagactcatcagagttccaaccacgcttcgaaggtcaaggtcaaagccagagggtccgtgacatgcaccag

SEQ ID NO: 145775 - DNA, 436 bp, Arabidopsis thaliana
ggaagaaaaatgggtcgagtctcatctattatctctttctctttgacactcttgatcctcttcaatggctacactgcccaacagtggcccaacgagtgccagctcgatcaactcaatgcgctcgaaccatcccaaatcatcaagagcgagggtggtcgcatcgaggtctgggaccaccatgcaccccagctccgttgctccggctttgcctttgagcgtttcgtcattgagcctcaaggtcttttcttgcccactttcttgaacgccggcaaactcacgtttgttgttcacggaaggggtctaatgggaagagttattccgggatgcgccgagacgttcatggagtcaccggtatttggagaaggtcaaggtcagggtcagagtcaagggttccgtgacatgcaccagaaagtagagcacctacggtgcggtgaca

SEQ ID NO: 145776 - DNA, 426 bp, Arabidopsis thaliana
agaaaacatacacaaatagcaaatcatggctaacaagctcttcctcgtctgcgcaactctcgccctctgcttgctgctcaccaacgcttccatctaccgcaccgttgtcgaattcgaagaagatgacgccagcaaccccgtaggtccaagacagagatgccagaaggagtttcagcaatcacaacacctaagagcttgccagagatggatgagcaagcaaatgaggcaaggacgtggtggtggtccttccctcgacgatgagttcgatttcgagggcccccagcagggataccagctactccagcagtgctgcaacgagcttcgccaggaagagccagtttgcgtttgccccaccttgaaacaagctgccagggcagttagcctccatggacagcacggaccattccaattcaagaaaatttacca

SEQ ID NO: 145777 - DNA, 433 bp, Arabidopsis thaliana
aacaaacaaaaagaaaatggttaagctcagcaatctcctcgttgcaaccttcggggttctcctcgtccttaacggctgccttgcgaggcagtcacttggggttcctcctcagctacagaacgagtgtaacctcgacaacctagatgttctccaagccaccgaaactatcaagagtgaagccggtcagatcgagtactgggaccacaaccaccctcagctccgatgtgttggtgtttccgttgctcgttatgtaattgaacaaggcggtctttacttgcccaccttcttcacttccccaaaaatttcctacgtcgttcaaggaacgggtatcagcggaagagtggtccctggatgtgccgagaccttcatggactcgcagccgatgcaaggacaacaacaaggccaaccatggcaaggacgacagggacaacaa

SEQ ID NO: 145778 - DNA, 422 bp, Arabidopsis thaliana
cacgaaaatggtagcagcttggctggctcgagcagaaccaccattgggaccagaggtagttcgatatatgttagatgcagattcgcatgcatggagcatgaggaaaagcaaagcgaattggtacagaattgttggtgttttagcttgggcagtgggtttagctaagtggttggataatatcaggcggtggaggaatccagtgacgacggtgctagtccatattctatatctggttcttgtttggtaccctgatttggtagtcccgactgcattcttgtacgtggtgatgatcggagtttggtactaccggtttagacccaagataccggctggtatggatatccgcttatcacaagctgaaaccagcgatcctgatgagctagatgaagaattcgacaccataccaagctcaaggcgaccag

SEQ ID NO: 145779 - DNA, 433 bp, Arabidopsis thaliana
atagagcctcagggtcttttcttgcccactttcttgaacgccggcaaactcacgtttgttgttcacggaaggggtctaatgggaagagttattccgggatgcgccgagacgttcatggagtcaccggtatttggagaaggtcaaggtcagggtcagagtcaagggttccgtgacatgcaccagaaagtagagcacctacggtgcggtgacaccattgcaacaccatctggtgtagctcaatggttctacaacaatggaaatgagcctctcattcttgttgcagccgcggatctcgccagcaaccagaaccagcttgaccgcaaccttagaccatttttgatagccggtaacatcccacaagggcaggaatggcttcaaggccgaaagcaacaaaagcaaaacaacatcttcaatggcttcgcacctgagatct

SEQ ID NO: 145780 - DNA, 420 bp, Arabidopsis thaliana
gagattctcttcaagctcaggcctttaggctttaggtttcttttgggagtcttcttgagctctgtaatcactctctagaagcttattttgcctcctaatgttattagggtgttgtactggaatctttaggatgaaccaaggaagatgagtctctcggtctttcaaaaaccaagtcttgtaatgaggagctgtccactgttgtaaagtaagtcattaagatggaatcgtttgcaggttcttgtgaaattgttgaggagaaggatgcggtaaggttagccaaacattctagcagatattgtatgtcacctttgggatcaagtaaagatatggagcagcgtcctgcattgaagtcagggtaccaaggttctatggagtatgacattgatcagcttttccagtctataactataaaaccatcac

SEQ ID NO: 145781 - DNA, 437 bp, Arabidopsis thaliana
taaatattctcaccaatctttacttcaataaaaatatatttatttaataacactaggaagaaactcgactgttacatcaaggtgaaaaagaagaacaatggaaaccaaacaagagtaaatcaaatcttaattaaccaaccaaaaacggaagtagcatatgcttgactagttgatacagacgtttagtgatgatggtgtctgaaagagtctaaccaccttgtgagacattctaaaggtgacaactttagaacattgagtattggtccgaccacgacttggagcttaatcccacctggctttgagctaatgaataatggattcatggtttggtgagcttgatgagatcgtggcgtgtcttgtgcacggctattggagaattcgggtcacagtattagaattcaaggtcaccgctgatctagtagacataattgaattca

SEQ ID NO: 145782 - DNA, 375 bp, Arabidopsis thaliana
gggaaggacagggacagcagggacaacaagggttccgtgacatgcaccagaaggtggaacatgtgagacgcggagacgtctttgccaacactccagactctgcccactggatctacaactcatgagaacagccacttgtcatcatcgctcttctcgacatcgccaactaccaaaaccaactcgaccgcaaccctagagtgttccatttggccggaaacaaccagcagggaggctttggcggttcacagcaacaacaagaacagaaaaacttgtggagcgggttcgacgcacaggtcatagctcaagcattgaaaattgacgttcagttggctcagcagcttcagaaccaacaagacagcagaggaaacatcgttc

SEQ ID NO: 145783 - DNA, 431 bp, Arabidopsis thaliana
ctttgccaacactccaggctctgcccactggatctacaactcaggagaacagccacttgtcatcatcgctcttctcgacatcgccaactaccaaaaccaactcgaccgcaaccctagagtgttccatttggccggaaacaaccagcaaggaggctttggcggttcacagcaacaacaagaacagaaaaacttgtggagcgggttcgacgcacaggtcatagctcaagcattgaaaattgacgttcagttggctcagcagcttcagaaccaacaagacagcagaggaaacatcgttcgtgttaagggacctttccaggtcgtgaggccacctctaagacagccctacgagagcgaggagtggagacacccacgtagcccacagggcaacggccttgaggagactatctgcagcatgaggtcccacgagaaca

SEQ ID NO: 145784 - DNA, 416 bp, Arabidopsis thaliana
atttcagtcgccctatgaaggcggccgaggtcaaggtcagtatgaaggtgaccgtggttacggtggtggcggttacaagagcatgatgcctgaaagtggcccatctagtacccaagtattgtccctgttgattggagtccctgtcgtcggttcgctacttgccttggctggattacttctagctggttcggtgatcggcttaatggttgctttaccactatttctcctcttcagcccggttatagtcccagcggctctaactatcgggcttgcaatgacaggctttttagcctcggggatgttcggtctaaccgggcttagctcaatctcatgggtcatgaactatcttcgtgggacaaggaggactgtgcctgagcaattggagtatgcttagaggagaatggctgatgcggttg

SEQ ID NO: 145785 - DNA, 388 bp, Arabidopsis thaliana
gaaaatggttaagctcagcaatctcctcgttgcaaccttcggggttctcctcgtccttaacggctgccttgcgaggcagtcacttggggttcctcctcagctacagaacgagtgtaacctcgacaacctagatgttctccaagccaccgaaactatcaagagtgaagccggtcagatcgagtactgggaccacaaccaccctcagctccgatgtgttggtgtttccgttgctcgttatgtaattgaacaaggcggtctttacttgcccaccttcttcacttccccaaaaatttcctacgtcgttcaaggaacgggtatcagcggaatgagtggtccctggatgtgccgagaccttcatggactcgcagccgatgcaaggacaacaaca

SEQ ID NO: 145786 - DNA, 441 bp, Arabidopsis thaliana
cacaaatagcaaaacatggctaacaagctcttcctcgtctgcgcaactctcgccctctgcttcctcctcaccaacgcttccatctaccgcaccgttgtcgaattcgaagaagatgacgccagcaaccccgtaggtccaagacagagatgccagaaggagtttcagcaatcacaacacctaagagcttgccagagatggatgagcaagcaaatgaggcaaggacgtggtggtggtccttccctcgactatgagttcgatttcgagggcccccagcagggataccagctactccagcagtgctgcaacgagcttcgccaggaagagccagtttgcgtttgccccaccttgaaacaagctgccagggcagttagcctccagggacagcacggaccattccaattcaggaaaatttaccagtcagcttagtacttgcctaacatt

SEQ ID NO: 145787 - DNA, 365 bp, Arabidopsis thaliana
gtgaagcatgggtacaatgtctagagcatcagccacaaaaatacatcttcaatggattaagaccacacggtattgatcaagctaagaagattgatcttaagacaacacagcaccttgataaccaatatgacacccggagaaacattgtccgagttcaaaggccgtgcggtgtcattaggccgactcagaggggccatgagtcctcacagcggagggagaagaatatgaaggacgactcgacacgactcgggaatgtgttataggagaccatctgctgggccaggtgcaccgataacctcgatgatccgtctcgtgctgacgtgttcaatccacagttcggttacattaacactctcaacagttac

SEQ ID NO: 145788 - DNA, 435 bp, Arabidopsis thaliana
  unsure (1)..(435): unsure at all n locations
gaattataattcttcgactccgtgcgataagtttcctaaaaaatcgaagaaagatcgatggctctagatatctgcgtgaaggttgccgtcggtgctcctgatgttctcggcgactgtccgtttagccaacgtgttcttctgacacttgaggagaagaagcttccctacaagacccatctgattaacgtctccgacaaaccccaatggttcttagacattagtccagaggggaaagttccggtggtgaagcttgatggcaaatgggtggctgattctgacgtaattgttggacttcttgaagagaaatatccagagccttctctcaagactcctcctgaatttgcttctgtaggatccaaaatctttggagcttttgtgactttcttgaagagcaaagacgcttatgacggatccgagaaggctntggttgatgag

SEQ ID NO: 145789 - DNA, 436 bp, Arabidopsis thaliana
caaaaagaaaatggttaagctcagcaatctcctcgttgcaaccttcggggttctcctcgtccttaacggctgccttgcgaggcagtcacttggggttcctcctcagctacagaacgagtgtaacctcgacaacctagatgttctccaagccaccgaaactatcaagagtgaagccggtcagatcgagtactgggaccacaaccaccctcagctccgatgtgttggtgtttccagtgctcgttatgtaattgaacaaggcggtctttacttgcccaccttcttcacttccccaaaaatttcctacgtctgtcaaggaacgggtatcagcggaagagtggtccctggatgtgccgagaccttcatggactcgcagccgttgcatggacaacaactaggccaaccatggcaaggacgacaggggcaacaagggcaacca

SEQ ID NO: 145790 - DNA, 432 bp, Arabidopsis thaliana
tctcatcttgttctgcacagaaacatgttctgatcatcagaattataacatgagcttacgctgtccaagtccgcgtaagaagtcaacaagaccagctctgcctgcatatttaccaaacgccaataatcgtttgccatgatccccaacaatgagctcataatcacacaaagtcactctctcagaaagaatctgcgattggataccccttttggcaacattcctcaggatcttagataggacaaaaaggataaatgaaaagtgtaatactttatccaacaaaggcatgtactctttctgtgccttatgagtttgcgaaatgaaagcgtatgctctttctggaagaatcatttttagctggaaacagaatcaaatctcataaactggtatttatatagtaataaaaaaggaactcttttaatgcaaattcccaca

SEQ ID NO: 145791 - DNA, 433 bp, Arabidopsis thaliana
gttaattagcggcatattctctttattactcatggtttcaaaaataagattccttaataaatatgctgctatatcattacatcgaaaattcctagctctcaccatctttaacttattatatattttttttttgttgggatcgatctaccctaacgttaaaacatctattccaacaaaactgcgtgcagtttttattcatgggatggcaaaatttgatattaacggacacaaatgctcaaggagcaatgaaaagactaattggtaattaaaaataaaataaaaactaataagtaaattagagtgatacaaaacagcaaaaatgagagaaaagagttaaacaatatgcgtagaattgagcgtcggttcatggtgccaagtggcatgggaacatacgggacaacacattcggtctgcgtcgatatgagttgataga

SEQ ID NO: 145792 - DNA, 425 bp, Arabidopsis thaliana
caaaaagaaaatggttaagctcagcaatctcctcgttgcaaccttcggggttctcctcgtccttaacggctgccttgcgaggcagtcacttggggttcctcctcagctacagaacgagtgtaacctcgacaacctagatgttctccaagccaccgaaactatcaagagtgaagccggtcagatcgagtactgggaccacaaccaccctcagctccgatgtgttggtgtttccgttgctcgttatgtaattgaacaaggcggtctttacttgcccaccttcttcacttccccaaaaatttcctacgtcgttcaaggaacgggtatcagcggaagagtggtccctggatgtgccgagacctttatggactcgcagccgatgcaaggacaacaacaaggccaaccatggcaaggtcgacagggacaac

SEQ ID NO: 145793 - DNA, 439 bp, Arabidopsis thaliana
cagaaaccaaagaaatagccaacttttcactttcgatcatttccaaaactatcatcggattttatagtttcaagcaaaacaaacaaccctcctacgctttgcttttaattattttcttctttgcttccatcatattcatgctctctctcacagaccacaaataattttacacgtttatcgattaactaattatataagggtcttttatataaactcctaaattatgatctaagatattgtgattgattggttctgttttttttgtaagacctcatccaaaatagctcatgttcggctggtcgaagatagatatgcaggtcgccaaaaacaaaacaaaaataataagttttgatcctatcggtttggtccaaaatgatcatttcggctcatcaatatcctataatatcatcaaatgtccattcgtattaagcctgaatta

SEQ ID NO: 145794 - DNA, 404 bp, Arabidopsis thaliana
caaaaagaaaatggttaagctcagcaatctcctcgttgcaaccttcggggttctcctcgtccttaacggctgccttgcgaggcagtcacttggggttcctcctcagctacagaacgagtgtaacctcgacaacctagatgttctccaagccaccgaaactatcaagagtgaagccggtcagatcgagtactgggaccacaaccaccctcagctccgatgtgttggtgtttccgttgctcgttatgtaattgaacaaggcggtctttacttgcccaccttcttcacttccccaaaaatttcctacgtcgttcaaggaacgggtatcagcggaagagtggtccctggatgtgccgagaccttcatggactcgcagccgatgcaaggacaacaacaaggccaaccat

SEQ ID NO: 145795 - DNA, 423 bp, Arabidopsis thaliana
cacatagcaaaaaatggcaaacaagttgttcctcgtctgcgcagctctcgctctctgcttcctcctcaccaacgcttgcatctaccgcaccgtcgttgagttcgaagaagatgacgccactaaccccataggcccaaaaatgaggaaatgccgcaaggagtttcagaaagaacaacacctaagagcttgccagcaattgatgctccagcaagcaaggcaaggccgtagcgatgagtttgatttcgaagacgacatggagaacccacagggacatcagcaggaacaacagctattccagcagtgctgcaacgagcttcgccaggaagagccagattgtgtttgccccaccttgaaacaagctgccaaggccgttagactccagggacagcaccaaccaatgctagtcaagaaaatttaccagac

SEQ ID NO: 145796 - DNA, 419 bp, Arabidopsis thaliana
  unsure (1)..(419): unsure at all n locations
caaaaagaaaatggtttagctcagcaatctcctcgttgcaaccttcggggttctcctcgtccttaacggctgccttgcgaggcagtcacttggggttcctcctcagctacagaacgagtgtaacctcgacaacctagatgttctccaagccaccgaaactatcaagagtgaagccggtcagatcgagtactgggaccacaaccaccctcagctccgatgtgttggtgtttccgttgctcgttatgtaattgaacaaggcggtctttacttgcccacctttcttacttccccaaaaatttcctacgtcgttcaaggaacgggtatcagcggaagagtggtccctggatgtgccgagaccttcatggactcgcagncgatgcaaggacaacaacaaggccaaccatggcaaggacgacagg

SEQ ID NO: 145797 - DNA, 426 bp, Arabidopsis thaliana
accagcttgaccgcaacccaaggtcattttacttagccggaaacaacccacaaggtcaagtatggctacaaggccgagagcaacagccacagaagaacattttcaatggatttggacccgaggttattgctcaagctttgaagatcgatcttcagacagcgcagcaacttcagaaccaagatgacaaccgtggaaacattgtccgagtccaaggcccgttcggtgtcattaggccgcctttgaggggccagagaccttctgaggaggaagaatgataagaatgacgacatggtcgacacggtaatggcttagaggagaccatctgcagcgccaggtgcaccgataacctcgatgacccgtctcgtgctgacgtgtacaagccacagctcggttacatcagcactcttaacagttacgatcttccca

SEQ ID NO: 145798 - DNA, 415 bp, Arabidopsis thaliana
cggacgcgtgggaacgcaatggtgcttccacagtggaacgcaaacgcgaacgctattctttacgtgacagacggggaagcccaaatccagatcgtaaacgacaatggtaacagagtgtttgacggacaagtctctcaaggacagctcatagccgtaccacaaggtttctcggtggtgaaacgcgcaacaagcaaccgattccagtgggttgagttcaaaacaaacgctaacgcgcaaatcaacactctggcgggacgaacctcagtcttgagaggtttaccacttgaagtcataaccaatgggttccaaatctcacccgaagaagcaaggagggtcaagttcaacacgctcgagaccactttgactcacagcagtggcccagctagctacggaaggccaagagtggctgcagctt

SEQ ID NO: 145799 - DNA, 435 bp, Arabidopsis thaliana
aacaaacaaaaagaaaatggttaagctcagcaatctcctcgttgcaaccttcggggttctcctcgtccttaacggctgccttgcgaggcagtcacttggggttcctcctcagctacagaacgagtgtaacctcgacaacctagatgttctccaagccaccgaaactatcaagagtgaagccggtcagatcgagtactgggaccacaaccaccctcagctccgatgtgttggtgtttccgttgctcgttatgtaattgaacaaggcggtctttacttgcccaccttcttcacttccccaaaaatttcctacgtcgttcaaggaacgggtatcagcggaagagtggtccctggatgtgccgagaccttcatggactcgcagccgatgcatggacaacaacaaggcctaccatggcaaggacgacagggacatcaagg

SEQ ID NO: 145800 - DNA, 439 bp, Arabidopsis thaliana
aaacaaaaagaaaatggttaagctcagcaatctcctcgttgcaaccttcggggttctcctcgtccttaacggctgccttgcgaggcagtcacttggggttcctcctcagctacagaacgagtgtaacctcgacaacctagatgttctccaagccaccgaaactatcaagagtgaagccggtcagatcgagtactgggaccacaaccaccctcagctccgatgtgttggtgtttccgttgctcgttatgtaattgaacaaggcggtctttacttgcccaccttcttcacttccccaaaaatttcctacgtcgttcaaggaacgggtatcagcggaagagtggtccctggatgtgccgagaccttcatggactcgcagccgatgcaaggacaacaacaaggccaaccatggcaaggacgacagggacaacaaggccaacct

SEQ ID NO: 145801 - DNA, 420 bp, Arabidopsis thaliana
cgcgaaatttttttctgcattgtatatttccggaatatgagtaaagtttatgattggttcgaagaacgtcttgagattcaggcgattgcagatgatataactagtaaatatgttcctccgcatgtcaacatattttattgtctaggcggaattacccttacttgttttttagtacaagtagctacgggatttgctatgactttttattaccgtccaaccgttactgaagcttttgcttctgttcaatatataatgactgaagctaactttggttggttaatccgatcagttcatcgatggtcggcaagtatgatggtcctaatgatgatcctgcacgtatttcgtgtatacctcaccggtggttttaaaaaacctcgcgaattaacttgggttaccggtgtgggtctgggtgattgaccg

SEQ ID NO: 145802 - DNA, 389 bp, Arabidopsis thaliana
ctagaaaaccacatttctgagcactcttgagtctgtatcctttgctggcctaatcaggctagaattgtgaagtgtgaaagtaagcatattgacaatggctactcccacagacctaggttcctcttcacctgtatggtggtggtgacgactctgaccattaccctgcacagaagcgtacttcaaaacgtactgcttccgaaacagcaacagacgaagaaacgaagatgaagaaaaagaagaatacgaagcacaacacaaatatggcttttcctaccagcatccggatctggaacgaagaagacgagctctctatcttaaagggatatggtggattttcgagctaaaacaggactagaatccaatattgtttgggatgcgtcttattgtta

SEQ ID NO: 145803 - DNA, 424 bp, Arabidopsis thaliana
aaagaaaatggttaagctcagcaatctcctcgttgcaaccttcggggttctcctcgtccttaacggctgccttgcgaggcagtcacttggggttcctcctcagctacagaacgagtgtaacctcgacaacctagatgttctccaagccaccgaaactatcaagagtgaagccggtcagatcgagtactgggaccacaaccaccctcagctccgatgtgttggtgtttccgttgctcgttatgtaattgaacaaggcggtctttacttgcccaccttcttcacttccccaaaaatttcctacgtcgttcaaggaacgggtatcagcggaagagtggtccctggatgtgccgagaccttcatggactcgcagccgatgcaaggacaacaacaaggccaaccatggcaaggacgacagggacaacaa

SEQ ID NO: 145804 - DNA, 444 bp, Arabidopsis thaliana
ggaggagagtgtagcagatcggcgaaaatgacaaccagattcaagaagaacaggaagaagagaggtcacgtcagcgccggacatggacgtatcggtaagcaccgtaagcatcccggaggtcgtggtaacgctggaggtatgcatcaccacaggatcctcttcgacaagtaccatccaggttacttcggtaaagttggtatgaggtatttccacaagctgaggaacaagttcttctgcccaatcgttaacctcgacaagctttggtcactcgtccctgaagatgtgaaggcgaaatcaaccaaggacaatgttccgttgatcgatgtgactcaacatggtttcttcaaggatttgggtaaaggtcatttgcctgagaacaagccgttcgttgtgaatgcgaagcttatttcgaagactgctgagaagaagattaaggaagctggt

SEQ ID NO: 145805 - DNA, 368 bp, Arabidopsis thaliana
aacaaacaaaaagaaaatggttaagctcagcaatctcctcgttgcaaccttcggggttctcctcgtccttaacggctgccttgcgaggcagtcacttggggttcctcctcagctacagaacgagtgtaacctcgacaacctagatgttctccaagccaccgaaactatcaagagtgaagccggtcagatcgagtactgggaccacaaccaccctcagctccgatgtgttggtgtttccgttgctcgttatgtaattgaacaaggcggtctttacttgcccaccttcttcactttcccaaaaatttcctacgtcgttcaaggaacgggtatcagcggatgagtggtccctggatgtgccgtgtccttta

SEQ ID NO: 145806 - DNA, 367 bp, Arabidopsis thaliana
ggctcgagtctcttctcttctttttttctccttaacacttttgatccttttcgcatggctactcggctcaacagggtcagcagggtcagcagtttccgaacgagtgccagctcgaccagctcaatgcgctcgagccttcacacgtactgaagagcgaggctggtcgcatcgaggtgtgggaccaccacgctcctcagctccgttgctcaggtgtctcctttgcacgttacatcatcgagtctaagggtctctacttgccctctttctttaacaccgcgaagctctcctttgtggctaaaggacgaggtcttatgggaaaagtgaaccctggatgcgccgaaaccattcatgactcatcagagtttca

SEQ ID NO: 145807 - DNA, 407 bp, Arabidopsis thaliana
aagaaatataagaaataacaaaatggctctagtctcttctcttctttctttcttctgaacacttttgatccttttccatggctacgcggctcaacagggtcagcagggtcagcagtttccgaacgagtgccagctcgaccagctcaatgcgctcgagccgtcacacgtactgaagagcgaggctggtcgcatcgaggtgtgggaccaccacgctcctcagctccgttgctcaggtgtctcctttgcacgttacatcatcgagtctaagggtctctacttgccctctttctttaacaccgcgaagctctctttcgtggctaagggacgaggtcttatgggaaaagtgatccctggatgcgccgaaacattccaagactcatcaggagttcaaccacgcttcgaaggtc

SEQ ID NO: 145808 - DNA, 439 bp, Arabidopsis thaliana
ctaaatctctctctgattactgatactctgtctcaatctcttctttcttctaatcctttatttcttgtaagctacttctcctgaatttcgtatttgatccgtttaatccaagtttcgattttatataacaaccacatagatcctgaggttttgtgataagaaacagagagagagagaaacagagtaatggcgaacagagatgtggagagagtagggaagaaaaacagaggagctaataacaattatttctacgatgagtcttctggtgaaactcattggacttcatggctgattccggcgattgtagtggcgaatctcgctgtctttatcgctgttatgttcgttaatgattgtcctaagaaaatcaccggacctaacaaagagtgtgttgctagattcctcggaagattctcagttcaaccacttaaagagaaccctt

SEQ ID NO: 145809 - DNA, 222 bp, Arabidopsis thaliana
cggacgcgtgggtggcgatgctgtatttaccggaagccggtttacggagcccaactgcgcgctaacctagaacccacatagggtgttggtcgattaatactgctagtcggtggtcatggaatgttttatcctttatagtgtttgtaatatcttagtatccttatttatctttttcttgttaattgtttggtcttttatctcatagtttatttttatatttct

SEQ ID NO: 145810 - DNA, 233 bp, Arabidopsis thaliana
tggagtctacaatatcgtaaggtcacaaaggaaaaggcaaaggatcaaagggagcttcctcttccgatgacaagtccaagtttgatgtcgttaaggaatggaccaattggtcattgaagaaagctaaagtcgtcactcactatggcttcatccctctggtcatcttcgtcggcatgaactccgatcccaaacctcatctctttcagcttcttaaccccgtctgatccatccaa

SEQ ID NO: 145811 - DNA, 426 bp, Arabidopsis thaliana
cggacgcgtgggagaagagagaggctctgataaaaaaaaaacaaaaaaaaatgacaaaggcttattcaacacgtgtcctcacgtttctgatattgatctcgctaatggcggtgacactgaacctttttcccacggtagaggcaaagaagcggagtagagatgctcctatagtgaaaggtctctcatggaacttttaccagaaagcatgtccgaaagtcgaaaacatcatcagaaaagagctcaagaaagtcttcaagagagatattggtttagccgcagccatccttcgtatacatttccatgattgctttgttcagggatgtgaagcatcagtgctgctagctggatcagccagtggaccaggagaacaatcatcaatcccaaatctgacactacgtcaacaagcctttgtcgtcattaataacc

SEQ ID NO: 145812 - DNA, 439 bp, Arabidopsis thaliana
agaaaacatacacaaatagcaaaacatggctaacaagctcttcctcgtctgcgcaactctcgccctctgcttcctcctcaccaacgcttccatctaccgcaccgttgtcgaattcgaagaagatgacgccagcaaccccgtaggtccaagacagagatgccagaaggagtttcagcaatcacaacacctaagagcttgccagagatggatgagcaagcaaatgaggcaaggacgtggtggtggtccttccctcgacgatgagttcgatttcgagggcccccagcagggataccagctactccagcagtgctgcaacgagcttcgccaggaagagccagtttgcgtttgccccaccttgaaacaagctgccagggcagttagcctccagggacagcacggaccattccaatccaggaaaatttaccagtcagcttagtac

SEQ ID NO: 145813 - DNA, 441 bp, Arabidopsis thaliana
catggcgacacttctctcaccttcttcaagctaagttttcattttgttcactgccacagatctatggccatggatatatctctgttcttcattttcctggtcatttacgcgccgttagtctcatacgccgatgaatctcaagccgagattgatgctctcacggcgtttaaactcaacctccatgaccctctcggtgctttaacttcatgggatccttcaacaccagcagctccatgtgactggcgtggcgttggctgtactaaccaccgtgtcactgagatccgtcttcctcgtctccaactctccggacgaatctccgatcgtatctccggtctacgcatgctacggaagctcagtctccggtctaactctttcaacggtactatccctacttcactcgcttactgcacgcgcctactcttcgtctttcttcagtacaac

SEQ ID NO: 145814 - DNA, 399 bp, Arabidopsis thaliana
cacgaaaatggtagcagcttggctggcttgagcagaaccaccattgggaccagaggtaggtcgatatatgttagatgcagattcgcatgcatggagcatgaggaaaagcaaagcgaattggttcagaattgttggtgttttagcttgggcagtgggttttgctaaatggttggataatatcaagcggtggaggaatccagtgaccacggtgctagagcatattctatatctgggtcttgtttgggaccccgatttggtagtcccgactgcattcttgttcgtggtgatgatcggagtttggtactaccggtttagacccaagataccggctggtatggatatccgcttattacaagctgaaaccgtcgatcctgatgagctagatgaagaatttgacac

SEQ ID NO: 145815 - DNA, 427 bp, Arabidopsis thaliana
agaggaagaaaaatgggtcgagtttcatctattatctctttctctttgacactgtggatcctcttcaatggctacactgcccaacagtggcccaacgagtgccagctcgatcaactcaatgcagctcgaaccatcccaaatcatcaagagcgagggtggtcgcatcgaggtctgggaccaccatgcaccccagctccgttgctccggctttgcctttgagcgtttcgtcattgagcctcaaggtcttttcttgcccactttcttgaacgccggcaaactcacgtttgttgttcacggaaggggtctaatgggaagagttattccgggatgcgccgagacgttcatggagtcaccggtatttggagaaggtcaaggtcaaggtcagagtcaagggtttcgtgacatgcaccagatagttgagcaccta

SEQ ID NO: 145816 - DNA, 419 bp, Arabidopsis thaliana
ttatatatatttttgaataacttttacgccttaaaaggatgggcgattattaaaaaaaaagagggcgacggaatgcattgcaacggtccctcaaatattcagtgaaaacaaaaccaaagaggattcttcgatcttcgatgcaaagcttcttaatcagcactcacaccacatacctcaacagttcgtatggcccgaccacgagaaaccttctacggatgttcaacctctccaagtcccactcatagacctagccggtttcctctccggcgactcgtgcttggcatcggaggctactagactcgtctcaaaggctgcaacgaaacatggcttcttcctaatcactaaccatggtgtcgatgagagccctttgtctcgtgcctatctgcatatggactctttctttaaagcccgcttgtgag

SEQ ID NO: 145817 - DNA, 438 bp, Arabidopsis thaliana
gtaaccaacaagcccaagattcttgatatcgatgagtctgataaggataaccatttggctgcggtggagtacgttgaggatatgtactctttctacaaagaggttgagaaggagagccagccgaagatgtatatgcacattcagacggagatgaacgagaagatgagagccatcttggtggattggttgttggaagttcacgtcaagtttgagcttaacttggagacgctttacctcactgtcaacatcattgatcggttcctttcggtgaaagctgttcctaaacgtgagttgcagcttgtgggaatcagagctttgcttattgcttccaagtacgaagagatctggccgcctcaagtgaatgatttggtgtatgtgacggataacgcttacaacagcaagcagattctggtgatggagaagactatccttgggaac

SEQ ID NO: 145818 - DNA, 362 bp, Arabidopsis thaliana
cacatagcaaaaaatggcaaacaagttgttcctagtctgcgcagctctcgctctctgcttgcttctcaccaacgcttgcatctaccgcaccgtcgttgagttcgaagaagatgacgccactaaccccataggcccaaaaatgaggaaatgccgcaaggagtttcagaaagaacaacacctaagagcttgccagcaattgatgctccagcaagcaaggcaaggccgtagcgatgagtttgatttcgaagacgacatggtgaacccacagggactacagcaggaacaacaggtattccagcagagctgcaacaagcttcgccaggaagagccagattgtgtttgccccaccttgaaacaagctg

SEQ ID NO: 145819 - DNA, 202 bp, Arabidopsis thaliana
ccgtcgattccgtcgccacgcgtcggaccgcacgatccattccacttgtttttagcttcttcttaatccgctctgtcctctcattagattctgttcctcttcaatttttctgcatgctctcgattcttctgacgcctcttttttcccgacgctgtttcgtcaaacgcttttcgaaatggcgattttggatttctgctgggcg

SEQ ID NO: 145820 - DNA, 440 bp, Arabidopsis thaliana
aagaggaagaaaaatgggtcgagtctcatctattatctctttctctttgacactcttgatcctcttcaatggctacactgcccaacagtggcccaacgagtgccagctcgatcaactcaatgcgctcgaaccatcccaaatcatcaagagcgagggtggtcgcatcgaggtctgggaccaccatgcaccccagctccgttgctccggctttgcctttgagcgtttcgtcattgagcctcaaggtcttttcttgcccactttcttgaacgccggcaaactcacgtttgttgttcacggaaggggtctaatgggaagagttattccgggatgcgccgagacgttcatggagtcaccggtatttggagaaggtcaaggtcagggtcagagtcaagggttccgtgacatgcaccagaaagtagagcacctacggggcggtgaca

SEQ ID NO: 145821 - DNA, 330 bp, Arabidopsis thaliana
agaacgcagagccggtattaggattgagttggagaaaattgaaatgcagggagatgacctttatttgccaactgctcctaacaagcttgttaggggtatccgcgtagacagaggaatacccttacaatcagctgccaaagcccctatcatgataacttttaacgttattgatcgcgatggtgaccacagtgatgttaaaccacaggcttgcattttcaaggttggagatgattgccggcaagatgttcttgcccttcaagtgatatcttttcttagagacatatttcaagcagctggtcttaacctttatctttttacatatggagtact

SEQ ID NO: 145822 - DNA, 95 bp, Arabidopsis thaliana
ctcaaaacaagacccatcgataacagcgatcatggtggctaaagccttagcacagctgataacatgcatcatcttattctgccacgttgtagctt

SEQ ID NO: 145823 - DNA, 305 bp, Arabidopsis thaliana
gcaacaacaagaacagaaaaacttgtggagcgggttcgacgcacaggtcatagctcgagcattgaaaattgacgttcagttggctcagcagcttcagaaccaacaagacagcagaggaaacatcgttcgtgttaagggacctttccaggtcgtgaggccacctctaagacagccctacgagagcgaggagtggagacacccacgtagcccacagggcaacggccttgaggagactatctgcagcatgaggtcccacgagaacattgacgaccctgctcgtgctgacgtgtacaagcccagcctag

SEQ ID NO: 145824 - DNA, 342 bp, Arabidopsis thaliana
aaaagatccattttttaggcaaaattgttttaattgttacgtcatttaaatcaatagccgcaaaagcccacaatttcaaaaaataataatattaaaatgtaatatagaaagaagggttcgaaaaattattctttccatattatatttcttcctagtagttctaatactcgagcagattgtttagctaaaaaagctcgggttcaaaatagcatttttccatgtaaacatatcggttcttgaatggctttctttagcacaaagtattttcccgataacttaatataaataataattgtggaaaaaaaataataataatattaaaatgtttttttccagcacatc

SEQ ID NO: 145825 - DNA, 273 bp, Arabidopsis thaliana
ggtttccagatctctcccgaggaagctaggaagatcaagttcaacacacttgagaccactttgacccgcgctgccggtaggcaacaacaacagttgatcgaggagattgtcgaggcttaaatcaaaacgtttttctttttcttaataaagtatggtcagtttgtaatcacgtccctttacctttaacgtacgtgtaaaatatgtgtctgcggcacctcacttgtaataacactttcttctcataaataaaagggaagtttcgagttacatact

SEQ ID NO: 145826 - DNA, 318 bp, Arabidopsis thaliana
  unsure (1)..(318): unsure at all n locations
ntcggcccacgcgtccgcggccattttacttagccggaaacaacccacatggtcaagtatggctacaaggccgcgagcaacagccacagaagaacattttcaatggatttggacccgaggttattgctcaagctttgaagatcgatcttcagacagcgcagcaacttcagaaccaagatgacaaccgtggaaacattgtccgagtccaaggcccgctcggtgtcattaggccgcctttgaggggccagagacctcatgtggaggaagaagaataagaaggaccacatggacgacacggtaatggcttaaaggagacca

SEQ ID NO: 145827 - DNA, 335 bp, Arabidopsis thaliana
ccacccgtggtccctggatgtgccgagaccttcatggactcgcagccgatgcaaggacaacaacaaggccaaccatggcaaggacgacagggacaacaaggccaaccatgggaaggacagggacaacagggacaacaaggaagacaaggccaaccatgggaaggacagggacaacagggacaacaaggacgacagggacaacaaggccaaccatgggaaggacagggacagcagggacaacaagggttccgtgacatgcaccagaaggtggaacatgtgagacgcggagacgtctttgccaacacttcaggctctgcccactggatctacaactc

SEQ ID NO: 145828 - DNA, 438 bp, Arabidopsis thaliana
aaataacaaaatggctcgagtctcttctcttctttctttcttcttaacacttttgatccttttccatggctacgcggctcaacagggtcagcagggtcagcagtttccgaacgagtgccagctcgaccagctcaatgcgctcgagccgtcacacgtactgaagagcgaggctggtcgcatcgaggtgtgggaccaccacgctcctcagctccgttgctcaggtgtctcctttgcacgttacatcatcgagtctaagggtctctacttgccctctttctttaacaccgcgaagctctctttcgtggctaagggacgaggtcttatgggaaaagtgatccctggatgcgccgaaacattccaagactcatcagagttccaaccacgcttcgaaggtcaaggtcaaagccagaggttccgtgacatgcaccagaaagtgga

SEQ ID NO: 145829 - DNA, 418 bp, Arabidopsis thaliana
cacacaccttcttcttcttcttcttctctctctatcacaagagagtcaaatccatggcttctacttcttctctcgctctctctcaagctctcctagctcgtgcaatctctcaccatggttctgaccaacgtggatctttaccagctttctctggactcaaatccaccggttcacgcgcctcagcttcgtctcgtcgacgtatcgctcaatccatgaccaaaaaccgatctctccgtcctcttgttcgcgctgcagctgttgagactgttgagccaaccactgattcgtcgattgtggacaaatcggtcaactcgattaggtttttggctatcgatgcggtggagaaggccaaatcaggtcatcctggtcttcctatgggttgtgctccgatggctcacattttgtatgatgaggtcat

SEQ ID NO: 145830 - DNA, 441 bp, Arabidopsis thaliana
aacaaaaagaaaatggttaagctcagcaatctcctcgttgcaaccttcggggttctcctcgtccttaacggctgccttgcgaggcagtcacttggggttcctcctcagctacagaacgagtgtaacctcgacaacctagatgttctccaagccaccgaaactatcaagagtgaagccggtcagatcgagtactgggaccacaaccaccctcagctccgatgtgttggtgtttccgttgctcgttatgtaattgaacaaggcggtctttacttgcccaccttcttcacttccccaaaaatttcctacgtcgttcaaggaacgggtatcagcggaagagtggtccctggatgtgccgagaccttcatggactcgcagccgatgcaaggacaacaacaaggccaactcatggcaggacgacagggacaacaaggccaaccatgg

SEQ ID NO: 145831 - DNA, 399 bp, Arabidopsis thaliana
gcagacagtcccgttgcccaacctgcaagtaataagaagaaataagccagactactaaatgttgtaatcgagcatgtttcatacatgaatgacatcagcaacctgtcccatccaataagtttgtttacatgactagaatggaacctctagaagacaaagacgcccactttctacaatgattctataaaattctcctatcctactctattaaaaattggttagggcaccctaggctatactccatgtcaagataccaaaatattttatctataccaccaacgcctgaaacaaaaaagaggtgtagtttctgaagaatatataaatcattttagggaacctcaaaagagttttgtcagatttcaagagtgtaaagagaaggagactgaaagatcgaacttg

SEQ ID NO: 145832 - DNA, 366 bp, Arabidopsis thaliana
gagagaacaaaaaaaagaaggagcggttacatattctctggtctgtcacaagaaaaatggatatctgtatggacaaggagccagatggtgtggtggtctatgcgaacggtgattcgtgtaatccaaaccaagaaaatgtttctgagcctctcttagattcagtatcacgcgatgatgctaatgtacatacagagcttcgatatggggaagagaacatcgaagtaaacgaatatgatgttaaagagtgtactagtgagatccccgttggtaagccgataggagatgattttgagtctaaagatgtcactaagtcaagtttacatgcaaagcatgcttcaaaatcaggtagagggattaacaaacaag

SEQ ID NO: 145833 - DNA, 389 bp, Arabidopsis thaliana
ccgagtccaaggcccgttcggtgtcattaggccgcctttgaggggccagagacctcaggaggaggaagaagaagaagaaggacgacatggacgacacggtaatggcttagaggagaccatctgcagcgccaggtgcaccgataacctcgatgacccgtctcgtgctgacgtgtacaagccacagctcggttacatcagcactctcaacagttacgatctccccatccttcgcttcatccgtctctcagccctccgtggatctatccgtcaaaacgcaatggtgcttccacagtggaacgcaaacgcgaacgctattctttacgtgacagacggggaagcccaaatccagatcgtaaacgacaatggtaacagagtgtttgacggacaag

SEQ ID NO: 145834 - DNA, 426 bp, Arabidopsis thaliana
  unsure (1)..(426): unsure at all n locations
aaatttctctccctaaatattccgagttcttgatttttgataacttcaggtcaaaatgggagtatactcgagagcggttgcgttttcggtctttgtgtcgtttctgctgtttttcactgcttattctaagagaaatgatggaacattcagagttggcctgaaaaaactgaagttggatcctaacaaccgactcgcaacacgctttggttccaagcaagaagaggccttgagatcttctttgcgttcgtacaacaacaatcttggtggtgattctggagatgctgatattgtcccgctcaagaattacttggatgctcagtactatggtgagattgctattggtactccaccgcagaagttcactgtcatttttgataccggaagctctaacctttgngtgccatcaggaaaatgttttttctcgct

SEQ ID NO: 145835 - DNA, 171 bp, Arabidopsis thaliana
caaaaagaaaatggttaagctcagcaatcttctcgttgcaaccttcggggttctcctcgtccttaacggctgccttgcgaggcagtcacttggggttcctccttagctacagaacgagtgtaaccttgacaacctagatgttctccaagccaccgaaactattaagagtga

SEQ ID NO: 145836 - DNA, 434 bp, Arabidopsis thaliana
cacacaccttcttcttcttcttcttctctctctatcacaagagagtcaaatccatggcttctacttcttctctcgctctctctcaagctctcctagctcgtgcaatctctcaccatggttctgaccaacgtggatctttaccagctttctctggactcaaatccaccggttcacgcgcctcagcttcgtctcgtcgacgtatcgctcaatccatgaccaaaaaccgatctctccgtcctcttgttcgcgctgcagctgttgagactgttgagccaaccactgattcgtcgattgtggacaaatcggtcaactcgattaggtttttggctatcgatgcggtggagaaggccaaatcaggtcatcctggtcttcctatgggttgtgctccgatggctcacattttgtatgatgaggtcatgaggtataaccccaag

SEQ ID NO: 145837 - DNA, 270 bp, Arabidopsis thaliana
aattgatcgatcttcccagtcataccccgtaggcccttcttttcctaactgttgacattctaccaacgaatcacttataatcattcgcacatctagatcggctaattgctcttggatagcacccgacccagtagaaatatctcgagttcgaaatatatcgaaaccttgagtggccaaaaaaagtgggatgctgtatgtccaggattgaatttcatattcaaatgaacctcgcaatcgtaagaaagtatgcccactagctatgggcctagc

SEQ ID NO: 145838 - DNA, 261 bp, Arabidopsis thaliana
gacaaagatgaaagattcgggaaagcaagaattacatggtatgaactaatatggatcgctgttatctaataagcaatacggatatctacctaactgaaaactacaatcaagagggggtccactgtgacactagatgtggattaatgtgtaagagcgtcaaggtgaatgagagagaacaacagctacaatcttggaaaaagagatgctcaaacaggctcgggctggccattgatccgagtactaggaatactacggcatgag

SEQ ID NO: 145839 - DNA, 437 bp, Arabidopsis thaliana
gcggagacgtctttgccaacactccatgctttgcccactggatctacaactcaggagaacagccacttgtcatcatcgctcttctcgacatcgccaactaccaaaaccaactcgaccgcaaccctagagtgttccatttggccggaaacaaccagcagggaggctttggcggttcacagcaacaacaagaacagaaaaacttgtggagcgggttcgacgcacaggtcatagctcaagcattgaaaattgacgttcagttggctcagcagcttcagaaccaacaagacagcagaggaaacatcgttcgtgttaagggacctttccaggtcgtgaggccacctctaagacagccctacgagagcgaggagtggagacacccacgtagcccacaaggcaacggcctttgggagactatctgcagcatgaggtcccacgag

SEQ ID NO: 145840 - DNA, 359 bp, Arabidopsis thaliana
aagaaaatggttaagctcagcaatcttctcgttgcaaccttcggggttctcctcgtccttaacggctgccttgcgaggcagtcacttggggttcctcctcagctacagaacgagtgtaacctcgacaacctagatgttctccaagccaccgaaactatcaagagtgaagccggtcagatcgagtactgggaccacaaccaccctcagctccgatgtgttggtgtttccgttgctcgttatgtaattgaacaaggcggtctttacttgcccaccttcttcacttccccaaaaatttcctacgtcggtcaaggaacgggtatcagcggaagagtggtccctggatgtgccgagaccttcat

SEQ ID NO: 145841 - DNA, 388 bp, Arabidopsis thaliana
ctccagcttcctgtctctgattgggaagagaaatgggttgatgtttacctcaacataagcgttaggttactagatctctgtaatgcctttagctctgagctcacacgtctcaaccagggagatctcttcctcaagtgtgttctgcacaatttacaatcggattctggggagaagtatctccaggctcgatcttcgcttgatagctggaggcaacatgttaatacaaacaaccctagaattgaaaactgccgtgcggttctagacagtcttgttaaatctctgagtctgcctaaagtcaagaactcgcctaaaggaaaggttctgatgcgagctttttatggtgtgaaggttcaaacagtttatatctgcagtgtatttaccgcagcct

SEQ ID NO: 145842 - DNA, 404 bp, Arabidopsis thaliana
  unsure (1)..(404): unsure at all n locations
ggacgacagggacaacaaggccaaccatgggaaggacagggacagcagggacaacaagggttccgtgacatgcaccagaaggtggaacatgtgagacgcggagacgtctttgccaacactccaggctctgcccactggatctacaactcaggagaacagccacttgtcatcatcgctcttctcgacatcgccaactaccaaaaccaactcgaccgcaaccctagagtgttccatttggccggaaacaaccagcagggaggctttggcggttcacagcaacaacaagaacagaaaaacttgtggagcgggttcgacgcacaggtcatagctcaagcattgaaaattgacgttcagttggctcagcagcttcagaaccaacaagacagcagnaggaaacatcgttc

SEQ ID NO: 145843 - DNA, 432 bp, Arabidopsis thaliana
cgcgaatcatccgtgatgttggtgtctagggttttatcaagagtttctcgcagcgcaggcttacgctcgtctctctcctccgtcgttactccgaagaggaatcagattccgattgttgcaagccgatttcactccctcgttcacggaacccccaacaagcttgttgcagttccagtgtcgctcctaaaccatggaactctagatttgaatgttcttcaaaggttcggctttttttcctcttcctcagctgaaccgaagggaaatgagagtaacaccgaagtaccaaagatcggcgaaacttctgagaatgtggaggtggggaaagctacagatgcagagattgacttcgacgatttgtcaagagacgatttagtgaagcttgtgagtgagaaggaagatcttttgagggtcagcagaaagacataatggaaa

SEQ ID NO: 145844 - DNA, 433 bp, Arabidopsis thaliana
cggagacgtctttgccaacactccaggctctgcccactggatctacaactcaggagaacagccacttgtcatcatcgctcttctcgacatcgccaactaccaaaaccaactcgaccgcaaccctagagtgttccatttggccggaaacaaccagcagggaggctttggcggttcacagcaacaacaagaacagaaaaacttgtggagcgggttcgacgcacaggtcatagctcaagcattgaaaattgacgttcagttggctcagcagcttcagaaccaacaagacagcagaggaaacatcgttcgtgttaagggacctttccaggtcgtgaggccacctctaagacagccctacgagagcgaggagtggagacacccacgtagcccacagggcaacggccttgaggagactatctgcagcatgaggtcccac

SEQ ID NO: 145845 - DNA, 422 bp, Arabidopsis thaliana
gcccaaatccagatcgtaaacgacaatggtaacagagtgtttgacggacaagtctctcaaggacagctcatagccgtaccacaaggtttctcggtggtgaaacgcgcaacaagcaaccgattccagtgggttgagttcaaaacaaacgctaacgcgcaaatcaacactctggcgggacgaacctcagtcttgagaggtttaccacttgaagtcataaccaatgggttccaaatctcacccgaagaagcaaggagggtcaagttcaacacgctcgagaccacactgacccatagcagtccaatgagctacggaaggcctagggcttgaggcttgatgagcgcgtggtggaatagcgtttgaatctaaagtttcgtttggtacgacttgtaatatgaaataataatgtacaaagaagtctacgc

SEQ ID NO: 145846 - DNA, 356 bp, Arabidopsis thaliana
ggaagacaaggccaaccatgggaaggacaggtacaacagggacaacaaggacgacagggacaacaaggccaaccatgggaaggacagggacagcagggacaacaagggttccgtgacatgcaccagaaggtggaacatgtgagacgcggagacgtctttgccaacactccaggctctgcccactggatctacaactcaggagaacagccacttgtcatcatcgctcttctcgacatcgccaactaccaaaaccaactcgaccgcaaccctagagtgttccatttggccggaaacaaccaacaaggaggctttggcggttcacagcaacaacaagaacagaaaaacttgtggagcgg

SEQ ID NO: 145847 - DNA, 421 bp, Arabidopsis thaliana
cgccactaaccccataggcccaaaaatgaggaaatgccgcaaggagtttcagaaagaacaacacctaagagcttgccagcaattgatgctccagcaagcaaggcaaggccgtagcgatgagtttgatttcgaagacgacatggagaacccacagggacaacagcaggaacaacagctattccagcagtgctgcaacgagcttcgccaggaagagccagattgtgtttgccccaccttgaaacaagctgccaaggccgttagactccagggacagcaccaaccaatgcaagtcaggaaaatttaccagacagccaagcacttgcccaacgtttgcgacatcccgcaagttgatgtttgtcccttcaacatcccttcattcccttctttctactaaatctcaaacaaaccctcaaagcgtatg

SEQ ID NO: 145848 - DNA, 433 bp, Arabidopsis thaliana
agcgcgaatcattctagccagtcaccagaaccagcttgaccgcaacccaaggccattttacttagccggaaacaacccacaaggtcaagtatggctacaaggccgagagcaacagccacagaagaacattttcaatggatttggacccgaggttattgctcaagctttgaagatcgatcttcagacagcgcagcaacttcagaaccaagatgacaaccgtggaaacattgtccgagtccaaggcccgttcggtgtcattaggccgcctttgaggggccagagacctcaggaggaggaagaagaagaagaaggacgacatggacgacacggtaatggcttagaggagaccatctgcagcgccaggtgcaccgataacctcgatgacccgtctcgtgctgacgtgtacaagccacagctcggttacatcagcact

SEQ ID NO: 145849 - DNA, 435 bp, Arabidopsis thaliana
agaaaatggttaagctcagcaatctcctcgttgcaaccttcggggttctcctcgtccttaacggctgccttgcgaggcagtcacttggggttcctcctcagctacagaacgagtgtaacctcgacaacctagatgttctccaagccaccgaaactatcaagagtgaagccggtcagatcgagtactgggaccacaaccaccctcagctccgatgtgttggtgtttccgttgctcgttatgtaattgaacaaggcggtctttacttgcccaccttcttcacttccccaaaaatttcctacgtcgttcaaggaacgggtatcagcggaagagtggtccctggatgtgccgagaccttcatggactcgcagccgatgcaaggacaacaacaaggccaaccatggcaaggacgacagggacaacaaggccaaccatggg

SEQ ID NO: 145850 - DNA, 442 bp, Arabidopsis thaliana
aaacaaaaagaaaatggttaagctcagcaatctcctcgttgcaaccttcggggttctcctcgtccttaacggctgccttgcgaggcagtcacttggggttcctcctcagctacagaacgagtgtaacctcgacaacctagatgttctccaagccaccgaaactatcaagagtgaagccggtcagatcgagtactgggaccacaaccaccctcagctccgatgtgttggtgtttccgttgctcgttatgtaattgaacaaggcggtctttacttgcccaccttcttcacttccccaaaaatttcctacgtcgttcaaggaacgggtatcagcggaagagtggtccctggatgtgccgagaccttcatggactcgcagccgatgcaaggacaacaacaaggccaaccatggcatggacgacaggacaacaaggccaccatggga

SEQ ID NO: 145851 - DNA, 440 bp, Arabidopsis thaliana
ggaagaaaaatgggtcgagtctcatctattatctctttctctttgacactcttgatcctcttcaatggctacactgcccaacagtggcccaacgagtgccagctcgatcaactcaatgcgctcgaaccatcccaaatcatcaagagcgagggtggtcgcatcgaggtctgggaccaccatgcaccccagctccgttgctccggctttgcctttgagcgtttcgtcattgagcctcagggtcttttcttgcccactttcttgaacgccggcaaactcacgtttgttgttcacggaaggggtctaatgggaagagttattccgggatgcgccgagacgttcatggagtcaccggtatttggagaaggtcaaggtcagggtcagagtcaagggttccgtgacatgcaccagaaagtagagcacctacggtgcggtgacaccat

SEQ ID NO: 145852 - DNA, 416 bp, Arabidopsis thaliana
cgactatgatacgactattggacgactattttacgacgactttacgacgacattttgtttccaaataagaatttggtcttatcttgattttttgttggttggtcatcgattatgagaattcggtttgtttgttgtttgaaatgctataaagtataacaaaaagacaattattattgaaaatcctatcaaatacataaaacacaacttacacttatgttcaaagttctaaaacacacacacacatacattattgttcaaagttcaagggaaaagggactgaaatctaaacctattgatcattctgtgaagtagctggtagaggctctgtggttgtcgaagattgagaggccatgaagtcaaggaattgcggatctgtttgtcggagatacttctccactaaggacaagtgttcgagc

SEQ ID NO: 145853 - DNA, 420 bp, Arabidopsis thaliana
agaaaaatgggtcgagtctcatctattatctctttctctttgacactcttgatcctcttcaatggctacactgcccaacagtggcccaacgagtgccagctcgatcaactcaatgcgctcgaaccatcccaaatcatcaagagcgagggtggtcgcatcgaggtctgggaccaccatgcaccccagctccgttgctccggctttgcctttgagcgtttcgtcattgagcctcagggtcttttcttgcccactttcttgaacgccggcaaactcacgtttgttgttcacggaaggggtctaatgggaagagttattccgggatgcgccgagacgttcatggagtcaccggtatttggagaaggtcaaggtcagggtcagagtcaagggttccgtgacatgcacccagaagtagagcaccta

SEQ ID NO: 145854 - DNA, 390 bp, Arabidopsis thaliana
cttagcctttactctatagttttatattatatcaatcgacatggcgaatgtggaccgtgatcggcgtgtgcatgtagaccgtactgacaaacgtgttcatcagccaaactacgaagatgatgtcggttttggtggctatggcggttatggtgctggttctgattataagagtcgcggcccctccactaaccaaatcttggcacttatagcaggagttcccattggtggcacactgctaaccctagctggactcactctagccggttcggtgatcggcttgctagtcttcatacccctctttctcctcttcagtccggtgatagttccggcggctctcactattgggcttgctgtgacgggaatcttggcttttggtttgtttgggttgac

SEQ ID NO: 145855 - DNA, 432 bp, Arabidopsis thaliana
gccacttgtcatcatcgctcttctcgacatcgccaactaccaaaaccaactcgaccgcaaccctagagtgttccatttggccggaaacaaccagcagggaggctttggcggttcacagcaacaacaagaacagaaaaacttgtggagcgggttcgacgcacaggtcatagctcaagcattgaaaattgacgttcagttggctcagcagcttcagaaccaacaagacagcagaggaaacatcgttcgtgttaagggacctttccaggtcgtgaggccacctctaagacagccctacgagagcgaggagtggagacacccacgtagcccacagggcaacggccttgaggagactatctgcagcatgaggtcccacgagaacattgacgaccctgctcgtgctgacgtgtacaagcccagcctaggtcgcgtgac

SEQ ID NO: 145856 - DNA, 431 bp, Arabidopsis thaliana
gaccattggaaccggagtttggagaatcagtagacattgtggagtgggtgagaaggaagataagagacaacatatcactagaagaagcattagatcctaacgtaggaaactgcagatatgtgcaagaagagatgcttttagttctacagattgctcttctctgcactacaaagctcccgaaagacagaccttcgatgagagatgtgatatcgatgctcggagaggctaaaccgaggaggaaaagtaatagtaatgaagagaacactagtcgtagcttggccgagaaacattcatcggtttttagtacttcacctgtaaatggccttctttagtatgagatttaagaatcaaaagaggccgataaactgattcgttcgattcgtgttctgtatgtagaagaaagagagaaagagagaaagagagagagatat

SEQ ID NO: 145857 - DNA, 393 bp, Arabidopsis thaliana
  unsure (1)..(393): unsure at all n locations
acccttccaagaaaaatgggtcgggtctaatcaattttttttttctcttggacactcttgatcctcttcaatggctacactgcccaacagtggcccaacgagtgccagctcgatcaactcaatgcgctcgaaccatcccaaatcatcaagaggcgagggggggtcgcatcgaggtctgggaccaccatgcaccccagttccgttgctccggctttgcctttgagcgtttcgtcattgagcctcagggtcttttcttgcccactttcttgaacgcctgcanactcacgtttgttgttcacggaaggtgtctaatgggaagagttatttcggggtgcgccgagacgttcatggagtcaccggtatttggagaaggtcaaggtcagggtctgagtc

SEQ ID NO: 145858 - DNA, 442 bp, Arabidopsis thaliana
ttgaaaaatatattttaagttatcaagttgaaaatatttaattaaagagatctgattataagttagtaaaggcaaaaacgaataaaaatttgaaattggggtagctgttcctaaggggcccgacgaatttttaattgtaattagagtatttttttttattgattggtttatcacattgtgatgttttacatgattaaatggacccattctaaaacaattagatgatgataaaattaacaaagattgggactccttatttcgatttaagaacatgcgaatagttccgtgattttgtctaagtgattgttgaagaatgccagacttgggcgaaatcgaataaaacggattcatgtgatctgcagagatcaatcccgaatctggcgaattattcctttttcttatatatgaaatatgggatttcactaagccaattcttatgaaa

SEQ ID NO: 145859 - DNA, 429 bp, Arabidopsis thaliana
gattaagcttgaacttggaggatcaatggccgacgttcgcacacactcgcaccagcttcaagtgcaccctcaacgccagcatgaaggaggcatcaaagtcctttatcctcagagtggcccttcttccactcaggtgctagccgtgtttgtcggtgtaccgataggaggaacgctgctgactatagccggtttgacattagccggttcggttataggactaatgctagcattcccgttgtttctcatctttagtccggttattgtaccagcagcctttgtcatcggtctagctatgactggattcctggcttcaggggccataggtctcaccggactatcatccatgtcgtgggtactcaactacatccgccgggccgggcagcatatcccggaggagcttgaggaagcgaagcatcgtttggctgacat

SEQ ID NO: 145860 - DNA, 403 bp, Arabidopsis thaliana
  unsure (1)..(403): unsure at all n locations
cgtccgattcggtcgcccacgcgtcggcggctttacttgcccaccttttacttcccaaaaatttcctacgtcgtcaggaacggtatcacggaagagggtcctggatgtgccagaccttatggactccagccgatgcaggcaacaacaaggccaaccatggaggacgacgggacaacaggccaaccatgggaaggacgggacaacgggacaacaggagacaggcaaccatggaaggacgggacaacagggcaacaggacgacagggcaacaggccaaccatgggaaggacagggcagcgggcaacagggttcgtgacatgcaccaaaggggaacatgggaccggagacgtctttgcaacctccagctctgccatggactacaactagagacagncattgcatat

SEQ ID NO: 145861 - DNA, 450 bp, Arabidopsis thaliana
gaagggcgccccacgcgtccgaacaaaaagaaaatggttaagctcagcaatcttctcgttgcaaccttcggggttctcctcgtccttaacggctgccttgcgaggcagtcacttggggttcctcctcagctacagaacgagtgtaacctcgacaacctagatgttctccaagccaccgaaactatcaagagtgaagccggtcagatcgagtactgggaccacaaccaccctcagctccgatgtgttggtgtttccgttgctcgttatgtaattgaacaaggcggtctttacttgcccaccttcttcacttccccaaaaatttcctacgtcgttcaaggaacgggtatcagcggaagagtggtccctggatgtgccgagaccttcatggactcgcagccgatgcaaggacaacaacaaggccaaccatggcaaggacgacagggacaacaa

SEQ ID NO: 145862 - DNA, 442 bp, Arabidopsis thaliana
ctcaggaggaggaagaagaagaagaaggacgacatggacgacacggtaatggcttagaggagaccatctgcagcgccaggtgcaccgataacctcgatgacccgtctcgtgctgacgtgtacaagccacagctcggttacatcagcactctcaacagttacgatctccccatccttcgcttcatccgtctctcagccctccgtggatctatccgtcaaaacgcaatggtgcttccacagtggaacgcaaacgcgaacgctattctttacgtgacagacggggaagcccaaatccagatcgtaaacgacaatggtaacagagtgtttgacggacaagtctctcaaggacagctcatagccgtaccacaaggtttctcggtggtgaaacgcgcaacaagcaaccgattccagtgggttgagttcaaaacaaacgctaacgcgca

SEQ ID NO: 145863 - DNA, 396 bp, Arabidopsis thaliana
gccgcctttgaggggccagagaccttatgaggaggaagaagaagaagaaggacgacacggacgacacggtaatggcttagaggagaccatctgcagcgccaggtgcaccgataacctcgatgatccgtctcgtgctgacgtgtacaagccacagctcggttacatcagcactctcaacagttacgatctccccatccttcgcttcatccgtctctcagccctccgtggatctatccgtcaaaacgcaatggtgcttccacagtggaacgcaaacgcgaacgccattctttacgtgacagacggggaagcccaaatccagatcgtaaacgacaatggtaacagagtggttgacggacaagttttttaaggacaggttattgtcgtaccacaaggttt

SEQ ID NO: 145864 - DNA, 429 bp, Arabidopsis thaliana
cttttgtcaaggaaaacggaagagtaagctgtgttgggagagatagaagaagggttagtgagtaaaccggaaccgtaccggaaacctggttcgttggtcattgagtgatcggactggtaatgagtggagttaaagagaaaagggtaagtgttgttgtggtcgggagagaagaaagaggaattagggttacaaaactcaggaagcttctccatctgatgcatcatcatgttcattatgtcagaatccatagagaaagatatggagaagctgataaaatgggtatggagagaaactggtgaaaagcttacaagtgaaattttagggttttttcttttggatgattgatgattgatgatgagagaaagagacggtatgtgcgagagaaatggcaatggtactactgtgcccaatcagaactcaagcaatagt

SEQ ID NO: 145865 - DNA, 433 bp, Arabidopsis thaliana
ggctcagcagctccagaaccagcaagataaccgtggcaacatcgtcaaggtcaacggacctttcggcgtcattaggccacccttgagacgcggcgaaggcggccaacaaccacatgaaatagctaatggtttagaggagactttgtgcaccatgcgatgcactgaaaacctcgatgacccgtcggatgctgacgtgtacaagccatcactcggatacattagcacacttaacagctacaatcttcctatcctcagacttctccgccttagcgctcttcgtggctccatccgtaaaaacgctatggtgctaccgcaatggaacgtaaacgcaaacgcggcactctacgtgacaaacggaaaggctcatatacaaatggtgaacgacaacggagaaagagtgttcgaccaagagatctccagcggacagttacta

SEQ ID NO: 145866 - DNA, 421 bp, Arabidopsis thaliana
ggcgaagtttttatcgttccggcaggtcatccattcactatactctcgcaagatcaagactttatcgcggtagggtttggtatttatgcgaccaacagcaaaagaacgttccttgcaggggaagagaatttgctgagcaacctcaacccggcggcaactagggtaacctttggtgttggaagtaaagtcgcggagaaactgttcacgagccaaaactattcctactttgcacctacgagtcgtagccaacaacaaattccagagaaacacaagccatcgtttcaatcaatcttagactttgctggtttttgaaaatgcttttttacagtcctaagaaaggaaagagtttaagagtttaatataatctttgtgaagatatgcaataaaatatggtaacgctctgcatgtaacttctatgtac

SEQ ID NO: 145867 - DNA, 407 bp, Arabidopsis thaliana
cttagaataacgaaagatattagatttgtctagaagtgcaagattgtatggatattatactcattgtgtatcttgatgaattggatcgtttctttgtggattcctagacgaaattgttgtaaattggtttctgggtattcctttatcatttcatcgagctggaatagttcctctaattgtatgaatttttctagaaaacttttttcttgaatatcattcaaaaaagtttcgcattgtctagtattccaccaattagtaatccaagttttcaaacttttattacagcagagagagatcaaccagggcaaaaagactatagatagaaaataaaaaaaaggaatgaatgctttcttttttgccattttgaatctgtgagttgttaatgaacctacctcatttgttgattc

SEQ ID NO: 145868 - DNA, 441 bp, Arabidopsis thaliana
cctaaacctaagagcaaagcaaatcgacggcgacgggaaaatagaaccgcagatctctgtctcctctctctctcgtaactgtttgttcgatggcaccgaagaaggcggaggaagtggtcgaaagccctcctgtttccagtgaagaagaagaatctggctcatctggagaataatctgaatcttctgctgaagttccgaagaaagtcgagtcttcgcaaaagcctgaatctgactctgaaggcgaatctgaatcggagtccagttctgggcccgagcccgagtccgagcctgctaagacgatcaagctgaagcctgttgggactaaaccaattccagagacgtctggatctgccgcgactgtacctgagagttcaacggctaagcgtcctttgaaggaagctgctcctgaagctattaagaagcagaagacatcggacactg

SEQ ID NO: 145869 - DNA, 431 bp, Arabidopsis thaliana
agaaaaatgggtcgagtctcatctattatctctttctctttgacactcttgatcctcttcaatggctacactgcccaacagtggcccaacgagtgccagctcgatcaactcaatgcgctcgaaccatcccaaatcatcaagagcgagggtggtcgcatcgaggtctgggaccaccatgcaccccagctccgttgctccggctttgcctttgagcgtttcgtcattgagcctcatggtcttttcttgcccactttcttgaacgccggcaaactcacgtttgttgttcacggaaggggtctaatgggaagagttattccgggatgcgccgagacgttcatggagtcaccggtatttggagaaggtcaaggtcagggtcagagtcaagggttccgtgacatgcaccagaaagtagagcacctacggtgcggtga

SEQ ID NO: 145870 - DNA, 435 bp, Arabidopsis thaliana
cacaaaggaaaggtttgtgtaaccggtgccggagggtttttgggttcgtgggtcgtcgatcttcttctctctaaggattacttcgtccatggcactgtcagagaccctgataatgaaaagtatgctcatttgaagaagctcgagaaagctggtgacaaactcaagctcttcaaggctgatttgttggactacggctctcttcaatctgctattgcaggttgcagcggagtcttccatgtcgcttgcccggttccaccagcttcagtccctaatcctgaggtagaattgatcgcacctgctgtggatggcacgctgaatgtgcttaaggcatgcattgaagcgaatgttaagcgtgttgtgtatgtttcctctgtagctgcggctttcatgaaccctatgtggtcaaagaatcaagtattagatgaggcatgttgg

SEQ ID NO: 145871 - DNA, 422 bp, Arabidopsis thaliana
caaacatggattttcaaggcggtgcactttcttacttttctttctctgtctcctagaagccacttcactgggatcgtctccatctttgatccaggttcagagattaaacaatttgaaaaatcggagactctgggattgtatggttcgttgttactgatagattacttaagctatggtttggtttagaatcggttcttctgtggcaaagcttgccataagaaggacactgtctcagtctcgttgtggttcatatgccactagaacaagggttttgccttgtcaaaccagatgttttcactctacaatactcaaatcaaaggcggagtctgctgcacctgttccacgtcctgtcccactttctaagctaactgatagcttcttagatggaacaagcagtgtgtatctagaggagttacaaagag

SEQ ID NO: 145872 - DNA, 425 bp, Arabidopsis thaliana
gccacttgtcatcatcgctcttctcgacatcgccaactaccaaaaccaactcgaccgcaaccctagagtgttccatttggccggaaacaaccagcagggaggctttggcggttcacagcaacaacaagaacagaaaaacttgtggagcgggttcgacgcacaggtcatagctcaagcattgaaaattgacgttcagttggctcagcagcttcagaaccaacaagacagcagaggaaacatcgttcgtgttaagggacctttccaggtcgtgaggccacctctaagacagccctacgagagcgaggagtggagacacccacgtagcccacagggcaacggccttgaggagactatctgcagcatgaggtcccacgagaacattgacgaccctgctcgtgctgacgtgtacaagcccagcctaggtc

SEQ ID NO: 145873 - DNA, 438 bp, Arabidopsis thaliana
ccttccctaagacgtggtgcctgggtcccaatggaccgcctaggatactccgaaccggaagcaggaagtagaactccttgtcaccaatctgcaaaaggtcctgtgaatcgagcttgacgttggggttcccagggagatggaggacaccttcaacgaagcagccatttttgccaagtacctcgagagagaagcgtcgtctagtgaagtcatagaagatccgagcgtggttgcgagaaatgttcatcccaccgccgagagatgagaggtcgacgtcgacggtcgatttcttagaattccggccgagaataatggagtaagactgcatatagtactcgaaatcctcaccttggagcttcgcaaatccaacctctacatcgctcccgcttccaacggctgtagccatgccgtgaaatttcttcgattttgaagtcggagatc

SEQ ID NO: 145874 - DNA, 435 bp, Arabidopsis thaliana; identical to SEQ ID NO: 130260

SEQ ID NO: 145875 - DNA, 381 bp, Arabidopsis thaliana
ttcacttccccaaaaatttcctacgtcgttcaaggaacgggtatcagcggaagagtggtccctggatgtgccgagaccttcatggactcgcagccgatgcaaggacaacaacaaggccaaccatggcaaggacgacagggacaacaaggccaaccatgggaaggacagggacaacagggacaacaaggaagacaaggccaaccatgggaaggacagggacaacagggacaacaaggacgacagggacaacaaggccaaccatgggaaggacagggacagcagggacaacaagggttccgtgacatgcaccagaaggtggaacatgtgagacgcggagacgtctttgccaacactccaggctttgcccactggatctacaac

SEQ ID NO: 145876 - DNA, 429 bp, Arabidopsis thaliana
  unsure (1)..(429): unsure at all n locations
aacacacccaaatatgcataagcttttgttttctcttctctccgtcgtctcactctcatttctcctcttcttccatggcgccgaggcacgccagcgagaggcgccgtttccaaacgcctgccatttcagccaaatcaacagcctcgcgcccgctcaggcgacgaagttcgaagccggtcagatggaagtatgggaccacatgagccctgagctccgatgcgccggtgtaacggtggctcgcatcacccttcagcccaattccattttcttgcccgctttctttagcccacctgcccttgcttacgttgtccaaggagaaggagttatggngacgattgcttctggttgtcctgagacttttgcagaagttgaaggatcatcanngagagggagagggaggagccccgggtcgaccgtntgaggacatgc

SEQ ID NO: 145877 - DNA, 436 bp, Arabidopsis thaliana
cttccatctaccgcactgttgtcgagttcgacgaagatgacgccagcaaccccatgggcccaagacagaaatgtcagaaggagtttcagcaatcacagcacctaagagcttgccagaaattgatgcgcatgcaaatgaggcaaggccgtggtggtggtccctccctcgacgatgagttcgatttggaagacgacatcgagaacccacaaggcccccagcagggacaccagatcctccagcagtgctgcagcgagcttcgccaggaagagccagtttgtgtttgccccaccttgagacaagctgccagggccgttagcctccagggacaacacggaccattccaatccaggaaaatttacaagacagctaagtacttgcctaacatttgcaagatccagcaagttggtgaatgcccctttcagaccaccatcccttt

SEQ ID NO: 145878 - DNA, 434 bp, Arabidopsis thaliana
atcaataaagaggaagaaaaatgggtcgagtctcatctattatctctttctctttgacactcttgatcctcttcaatggctacactgcccaacagtggcccaacgagtgccagctcgatcaactcaatgcgctcgaaccatcccaaatcatcaagagcgagggtggtcgcatcgaggtctgggaccaccatgcaccccagctccgttgctccggctttgcctttgagcgtttcgtcattgagcctcagggtcttttcttgcccactttcttgaacgccggcaaactcacgtttgttgttcacggaaggggtctaatgggaagagttattccgggatgcgccgagacgttcatggagtcaccggtatttggagaaggtcaaggtcagggtcagagtcaagggttccgtgacatgcaccagaaagtagagcaccta

SEQ ID NO: 145879 - DNA, 434 bp, Arabidopsis thaliana
atggttaagctcagcaatctcctcgttgcaaccttcggggttctcctcgtccttaacggctgccttgcgaggcagtcacttggggttcctcctcagctacagaacgagtgtaacctcgacaacctagatgttctccaagccaccgaaactatcaagagtgaagccggtcagatcgagtactgggaccacaaccaccctcagctccgatgtgttggtgtttccgttgctcgttatgtaattgaacaaggcggtctttacttgcccaccttcttcacttccccaaaaatttcctacgtcgttcaaggaacgggtatcagcggaagagtggtccctggatgtgccgagaccttcatggactcgcagccgatgcaaggacaacaaccaggccaaccatggcaaggacgacagggacaacatggccaaccatgggaagg

SEQ ID NO: 145880 - DNA, 360 bp, Arabidopsis thaliana
aaaatggttaagctcagcaatctccttgttgcaaccttcggggttctcctcgtccttaacggctgccttgcgaggcagtcacttggggttcctcctcagctacagaacgagtgtaacctcgacaacctagatgttctccaagccaccgaaactatcaagagtgaagccggtcagatcgagtactgggaccacaaccaccctcagctccgatgtgttggtgtttccgctgctcgttatgtaattgaacaaggcggtctttacttgcccaccttcttcacttccccaaaaatttcctacgtcgttcaaggaacgggtatcagcggaagagtggtccctggatgtgccgagaccttcatggac

SEQ ID NO: 145881 - DNA, 433 bp, Arabidopsis thaliana
cggacgcgtgggacaatttcacattcttttgcatatttcttcttcttcttccattatggagatacggagcttgattgtttctatgaaccctaatttatcttcctttgagctctctcgccctgtatctcctctcactcgctcactagttccgttccgatcgactaaactagttccccgctccatttctagggtttcggcgtcgatctccaccccgaatagtgaaactgacaagatctccgttaaacctgtttacgtcccgacgtctcccaatcgcgaactccggactcctcacagtggataccatttcgatggaacacctcggaagttcttcgagggatggtatttcagggtttccatcccagagaagagggagagtttttgttttatgtattctgtggagaatcctgcatttcggcagagtttgtcaccattg

SEQ ID NO: 145882 - DNA, 441 bp, Arabidopsis thaliana
gccacttgtcatcatcgctcttctcgacatcgccaactaccaaaaccaactcgaccgcaaccctagagtgttccatttggccggaaacaaccagcagggaggctttggcggttcacagcaacaacaagaacagaaaaacttgtggagcgggttcgacgcacaggtcatagctcaagcattgaaaattgacgttcagttggctcagcagcttcagaaccaacaagacagcagaggaaacatcgttcgtgttaagggacctttccaggtcgtgaggccacctctaagacagccctacgagagcgaggagtggagacacccacgtagcccacagggcaacggccttgaggagactatctgcagcatgaggtcccacgagaacattgacgaccctgctcgtgctgacgtgtacaagcccagcctaggtcgcgtgaccagcgtcaa

SEQ ID NO: 145883 - DNA, 434 bp, Arabidopsis thaliana
agatctagattcagtttttttcatcaaataagagcgtcttcataaacgcccttcgtcttcttccctggaaatctagtttctttcttccacgaaaatgagagagtgcatttcgatccacattggtcaggctggtatccaggtcggaaatgcttgctgggagctgtactgtcttgaacatggcattcagcctgatggccagatgccgagtgacaagactgttggtggaggtgacgatgctttcaacaccttcttcagtgaaaccggtgcaggtaagcacgtcccacgtgctgtctttgttgatcttgagccaactgtgatcgacgaggtcaggactggtacttaccgtcagcttttccaccctgaacaactcatcagcggtaaagaagatgcagctaacaatttcgcccgtggtcattacaccattgggaaagaga

SEQ ID NO: 145884 - DNA, 428 bp, Arabidopsis thaliana
ggaacatcaagcatctcctgcaaattttcaagttactaggcattataagtcttaatgtttcagtctgtagaagtgcatatgcctaaaagatcaaagaaaaagacatacctttactacggtccagttcccataagcaccaggagaccaaggatttgggctaaaaagtcgccgaggaattccttttggaacatctcctgctggaatgtaggagacaccggtccacacgagcaccatgagtggtacaccatagtcagctattaagcttctgagccagcctgtgcaatcgaagcaaattgagtcactaggctttttcaagaatccgtgaatgcgtaaatgattggcctgaatccccttgataagaagaatccagctcatgagataaagatgttgtttcacttaccagttccgtaccgccatgatctggcttt

SEQ ID NO: 145885 - DNA, 382 bp, Arabidopsis thaliana
aacaaaaagaaaatggttaagctcagcaatctcctcgttgcaaccttcggggttctcctcgtccttaacggctgccttgcgaggcagtcacttggggttcctcctcagctacagaacgagtgtaacctcgacaacctagatgttctccaagccaccgaaactatcaagagtgaagccggtcagatcgagtactgggaccacaaccaccctcagctccgatgtgttggtgtttccgttgctcgttatgtaattgaacaaggcggtctttacttgcccaccttcttcacttccccaaaaatttcctacgtcgttcaaggaacgggtatcagcggaagagtggtccctggatgtgccgagaccttcatggactcgcagccgatgc

SEQ ID NO: 145886 - DNA, 327 bp, Arabidopsis thaliana
aaaacatacacaagtaattaactaacatcaaatggcgaacaagctcttcctcgtctgcgcagctctcgccctgtgtttcatcctcaccaacgcttccgtctatcgcacggttgtcgagttcgacgaagatgacgccagtaaccccataggcccaatacagaaatgtcagaaggagtttcagcaagaacagcacctaagagcttgccagagatggatgcgcaagcaaatgtggcaaggacgtggtggtggttcttccctcgacgattagttcgatatggaagacgacatctagaacccgcagagacgacagctactccagaagtgctg

SEQ ID NO: 145887 - DNA, 433 bp, Arabidopsis thaliana
atttgctcattagagaacagaaaaaaaaaaaacaatggcaactcaagccgccgggatcttcaactccgccataacaaccgccgcaacctccggcgtcaagaaactccactttttctcaacaacccaccgtcccaaatccctctccttcaccaaaaccgcaatccgcgccgagaaaacagattcctccgccgccgctgctgcagcccccgccacgaaagaagctcccgtgggattcacgccaccgcagctagacccaaacacaccgtctccgatcttcgctggaagcaccggtggtcttctacgtaaagcgcaagtggaagagttctacgttatcacgtggaactcaccgaaagaacagatctttgagatgccgacaggaggagcagcgatcatgagagaaggtccgaatcttctgaagctagcgaggaaagag

SEQ ID NO: 145888 - DNA, 401 bp, Arabidopsis thaliana
gaaatctaattgttccaattgggttgcgggcaggaatcatagcatcaagctttatactacagtcaggtggattcctcacttacaacccaagttccccggtttggattgcagggagccgcccatcacagccttttagtggagttgttggtcttatggtctctttggcgttggcacttattctttatccgaaacgttctccagaaaccaagatgcagaaatataattaagaagaagaaggcaaacagtaagaaatgacatgttgtgctcatgccctttctatgatttgcagagggaaaactgatttactatgcacagaagaataaaaaaagaataggtgaaagtatagaaaatgaggacagaagaagagcttcggatctgcatgcttgtaagtaggacgcata

SEQ ID NO: 145889 - DNA, 428 bp, Arabidopsis thaliana
cagtaactctcaggtgcgtgtgctctccgctggttccttagaacaatcggcacacgctttttcatttcaatcttcttcttctacgaatctcttaagtatctcaggtctgttgagagatggcagatcgattgacacgtattgctattgtgagttcagaccgttgcaagccaaagaaatgtcgccaagagtgcaagaagagttgtcctgtggtcaagacaggaaaactttgtattgaggtgactgttggttccaagcttgcttttatctcagaggagttgtgtatcggttgcggtatttgtgtgaagaaatgcccgtttgaagctattcagattatcaatcttccaagagacttggagaaagatacgacccatcgttatggggcaaacacttttaagttacacaggctcccagttccaagaccagggcag

SEQ ID NO: 145890 - DNA, 419 bp, Arabidopsis thaliana
tgagcaagcaaatgaggcaaggacgtggtggtggtccttccctcgacgatgagttcgatttcgagggcccccagcagggataccagctactccagcagtgctgcaacgagcttcgccaggaagagccagtttgcgtttgccccaccttgaaacaagctgccagggcagttagcctccagggacagcacggaccattccaatccaggaaaatttaccagtcagctaagtacttgcctaacatttgcaagatccagcaagttggtgaatgtcccttccagaccaccatccctttcttccctccttactactagagtccaagcccggcctagcacgatgatcatgagtgttgctattgatgtatgttaatactatacacagtcatcgtgtgtgttttataaaactgtaagcttaggatgttt

SEQ ID NO: 145891 - DNA, 435 bp, Arabidopsis thaliana
gaaaatggttaagctcagcaatctcctcgttgcaaccttcggggttctcctcgtccttaacggctgccttgcgaggcagtcacttggggttcctcctcagctacagaacgagtgtaacctcgacaacctagatgttctccaagccaccgaaactatcaagagtgaagccggtcagatcgagtactgggaccacaaccaccctcagctccgatgtgttggtgtttccgttgctcgttatgtaattgaacaaggcggtctttacttgcccaccttcttcacttccccaaaaatttcctacgtcgttcaaggaacgggtatcagcggaagagtggtccctggatgtgccgagaccttcatggactcgcagccgatgcaaggacaacaacaaggccaaccatggcaaggacgacagggacaacaaggccaaccatggga

SEQ ID NO: 145892 - DNA, 434 bp, Arabidopsis thaliana
atacaaaacaaaacacacccaaatatgcataagcttttgttttctcttctctccgtcgtctcactctcatttctcctcttcttccatggcgccgaggcacgccagcgagaggcgccgtttccaaacgcctgccatttcagccaaatcaacagcctcgcgcccgctcaggcgacgaagttcgaagccggtcagatggaagtatgggaccacatgagccctgagctccgatgcgccggtgtaacggtggctcgcatcacccttcagcccaattccattttcttgcccgctttctttagcccacctgcccttgcttacgttgtccaaggagaaggagttatggggacgattgcttctggttgtcctgagacttttgcagaaagtgaaggatcatcaggaagaggaggaggaggagacccgggtcgacgttttgagga

SEQ ID NO: 145893 - DNA, 439 bp, Arabidopsis thaliana
gggcaacggccttgaggagactatctgcagcatgaggtcccacgagaacattgacgaccctgctcgtgctgacgtgtacaagcccagcctaggtcgcgtgaccagcgtcaacagctataccttgcccatcttggagtatgtcaggctcagtgccactcgtggcgttctccagggtaatgcgatggtgcttcctaaatacaacatgaacgctaacgagatcttgtactgcactggaggacaaggaaggatccaagtggtcaacgacaacggacagaacgtgttggaccaacaggtgcagaagggacagctcgtggtcatcccacaagggttcgcatacgttgtccagtcccacggaaacaagttcgagtggatctctttcaaaactaatgaaaacgcaatgatcagcactttggcgggtagaacctcgctcttgagggca

SEQ ID NO: 145894 - DNA, 426 bp, Arabidopsis thaliana
gttcgacgcacaggtcatagctcaagcattgaaaattgacgttcagttggctcagcagcttcagaaccaacaagacagcagaggaaacatcgttcgtgttaagggacctttccaggtcgtgaggccacctctaagacagccctacgagagcgaggagtggagacacccacgtagcccacagggcaacggccttgaggagactatctgcagcatgaggtcccacgagaacattgacgaccctgctcgtgctgacgtgtacaagcccagcctaggtcgcgtgaccagcgtcaacagctataccttgcccatcttggagtatgtcaggctcagtgccactcgtggcgttctccagggtaatgcgatggtgcttcctaaatacaacatgaacgctaacgagatcttgtactgcactggaggacaaggaag

SEQ ID NO: 145895 - DNA, 420 bp, Arabidopsis thaliana
gtatttctcgccgccgcttttgtatcttcttctctctcgctttgctctctcggaaatttttgcagaaacctctctcatctgaactcagaaaatctccgagttcgtatatcttctccgtttgagcaatggcgttggtcatccacacttacaagggaaacaaaggtgccaataaggcacttattgctgcagagtatgcgggtgtgaagatcgaggagtccgcagactttcagatgggcgtcactaacaagtcacctgagttccttatgatgaatcctattggaaaggttcctgtgcttgagactcctgaaggtcccatatttgagagcaatgccattgcccgatacgtgagccgtaagaatggtgacaactctttgaatggatcctcccttattgaatacgctcacattgagcaatggatcg

SEQ ID NO: 145896 - DNA, 431 bp, Arabidopsis thaliana
acgatcgttcgtgttaagggacctttccaggtcgtgaggccacctctaagacagccctacgagagcgaggagtggagacacccacgtagcccacagggcaacggccttgaggagactatctgcagcatgaggtcccacgagaacattgacgaccctgctcgtgctgacgtgtacaagcccagcctaggtcgcgtgaccagcgtcaacagctataccttgcccatcttggagtatgtcaggctcagtgccactcgtggcgttctccagggtaatgcgatggtgcttcctaaatacaacatgaacgctaacgagatcttgtactgcactggaggacaaggaaggatccaagtggtcaacgacaacggacagaacgtgttggaccaacaggtgcaagaaggacagctcgtggtcatcccacaagggttcgcata

SEQ ID NO: 145897 - DNA, 442 bp, Arabidopsis thaliana
ggacagcagggacaacaagggttccgtgacatgcaccagaaggtggaacatgtgagacgcggagacgtctttgccaacactccaggctctgcccactggatctacaactcaggagaacagccacttgtcatcatcgctcttctcgacatcgccaactaccaaaaccaactcgaccgcaaccctagagtgttccatttggccggaaacaaccagcagggaggctttggcggttcacagcaacaacaagaacagaaaaacttgtggagcgggttcgacgcacaggtcatagctcaagcattgaaaattgacgttcagttggctcagcagcttcagaaccaacaagacagcagaggaaacatcgttcgtgttaagggacctttccaggtcgtgaggccacctctaagacagccctacgagagcgaggagtggagacacccacgta

SEQ ID NO: 145898 - DNA, 427 bp, Arabidopsis thaliana
cggacgcgtgggtgcgcagtcaatttgctacaacttagaaaatggcggcggctacttcatccatcgctccttctctttcatgcccatctccttcttcttcatccaaaaccctttggtcttccaaagccagaaccttggctctacccaatatcggtttcctctcgtcttcttccaagtctctgaggtcgcttactgccaccgtcgctggaaatggcgccactggatcctcccttgccgctcgcatggtttcttcgtctgcggtcaaagcccctgtttctctcgattttgagacatctgtcttcaaaaaggagaaagtttctcttgctggttacgaagagtacattgtgagaggaggaagagacttgttcaagcatctcccagatgctttcaaggggattaagcagattggtgtgattggctggggatc

SEQ ID NO: 145899 - DNA, 355 bp, Arabidopsis thaliana
tcctaacaaagcaatatcatttccaatttataaaagttaaagccatggctgcatctttctctgtcccctctatgataatggaagaagaagggagattcgaagcggaggttgcggaagtgcagacttggtggagctcagagaggttcaagctaacaaggcgcccttacactgcccgtgacgtggtggctctacgtggccatctcaagcaaggctatgcttcgaacgagatggctaagaagctgtggagaacgctcaaaagccatcaagccaacggtacggcctctcgcaccttcggagcgttggaccctgttcaagtgaccatgatggctaaacatttggacaccatctatgtctc

SEQ ID NO: 145900 - DNA, 422 bp, Arabidopsis thaliana
gaaaaccctagctagaaacgacgatccaaagatgacgcagaagagcaatcagttcaagggccaacagaagaggaagactattgctcctaatcgccatggcaaatccattcaaactcgcaaagggaagagaaatgtgaaaccaacaaagatgacgaaagagatggacactgatcgggagcttacgaaattcataaaccattgcaatgaagtgaaagcaactaatgcagcttgtaaagaaggtggtcaactcaatatcatcaaagctgaatctcaacctgagccatccaagaaatccgccaaatagacaacaaacccttctttttttgtttccagtgtttcaacttttgtagctcttacacaatccaatcggttttgtctttaaatcaatcatctataatgctattgttaccaatttcgtcact

SEQ ID NO: 145901 - DNA, 430 bp, Arabidopsis thaliana
tctcacttcccagctacttctctctctcgcgctctctctttcttttttggcaatggctactggatcaacaaccgattccgccaggtctccttcctcaggtgttctccaaaagctgttattactattctctgtctgtatagctgcttcaacttataaagcaatccagcctcctccatcaaagctatgtggctctcctgatggtccatccatcacaggaccaaggattaagctaagagacggaaggcgtttagcttacaaagagcatggagttccaagagatgaagctaaccataagatcatcgttgtccatggatctgatagttgcagacacgataatgctttcgcagctctactatcaccggatattaaggatggactaggtgtatatatggtttcatttgatagaccttgttatgcagagagtgatcct

SEQ ID NO: 145902 - DNA, 498 bp, Arabidopsis thaliana
aacaaaaagaaaatggttaagctcagcaatctcctcgttgcaaccttcggggttctcctcgtccttaacggctgccttgcgaggcagtcacttggggttcctcctcagctacagaacgagtgtaacctcgacaacctagatgttctccaagccaccgaaactatcaagagtgaagccggtcagatcgagtactgggaccacaaccaccctcagctccgatgtgttggtgtttccgttgctcgttatgtaattgaacaaggcggtctttacttgcccaccttcttcacttccccaaaaatttcctacgtcgttcaaggaacgggtatcagcggaagagtggtccctggatgtgccgagaccttcatggactcgcagccgatgcatggacaacaacaaggccaaccatggcaaggacgacagggacaacaaggccaaccatgggaaggacagggacaacagggacaacaaggaagacaggcccaccatgggaaggacagg

SEQ ID NO: 145903 - DNA, 523 bp, Arabidopsis thaliana
  unsure (1)..(523): unsure at all n locations
caagaaaacatacacaaatagcaaaacatggctaacaagctcttcctcgtctgcgcaactctcgccctctgcttcctcctcaccaacgcttccatctaccgcaccgttgtcgaattcgaagaagatgacgccagcaaccccgtaggtccaagacagagatgccagaaggagtttcagcaatcacaacacctaagagcttgccagagatggatgagcaagcaaatgaggcaaggacgtggtggtggtccttccctcgacgatgagttcgatttcgagggcccccagcagggataccagctactccagcagtgctgcaacgagctttgccaggaagagccagtttgcgtttgccccaccttgaaacaagctgccagggcagttagcctccaaggacagcacggaccattccaattcaagaaaatttaccagtcagctaagtacttgcctaacatttgcaagatccagcaagttggtgaatggtcctttcagaccaccattcctttcttccctncttactactaga

SEQ ID NO: 145904 - DNA, 482 bp, Arabidopsis thaliana
attgagcttctttatatctactcttttaatcactgtcgtgacctcgcaaactcgatgccgaaatttcaagtcgatcatcagtttcggcgactcgattactgatactggaaacttactcggcctctctagtcctaacgatcttcctgagtcagcctttccgccatacggagaaaccttcttccaccatccgtctggtcgtttctccgatggccgcctcatcatcgacttcattgctgaattcttagggattccacatgtgcctccgttttatggatctaaaaatggaaactttgagaaaggagttaattttgcggtgggaggagcaacagcactagaatgttctgttcttgaggagaaaggaactcattgttctcaaagcaatattagtttaggaaaccagcttaagagcttcaaagagagtttaccatatctttgtggctcctcatcaccagaatgtagagatatgattgaaaatgcattta

SEQ ID NO: 145905 - DNA, 314 bp, Arabidopsis thaliana
gtaccgattcggagttccggcccaggcgtacgcaaccatggaaaggacagggacaacagggacaacaaggacgacagggacaacatggccaaccatgggaaggacagggacagcagggacaacaagggttccgtgacatgcaccagaaggtggaacatgtgagacgcggagacgtcttgccacactcaggcttgccatgatctcactcaggacagcattgatatgttttgaatgcatacaacatacgaactaggtattgcgacacaagagttggtaaacaaacaacttgggtaccagtatagtaatatatgtaa

SEQ ID NO: 145906 - DNA, 297 bp, Arabidopsis thaliana
  unsure (1)..(297): unsure at all n locations
atcgagtctaagggtctctacttgccctctttctttaacaccgcgaagctctctttcgtggctaagggacgaggtcttatgggaaaagtgatccctggatgcgccgaaacattccaagactcatcagagttccaaccacgcttcgaaggtcaaggtcaaagccagaggttgcgtgacatgcaccagaaagtggagcacattaggagcggtgataccattgccacaacacccggtgtagcacagtggttctacaacgacggacaggaaccactngtcatcgtcagcgtcttcgatcta

SEQ ID NO: 145907 - DNA, 532 bp, Arabidopsis thaliana
tcttgatacaatttttaaatattggatttttcgttatttaaatcgtgtatctccgtcacttgtagtgatttatcagtgaatctttcgtaccttatacatcataaccaaatcaaagtcgtatttactttactttttttacccatgagggattccttgtatatttcaacaaaaaaaatatgatttttttcagtaaatgtaaatagcacaattgtggctagggaagtatattatcgacctagctaactttattgtagaaattttcgggataaatgattggaccatgcaaactagaaataccttttcttggataagggaagagattactcgctccatatctgtctcactcataatatatataataacttgggcatccatttcaagtgcatatccgatttttgcccagcagaattatgaaaatccacgagaggcgactgggcgtattgtatgtgccaattgccatttagcttataagcccgtggatattgaagtttcacaaacgggactctctgatactgtatatgaagcagtgtta

SEQ ID NO: 145908 - DNA, 527 bp, Arabidopsis thaliana
  unsure (1)..(527): unsure at all n locations
attttcactgagcgcataacatttttgagacaagagactctctctctctctcttctctctttctctccccctctctccggcgatggttgttgctatggaccaacgcaccaatgtgaacggagatcccggcgccggagaccggaagaaagaagaaaggtttgatccgagtgcacaaccaccgttcaagatcggagatataagggcggcgattcctaagcactgttgggttaagagtcctttgagatcaatgagttacgtcgtcagagacattatcgccgtcgcggctttggccatcgctgccgtgtatgttgatagctggttcctttggcctctttattgggccgcccaaggaacacttttctgggccatctttgttctcggccacgactgtggacatgggagtttctcagacattcctctactgaatagggtggtggtcacattcttcattctttcatcctcgttccttaccatggntggagaattagccaccggacacaccaccagaaccatggccatgttgaaaa

SEQ ID NO: 145909 - DNA, 341 bp, Arabidopsis thaliana
gataaaaatggctcgagtctcttctcttctttctttctccttaacacttttgatccttttccatggctacgcggctcaacagggtcagcagggtcagcagtttccgaacgagtgccagctcgaccagctcaatgcgctcgagccttcacacgtactgaagagcgaggctggtcgcatcgaggtgtgggaccaccacgctcctcagctccgttgctcaggtgtctcctttgcacgttacatcatcgagtctaagggtctctacttgccctctttctttaacaccgcgaagctctccttcgtggcaaaggacgaggtcttatgggaaaagtgatccctggatg

SEQ ID NO: 145910 - DNA, 342 bp, Arabidopsis thaliana
aaaaacttctctctgaatctcagtgagttctcataaaatgagagggatggtgagttttgccgtttgggctctctttgctgctttactctcacagcagctctttgcttctgttgcttccgtaaggtttgaggatgccaaaacatactacttatctcctccctctggctcacatggaactcctccatcacacacgcctccttcttctaactgtggaagtccaccttacgacccttctccttcaactccttctcacccttcacctccatcacatactccaactccttccactccatcacacacttcaactccacacacttcatcacacacgccaaactccacaca

SEQ ID NO: 145911 - DNA, 542 bp, Arabidopsis thaliana
agaaaacatacacaaatagcaaaacatggctaacaagctcttcctcgtctgcgcaactctcgccctctgcttcctcctcaccaacgcttccatctaccgcaccgttgtcgaattcgaagaagatgacgccagcaaccccgtaggtccaagacagagatgccagaaggagtttcagcaatcacaacacctaagagcttgccagagatggatgagcaagcaaatgaggcaaggacgtggtggtggtccttccctcgacgatgagttcgatttcgagggcccccagcagggataccagctactccagcagtgctgcaacgagcttcgccaggaagagccagtttgcgtttgccccaccttgaaacaagctgccagggcagttagcctccagggacagcacggaccattccaatccaggaaaatttaccagtcagctaagtacttgcctaacatttgcaagatccagcaagttggtgaatgtcctcttcagaccaccatccctttcttccctccttactactagaggccaagcccgggctagcacg

SEQ ID NO: 145912 - DNA, 307 bp, Arabidopsis thaliana
tctcgattaagcttgaacttggaggatcaatggccgacgttcgcacacactcgcaccagcttcaagtgcaccctcaacgccagcatgaaggaggcatcaaagtcctttatcctcagagtggcccttcttccactcaggtgctagccgtgtttgtcggtgtaccgataggaggaacgctgctgactatagccggtttgacattagccggttcggttataggactaatgctagcattcccgttgtttctcatctttagtccggttattgtaccagcagcctttgtcatcggtctagctatgactggatt

SEQ ID NO: 145913 - DNA, 482 bp, Arabidopsis thaliana
cggacgcgtgggtcagggtcagagtcaagggttccgtgacatgcaccagaaagtagagcacctacggtgcggtgacaccattgcaacaccatctggtgtagctcaatggttctacaacaatggaaatgagcctcattcttgttgcagccgcggatctcgccagcaaccagaaccagcttgaccgcaaccttagaccatttttgatagccggaaacaacccacaagggcaggaatggctacaaggccgaaagcaacagaagcaaaacaacatcttcaatggcttcgcacctgagatcttggctcaagccttcaagatcaatgtcgagacggctcagcagctccagaaccagcaagataaccgtggcaacatcgtcaaggtcaacggacctttcggcgtcattaggccacccttgagacgcggcgaaggcggccaacaaccacatgaaatagctaatggtttagaggagactttgtgcaccatg

SEQ ID NO: 145914 - DNA, 433 bp, Arabidopsis thaliana
aaacatacacacatagcaaaaaatggcaaacaagttgttcctcgtctgcgcagctctcgctctctgcttcctcctcaccaacgcttccatctaccgcaccgtcgttgagttcgaagaagatgacgccactaaccccataggcccaaaaatgaggaaatgccgcaaggagtttcagaaagaacaacacctaagagcttgccagcaattgatgctccagcaagcaaggcaaggccgtagcgatgagtttgatttcgaagacgacatggagaacccacagggacaacagcaggaacaacagctattccagcagtgctgcaacgagcttcgccaggaagagccagattgtgtttgccccaccttgaaacaagctgccaagggccgtagactccagggacagcaccaaccaatgcaagtcaggaaaatttaccagaca

SEQ ID NO: 145915 - DNA, 439 bp, Arabidopsis thaliana
ggtcaaggtcagggtcagagtcaagggttccgtgacatgcaccagaaagtagagcacctacggtgcggtgacaccattgcaacaccatctggtgtagctcaatggttctacaacaatggaaatgagcctctcattcttgttgcagccgcggatctcgccagcaaccagaaccagcttgaccgcaaccttagaccatttttgatagccggaaacaacccacaagggcaggaatggctacaaggccgaaagcaacagaagcaaaacaacatcttcaatggcttcgcacctgagatcttggctcaagccttcaagatcaatgtcgagacggctcatcagctccagaaccagcaagataaccgtggcaacatcgtcaaggtcaacggacctttcggcgtcattaggccacccttgagacgcgggaaggcggcaacaccacatg

SEQ ID NO: 145916 - DNA, 530 bp, Arabidopsis thaliana
  unsure (1)..(530): unsure at all n locations
ggcttagaggagaccatctgcagcgccaggtgcaccgataacctcgatgatccgtctcgtgctgacgtgtacaagccacagctcggttacatcagcactctcaacagttacgatctccccatccttcgcttcatccgtctctcagccctccgtggatctatccgtcaaaacgcaatggtgcttccacagtggaacgcaaacgcgaacgccattctttacgtgacagacggngaagcccaaatccagatcgtaaacgacaatggtaacagagtgtttgacggacaagtctctcaaggacagctcatagccgtaccacaaggtttctcggtggtgaaacgcgcaacaagcaaccgattccagtgggttgagttcaaaacaaacgcatacgcgcaaatcaacactcttgcgggacgaacctcagtcttgagaggtttaccacttgaagttataaccaatgggttccaaatctcacctgaagaagcaaggagggtcaagttcaacacgctcgagnaccacttgactcacagcag

SEQ ID NO: 145917 - DNA, 470 bp, Arabidopsis thaliana
caaacgcgaacgccattctttacgtgacagacggggaagcccaaatccagatcgtaaacgacaatggtaacagagtgtttgacggacaagtctctcaaggacagctcatagccgtaccacaaggtttctcggtggtgaaacgcgcaacaagcaaccgattccagtgggttgagttcaaaacaaacgcaaacgcgcaaatcaacactcttgcgggacgaacctcagtcttgagaggtttaccacttgaagttataaccaatgggttccaaatctcacctgaagaagcaaggagggtcaagttcaacacgctcgagaccactttgactcacagcagtggcccagctagctacggaaggccaagggtggctgcagcttaagagcttaaaaccgcggctcaacaatgaacctctagtactgtaaaaggaagttaaatagtacgaagtaataataataatgtacgaacatgtgac

SEQ ID NO: 145918 - DNA, 273 bp, Arabidopsis thaliana
  unsure (1)..(273): unsure at all n locations
cggacgcgtgggcaaacggctacgtatagaggacaaaaaaactaaaactaaaaagctttgcaagatctttgaattgtttcatcagccttggttggtgtttttgaaaatcttcatttgtccctttttgtccgaccattgagatacaaaaatgcgtttatattgtagtaatattttcttttcttttttttgttaataggcgtnatattgttaactgcgagagacatcatatagattttcttgttctgaacatttttaagtttgcaactgtattat

SEQ ID NO: 145919 - DNA, 544 bp, Arabidopsis thaliana
cttagccaagcagctgttgtttcttagttgactccctctccgacgaaaatggtgtccacgagcaagatcaaatccgttgatttctataggaaaatcccgagggatttgacagaggcgtctctgtctggtgctggattgtccattatagcagccctctctatgatatttctatttggaatggagttgaataattatttggctgtcagcacttccacatcggtcattgttgacaggagcgctgacggagacttcttgcgcttagattttaacataagcttcccgtcactttcatgtgaattcgcatctgtggatgtcagtgatgtattaggaactaacaggctaaatgtaacaaagacaattcggaagttttctattgattcgaatatgagacccactggttctgagtttcatgccggggaagttttatcactcattaatcatggagatgaaactggtgaagaaatagttgaagattcggtaccacttactggacgcaactttgacacatttacacatcaatttccaatcttggttgtaatttcta

SEQ ID NO: 145920 - DNA, 482 bp, Arabidopsis thaliana
gaagtcttgtctagctacttttgctctcgcagtgttagtaacacaaggaagcatttttagtttgtgtttggcctcctctgcttctacaaactctgttcctaattggtttcatcattggccgccgtttaaatggggaccaaattttccatattctccacctaaaccgccgccaatcgagaaatatcctccaccggtgcagtatccaccaccgatcaagaagtatccaccgccaccatacgagcatccaccggtgaagtatccaccaccgatcaagacttaccctcattcgccggtgaagtatcctccaccagaacagtatccaccgccgattaagaagtatcctccaccagaacagtatccaccgccgattaagaagtatcctcaccagaacagtattcactcgctctcaagaagatcctccgccagaacagtatcaccaccgatcaagaagtatctctgcagacattatcaccgcataaaag

SEQ ID NO: 145921 - DNA, 506 bp, Arabidopsis thaliana
cgacaaatgggcgattgagcgaagaagaaaccttcgttctctctcggaaatgacgaagaggaagaaggaagtaatagatgtcgattgctccgagaagaaagattttgtgattgattggtcttcggctatggataaggaagacgaagttcccgagctcgagattgttaataccaccaaacctactcctccgccaccgccaacgtttttctccgacgatcaaaccgattctccgaaactcctaaccgatcgtgacctcgacgagcagctagagcgtaaaaaagcgatcctgacattaggtccgggcttacccgacaagggtgagaaaattcgactcaaaatcgctgatctcgaagaggagaagcagcgtagagttttagaaggctcgaaaatggaggtggacagaagttcgaaagtcgtgtcttcgactagctcaggttcagatgtcttaccgcaagggaatgcagtttcaaaagatacctctagagggaatgcagactcaaaagaca

SEQ ID NO: 145922 - DNA, 470 bp, Arabidopsis thaliana
cggacgcgtggggccgcggatctcgccagcaaccagaaccagcttgaccgcaaccttagaccatttttgatagccggaaacaacccacaagggcaggaatggctacaaggccgaaagcaacagaagcaaaacaacatcttcaatggcttcgcacctgagatcttggctcaagccttcaagatcaatgtcgagacggctcagcagctccagaaccagcaagataaccgtggcaacatcgtcaaggtcaacggacctttcggcgtcattaggccacccttgagacgcggcgaaggcggccaacaaccacatgaaatagctaatggtttagaggagactttgtgcaccatgcgatgcactgaaaacctcgatgacccgtcggatgctgacgtgtacaagccatcactcggatacattagcacacttaacagctacaatcttcctatcctcagacttctccgccttagcgctct

SEQ ID NO: 145923 - DNA, 482 bp, Arabidopsis thaliana
cggacgcgtgggcaaaataaagttacgtcaaatcagtgtctatacattaaaaataaaatcaaaataaaactaggattaccaagtttttagtcgcgggtcttctatcatgtaagatattattcacctgacagttgacacgtttattttgtttctaactttttaagttttactgttccatctttcgtttcaataatttttttgcatatttcttttgcgaaaaaacgatagaactcatagagggtggagaataggatgtcgttttgcgctctaatatttaaattttcttgctagcttggttctttccacttaaaagcattatacactttttctaattaggattttacaaaaagaaatgacaacacaatatatcattgtcccatttctcgcaatatacaacatcctattttgtatgtttttgtccttctcattttggtaattactcgtttgttcttttcttttaagatgacgccatcaaattacta

SEQ ID NO: 145924 - DNA, 465 bp, Arabidopsis thaliana
agcgggttcgacgcacaggtcatagctcaagcattgaaaattgacgttcagttggctcagcagcttcagaaccaacaagacagcagaggaaacatcgttcgtgttaagggacctttccaggtcgtgaggccacctctaagacagccctacgagagcgaggagtggagacacccacgtagcccacagggcaacggccttgaggagactatctgcagcatgaggtcccacgagaacattgacgaccctgctcgtgctgacgtgtacaagcccagcctaggtcgcgtgaccagcgtcaacagctataccttgcccatcttggagtatgtcaggctcagtgccactcgtggcgttctccagggtaatgcgatggtgctttctaaatacaacatgaacgctaacgagatcttgtactgcactggaggacaaggaaggatccaagtggtcaacgacaacggacagaacgtg

SEQ ID NO: 145925 - DNA, 493 bp, Arabidopsis thaliana
ccgttgctccggctttgcctttgagcgtttcgtcattgagcctcagggtcttttcttgcccactttcttgaacgccggcaaactcacgtttgttgttcacggaaggggtctaatgggaagagttattccgggatgcgccgagacgttcatggagtcaccggtatttggagaaggtcaaggtcagggtcagagtcaagggttccgtgacatgcaccagaaagtagagcacctacggtgcggtgacaccattgcaacaccatctggtgtagctcaatggttctacaacaatggaaatgagcctctcattcttgttgcagccgcggatctcgccagcaaccagaaccagcttgaccgcaaccttagaccatttttgatagccggaaacaaacccacagggcaggaatggctacaaggccgaaagcaacagaagcaaaacaacatctttaatggcttcgcacctgagatcttggctcaagccttcaagatcaatgtc

SEQ ID NO: 145926 - DNA, 367 bp, Arabidopsis thaliana
cacaaacgagtaagaatacaaatacaaatagcaaaaaaaatggcaaacaagctcttcctcgtctgcgcaactttcgccctctgcttcctcctcaccaacgcttccatctaccgcactgttgtcgagttcgacgaagatgacgccagcaaccccatgggcccaagacagaaatgtcagaaggagtttcagcaatcacagcacctaagagcttgccagaaattgatgcgcatgcaaatgaggcaaggccgtggtggtggtccctccctcgacgatgagttcgatttggaagacgacatcgagaacccacaaggcccccagcagggacaccagatcctccagcagtgctgcagcgagcttcgccaggaag

SEQ ID NO: 145927 - DNA, 527 bp, Arabidopsis thaliana
aaagaaaatggttaagctcagcaatctcctcgttgcaaccttcggggttctcctcgtccttaacggctgccttgcgaggcagtcacttggggttcctcctcagctacagaacgagtgtaacctcgacaacctagatgttctccaagccaccgaaactatcaagagtgaagccggtcagatcgagtactgggaccacaaccaccctcagctccgatgtgttggtgtttccgttgctcgttatgtaattgaacaaggcggtctttacttgcccaccttcttcacttccccaaaaatttcctacgtcgttcaaggaacgggtatcagcggaagagtggtccctggatgtgccgagaccttcatggactcgcagccgatgcaaggacaacaacaaggccaaccatggcaaggacgacagggacaacaaggccaaccatgggaaggacaaggacaacagggacaacaaggaagacaaggccaaccatgggaaggacagggacaacatggacaacaaggacgacagggacaac

SEQ ID NO: 145928 - DNA, 430 bp, Arabidopsis thaliana
gaagatttggaactcggagatgaagatgaagtaaaggacagggaagcgaaacaagagtttaaccttctctgtgactggataaaacagcagctcggtgacaaagttgcaaaagtccaagtctcaaaccgtttgagctcttctccttgtgtgcttgtctctggcaaattcgggtggtcagctaatatggaaaggctaatgaaggcacaggctcttggagacacttcaagcctggagttcatgagaggtaggagaatactagagatcaatccagatcatcccatcatcaaagacttgaacgctgcttgtaagaatgcaccagagagcactgaagcaacaagagtggtcgatctcttgtatgacactgctataatatcaagtggattcactcctgatagcccggccgagctcgggaacaagatatatgagatga

SEQ ID NO: 145929 - DNA, 534 bp, Arabidopsis thaliana
cttcttctctctaatacgagaagaaaaaggcgaaaacctcgccaatccgattacgcgaaaaatcaaaggtttttggatatggcgtcgaagcggatcttgaaggaattgaaggatctccagaaggatccacctacatcatgtagcgcaggtcctgttgctgaagacatgtttcactggcaggcaacgataatgggtccttcagagagtccttatgctggaggtgttttccttgtaaccatccatttccctccggattacccattcaagcctcctaaggtggcctttaggaccaaggtgttccatcccaacattaacagcaacggtagcatttgcctcgacatcttgaaggagcagtggagtcctgcgctcaccatttccaaggtgctgctatcgatctcgtctttgctaaccgatccaaacccggatgatcctttggtgcccgagatagctcacatgtacaagactgacaagaacaagtaccagttcactgcacgaagctggacttagaagtatgccatgggctaaatggaaaat

SEQ ID NO: 145930 - DNA, 109 bp, Arabidopsis thaliana
gttaaatagtacgtagtaattataataatgtacgaaaatgtgacaagttttgttgaggtttacctgtaaaatgccactccttttctgaataaaatctttctttccgatc

SEQ ID NO: 145931 - DNA, 334 bp, Arabidopsis thaliana
cggacgcgtgggtttttataggaatatacaagagaaaatcgacggagagtttccagtcgctaccgtaccaagtgtcgctatttagctgcatgctatggctctactacgcattgattaagaaagacgcttttctcctaattaccatcaactcctttggctgcgtcgtggagactctctacatagccatgttcttcgcttacgccaccagggagaaaaggatatcggctatgaagttgttcatagcaatgaacgttgccttcttctcgttgattctaatggtaacacatttcgtggttaaaactcctcccctccaagtctctgtactcggctggat

SEQ ID NO: 145932 - DNA, 458 bp, Arabidopsis thaliana
catacacacatagcaaaaaatggcaaacaagttgttcctcgtctgcgcagctctcgctctctgcttcctcctcaccaacgcttccatctaccgcaccgtcgttgagttcgaagaagatgacgccactaaccccataggcccaaaaatgaggaaatgccgcaaggagtttcagaaagaacaacacctaagagcttgccagcaattgatgctccagcaagcaaggcaaggccgtagcgatgagtttgatttcgaagacgacatggagaacccacagggacaacagcaggaacaacagctattccagcagtgctgcaacgagcttcgccaggaagagccagattgtgtttgccccaccttgaaacaagctgccaaggccgttagactccagggacagcaccaaccaatgcaagtcaggaaaatttaccagacagccaagcacttgcccaacgtttgcgaca

SEQ ID NO: 145933 - DNA, 504 bp, Arabidopsis thaliana
gcaacatcgtcaaggtcaacggacctttcggcgtcattaggccacccttgagacgcggcgaaggcggccaacaaccacatgaaatagctaatggtttagaggagactttgtgcaccatgcgatgcactgaaaacctcgatgacccgtcggatgctgacgtgtacaagccatcactcggatacattagcacacttaacagctacaatcttcctatcctcagacttctccgccttagcgctcttcgtggctccatccgtaaaaacgctatggtgctaccgcaatggaacgtaaacgcaaacgcggcactctacgtgacaaacggaaaggctcatatacaaatggtgaacgacaacggagaaagagtgttcgaccaagagatcttcagcggacagttactagtcgtgccacaaggcttttcggtcatgaaacatgccatatgcgaacagttcgagtggatcgaattcaagacaaacgaaaacgcacaggtcaacacactcgcgggcc

SEQ ID NO: 145934 - DNA, 447 bp, Arabidopsis thaliana
taagaagataaaaatggctcgagtctcttctcttctttctttctccttaacacttttgatccttttccatggctacgcggctcaacagggtcagcagggtcagcagtttccgaacgagtgccagctcgaccagctcaatgcgctcgagccttcacacgtactgaagagcgaggctggtcgcatcgaggtgtgggaccaccacgctcctcagctccgttgctcaggtgtctcctttgcacgttacatcatcgagtctaagggtctctacttgccctctttctttaacaccgcgaagctctccttcgtggctaaaggacgaggtcttatgggaaaagtgatccctggatgcgccgaaacattccaagactcatcagagttccaaccacgcttcgaaggtcaaggtcaaagccagaggttccgtgacatgcaccagaaagtggagcacat

SEQ ID NO: 145935 - DNA, 522 bp, Arabidopsis thaliana
aactacaatacctactcaggtggctctcatgtgatggaatacggtaacaatagtattaagtcggagaagctttatctttaccaagggtttgatccagccaccgttaatctcccactaaacgaattaccggtcaagtcaaaaataggagtcgttaaccaacgcgatgcggaccttctcttcctttggcatatgtatcggacatcggaagatgggtcaaggaagaaggatgacacattgaaggaattaactgagacaacaaggcataggaaacatttagatgcaagcgtcgaattgatagccacaattttgtttggtccgacgatgaatgttcttaacttggttagagaacccggtttgcctttggttgacgattgggaatgtcttaaatcgatggtacgtgtatttgaagagcattgtggatcactaacgcaatatgggatgaaacatatgcgagcgtttgcaaaccgttgtaacaacggtgtgtccaaagagctgatggaggaagcttctactgcggcatgc

SEQ ID NO: 145936 - DNA, 453 bp, Arabidopsis thaliana
atggctttcccgcgatttctttctctcctcgccgtcgtcactctctctcttttcctcaccaccactgatgcttcctctcgctctctatccactccacctaaaacgaacgtactcgacgtcgtttcatctctccagcaaacacaaactatcctctcactcgacccgactcgttcctcactcaccaccaccaaacccgaatccctatccgacccggttttcttcaattcatcttcaccactatctctagagcttcactctcgagacactttcgtcgcgtcacagcacaaagactacaaaagcttaacactcagtcgactcgagcgcgactcatcccgagtcgccggaatcgtcgcgaagatccgtttcgccgtcgaaggagtcgatagatccgatctcaaacccgtttacaacgaagatacacgataccaaaccgaggatctaacgacacctgtc

SEQ ID NO: 145937 - DNA, 545 bp, Arabidopsis thaliana
  unsure (1)..(545): unsure at all n locations
tttgtgtgctcttagcctttactctatagttttatatcatatcaatcgacatggcgaatgtggaccgtgatcggcgtgtgcatgtagaccgtactgacaaacgtgttcatcagccaaactacgaagatgatgtcggttttggtggctatggcggttatggtgctggttctgattataagagtcgcggcccctccactaaccaaatcttggcacttatagcaggagttcccattggtggcacactgctaaccctagctggactcactctagccggttcggtgatcggctagctagtctccatacccctctttctcctctacagtccggtgatagtcccggcggttctcactattgngcttgctgtgacgggaatcatggctctggattgtttgggttgacgggtctgagcttggtctcgtgggtcctcaactaccttcgtgggacgagtgatacagtgccagagcaattggactacgcttaacggcgtatggcttgtgcgaaagctatgctggtatgaagggaaaagagatgggtcagattgtgca

SEQ ID NO: 145938 - DNA, 402 bp, Arabidopsis thaliana
gaccacgcgtccgctactccagcagtgctgcaacgagcttcgccaggaagagccagtttgcgtttgccccaccttgaaacaagctgccagggcagttagcctccagggacagcacggaccattccaatccaggaaaatttaccagtcagctaagtacttgcctaacatttgcaagatccagcaagttggtgaatgtcccttccagaccaccatccctttcttccctccttactactagagtccaagcccggcctagcacgatgatcatgagtgttgctattgatgtatgttaatactatacacagtcatcgtgtgtgttttataaaactgtaagcttaggatgtttgaggctaatgtaattagcactacaccgtaataaatgagaggtttactttatgtttt

SEQ ID NO: 145939 - DNA, 547 bp, Arabidopsis thaliana
  unsure (1)..(547): unsure at all n locations
tggcaaacaagttgttcctcgtctgcgcagctctcgctctctgcttcctcctcaccaacgcttccatctaccgcaccgtcgttgagttcgaagaagatgacgccactaaccccataggcccaaaaatgaggaaatgccgcaaggagtttcagaaagaacaacacctaagagcttgccagcaattgatgctccagcaagcaaggcaaggccgtagcgatgagtttgatttcgaagacgacatggagaacccacagggacaacagcaggaacaacagctattccagcagtgctgcaacgagcttcgccaggaagagccagattgtgtttgccccaccttgaaacaagctgccaaggccgttagactccagggacagcaccaaccaatgcaagtcaggaaaatttaccagacagccaagcacttgcccaacgtttgcgacatcccgcaagttgatgtttgtcccttcaacatcccttcattcccttctttctactaaatctcaaacaaaccctcaaagcgtatgagagtggtgttgntgatatatacatg

SEQ ID NO: 145940 - DNA, 516 bp, Arabidopsis thaliana
acatagcaaaaaatggcaaacaagttgttcctcgtctgcgcagctctcgctctctgcttcctcctcaccaacgcttccatctaccgcaccgtcgttgagttcgaagaagatgacgccactaaccccataggcccaaaaatgaggaaatgccgcaaggagtttcagaaagaacaacacctaagagcttgccagcaattgatgctccagcaagcaaggcaaggccgtagcgatgagtttgatttcgaagacgacatggagaacccacagggacaacagcaggaacaacagctattccagcagtgctgcaacgagcttcgccaggaagagccagattgtgtttgccccaccttgaaacaagctgccaaggccgttagactccagggacagcaccaaccaatgcaagtcaggaaaatttaccagacagccaagcacttgcccaacgtttgcgacatcccgcaagttgatgtttgtccctttaacatcccttcattcccttctttctactaaatctcaaac

SEQ ID NO: 145941 - DNA, 483 bp, Arabidopsis thaliana
atggatttggacccgaggttattgctcaagctttgaagattgatcttcagacagcgcagcaacttcagaaccaagatgacaaccgtggaaacattgtccgagtccaaggcccgttcggtgtcattaggccgcctttgaggggccagagacctcaggaggaggaagaagaagaagaaggacgacacggacgacacggtaatggcttagaggagaccatctgcagcgccaggtgcaccgataacctcgatgatccgtctcgtgctgacgtgtacaagccacagctcggttacatcagcactctcaacagttacgatctccccatccttcgcttcatccgtctctcagccctccgtggatctatccgtcaaaacggcatggtgcttccacagtggaacgcatacgcgaacgccattctttacgtgacagacggggaagcccaaatccagatcgtaaacgacaatggtaacagagtgtttgacggac

SEQ ID NO: 145942 - DNA, 494 bp, Arabidopsis thaliana
ataaaagaaaaattgaattttttttcttctatctatctacctctgttcttcctcgtcatttcttacccagaaaattagaggataacaaaaatctgtttctttcgatgatcatcgtgacactttctctgtgatttttcctttcttctgttgttgttgatcatcgtgatcatcgtctttccttacatgcgaacccccatgtcagacactcagcatgtacagagctctttggtgtcgattcgatcttccgacaaaatcgaagatgcctttaggaagatgaaagtaaatgagaccggcgtggaggaactgaatccgtatccagatcgtcccggtgaaagagattgccaattctatttaagaactggtctctgtggctatggaagcagttgccgttacaatcatcctactcatcttccacaggatgttgcttattacaaggaggagctccctgagagaattggacagccggattgtgagtattttctgaagacaggagc

SEQ ID NO: 145943 - DNA, 488 bp, Arabidopsis thaliana
attttattgaataatatcacataccatatgaaaaattagacctctatataacaaaataacatgttacattaagaaatcaagtttctcgtaagttttaatatgataatatatccaatggttgccactttcttgactacaatattccattgtgccattcggtaaattttactctaataacttaattaccttaattttaacaaaaattgatgttagatacacatataatggcaattttttctttttattcttaatatgatgtttaactaaatcctaaatggtattttgattagaatgacggtgatatatcaaacacttacatgtgagttcaattttttatttattttttctagtaggttactttaagaaaagtacgtttattaaaatcaagaaaattcaatgttgtttcgactaatttattaatttatatggattctaattatgtgtagatgcgcttgatgtcatatcccggaggattgccaattaagaga

SEQ ID NO: 145944 - DNA, 278 bp, Arabidopsis thaliana
tccatttaatgttaaaattttacaaacgaattctcgattatttaaagttgatgacatgtataccttgcaaacataaatccctttattattaaaagggaagtacaaattgaaattttttctaatttggcctcaattttgatttcaattttggattttattctttgctattcaaaattattaaggctaatttggtcttaacaatctcctaaactttatatgatccgattcaatctaaaccgtttaataaaattaatttctttcaatctaaaccgttcaac

SEQ ID NO: 145945 - DNA, 455 bp, Arabidopsis thaliana
gcctttactctatagtttaatatcatatcaatcgacatggcgaatgtggaccgtgatcggcgtgtgcatgtagaccgaactgacaaacgtgttcataagccaaactacgaagatgatgtcggttttggtggctatggcggttatggtgctgggtctgattataagagtcgcggcccctccactaaccaaatcttggcacttatagcaagagttcccattggtggcacactgctaaccctagctggactcactctagccgggtcggtgatcggcttgctagtctccatacccctctttctcctttttagttcggtgatagtcccggcgggtctcactattgggcttgctgtgacgggaatcttggcttctggtttggttgggttgacgggtctgagctcggtctcgtgggtcctcaactaccttcgtgggacgagtgatacagtgccagagcaatt

SEQ ID NO: 145946 - DNA, 394 bp, Arabidopsis thaliana
catacacaagtaattaactaacaacaaatggcgaacaagctcttcctcgtctgtgcagctctcgccctgtgtttcatgctcaccaacgcttccgtctatcgcacggttgtcgagttcgacgaagatgacgccagtaaccccataggcccaatacagaaatgtcagaaggagtttcagcaagaacagcacctaatagcttgccagagatggatgcgcaagcaaatgtggcaaggacgaggtggtggtccttccctcgacgatgagttcgatttggaagacgacatctagaaccctgcaagactacagctacttcagatgtgctgtagtgtgctctgccagaagagccagtttgtgtttgccccatcttgagacaagctgtcaaggccgttagatt

SEQ ID NO: 145947 - DNA, 504 bp, Arabidopsis thaliana
aagaaataacaaaatggctcgagtctcttctcttctttctttcttcttaacacttttgatccttttccatggctacgcggctcaacagggtcagcagggtcagcagtttccgaacgagtgccagctcgaccagctcaatgcgctcgagccgtcacacgtactgaagagcgaggctggtcgcatcgaggtgtgggaccaccacgctcctcagctccgttgctcaggtgtctcctttgcacgttacatcatcgagtctaagggtctctacttgccctctttctttaacaccgcgaagctctctttcgtggctaagggacgaggtcttatgggaaaagtgatccctggatgcgccgaaacattccaagactcatcagagttccaaccacgcttcgaaggtcaaggtcaaagccagagggtccgtgacatgcaccagaaagtggagcacattaggagcggtgataccattgccacaacacccggtgtagcacagtggttctacaacga

SEQ ID NO: 145948 - DNA, 510 bp, Arabidopsis thaliana
  unsure (1)..(510): unsure at all n locations
gtatgtctgattattggatcgagtcgtagacctacgaaaatcttggcacgaagtcctaacaattaaaataatattattagtacatagtttaatataattaaaatgcgtaatgtcaaaaaattaatagatatcatagtaaaataaatatcgaagtaaagattattttgaaatgaaaaatctaaaagacacctaaattattaatcaaaaccacttatttagttaaaatccattttatataatatcaattatcataatatacaaaaattaatctattaatttgtttagataattattaaatacctaaaatataaaacctaaatattaaaaattgcagcaaacaagactaacgacttgaggatttagaccaacangactataaagctcagtcaaaaaaatgtacgacacgaaaactgtccacttctaccgaaaatgcatatgatcatttcaggtaaaccaggtctcatagattagacccatggacagcctactaagaccgaactttattatata

SEQ ID NO: 145949 - DNA, 432 bp, Arabidopsis thaliana
tgcaaaaaaaaagaaatagatatatttcattctgatgctgtcaccagctggttataacagagtgaattgttgcttaagaaattcttggcccctgttttaagttataagtcacatgagtaagtacatagagagatggttctgatggcatgtgtttgtgtgacaggcagaagggcttatagaggagaaaaggaggctggcttgttatgagtttttggagcaattctgcaactgtgttgcatccaatgtctctctattacagaaatccatccggtgccctgatgagtgccgcgaggccatctcctcccttgtatatgcagccgctagagtctctgaagtccctgagctacgcgacctcagatctttatttgctgagagatacggaaacacacttgatcagtttgtgaaccctgagtttgtagagagattcaaagc

SEQ ID NO: 145950 - DNA, 467 bp, Arabidopsis thaliana
atgggaaggacagggacaacagggacaacaaggaagacatgtgttaattatgggaaggacagggacaacagggacaacaaggacgacagggacaacaaggccaaccatgggaaggacagggacagcagggacaacaagggttccgtgacatgcaccagaaggtggaacatgtgagacgcggagacgtctttgccaacactccaggctctgcccactggatctacaactcaggagaacagccacttgtcatcatcgctcttcttgacatcgccaactactaaaaccaactcgaccgcaaccctagagtgttccatttggccggaaacaaccagcatggaggctttggcggttcacagcaacaacaagaacagaaaaacttgtggagcgggttcgacgcacaggttatagcttaagcattgaaaattgacgtttagttggctcagcagtttcagaaccaacaagatagc

SEQ ID NO: 145951 - DNA, 416 bp, Arabidopsis thaliana
cggtctttcccaatgctgaacagataatgggtattccgaacaaattttacacccatgacactgtaaaacaaagtcgcgtgtcagttaagctccacaatcttttaatgattccaaggagtctttaacacaaaatataatatttgcggtaataatcaacattttactagccaagtaaatctgttgggaagatactggaaaaggaaaggggttttctgcttatatatcatgtcatgcaattagtcatactgttttcttacacaaaattataatattcaaggaaaaactgggtccacattattgagtacgttatgccattttcagaaatatggtacgaattatggaagtacctgtcaccatgagcaaagatagacttatgacaatcaccaaaatccaaaccccaaattttcaaatttttg

SEQ ID NO: 145952 - DNA, 488 bp, Arabidopsis thaliana
  unsure (1)..(488): unsure at all n locations
aaaacatacacacatagcaaaaaatggcaaacaagttgttcctcgtctgcgcagctctcgctctctgcttcctcctcaccaacgcttccatctaccgcaccgtcgttgagttcgaagaagatgacgccactaaccccataggcccaaaaatgaggaaatgccgcaaggagtttcagaaagaacaacacctaagagcttgccagcaattgatgctccagcaagcaaggcaaggccgtagcgatgagtttgatttcgaagacgacatggagaacccacagggacaacagcaggaacaacagctattccagcagtgctgcaacgagcttcgccaggaagagccagattgtgtttgccccaccttgaaacaagctgccaaggccgttagactccagggacagcaccaaccaatgcaagtcaggaaaatntaccagacagccaagcacttgcccaacgtttgcgacattccgcaagttgatgtttgctccttc

SEQ ID NO: 145953 - DNA, 492 bp, Arabidopsis thaliana
  unsure (1)..(492): unsure at all n locations
cccacgcgtccgaagaggaagaaaaatgggtcgagtctcatctattatctctttctctttgacactcttgatcctcttcaatggctacactgcccaacagtggcccaacgagtgccagctcgatcaactcaatgcgctcgaaccatcccaaatcatcaagagcgagggtggtcgcatcgaggtctgggaccaccatgcaccccagctccgttgctccggctttgcctttgagcgtttcgtcattgagcctcagggtcttttcttgcccactttcttgaacgccggcaaactcacgtttgttgttcacggaaggggtctaatgggaagagttattccgggatgcgccgagacgttcatggagtcaccggtatttggagaaggtcaaggtcagggtcagagtcaagggttccgtgacatgcaccagaaagtagagcacctactgtgcggtgacaccatngcaacaccatctggtgtagctcaatggttctacaa

SEQ ID NO: 145954 - DNA, 486 bp, Arabidopsis thaliana
  unsure (1)..(486): unsure at all n locations
ctgaactttagcgcgagcttgaacagcggcgtttggattacgcaagattggatcgccggagtctcccatggcgacaaaagggatctcggagctgtgctagggtttttcgtgaggaagcggatggaggatttttgcagagagaagaagcaaaactaacaaaacccaaattcaatctctaaccggattctgattattaagaaaaccgagttgagatccaacagatcacgatacgtaaaacgatgccgtgctcgtatatctcggtcacactntaacccactcgctgaacaagagggttatcagcttcaattacctttntttttggattttacaattttttgttaacatgtcaaattattggttttgtaggcattcgttgatcnttggctcccatatttttctaaaatccattaacaaaaaacataattaaaatagattccaattttatttatttttacaataacaggcttctaaattttaaatatttta

SEQ ID NO: 145955 - DNA, 505 bp, Arabidopsis thaliana
gcattgcaaatactgcgagaataagttcacgagcgaaattgctggagagtacaatgtcaattcttctgcagttgggcaactagaaggagttgatcctgttgatcaattagctggacgatgcattcgcgttgtcaagaacatggaagctgaaacaaatgggtgtgtattatgcagtggttctgatttttgtagatcaggatttgggccacggacaatcataatatgtgatcagtgtgaaaaggagtaccacattggatgtttgagtagtcagaatattgtggatttaaaggaattacctaaaggaaactggttttgctccatggactgtacgaggatcaacttcacattacaaaagttacttcttggtggggcggagaagctttcagattcttctttgggataatacagacgaagcaggagagaaatgatgtatatttcatcagtgatcttgacatcagatggagactgatcagcggcaaagtactttctctgaagctcgatgtac

SEQ ID NO: 145956 - DNA, 489 bp, Arabidopsis thaliana
  unsure (1)..(489): unsure at all n locations
atcacaaacgagtaagaatacaaatacaaatagcaaaaaaaatggcaaacaagctcttcctcgtctgcgcaactttcgccctctgcttcctcctcaccaacgcttccatctaccgcactgttgtcgagttcgacgaagatgacgccagcaaccccatgggcccaagacagaaatgtcagaaggagtttcagcaatcacagcacctaagagcttgccagaaattgatgcgcatgcaaatgaggcaaggccgtggtggtggtccctccctcgacgatgagttcgatttggaagacgacatcgagaacccacaaggcccccagcagggacaccagatcctccagcagtgctgcagcgagcttcgccaggaagagccagttngtgtttgccccaccttgagacaagctgccagggccgttagcctccagggacaacacggaccattccaatccaggaaaatttacaagacagctaagtacttgcctaacattt

SEQ ID NO: 145957 - DNA, 428 bp, Arabidopsis thaliana
  unsure (1)..(428): unsure at all n locations
caactctttataccagcctctgtaacgttcgatcatcttgtatttcatttcaaccactcattgtttttagtttgttttacgaagaatcaactatggcgacgaagagaagcgttggaactttgaaggaagcggatctgaagggaaagagtgtgttcgtgagggttgatctcaacgttcctttggatgataactctaacatcaccgatgacaccaggattcgtgccgctgttcccaccatcaagtacttgatgggtaatggatctagggttgttctctgcagtcacttgggccgcccaaaaggtgttactcctaagtacagcttaaagcctcttgtgcccagattgtctgaacttcttggtgttgaggttgtaatggcaaatgactctattggtgaggaagtncagaagttggttgcaggactacctgaa

SEQ ID NO: 145958 - DNA, 510 bp, Arabidopsis thaliana
aaaatggttaagctcagcaatctcctcgttgcaaccttcggggttctcctcgtccttaacggctgccttgcgaggcagtcacttggggttcctcctcagctacagaacgagtgtaacctcgacaacctagatgttctccaagccaccgaaactatcaagagtgaagccggtcagatcgagtactgggaccacaaccaccctcagctccgatgtgttggtgtttccgttgctcgttatgtaattgaacaaggcggtctttacttgcccaccttcttcacttccccaaaaatttcctacgtcgttcaaggaacgggtatcagcggaagagtggtccctggatgtgccgagaccttcatggactcgcagccgatgcaaggacaacaacaaggccaaccatggcaaggacgacagggacaacaaggccaaccatgggaaggacagggacaacagggacaacaaggaagacaaggccaaccatgggaaggacaggacaacagggacaacaaggac

SEQ ID NO: 145959 - DNA, 528 bp, Arabidopsis thaliana
gccggaaacaaccagcagggaggctttggcggttcacagcaacaacaagaacagaaaaacttgtggagcgggttcgacgcacaggtcatagctcaagcattgaaaattgacgttcagttggctcagcagcttcagaaccaacaagacagcagaggaaacatcgttcgtgttaagggacctttccaggtcgtgaggccacctctaagacagccctacgagagcgaggagtggagacacccacgtagcccacagggcaacggccttgaggagactatctgcagcatgaggtcccacgagaacattgacgaccctgctcgtgctgacgtgtacaagcccagcctaggtcgcgtgaccagcgtcaacagctataccttgcccatcttggagtatgtcaggctcagtgccactcgtggcgttctccagggtaatgcgatggtgcttcctaaatacaacatgaacgctaacgagatcttgtactgcactggaggacaaggaaagatccaagtggtcaacgacaacggacagaac

SEQ ID NO: 145960 - DNA, 453 bp, Arabidopsis thaliana
aaaaaaagatagagatggagaatcacacgaccatgaaagtttcatctcttaattgtatcgatctagccaacgacgatcttaatcattctgttgtttccctcaaacaggcatgtttggattgtggatttttctatgtgatcaatcatgggataagcgaagagttcatggacgatgttttcgagcagagcaagaagctttttgctcttcctttagaagaaaagatgaaagtgttgagaaacgaaaagcatcgaggctatacacctgttcttgatgaacttttagatcccaagaatcaaatcaatggggatcacaaagagggttattacattggaattgaagttcctaaagatgatcctcattgggataagccattctatggtcctaacccttggcctgatgctgatgttttacctggttggcgagaaacaatggagaaatatcatcaagaagcat

SEQ ID NO: 145961 - DNA, 408 bp, Arabidopsis thaliana
cattttcgtagccgcaagactcctttcagattcttacttgcagctatgggtaaagagaagtttcacattaacattgtggtcattggtcatgttgattctggaaaatcgaccacaactggtcacttgatctataagcttggtggtattgacaagcgtgtcatcgagaggttcgagaaggaagctgctgagatgaacaagaggtccttcaagtacgcatgggtgttggacaaacttaaagccgagcgtgagcgtggtattaccatcgatattgctctatggaagttcgagaccaccaagtactactgcacagtcattgatgccccaggacatcgtgatttcatcaagaacatgattactggtacctcccaggctgattgtgctgttcttatcattgactccaccactgga

SEQ ID NO: 145962 - DNA, 493 bp, Arabidopsis thaliana
  unsure (1)..(493): unsure at all n locations
caataaagaggaagaaaaatgggtcgagtctcatctattatctctttctctttgacactcttgatcctcttcaatggctacactgcccaacagtggcccaacgagtgccagctcgatcaactcaatgcgctcgaaccatcccaaatcatcaagagcgagggtggtcgcatcgaggtctgggaccaccatgcaccccagctccgttgctccggctttgcctttgagcgtttcgtcattgagcctcagggtcttttcttgcccactttcttgaacgccggcaaactcacgtttgttgttcacggaaggggtctaatgggaagagttattccgggatgcgccgagacgttcatggagtcaccggtatttggagaaggtcaaggtcagggtcagagtcaaggggtccgtgacatgcaccagaaagtagagcacctacggtgcggtgacaccatngcaacaccatctggtgtagctcaatgngtctacaacaatggaa

SEQ ID NO: 145963 - DNA, 414 bp, Arabidopsis thaliana
gccggaaacaaccagcagggaggctttggcggttcacagcaacaacaagaacagaaaaacttgtggagcgggttcgacgcacaggtcatagctcaagcattgaaaattgacgttcagttggctcagcagcttcagaaccaacaagacagcagaggaaacatcgttcgtgttaagggacctttccaggtcgtgaggccacctctaagacagccctacgagagcgaggagtggagacacccacgtagcccacagggcaacggccttgaggagactatctgcagcatgaggtcccacgagaacattgacgaccctgctcgtgctgacgtgtacaagcccagcctaggtcgcgtgaccagcgtcaacagctataccttgcccatcttggagtatgtcaggctcagtgccactcgtggc

SEQ ID NO: 145964 - DNA, 399 bp, Arabidopsis thaliana
tgagttttcgaagaaccatttcgtgtggtttttgcgtcgcgtggtcagagaaggttgaatcagcagaatcaagacatcatgaactcacctcctccttcttctaatgatggcttggcgaagcgaaaaagaggtcgaccgcgcaaagatgaaaactcaactccaaaaccggacatgaatttggtaggtaaggtggttactggtgtaatcgaaggatctttcgacgcaggctatctccttaacgttaaggttaaagacagtgacacccaactcagaggtctcgtgttcatacggggcagagtcactccgatcactccagaaaacgacgtggcttcctttgttaaaatgtacggaagagaagatatcaagaacaacccaaaccgatcaattctttccctactg

SEQ ID NO: 145965 - DNA, 541 bp, Arabidopsis thaliana
gtagccgcaagactcctttcagattcttacttgcagctatgggtaaagagaagtttcacattaacattgtggtcattggtcatgttgattctggaaaatcgaccacaactggtcacttgatctataagcttggtggtattgacaagcgtgtcatcgagaggttcgagaaggaggctgctgagatgaacaagaggtccttcaagtacgcatgggtgttggacaaacttaaggccgagcgtgagcgtggtattaccatcgatattgctctatggaagttcgagaccaccaagtactactgcacagtcattgatgccccaggacatcgtgatttcatcaagaacatgattactggtacctcccaggctgattgtgctgttcttatcattgactccaccactggaggttttgaggctggtatctctaaggatggtcagacccgtgagcacgctcttcttgctttcacccttggtgtcaagcagatgatttgctgttgaacaagatggatgccaccacccccaaatactccaaggctggtacgatg

SEQ ID NO: 145966 - DNA, 471 bp, Arabidopsis thaliana
caaatgcacaagagagtagttatggaacatattgtcctggcatgaatccgtcacccccatctgaatatatcacttgcttaggggatttatatagtgttgcttggatggaagatagtgagactcacaatttaaagaaagagaccataaagcaacaataccacacggtgaagatgaggacatcaaactacaatacctactcaggtggctctcatgtgatggaatacggtaacaatagtattaagtcggagaagctttatctttaccaagggtttgatccagccaccgttaatctcccactaaacgaattaccggtcaagtcaaaaataggagtcgttaaccaacgcgatgcggaccttctcttcctttggcatatgtatcggacatcggaagatgggtcaaggaaagaggatgacacattgaaggaattaactgagacaacaaggcataggaaacatttagatgcaagcgtcg

SEQ ID NO: 145967 - DNA, 384 bp, Arabidopsis thaliana
ttaagcttcaactatatatttgcatgttatttgccaaaaggatttgacaataatgcaacaagagtttcattgaaaatttcaagaaccctagttaataacgataatgggttcgagagttttggcttccttctttgttttcttaatcttcacggtcatcacattgcctcccacgatccaagcttgcactccttgtactcgtcctcatcctccggttccgaaacctccacaacacggcggtggtggaggtggtggtagcaagccgcctccacatcacggtggaaaaggtggtggtaaacccccaccccacggtggaaaaggtggaggaccgccgcatcatggtggaggaggaggaggaggagggaaattaccgccggttgttagacc

SEQ ID NO: 145968 - DNA, 474 bp, Arabidopsis thaliana
caaaaagaaaatggttaagctcagcaatctcctcgttgcaaccttcggggttctcctcgaccttaacggctgccttgcgaggcagtcacttggggttcctcctcagctacagaacgagtgtaacctcgacaacctagatgttctccaagccaccgaaactatcaagagtgaagccggtcagatcgagtactgggaccacaaccaccctcagcttcgatgtgttggtgtttccgttgctcgttatgtaattgaacaaggcggtctttacttgcccaccttcttcactttcccaaaaattttctacgtcggtcaaggaacgggtatcaacggaagagtggttcctggatgtgccgagaccttcatggactctcagccgatgcaaggacaacaacaaggccaaccattgcaaggacgacagggacaacaaggccaaccatgggaaggacagggacaacagggacaacaaggaagaca

SEQ ID NO: 145969 - DNA, 473 bp, Arabidopsis thaliana
cggacgcgtgggaaatataagaaataacaaaatggctcgagtctcttctcttctttctttcttcttaacacttttgatccttttccatggctacgcggctcaacagggtcagcagggtcagcagtttccgaacgagtgccagctcgaccagctcaatgcgctcgagccgtcacacgtactgaagagcgaggctggtcgcatcgaggtgtgggaccaccacgctcctcagctccgttgctcaggtgtctcctttgcacgttacatcatcgagtctaagggtctctacttgccctctttctttaacaccgcgaagctctctttcgtggctaagggacgaggtcttatgggaaaagtgatccctggatgcgccgaaacattccaagactcatcagagttccaaccacgcttcgaaggtcaaggtcaaagccagaggtttcgtgacatgcaccagaaagtggagcacattatgagcg

SEQ ID NO: 145970 - DNA, 473 bp, Arabidopsis thaliana
aataaagaggaagaaaaatgggtcgagcctcatctattatctctttctctttgacactcttgatcctcttcaatggctacactgcccaacagtggcccaacgagtgccagctcgatcaactcaatgcgctcgaaccatcccaaatcatcaagagcgagggtggtcgcatcgaggtctgggaccaccatgcaccccagctccgttgctccggctttgcctttgagcgtttcgtcattgagcctcagggtcttttcttgcccactttcttgaacgccggcaaactcacgtttgttgttcacggaaggggtctaatgggaagagttattccgggatgcgccgagacgttcatggagtcaccggtatttggagaaggtcaaggtcagggtcagagtcaagggttccgtgacatgcaccagaaagtagagcacctacggtgcggtgacaccattgcaacaccatctgggtagctcaat

SEQ ID NO: 145971 - DNA, 467 bp, Arabidopsis thaliana
  unsure (1)..(467): unsure at all n locations
aatttgtgtgctcttagcctttactctatagttttatatcatatcaatcgacatggcgaatgtggaccgtgatcggcgtgtgcatgtagaccgtactgacaaacgtgttcatcagccaaactacgaagatgatgtcggttttggtggctatggcggttatggtgctggttctgattataagagtcgcggcccctccactaaccaaatcttggcacttatagcaggagttcccattggtggcacactgctaaccctagctggactcactctagccggttcggtgatcggcttgctagtctccatacccctcttcctcctcttcagtccggngatagtcccggcggctctcactattgggcttgctgtgacgggaatcttggcttttggtatgtttgggttgacgggtctgagctcggtctcgtgggtccttaactactctcgtgggacgagtgatacagtgccagagc

SEQ ID NO: 145972 - DNA, 443 bp, Arabidopsis thaliana
  unsure (1)..(443): unsure at all n locations
gttcaccgccgatgatctgctctgtgccacagctgagatcatggggaaaagtacatatggcacagcatacaaggccacattagaagacggcaatgaagtcgctgtgaagcgtctgagagagaaaacaacaaaaggagtcaaagaattcgaaggagaagtcacagctttaggcaagattcgtcatcagaatcttcttgcactaagagcttactacttaggacctaaaggagagaagcttctcgtctntgattacatgtctaaaggaagcctctctgcatttcttcacgctcgaggaccagaaaccctaattccgtgggaaacaagaatgaagatagcaaaaggaatcagtcgtggtttagctcaccttcacagcaacgagaacatgatccatgagaatctcacagcaagcaacattctcctcgacgaacaaaccaacgcacaca

SEQ ID NO: 145973 - DNA, 389 bp, Arabidopsis thaliana
cggacgcgtgggtgctgcttggactgtactactttgatactttgttttctcgtatacctgttcctgtcatgcgccagattgtatcaaaccttgagaagatgaatttaccaactaaaccttctggttcaaccggagacatgacccgtggctcagaagacactgcccgtcgtccaccatcagtaaaagcatccctctctgtttcatttggtcagcgtgcacctcatcgtgcttccaccagaggcttttcttctgttcgccgttctccaccgactggttatgacagatatggaggcgatgaattacaacagcggttctcacgtagaagccagagccgagactatatttcttactgagtctcatattgacaacgggaaagagcgagggtgtat

SEQ ID NO: 145974 - DNA, 404 bp, Arabidopsis thaliana
gacgagttttccaataactacggcgacgtgactcttaccgagttgcaatcgtcggcggatccgaaagccgggaagtggatagaggctgttgagggaaaggagtggaccgatgtgagcgatttggtggaagagatgttggaatcagaggttctgatcagaggccgagtgcacacgaatcgtccaacgtctaacaaattggggtttgtggtcttgagggagagcggatcaactgttcagtgcgtggttagccaatcagagaagaccaaagtaggtgccaacatggttaaatacctcaagcagctgagtcgcgaatcctttgtcgatgttatcggtgtcgtcactctccccaaggagccgcttacgggaactacgcagcaagttgaaatttaagtgagaaaagtgta

SEQ ID NO: 145975 - DNA, 375 bp, Arabidopsis thaliana
gtcggaatttcgaaaaaccctaattcagctaaaggttgatcgttgatctaaaagctcgagtgatgaagggaaattggtcgatcgtacgaaaggttcttcatcgccagttctccactctccgttcctcgacaccatcgtcgcgattatctacttccatccgaccgcttgttctggccccaaactcgatatcgtcgctaatcgctagaaactcattgtttactgcctccaacattggtccatccatcgattttaacttctccaacacttcgcttcctcatcggagaagcctctgttcggaagctggaggtgaaaatggtgttgttctagtgaaatcagaggaagagttcatcaatgcaatgagcaaagcttaagatg

SEQ ID NO: 145976 - DNA, 375 bp, Arabidopsis thaliana
  unsure (1)..(375): unsure at all n locations
cttagatcttcttttcaaatttcaatggcgtccggtgatgttgagtatcggtgcttcgttggaggtctagcatgggccactgatgacagagctcttgagactgccttcgctcaatacggcgacgttattgattccaagatcattaacgatcgtgagactggaagatcaaggggattcggattcgtcaccttcaaggatgagaaagccatgaaggatgcgattgagggaatgnacggacaagatctcgatggccgtagcatcactgttaacgaggctcagtcacgaggaagcggtggcggcggaggccaccgtggaggtggtggcggtggataccgcagcggcggtggtggaggttactccggtggaggtggtagc

SEQ ID NO: 145977 - DNA, 391 bp, Arabidopsis thaliana
  unsure (1)..(391): unsure at all n locations
caaaaagaaaatggttaagctcagcaatctcctcgttgcaaccttcggggttctcctcgtccttaacggctgccttgcgaggcagtcacttggggttcctcctcagctacagaacgagtgtaacctcgacaacctagatgttctccaagccaccgaaactatcaagagtgaagccggtcagatcgagtactgggaccacaaccaccctnagctccgatgtnntgttgtttccgttgctcgttatgtaattgaacaaggcggtctttacttgcccaccttcttcacttccccaaaaatttcctacgtcgttcaaggaacgggtatcagcggaagaatgggtcctggatgtgcccagaccttcatggactcgcagcctatgcaaggacaacaa

SEQ ID NO: 145978 - DNA, 428 bp, Arabidopsis thaliana
  unsure (1)..(428): unsure at all n locations
ctagccgctacacacttttctgcgatatctctgagatttgttgacagtctctaaccatgggtaaagagaagtttcacatcaacattgtggtcattggccacgtcgattctggaaagtcgaccaccactgggcacttgatctacaagttgggtggtattgacaagcgtgtcattgagaggttcgagaaggaggctgctgagatgaacaagaggtccttcatnnacgcatgggttttggacaaacttaaggctgagcgtgagcgtggtatcaccattgacattgctctctggaagttcgagaccaccaagtactactgcactgtcattgatgctcctggtcatcgtgatttcatcaagaacatgatcactggtacctcccaggctgattgtgctgtccttatcattgactccaccactggtggttttgag

SEQ ID NO: 145979 - DNA, 397 bp, Arabidopsis thaliana
  unsure (1)..(397): unsure at all n locations
gcgaacaaaaagaaaatggttaagctcagcaatctcctcgttgcaaccttcggggttctcctcgtccttaacggctgccttgcgaggcagtcacttggggttcctcctcagctacagaacgagtgtaacctcgacaacctagatgttctccaagccaccgaaactatcaagagtgaagccggtcagatcgagtactgggaccacaaccaccctcagctccgatgtgttggtgttncccgtgctcgttatgtaattgaacaaggcggtctttacttgcccaccttcttcacttccccaaaaatttcctacgtcgttcaaggaacgggtatcagcggaagagtggtccctggatgtgccgagaccttcatggactcgcagccgatgcaaggacaacaac

SEQ ID NO: 145980 - DNA, 423 bp, Arabidopsis thaliana
  unsure (1)..(423): unsure at all n locations
aagaaaacatacacaaatagcaaaacatggctaacaagctcttcctcgtctgcgcaactctcgccctctgcttcctcctcaccaacgcttccatctaccgcaccgttgtcgaattcgaagaagatgacgccagcaaccccgtaggtccaagacagagatgccagaaggagtttcagcaatcacaacacctaagagcttgccagagatggatgagcaagcaaatgaggcaagnacgtggtggtggtccttccctcgacgatgagttcgatttcgagggcccccagcagggataccagctactccagcagtgctgcaacgagcttcgccaggaagagccagtttgcgtttgccccaccttgaaacaagctgccagggcagttagcctccaaggacagcacggaccattccaatccaggaaaattt

SEQ ID NO: 145981 - DNA, 435 bp, Arabidopsis thaliana
  unsure (1)..(435): unsure at all n locations
ctcagcaatctcctcgttgcaaccttcggggttctcctcgtccttaacggctgccttgcgaggcagtcacttggggttcctcctcagctacagaacgagtgtaacctcgacaacctagatgttctccaagccaccgaaactattaagagtgaagccggtcagatcgagtactgggaccacaaccaccctcagctccgatgtgttggtgtttccgttgctcgtnntgtaattgaacaaggcggtctttacttgcccaccttcttcacttccccaaaaatttcctacgtcgttcaaggaacgggtatcagcggaagagtggtccctggatgtgccgagaccttcatggactcgcagccgatgcaaggacaacaacaaggccaaccatggcaaggacgacagggacaacaaggccaaccatgggaaggacagggacaa

SEQ ID NO: 145982 - DNA, 427 bp, Arabidopsis thaliana
cggacgcgtgggataaagaggaagaattttgggtcgagtctcatctattatctctttctctttgacactcttgatcctcttcaatggctacactgcccaacagtggcccaacgagtgccagctcgatcaactcaatgcgctcgaaccatcccaaatcatcaagagcgagggtggtcgcattgaggtctgggaccaccatgcaccccagctccgttgctccggggttgcctttgagcgtttcgtcattgagcctcagggtcttttcttgcccactttcttgaacgccggcaaactcacgtttgttgttcacggaaggggtctaatgggaagagttattccgggatgcgccgagacgttcatggagtcaccggtatttggagaaggtcaaggtcagggtcagagtcaagggttccgtgacatgcaccag

SEQ ID NO: 145983 - DNA, 423 bp, Arabidopsis thaliana
  unsure (1)..(423): unsure at all n locations
aaaaatggctcgagtctcttctcttctttctttctccttaacacttttgatccttttccatggctacgcggctcaacagggtcagcagggtcagcagtttccgaacgagtgccagctcgaccagctcaatgcgctcgagccttcacacgtactgaagagcgaggctggtcgcatcgaggtgtgggaccaccacgctcctcagctccgttgctcaggtgtctcnnntgcacgttacatcatcgagtctaagggtctctacttgccctctttctttaacaccgcgaagctctccttcgtggctaaaggacgaggtcttatgggaaaagtgatccctggatgcgccgaaacattccaagactcatcagagttccaaccacgcttcgaaggtcaaggtcaaagccagaggttccgtgacatgcacca

SEQ ID NO: 145984 - DNA, 357 bp, Arabidopsis thaliana
  unsure (1)..(357): unsure at all n locations
ggaggacaagaatgggcattggaccagctattacatcgttttactgactttccattcacgctcgtacaagtttccctgatggaaacaggttccttatatgtgtcactatcattctcttcatcttctaaagcatctgtggattgggaaccacaccaaatatcatcaagtaaacgcctttctgcagccattgcagcagcctgaattggactaagatctgacataatgctgntatcaccaccaagacgttgaggtcctgaaggtaaaagagttcccgcacgcactcttttttctgctgcttgagctgcagttgctctgagaaatgatagagaaggctgacgagaaagtccacccaaacgc

SEQ ID NO: 145985 - DNA, 386 bp, Arabidopsis thaliana
  unsure (1)..(386): unsure at all n locations
tcatcacaaacgagtaagaatacaaattcaaatagcaaaaaaaatggcaaacaagctcttcctcgtctgcgcaactttcgccctctgcttcctcctcaccaacgcttccatctaccgcactgttgtcgagttcgacgaagatgacgccagcaaccccatgggcccaagacagaaatgtcagaaggagtttcagcaatcacagcacctaagagcttgccagaaattgatgnccatgcaaatgaggcaaggccgtggtggtggtccctccctcgacgatgagttcgatttggaagacgacatcgagaacccacaatgcccccagcagggacaccagatcctccagcagtgctgcagcgagcttccccaagaagagccagtttgtgttt

SEQ ID NO: 145986 - DNA, 290 bp, Arabidopsis thaliana
  unsure (1)..(290): unsure at all n locations
aacaaacaaaaagaaaatggttattctcagcaatctcctcgttgcaaccttcggggttctcctcgtacttaacgggtgccttgcgaggcattcacttggggttcctcctcagctacagaacgagtgtgacctccacaacctagatgctctccaagccaccgaaactatcaagtgtgaagccggtcagatcgagtactgggaccacaactacncttagntnntattttttgttntttacgatgctcgtcttcgaattgaacaaagcggtcttcatttggccaccttcttaa

SEQ ID NO: 145987 - DNA, 444 bp, Arabidopsis thaliana
ggaaggacagggacagcagggacaacaagggttccgtgacatgcaccagaaggtggaacatgtgagacgcggagacgtctttgccaacactccaggctctgcccactggatctacaactcaggagaacagccacttgtcatcatcgctcttctcgacatcgccaactaccaaaaccaactcgaccgcaaccctagagtgttccatttggccggaaacaaccagcagggagggtttggcggttcacagcaacaacatgaacagaaaaacttgtggagcgggttcgacgcacaggtcatagctcaagcattgaaaattgacgttcagttggctcagcagcttcagaaccaacaagacagcagaggaaacatcgttcgtgttaagggacctttccaggtcgtgaggccacctctaagacagccctacgagagcgaggagtggagaca

SEQ ID NO: 145988 - DNA, 431 bp, Arabidopsis thaliana
  unsure (1)..(431): unsure at all n locations
catagcaaaaaatggcaaacaagttgttcctcgtctgcgcagctctcgctctctggttcctcctcaccaacgctggcatctaccgcaccgtcgttgagttcgaagaagatgacgccactaaccccataggcccaaaaatgaggaaatgccgcaaggagtttcagaaagaacaacacctaagagcttgccagcaattgatgctccagcaagcaaggcaaggnngtagcgatgagtttgatttcgaagacgacatggagaacccacagggacaacagcaggaacaacagctattccagcagtgctgcaacgagcttcgccaggaagagccagattgtgtttgccccaccttgaaacaagctgccaaggccgttagactccagggacagcaccaaccaatgcaagtcaggaaaatttaccagacagccaagcac

SEQ ID NO: 145989 - DNA, 429 bp, Arabidopsis thaliana
  unsure (1)..(429): unsure at all n locations
agaaaacatacacaaatagcaaattttttctaacaagctcttcctcgtctgcgcagctctcgccctctgcttgcgggggaccaacgcttccatctaccgcaccgttgtcgaattcgaagaagatgacgccagcaaccccgtaggtccaagacagagatgccagaaggagtttcagcattcacaacacctaagagcttgccagtgatggnnnagcaagcaatttagttaaggacgtggtggtggtccttcccttgacgatgagttcgattccgagggcccccagcagggataccagctactccagcagtgctgcaacgagcttcgccaggaagagccagtttgcgtttgccccaccttgaaacaagcttccagggcagttttgtctccagggacagcacggaccattccaatccaggaaaatataccagt

SEQ ID NO: 145990 - DNA, 425 bp, Arabidopsis thaliana
aacaaacaaaaagaaaatggttaagctcagcaatctcctcgttgcaaccttcggggttctcctcgtccttaacggctgccttgcgaggcagtcacttggggttcctcctcagctacagaacgagtgtaacctcgacaacctagatgttctccaagccaccgaaactatcaagagtgaagccggtcagatcgagtactgggaccacaaccacccttagcttttatgtgttggtgtttcctgtgctcgttatgtaattgaacaaggcggtctttacttgcccaccttcttcacttccccaaaaatttcctacgtcgttcaaggaacgggtatcagcggaagagtggtccctggatgtgccgagaccttcatggactcgcagccgatgcaaggacaacaacaaggccaaccatggcaaggacgacagg

SEQ ID NO: 145991 - DNA, 441 bp, Arabidopsis thaliana
  unsure (1)..(441): unsure at all n locations
aacattgtccgagtccaaggcccgttcggtgtcattaggccgcctttgaggggccagagacctcaggaggaggaagaagaagaagaaggacgacatggacgacacggtaatggcttagaggagaccatctgcagcgccaggtgcaccgataacctcgatgacccgtctcgtgctgacgtgtacaagccacagctcggttacatcagcactctcaacagttacgatctccnnatccttcgcttcatccgtctctcagccctccgtggatctatccgtcaaaacgcaatggtgcttccacagtggaacgcaaacgcgaacgctattctttacgtgacagacggtgaagcccaaatccagatcgtaaacgacaatggtaacagagtgtttgacggacaagtctctcaaggacagctcatagccgtaccacaaggtttctcggtg

SEQ ID NO: 145992 - DNA, 441 bp, Arabidopsis thaliana
  unsure (1)..(441): unsure at all n locations
aaaaagaaaatggttaagctcagcaatctcctcgttgcaaccttcggggttctcctcgtccttaacggctgccttgcgaggcagtcacttggggttcctcctcagctacagaacgagtgtaacctcgacaacctagatgttctccaagccaccgaaactatcaagagtgaagccggtcagatcgagtactgggaccacaaccaccctcagctccgatgtgttggtgttnncgttgctcgttatgtaattgaacaaggcggtctttacttgcccaccttcttcacttccccaaaaatttcctacgtcgttcaaggaacgggtatcagcggaagagtggtccctggatgtgccgagaccttcatggactcgcagccgatgcaaggacaacaacaaggccaaccatggcaaggacgacagggacaacaaggccaaccatgggaa

SEQ ID NO: 145993 - DNA, 457 bp, Arabidopsis thaliana
  unsure (1)..(457): unsure at all n locations
ggaaancccggggcggcccacagccttcggtttggaagagacctctttttctctcttcttttaactcgacgcactttagaaagaaacggtagtccgacgacctctccgtgggccgctgaatcctcatcgctgattcttggcggctttctttttgatgaaattggattacgatggctggatattcaaccaaaggagctcctactaatggatcagtctacgtttcaaatctccccttaggaactgacgagaatatnntcgctgactattttgggaccattgggttgcttaaggtatggtattggccagagagacaaacgaactggcactcccaaggtatggctgtaccgggataaagagactgatgagcccaagggagatgctactgttacctatgaggatccgcatgctgctttggctgctgttgaatggatcaatatcaaatgatttcatggaaaca

SEQ ID NO: 145994 - DNA, 429 bp, Arabidopsis thaliana
  unsure (1)..(429): unsure at all n locations
cacatagcaaaaaatggcaaacaagttgttcctcgtctgcgcagctctcgctctctgcttcctcctcaccaacgcttgcatctaccgcaccgtcgttgagttcgaagaagatgacgccactaaccccataggcccaaaatggaggaaaggccgaagggggttcaagaaggaccaccacctaaaagctggccagcaatggatgctccagcaggcagggcaggtcnntgcggaggagttggatttcgaagaccacatggagaacccacaggcacaacagcgggcacaacagctatcccagcagtgctgaaacgagcttcgccaggaagagccagattgtgtgtgccacaccttgaaacaagctgccaaggccgtgagactccaggcacagccccacccagcgcatgtcgggaaaatttaccagacagccaa

SEQ ID NO: 145995 - DNA, 436 bp, Arabidopsis thaliana
  unsure (1)..(436): unsure at all n locations
cacacatagcaaaaaatggcaaacaagttgttcctcgtctgcgcagctctcgctctgtgcttcctcctcaccaacgctgtgcatctaccgcaccgtcgttgagttcgaagaagatgacgccactaaccccataggcccaaaaatgaggaaatgccgcaaggagtttcagaaagaacaacacctaagagcttgccagcaattgatgctccagcaagcaaggcaaggncgtagcgatgagtttgatttcgaagacgacatggagaacccacagggacaacagcaggaacaacagctattccagcagtgctgcaacgagcttcgccaggaagagccagattgtgtttgccccaccttgaaacaagctgccaaggccgttagactccagggacagcaccaaccaatgcaagtcaggaaaatttaccagacagccaagcac

SEQ ID NO: 145996 - DNA, 448 bp, Arabidopsis thaliana
  unsure (1)..(448): unsure at all n locations
caaaaaatggcaaacaagttgttcctggtctgcgcagctctcgctctctgcttcctggtcaccaacgcttgcatcggcgcggaccgtcgttgagttcgaagaagatgacgccactaaccccataggcccaaaaatgaggaaatgccgcaaggagtttcagaaagaacaacacctaagagcttgccagcaattgatgctccagcaagcaaggcaaggccgtagcgatgagggtgttntcgaagacgacatggagaacccacagggacaacagcaggaacaacagctattccagcagtgctgcaacgagcttcgccaggaagagccagattgtgtttgccccaccttgaaacaagctgccaaggccgttagactccagggacagcaccaaccaatgcaagtcaggaaaatttaccagacagccaagcacttgcccaacgtttgcgacatt

SEQ ID NO: 145997 - DNA, 372 bp, Arabidopsis thaliana
  unsure (1)..(372): unsure at all n locations
gttaagctcagcaatctcctcgttgcaaccttcggggttctcctcgtccttaacggctgccttgcgaggcagtcacttggggttcctcctcagctacagaacgagtgtaacctcgacaacctagatgttctccaagccaccgaaactatcaagagtgaagccggtcagatcgagtactgggaccacaaccaccctcagctccgatgtgttggtgtttccgttgctttttatgtaattgaacaaggcggtctttacttgcccaccttcttcacttccccaaaaatttcctacgtcgttcaaggaacgggtatcagcggaagagtggtccctggatgtgccgagaccttcatggactcgcaancgatgcaagga

SEQ ID NO: 145998 - DNA, 441 bp, Arabidopsis thaliana
  unsure (1)..(441): unsure at all n locations
ctcgaccgcaaccctagagtgttccatttggccggaaacaaccagcagggaggctttggcggttcacagcaacaacaagaacagaaaaacttgtggagcgggttcgacgcacaggtcatagctcaagcattgaaaattgacgttcagttggctcagcagcttcagaaccaacaagacagcagaggaaacatcgttcgtgttaagggacctttccaggtcgtgaggcnncctctaagacagccctacgagagcgaggagtggagacacccacgtagcccacagggcaacggccttgaggagactatctgcagcatgaggtcccacgagaacattgacgaccctgctcgtgctgacgtgtacaagcccagcctaggtcgcgtgaccagcgtcaacagctataccttgcccatcttggagtatgtcaggctcagtgccactcgt

SEQ ID NO: 145999 - DNA, 444 bp, Arabidopsis thaliana
  unsure (1)..(444): unsure at all n locations
caaaaagaaaatggttaagctcagcaatctcctcgttgcaaccttcggggttctcctcgtccttaacggctgccttgcgaggcagtcacttggggttcctcctcagctacagaacgagtgtaacctcgacaacctagatgttctccaagccaccgaaactatcaagagtgaagccggtcagatcgagtactgggaccacaaccaccctcagctccgatgtgttggtgtnnccgttgctcgttatgtaattgaacaaggcggtctttacttgcccaccttcttcacttccccaaaaatttcctacgtcgttcaaggaacgggtatcagcggaagagtggtccctggatgtgccgagaccttcatggactcgcagccgatgcaaggacaacaacaaggccaaccatggcaaggacgacagggacaacaaggccaaccatgggaagg

SEQ ID NO: 146000 - DNA, 491 bp, Arabidopsis thaliana
  unsure (1)..(491): unsure at all n locations
cacgcccgtcctgactctngccaaaaaccccttgaaacccctttaatataaatcgaaaccctatggctananngctcattctgnnngttttcgcaaccctcttgcgcctgcttcaatcccctcctagccannacgcatccnnatctaccgcacannngtggtggnnagttcgaggggaagatgattgaccgtgatgccaacccatcaacaagtgtaagggtgccagagggagggtttatgaagcatcagcaactaagtaggttgcaagcaatggatctnnatgagagctcaacaaggaagaatcggatacgaagctgatgactttgagctcactcttgatgtcgatcttgaggacgatgagaacccaatggggcctcaacaacagtcatctcttaaaatgtgttgtaatgaattaaggcaagtggacaagatgtgtgtgtgtcctacactgaaaaaggcggctcaacaagtcagattccagggaatgcatg

SEQ ID NO: 146001 - DNA, 459 bp, Arabidopsis thaliana
  unsure (1)..(459): unsure at all n locations
ggaaancccgcggggacccacgcgtccgattaaaatggctcgtgtctcttctcttttttctttctccttaacacttttgatcctgttccatggctacgcggctcggcagggtcagcagggtcagcagtttccgaacgagtgccagctcgaccagctcaatgcgctcgagccttcacacgtactgaagagcgaggctggtcgcatcgaggtgtgggaccaccacgctcctcagctccgttgctcaggtnnctcctttgcacgttacatcatcgagtctaagggtctctacttgccctctttctttaacaccgcgaagctctccttcgtggctaaaggacgaggtcttatgggaaaagtgatccctggatgcgccgaaacattccaagactcatcagagttccaaccacgcttcgaaggtcaaggtcaaagccagaggttccgtgacatgcaccagaaagt

SEQ ID NO: 146002 - DNA, 419 bp, Arabidopsis thaliana
  unsure (1)..(419): unsure at all n locations
aagaaaatggttaagctcagcaatctcctcgttgcaaccttcggggttctcctcgtccttaacggctgccttgcgaggcagtcacttggggttcctcctcagctacagaacgagtgtaacctcgacaacctagatgttctccaagccaccgaaactatcaagagtgaagccggtcagatcgagtactgggaccacaaccaccctcagctccgatgtgttggtgtttcnnttgctcgttatgtaattgaacaaggcggtctttacttgcccaccttcttcacttccccaaaaatttcctacgtcgttcaaggaacgggtatcagcggaagagtggtccctggatgtgccgagaccttcatggactcgcagccgatgcaaggacaacaacaaggccaaccatggcaagtacgacagggaca

SEQ ID NO: 146003 - DNA, 436 bp, Arabidopsis thaliana
  unsure (1)..(436): unsure at all n locations
agcaaaaaatggcaaacaagttgttcctcgtctgcgcagctctcgctctctgcttcctcctcaccaacgcttccatctaccgcaccgtcgttgagttcgaagaagatgacgccactaaccccataggcccaaaaatgaggtaatgccgcaaggagtttcagaaagaacaacacctaagagcttgccagcaattgatgctccagcaagcaaggcaaggccgtagnnattggtttgatttcgaagacgacatggagaacccacagggacaacagcaggaacaacagctattccagcagtgctgcaacgagcttcgccaggaagagccagattgtgtttgccccaccttgaaacaagctgccaaggccgttagactccagggacagcaccaaccaatgcaagtcaggaaaatttaccagacagccaagcacttgcccaa

SEQ ID NO: 146004 - DNA, 433 bp, Arabidopsis thaliana
  unsure (1)..(433): unsure at all n locations
gccaaaaacctggaaacctttaaaaaattttaactatggctaagctcattctcgtttgggcaactcttgccctcttgaggctcctagccaacgcatccatctaccgcacagtggtggagttcgaggaagatgatgacgtgagcaacccacaacaaggtaagtgccagagggagtttatgaagcatcagcaactaagaggttgcaagcaatggatccgcaaganagctcaacaaggaagaatcggatacgaagctgatgactttgagctcactcttgatgtcgatcttgaggacgatgagaacccaatggggcctcaacaacagtcatctcttaaaatgtgttgtaatgaattaaggcaagtggacaagatgtgtgtgtgtcctacactgaaaaaggcggctcaacaagtcagattccagggaatgcatggaca

SEQ ID NO: 146005 - DNA, 433 bp, Arabidopsis thaliana
  unsure (1)..(433): unsure at all n locations
aagaaaacatacacaaatagcaaaacatggtttacaagctcttcctcgtctgcgcaactgtcgccctctgcttcctcctgggcaacgcttccatctaccgcaccgttgtcgaattcgaagaagatgacgccagcaaccccgtaggtccaagacagagatgccagaaggagtttcagcaatcacaacacctaagagcttgccagagatggatgagcaagcaaatnntgcaaggacgtggtggtggtccttccctcgacgatgagttcgatttcgagggcccccagcagggataccagctactccagcagtgctgcaacgagcttcgccaggaagagccagtttgcgtttgccccaccttgaaacaagctgccagggcagttagcctccagggacagcacggaccatttcaatccaggagaatttaccagtcagc

SEQ ID NO: 146006 - DNA, 416 bp, Arabidopsis thaliana
  unsure (1)..(416): unsure at all n locations
agaaataacaaaatggctcgagtctcttctcttctttctttcttcttaacacttttgatccttttccatggctacgcggctcaacagggtcagcagggtcagcagtttccgaacgagtgccagctcgaccagcttaatgcgcttgagccgtcacacgtactgaagagcgaggctggtcgcatcgaggtgtgggaccaccacgctcctcagctncgntgctcaggtnnctgctttgcacgttacatcatcgagtctaagggtctctacttgccctctttctttaacaccgcgaagctctctttcgtggctaagggacgaggtcttatgggaaaagtgatccctggatgcgccgaaacatttcaagactcatcagagttccaaccacgcttcgaaggtcaaggtcaaagccagaggtt

SEQ ID NO: 146007 - DNA, 300 bp, Arabidopsis thaliana
ctgaaggtgacgcacctggcttgcccaatggtgtgagccccggagagcgccaccatcacgcgtggggataaaccgggggctcggaaaaggttaataaggttatcaagagtagaggttggaggtggcaggacgccggagttagcagtcgagaagctcgccgtgatagaatcacgtctccctagttttacgctccaaccgcggccacccatctgcttagttcaaaatggggtaggtaagattctttacaaaacaattcttcaaaattttagtcacaaatcgtcgaaaaaaaaaaatttattt

SEQ ID NO: 146008 - DNA, 479 bp, Arabidopsis thaliana
  unsure (1)..(479): unsure at all n locations
tccgaacaagggccaaccattgggagggacagtggacaacaggtgacaacaagggaagacaagtgccaaccatgggaagggacagtggacatacagggacaacataggacgacatgggacaacaaggtccaaccatgggaaaggacatgggaccagcagtggaccaacaatagggttccgtgacaatggcaccagaagggtggaacaatgttgagaacgcggagaccgtctttgccaacaaactccaggctctgcccactnntatctacatactcaaggagaacagccacttgtcatcaatcgctcttctcgacatcgccaactaccaaaaccaactcgaccgcaaccctagagtgttccatttggccggaaacaaccagcagggaggctttggcggttcacagcaacaacaagaacagaaaaacttgtggagcgggttcgacgcacaggtcatagctcaagcattgaaaattgacgtt

SEQ ID NO: 146009 - DNA, 432 bp, Arabidopsis thaliana
  unsure (1)..(432): unsure at all n locations
gacgacacggtaatggcttagaggagaccatctgcagcgccaggtgcaccgataacctcgatgacccgtctcgtgctgacgtgtacaagccacagctcggttacatcagcactctcaacagttacgatctccccatccttcgcttcatccgtctctcagccctccgtggatctatccgtcaaaacgcaatggtgcttccacagtggaacgcaaacgcgatncctattctttacgtgacagacggggaagcccaaatccagatcgtaaacgacaatggtaacagagtgtttgacggacaagtctctcaaggacagctcatagccgtaccacaaggtttctcggtggtgaaacgcgcaacaagcaaccgattccagtgggttgagttcaaaacaaacgctaacgcgcaaatcaacactctggcgggacgaacct

SEQ ID NO: 146010 - DNA, 431 bp, Arabidopsis thaliana
  unsure (1)..(431): unsure at all n locations
agaaataacaaaatggctcgagtctcttctcttctttctttcttcttaacacttttgatccttttccatggctacgcggctcaacagggtcagcagggtcagcagtttccgaacgagtgccagctcgaccagctcaatgcgctcgagccgtcacacgtactgaagagcgaggctggtcgcatcgaggtgtgggaccaccacgctcctcagctccgttgcnnaggtgtctcctttgcacgttacatcatcgagtctaagggtctctacttgccctctttctttaacaccgcgaagctctctttcgtggctaagggacgaggtcttatgggaaaagtgatccctggatgcgccgaaacattccaagactcatcagagttccaaccacgcttcgatggtcaaggtcaaagccagaggttccgtgacatgcacca

SEQ ID NO: 146011 - DNA, 435 bp, Arabidopsis thaliana
  unsure (1)..(435): unsure at all n locations
cagggacaacaaggaagacaaggccatctcatgggaaggacagggacaacagggacaacaaggacgacagggacaacaaggccaaccatgggaaggacagggacagcagggacaacaagggttccgtgacatgcaccagaaggtggaacatgtgagacgcggagacgtctttgccaacactccaggctctgcccactggatctacaactcaggagaacagccnnttgtcatcatcgctcttctcgacatcgccaactaccaaaaccaactcgaccgcaaccctagagtgttccatttggccggaaacaaccagcagggaggctttggcggttcacagcaacaacatgaacagaaaaacttgtggagcgggttcgacgcacaggtcatagctcaagcattgaaaattgacgttcagttggctcagcagcttcagaa

SEQ ID NO: 146012 - DNA, 433 bp, Arabidopsis thaliana
  unsure (1)..(433): unsure at all n locations
aacaacttactgaatcaaaagtttctagagtgagactctctaaatgacgcctgatcactgcatttccctgcctatgcacaagttttatattcaccaatttggatatatttagtcctgcatctgtcaactttttctctctttcttgatctggaacctcgttaaacatccataactcagatccaggcgcaagcagagcttctagcacctatacggttagaaaagcacnnaactagttaacacagagtttgcatggaacaatgtttacactatagttcttcactctcttttgatacatcatgtaccttgatcatatcatcaatatcacgacgccatccacaaaaaagtattttctctggatattttggaggatcctgcattttgggaaaatgacacatccgtacctacatatatgaatatggttctatctttaatc

SEQ ID NO: 146013 - DNA, 430 bp, Arabidopsis thaliana
  unsure (1)..(430): unsure at all n locations
gaagataaaaatggctcgagtctcttctcttctttctttctccttaacacttttgatccttttccatggctacgcggctcaacagggtcagcagggtcagcagtttccgaacgagtgccagctcgaccagctcaatgcgctcgagccttcacacgtactgaagagcgaggctggtcgcatcgaggtgtgggaccaccacgctcctcagctccgttgctcatgggtctnctttgcacgttacatcatcgagtctaagggtctctacttgccctctttctttaacaccgcgaagctctccttcgtggctaaaggacgaggtcttatgggaaaagtgatccctggatgcgccgaaacattccaagactcatcagagttccaaccacgcttcgaaggtcaaggtcaaagccagaggttccgtgacatgcaccag

SEQ ID NO: 146014 - DNA, 423 bp, Arabidopsis thaliana
  unsure (1)..(423): unsure at all n locations
ggaagaaaaatgggtcgagtctcatctattatctctttctcttggacactcttgatcctcttcaatggctacactgcccaacagtggcccaacgagtgccagctcgatcaactcaatgcgctcgaaccatcccaaatcatcaagagcgagggtggtcgcatcgaggtctgggaccaccatgcaccccagctccgttgctccggctttgcctttgagcggttnnncattgagcctcacggtcttttcttgcccactttcttgaacgccggcaaactcacgtttgttgttcacggaaggggtctaatgggaagaggtatttcgggatgcgccgagacgttcatggagtcaccggtatttggagaaggtcaaggtcagggtcagagtcaagggttccgtgacatgcaccagaaagtagagcaccta

SEQ ID NO: 146015 - DNA, 429 bp, Arabidopsis thaliana
  unsure (1)..(429): unsure at all n locations
gaattatctctgttcaaagcttttgttttgttcccaattctgaagttttgaatcaacaaatcttcaataaagttttctcctttcactatctttccatattcttcttcttagtaaaactttgcattaatggcttacccaaanttgtaagctctttgtttcctcccttcttcttattctcttcttcattctccaaatttgtttctaggtttcttcagtttgagggatgaagaagtctaaactcgataattcttcttcacagattcgattcgggcttgttcagttcttattagctgttctgcttttttacttcctctgcatgagcttcgagatcccattcatcttcagaaccgggtctgggtccgggtctgatgatgtttcatcttcttcttttgctgacgcattaccgagaccaatggttgttggtggtgg

SEQ ID NO: 146016 - DNA, 387 bp, Arabidopsis thaliana
  unsure (1)..(387): unsure at all n locations
agaaaacatacacaaatagcaaaacatggctaacaagctcttcctcgtctgcgcaactctcgccctctgcttcctgctcaccaacgcttccatctaccgcaccgttgtcgaattcgaagaagatgacgccagcaaccccgttggtccaagacagagatgccagaaggagtttcagcaatcacaacacctaagagcttgccagagatggatgagcaagcaaatgagnnaaggtcgtggtggtggtccttccctcgacgatgagttcgatttcgtgggcccccagcagggataccagctactccagcagtgctgcaacgagcttcgccaggaagagccagttagcgtttgccccaccttgaaacaagctgccagggcagttagccttca

SEQ ID NO: 146017 - DNA, 347 bp, Arabidopsis thaliana
  unsure (1)..(347): unsure at all n locations
agaaaacatacacaaatagcaaatcatgtctaacaagctcttcctcgtctgcgcaactctcgccctctgcttcctcctcaccaacgcttccatctaccgcaccgttgtcgaattcgaagaagatgacgccagcaaccccgtaggtccaagacagagatgccagaaggagtttcagcaatcacaacacctaagagcttgccagagatggatgancaagcaaatttttccaggacgtggtggtggtccttccctcgacgatgagttcgatttcgagggcccccagcaaggataccagctactccagcagtgctgcaacgagcttcggcaggaagagccagtttgcgttt

SEQ ID NO: 146018 - DNA, 438 bp, Arabidopsis thaliana
aaaatggttaagctcagcaatctcctcgttgcaaccttcggggttctcctcgtccttaacggctgccttgcgaggcagtcacttggggttcctcctcagctacagaacgagtgtaacctcgacaacctagatgttctccaagccaccgaaactatcaagagtgaagccggtcagatcgagtactgggaccacaaccaccctcagctccgatgtgttggtgtttcccctgctcgttatgtaattgaacaaggcggtctttacttgcccaccttcttcacttccccaaaaatttcctacgtcgttcaaggaacgggtatcagcggaagagtggtccctggatgtgccgagaccttcatggactcgcagccgatgcaaggacaacaacaaggccaaccatggcaaggacgacagggacaacaaggccaaccatgggaagga

SEQ ID NO: 146019 - DNA, 431 bp, Arabidopsis thaliana
aagaaaatggttaagctcagcaatctcctcgttgcaaccttcggggttctcctcgtccttaacggctgccttgcgaggcagtcacttggggttcctcctcagctacagaacgagtgtaacctcgacaacctagatgttctccaagccaccgaaactatcaagagtgaagccggtcagatcgagtactgggaccacaaccaccctcagctccgatgtgttggggtttccgttgctcgttatgtaattgaacaaggcggtctttacttgcccaccttcttcacttccccaaaaatttcctacgtcgttcaaggaacgggtatcagcggaagagtggtccctggatgtgccgagaccttcatggactcgcagccgatgcaaggacaacaacaaggccaaccatggcaaggacgacagggacaacaaggccaacc

SEQ ID NO: 146020 - DNA, 431 bp, Arabidopsis thaliana
aagaaaatggttaagctcagcaatctcctcgttgcaaccttcggggttctcctcgtccttaacggctgccttgcgaggcagtcacttggggttcctcctcagctacagaacgagtgtaacctcgacaacctagatgttctccaagccaccgaaactatcaagagtgaagccggtcagatcgagtactgggaccacaaccaccctcagctccgatgtgttggggtttccgttgcttgttatgtaattgaacaaggcggtctttacttgcccaccttcttcacttccccaaaaatttcctacgtcgttcaaggaacgggtatcagcggaagagtggtccctggatgtgccgagaccttcatggactcgcagccgatgcaaggacaacaacaaggccaaccatggcaaggacgacagggacaacaaggccaacc

SEQ ID NO: 146021 - DNA, 431 bp, Arabidopsis thaliana
  unsure (1)..(431): unsure at all n locations
ataaagaggaagaaaaatgggtcttgtctcatctattatctctttctctttgacactcttgatcctcttcaatggctacactgcccaacagtggcccaacgagtgccagctcgatcaactcaatgcgctcgaaccatcccaaatcatcaagagcgagggtggtcgcatcgaggtctgggaccaccatgcaccccagctccgttgctccggctttgcctttgnccgtntcgtcattgagcctcagggtcttttcttgcccactttcttgaacgccggcaaactcacgtttgttgttcacggaaggggtctaatgggaagagttattccgggatgcgccgagacgttcatggagtcaccggtatttggagaaggtcaaggtcagggtcagagtcaagggttccgtgacatgcaccagatagtagagcacctac

SEQ ID NO: 146022 - DNA, 388 bp, Arabidopsis thaliana
  unsure (1)..(388): unsure at all n locations
aaaaagaaaatggttaagctcagcaatctcctcgttgcaaccttcggggttctcctcgtccttaacggctgccttgcgaggcagtcacttggggttcctcctcagctacagaacgagtgtaacctcgacaacctagatgttctccaagccaccgaaactatcaagagtgaagccggtcagatcgagtactgggaccacaaccaccctcagctncgatgtgttggnntttccgttgctcgttatgtaattgaacaaggcggtctttacttgcccaccttcttcacttccccaaaaatttcctacgtcgttcaaggaacgggtatcagcggaagagtggtccctggatgtgccgagacctttatggactcgcagccgatgcaaggacaac

SEQ ID NO: 146023 - DNA, 436 bp, Arabidopsis thaliana
  unsure (1)..(436): unsure at all n locations
aagaaataacaaaatggctcgagtctcttctcttctttctttcttcttaacacttttgatccttttccatggctacgcggctcaacagggtcagcagggtcagcagtttccgaacgagtgccagctcgaccagctcaatgcgctcgagccgtcacacgtactgaagagcgaggctggtcgcatcgaggtgtgggaccaccacgctcctcagctccgttgctcagntgtctcctttgcacgttacatcatcgagtctaagggtctctacttgccctctttctttaacaccgcgaagctctctttcgtggctaagggacgaggtcttatgggaaaagtgatccctggatgcgccgaaacattccaagactcatcagagttccaaccacgcttcgaaggtcaaggtcaaagccagaggttccgtgacatgcaccagaaa

SEQ ID NO: 146024 - DNA, 422 bp, Arabidopsis thaliana
  unsure (1)..(422): unsure at all n locations
caaaaagaaaatggttaagctcagcaatctcctcgttgcaaccttcggggttctcctcgtccttaacggctgccttgcgaggcagtcacttggggttcctcctcagctacagaacgagtgtaaccttgacaacctagatgttctccaagccaccgaaactatcaagagtgaagccggtcagatcgagtactgggaccacaaccaccctcagntncgatgtgtgnntgtttccgttgctcgttatgtaattgaacaaggcggtctttacttgcccaccttcttcacttccncaaaaatttcctacgtcggtcaaggaacgggtatcagcggaagagtggtccctggatgtgccgagaccttcatggactcgcagccgatgcaaggacaacaacaaggccaaccatggcatggacgacagggac

SEQ ID NO: 146025 - DNA, 437 bp, Arabidopsis thaliana
  unsure (1)..(437): unsure at all n locations
agaaaacatacacaaatagcaaaacatggctaacaagctcttcctcgtctgcgcaactctcgccctctgcttcctcctcaccaacgcttccatctaccgcaccgttgtcgaattcgaagaagatgacgccagcaaccccgtaggtccaagacagagatgccagaaggagtttcagcaatcacaacacctaagagcttgccagagatggatgagcaagcaaatgagncaaggacgtggtggtggtccttccctcgacgatgagttcgatttcgagggcccccagcagggataccagctactccagcagtgctgcaacgagcttcgccaggaagagccagtttgcgtttgccccaccttgaaacaagctgccagggcagttagcctccagggacagcacggaccattccaatccaggaaaatttaccagtcagctaagt

SEQ ID NO: 146026 - DNA, 436 bp, Arabidopsis thaliana
aagaaaatggttaagctcagcaatcttctcgttgcaaccttcggggttctcctcgtccttaacggctgccttgcgaggcagtcacttggggttcctcctcagctacagaacgagtgtaacctcgacaacctagatgttcttcaagccaccgaaactatcaagagtgaagccggtctgatcgagtactgggaccacaaccacccttagctccgatgtggtggtttcttctttgctcgttttgtaattgaacaaggcggtctttacttgcccaccttcttcacttccccaaaaatttcctacgtcgttcaaggaacgggtatcagcggaagagtggtccctggatgtgccgagaccttcatggacttgcagccgatgcaaggacaacaacaaggccaaccattgcatggacgacagggacaacatggccaaccatggg

SEQ ID NO: 146027 - DNA, 434 bp, Arabidopsis thaliana
  unsure (1)..(434): unsure at all n locations
acaaacaaaaagaaaatggttaagctcagcaatctcctcgttgcaaccttcggggttctcctcgtccttaacggctgccttgcgaggcagtcacttggggttcctcctcagctacagaacgagtgtaacctcgacaacctagatgttctccaagccaccgaaactatcaagagtgaagccggtcagatcgagtactgggaccacaaccaccctcagctccganntgttggtgtttccgttgctcgttatgtaattgaacaaggcggtctttacttgcccaccttcttcacttccccaaaaatttcctacgtcgttcaaggaacgggtatcagcggaagagtggtccctggatgtgccgagaccttcatggactcgcagccgatgcaaggacaacaacaaggccaaccatggcaaggacgacagggacaacaagg

SEQ ID NO: 146028 - DNA, 434 bp, Arabidopsis thaliana
  unsure (1)..(434): unsure at all n locations
cggacgcgtgggcaaaaagaaaatggttaagctcagcaatctcctcgttgcaaccttcggggttctcctcgtccttaacggctgccttgcgaggcagtcacttggggttcctcctcagctacagaacgagtgtaacctcgacaacctagatgttctccaagccaccgaaactatcaagagtgaagccggtcagatcgagtactgggaccacaaccaccctcnnctccnatgtgttggtgtttccgttgctcgttatgtaattgaacaaggcggtctttacttgcccaccttcttcacttccccaaaaatttcctacgtcgttcaaggaacgggtatcagcggaagagtggtccctggatgtgccgagaccttcatggactcgcagccgatgcaaggacaacaacaaggccaaccatggcaaggacgacagggac

SEQ ID NO: 146029 - DNA, 436 bp, Arabidopsis thaliana
  unsure (1)..(436): unsure at all n locations
agaaaaatgggtcgagtctcatctattatctctttctctttgacactcttgatcctcttcaatggctacactgcccaacagtggcccaacgagtgccagctcgatcaactcaatgcgctcgaaccattccaaatcatcaagagcgagggtggtcgcatcgaggtctgggaccaccatgcaccccagctccgttgctccggctttgcctttgagcgtttcgtcatngagcctcagggtcttttcttgcccactttcttgaacgccggcaaactcacgtttgttgttcacggaaggggtctaatgggaagagttattccgggatgcgccgagacgttcatggagtcaccggtatttggagaaggtcaaggtcagggtcagagtcaagggttccgtgacatgcaccagaaagtagagcacctacggtgcggtgacacca

SEQ ID NO: 146030 - DNA, 410 bp, Arabidopsis thaliana
tttgtgtgctcttagcctttactctatagttttatatcatatcaatcgacatggcgaatgtggaccgtgatcggcgtgtgcatgtataccgcactgacaaacgtgttcatcagccaaactacgaagatgatgtcggttttggtggctatggcggatatggcgctggttctgattataagattcgcggcccctccactaaccaaatcttggcacttatagtttgagttcccattggcggcacactgctaaccctagctggactcactctagccggaccggagatcgggttgctagtctccatacccctgttgctcctcttcagtccggtgatagtcccggcggctctcactattgggcttgctgtgacggggatcttggcttttggttcgcttgggatgacgggtctgagc

SEQ ID NO: 146031 - DNA, 427 bp, Arabidopsis thaliana
  unsure (1)..(427): unsure at all n locations
aacaaaaagaaaatggttaagctcagcaatctcctcgttgcaaccttcggggttctcctcgtccttaacggctgccttgcgaggcagtcacttggggttcctcctcagctacagaacgagtgtaacctcgacaacctagttgttctccaagccaccgaaactatcaagagtgaagccggtcagatcgagtactgggaccacaaccaccctnagntncgatgtnntggtgtttccgttgctcgttatgtaattgaacaaggcggtctttacttgcccaccttcttcacttccccaaaaatttcctacgtcgttcaaggaacgggtatcagcggaagagtggtccctggatgtgccgagaccttcatggactcgcagccgatgcaaggacaacaacaaggccaaccatggcaaggacgacagggacaac

SEQ ID NO: 146032 - DNA, 425 bp, Arabidopsis thaliana
  unsure (1)..(425): unsure at all n locations
caaaaagaaaatggttaagctcagcaatctcctcgttgcaaccttcggggttctcctcgtccttaacggctgccttgcgaggcagtcacttggggttcctcctcagctacagaacgagtgtaacctcgacaacctagatgttctccaagccaccgaaactatcaagagtgaagccggtcagatcgagtactgggaccacaaccaccctcagctccgatgtgtnngtgtttccgttgctcgttatgtaattgaacaaggcggtctttacttgcccaccttcttcacttccccaaaaatttcctacgtcgttcaaggaacgggtatcagcggaagagtggtccctggatgtgccgagaccttcatggactcgcagccgatgcaaggacaacaacaaggccaaccatggcaaggacgacagggacaac

SEQ ID NO: 146033 - DNA, 436 bp, Arabidopsis thaliana
agaaaaatgggtcgagtctcatctattatctctttctctttgacactcttgatcctcttcaatggctacactgcccaacagtggcccaacgagtgccagctcgatcaactcaatgcgctcgaaccatcccaaatcatcaagagcgagggtggtcgcatcgaggtctgggaccaccatgcaccccagctccgttgctccggctttgcctttgagcgtttcgtcaaagagcctcagggtcttttcttgcccactttcttgaacgccggcaaactcacgtttgttgttcacggaaggggtctaatgggaagagttattccgggatgcgccgagacgttcatggagtcaccggtatttggagaaggtcaaggtcagggtcagagtcaagggttccgtgacatgcaccagaaagtagagcacctacggtgcggtgacacca

SEQ ID NO: 146034 - DNA, 422 bp, Arabidopsis thaliana
gtcttgctatttcagaccagctcttcttcttctgttagttcttttggttcatgccgagtcacgcggtcggttcgagccaaagattcttatgccgacagaggaagctaacccggctgaccaagacgaagatggtgtcggtacaagatgggcggttctcgtcgctggttcttctggatatggaaactacagacaccaggctgacgtgtgtcacgcatatcaaattttaagaaaaggaggtttaaaggaagagaacatagtcgttttgatgtatgatgatatcgcaaaccacccacttaatcctcgtccgggtactctcatcaaccatcctgacggtgacgatgtttacgccggagtccctaaggactatactggtagtagtgttacggctgcaaacttctacgctgtactcctaggcgaccaga

SEQ ID NO: 146035 - DNA, 399 bp, Arabidopsis thaliana
  unsure (1)..(399): unsure at all n locations
gaccacgcgtccgcgaccgctaccctagagtgttccatttttctttaaacaaccagcagggaggctctggcggtttacagcaacaacatgaacagtaaaacttgtggagcgggttcgacgcacaggtcatagctcaagcattgaaaattgacgtccagttggctcagcatctttagaaccaacaagacagcagaggaaacatcggccgtgttaagggaccnntccnnntnttgaggtttccacttagacagccctacgagagctaggagtggagacaccttcttagcccacatggtattggccttgaggagactatctgcagcatgaggtcccacgagaacattgacgtccctgctcgtgctgacgtgtacaagcccaacctatgttgtgtgaccagcg

SEQ ID NO: 146036 - DNA, 436 bp, Arabidopsis thaliana
  unsure (1)..(436): unsure at all n locations
agaaaatggttaagctcagcaatctcctcgttgcaaccttcggggttctcctcgtccttaacggctgccttgcgaggcagtcacttggggttcctcctcagctacagaacgagtgtaacctcgacaacctagatgttctccaagccaccgaaactatcaagagtgaagccggtcagatcgagtactgggaccacaaccaccctcagctccgatgtgttggtgttnncgttgctcgttatgtaattgaacaaggcggtctttacttgcccaccttcttcacttccccaaaaatttcctacgtcgttcaaggaacgggtatcagcggaagagtggtccctggatgtgccgagaccttcatggactcgcagccgatgcaaggacaacaacaaggccaaccatggcaaggacgacagggacaacaaggccaaccatggga

SEQ ID NO: 146037 - DNA, 423 bp, Arabidopsis thaliana
  unsure (1)..(423): unsure at all n locations
ggttaagctcagcaatctcctcgttgcttaccttcggggttctcctcgtccttaacggctgccttgcgaggcagtcacttggggttcctcctcagctacagaacgagtgtaacctcgacaacctagatgttctccaagccaccgaaactatcaagagtgaagccggtcagatcgagtactgggaccacaaccaccctcagctccgatgngnnggngtttaatgnccttgttatgtaattgaacaaggcggtctttacttgcccaccttcttcactttcccaaaaatttcctacgtcgttcaaggaacgggtatcagcggaagagtggtccctggatgtgccgagaccttcatggactcttagccgatgcaaggacaacaacaaggtcaaccatggcaaggacgacagggacaacatggtccac

SEQ ID NO: 146038 - DNA, 422 bp, Arabidopsis thaliana
  unsure (1)..(422): unsure at all n locations
accagtcaagtctgtaaatggcgaaaaaagaaggttcaaagatgaacatcgccattatacatccagatcttggaataggcggagcagagagattgattgttgatgcggccgttgagcttgcctcgcacggtcataaagttcatatcttcacctctcaccacgacaaatccagatgcttcgaggaaactctttccggtatctttcaagttacggtgtatggagnttgcctgccacggcatattttctaccgactacacgcagtgtgtgcatatttgcggtgcttgtttgttgctctctgtgttcttttgggttggtcttcattcgatgttgtactagcagaccaagtttcagtcgtagtcccattgctgaaactcaaaaggttgttttctactgccatttcccggatctcttgctagctaagc

SEQ ID NO: 146039 - DNA, 437 bp, Arabidopsis thaliana
  unsure (1)..(437): unsure at all n locations
tacacacatagcaaaaaatggcaaacaagttgttcctcgtctgcgcagctctcgctctctgcttcctcctcaccaacgcttccatctaccgcaccgtcgttgagttcgaagaagatgacgccactaaccccataggcccaaaaatgaggaaatgccgcaaggagtttcagaaagaacaacacctaagagcttgccagcaattgatgctccagcaagcaaggcnnggccgtagcgatgagtttgatttcgaagacgacatggagaacccacagggacaacagcaggaacaacagctattccagcagtgctgcaacgagcttcgccaggaagagccagattgtgtttgccccaccttgaaacaagctgccaaggccgttagactccagggacagcaccaaccaatgcaagtcaggaaaatttaccagacagccaagcac

SEQ ID NO: 146040 - DNA, 435 bp, Arabidopsis thaliana
  unsure (1)..(435): unsure at all n locations
attaggagcggtgataccattgccacaacacccggtgtagcacagtggttctacaacgacggacaggaaccacttgtcatcgtcagcgtcttcgatctagccagtcaccagaaccagcttgaccgcaacccaaggccattttacttagccggaaacaacccacaaggtcaagtatggctacaaggccgagagcaacagccacagaagaacattttcaatggattnngacccgaggttattgctcaagctttgaagatcgatcttcagacagcgcagcaacttcagaaccaagatgacaaccgtggaaacattgtccgagtccaaggcccgttcggtgtcattaggccgcctttgaggggccagagacctcaggaggaggaagaagaagaagaaggacgacatggacgacacggtaatggcttagaggagaccatc

SEQ ID NO: 146041 - DNA, 435 bp, Arabidopsis thaliana
  unsure (1)..(435): unsure at all n locations
cggacgcgtgggcaagagcaagttcgacaacttgtatggatgccgtcactcactccctgatggtctcatgagggccactgatgtcatgatcgctggaaaggttgctgttatctgtggatatggtgatgctggaaagggttgtgctgctgccatgaagactgccggggctagagtcattgtgactgagattgatcccatctgtgcccttcaagcttcgatggaanaactgcaggttcttaccctcgaggatgttgtctcagaagctgatatctgtgtcaccaccaccgtgcacaaagatatcatcatggttgaccacatgaggaagatgaagaacaacgctattgtgtgcaacattggtcactctgacaatgagattgacatgctcggacttgagacttaccctggtgtgaagcgtatcaccatcaagccacagac

SEQ ID NO: 146042 - DNA, 293 bp, Arabidopsis thaliana
  unsure (1)..(293): unsure at all n locations
cgagaacattgacgaccctgctcgtgctgacgtgtacaagcccagcctaggtcgcgtgaccagcgtcaacagctataccttgcccatcttggattatgtaaggttaaggcccactggggcgttcttcaaggtaatgcgatggtgctttctaaatacaacatgaacgcttacgagatcttgtactgcactggaggacaaggaaggatccaagtggtcaacgacaannnacataacgtgttggaccaacaggtgcagaagggacagctcgtggtcattccacaagggttcgcata

SEQ ID NO: 146043 - DNA, 437 bp, Arabidopsis thaliana
  unsure (1)..(437): unsure at all n locations
tggactcgcagccgatgcaaggacaacaacatggccaaccatggcaaggacgacagggacaacaaggccaaccatgggaaggacagggacaacagggacaacaaggaagacaaggccaaccatgggaaggacagggacaacaggtacaacaaggacgacagggacaacaaggccaaccatgggaaggacagggacagcagggacaacaagggttccgtgacatgcacnntatggtggaacatgtgagacgcggagacgtctttgccaacactccaggctctgcccactggatctacaactcaggagaacagccacttgtcatcatcgctcttctcgacatcgccaactaccaaaaccaattcgaccgcaaccctagagtgttccatttggccggaaacaaccagcagggaggctttggcggttcacagcaacaacaa

SEQ ID NO: 146044 - DNA, 440 bp, Arabidopsis thaliana
  unsure (1)..(440): unsure at all n locations
gccaaccatgggaaggacagggacaacagggacaacaaggacgacagggacaacatggccaaccatgggaaggacagggacagcagggacaacaagggttccgtgacatgcaccagaaggtggaacatgtgagacgcggagacgtctttgccaacactacacgctctgcccactggatctacaactcaggagaacagccacttgtcatcatcgctcttctcgacattnncaactaccaaaaccaactcgaccgcaaccctagagtgttccatttggccggaaacaaccagcagggaggctttggcggttcacagcaacaacaagaacagaaaaacttgtggagcgggttcgacgcacaggtcatagctcaagcattgaaaattgacgttcagttggctcagcagcttcagaaccaacaagacagcagaggaaacatcgtt

SEQ ID NO: 146045 - DNA, 444 bp, Arabidopsis thaliana
  unsure (1)..(444): unsure at all n locations
gcaaaatccaaatcaaattcctgaagaaacctctttcgctctcgtcttcgttttcagatcaacaagaaatggcaacagcaacatcagcttctctgttttcaactgtttcttcatcttactccaaagctagctccataccacattcaagactccaatctgtgaaattcaactcagtccctagcttcaccggtctcaaatcaacctctctcatctccggatctgattccnnttccttagccaagactctacgcggttccgtaacgaaagcacaaacatctgacaagaagccttacggattcaaaatcaacgcttcatacaaagtagctgttcttggtgctgctggtggtataggtcagcctttatcacttctcatcaagatgtctccgttagtctctacgcttcatctttacgatatcgccaatgttaaaggagttgctgctgatc

SEQ ID NO: 146046 - DNA, 420 bp, Arabidopsis thaliana
  unsure (1)..(420): unsure at all n locations
atttgggtcccatactgtcttcgcaacttggccctctctctcgcgttcagaacgttttgacttttaagcttcttctcgattttggttttatcctttgttatttttagtctgctccgtattccctccgaatctcgtttcaaatacatcctctcgtaaagaaaccgttttttttggtttagtactgaatgataaaagtattgttttcgtacgaaatttatgtnaaccctcctagctctagaggatcacctagaccatatgcatgggacttggtcgagcttcgatgcggattagcccgagttatcaatagaatactgaaaattgacataattaactatgatttaatgcaaatgcgtgtctataatatactgaacatctaacagacatgatgattgatgagcagtaaattccaaacggtctaac

SEQ ID NO: 146047 - DNA, 374 bp, Arabidopsis thaliana
aaacaaaaagaaaatggttaagctcagcaatctcctcgttgcaaccttcggggttctcctcgtccttaacggctgccttgcgaggcagtcacttggggttcctcctcagctacagaacgagtgtaacctcgacaacctagatgttctccaagccaccgaaactatcaagagtgaagccggtcagatcgagtactgggaccacaaccaccctcagctccgaaaagttggtgtttccgttgctcgttatgtaattgaacaaggcggtctttacttgcccaccttcttcacttccccaaaaatttcctacgtcgttcaaggaacgggtatcagcggaagagtggtccctggatgtgccgagacctttatggactcgc

SEQ ID NO: 146048 - DNA, 434 bp, Arabidopsis thaliana
  unsure (1)..(434): unsure at all n locations
agaaaacatacacaaatagcaaaacatggctaacaagctcttcctcgtctgcgcaactctcgccctctgcttcctcctcaccaacgcttccatctaccgcaccgttgtcgaattcgaagaagatgacgccagcaaccccgtaggtccaagacagagatgccagaaggagtttcagcaatcacaacacctaagagcttgccagagatggatgagcaagcaaannaggcaaggacgtggtggtggtccttccctcgacgatgagttcgatttcgagggcccccagcagggataccagctactccagcagtgctgcaacgagcttcgccaggaagagccagtttgcgtttgccccaccttgaaacaagctgccagggcagttagcctccagggacagcacggaccattccaatccaggaaaatntaccagtcagcta

SEQ ID NO: 146049 - DNA, 261 bp, Arabidopsis thaliana
  unsure (1)..(261): unsure at all n locations
agaaaacatacacaaatagcaatttttttctcacaagctctcacttgcatgcgcaactctcgacctgtgccagggtgtcaccaacacttccatctaccggactgttgacaaattcgaaaaagaggactccagcaacccagcatgtcccaggcagatattccanaaggagtgtgagcaatcactacacctaagagcctgccagaaatgnatgagcaagcaaatgttttttttttgttgtggtggttgaagccatgaccatta

SEQ ID NO: 146050 - DNA, 415 bp, Arabidopsis thaliana
  unsure (1)..(415): unsure at all n locations
ggacgacacggtaatggcttagaggatgaccatctggagcgccaggtgcaccgataacctcgatgacccgtctcgtgctgacgtgtacaagccacagctcggttacatcagcactctcaacagatacgatctccccatccttcgcttcatgcgtgtatcagccctgcgtggatctatccgacaaaacgcaatggtgcttccacagtggaacgcaaacgcgaacggnattcgtcacgtgacagacggtgaagcccaaatccagatcgtaaacgacaatggtaacagagtgttcgacggacaagtctctcaaggacagctgatagccgtaccacagggtttctgcgtggtgaaacgcgcaacacgcaaccgattccagtgtagtgagttcagaacatacgctaacgcgcaaatcaac

SEQ ID NO: 146051 - DNA, 436 bp, Arabidopsis thaliana
  unsure (1)..(436): unsure at all n locations
agaaaaatgggtcgagtctcatctattatctctttctctttgacactcttgatcctcttcaatggctacactgcccaacagtggcccaacgagtgccagctcgatcaactcaatgcgctcgaaccatcccaaatcatcaagagcgagggtggtcgcatcgaggtctgggaccaccatgcaccccagctccgttgctccggctttgcctttgagcgtttcgtcattgnccctcagggtcttttcttgcccactttcttgaacgccggcaaactcacgtttgttgttcacggaaggggtctaatgggaagagttattccgggatgcgccgagacgttcatggagtcaccggtatttggagaaggtcaaggtcagggtcagagtcaagggttccgtgacatgcaccaagaagtagagcacctacggtgcggtgacacca

SEQ ID NO: 146052 - DNA, 434 bp, Arabidopsis thaliana
  unsure (1)..(434): unsure at all n locations
cattaggccgcccttgaggggccagagacctcaggaggaggaagaagaagaagaaggacgacatggacgacacggtaatggcttagaggagaccatctgcagcgccaggtgcaccgataacctcgatgacccgtctcgtgctgacgtgtacaagccacagctcggttacatcagcactctcaacagttacgatctccccatccttcgcttcatccgtctctcanncctccgtggatctatccgtcaaaacgcaatggtgcttccacagtggaacgcaaacgcgaacgctattctttacgtgacagacggggaagcccaaatccagatcgtaaacgacaatggtaacagagtgtttgacggacaagtctctcaaggacagctcatagccgtaccacaaggtttctcggtggtaaaacgcgcaacaagcaaccgat

SEQ ID NO: 146053 - DNA, 431 bp, Arabidopsis thaliana
caaaaagaaaatggttaagctcagcaatctcctcgttgcaaccttcggggttctcctcgtccttaacggctgccttgcgaggcagtcacttggggttcctcctcagctacagaacgagtgtaacctcgacaacctagatgttctccaagccaccgaaactatcaagagtgaagccggtcagatcgagtactgggaccacaaccaccctcagctccgatgtgtttctgcctccgatgctcgttatgtaattgaacaaggcggtctttacttgcccaccttcttcacttccccaaaaatttcctacgtcgttcaaggaacgggtatcatcggaagagtggtccctggatgtgccgagaccttcatggactcgcagccgatgcaaggacaacaacaaggccaaccatggcaaggacgacagggtcaacaaggcc

SEQ ID NO: 146054 - DNA, 435 bp, Arabidopsis thaliana
  unsure (1)..(435): unsure at all n locations
caagattcctcaaaaggaaagaagagaaagaagataagagatatctggttggtcggagatggagatgatcggaggagacgatacagatacagagatgtacggagctctagtgacggcacagtccttaaggttgcgtcatcttcaccactgcagagagaaccagtgtacctctgttctcgtcaaatacattcaagctcctgttcatcttgtttggtcactggtgcggagntttgatcagccgcagaaatacaaaccatttataagcagatgcactgtaaatggtgatcctgagatcggttgtctcagagaagtaaatgtcaaatctggtccagcaaccaccagtacagagagattggaacagcttgatgatgaagaacacatcctcggtatcaacatcattggtggtgatcatagacttaaagaatactcttcgat

SEQ ID NO: 146055 - DNA, 434 bp, Arabidopsis thaliana
  unsure (1)..(434): unsure at all n locations
tttaagttttgttgttactttagaagacctgtggtttatatttgtgagcatttgaactagttattaaagttcatagtcttaaatgtgaacagatatacaagagagcaagtgaggcatatgaagctttgtcgactaggttaggtgagcagaagtttctctttgaagacaggtattgcaatcacattccggaactggattctttctcttaagcctttttgtaaaagatnnacaatgtttatattattctcttcccacaggccatcgagtttggatgctttcttactctcgcacatactttttataatccaagcgttaccagtgagcagctttaaatttcaccaatatatttctcagttatgggtttatcaggttgaatttagccttagaactatttagatgaagtagttttcttaatggtgcatgatcaggttaca

SEQ ID NO: 146056 - DNA, 384 bp, Arabidopsis thaliana
  unsure (1)..(384): unsure at all n locations
agaggaagaaaaatgggtcgagtctcatctattatctctttctctttgacactcttgatcctcttcaatggctacactgcccaacagtggcccaacgagtgccagctcgatcaactcaatgcgctcgaaccatcccaaatcatcaagagcgagggtggtcgcatcgaggtctgggaccaccatgcaccccagctccgttgctccggctttgcctttgagcgtttcgtgnntgagcctcagggtcttttcttgcccactttcttgaacgccggcaaactcacgtttgttgttcacggaaggggtctaatgggaagagttattccgggatgcgccgagacgttcatggagtcaccggtattaggagaaggtcaaggtcagggtcag

SEQ ID NO: 146057 - DNA, 431 bp, Arabidopsis thaliana
  unsure (1)..(431): unsure at all n locations
gacgccagcaaccccgtaggtccaagacagagatgccagaaggagtttcagcaatcacaacacctaagagcttgccagagatggatgagcaagcaaatgaggcaaggacgtggtggtggtccttccctcgacgatgagttcgatttcgagggcccccagcagggataccagctactccagcagtgctgcaacgagcttcgccaggaagagccagtttgcgtnntccccaccttgaaacaagctgccagggcagttagcctccagggacagcacggaccattccaatccaggaaaatttaccagtcagctaagtacttgcctaacatttgcaagatccagcaagttggtgaatgtcccttccagaccaccatccctttcttccctccttactactagagtccaagcccggcctagcacgatgatcatgagtg

SEQ ID NO: 146058 - DNA, 89 bp, Arabidopsis thaliana
gtaaaaacaatttctcattagcttacaatggcggatacacaccgtgtcgaccgtgctgatagacactttcaatgtcagtcgccctatat

SEQ ID NO: 146059 - DNA, 435 bp, Arabidopsis thaliana
  unsure (1)..(435): unsure at all n locations
caaacgcgaacgccattctttacgtgacagacggggaagcccaaatccagatcgtaaacgacaatggtaacagagtgtttgacggacaagtctctcaaggacagctcatagccgtaccacaaggtttctcggtggtgaaacgcgcaacaagcaaccgattccagtgggttgagttcaaaacaaacgcaaacgcgcaaatcaacactcttgcgggacgaaccnnaggcttgagaggtttaccacttgaagttataaccaatgggttccaaatctcacctgaagaagcaaggagggtcaagttcaacacgctcgagaccactttgactcacagcagtggcccagctagctacggaaggccaagggtggctgcagcttaagagcttaaaaccgcggctcaacaatgaacctctagtactgtaaaaggaagttaaatag

SEQ ID NO: 146060 - DNA, 327 bp, Arabidopsis thaliana
  unsure (1)..(327): unsure at all n locations
catacacacatagcaaaaaatggcaaacaagttgttcctcgtctgcgcagctctcgctctctgcttcctcctcaccaacgcttccatctaccgcaccgtcgttgagttcgaagaagatgacgccactaaccccataggcccaaaaatgaggaaatgccgcacggagtttcagaaagaacaacacctaagagcttgccagcaattgatgctccagcaagcaaggcaaggccgtagcgatgagtttgatttcgaagacgacatggagaacccacagggacaacagcagggacaacagctanttcagcagtgctgcaacgagcttcgcca

SEQ ID NO: 146061 - DNA, 424 bp, Arabidopsis thaliana
caaaaagaaaatggttaagctcagcaatctcctcgttgcaaccttcggggttctcctcgtccttaacggctgccttgcgaggcagtcacttggggttcctcctcagctacagaacgagtgtaacctcgacaacctagatgttctccaagccaccgaaactatcaagagtgaagccggtcagatcgagtactgggaccacaaccaccctcagctccgatgtgttggtgtttccgttgctcgttatgtaattgaacaaggcggtctttacttgcccaccttcttcacttccccaaaaatttcctacgtcgttcaaggaacgggtatcagcggaagagtggtccctggatgtgccgagaccttcatggactcgcagccgatgcaaggacaacaacaaggccaaccatggcaaggacgacagggacaa

SEQ ID NO: 146062 - DNA, 346 bp, Arabidopsis thaliana
gaaaatgaataagctcagcaatatcctcgttgcaaccttagccgttctcctcgtccttaaccggatgccttgcgagggagacacttgcacgttgctgctcagctacagaaccagagcaaccgtaacaacctaaatgtactccaagccaccgaaactatcacgagtgaaaccgaacacatcgagtactgggaccacaaccacactcagcttcaatgtgttggtgttgccgttgctcgttatgtaaatgaacaagagcagctttacttgtacaccttcatcactttcacaaaaataaactacgtcgaccaaggaacaggtatcagcgtcagagtgagacctggatgtg

SEQ ID NO: 146063 - DNA, 451 bp, Arabidopsis thaliana
ttgaaaatgtttcagctttacaagaatgattgtcttaatataacaacatacaatctgtcatcttgtttgcatgtgggagaatgttgactataagttacaatcaggacgatcttatcagctccaatagttcactcttcctcaactttgagtatcctttgattcctctgttctttgcaacttctttgagctctgcaagtttcatagtttctatcagtgaagctttctcttccttctttgtcaattctcctaaagctttatcgctgtttgatactgggagcttacctcttggacctgaggcagaagaagataaaggagttctcttgacaaaactagacggtggtcgaggaagctctacttgtctctttggtggcttctccttcacactagtatctcctacagttgcagagttgattatattaacaaatggcgagaacatggatttgacatttga

SEQ ID NO: 146064 - DNA, 439 bp, Arabidopsis thaliana
  unsure (1)..(439): unsure at all n locations
tcgatcgaccacgcgtccgaaaagaaaaggtaagctcagcaatctcctcgttgcaaccttcgtgttcttttcgtccttaacggctgccttgcgaggcagtcacttggggttcctcctcagctacagaacgagtgtaacctcgacaacctagatgttctccaagccaccgaaactatcaagagtgaagccggtcagatcgagtactgggaccacaaccaccctcagctccgatgtgttggtgtttccgttgctcgttatgtaattgaacaaggcggtctttacttgcccaccttcttcactttcncaaaaatttcctacgtcgttcaaggaacgggtttcagcggaagagtggtccctggatgtgccgagaccttaatgactcgcaaccgatgcaaggacaacaacaaggccaaccatggcaaggacgacagggacaaca

SEQ ID NO: 146065 - DNA, 512 bp, Arabidopsis thaliana
aaatgatgtgggtgcaacgagacttcatgatctacaactattgtaccgattttaagagattccctcaaggcctccccaaggagtgtaaactttgattctattatgggaattttcaagcatttttctttccgttttgtttcatcttgtgatgttactttgatttattttgttctttcttttggtgtttctgagatacgatattacatgtatacgtattcttcctgagaaaataagaagttgtattactcgataatacattttatctctcaatgtggtgtgattgtttattgggtttggcgtacaatgaaagctacatcaatgtgctttagaaaaatgcatacgaaaagaaaaacacaacaatcaaaaacccgtgaggtaactaaattatctccatttacaaatatactaacaatactactaatttattgctaagctgtcagctgtcacgaccatgataatgaaaaaaaaatcatctctgtttcttctaaacttagagtttctcgaatttcaca

SEQ ID NO: 146066 - DNA, 466 bp, Arabidopsis thaliana
  unsure (1)..(466): unsure at all n locations
cgtttccggaatatcccgcgtgccgacccacgacagtccgctttggactcgcaacccaagggctcattttactttaagctcggaaacatacccacatgtgtcaagggtatggctacaaggcgcgagtagcgaacagccacatgaagaacaattttcatnatggatttggactccgagggttatttgcttcaaggcttttgaagattcgatcttcaagacagcgcagcatacttcagaaccaagatgacaaccgtggaaacattgtccgagtccaaggcccgttcggtgtcattaggccgcctttgaggggccagagacctcaggaggaggaagaagaagaagaaggacgacatggacgacacggtaatggcttagaggagaccatctgcagcgccaggtgcaccgataacctcgatgacccgtctcgtgctgacgtgtacaagccacaggttgggtacattagcac

SEQ ID NO: 146067 - DNA, 309 bp, Arabidopsis thaliana
  unsure (1)..(309): unsure at all n locations
acaaatagcaaaacatggctaacaagctcttcctcgtctgcgcaactctcgccctctgcttcctcctcaccaacgcttccatctaccgcaccgttgtcgaattcgaagaagatgacgccagcaaccccgtaggtccaagacagagatgccagaaggagtttcagcaatcacaacacctaagagctngccagagatggatgagcaagcaaatgaggcagggaccgtgtggtggtcccttcctcgacgatgagttcgatttcgagggcccccagcagggataccagctactncagcagtgctgcaacgagc

SEQ ID NO: 146068 - DNA, 424 bp, Arabidopsis thaliana
ctcagtgccactcgtggcgttctacagggtaatgcgatggtgctttctaaatacaacatgaacgctaacgagagcttgtactgcactggaggacagggaaggatccaagtggtcaacgacaacggacagaacgtgttggaccaacaggtgcagaagggacagctcgtggtcataccacaagggttcgcatacgttgttcagtcccacggaaacaagtgcgagtggatctctttcaaaactaatgaaaacgcaatgatcagcactttggcgagtagaacctcgctcttgagggcattgccattggaggtcatatcaaatggattccagatctctcccgaggaagctaggacgagcaagttcaacacacttgagaccactttgacccgcgctgtcggaaggcaacaacaacagttgatcgaggaga

SEQ ID NO: 146069 - DNA, 471 bp, Arabidopsis thaliana
  unsure (1)..(471): unsure at all n locations
ctctctttctctcacaatggagacaagaccatcatcatcatcttctctttcattttcgacgaatcttaacctcgacagacggggagttctcaaactcctcggaaaaggcgccaccggaacagtcttcctcgctcaccactctgtttccgactactctggtttcttctccctctgctaaaaaactcgtcgacanatcctccgcattttctctccgccgtgcaaggtggaaaattcagatcctccgacgtctcttcgttgacacaaacccaaacccatttttcccaaaactcttagcttcatcagaatcctctgaattcatcgcatgggctttaccttactgctccggtggagatttaaccgtcctccgacaacgtcaaaacgacagcgttnttagctcctccgtttttaaattctacttacttgaaatcgttgtgcgctggaccactttataccatggggatcgttacagag

SEQ ID NO: 146070 - DNA, 427 bp, Arabidopsis thaliana
attcaccaactctttataccagcctctgtaacgttcgatcatcttgtatttcatttcaaccactcattgtttttagtttgttttacgaagaatcaactatggcgacgaagagaagcgttggaactttgaaggaagcggatctgaagggaaagagtgtgttcgtgagggttgatctcaacgttcctttggatgataactctaacatcaccgatgacaccaggattcgtgccgctgttcccaccatcaagtacttgatgggtaatggatctaggttgttctctgcagtcacttgggccgcccaaaaggtgttactcctaagtacagcttaaagcctcttgtgcccagattgtctgaacttcttggtgttgaggttgtaatggcaaatgactctattggtggagaagtccagaagttggttgcaggacta

SEQ ID NO: 146071 - DNA, 439 bp, Arabidopsis thaliana
cgataatgaacataaagcatgcgctttttggaagagaattggtgcatattttaacaatagcgcttcacttgcaaatctgccaaagcgagagccgagtcactgcaagcaaagatggagtaaacttaacgacaaagtctgcaaatttgttggatgttatgatcaagctttgaatcaaagaagtagtggtcaatctgaagatgatgttttccaagttgcataccaagtctacacgaacaattacaagagtaattttacacttgagcatgcatggagggagctccgacacagtaaaaaatggtgtagtttgtacccctttgaaaattctaagggtggtggaagctcaaagagaacaaagttgaataatggagatcgtgtatattcttcaagctctaatccggagagtgtgcctatagctctagatgaagaggagcaagtcatg

SEQ ID NO: 146072 - DNA, 477 bp, Arabidopsis thaliana
cttatacaaacagatctttttgaaattggattcatctaagaagcagactctgttttcatggctgtttacaataccaaactctgtttggcctctgttttcttgctcttagggcttcttttggcttttgacttgaagggtatagaagcagaaagtcttaccaaacagaaactggactcgaagatacttcaggatgagattgtgaagaaagtcaacgaaaacccaaacgctggatggaaagctgctataaatgatcgattttcaaacgccactgttgcagagtttaagcgtcttctcggtgttaaaccaacaccaaagaagcatttcttaggtgttcctattgtgagccatgatccatctttgaagctacctaaagcttttgatgctagaactgcttggccacagtgcactagtattggaaacatcttagatcagggacattgtggttcttgctgggcatttggtgctgttgaatcacta

SEQ ID NO: 146073 - DNA, 271 bp, Arabidopsis thaliana
atacacacatagcaaaaaatggcaaacaagttgttcctcgtctgcgcagctctcgctctctgcttcctcctcaccaacgcttgcatctaccgcaccgtcgttgagttcgaagaagatgacgccactaaccccataggcccaaaaatgaggaaatgccgcaaggagtttcagaaagaacaacacctaagagctggccagcaattgatgctccagcaagcaaggcaaggccgtagcgatgagtttgatttcgaagacgacatggagaacccac

SEQ ID NO: 146074 - DNA, 473 bp, Arabidopsis thaliana
  unsure (1)..(473): unsure at all n locations
gacagaagttcctctgaaagggtcagcgaagaaccactacaagaggtggaagagcgaaaaccaactcttccctgacgccattggccatcatatccaaggtgtcaccgttcacgagggcgactgggactcccacggngccatcaagtcctggaactacacatgcgatgggaagcaagaggtgttcaaggagaagagggagttagacgaccagaagatggcggtgacgtttagagggctggatggtcatgtgatggagcagcttaaggtgtatgacgtcatcttccagttcgtccctaagtctcaggaaggtgcgtctgcaaagcactatgttttggagaagcgctcgaaactctcagagcccataagacatgaagtcgtacgagctgctgtgcatgatgaccacatctagaccaacagctaatatataggcctctatgagtaaataatagacatctaaatatggggggcgtggt

SEQ ID NO: 146075 - DNA, 500 bp, Arabidopsis thaliana
  unsure (1)..(500): unsure at all n locations
gaaatttctgatatttacttttcctctgagttattatagatcaattatcttatttaatatatattcgntttatttttttcatatattaaaattcaccatatttcaaactctataaataaagacttgttttatttgatttggatacaaaaaaatacatctatttttactaattatccatttaaaacataaaaaaaagaaaaatgaaataaaaatagtgggtagagtgttgaattttattaagcaaaccattgtagagtataaaatttaagtgggtattgaattattatgtggaagagagaagaaatgatgtggaaaaaaagaagatgacttggagggtgttgaatgaaaaaaccattgttgatagcctgatgactgattagaaatcaacatgtcatctattttaacgaatattaaaaattaaatttagcaaccatccaaagtaatacaagattcacatgatttatacatatttctttgaaaaacttgtttataaacttcac

SEQ ID NO: 146076 - DNA, 424 bp, Arabidopsis thaliana
  unsure (1)..(424): unsure at all n locations
gtcgaccacgcgtccgcgaaaaaagcttttaaaacttatctagtttcgtttgatacacattttatagaaatatatggcatccaaccaacagagctacagagctgttgagaccagaggcaaggcccatgataagactggacatgctatggtaactatgagggacaaggctgaggagggccggtacaagacttttcaaacggcccaaacagcccaacagaaggcccatgagacagcccagtcagctaaagataagacatctcaaactgcccaagcggttcaacagaaggcccatgaaacggcccagtcagtanaagagaagacatttcaaactgcccaaacggcacagcaaaaggcccatgagacgacgcaagcagcaaatgaaaagacatcttaagctggcgacaaagcttgcgaggtcaaggac

SEQ ID NO: 146077 - DNA, 500 bp, Arabidopsis thaliana
atacattatgtggttatacgtcgcaatgtacaatccttgctctgttttcatgatgtaagcactctagagcacgagcaacgcctaacgcgaacccatatagttccatccagaccatagttgatgacttctcgcttgcgatgaacttatcaagagacccgttttccatagatgcgcaaataattgctctcttggaaccttcagagatgaatcctaggacggtaacaatgtcgacatgcgaagctaggctcatgctggcaacttcagtgataaaggctgcaccattattaccttttaagtctttcaaaaccttcactgcaaccatacggtcatcagaaagggttcccctatagacaattccgaatgcgcctcgccccaccacttctgcgaatgagtttggaattctcttcacttgatcgtagctatattgcttcagatgaataagtgctttgattcttggtttggaatatgttccttgaggtcttggtgacccttatcatttg

SEQ ID NO: 146078 - DNA, 419 bp, Arabidopsis thaliana
tccaggctctgcccactggatctacaactcaggagaacagccacttgtcatcatcgctcttctcgacatcgccagctaccaaaaccaactcgaccgcaaccctagagtgttccatttggccggaaacaaccagcagggaggctttggcggttcacagcaacaacaagaacagaaaaacttgtggagcgggttcgacgcacaggtcatagctcaagcattgaaaattgacgttcagttggctcagcagcttcagaaccaacaagacagcagaggaaacatcgttcgtgttaagggacctttccaggtcgtgaggccacctctaagacagccctacgagagcgaggagtggagacacccacgtagcccacagggcaacggccttgaggagactatctgcagcatgaggtcccacgagaaca

SEQ ID NO: 146079 - DNA, 520 bp, Arabidopsis thaliana
cacatagcaaaaaatggcaaacaagttgttcctcgtctgcgcagctctcgctctctgcttcctcctcaccaacgctggcatctaccgcaccgtcgttgagttcgaagaagatgacgccactaaccccataggcccaaaaatgaggaaatgccgcaaggagtttcagaaagaacaacacctaagagcttgccagcaattgatgctccagcaagcaaggcaaggccgtagcgatgagtttgatttcgaagacgacatggagaacccacagggacaacagcaggaacaacagctattccagcagtgctgcaacgagcttcgccaggaagagccagattgtgtttgccccaccttgaaacaagctgccaaggccgttagactccagggacagcaccaaccaatgcaagtcaggaaaatttaccagacagccaagcacttgcccaacgtttgcgacatccccgcaaggtgatgttggtcccttcaacatcccttcattcccttctttctactaaatctcaaacaa

SEQ ID NO: 146080 - DNA, 522 bp, Arabidopsis thaliana
cgcgtccgaacaaaaagaaaatggttaagctcagcaatctcctcgttgcaaccttcggggttctcctcgtccttaacggctgggttgcgaggcagtcacttggggttcctcctcagctacagaacgagtgtaacctcgacaacctagatgttctccaagccaccgaaactatcaagagtgaagccggtcagatcgagtactgggaccacaaccaccctcagctccgatgtgttggtgtttccgttgctcgttatgtaattgaacaaggcggtctttacttgcccaccttcttcacttccccaaaaatttcctacgtcgttcaaggaacgggtatcagcggaagagtggtccctggatgtgccgagaccttcatggactcgcagccgatgcaaggacaacaacaaggccaaccatggcaaggacgacagggacaacaaggccaaccatgggaaggacagggacaacagggacaacaaggaagacaaggccaaccatgggaaggacagggacaacagggacaac

SEQ ID NO: 146081 - DNA, 70 bp, Arabidopsis thaliana
ggttaccacttgaagtataaccaatggttccaaatctcacctgaagaagcaagggagggtcaagtcaaca

SEQ ID NO: 146082 - DNA, 345 bp, Arabidopsis thaliana
atgggaaggacaggaccaccaggaacaccagggacaacagggacaccaaggccaaccatgggaaggacaggaacagcagggacaacaagggttccgtgacatgcaccaaaaggtggaacatgtgagacgcggagacgtttttgccaacactccaggctctgcccactggatctacaactcaggagaacagccacttgtcataatcgctcttttcgacatcgccaactaccaaaaccaactcgaccgcaaccttagagtgttccatttggccggaaacaaccagcagggaggctttggcggttcacagcaacaacatgaacagaaaacttgtggagcgggttcgac

SEQ ID NO: 146083 - DNA, 388 bp, Arabidopsis thaliana
  unsure (1)..(388): unsure at all n locations
ggaaaaatatgaacatttgatcaggcggatatagataacagtgggacaatagactatggagagtttatagcagcagtggtgcatttgaacaaaatagagaaagaagaccatttgttcaaagcattctcttactttgaccaagatggaagtggttatataaccagagacgagctccaacaagcttgcaagcaatttggcttagcggatgttcatttagacgacattttacgcgaagtcgataaagacaacgtaacaactcattaatatgcaattgatattgctttacctatagttacttgcaagaacattgnntctttataatgatgttattatgattggttttgtcaggatggaagaatagactacaagcgagtttgggatatgatgc

SEQ ID NO: 146084 - DNA, 471 bp, Arabidopsis thaliana
  unsure (1)..(471): unsure at all n locations
gtggatgtttagctctttcttaggcgcgttgtttgcgacattggggctcgtctacatccaagagaatctcggatggggtttaggttatggcatccctaccgtaggactcttggtttctctcgttgtgttctatattggaacaccattttacaggcataaggttatcaaaacagacaatttggcgaaagatttggttcaagttcctatcgcggcattcaaaaaccgaaagcttcagtgtcctgatgaccacttggagctttatgagcttgactctcattattacaaaagcaatggtaagcatcaagttcatcacacgcccgtcttcaggttcttggataaagcggccattaagacaagttcaagagtgccatgtacggtgacaaangtggaagtggcaaagcgtgtgctaggacttatctttatatggcttggcactttgatcccaagcaccttgtgggcacaagtcaacac

SEQ ID NO: 146085 - DNA, 468 bp, Arabidopsis thaliana
cgctttgggttgtggtcacgacaacgaaggtctctttaccggagcagccggtttactcggtttaggcggtggtgggttatcgataaccaatcaaatgaaagcgacgtcgttttcttactgcctcgttgaccgtgactcgggaaagtcctcaagtcttgatttcaactcggtccaactcggtggcggagacgcgacggcgccgcttctacgtaacaaaaagatcgacactttctactacgtcggactcagtggattcagcgtcggtggtgaaaaagtcgtgctgcctgatgcgatcttcgatgtcgatgcttcgggaagcggaggagtgatcttggattgtggaaccgccgtgactcgtcttcagacgcaggcttataactcgctgcgtgacgcgtttcttaaactcaccgtgaatctcaaaaaaggatcttcgagcatctctctgttcgacacgtgttacgatttctc

SEQ ID NO: 146086 - DNA, 326 bp, Arabidopsis thaliana
  unsure (1)..(326): unsure at all n locations
ggaatttcagagcgacaaggatgagtttcaaatttctctttaactttaatttctcgatgcacaaatgtaaaagcggataatttggcacgaaaaatacgttccgaaccacatcacatcacctatgtaaacaacattccccaagaatcgctcttttgagctctaattaagagtagacggcaaaaaaataatcaaatttgttcaattaccttttagttaagaaaaataatattttttgagaaattggtaagaatgccctttcaaaaatacccattttctatatatatcttgtttttcaaannanannannnnnnnnnnnnnnnnnnnnn

SEQ ID NO: 146087 - DNA, 228 bp, Arabidopsis thaliana
gaagaaagcaaataaaatctagagaagcttgtttctagggtttcgacttttcgacggccggtccaatttttcaccggtttgtgcttaaggaatcatgaagcttgctttttccgaaacttttaagtttaatcttgggagaaggaatctggaccggttttcaaaaaggtccggcagggttgaaagggtggttttaaaacttggtttggttttggttttatggaaaatgaa

SEQ ID NO: 146088 - DNA, 405 bp, Arabidopsis thaliana
cgaaaaatctatagagagctcactcactaacaatggcgtctcttctcggaagatctccttcttcaatcttgacctgccctcgtatatcttctccttcctcaacatcttcaatctcccatctctgcttcggaccagagaaattttctggaagaatccaattcaatccaaagaggaacagatctcgttaccatgtctctgttatgaatgtcgctacagagatcaactctattgaacaagcaaagaagattgattcaaaggaaagtgcaagaccggtttatccgtttgctgccatagttggacaagatgagatgaagctatgccttttgttaaatgtgattgacccgaagataggtggtgtgatgataatgggagatagaggaactggtaaatcaacaacttgtagat

SEQ ID NO: 146089 - DNA, 494 bp, Arabidopsis thaliana
agaaaaatggatcgagagttatctatcatacattgctgtttgacactctagaacctcttcaatgactacggtgcgcgaacagtgatctaacgagtgccagcatcaatcaacatataatgcgactcgaaccatcccaaatcataaagagcgagggtgaatgcattgaggtctgaaaccaccatgcactccagatccggtgcttcggctgagcctttgagcgtatagtaattgtacctcacggtctttgattgcccactttcttgaacgccggcgaactcacgattgttgttcacggatggggtctcatgagaagagttatttcgggatgcgcctagacgttcatggagtcaccgttatttggagaaggtcaaggtcagaggtcagagacaagggttccgtgacatgcaccagatagtagagcacctacggtgcagtgacaccattgcaacaccatctggtgtaactcaaaggttctacaacaatggaaatgagcc

SEQ ID NO: 146090 - DNA, 472 bp, Arabidopsis thaliana
aaagaaaacattcgaaaccctaaaaacttcatttgaattcgacatgacaaagaagagaaagctcgaaggagaagaagctaacgaagctgaagaaccgtcgcagaagctgaagcagacgccagaggaggagcagcagcttgtaattaaaaatcaggataatcaaggagacgttgaagaagttgaatacgaggaagtagaggaagagcaagaagaagaagtagaagatgatgatgatgaagatgatggtgatgagaatgaggatcagacggatgggaatcgtatagaggcggcggcgacgtctggatctggcaatcaagaagatgatgacgatgaaccaattcaggatctgttggaaccattttcaaaggagcaagttttgagtcttcttaaggaagcagcggagaagcatgttgatgtagccaatcgaattaaggaagtagctgatgaggaccctgttcatcggaagatcttt

SEQ ID NO: 146091 - DNA, 501 bp, Arabidopsis thaliana
ctcctcgttgcaaccttcggggttctcctcgtccttaacggctgccttgcgaggcagtcacttggggttcctcctgagctgcagaacgagtgtaacctcgaaaacctaaatgttctccaagccaccgaaactatcaagagtgaagccggtcagatcgagtactgggaccacaaccaccctcagctccgatgtgttggtgtttccggtgctcgttatgtaattgaacaaggcggtctttacttgcccaccttcttcacttccccaaaaatttcctacgtcgttcaaggaacgggtataagcggaagagtggtccctggatgtgccgagaccttcatggactcgcagccgatgcaaggacaacaacagggccaaccatggcaaggacgacagggacaacatggccaaccatgggaaggacagggacaacagggacaacagggaagacagggccaaccatgggtggacagggaccacagggacaacaaggacgacagggacaac

SEQ ID NO: 146092 - DNA, 167 bp, Arabidopsis thaliana
gggacaccaggggttccgggacatgcaccagaagggggaacatgtgaaacgcggagacgtcggggccaacactccaggctctgcccactggatctacaactaaggagaacagccactggtcataatcgctcttttcgacatcgccaactaccaaaaccaactcgacc

SEQ ID NO: 146093 - DNA, 340 bp, Arabidopsis thaliana
  unsure (1)..(340): unsure at all n locations
agggacagcagggaccaacaggggttccgtgacatgcaccagaaggtggaacatgtgagacgcggagacgtctttgccaacactccaggctctgcccactggatctacaactcaggagaacagccactggtcataatcgttcttttcgacatcgccaactaccaaaaccaactcgaccgcaaccctagagtgttccattgggccggaaacaaccagcagggaggctttggcggtcacagcaccaacaggaacagaaaaacttgtggagcgggttcgacgcacaggtcatagctcaagcattgaaaattgacgtcagtnggctcagcagcttcagaccaac

SEQ ID NO: 146094 - DNA, 389 bp, Arabidopsis thaliana
  unsure (1)..(389): unsure at all n locations
gngacaacaaggccaaccatgggaaggacagggacagcagggacaacaagggttccgtgacatgcaccagaaggtggaacatgtgagacgcggagacgtctttgccaacactccaggctctgcccactggatctacaactcaggagaacagccacttgtcatcatcgctcttctcgacatcgccaactaccaaaaccaactcgaccgcaaccctagagtgttccatttggccggaaacaaccagcagggaggctttggcggttcacagcaacaacaagaacagaaaaacttgtggagcgggttcgacgcacaggtcatagctcaagcatttgaaantgacgttcagttggctcagcagcttcagaaccaacangacagcagaggaaaca

SEQ ID NO: 146095 - DNA, 378 bp, Arabidopsis thaliana
cccgagaaaacgaaaaccctagtttcagaggcatctccagacaccgaaaatggcggaaggactcgttttgaagggcaccatgcgtgcacacactgacatggtgacggcaatcgccaccccaatcgataacgcagacatcatcgtctcagcttcccgcgacaaatccatcattttgtggaaactcaccaaggacgacaaagcctacggtgtagctcagaggcgtctcactggtcactctcacttcgttgaggatgttgttctctcctccgatggacaattcgcgctttccggcagctgggacggcgagctccgtctttgggatcttgctgctggtgtctccactcgtagattcgttggacacaacaaaggcccgtgctc

SEQ ID NO: 146096 - DNA, 511 bp, Arabidopsis thaliana
caaaaagaaaatggttaagctcagcaatctcctcgttgcaaccttcggggttctcctcgtccttaacggctgccttgcgaggcagtcacttggggttcctcctcagctacagaacgagtgtaacctcgacaacctagatgttctccaagccaccgaaactatcaagagtgaagccggtcagatcgagtactgggaccacaaccaccctcagctccgatgtgttggtgtttccgctgctcgttatgtaattgaacaaggcggtctttacttgcccaccttcttcacttccccaaaaatttcctacgtcgttcaaggaacggatatcagcggaagagtggtacttggatgtgccgagacctttatggactcgcagccgatgcaaggacaacaacaaggccaaccatggcaaggacgacagggacaacacggccaaccatgggaaggacagggacaacagggacaacaaggaagacaaggccaaccatgggaaggcagcgacaacagggacaac

SEQ ID NO: 146097 - DNA, 474 bp, Arabidopsis thaliana
aacgactcacgcgtccgttgcaaaaaacttctctctgaatctcagtgagttctcataaaatgagagggatggtgagttttgccgtttgggcgcgctttgctgctttactctcacagcagctctttgcttctgttgcttccgtaaggctcgaggatgccaaaacatactacttatctactccctctggctcacatggaactccttcatcacacacgcctccttcttataactgaggaagtccaccttacgacccttctccttcaactccttctcacccttcacctccatcacatactccaactccttccactccatcacacactccaactccacacactccatcacacacgccaactccacacacccctccttgtaactgtggaagtccaccttcccacccttccacgccttcacaccctttcactccttcgcactcaacgccatcacaccctccttctggtggatattactcat

SEQ ID NO: 146098 - DNA, 379 bp, Arabidopsis thaliana
atttattttcattgttcaaacaaatatttgcagaaaagagatttatttttacctgcttagcatataataggaagggcgtaagaaaactttttttttatatattcattgctagattattaaaataaacatgaatgcacagatatatatgtctatttttattcttttattgtggtacagctctatctgggacagcacatgctgtgctctataaaaaaggaaatgttctcttcaagggaaaaattgaaacataaaaatttattgagaattactcctcaaacgcatctctagagagataaaataccccattatagagctataggtctataacacaacgtaacgtatgttctgattctggagtttacatatactcatcattact

SEQ ID NO: 146099 - DNA, 361 bp, Arabidopsis thaliana
atcaaagcttacacttgccactgaacatacgaaaaatgtcgtagatctagcgctgctcgacaaagaggagggagggcgacagagtacacgatgactactcatacatttccctattttctcaccgccagcaagatgcgcagactggatatggatttgtcaccctttatgggggaagcagagatatatttaacaatgcatgctacggctctataagaaatgaagcttgcgccgcttggcgatgatagagctattgatctatataggcacttacattataaacacacttctagagagaacacattccccaatcaacactttatttctataacacagaatagctttttgtccgattcttcgattg

SEQ ID NO: 146100 - DNA, 442 bp, Arabidopsis thaliana
gcctctcattcttgttgcagccgcggatctcgccagcaaccagaaccagcttgaccgcaaccttagaccatttttgatagccggaaacaacccacaagggcaggaatggctacaaggccgaaagcaacagaagcaaaacaacatcttcaatggcttcgcacctgagatcttggctcaagccttcaagatcaatgtcgagacggctcagcagctccagaaccagcaagataaccgtggcaacatcgtcaaggtcaacggacctttcggcgtcattaggccacccttgagacgcggcgaaggcggccaacaaccacatgaaatagctaatggtttagaggagactttgtgcaccatgcgatgcactgaaaacctcgatgacccgtcggatgctgacgtgtacaagccatcactcggatacattagcacacttaacagctacaat

SEQ ID NO: 146101 - DNA, 460 bp, Arabidopsis thaliana
ctgcattggctggaacctacaactttgatgacatggcgaaagtggctgcgattgcctccatgtgcgtccaccaagaggtctgacacagaccattcatgggtgaagttgtgcaggcactaaaacttatatccaacgatgcagatgagacctgtggtgattattgcagccaaaaggactcatcagtaccagactctgctgacttcaaaggcgatctggctccttcggatagcagctggtggaaattgacacctcggtaaaggtatggtcaagcttcgtcgttcataacaatggattatagctcaggaccactagaggacatgggaaaccggccttactttgcttctagcattccaagagtaggaggtctaattctaccaaacagatcaggtccgttaagacccatgcgtagtagaagaaactttttagactgagaggagcatgagcgaacacggtggaccgt

SEQ ID NO: 146102 - DNA, 124 bp, Arabidopsis thaliana
gtcagaagcattgaacgtgctgttgagttggttttccgggtcgaagaaaatgctgtttgaagtcaagtccttaaggcacaggtcaggaaaggactagtcagtgatgctattgagtccttaatcc

SEQ ID NO: 146103 - DNA, 501 bp, Arabidopsis thaliana
aaaaggaaattggttaacctcaccaatttccttttcgaacctttgtgttttcttcgtccttaacggctgcctggcgaggcagtaacttggggttcctcctaagctacagaacgagtgtaacctcaacaacctagatgttctccaagccaccgaaactatcaagagtgaagccgctcagatcgagtactgggaccacaaccaccctcagctccgatgtgttggtgtttccgttgctcgttatgtaattgaacaaggcggtctttacttgcccaccttcttcacttccccaaaaatttcctacgtcgttcaaggaacggttatcagcggaagagtggttcctggatgtgccgagaccttcatggcctcgcagccgatgcaaggacaacaacaaggccaaccatggcagggacgacagggacaacagggccaaccatgggaaggacaggtacaacagggacaacatggaagacaaggccaaccatgggaaggacagggacaaca

SEQ ID NO: 146104 - DNA, 284 bp, Arabidopsis thaliana
  unsure (1)..(284): unsure at all n locations
gacaaggccaaccatgggaaggacagggacaacagggacaacagggacgacaggacaacagggccaaccatgggagggacagggacagcagggacaacangggttccgtgacatgcaccagaaggtggaacatgtgagacgcggagacgtttttgccaacactccaggctttgcccactggatctacaactaaggagaacagccacttgtaataatggtttttctggacatggccaactaccaaaaccaacttgaccgaaaccttagagtgttccatttggccg

SEQ ID NO: 146105 - DNA, 456 bp, Arabidopsis thaliana
caaacgcgaacgccattctttacgtgacagacggggaagcccaaatccagatcgtaaacgacaatggtaacagagtgtttgacggacaagtctctcaaggacagctcatagccgtaccacaaggtttctcggtggtgaaacgcgcaacaagcaaccgattccagtgggttgagttcaaaacaaacgcaaacgcgcaaatcaacactcttgcgggacgaacctcagtcttgagaggtttaccacttgaagttataaccaatgggttccaaatctcacctgaagaagcaaggagggtcaagttcaacacgctcgagaccactttgactcacagcagtggcccagctagctacggaaggccaagggtggctgcagcttaagagcttaaaaccgcggctcaacaatgaacctctagtactgtaaaaggaagttaaatagtacgaagtaataataataatg

SEQ ID NO: 146106 - DNA, 337 bp, Arabidopsis thaliana
  unsure (1)..(337): unsure at all n locations
gtccgaattcccggtcaccacgcgtcgccattagtaacttgcaaatttcttagtcacaaaccacactagcgccctgactttacaggtgctaggaaacgccaaaggagcagtagcagtggtggtatctattctaatcttcaagaatccggtgtcagtgaccggaatgctgagttactccctcaccgtctgtggagttatactgtacagcgaagccaagaaacgaaacaaatattagaacactaaacacacacaaagcgtttacttcttcttcatcattcccccctatatatatgtnatatattttctcccctatggatatacaagcaaagagtctctt

SEQ ID NO: 146107 - DNA, 298 bp, Arabidopsis thaliana
  unsure (1)..(298): unsure at all n locations
agaaaaatgggtcgagtctcatctattatctctttctctttgacactctcgattctcttcaatggctacactgcccaacaggggccaacgagtgnagctcgacaacttatgcgctcgaccatccaaatataaagcgaggggtcgatgagtctggaccacagccccagctcgtgctcgcttgcttgagcgttcgcatgacctaggtctttctgccacttctgacgcgcaactacgttgtgtcacgaggggttatggagagtattcggatgcccggacgtcatgagcaccgtatttgaga

SEQ ID NO: 146108 - DNA, 444 bp, Arabidopsis thaliana
aaagaaaatggttaagctcagcaatctcctcgttgcaaccttcggggttctcctcgtccttaacggctgccttgcgaggcagtcacttggggttcctcctcagctacagaacgagtgtaacctcgacaacctagatgttctccaagccaccgaaactatcaagagtgaagccggtcagatcgagtactgggaccacaaccaccctcagctccgatgtgttggtgtttccgttgctcgttatgtaattgaacaaggcggtctttacttgcccaccttcttcacttccccaaaaatttcctacgtcgttcaaggaacgggtatcagcggaagagtggtccctggatgtgccgagaccttcatggactcgcagtcgatgcaaggacaacaacaaggccaaccatggcaaggacgacagggacaacaaggccaaccatgggaaggaca

SEQ ID NO: 146109 - DNA, 548 bp, Arabidopsis thaliana
aagaaaatggttaagctcagcaatctcctcgttgcaaccttcggggttctcctcgtccttaacggctgccttgcgaggcagtcacttggggttcctcctcagctacagaacgagtgtaacctcgacaacctagatgttctccaagccaccgaaactatcaagagtgaagccggtcagatcgagtactgggaccacaaccaccctcagctccgatgtgttggtgtttccgttgctcgttatgtaattgaacaaggcggtctttacttgcccaccttcttcacttccccaaaaatttcctacgtcggtcaaggaaccggtatcagcggaagagtggtccctggatgtgccgagaccttcatggactcgcagtcgatgcaaggacaacaacaaggccaaccatggcaaggacgacagggacaacaaggccaaccatgggaaggacagggacaacagggacaacaaggaaagacaagccaaccatgggaaggacagtgacaacatggacaacaaggacgacagggacaacaaggccaaccatggaaggcagg

SEQ ID NO: 146110 - DNA, 407 bp, Arabidopsis thaliana
gcgtccggtgaatccttctacggtggcgacgacaagcaacgaccgtcgatgtatccccaagttgatcaatccaggcctggggatccttttgcttctacaaatccttacgtcgcttcttccccttatctctatccttctctatcctctcacaatctcggacctaatctcttcccagaccacggagatgcatccaacgaccaatcaccatctgctcctcctcaggcgacggaggaggttctcatccgtgttcccggcgctattctcaaccttatcgacaaatcctacagcgttgaactcgcgtgcggtgatttcaccatctttcgaatcatccaggggcaaaatattgtaacggttctagctaatgttgggaatgagaatcaatggccgttgacgaagaacgaggttgc

SEQ ID NO: 146111 - DNA, 514 bp, Arabidopsis thaliana
  unsure (1)..(514): unsure at all n locations
gtcatttatcattatcatttagttcagttttaattttatttagttttgtacaatttcaatcaaaaaaggagtctgtatgtcacgttaccgagggcctcgttttaaaaaaatacgccgtctgggggctttaccgggactaactagtaaaaggcctaaggcaggaagcgatcttagaaaccaatcacgctccgtaaaaaaatctcaatatcgtattcgtttagaagaaaaacaaaaattgcgttttcattatggtcttacagaacaccaattacttaaatatgtgcgtatagccggaaaagccaaggggtcaacaggtcaagttttactacaattacttgaaatgcgtttggataacatcctttttcgattgggtatggctttgactattcctcaagcgcgccaattagttaatcatggacatnatttagttaatggtcgtatagttgatataccaagttatcgctgcaaaccccgagatattattacagtgaaggatgaacaaaactctagaact

SEQ ID NO: 146112 - DNA, 411 bp, Arabidopsis thaliana
  unsure (1)..(411): unsure at all n locations
ttaagaaagaccaacacagacacggaagaagtagcttggttcttctctttgtgtatgtgaatgcgggagatggggactggagattctgcttcgagactgattctctggttctgcttagggtttttgattctaggtgttggatttgtgcaatgtggagttacttatgaccggaaagcacttctcattaatggacagagacgaatcctcttctctggctccatacattaccctcgaagcactcctgatatgtgggaagatntgattcagaaggcgaaagatggaggcattgatgtgattgagacgtatgtgttctggaatcttcatgagccttctcctggaaaatacgattttgaagggaggaaatgatttggtgagatttgtgaagacgattcacaaagctggtttatatgc

SEQ ID NO: 146113 - DNA, 350 bp, Arabidopsis thaliana
aaacaggaaaccatacccaattggcaaattttggttaacaggcttttcttggtttgcgcaactttggccctttggttcctcgtgaccaacgcttccatctaccgaaccgttgtcgaattcgaagaagatgacgccagcaaccccgtaggtccaagacagagatgccagaaggagtttcagcaatcacaacacctaagagcttgccagagatggatgagcaagcaaatgaggcaaggacgtggtggtggtccttccttcgacgatgagttcgatttcgagggcccccagcagggataccagctactccagcagtgctggaacgagcttcgccaggaagagccagtttgcgt

SEQ ID NO: 146114 - DNA, 451 bp, Arabidopsis thaliana
aacaacatgaacgctaacgagatcttgtactgcattggatgttctaaggaaggatccaagtggtgagcgacgacggacagatcgtgttggaccaacaggtgcataagggacagttcgtggtcatcccacaagggttcgcatacgttgtccagtcccacggaaacaagttcgagtgcatctctttcaaaactaatgaaaacgcaatgatcagcactttggcggatagaacctcgctcttgagggcattgccattggaggtcatatcaaatggtttccagatctctcccgaggaagctaggaagatcaagttcaacacacttgagaccactttgacccgcgctgtcggtaggcaacaacaactgttgatcaaggagattgtcgaggcttaaatcaaaacgtttttttttttttaaataagtatggtcagtttgtaatcatcgccttttacctt

SEQ ID NO: 146115 - DNA, 197 bp, Arabidopsis thaliana
ctcctccgtcgaagttttgaattctctctggttctccaattctcctttcgagctgccttaagcttcgcatttacgtttacgttatgcacgaatgagatcatcgtagatcgtgattgaagaagcgagagataaattaggagagcgaagatgagcgagggccagaagttccagttgggaacaatcggcgctttgagttt

SEQ ID NO: 146116 - DNA, 356 bp, Arabidopsis thaliana
  unsure (1)..(356): unsure at all n locations
gctacaaggccgagagcaacagccacagaagaacattttcaatggatttggacccgaggttattgctcaagctttgaagatcgatcttcagacagcgcagcaacttcagaaccaagatgacaaccgtggaaacattgtccgagtccaaggcccgttcggtgtcattaggccgcctttgaggggccagagacctcaggaggaggaagaagaagaagaaggacgacatggacgacacggtaatggcttagaggagaccatctgcagcgccaggtgcaccgataacctcgatgacccgtctcgtgctgacgtgtacaagccacagctcggttacatcagcactctcaacagntacgatc

SEQ ID NO: 146117 - DNA, 446 bp, Arabidopsis thaliana
aaatgtcagaatctccttcagcgaattcacatctcagctgcttttgaatccgccgtaactaaaaacaatcctccttttctcggagcgttaaactatgggcgcgccggcaggacaaagggcggcggtggctgaagcggctggcgccgatggtgctccaccgcagcagcagcgtggatttggttccacgatttccggcatcgttagaatcgccgtcttttgggtatttgcttctaagttcttttctcctaagcagaaacctatggatcccactgctccgtctcagctcatgactaatctcttccacaagggcgaatcattggatatgtggttttatctatcaaagcaagagaagttcaatgactttggcaatgatcgtccgctatattggcatgagacgaatataccttatgctgtatggacaccagagagtattaggaccaagtcac

SEQ ID NO: 146118 - DNA, 402 bp, Arabidopsis thaliana
  unsure (1)..(402): unsure at all n locations
ggcgaatgtggaccgtgatcggcgtgtgcatgtagaccgtactgacaaacgtgttcatcagccaaactacgaagatgatgtcggttttggtggctatggcggttatggtgctggttctgattataagagtcgcggcccctccactaaccaaatcttggcacttatagcaggagttcccattggtggcacactgctaaccctagctggactcactctagccggttcggtgatcggcttgctagtctccatacccctcttcctcctcttcagtccggtgatagtcccggcggctctcactattgggcttgctgtgacgggaatcttggcttctggtttgtttgggttgacgggtctgagctcggtctcgtgggtcctcaactacctncgtgggacgagtgatac

SEQ ID NO: 146119 - DNA, 486 bp, Arabidopsis thaliana
aagaaaaatgggtcgagtctcatctattatctctttctctttgacactcttgatcctcttcaatggctacactgcgcaacagtggcccaacgagtgccagctcgatcaactcaatgcgctcgaaccatcccaaatcatcaagagcgagggtggtcgcatcgaggtctgggaccaccatgcaccccagctccgttgctccggctttgcctttgagcgtttcgtcattgagcctcagggtcttttcttgcccactttcttgaacgccggcaaactcacgtttgttgttcacggaaggggtctaatgggaagagttattccgggatgcgccgagacgttcatggagtcaccggtatttggagaaggtcaaggtcagggtcagagtcaaagggtccgtgacatgcaccagaaagtagagcacctacggtgcggtgacaccattgcaacaccatctggtgtagctcaatggtctacaacaatggaaatgag

SEQ ID NO: 146120 - DNA, 511 bp, Arabidopsis thaliana
ggaaaaagttggattcaattgtcaactactcctatcggaaataggattgactacggattcgagccatagcacatgggttcataaaaccgtacgattctcccgatctaaatcaagccggttttacatgaagaagatttgactcggcatgttctattcgatacgggtaggagaaacggtattcttttcttaaacttaaaaaaatagagaaataagaaccaagtcaagatgatacggattaatcctttattcttgcgccaaagatcttcctatttccaaaggaactggagttacatctcttttccatttccattcaagagttcttatgtgtttccacgcccctttaagaccccgaaaaatcgacaaattcccttttcttaggaccacatgcgagataacgaaaaaaaaaaagagagaatggtaaccccacgattaactatattatttatgaatttcatagtaatagaaatacatgtcctaccgaaaccagaattgaactcgctatcctatcatc

SEQ ID NO: 146121 - DNA, 321 bp, Arabidopsis thaliana
gatgttctccaagccaccgaaactatcaagagtgaagccggtcagatcgagtactgggaccacaaccaccctcagctccgatgtgttggtgtttccgttgctcgtatgtaattgaacaaggcggtctttacttgcccaccttttcacttccaaaaatttctacgtcgtcaagaacgtatagcggagagggtctgatggcagacttaggactgagcgtgaggcacacaggcaacggaggcacgcacaggacaggaggcggccagcacagaacagcactggagcagcacaggcaagcacgcacagcactgagcagcgagcaca

SEQ ID NO: 146122 - DNA, 231 bp, Arabidopsis thaliana
aaaaaacttctctctgaatctcagtgagttctcataaaatgagagggatggtgagttttgccgtttgggctctctgtgctgcgttactctcacagcagctctttgtttctgttgcttccgtaaggttggaggatgccaaaccatactacttatctcctccttctggttcacatggaactcctccatcacacacgcctccttcttctaactgtggaagtccaccttacgacc

SEQ ID NO: 146123 - DNA, 297 bp, Arabidopsis thaliana
caaaaggaaatgggttaacttaacaattttcttcgtggcaacctccggggttttcttggtccttaccggttgcctggcaaggcaggaattgggggttcctcttaagttccagaccgagagtaacctcgacaccctaaatgttttccaagccaccgaacctatcaagagtgaagccggccagatcgagtactgggaccacaaccaccttaagttccgatgtgtgggtgtttccgttgttcgtaatgtaattgaccaaggcggccttaactggcccaccttcttaacttccccaaaaat

SEQ ID NO: 146124 - DNA, 426 bp, Arabidopsis thaliana
aagcatatcaataacgaggaaagaacttaacatttatccctataacgcgagcgaaccgcgaaatcccactcgaaaacgacttctccacgttcgaattgtaccatcacaaacatctcacgacggaccgggcctaagttccctggaaaggggcgccagagaggttgagagccccgtcgtgcccggaccctgtcgcaccacgaggcgctgtctacgagtcgggttgtttgggaatgcagccccaatcggccggtaaattccgtccaaggctaaatacgggcgagagaccgatagcgaacaagtaccgggaggtaaagatgaaaaggactttgaaaagagagtcaaagagtgcttgaaattgtcgagagggaagcggatgggggccgtcgatgcgtcctggtcggatgcggaacggaacaatcccgtccg

SEQ ID NO: 146125 - DNA, 426 bp, Arabidopsis thaliana
caaaaagaaaatggttaagctcagcaatctcctcgttgcaaccttcggggttctcctcgtccttaacggctgcctggcgaggcagtcacttggggttcctcctcagctacagaacgagtgtaacctcgacaacctagatgttctccaagccaccgaaactatcaagagtgaagccggtcagatcgagtactgggaccacaaccaccctcagctccgatgtgttggtgtttccgttgctcgttatgtaattgaacaaggcggtctttacttgcccaccttcttcacttccccaaaaatttcctacgtcgttcaaggaacgggtatcagcggaagagtggtccctggatgtgccgagaccttcatggactcgcagccgatgcaaggacaacaacaaggccaaccatggcaaggacgacagggacaaca

SEQ ID NO: 146126 - DNA, 444 bp, Arabidopsis thaliana
  unsure (1)..(444): unsure at all n locations
ctgaggaggataaaaaccctagggtgagtgagatagagagaagcgaaaatggtgcagcgccttgtttcccgatcacgacacagttacgccaccaaatccaaccagcacaggatcgtcaaaactccaggaggtaaattgacgtaccagaccactaagaagagagctagtggacctaaatgtcccgttaccggcaagcgtattcagggtattcctcacttgaggccaactgagtacaagaggtcacgtttatcaagaaacaggaggaccgtgaaccgtgcttatgggtggggtttgtctggttctgctgttagggaaagaatcattcgtgctttccttgtggaggagcaaaagatngtgaagaaggttttgagcttcagaaggaaaggaaaaggttgctcccagtgatctagaccctataagttttatgtttatggctctgtctag

SEQ ID NO: 146127 - DNA, 453 bp, Arabidopsis thaliana
  unsure (1)..(453): unsure at all n locations
cacaaacgagtaagaatacaaatacaaatagcaaaaaaaatggcaaacaagctcttcctcgtctgcgcaactttcgcgcctctgcttcctcctcaccaacgcttccatctaccgcactgttgtcgagttcgacgaagatgacgccagcaaccccatgggcccaagacagaaatgtcagaaggagtttcagcaatcacagcacctaagagcttgccagaaattgatgcgcatgcaaatgaggcaaggccgtggtggtggtccctccctcgacgatgagttcgatttggaagacgacatcgagaacccacaaggcccccagcagggacaccagatcctccagcagtgctgcagcgagcttcgccaggaagagccagtttgtgtttgccccaccttgagacangctgccagggccgttagcctncagggacaacacggaccattccaatccaggaa

SEQ ID NO: 146128 - DNA, 367 bp, Arabidopsis thaliana
aacactccaggctctgcccactggatctacaactcaggagaacagccacttgtcatcatcgctcttctcgacatcgccaactaccaaaaccaactcgaccgcaaccctagagtgttccatttggccggaaacaaccagcagggaggctttggcggttcacagcaacaacaagaacagaaaaacttgtggagcgggttcgacgcacaggtcatagctcaagcattgaaaattgacgttcagttggctcagcagcttcagaaccaacaagacagcagaggaaacatcgttcgtgttaaagggacctttccaggtcgtgaggccacctctaagacagtcctacgagagcgaggagtggagacacccacgt

SEQ ID NO: 146129 - DNA, 431 bp, Arabidopsis thaliana
aacaaacaaaaagaaaatggttaagctcagcaatctcctcgttgcaactcttcggggttctcctcgtccttaacgggtgccttgcgaggcagtcacttggggttcctcctcagctacagaacgagtgtaacctcgacaacctagatgttctccaagccaccgaaactatcaagagtgaagccggtcagatcgagtactgggaccacaaccaccctcagctccgatgtgttggcgtttccgttgctcgttatgtaattgaacaaggcggtctttacttgcccaccttcttcacttccccaaaaatttcctacgtcgttcaaggaacgggtatcagcggacgagtggtacctggatgtgccgagaccttcatggactcgcagccgatgcaaggacaacaacaaggccaaccatggcaaggacgacagggacaa

SEQ ID NO: 146130 - DNA, 529 bp, Arabidopsis thaliana
cgaccacgcgtccggaaaggagagcacataccgtgcggtgacaccattgcaacaccatctgttgtatcttaatggttgtacaccaatggcgacgagcctctcattcttgatgcagccgcggatctctccagcaaccacaaccagctagaccgcatccttaaaccattatagatgggcgggaacaactcacaagggcaggaatggctacaaggtcgaaagcatcagaagctagacaacatctgcaatcgctacgcacctgagatcttggctcaagcctacaagagcaatgtgcagacggctcagcagctccagaaccagcaagataaccgaggcaacatcgtcaaggtcaacggacctttcggcgtcattaggccacccttgagacgcggcgaaagcggccaacaaccacatgaaatagctgatggtttagaggagactttgtgcaccatgcgatgcactgaaaaccttgatgacccgtcggatgctgacctgtacaagccatcacttggatacattagcacacttaaca

SEQ ID NO: 146131 - DNA, 315 bp, Arabidopsis thaliana
aaacgctaactagcaatctcctcgcagcaactcttcgatgttcttctcgtccttaacggctgcctcgcgacgccgcacttgaggttcctcctcagctacacaacgagtgtaaccatcacaacctagatgttctccaagccaccgaaactatcaagagtgaaaccggtcagattgagtgctgataccacacctaccatcagatcaccaaagcccatgaatcaccccgctcgttatgtaattgaacataggcggtctatacttgcccacctttttcacttccccaaaaatttctacgatcctcaaggaaccgttatc

SEQ ID NO: 146132 - DNA, 519 bp, Arabidopsis thaliana
cgttccggaattgacccacgcgtccgcaaaaagaaaatggttaagctcagcattctcctcgttgcaaccttcggggttttcttcgtccttaacggttgcctggcgaggcagtcacttggggttcctcctcagctacagaacgagtgtaacctcgacaacctaaatgttctccaagccaccgaaactatcaagagtgaagccggtcagatcgagtactgggaccacaaccaccctaagctccgatgtgttggtgtttccgttgctcgttatgtaattgaacaaggcggtctttacttgcccaccttcttcacttccccaaaaatttcctacgtcgttcaaggaacgggttttaaccgaaagagtggtcccttgatgtgccgagacctcatggactcgcagccgatgcaggacaacaacaaggcaaccatggaaggacacagggacacaaggccaccatgggatgacaggaccacaggacacatggagacaggtcaccatggaagacaggacacaggacac

SEQ ID NO: 146133 - DNA, 396 bp, Arabidopsis thaliana
aacgaacaaacataagagaatctcttctttctaaccttcggggttttcttcttctttaacggttgccttgcaaggcaggcgcttggggttcttcctaagttacagaacgagtgtaacctcgacaacttagatgttctccaagccaccgaaactatcaagagtgaagccggtcagatcgagtactgggaccacaaccaccctcagttccaatgtgtagaggttaccgatgctcaatatgcaatcgaacaaggcggtctttacttgcccaccttcttcacttccccaaaaatttcctacgtcgttcaaggaacgggtttcagcggaagagtgttccctggatgtcccgagaccttaatggacttccacacgttgcacggacaacaacagggtcaacca

SEQ ID NO: 146134 - DNA, 534 bp, Arabidopsis thaliana
cggacgcgtgggtttggtttctctcttccaatcatccttcaagctcatctttttcttctacccaataacgaaagggggctcctttactaatgggttgcttcagcagtaaacaccggaaaactcaaaacgacggcggagaaaaatcaatcccgatcaatccagttcaaacccatgtagtccccgagcatcgtaaacctcaaaccccaacaccaaaacccatgaatcacccaatccatcagcagatttcaacaccgtcttcaaatccagtctcagttcgagatccagatacgattttaggtaaacccttcgaagacatcaggaaattttacagcttggggaaagaattaggtcgaggtcaatttgggattacgtatatgtgtaaagagattggtactgggaacacttatgcttgcaaatcgattcttaagaggaagctaattagtaagcaagataaagaagatgtgaagagagagattcagataatgcagtatttgtctggacaacctaacaatgttgagatcaaaggtgcttatg

SEQ ID NO: 146135 - DNA, 455 bp, Arabidopsis thaliana
caagaaaacatacacaaatagcaaaacatggctaacaagctcttcctcgtctgcgcaactctcgccctctgcttgggcctcaccaacgcttccatctaccgcaccgttgtcgaattcgaagaagatgacgccagcaaccccgtaggtccaagacagagatgccagaaggagtttcagcaatcacaacacctaagagcttgccagagatggatgagcaagcaaatgaggcaaggacgtggtggtggtccttccctcgacgatgagttcgatttcgagggcccccagcagggataccagctactccagcagtgctgcaacgagcttcgccaggaagagccagtttgcgtttgccccaccttgaaacaagctgccagggcagttagcctccagggacagcacggaccattccaatccaggaaaatttaccagtcagctaagtacttgcctaacatttg

SEQ ID NO: 146136 - DNA, 433 bp, Arabidopsis thaliana
gccgctaaaccgccgaagaggtaaggaaccggcgagtgccacggtgattgcgcgtcactccgtggtgattaacggaggttgaccttgccacatcttcaaacttcgattgtacgctcaatggtctcatttttgttgttgttgtgtgtaatctctttttgtttctctctggacttgtgtgttttggagataatttcttctacttttgtttttctaacttgatgtggaaaaaggaaagatgagtaggaaacagaggagaaggtaaagagatgtatttataggtatacgcaacttggggacaaagaaagtgacgatcatatttaattgatggaatttagtggaaccaactctttatttcttaaccatagtgaactcatcaacgtatctctcttttattaaagaaaataacgtatttatactgtaagaactaagaagt

SEQ ID NO: 146137 - DNA, 436 bp, Arabidopsis thaliana
gacgattacactattcgaacaatttgtaattcacctcaaacaaaaaatgggtaaggcgcctttaatttgattaaaaaaagaattcctgttgttgaattatatttatataaagaatttaattaaaaacttgtattgtatttatataataataataatattaagtattaaggcacattcttttaatataatatattcgtaattactttcttgaaattgataggttgaaaatacactttagaaaaaaaaaaagagaaaacagcctaatactaataatttgatctacatcaattcatatgcattagattctaatttcactttattttaaaaaaaaaattttagttttgttacatatttttatttttagggcgtgccgtttttgaggatccaagctttcttttcgcgtgcatgcaaaatgtttaatttttttatagtgtca

SEQ ID NO: 146138 - DNA, 418 bp, Arabidopsis thaliana
catggcgacacttctctcaccttcttcaagctaagttttcattttgttcactgccagagatctatggccatggatatatctctgccttcattttcctggtcatttacgcgccgttagtctcatacgccgatgaatctcaagccgagattgatgctctcacggcgtttaaactcaacctccatgaccctctcggtgctttaacttcatgggatccttcaacaccagcagctccatgtgactggcgtggcgttggctgtactaaccaccgtgtcactgagatccgtcttcctcgtctccaactctccggacgaatctccgatcgtatctccggtctacgcatgctacggaagctcagtctccggtctaactctttcaacggtactatccctacttcactcgcttactgcacgcgcctact

SEQ ID NO: 146139 - DNA, 465 bp, Arabidopsis thaliana
  unsure (1)..(465): unsure at all n locations
gggtccagccacgcgtccgcacatagcaaaaaatggcaaacaagttgtttctcgtctgcgcagctctcgctctntggtcgcgtggctcaccaacgctgggatctaccgactgtcgttgtagttcgaagaagatgacgccactaaccccataggcccaaaaatgaggaaatgccgcaaggagtttcagaaagaacaacacctaagagcttgccagcaattgatgctccagcaagcaaggcatggccgtagcgatgagtttgatttcgaagacgacatggagaacccacagggacaacagcaggaacaacagctattccagcagtgctgcaacgagctttgccaggaagagccagattgtgtttgccccaccttgaaacaagctgccaaggccgttagactccagggacagcaccaaccaatgcaagtcaggaaaatttaccagacagccaagcacttgcccaacgt

SEQ ID NO: 146140 - DNA, 288 bp, Arabidopsis thaliana
ttcctctaactttctttatatttttttcttccccagagaaagagaattactagacgctagagagagatcatgggtgattaatattactatgggatgtgtagtaacatgtctgcatgttccttatcgacgtcttattctactaaactctttctattcatggttcctcttgttgtcatctctggtatcgtctttgtaaacattggtcctaaagacacaacttctttattaacccttcttgctcactctactactcatttttctccatcttcgtttctgttctactgctcc

SEQ ID NO: 146141 - DNA, 398 bp, Arabidopsis thaliana
gtgtaacctcgacaacctagatgttctccaagccaccgaaactatcaagagtgaagcgggcagatcgagtactgggaccacaaccacctcagctccgatgtgttggtgtttccgttgctcgttatgtaattgaacaaggcggtctttacttgcccaccttcttcacttccccaaaaatttcctacgtcgttcaaggaacgggtatcagcggaagagtggtccctggatgtgccgagaccttcatggactcgcagccgatgcaaggacaacaacaaggccaaccatggcaaggacgacagggacaacaaggccaaccatgggaaggacagggacaacagggacaacaaggaagacaaggccaaccatgggaaggacagggtcaacagggtcaacatgga

SEQ ID NO: 146142 - DNA, 190 bp, Arabidopsis thaliana
  unsure (1)..(190): unsure at all n locations
cggggcgggcacgcgtacagtgtaacctcnacaacctatatgttctccttttcaccgaaactatcaagagtgagcccgttcagatcgagtacagggaccacatccactctcagctccgatgtgttggtgtttccgttgctgttatgtaattgaacatgttcggactctacttgtccaccttcttcacttt

SEQ ID NO: 146143 - DNA, 450 bp, Arabidopsis thaliana
gtcccccacgcgtccgtgagttctcataaaatgagagggattttatttttgccatttggctctttcctgctgtactctacagcagctctgtgcttctccccttccccaaggtttgaggatgccaaaacatactacttatctccttcctctttctcacatggaactcctccatcacacacgcctccttcttctaactgtgtaagtccaccttactacccttcttcttcaactcctttttacccttcactcttttttacatactccaactccttccactccatcacacactccaactccacacactttattacacacaccaactcctcacaccccttcttgttactgttgtagtccacctttccactcctccacgccttttcaccctttcacttcttctcacccaaccccatcacaccctctttctgatgtatattacctcttcttctccac

SEQ ID NO: 146144 - DNA, 447 bp, Arabidopsis thaliana
aaaggttccaagtccaacaatgacaaggaatccaaagactcaactgaaatagcaaggggtccaagtccaaacattgacaaggaaacaaaaactcaaatgaaaggaaaagatagttgttttttccatcttgaatgggtatattccagggctagtcaaatcccgaacctcgtaaaaaaccaatctccttgaggttcgttcttgactcctccccttttgaagctctccaatagattaccgaaatgggggtggttcaagcagtctgacaaggaaacaaatctttgatcctccgcacggttgtacgaatcagattctcagtagttgcaacagagctaacactcagcctagcctcaggacctgactcaaccagcatttggaaggaaatggtcaaaagtgatcctccttctttttctccaggcttacccgtaccatctggaaaaatagcaaaat

SEQ ID NO: 146145 - DNA, 446 bp, Arabidopsis thaliana
cggggggggccaacgcgtccgcctcaatttgccaagattgaaggacctttttgagcagttcggtagctgttaaggcgtgggggaaaattatcctgggcctggttgaaaccacacaagtggaaataaaggagaaaatgagaagatgaatgatgtagaaagagttcctccatttgccaagaatgagaaggctgattgtgtggctgatgagatcgccgacaagctcgaagatcagccatgcacaaaccacaccacagcgagcacggttactcctggctcggtacctccacggctgacgaactaccaggacattctctgtgaatgcaaaatcgacccaaacactacccgtgacggattgatcttacctgtctgtatccctaaccggatcccgactttggctttaactaaatacacccaaactggttatgctcggtatcttaatgattcga

SEQ ID NO: 146146 - DNA, 198 bp, Arabidopsis thaliana
  unsure (1)..(198): unsure at all n locations
gaatccccggcgagcccacgcgtccgtaaagaggaagaaaaatgggtcgagtctcatctattatctctttctntntgcactgcttgatcctcttcaatggctacactgcctcacagatggcccaacgagtgccagctcgatcaacttaatgcgctcgaaccatcccaaatcatcaagagcgagggtgttcgcatctga

SEQ ID NO: 146147 - DNA, 290 bp, Arabidopsis thaliana
  unsure (1)..(290): unsure at all n locations
tcttacagtaattatgactgattctgatttgcttgcaattcatgtaggatcggggatctggactagatggaaaggatggttggttacgatcttttctttttcctttcgttactatcatgcggctaacaccgtgaaagctacttatcagagagttctttattgttnttccattcagctgaagcagcatcagagaatggtggttctgccaatggtccgaaaaatggaagtgctggtacacctattctaccggtgagccagacctatccaatcatgccaatgacagctgcagg

SEQ ID NO: 146148 - DNA, 444 bp, Arabidopsis thaliana
  unsure (1)..(444): unsure at all n locations
gtaattaactaacaacaaatggcgaacaagctcttcctcgtctgcgcagcttcgcgcctgtgtttcatcctcaccaacgcttccgctatcgcacggttgtcgagttcgacgaagatgacgccagtaaccccataggcccaatacagaaatgtcagaaggagtttcagcaagaacagcacctaagagcttgccagagatggatgcgcaagcaaatgtggcaaggacgtggtggtggtccttccctcgacgatgagttcgatatggaagacgacatcgagaacccgcagagacgacagctactccagaagtgctgcagcgagcttcgccaagaagagccagtttgcgtttgccccaccttgagacaagctgccaaggccgttagattccagggacagcaacaccaaccagagcaagtcaggaaaanttaccaggcagctaagtact

SEQ ID NO: 146149 - DNA, 401 bp, Arabidopsis thaliana
  unsure (1)..(401): unsure at all n locations
aacaagaaaacatacacaaatagcaaaacatggctaacaagctcttcctcgttgcgcaactctcgccctctgcttcctcctcaccaccgcttccatctaccgcaccgttgtcgaattcgaagaagatgacgccagcaaccccgtaggtccaagacagagatgccagaaggagtttcagcaatcacaacacctaagagcttgccagagatggatgagcaagcaaatgaggcaaggacgtggtggnggtccttccctcgacgatgagttcgatttcgagggcccccagcagggataccagctactccagcagtgctgcaacgagcttcgccaggaagagccagtctgcgtttgccccaccttgaaacaagctgccagggcagttagccttcagggacagcacg

SEQ ID NO: 146150 - DNA, 444 bp, Arabidopsis thaliana
caaaaaaatatcttttaatagtggaaaaaagatgttttgatattaataagttacagactgataacaatctgcagacaagatcttaacatgttcaaccattctacatagcaaaaagatgggtttgcgctgtaccttcaagcaattaccaatggcagtgagatgatcagcagaaaaaaacttcccggaactgaaaggaactggcagtagcttgctaaatataggatgatcgactgaaaccttttcatggagtttcagcgctaagagcaaagcatctgggtttcccacctcggtggcttgttcaaaccatttataaagttctggagcttccataacatgagtaacaacaggttcagtaggcaactgcacaataaaaaagataggatcacaaaaaaacttcacaatgtgtaataaacccgcactaaactttgcacataaaaatgaatc

SEQ ID NO: 146151 - DNA, 450 bp, Arabidopsis thaliana
gggacaacaaggccaaccatgggaaggacagggacagcagggacaacaagggttcggtgggatgcaccagaaggtggaacatgtgagaccgggagacgtctttgccaacactccaggctctgcccactggatctacaactcaggagaacagccacttgtcatcatcgctcttctcgacatcgccaactaccaaaaccaactcgaccgcaaccctagagtgttccatttggccggaaacaaccagcagggaggctttggcggttcacagcaacaacaagaacagaaaaacttgtggagcgggttcgacgcacaggtcatagctcaagcattgaaaattgacgttcagttggctcagcagcttcagaaccaacaagacagcagaggaaacatcgttcgtgttaagggacctttccaggtcgtgaggccacctctaagacagccctacgagag

SEQ ID NO: 146152 - DNA, 428 bp, Arabidopsis thaliana
ctctatatacccccttttaatttgtgtgctcttagcctttactctatagtttatgtcatatcaatcgacatggcgaatgtggacgtgatcggcgtgtgcatgtagaccgtactgacaaacgtgttcatcagccaaactacgaagatgatgtcggttttggtggctatggcggttatggtgctggttctgattataagagtcgcggcccctccactaaccaaatcttggcacttatagcaggagttcccattggtggcacactgctaaccctagctggactcactctagccggttcggtgatcggcttgctagtctccatacccctcttcctcctcttcagtccggtgatagtcccggcggctctcactattgggcttgctgtgacgggaatcttggcttctggtttgtttgggttgacgggtctgagc

SEQ ID NO: 146153 - DNA, 441 bp, Arabidopsis thaliana
ctctcaaggacagctcatagccgtaccacaaggtttctcggtggtgaaaccgcagcaagcaaccgattccagtgggttgagttcaaacaaacgctaacgcgcaaatcaacactctggcgggacgaacctcagtcttgagaggtttaccacttgaagtcataaccaatgggttccaaatctcacccgaagaagcaaggagggtcaagttcaacacgctcgagaccactttgactcacagcagtggcccagctagctacggaaggccaagagtggctgcagcttaagagcttaaaaccgcggcttaacaatgaaccgctactgtaaaaggaagttaaatagtacgtagtaattataataatgtacgaaaatgtgacaagttttgttgaggtttacctgtaaaatgccactccttttctgaataaaatctttctttccgatcaa

SEQ ID NO: 146154 - DNA, 442 bp, Arabidopsis thaliana
acacacatagcaaaaaatggcaaacaagttgttcctcgtctgcgcagctccgctgctctgcttcctcctcaccaacgcttccatctaccgcaccgtcgttgagttcgaagaagatgacgccactaaccccataggcccaaaaatgaggaaatgccgcaaggagtttcagaaagaacaacacctaagagcttgccagcaattgatgctccagcaagcaaggcaaggccgtagcgatgagtttgatttcgaaaacgacatggagaacccacagggacaacagcaggaacaacagcttttccagcagtgctgcaacgagcttcgccaggaagaagcaggatgtggttggcccaccttgaaacaagctgccaaggccgttagactccagggacagcaccaaccaatgcaagtcaggaaaatttaccagacagccaagcacttgccc

SEQ ID NO: 146155 - DNA, 310 bp, Arabidopsis thaliana
  unsure (1)..(310): unsure at all n locations
aggacagggacagcagggacaacaagggttccgtgacatgcaccanaaggtggacgatgtgagtacgcggagacgtctttgccaacactccaggtctctgcccactggatctacaactcatgagaacagccacttgtcatcatcgctcttctcgacatcgccaactaccaaaaccaacttgaccgcaaccctagagtgttccatttggccggaaacaaccagcagggaggctttggcggttcacagcatcaacaagaacagaaaaacttgtggagcgggttcgtcgcacaggtcatagcttaagcattga

SEQ ID NO: 146156 - DNA, 447 bp, Arabidopsis thaliana
gggacaacaaggccaaccatgggaaggacagggacaacagggacaacaaggagacaaggccaaccatgggaaggacagggacaacacggacaacaaggacgacagggacaacaaggccaaccatgggaaggacagggacagcagggacaacaagggttccgtgacatgcaccagaaggtggaacatgtgagacgcggagacgtctttgccaacactccaggctctgcccactggatctacaactcaggagaacagccacttgtcatcatcgctcttctcgacatcgccaactaccaaaaccaactcgaccgcaaccctagagtgttccatttggccggaaacaaccagcagggaggctttggcggttcacagcaacaacaagaacagaaaaacttgtggagcgggttcgacgcacaggtcatagctcaagcattgaaaattgacgtt

SEQ ID NO: 146157 - DNA, 457 bp, Arabidopsis thaliana
gcgaccacgcgtccgccgcaaccctagagtgttccatttggccggaaacaaccagcagggaggctttggggttgacagcaacaacaagaacagaaaaacttgtggagcgggttcgacgcacaggtcatagctcaagcattgaaaattgacgttcagttggctcagcagcttcagaaccaacaagacagcagaggaaacatcgttcgtgttaagggacctttccaggtcgtgaggccacctctaagacagccctacgagagcgaggagtggagacacccacgtagcccacagggcaacggccttgaggagactatctgcagcatgaggtcccacgagaacattgacgaccctgctcgtgctgacgtgtacaagcccagcctaggtcgcgtgaccagcgtcaacagctataccttgcccatcttggagtatgtcaggctcagtgccactcgtggcgttc

SEQ ID NO: 146158 - DNA, 303 bp, Arabidopsis thaliana
gaagataaaaatggctcgagtctcttctcttctttctttctccttaacactttggtccggtttccatggctacgcggttcaacagggtcacaagggtcagcagtttccgaacgagtgccagctcgaccagctcaatgcgctcgagccttcacacgtactgaagagcgatggctggtcgcatcgaggtgtgggaccaccacgctcctcagctccgttgctcaggtgtctcctttgcacgttacatcatcgagtcttagggtctctacttgccctctttctttaacaccgtgaagctctccttcg

SEQ ID NO: 146159 - DNA, 443 bp, Arabidopsis thaliana
cacaaatagcaaaacatggctaacaagctcttcctcgtctgcgcaactctcgccggtgcgttcctcctcaccaacgcttccatctaccgcccgttgtcgaattcgaagaagatgacgccagcaaccccgtaggtccaagacagagatgccagaaggagtttcagcaatcacaacacctaagagcttgccagagatggatgagcaagcaaatgaggcaaggacgtggtggtggtccttccctcgacgatgagttcgatttcgagggcccccagcagggataccagcttctccagcagtgctgcatcgagctttgccaggatgagccagtttgcgtttgccccaccttgaaacaagctgtctgggcagttagcctccagggtctgcacggaccattccaattcaggaaaatttaccagtcagctaattactggcctacatttgca

SEQ ID NO: 146160 - DNA, 113 bp, Arabidopsis thaliana
  unsure (1)..(113): unsure at all n locations
aaatgttaccaaatgcttttatctattcaaactggtattcaattgttaccatgttgggcatatttaaatcattatcatattgntcttcatnttatgtaataaattattttact

SEQ ID NO: 146161 - DNA, 435 bp, Arabidopsis thaliana
ggaagacaaggccaaccatgggaaggacagggacaacagggacaacaaggacgaggggacaacaaggccaaccatgggaaggacaggtgacagcagggacaacaagggttccgtgacatgcaccagaaggtggaacatgtgagacgcggagacgtctttgccaacacttcaggctctgcccactggatctacaactcaggagaacagccacttgtcatcatcgctcttctcgacatcgccaactaccaaaaccaactcgaccgcaaccctagagtgttccatttggccggaaacaaccagcagggaggctttggcggttcacagcaacaacaagaacagaaaaacttgtggagcgggttcgacgcacaggtcatagctcaagcattgaaaattgacgttcagttggctcagcagcttcagaaccaacaagacagc

SEQ ID NO: 146162 - DNA, 189 bp, Arabidopsis thaliana
  unsure (1)..(189): unsure at all n locations
aaaacatacacaaatagcaaaacatggctaacaagctcttcctcgnctgcgcaacggtggccctctgcttccggctcaccaacgctctcatctaccgcaccgttgtcgaattcgaagaagatgacgccagcaaccccgtatgtccaagacagagatgccagaaggagtttcagcaattacaacacctaa

SEQ ID NO: 146163 - DNA, 445 bp, Arabidopsis thaliana
caaaactcgtgaatattacaaatctgccactagaggtgaatttttgactaaacggttttttttttttttttcgatctcacggggtctgattctcgttgttgtctcatggagagcacggagcagccgaggaacatctccggatcgatgcagagccctagatctccgtcttcgcatccgtatctgtcagtctccgtcacagatcctgtcaaattaggcaatggcgtacaagcttatatctcttacagagttatcaccaagactaacttgccggagtaccaaggacccgagaagattgttattagacgatacagtgatttcgtctggttacgggatcggctttttgaaaagtacaagggcattttcattcctcctcttccagagaagagtgctgtagaaaaattccgctttagtgccgaatttattgaaatgaggcgagcagcattgg

SEQ ID NO: 146164 - DNA, 382 bp, Arabidopsis thaliana
cacttgctcggtggttcatttacgaccacactctctcttctctttagcccttcgtgctctatttattctccaacaaactctctcttctcttttcaagtcttcttcttcattactcgcaccatgaccaaaccctccgacccaaccagagactcccacgtggcagttctcgcttttcctttcggcactcatgcagctcctctcctcaccgtcacgcgccgcctcgcctccgcctctccttccaccgtcttctctttcttcaacaccgcacaatccaactcttcgttatttccctccggtgacgaagcagatcgttcggcgaacatcagagtatacgatattgccgacggtgttccggagggatacgtgttttagcgggagacca

SEQ ID NO: 146165 - DNA, 444 bp, Arabidopsis thaliana
gagactttgtgcaccatgcgatgcactgaaaacctcgatgacccgtcggatgctggcgggtacaagccatcactcggatacattagcacacttaacagctacaatcttcctatcctcagacttctccgccttagcgctcttcgtggctccatccgtaaaaacgctatggtgctaccgcaatggaacgtaaacgcaaacgcggcactctacgtgacaaacggaaaggctcatatacaaatggtgaacgacaacggagaaagagtgttcgaccaagagatctccagcggacagttactagtcgtgccacaaggcttttcggtcatgaaacatgccataggcgaacagttcgagtggatcgaattcaagacaaacgaaaacgcacaggtcaacacactcgcgggccgtacctcagtcatgagaggtttgccgcttgaggttataacc

SEQ ID NO: 146166 - DNA, 355 bp, Arabidopsis thaliana
  unsure (1)..(355): unsure at all n locations
tagactttgttcaccatccgattcacttatttcctacatacaccctnnnnacccggccgttacaacccactactgggatacataatcccacttaccacttacaatcttcctatcctaaacactttccgccttaacgctcttcaggcctccatccctaaaaactctatgttgcttccgaaatggaacttaaacccaaactcttcactctacttgacaaacggaaaggctcatatacaaatggttaactacaccgtgtaaagatatacctccaaaatatctccttcttacagatactatgtcttgccacatggcttttttgtcattaaacatactattacctaacagttcgagtttt

SEQ ID NO: 146167 - DNA, 431 bp, Arabidopsis thaliana
  unsure (1)..(431): unsure at all n locations
aacaaacaaaaagaaaatggttaagctcagcaatctcctcgttgcaaccttcggggtctgctcgtccttaacggctgccttgcgaggcaatncacttggggttcctcctcagctacagaacgagtgtaacctcgacaacctagatgttctccaagccaccgaaactatcaagagtgaagccggtcagatcgagtactgggaccacaaccaccctcagctccgatgtgttggtgtttccgttgctcgttatgtaattgaacaaggcggtctttacttgcccaccttcttcacttccccaaaaatttcctacgtcgttcaaggaacgggtatcagcggaagagtggtccctggatgtgccgagaccttcatggactcgcagccgatgcatggacaacaacaaggccaaccatggcatgtacgacagggacaac

SEQ ID NO: 146168 - DNA, 388 bp, Arabidopsis thaliana
  unsure (1)..(388): unsure at all n locations
natcacaaaaagacctctcaatagtcaagctttcaagaaccgggcattntgtaataaggcgtttctaaccccatatcgtcagcacacttagttataatcagatccataactttgagtgaaggtaaagaaacaaactcgggactagccaaagtaatccacaaagctttaaagataccaaactctcacaagtgtaaatgcttgaaggtaactgaacctcccaactcccatacgaatcatccaaaacatcgatatgttgaactttacgcgtgacgatagtgttgatccaacgtccgataagaaaaatgtcagggtcatactcgtcatcacaatcatacttcaagataaatttttgtaagaatgattcactgttgaaatcgagaaagctatc

SEQ ID NO: 146169 - DNA, 458 bp, Arabidopsis thaliana
agggggggggcgagcgacccgagactttttacaccatgccatgcacttaaatcctcgatgacgcacccagatgctgcgggggcgatgtcatcactcggattcattagcacgccttaacagattacaatcttcctatcctcagacttatgcgacttagcgctcttcgtggctgcatccgtaaaaacgctatggtgctacctgtctggaacgtaaacgcaaacacggtactctacgtgacaaacggaaaggctcatatacaaatggtgaacgacaacggagaaagagtgttcgaccaagagatctccatcggacagttactagtcgtgccacaaggcttttcggtcatgaaacatgccataggcgaacagttcgagtggttcgaatttaagatcaaactaaaacgcacaggtgaacacactttctgtccggtcctcattcatgagaggtttgccgcttga

SEQ ID NO: 146170 - DNA, 438 bp, Arabidopsis thaliana
tcgagacggctcagcagctccagaaccagcaagataaccgtggcaacatctcaaggtcaacggacctttcggcgtcattaggccacccttgagacgcggcgaaggcggccaacaaccacatgaaatagctaatggtttagaggagactttgtgcaccatgcgatgcactgaaaacctcgatgacccgtcggatgctgacgtgtacaagccatcactcggatacattagcacacttaacagctacaatcttcctatcctcagacttctccgccttagcgctcttcgtggctccatccgtaaaaacgctatggtgctaccgcaatggaacgtaaacgcaaacgcggcactctacgtgacaaacggaaaggctcatatacaaatggtgaacgacaacggagaaagagttgtcgaccaagagatctccagcggacagttact

SEQ ID NO: 146171 - DNA, 440 bp, Arabidopsis thaliana
ggacacagccggtccatccattcacgtcctcataaaaatgcttgcgactataactctcgtcatggctccggttttcctctgaaagtgcaccgttacttatccatcccggcttatttactctcttgcacatatacaaatagagagggagagagacaattgtctactcggtagtcttatgagacggcggttgttgcgattgctgccatgatggtggtggctgtgtttgcttcctagtcttcttcttctctgctttggtctaatgttatctattcgactgggactgtccgatgaacttgattcatcatcactcggataatcataggtcgtagcttctatatcatcgagacgttttctgcgacggtggacccgatttatgttagtcaaactgtgacacaagcaactaatcatctctccaatggcgaaccagtacgctgcacaag

SEQ ID NO: 146172 - DNA, 442 bp, Arabidopsis thaliana
  unsure (1)..(442): unsure at all n locations
caacaatggaaatgagcctttcattcttgttgcagccgcggatctcgccagcaccaggggcagcttgaccgtagccttagaccattctgatagccggaaacaacccacaagggcaggaatggctacaaggccaaaagcaacagaagcaaaacaacatcttcaatggcttcgcacctgagatcttggctcaagccttcaagatcaatgtcgagacggctcagcagctccagaaccagcaagataaccgtggcaacatcgtcaaggtcaacggacctttcggcgtcattaggccacccttgagactcggcgaangcggccaacaaccacatgaaatagctaatggtttagaggagactttgtgcaccatgcgatgcactgaaaacctcgatgacccgtcggatgctgacgtgtacaagccatcactcggatacattagcacact

SEQ ID NO: 146173 - DNA, 291 bp, Arabidopsis thaliana
cgcgtccgctaaaaccctcgaacacatcgcctttatctctttctctagatctactcgctatgggtacgatcaccgttgttaaggctagacagatcttctcagtcgtggtaatcccaccgttgaggttgatatccacacttcaaatggtattaaggttacagcagctgttccaagtggagcttccactggtatctatgaggctcttgagctgagggatggaggatctgactaccttggaaagggtgtatctaaggcttttggcattgtgaacaacatcatttgtccagcact

SEQ ID NO: 146174 - DNA, 243 bp, Arabidopsis thaliana
  unsure (1)..(243): unsure at all n locations
tcatcatcaaaacttgcggtaccacttattttctcctctctatcccaccacttntaatcgtctctgtttagctctgtctgaatatcaagttcctgaagtacactctcggttccttactctatcccggaggccagccttttcctcaccgcagcttctctgaataagtctctgatcttgatggtcactatactaatcttttcttgaacattgtatcctacttcattgtctttgatatattatact

SEQ ID NO: 146175 - DNA, 437 bp, Arabidopsis thaliana
ggtgatgccaaagtagacgactacttgtagtaaacaaaacctttggctttacactgctcctccaaatcccagatctctctctgtctctgtcccgcggagtccccgagagattgatcaccatcacttttgtaccttccttgtactacctatggcgtctgctagcttcgttaagcctaacaccctctcttctccatggatcggccaacgctcctttgctcacacctctgcttcttcttctcctcctcctcgagtctccttcgcgatccgcgccggtgcttactccgacgagcttgttaaaaccgccaaaagcattgcatcccctgtgagaggtatcttggcgatcgatgagtccaatgcaacctgtgggaagaggcttgctactatcggcttggataacaccgaggacaaccgttaggcctacaggcaacttttgctta

SEQ ID NO: 146176 - DNA, 439 bp, Arabidopsis thaliana
gaaacatgccataggcgaacagttcgagtggatcgaattcaagacaaacgaaacgcacaggtcaacacactcgcgggccgtacccagtcatgagaggtttgccgcttgaggttataaccaatgggtaccagatctctcccgaagaagctaaacgagtaaagtttagcacgattgagaccacactgacccatagcagtccaatgagctacggaaggcctagggcttgaggcttgatgagcgcgtggtggaatagcgtttgaatctaaagttcggtttggtacgacttgtaatatgaaataataatgtacaaagaagttctacgcttaagggaactgttttgttttgagctttgtattaggacgtctagtgtacaacaacgaacgtcgtgtataagctatcgttgactctgcacaatgtaacttttttctgaataaaaatt

SEQ ID NO: 146177 - DNA, 393 bp, Arabidopsis thaliana
  unsure (1)..(393): unsure at all n locations
aaacgagtaagaatacaaatacaaatttcaaaaaaaatggctaacaagntgtggtggggctgcgcaacatttctccctctgcttcctcctctgccaacgcttccatttaccgcactgttgtcgagttcgacgaagatgacgccagcaaccccatgcgcccaagacagaaatgtcagaaggagtttcagttattacagcacctaagagcttgccagaaattgatgcgcatgcaaatgaggcaaggtcgtggtggtggtcctttttttgacgattagttctatttggaagacgacatcgataacccacaatgcccctatcttggacaccatgatccttcatcagggctgcaatcagctttgccaggaagagcccgtttgttttttgccccacctt

SEQ ID NO: 146178 - DNA, 451 bp, Arabidopsis thaliana
gccgagagcaacagccacagaagaacattttcaatggatttggacccgaggttatgctcaagctttgaagatcgatcttcagacagccgagcaaccttcagaaccaagatgacaaccgtggaaacattgtccgagtccaaggcccgttcggtgtcattaggccgcctttgaggggccagagacctcaggaggaggaagaagaagaagaaggacgacatggacgacacggtaatggcttagaggagaccatctgtagcgccaggtgcaccgataacctcgatgacccgtctcgtgctgacgtgtacaagccacagctcggttacatcagcactctcaacagttacgatctccccatccttcgcttcatccgtctctcagccctccgtggatctatccgtcaaaacgcaatggtgcttccacagtggaacgcaaacgcgaacgctattcttta

SEQ ID NO: 146179 - DNA, 441 bp, Arabidopsis thaliana
aacgagtgtaacctcgacaacctagatgttctccaagccaccgaaactatcaagagtgagccggtcagatcgagtactgggaccacaaccacctcagctccgatgtgttggtgtttccgttgctcgttatgtaattgaacaaggcggtctttacttgcccaccttcttcacttccccaaaaatttcctacgtcgttcaaggaacgggtatcagcggaagagtggtccctggatgtgccgagaccttcatggactcgcagccgatgcaaggacaacaacaaggccaaccatggcaaggacgacagggacaacaaggccaaccatgggaaggacagggacaacagggacaacaaggaagacaaggccaaccatgggaaggacagggacaacagggacaacaaggacgacagggacaacaaggccaaccatgtgaaggacaggg

SEQ ID NO: 146180 - DNA, 163 bp, Arabidopsis thaliana
caacctatattttttttcaagccaccgaaactatcaagagggagcggtttttatcgagggtgggaccacaaccatgcctcagtctcctatgtgtaggtgtttccgttgttagttatttaaatgaacaaggccgtctttacttgtttattttctacatttttcc

SEQ ID NO: 146181 - DNA, 440 bp, Arabidopsis thaliana
caacgcttccatctaccgcaccgtcgttgagttcgaagaagatgacgccacaaccccataggcccaaaaatgaggaaatgccgcgggagtttcagaaagaacaacacctaagagcttgccagcaattgatgctccagcaagcaaggcaaggccgtagcgatgagtttgatttcgaagacgacatggagaacccacagggacaacagcaggaacaacagctattccagcagtgctgcaacgagcttcgccaggaagagccagattgtgtttgccccaccttgaaacaagctgccaaggccgttagactccagggacagcaccaaccaatgcaagtcaggaaaatttaccagacagccaagcacttgcccaacgtttgcgacatcccgcaagttgatgtttgtcccttcaacatcccttcattcccttctttctactaaatc

SEQ ID NO: 146182 - DNA, 456 bp, Arabidopsis thaliana
  unsure (1)..(456): unsure at all n locations
tcggaggctttggcggttcacagcaacaacaagaacagaaaaacttgtggagcgggttgacgcacaggtcatagctcaagcattgaaaattgcgttcagttggctcagcagcttcagaaccaacaagacagcagaggaaacatcgttcgtgttaagggacctttccaggtcgtgaggccacctctaagacagccctacgagagcgaggagtggagacacccacgtagcccacagggcaacggccttgaggagactatctgcagcatgaggtcccacgagaacattgacgaccctgctcgtgctgacgtgtacaagcccagcctaggtcgcgtgaccagcgtcaacagctataccttgcccatcttggagtatgtcaggctcagtgccactcgtggcgttctccagggtaatgcgatggtgcttnctaaatacaacatgaacgctaacgagatcttg

SEQ ID NO: 146183 - DNA, 388 bp, Arabidopsis thaliana
  unsure (1)..(388): unsure at all n locations
ccacgcgtccgcattgcttcatcattaccaaatcatcaacttaatcgtttctctcaaatttaggggggtcggttttctcgaaagtcttgcggttttctgaatcacttctatctggtttgagggtttcgtttgatatctggagaaaggggtttctggaaacaaggagttcataattcgcgatcttgatctatcgatcttcatttatatataaaagcgtgaatgagattatgatggagtcgaaaggtggtaaaaagaagtccagcagtagtagttccttattttacgaagctcccctcggttacagcattgaagacgttcgtccaaacggtggaatcaagaaattcanatcttctgtctactcaaactgctccaagaggccatcctgagt

SEQ ID NO: 146184 - DNA, 440 bp, Arabidopsis thaliana
acaaacaaaaagaaaatggttaagctcagcaatctcctcgttgcaaccttcgggtgtctcctcgtccttaacggctgccttgcgaccagtcacttggggttcctcctcagctacagaacgagtgtaacctcgacaacctagatgttctccaagccaccgaaactatcaagagtgaagccggtcagatcgagtactgggaccacaaccaccctcagctccgatgtgttggtgtttccgttgctcgttatgtaattgaacaaggcggtctttacttgcccaccttcttcacttccccaaaaatttcctacgtcgttcaaggaacgggtatcagcggaagagtggtccctggatgtgccgagaccttcatggactcgcagccgatgcaaggacaacaacaaggccaaccatggcaaggacgacagggacaacaaggccaacca

SEQ ID NO: 146185 - DNA, 403 bp, Arabidopsis thaliana
gtggtccctggatgtgccgagacctttatggactcgcagccgatgcaaggacaacaacaaggccaaccatggcaaggacgacagggacaacaaggccaaccatgggaaggacagggacaacagggacaacaaggaagacaaggccaaccatgggaaggacagggacaacagggacaacaaggacgacagggacaacaaggccaaccatgggaaggacagggacagcagggacaacaagggttccgtgacatgcaccagaaggtggaacatgtgagacgcggagacgtctttgccaacacttcaggctcttgccactggatctacaactcaggagaacagccacttgtcatcatcgctcttctcgacaatgtcaactaccaaaaccaacttgaccgcaacccta

SEQ ID NO: 146186 - DNA, 184 bp, Arabidopsis thaliana
gttctgggaccacaaccacccttagctttgatgtgttggtgtttccggtggggggtgtgtaattgaacaaggcggtctttacttgcccacccttttcacttccccaaaaattttctacgttgttctaggaactgggtttcagcttaagagtggttcctggatgtgccgagaccttcatggttct

SEQ ID NO: 146187 - DNA, 350 bp, Arabidopsis thaliana
ctcaaataatcctaattaaaattatttttgcgccgaacccaatgcatagctcactgaaaacaatggctccagcaaagttggaacgactatgtgttctctcattctttcttttttgtgcaacagtttttggaacagaatcattggagtcattgcctgaggataaactgatactgagagggttgaaattttatggtttccatggagtgcttccagaagagagggaatagggtggtctgtttatcgttgacattaattagtggttgagtctgaaaaaggccattgtatcagacaacttagcagatacagttagctttgttgattcttttaggcttgtgaagaaaattgttgat

SEQ ID NO: 146188 - DNA, 334 bp, Arabidopsis thaliana
taggaacttatcatgaatcctctggtttctgctgcttcggttattgctggggggttggctgttgggcttgcttctattggacctggagtcggacaaggtacagctgcaggtcaagctgtccaaggtatctcgtgacaacctgtggcagaaggaaaaatacgaggtacttcattgcttattttggtcttttatggaagctttaacaatttatggtctggttgtagcattagcgcttttatatgcgaatccttttgtttaagcccagaaattacaaaattctggattttattagcgtgtttcttaattccatcaagtattaacatttacatttatt

SEQ ID NO: 146189 - DNA, 426 bp, Arabidopsis thaliana
acagggtttgtaagttgtaaccatatatatgccgtataagaatcagaggtttctagctgtacacgaaagctatgtataaataaaagctatgtatatatgtttttttctaccataacttttcaataatggatctcggctattgattgttctcgaccaaagtgatatgataattataatctttgcgcacacctaaattttatagtgaaaaatacataatttaaaaactttacttttgtagagatgcctatataaaaatggtttaccacatggacattgttatttgttcagatctccaacgtatagcaatatttgtgatttatagatatgtaatttggtgttcaaagaatgtgtagaacaattattcttatgggtatgccaagaaaagttatataactttattctatactgctttcacgttaaataatg

SEQ ID NO: 146190 - DNA, 427 bp, Arabidopsis thaliana
gatgacaaccgtggaaacattgtccgagtccaaggcccgttcggtgtcattaggccgcctttgaggggccagagacctcaggaggaggaagaagaagaagaaggacgacatggacgacacggtaatggcttagaggagaccatctgcagcgccaggtgcaccgataacctcgatgacccgtctcgtgctgacgtgtacaagccacagctcggttacatcagcactctcaacagttacgatctccccatccttcgcttcatccgtctctcagccctccgtggatctatccgtcaaaacgcaatggtgcttccacagtggaacgcaaacgcgaacgctattctttacgtgacagacggggaagcccaaatccagatcgtaaacgacaatggtaacagagtgtttgacggacaagtctctcaaggacagc

SEQ ID NO: 146191 - DNA, 404 bp, Arabidopsis thaliana
catcacaaacgagtaagaatacaaatacaaatagcaaaaaaaatggcaaacaagctcttcctcgtctgcgcaactttcgccctctgcttcctcctcaccaacgcttccatctaccgcactgttgtcgagttcgacgaagatgacgccagcaaccccatgggcccaagacagaaatgtcagaaggagtttcagcaatcacagcacctaagagcttgccagaaattgatgcgcatgcaaatgaggcaaggccgtggtggtggtccctccctcgacgatgagttcgatttggaagacgacatcgagaacccacaaggcccccagcagggacaccagatcctccagcagtgctgcagcgagcttcgccaggaagagccagtttgtgtttgccccaccttgagacaagc

SEQ ID NO: 146192 - DNA, 430 bp, Arabidopsis thaliana
cccaaaagcatacaatacaatgtctactcttgttttattcctccaacttttttccatcctaccattagcacttgggttgaaccacccaaattgtgacctgaccaagactcaagaccaaggctctaccctaagaatcttccacatagacagcccttgctcccccttcaaatcatcatccccactctcatgggaagcgcgtgtgctccagacgctggctcaagaccaggcccgtctccagtacctgagcagcctcgtcgccgggagatctgtagtccccattgcctcagggcgtcaaatgttgcaaagcactacatacattgtcaaggctttgatcggtactccggctcagccgctgctcctagccatggacacgagcagtgacgtggcttggattccttgctccggctgcgttggctgtccttctaacacg

SEQ ID NO: 146193 - DNA, 328 bp, Arabidopsis thaliana
ggattatttgatcaaggattataatctatatctatgttttaagatttagagactactttttttttctttctaaatttccatgtttaatttgtgtggatttcatatttttttactataattttttttgtttctttagtaatataatcaaatctgtttcaattcatttcattgtaaagaccaacattggattatgttcgaatttatattggcactaatatccatgattcaatagtacctagacagtgaagatatttaatgaatttgagctaaatattggctttttagcgacagtgatagtgaggtattaaattatttaatttattaattt

SEQ ID NO: 146194 - DNA, 230 bp, Arabidopsis thaliana
ctcttataaaactaatgaaaactcattgttcatcactttggcggttagaagggcgctcttgagggcattgccattttaggtcatatcaaatggtttccagatctctcccgaggaagcttggtagattcaagttcaacacactcgagaccactctgacccacgctgtcttttggcaacaaccacactttatcgtggtgattgacgaggcttaaatctaaacgccatacttt

SEQ ID NO: 146195 - DNA, 304 bp, Arabidopsis thaliana
aaagaaaatggttaagctcagcaatctcctcgttgcaaccttcggggttctcctcggccttaacggctgccttgcgaggcagtcacttggggttcctcctcagctacagaacgagtgtaacctcgacaacctagatgttcttcaagccaccgaaactatcaagagtgaagccggtcagatcgagtactgggaccacaaccaccctcagctccgatgtgttggtgtttccgctgctccgtatgtaaatgaacaaggcgtgttttactttcccaccttatttactttctcaataaatttcctattt

SEQ ID NO: 146196 - DNA, 375 bp, Arabidopsis thaliana
atgtttcaaaaaaaaaactcttatttattaaggacttgtgctaaatacattgagcctcaaacatccaaaacttacattttcataaaagacacgatgaggtgtggtgttaacatgtatcaacaaccacactctcatacgctcgagggtttttgcctcaaaacaagacccatcgataacagcgatcatgggggctaaagccttagcacagctgataacatgcatcatcttattctgccacgttgtagctttcgtagaagacctcaccatacgccaagtcacggtcgacaatcggtgaattcgtccgtatcttttcgggacttacacatgagagtaattttccgggttttttatgtcctgattacggtaagtaactac

SEQ ID NO: 146197 - DNA, 197 bp, Arabidopsis thaliana
tggacgcgtgggtggtaccaattgttctattgcaagcgattcttaccatgggggcaaggaagatgtgggtttactacatttaatcggatctggtgcctatagattctatatctcgtgagtcgaggagtcttgccatgtgggaatctatacggaggttttaactatgctggtattgactattataacatcttaataaa

SEQ ID NO: 146198 - DNA, 403 bp, Arabidopsis thaliana
ctttcacgtctctcttccctgaaactttcccgagaaaattctcaatcctctattttctcgagaaaattctcattctcattttctttcagggaaaagttttgttgttgaatacagatttggaaacttcatttgtttttttccgtttttaaccaaaatttttaaaaaagctttcttctgaacgttaatcgtggagagtttcgggtcgggtcgggtcgtaaaaggcgggtttcacggtggtgatagattcaccttctgcttccttctgagggggttagccccgaggcttttttgcttggcgggtttcaaatttcctcaattctaacatactcacagattcattttctccaatttcttgttgctgtttcgaaatttgaagtcacaaattttgtatttcatttgttac

SEQ ID NO: 146199 - DNA, 417 bp, Arabidopsis thaliana
taaagaggaagaaaaatgggtcgagtctcatctattatctctttctctttgacactcttgatcctcttcaatggctacactgcccaacagtggcccaacgagtgccagctcgatcaactcaatgcgctcgaaccatcccaaatcatcaagagcgagggtggtcgcatcgaggtctgggaccaccatgcaccccagctccgttgctccggctttgcctttgagcgtttcgtcattgagcctcagggtcttttcttgcccactttcttgaacgccggcaaactcacgtttgttgttcacggaaggggtctaatgggaagagttattccgggatgcgccgagacgttcatggagtcaccggtatttggagaaggtcaaggtcagggtcagagtcaagggttccgtgacatgcaccagaaa

SEQ ID NO: 146200 - DNA, 429 bp, Arabidopsis thaliana
cagggacaacaaggaagacaaggccaaccatgtgaaggacagggacaacagggacaacaaggacgacagggacaacaaggccaaccatgggaaggacagggacagcagggacaacaagggttccgtgacatgcaccagaaggtggaacatgtgagacgcggagacgtctttgccaacactccaggctctgcccactggatctacaactcaggagaacagccacttgtcatcatcgctcttctcgacatcgccaactaccaaaaccaactcgaccgcaaccctagagtgttccatttggccggaaacaaccagcagggaggctttggcggttcacagcaacaacaagaacagaaaaacttgtggagcgggttcgacgcacaggtcatagctcaagcattgaaaattgacgttcagttggctcagcagctt

SEQ ID NO: 146201 - DNA, 290 bp, Arabidopsis thaliana
cggaaaggcaattttgtatcttaaggtgatatctgtgattttatgattatgaccttgtctccgactctatctccagtaataactctagcttctagtatatgattacccatctgtgttacttgcaatctagtaccattacataggccaccttttggatcaatattccttaataacataaccggtgtaccaatcttaagagtgagattgtgattaggcaaaccagaaagctttatactattgaggaaatcaggtgtgaagacaggattgttcaatgacgcttcatcttgagg

SEQ ID NO: 146202 - DNA, 309 bp, Arabidopsis thaliana
caaaaagaaaatggttaagctttttattttcctcgttgcaaccttcggggggctcctcgtccttaacggctgccttgcgaggcatttacttggtgtttcttcttaactacagaacgagtgtaacctttacatcctatatgttctccaagccaccgaaactatcaatattgtagcctttcataacgtgttctgggaccataaccacccttatctcctatgtgtttgttttttcgttgtctgttatgtatttgtactatgtattctttacttgcctaccttattcaatatttcaaaaattttcttatttct

SEQ ID NO: 146203 - DNA, 207 bp, Arabidopsis thaliana
acccacgcgtccgaatcaataaagaggaagaaaaatgggtcgagtttcatctattatctctttctcttggacactcttgatcctcttcaatggctacactgcccaacagtggcccaacgagtgccagctcgatcaacttaatgcgctcgaaccatcccaaatcattaagagcgagggtggttgcattgaggtttttgaccaccattt

SEQ ID NO: 146204 - DNA, 420 bp, Arabidopsis thaliana
agaaaaatgggtcgagtctcatctattatctctttctctttgacactcttgatcctcttcaatggctacactgcccaacagtggcccaacgagtgccagctcgatcaactcaatgcgctcgaaccatcccaaatcatcaagagcgagggtggtcgcatcgaggtctgggaccaccatgcaccccagctccgttgctccggctttgcctttgagcgtttcgtcattgagcctcagggtcttttcttgcccactttcttgaacgccggcaaactcacgtttgttgttcacggaaggggtctaatgggaagagttatttcgggatgcgccgagacgttcatggagtcaccggtatttggagaaggtcaaggtcagggtcagagtcaaggggttcctgtcatgcaccaaaaagtagagctccta

SEQ ID NO: 146205 - DNA, 420 bp, Arabidopsis thaliana
agatgctccagatgaattactaagagatggaatcacagtagatctttcatataacaatctcaagtggcagagtcctgaaagtcgtgcttgtcgcccaaatatgaatctgaatctaaacttgtttcagagcacttcgacaaaaaaatcgagcaaatttctgccatgtatcaaagatttcaaatgtcctcgatattccagctgcttgcatgtgaactgcggtggaagcgatatgtatgttaaggagaaaaaaacaaaagaattatatgaaggagatggaaatgttgaaggtggtgctgctaagtattttttgaagcctgacgctaattggggatttagcagcacaggggacttcatggacgataacaattttcaaaacactagattcaccatgtttgtcccggcatctaaccagtctgatct

SEQ ID NO: 146206 - DNA, 405 bp, Arabidopsis thaliana
gtcccacggaaacaagttcgagtggatctctttcaaaactaatgaaaacgcaatgatcagcactttggcgggtagaacctcgctcttgagggcattgccattggaggtcatatcaaatggtttccagatctctcccgaggaagctaggaagatcaagttcaacacacttgagaccactttgacccgcgctgccggtaggcaacaacaacagttgatcgaggagattgtcgaggcttaaatcaaaacgtttttctttttcttaataaagtatggtcagtttgtaatcacgtccctttacctttaacgtacgtgtaaaatatgtgtctgcggcacctcacttgtaataacactttcttctcataaataaaagggaagtttcgtgtttaaaaatatattattataatt

SEQ ID NO: 146207 - DNA, 424 bp, Arabidopsis thaliana
  unsure (1)..(424): unsure at all n locations
gaattcaaaacccaccttgattgtcctaccagcaatctccagctttccatttaaggcaatttgtgctgcctttgaatgttcaagttgaacaaactatgcaagagaaaataaaactcagtgaggaataactaagaaaaagagtaccaacaaagtaaaaaacacgttccactaacctgaataaatccaaatcctttgcactgcccagtttcaggatcaagtggtagctgaacaagctcaacgggaccaaatgcctcaaaaatctgataaagaaaaggaaacaactgtgagaatatgaaggatactgaaagaaaaaaaaacagttgctggagtgtccatatgtaattaaacaattgacctagaaaactgaatatcacctgtctaagctgcagttccgacatgttgaaatgcangttacccacataga

SEQ ID NO: 146208 - DNA, 427 bp, Arabidopsis thaliana
cagccgcatcatccttctcccttgtgcgatatcgtttgcgtgagatttgtctgaaaagtagctaaccatgggtaaagagaagtttcacatcaacattgtggtcattggccacgtcgattctggaaagtcgacaaccactggacacttgatctacaagttgggtggtattgacaagcgtgtgatccagaggttcgagaaggaggctgctgagatgaacaagaggtccttcaagtacgcatgggtgttggacaaacttaaggctgagcgtgagcgtggtatcaccattgacattgctctttggaagttcgagaccaccaagtactactgcactgtcattgatgctcctggtcatcgtgatttcatcaagaacatgatcactggtaccttccaggctgattgtgctgtccttatcattcacttcaccact

SEQ ID NO: 146209 - DNA, 341 bp, Arabidopsis thaliana
ggggcgccacgcgtcctagcctaatatccttctcctagagctttatttttgcgtgagaattgtctgagggtagctaaccatgggtgaagagaagttccacatcaacattgtggtcattggccacgtttattctggaaagtcttcaaccactggacacttgatctacaagttgggtggatttgacaagcgtgtgatcgagaggtttgtgatggaggctgctgagatgaacaagaggctcttcaagttctcatgggtgttggacaaacatataggctgatcgtgagcgtggtataaccattgacattgttctctggatgttcaataccactcaattactactt

SEQ ID NO: 146210 - DNA, 426 bp, Arabidopsis thaliana
gattcccgaggctcgaaaaaaccctaaatctcttctccgttcactcatccaaccgaagatgcgtgagattcttcacatccagggtggtcaatgcggtaaccagatcggcgccaagttctgggaagtggtttgcgccgagcacggcatcgatccaaccggaaggtacaccggagactcagatctgcaacttgagcgcatcaacgtttactacaatgaagcgagttgcggtagattcgttcctcgtgcagtgctcatggatttggagcctgggactatggatagtctcagatctggaccgtacggtcagacctttcgacctgataacttcgtctttggtcaatccggtgctggtaacaactgggccaagggacactacacggaaggagctgaactaatcgatttcgttcttgatgttgttcgtaagga

SEQ ID NO: 146211 - DNA, 412 bp, Arabidopsis thaliana
gtaacatttcttcctttattccaagaaacaaacgaagaagctactttttgtaataacaacagctgagtcttcttctacaggtttgcagagatgtgggaagagttgtcgactaagatggatcaattacttgagacctgatttaaagagaggagctttttctcctgaagaagagaatctcatcgtcgaacttcatgccgtccttggaaacaggtaataattagttatcaacaataatgctgtctaagaaaaaatatcatagaaaacagaggatcatgtttatgttttcagcttcattcctctgttttttgctctgctctgttttaacagaggatcaagtttatgtcttaagcctcctctgtttttggctttggtctgtttatactcagatggtcacagattgcgtcaaggcttt

SEQ ID NO: 146212 - DNA, 400 bp, Arabidopsis thaliana
ctgaatctgactgacttcaaaggacacagcttttacttctataactgagcgaagcaggtgaaaaaatggcgaatcggaagttagagaagatggcatcgattgatgttcatcttcgtcaactggttcctggcaaagttagtgaagacgacaagcttgttgagtatgatgctttgcttctagatcggtttctcgatatcctccaggatttgcacggtgaagatctccgtgaaactgttcaagagctttatgagcattctgcagaatacgaagggaagcatgaacctaagaagctagaggagctagggagtgtgctaacgagtttagatccaggagattccattgttatcgctaaagctttctctcatatgcttaacttagccaatttggctgaggaagtgca

SEQ ID NO: 146213 - DNA, 402 bp, Arabidopsis thaliana
cggacgcgtgggagaaaaatgggtcgagtctcatctattatctctttctctttgacactcttgatcctcttcaatggctacactgcccaacagtggcccaacgagtgccagctcgatcaactcaatgcgctcgaaccatcccaaatcatcaagagcgagggtggtcgcatcgaggtctgggaccaccatgcaccccagctccgttgctccggctttgcctttgagcgtttcgtcattgagcctcagggtcttttcttgcccactttcttgaacgccggcaaactcacgtttgttgttcacggaaggggtctaatgcgaagagttattccgggatgcgccgagacgttcatggagtcaccggtattatgagaaagttaaggtcagggtctgagtcaagggttt

SEQ ID NO: 146214 - DNA, 390 bp, Arabidopsis thaliana
gtcggaaattccggggtgagacttttgcagaagttgaaggttcatcaggaagaggaggtggaggtgcacccggttcgacgttttgaggacatgcaccagaagttggagaatttccgccgaggggatgtgtttgcttcgcttgccggagtttcacagtggtggttcaaccttggtgattcctatgtcgtcattgttattgttcttgttgtctcctacagttataacctgttttgccaatttccttatgattgttcaactagcctgtagtttaacgcatgatgaataactaccattttcgtttcctttatgcaacaactcttttattggtttggacctaatcataattttttttagttattttatatttattattcattcattttattcttc

SEQ ID NO: 146215 - DNA, 278 bp, Arabidopsis thaliana
tgctgagaagaaaaaaggattgggtgattggatgaacattataaagcctgttaatgaggagaaagatcattgggtacctgatgaagctgtttctaagtgcacatcatgtggttcagatttcggtgcatttatacgaaggcaccactgcaggaattgtggtgacgtcttctgtgacaagtgtactcaaggcaggattgctctcactgcttaggataatgcttctcaagttcgtgtttgtgaccgcagcatggctgaagtgtcacaaatgttgattaatg

SEQ ID NO: 146216 - DNA, 422 bp, Arabidopsis thaliana
gttatttgggccctgcggtttaactttcgaactgctaattttcggatgggagaggtccatcctagttacgtatgggcgtatttgtcccattgacacgtctgaaggaatcaatgttggacttattggatctttatcaattcatgccaggattggtgattgggggtctcttgaaagtccattttatgaactctttgtgatatcataataagcacggattcggttgctttctttatcaccaagtcatgatgaatattatatgtattgcggcatggaaaattttatggctatgaatggtggcattcattatgaactggctgtttcagcttgattccgttaagattatttgcttcttttatgggaagaggctcattttctaagattttttctttttcaattatttttctatatggagctatttttat

SEQ ID NO: 146217 - DNA, 404 bp, Arabidopsis thaliana
ggaagaaaaatgggtcgagtctcatttattatctctttctctttgacactgttgatcctcttcaatggctacactgcccaacagtggcccaacgagtgccagcttgatcaactcaatgcgcttgaaccatcccaaatcatcaagagcgagggtggtcgcatcgaggtctgggaccaccatgcaccccagctccgttgctccggctttgcctttgagcgtttcgtcattgagcctcaaggtcttttcttgcccactttcttgaacgccggcaaactcacgtttgttgttcacggaaggggtctaatgggaagagttattccgggatgcgccgagacgttcatggagtcaccggtatttggagaaggtcaaggtcagggtcagagtcaagggttccgtgacatgca

SEQ ID NO: 146218 - DNA, 427 bp, Arabidopsis thaliana
cgacgcacaggtcatagctcaagcattgaaaattgacgttcagttggctcagcagcttcagaaccaacaagacagcagaggaaacatcgttcgtgttaagggacctttccaggtcgtgaggccacctctaagacagccctacgagagcgaggagtggagacacccacgtagcccacagggcaacggccttgaggagactatctgcagcatgaggtcccacgagaacattgacgaccctgctcgtgctgacgtgtacaagcccagcctaggtcgcgtgaccagcgtcaacagctataccttgcccatcttggagtatgtcaggctcagtgccactcgtggcgttctccagggtaatgcgatggtgcttcctaaatacaacatgaacgctaacgagatcttgtactgcactggaggacaaggaaggatc

SEQ ID NO: 146219 - DNA, 425 bp, Arabidopsis thaliana
tctctctttcttgctactggaatctgcaatgagttctttgctttcgaagttgccgcaacctaaacagaattgaagacagtacgtagtaccatgagtcaaacaatggaggaatatcagtctaatgagagtgaagataaaagaagttggatttggagtaaggcggtaagtgttgggaagaaagttctgacagctggtgttgtagtgtcttcagctccacttcttgttccttcactttttgtcgcctcgacactcgcctttctctcctcggttccgttttgtctcttcttggctaattatgcttgtacacaaaaggtcatgagtactctgcttcctgatactgaagaaactggtggagttggcaaggaggatgatgacgaatctagatttgatgagtacagcaagattggtcacggtgaaggcgcggc

SEQ ID NO: 146220 - DNA, 422 bp, Arabidopsis thaliana
gataaaaatggctcgagtctcttctcttctttctttctccttaacacttttgatccttttccatggctacgcggctcaacagggtcagcagggtcagcagtttccgaacgagtgccagctcgaccagctcaatgcgctcgagccttcacacgtactgaagagcgaggctggtcgcatcgaggtgtgggaccaccacgctcctcagctccgttgctcaggtgtctcctttgcacgttacatcatcgagtctaagggtctctacttgccctctttctttaacaccgcgaagctcttcttcgtggctaaaggacgaggtcttatgggaaaagtgatccctggatgcgccgaaacattccaagactcatcagagttccaaccacgcttcgaaggtcaaggtcaaagccaggggttccgtgacatgc

SEQ ID NO: 146221 - DNA, 361 bp, Arabidopsis thaliana
gaaaatggttaagctcagcaatctcctcgttgcaaccttcggggttctcctcgtccttaacggctgccttgcgaggcagtcacttggggttcctcctcagctacagaacgagtgtaacctcgacaacctagatgttctccaagccaccgaaactatcaagagtgaagccggtcagatcgagtactgggaccacaaccaccctcagctccgatgtgttggtgtttccgttgctcgttatgtaattgaacaaggcggtctttacttgcccaccttcttcacttccccaaaaatttcctacgtcgttcaaggaacgggtttcagcggaagagtggttcctggatgtgccgagaccttcatggac

SEQ ID NO: 146222 - DNA, 388 bp, Arabidopsis thaliana
cacctctaagacagccctacgagagcgaggagtggagacacccacgtagcccacagggcaacggccttgaggagactatctgcagcatgaggtcccacgagaacattgacgaccctgctcgtgctgacgtgtacaagcccagcctaggtcgcgtgaccagcgtcaacagctataccttgcccatcttggagtatgtcaggctcagtgccactcgtggcgttctccagggtaatgcgatggtgcttcctaaatacaacatgaacgctaacgagatcttgtactgcactggaggacaaggaaggatccaagtggtcaacgacaacggacagaacgtgttggaccaacacgtgcacaagggacagctcgtgggcattccacaagggttcgc

SEQ ID NO: 146223 - DNA, 422 bp, Arabidopsis thaliana
cactggaacgttgaaataacgttagattacaaaaagtacgtactagaaacactctggttccaaaatataaaaagaaactaatctagccacaacaaaatacaaaacttgatactttttaaagcaaccattttgaatgaaaagtgggaaaaaaccaacgagcatccttgaaaagtattttcgaggtcctggaagaagcagtaagaagtttcaaccagttggaccacattagcggatcgaaaatggtagactcaaataccgttcttgatagaagcatttcataaactattttcattgtatttttgtaactgatcataacttaaatttatgcaatttattatcacttttgtctctacctttattccttgatctttttataaatttttttgttttttatatttcttattttttaccttttttaatta

SEQ ID NO: 146224 - DNA, 418 bp, Arabidopsis thaliana
gtcatgttgattctggaaaatcgaccacaactggtcacttgatctataagcttggtggtattgacaagcgtgtcatcgagaggttcgagaaggaggctgctgagatgaacaagaggtccttcaagtacgcatgggtgttggacaaacttaaggccgagcgtgagcgtggtattaccatcgatattgctctatggaagttcgagaccaccaagtactactgcacagtcattgatgccccaggacatcgtgatttcatcaagaacatgattactggtacctcccaggctgattgtgctgttcttatcattgactccaccactggaggttttgaggctggtatctctaaggatggtcagacccgtgagcacgctcttcttgctttcacccttggtgtcaaacagatgatttgctgtttgta

SEQ ID NO: 146225 - DNA, 421 bp, Arabidopsis thaliana
aatgaatgttccacaacttcagcttcctagttccattacgaaaacacgctactcaagaaccccctgcaagtatccctcacatttagctttacacacacacacaaaaatcctcatttaaataactatgtagtgctcattaccagattcctgacgccttcttgctttgatccctgatgtgaaatgacattctcagtttttgttcaaaattatcataagcccaatgtgttaagaaggaccatggaaacaatttaccgcgattttccagagaaggcatcgtcgatttgttcaggggttggtctttcagcgtacgttgctagcaagacatatttctcctttccattttcctcgttcactctcttataaagctcataccggtatggataagacatcctgaccaaattcaggtcaaacattcagaatg

SEQ ID NO: 146226 - DNA, 217 bp, Arabidopsis thaliana
gaggagatagcgaaggccaattattattttattttcctattttagttttcattacggcctgtgaatcttcgggttgggtgttctgtaacttcccagattttttttttctctttgctgggcttcgatgccttttcccctttttttctctttcctctgctcttgattcagtttagggcgagaaaaagtagctgtttttacagggtttatcacaaagatc

SEQ ID NO: 146227 - DNA, 418 bp, Arabidopsis thaliana
attggtacttctcaaattaaatggatcacaaaatcctactaacacctcccgaatctttatacaccaaatgtatcataaccatcatttacgtagtatcaatctctcatctaaatgcccatttcataacttcatgcaaacaaaccccataccctagcgtctgcgaccaccacatgtctaattcacctctcaaacctttagacgaccaaacggatgggttcactttccacgaccttgtggtcagctccaccatggaccaggccgtacaactacaccgtcttgtgtcttccgtgaaacagcatcattctctccacaaacacgcaacatcagctttgtttgactgcttggagctctacgaagacactatagaccaactcaaccactctcggagatcgtacggtcaatattcttcgccacatga

SEQ ID NO: 146228 - DNA, 252 bp, Arabidopsis thaliana
attgaattcacttcaatacatttttgctaaaaagattttgcacattcttggtttttaacaataggaaagtaaaaaaaagcgaaaagcgtccattgtctaatggataggacataggtcttctaaacctttggtataggttcaaatcctattggacgcaatataaatatatctatattgatatttatctattatttccatttctatatattatatataatcctcctatggaaaaaaaaaaaaataaaaattaaa

SEQ ID NO: 146229 - DNA, 426 bp, Arabidopsis thaliana
gaagaggattggccttccataaagaagagagtaggcgtggagcgaaaatgatgtcttcacctgaaaattcagtcaagttagtagttgatcgctggctgcctttcagaaccacagcccttgaagttgctcaaatgtacattttgcgggaacgactaatggcttctattttattcaaggtaacacatccacgggaacatttgccacctcatctcggagcttctatgcatgcaatagctggtattctctcatatgatggtcatgcaggactttcatgtccaccggagtctatggtaccaaaacattcaaggactgagatgtatgataccggtggatgggaagagaaaccaaactctttccttaactcactcttttggtctctgagtttgaaagagaacaagcatcctagtcacacgaataggaatcagc

SEQ ID NO: 146230 - DNA, 371 bp, Arabidopsis thaliana
ccgggctttccgatcatcggaaacttgcatcagcttggggagctaccacatcaatctctatggagtctctccaaaaaatatggtcctgtaatgcttttgaagtttggaagtatcccaacggttgttgtctcttcttctgaaacagcaaagcaagctctgaaaatccatgacctcaattgttgtagccgtccaagcttagcaggaccaagagcgctctcttacaactacttggacatagttatctctccttttaatgattactggaaagaattgaggaggatttgtgcgctagagcttttcagtcctaagccagttcatttgattcaccccatcagggaagaggaacgtaagattctgcttaattcactctt

SEQ ID NO: 146231 - DNA, 370 bp, Arabidopsis thaliana
cctacagctaactatttattcttaggagattacgtagacaggggcaagcagagtttggagactatttgtcttctgcttgcttacaaaatcaaataccctgagaacttttttcttctaagaggaaaccacgaatgtgcttctattaacagaatctatggattctatgatgaatgtaaacgtcgattcagtgtgagactcttgaaagtgtttacagattcttttaactgtctccctggtgctgttgttatagacaatatgaatttatgtatgcactggggccctttttccgatttgaccaacttgtacatattatgatcattaatcgtcctactgtttttcctgacttcttgttttgctctgttatctgctt

SEQ ID NO: 146232 - DNA, 384 bp, Arabidopsis thaliana
aacaaaaagaaaatggttaagctcagcaatctcctcgttgcaaccttcggggttctcgctcgtccttaacggctgccttgcgaggcagtcacttggggttcctcctcagctacagaacgagtgtaacctcgacaacctagatgttctccaagccaccgaaactatcaagagtgaagccggtcagatcgagtactgggaccacaaccaccctcagctccgatgtgttggtgtttccgttgctcgttatgtaaatgaacacggcggtctttatttgcccacacttttttattttcttaaaaattttcttcttttgttcttggatctgtttttcttttgtaatgtgtgtttcctattgttttttttcttactctttttatctttttt

SEQ ID NO: 146233 - DNA, 413 bp, Arabidopsis thaliana
gaatttgtttacaaatccggaaaaaaacaaacacgaaaactattttttacgaaaagacatatgttttgttaatttcatatgacatgccactaacggaattgataagtcttacacatttttagagtctcataagtcataaactatatgaaaattttaaaatgacataaactgaccaccgttttctacaaaaaaaaaaaaaaaaatcatttcccaattattaaaggtaaaagaatatttaaaaatcctgatttgacagaaaaaattattgaggatagagtccatggctaattctttttttttgcttacatataattaatactagatttttaatgaggatatataacgaatgttgctcattaacttactcatttggtatatgagattgaaagagaacatacattattgtgttttga

SEQ ID NO: 146234 - DNA, 420 bp, Arabidopsis thaliana
gaatatgatgacaaatccggattaaatcaaactcgaaaactatttcttacgggaaggcatatgttttggtaatttcatatgacatgccactaacggaattgataagttttacacatttttagagtcttcataagtcataaactatatgaaaattttaaaatgacataaactgaccacctgtttctataaattaaaaataaaaaattattttccattattaaaggttaaagaatatttaatatttcctatttgtcagtaattatttttgtggttagagtctatggttaatttttattttattcttacatttaatttatttctagtttcttttatgtttatttatattattatttttactatgttttttttccattgtttatatttatatttttttaattattattttaatattattttgtt

SEQ ID NO: 146235 - DNA, 414 bp, Arabidopsis thaliana
aaggaaaatggttaagctcagcaatctcctcgttgcaaccttcggggttctcctcggccttaacggctgccttgcgaggcagtcacttggggttcctcctcagctacagaacgagtgtaacctcgacaacctagatgttctccaagccaccgaaactatcaagagtgaagccggtcagatcgagtactgggaccacaaccaccctcagctccgatgtgttggtgtttccgttgctcgttatgtaattgaacaaggcggtctttacttgcccaccttcttcacttccccaaaaatttcctacgtcgttcaaggaacgggtatcagcggaagagtggtccctggatgtgccgagacctttatggactcgcagtcgatgcaaggacaacaacaagtccaaccatggcaaggacgaca

SEQ ID NO: 146236 - DNA, 416 bp, Arabidopsis thaliana
caaatggcgaacaagctcttttttgtttgcgcagctctcgccctgtgtttgatcctcaccaacgcttccgtctatcgcacggttgtcgagttcgacgaagatgacgccagtaaccccataggcccaatacagaaatgtcagaaggagtttcagcaagaacagcacctaagagcttgccagagatggatgcgcaagcaaatgtggcaaggacgtggtggtggtccttccctcgacgatgagttcgatatggaagacgacatcgagaacccgcagagacgacagctactccagaagtgctgtagcgagcttcgccaagaagagccagtttgcgtttgccccaccttgagacaagctgccaaggccgttagatttcagggacagcaacaccaaccagagcaagtcaggaaaatttacca

SEQ ID NO: 146237 - DNA, 425 bp, Arabidopsis thaliana
ttttacgaaaaaagcttttaaaacttatctagtttcgtttgatacacatttgaagaaagaaatggcatccaaccaacagagctacaaagctggtgagaccagaggcaaggcccaggagaagactggacaagctatgggaacgatgagggacaaggctgaggagggccgggacaagacttctcaaacggcccaaacagcccaacagaaggcccatgagacagcccagtcagctaaagataagacatctcaaactgcccaagcggctcagcagaaggcccatgaaacggcccagtcagcaaaagagaagacatctcaaactgcccaaacggcacagcaaaaggcccatgagacgacgcaagcagcaaaagaaaagacatctcaagctggcgacaaagctcgcgaggccaaggacaaggccgggagct

SEQ ID NO: 146238 - DNA, 419 bp, Arabidopsis thaliana
ttcatttttccttttcttccatggcgccgaggcacgccagcgagaggcgccgtttccaaacgcctgccatttcagccaaatcaacagcctcgcgcccgctcaggcgacgaagttcgaagccggtcagatggaagtatgggaccacatgagccctgagctccgatgcgccggtgtaacggtggctcgcatcacccttcagcccaattccattttcttgcccgctttctttagcccacctgcccttgcttacgttgtccaaggagaaggagttatggggacgattgcttctggttgtcctgagacttttgcagaagttgaaggatcatcaggaagaggaggaggaggagacccgggtcgacgttttgaggacatgcaccagaagttggagaatttccggcgaggggatgtgtttgcttcgc

SEQ ID NO: 146239 - DNA, 295 bp, Arabidopsis thaliana
gtttcattgaaaatttcaagaaccctagttaataacgataatgggttcgagagttttggcttccttctttgttttcttaatcttcacggtcatcacattgcctcccacgatccaagcttgcactccttgtactcgtcctcatcctccggttccgaaacctccacaacacggcggtggtggaggtggtggtagcaagccgcctccacatcacggtggaaaaggtggtggtaaacccccaccccacggtggaaaaggtggaggaccgccgcatcatggtcgaggaggaggaggaggt

SEQ ID NO: 146240 - DNA, 427 bp, Arabidopsis thaliana
gcacgttactggagctgatctcacgttattttggatcgtaatcatggacggcgaagattttgccggaaaggcggctgctgaagccaagggattgaacccgggattaatcgtgctgcttgttgttggaggtccgcttcttgtgttcctaatcgccaactacgtgctttacgtttatgctcagaagaacctacctccaaggaagaagaagcccgtttccaaaaagaagctcaagcgggagaagctaaagcaaggagtccctgtccctggagaataaaagccagcttaagcttccttcacttgtgcctccttcaaagcggtttttgttcggttaccaaatttcacccttgcgggttttttcttcctttacttctgtcatgaggattatcttgagtcctgtatgatttcacatggagagtgtagactattg

SEQ ID NO: 146241 - DNA, 423 bp, Arabidopsis thaliana
cgccaactaccaaaaccaactcgaccgtaaccctagagtgttccatttggccggaaacaaccagcagggaggctttggcggttcacagcaacaacaagaacagaaaaacttgtggagcgggttcgacgcacaggtcatagctcaagcattgaaaattgacgttcagttggctcagcagcttcagaaccaacaagacagcagaggaaacatcgttcgtgttaagggacctttccaggtcgtgaggccacctctaagacagccctacgagagcgaggagtggagacacccacgtagcccacagggcaacggccttgaggagactatctgcagcatgaggtcccacgagaacattgacgaccctgctcgtgctgacgtgtacaagcccagcctaggtcgcgtgaccagcgtcaacagctatacctt

SEQ ID NO: 146242 - DNA, 417 bp, Arabidopsis thaliana
gtttgggatggttagggataacttgaagagagagttatcaactttactttctctatgcattcaggcaccgagatcttctaaaggagggatgctaagatctggcaggtcctttggaaaagattctcctgcagttcactggcaaagcattatcgacggtcttaattcgcttcttgtcacattgaaagaaaatcatgttcctttagttctcatccagaagatatactctcaaactttctcatacattaacgtacaacttttcaacagtctccttctgcgtaaagagtgctgtacatttagcaatggtgaatttgtaaaatccgggcttgcggagctagagctatggtgttgtcaagccaaagaatattctgggccgtcttgggaagaactgaaacatattagacaagccgttgggttctt

SEQ ID NO: 146243 - DNA, 418 bp, Arabidopsis thaliana
atttcaaaagaaaacaatcaatcgagaaatggcaatgtctggaacatacgtggcggaggtaccgcttaagggatcggcggagaaacactacaagaagtggaggaacgaaaaccacgtcttccaggatgccgtcggccaccacatccaaggttgcactatgcatgacggtgactgggactcccacggctccatcagatcatggaatatcacatgcgatggaaagccggaagtcttcaaggagaagagagagatagacgacgaaaagatggcgttgacgttgaaagggctagagggtcaagcgatggagaagttcaagaagtatgaggttatctaccagttcattcccaagtcgaatgaaggctgcgtctgcaaaatcactctcatattggaaaagcgcaacgaaaacttcctcgaaccc

SEQ ID NO: 146244 - DNA, 415 bp, Arabidopsis thaliana
ataagaaataacaaaatggctcgagtctcttctcttctttctttcttcttaacacttttgatccttttccatggctacgcggctcaacagggtcagcagggtcagcagtttccgaacgagtgccagctcgaccagctcaatgcgctcgagccgtcacacgtactgaagagcgaggctggtcgcatcgaggtgtgggaccaccacgctcctcagctccgttgctcaggtgtctcctttgcacgttacatcatcgagtctaagggtctctacttgccctctttctttaacaccgcgaagctctctttcgtggctaagggacgaggtcttatgggaaaagtgatccctggatgcgccgaaacattccaagacttatcagagtttcaaccacgcttcgaaggtcaaggtcaaagccaga

SEQ ID NO: 146245 - DNA, 411 bp, Arabidopsis thaliana; identical to SEQ ID NO: 123768

SEQ ID NO: 146246 - DNA, 426 bp, Arabidopsis thaliana
agagatcccaaatccggaagatatcttcttctctcataactcagtttactcagattcactgaaacatacaattaagttaaccgtcagtctctcacctgcagcaaaattcactcttctgctaataatgttctccacagagattcatctattgatcattttgactttttcaggaaccagagatgaaaaattatagttaaggttagtagtagtagataggtttaataaatttgtagttaagtaacccaaaaaaataacattaaactaaaatccaacactagaaaccagagagacccccttaacgacaacaacctctctgtacacaagacaacaaacactctctacaaaaacactactctttccttcttcttctctctactctattctaattctaaagagagagagaaaagctatggatggatatgaagc

SEQ ID NO: 146247 - DNA, 430 bp, Arabidopsis thaliana
ctagagtgttccatttggccggaaacaaccagcagggaggctttggcggttcacagcaacaacaagaacagaaaaacttgtggagcgggttcgacgcacaggtcatagctcaagcattgaaaattgacgttcagttggctcagcagcttcagaaccaacaagacagcagaggaaacatcgttcgtgttaagggacctttccaggtcgtgaggccacctctaagacagccctacgagagcgaggagtggagacacccacgtagcccacagggcaacggccttgaggagactatctgcagcatgaggtcccacgagaacattgacgaccctgctcgtgctgacgtgtacaagcccagcctaggtcgcgtgaccagcgtcaacagctataccttgcccatcttggagtatgtcaggctcagtgccactcgtgg

SEQ ID NO: 146248 - DNA, 370 bp, Arabidopsis thaliana
ggcacaggggttacacagaggttattacaccaaatatgtacaacatggagttgtggcaaacatccggacatgctgacaattacaaggataatatgtttacgtttaatattgagaagcaagagttcgggctcaaacctatgaattgtcctggtcactgcttgatattccagcatagggttcgctcatatagagagttacctatgagactggccgactttggagtgttacaccgcaatgaggcaagtggagcacttagtggattgactcgtgtccgacggttccagcatgatgatgcacacatattctgtacaacggaacaggttaagggagaagtgcatggtgtgttggagttcattgacttcttgttcaa

SEQ ID NO: 146249 - DNA, 410 bp, Arabidopsis thaliana
cggacgcgtgggtaaagatagagtcccattttacatgtcaatactgacaacagtggaatttatagtaagatgaaaatccgttgacttttaaaatcgtgagggttcaagtccctctatccccagctctactccccgaaaaggttgacaccttacctttttttcgttattatttatttgaattatttataatctatatcatttttcattttcaaacttagaaagtcttcttttatttataaaatccaagaaattcccggtccacaactttttgaatttactacttttgagtttcttttcattgacatagacctaagtcatatattaaaatgatactgatacttcagtagattatacttcggtaatggtacacatagcttaattgcgggggactgaaaattcttgtgcaccat

SEQ ID NO: 146250 - DNA, 426 bp, Arabidopsis thaliana
  unsure (1)..(426): unsure at all n locations
gcacctaagagcttgccagaaattgatgcgcatgcaaatgaggcaaggccgtggtggtggtccctccctcgacgatgagttcgatttggaagacgacatcgagaacccacaaggcccccagcagggacaccagatcctccagcagtgctgcagcgagcttcgccaggaagagccagtttgtgtttgccccaccttgagacaagctgccagggccgttagcctccagggacaacacggaccattccaatccaggaaaatttacaagacagctaagtacttgcctaacatttgcaagatccagcaagttggtgaatgccccttccagaccaccatccctttcttccctccttactaatagattccaaacaaaaaccctcgagcgtatgagagtgtggttgntgatacatgttaacaccacaccttatc

SEQ ID NO: 146251 - DNA, 423 bp, Arabidopsis thaliana
cttttgatgatttttccaaatttcaactctctttttattttctttatatagtttctaatatattttttgataaaattcttcgtgtgtatatacagcgaaagaaatatccgcgggaacccttgtatatgtagcctatagatctggggattttacaggccttttaaaaacttacgacctatgtgatgtgagtttggcatgtaacattgattctgagattgaagctggcgacgtgtttgacttcagtcttaaagacgttctttatgttggttttgatgaggtaactatttttaatactctttgtatatgaatttgaagtttccttaagaagtcctaggaccaatgttttttcaagtaatgctcttgggttcatgatgttctttggttctcattaattcttctttttaacttggcagggaatcaagt

SEQ ID NO: 146252 - DNA, 422 bp, Arabidopsis thaliana
gaacagtatccaccgccgattaagaagtatcctccgccaattaagaagtatcctccgccagaagagtatccaccaccgatcaagacttatcctcatccccctgtgaagtttccaccgcctccgtacaagacttaccctcatccgccgatcaaaacttatcctcctccgaaagaatgtcctcctccgcctgaacattacccttggcctccgaaaaagaaatatcctccaccggttgagtatccgtcgccgccatataagaaatatcctccggctgatccatagtaactcaaaaccaaacaaggacgtgtttgtctataagtatatgtctagttaaaaaactgttctgttctttctgttatgttctttctttttcttatgactttctgttatgatgcatcaaataaagaataaactgttctgtt

SEQ ID NO: 146253 - DNA, 419 bp, Arabidopsis thaliana
aacaaaaagaaaatggttaagctcagcaatctcctcgttgcaaccttcggggttctgctcgtccttaacggctgccttgcgaggcagtcacttggggttcctcctcagctacagaacgagtgtaacctcgacaacctagatgttctccaagccaccgaaactatcaagagtgaagccggtcagatcgagtactgggaccacaaccaccctcagctccgatgtgttggtgtttccgttgctcgttatgtaattgaacaaggcggtctttacttgcccaccttcttcacttccccaaaaatttcctacgtcgttcaaggaacgggtatcagcggaagagtggtccctggatgtgccgagaccttcatggactcgcagccgatgcaaggacaacaacaaggccaaccatggcaaggacgaca

SEQ ID NO: 146254 - DNA, 419 bp, Arabidopsis thaliana
cacatagcaaaaaatggcaaacaagttgttcctcgtctgcgcagctctcgctctctgcttcctcctcaccaacgcttccatctaccgcaccgtcgttgagttcgaagaagatgacgccactaaccccataggcccaaaaatgaggaaatgccgcaaggagtttcagaaagaacaacacctaagagcttgccagcaattgatgctccagcaagcaaggcaaggccgtagcgatgagtttgatttcgaagacgacatggagaacccacagggacaacagcaggaacaacagctattccagcagtgctgcaacgagcttcgccaggaagagccagattgtgtttgccccaccttgaaacaagctgtcaagggcggtagactccagggacagcaccaaccaatgcaagtcaaggaaatttacc

SEQ ID NO: 146255 - DNA, 416 bp, Arabidopsis thaliana
gcgggttcgacgcacaggtcatagctcaagcattgaaaattgacgttcagttggctcagcagcttcagaaccaacaagacagcagaggaaacatcgttcgtgttaagggacctttccaggtcgtgaggccacctctaagacagccctacgagagcgaggagtggagacacccacgtagcccacagggcaacggccttgaggagactatctgcagcatgaggtcccacgagaacattgacgaccctgctcgtgctgacgtgtacaagcccagcctaggtcgcgtgaccagcgtcaacagctataccttgcccatcttggagtatgtcaggctcagtgccactcgtggcgttctccagggtaatgcgatggtgctttctaaatacaacatgaacgctaacgagatcttgtactgcact

SEQ ID NO: 146256 - DNA, 430 bp, Arabidopsis thaliana
agaaaacatacacaaatagcaaaacatggctaacaagctcttcctcgtctgcgcagctctcgccctctgcttcctcctcaccaacgcttccatctaccgcaccgttgtcgaattcgaagaagatgacgccagcaaccccgtaggtccaagacagagatgccagaaggagtttcagcaatcacaacacctaagagcttgccagagatggatgagcaagcaaatgaggcaaggacgtggtggtggtccttccctcgacgatgagttcgatttcgagggcccccagcagggataccagctactccagcagtgctgcaacgagcttcggcaggaagagccagtttgcgtttgccccaccttgaaacaagctgccagggcagttagccttcaaggacagcacggaccatttcaatccaggaaaatttaccagtca

SEQ ID NO: 146257 - DNA, 403 bp, Arabidopsis thaliana
gccacttgtcatcatcgctcttctcgacatcgtcaactaccaaaaccaactcgaccgcaaccctagagtgttccatttggccggaaacaaccagcagggaggctttggcggttcacagcaacaacaagaacagaaaaacttgtggagcgggttcgacgcacaggtcatagctcaagcattgaaaattgacgttcagttggctcagcagcttcagaaccaacaagacagcagaggaaacatcgttcgtgttaagggacctttccaggtcgtgaggccacctctaagacagccctacgagagcgaggagtggagacacccacgtagcccacagggcaacggccttgaggagactatctgcagcatgaggtcccacgagaacattgacgaccctgctcgtgctgac

SEQ ID NO: 146258 - DNA, 413 bp, Arabidopsis thaliana
gttgtagaaacctgatcaagcgcctcatccactgactgcatcaaaatattagcagtaacttcagatattctgccctcatcaagcatctcccagtaagttgcttgcacacctgacacaaccaattttcaaagtgtcaataatctagcaggtaaatagtatattggagggtacatgatcataactaccatttaagaaccgcatacgtatgtcctttaaacttttagggtcaagacttccaattttagagccattgtgaggatgatgaactagttccccttctgaaccttttaggcttgaaatataactttcaactgtaggccagtcagcaagtcctagctcctcatcgtctcctagatcttgaaacgctcgtaaggccttattcaacatttcgtacttcgtatattccaatattc

SEQ ID NO: 146259 - DNA, 352 bp, Arabidopsis thaliana
aaaaatggcaaacaagttgttgctcgtctgcgcagctctcgctctctgcttcctcctcacgagcgctttcatctaccgcaccgtcgttgagttcgaagaagatgacgccactaaccccataggcccaaaaatgaggaaatgccgcaaggagtttcagaaagaacaacacctaagagcttgccagcaattgatgctccagcaagcaaggcaaggccgtagcgatgagtttgatttcgaagacgacatggagaacccacagggacaacagcaggaacaacagctattccagcagtgctgcaacgagctttgccaggaagagccagattgggtttgccccaccttgaaacaagct

SEQ ID NO: 146260 - DNA, 407 bp, Arabidopsis thaliana
atttatttatcttggtcaagagacattgattctcttaaatttctgcaaaaggaaggtcagagattcacaccgcatctgaaattgtgctcagaggggttccaaatattaccagtcgttaggaagcaatcacgagttgttttaggaattagtgaacgtgataatggctagcaatgagatggaaaaatcgagtaaagagaaggaacctaaaacacctcctccttcttctactgcccctccctcttcacaggaaccttcatcggctgtgagtgctggcatggctactccagattggtctggttttcaggcatattctcctatgccgccgcctcatggttatgtggcatctagtccccaacctcacccttatatgtggggagttcagcatatgatgcctccttatggaactc

SEQ ID NO: 146261 - DNA, 354 bp, Arabidopsis thaliana
cagaagagaagtctaagccattatggatctcctgcaaaagacatggacctggttaattcaacctcattgataagatgttaaaacagaaactaaaacatgtgaataaagaaaaaaataccaagctctaataaaaaactctatcttgtttgattaagtcttgtttcagtcttgctttcaaatgtttgttgagtcttatggagtttaagttggttcaagtagtttgcagctttgtagggattccagtttgtaatggcattatataagccatcgctttcattgtaataaagcagagaatttttagagtttatattcacagagcattgtttacttttacactcttactaaacacattat

SEQ ID NO: 146262 - DNA, 469 bp, Arabidopsis thaliana
cacacatagcaaaaaatggcaaacaagttgttcctcgtctgcgcagctctcgctctctgcttcctcctcaccaacgcttccatctaccgcaccgtcgttgagttcgaagaagatgacgccactaaccccataggcccaaaaatgaggaaatgccgcaaggagtttcagaaagaacaacacctaagagcttgccagcaattgatgctccagcaagcaaggcaaggccgtagcgatgagtttgatttcgaagacgacatggagaacccacagggacaacagcaggaacaacagctattccagcagtgctgcaacgagcttcgccaggaagagccagattgtgtttgccccaccttgaaacaagctgccaaggccgttagactccagggacagcaccaaccaatgcaagtcaggaaaatttaccagacagccaagcacttgcccaacgtttgcgacatcccgcaggttgatg

SEQ ID NO: 146263 - DNA, 377 bp, Arabidopsis thaliana
gcgccgaaacattccaagactcatcagagttccaaccacgcttcgaaggtcaaggtcaaagccagaggttccgtgacatgcaccagaaagtggagcacattaggagcggtgataccattgccacaacacccggtgtagcccagtggttctacaacgacggacagcaaccacttgtcatcgtcagcatcttcgatctagccagtcaccagaaccagcttgaccgcaacccaaggccattttacttagccggaaacaacccacaaggtcaagtatggctacaaggacgagagcaacagccacagaagaacatcttcaatggatttggacccgaggttattgctcaagctttgaagattgatcttcagacagcgcaacaa

SEQ ID NO: 146264 - DNA, 195 bp, Arabidopsis thaliana
  unsure (1)..(195): unsure at all n locations
gcttacgctcaccaatctcctcgttgcaaccttcggggttctccttgttcttaacggctgccttgcgaggcagggacttggggttccttctcagctacagaacgagtttaactctcnacaacctgatgttcttcaagccaccgaaactatcaagagtgaagccggtcagatcgagtactgttaccacaaccaccc

SEQ ID NO: 146265 - DNA, 364 bp, Arabidopsis thaliana
ctctatctcactctttgcttctgcaactcacagtcaatggcggctgaatatggcgttagtgaaacccatctccaagggctcttccccaaagctctcaaacccgagcaaattcctctccggccgacgtttctccaccgtgatcagaatgtcagcctcttcctcaccgcctcctccaaccaccgtcacctcgaagtccaagaagggaacgaagaaagagattcaagagtcgcttcttactccgagggtctacacgacggacttcgaggaaatggaacagcttttcaacacggagatcaacaagaaccttaacgaagcagagttcgaggctctgcttcaagagttcaagaccgatttccaccagaca

SEQ ID NO: 146266 - DNA, 431 bp, Arabidopsis thaliana
  unsure (1)..(431): unsure at all n locations
caaatggtgaacgacaacggagaaagagtgttcgaccaagagatctccagcggacagttactagtcgtgccacaaggcttttcggtcatgaaacatgccataggcgaacagttcgagtggatcgaattcaagacaaacgaaaacgcacaggtcaacacactcgcgggccgtacctcagtcatgagaggtttgccgcttgaggttataaccaatgggtaccagatctctcccgaagaagctaaacgagtaaagtttagcacgattgagaccacactgacccatagcagtccaatgagctacggaaggcctagggcttgaggcttgatgagcgcgtggtggaatagcgtttgaatctaaagttcggtttggtacgacttgtaatatgaaataataatgtacanagaagttctacgcttaagggaactgttttg

SEQ ID NO: 146267 - DNA, 204 bp, Arabidopsis thaliana
gcgtacgcggacgcgtgggggagtacatagaggagcgaaggcttaaggtatttggtgaagaagcactctgagttcatgagctacccaatctctctctggattgagaagaccattgagaaggagatctctgatgatgaagaggaggaagagaagaaggatgaggaaggcatggttgtggaagtttattaggagaatgtaaaggtg

SEQ ID NO: 146268 - DNA, 476 bp, Arabidopsis thaliana
aaaacatacacaagtaattaactaacaacaaatggcgaacatgctctttctcgtctgcgcagctctcggcgtgtgtttcatcctcaccaacgcttccgtctatcgcacggttgtcgagttcgacgaagatgacgccagtaaccccataggcccaatacagaaatgtcagaaggagtttcagcaagaacagcacctaagagcttgccagagatggatgcgcaagcaaatgtggcaaggacgtggtggtggtccttccctcgacgatgagttcgatatggaagacgacatcgagaacccgcagagactacagctactccagaagttgctgcatcgagcttcgccaagaagagccagtttgcgtttgccccatcttgagacaagctgccaaggtcgttagattcctgggtcagtatcaccaaccttagcaagtcatgtaaatttccaggcagttaattacttgtctaacatttgcaaaa

SEQ ID NO: 146269 - DNA, 388 bp, Arabidopsis thaliana
gcctcatacccagaaaaacaaaaggataggaaagacgaagaaataaaaagagagagaatgttagagagacaaactctgagagacaaaacaagagaaaatcgctcgtcgtcggtattcaagcgtctgtgactccgataaagcctagactagcgaggacggcgagagagagagagagagagctttggagttgtcgtatctctaaatcggaggcaatttgagtgagataaagacaaaggaaggaatcaagtggactaccgaagcgagttttgagctttttcagagacggatttggagatttcttgttgatatcgtctgcttagaggcttatttggtaccagatgaaacagatctgagcttcggaaggtatggcgagttccgagtttcaatg

SEQ ID NO: 146270 - DNA, 440 bp, Arabidopsis thaliana
agaaaaatgggtcgagtctcatctattatctctttctctttgacactcttgatcctcttcaatggctacactgcccaacagtggcccaacgagtgccagctcgatcaactcaatgcgctcgaaccatcccaaatcatcaagagcgagggtggtcgcatcgaggtctgggaccaccatgcaccccagctccgttgctccggctttgcctttgagcgtttcgtcattgagcctcagggtcttttcttgcccactttcttgaacgccggcaaactcacgtttgttgttcacggaaggggtctaatgggaagagttattccgggatgcgccgagacgttcatggagtcaccggtatttggagaaggtcaaggtcagggtcagagtcaagggttccgtgacatgcaccagaaagtagagcacctacggggcggtgacaccattgc

SEQ ID NO: 146271 - DNA, 431 bp, Arabidopsis thaliana
cgcgcacatgcatacacagatatcactcgaggcgcaatgtcgtcttggttgatcatactgctcttgcttctatccggacgaacgctgagatctaccgcaccgacgttgagttcgaagaagatgacgccactaaccccataggcccaaaaatgaggaaatgccgcaaggagtttcagaaagaacaacacctaagagcttgccagcaattgatgctccagcaagcaaggcaaggccgtagcgatgagtttgatttcgaagacgacatggagaacccacagggacaacagcaggaacaacagctattccagcagtgctgcaacgagcttcgccaggaagagccagattgtgtttgccccaccttgaaacaagctgccaaggccgttagactccaaggacagcaccaaccaatgcaagtcaggaaaatttaccag

SEQ ID NO: 146272 - DNA, 284 bp, Arabidopsis thaliana
gttaaaacagaaaaaatgtcaacttcagaaaacactccgtttaatggttttgcctcatccaccattgttcgagctaccattgtccaagcctccaccgtctacaacgatactcccgccactctagaaaaggcgaacaagtttattgtggaggctgcaagcaagggatcggagctggttgtgttcccggaggcgtttatcggtggttatcctcgaggttttaggtttggtttaggggtgggagttcataactatttatggcgtgttgagatcctcatgttccatgc

SEQ ID NO: 146273 - DNA, 460 bp, Arabidopsis thaliana
cattttcgtagccgcaagactcctttcagattcttacttgcagctatgggtaaagagaagtttcacattaacattgtggtcattggtcatgttgattctggaaaatcgaccacaactggtcacttgatctataagcttggtggtattgacaagcgtgtcatcgagaggttcgagaaggaggctgctgagatgaacaagaggtccttcaagtacgcatgggtgttggacaaacttaaggccgagcgtgagcgtggtattaccatcgatattgctctatggaagttcgagaccaccaagtactactgcacagtcattgatgccccaggacatcgtgatttcatcaagaacatgattactggtacctcccaggctgattgtgctgttcttatcattgactccaccactggaggttttgaggctggtatctctaaggatggtcagacccgtgagcacgctcttc

SEQ ID NO: 146274 - DNA, 402 bp, Arabidopsis thaliana
aacacacacaaatctctgaagtaaaatgacgttcccttctctttctgtctcatttctcttctttgccttcatattcgttacgcatgcattcgacctcagcatcatccagatgcaacagggaacatgtccgtacacggtggttgtcatgacaagctgtctttctccggagtcgacaagagatcagatcagcattgtttttggcgatgccgacggtaacaaggtgtatgcaccgaaactagggggtttggtaagaggaccagggggttttgggaagtgttcaacgaacacattccaagtcagaggtcaatgtttgaatgaccctatctgctctctctatatcaaccggaatggacccgacggttgggtcccggagtccattgagatctactcagaaggttcaaa

SEQ ID NO: 146275 - DNA, 529 bp, Arabidopsis thaliana
cgaccccgcgtccgcaacaaatggcgaacaagctcttcctcgtctgcgcagctctcgccctgtgtttcatcctcaccaacgcttccgtctatcggacggatgttgagatcgacgaagatgacgccagtaaccccataggcccaatacagaaatgtcagaaggagtttcagcaggaacagcacctaagagcttgccagagatggatgcgcaagcaaatgtggcaaggacgtggtggtggtgcttgcatggacgatgagttcgatatggaagacgacatcgagaacccgcagagacgacagctactccagaagtgctgcagcgagcttcgccaagaagagccagtttgcgtttgccccaccttgagacaagctgccaaggccgatagattccagggacagcaacaccaaccagagcaagtcaggaaaagctaccaggcagataagaacttgcctaacattcgtagactacagtaggttggtgtttgccccttccagatcccttcaataccttcttactactaaattccaaa

SEQ ID NO: 146276 - DNA, 323 bp, Arabidopsis thaliana
aagaaaatggttaagctcagcaatctcctcgttgcaaccttttttgtttttctcgtccttaacggctgcgttgcgaggcagtcacttggggttcctcctcatctacagaacgagtgtaacctctacaacctagatgttctccaagccacctaaactatcaagagtgaagccggtcagatcgagtactgggaccacaaccaccctcagctccgatgtgttggtgtttctcgtgcttgttatgttattgaacaaggctgtctttacttgcccaccttcttcactttcctaaaaattttctacgttgttcaaggaactggtatcat

SEQ ID NO: 146277 - DNA, 486 bp, Arabidopsis thaliana
ccttcatggactcgcagccgatgcaaggacaacaacaaggtttaccattgcaaggacgacagggacaacagggccaaccatgggaaggacagggacaacagggacaacaaggaagacaaggccaaccatgggaaggacagggacaacagggacaacaaggacgacagggacaacaaggccaaccatgggaaggacagggacagcagggacaacaaagggttccgtgacatgcaccaaaaggtggaacatgtgagacgcggagacgtttttgccaacactcaaggctttgcccactggatctacaactcatgagaacagccacttgtcatcatcgctctttttgacatcgtcaattacgaaaaccaactttaccagatacgtagagtgatccatttggtcggaaacaaccagcatggaggctttggcggttcacagtaacaacaagaacagaaaaacttgtggagcgggttcgacgcacaggtcata

SEQ ID NO: 146278 - DNA, 515 bp, Arabidopsis thaliana
cttagccaagcagctgttgtttcttagttgactccctctcctacgattatggtgtccacgagcaagatcgaatccgttgatttctataggaaaatcccgagggatttgacagaggcgtctctgtctggtgctggattgtccattatagcagccctctctatgatatttctatttggaatggagttgaataattatttggctgtcagcacttccacatcggtcattgttgacaggagcgctgacggagacttcttgcgcttagattttaacataagcttcccgtcactttcatgtgaattcgcatctgtggatgtcagtgatgtattaggaactaacaggctaaatgtaacaaagacaattcggaagttttctattgattcgaatatgagacccactggttctgagtttcatgccggggaagttttatcactcattaatcatggagatgaaactggtgaagaaatagttgaagattctgtaccacttactggacgcaactttgacacatatacaca

SEQ ID NO: 146279 - DNA, 521 bp, Arabidopsis thaliana
cacatagcaaaaaatggcaaacaagttgttcctcgtctgcgcagctctcgctctctgcttcctcctcaccaacgcttccatctaccgcaccgtcgttgagttcgaagaagatgacgccactaaccccataggcccaaaaatgaggaaatgccgcaaggagtttcagaaagaacaacacctaagagcttgccagcaattgatgctccagcaagcaaggcaaggccgtagcgatgagtttgatttcgaagacgacatggagaacccacagggacaacagcaggaacaacagctattccagcagtgctgcaacgagcttcgccaggaagagccagattgtgtttgccccaccttgaaacaagctgccaaggccgttagactccagggacagcaccaaccaatgcaagtcaggaaaatttaccagacagccaagcacttgcccaacgtttgcgacatccccgaagttgatgtttgtcccttcaacatcccttcattcccttctttctactaaatctcaaacaaac

SEQ ID NO: 146280 - DNA, 517 bp, Arabidopsis thaliana
  unsure (1)..(517): unsure at all n locations
acattttatcagaaagataatatgtttattatttattattaacatgtttattatttattatttttgactgtttagatatttattatttattattaacatgtttattatttattatttttgactctttaaatatttattatttattatttattattaatatgtttattattattttgttcattagttgaactattttacatagataaaagtaataatattttaaagtaaaaattatttattattaatatgtttattagttgaactattttattattaatatgtgtccaaacgtagaaacattagagataaaatgaaatagaaagagtaataaatgaaccaacacgttaacaaactttatataaaaatcaagaaactttttttttttaaatcactgtctttaaaaatcaacagantttatttgaacttatcactgtctttgtcaaaaaaaaatgatgtaaactttattttaaaagtcggaaacttttttaaaaatcaaacaaacttttgtaactttaaa

SEQ ID NO: 146281 - DNA, 422 bp, Arabidopsis thaliana
ctttaaataccattttccctacgagtctacgacgctctctaaacttcttatacaaaacaaaacacacccgaatatgcataagcttttgttttctcttctctccgtcgtctcactctcatttctcctcttcttccatggcgccgaggcacgccagcgagaggcgccgtttccaaacgcctgccatttcagccaaatcaacagcctcgcgcccgctcaggcgacgaagttcgaagccggtcagatggaagtatgggaccacatgagccctgagctccgatgcgccggtgtaacggtggctcgcatcacccttcagcccaattccattttcttgcccgctttctttagcccacctgcccttgcttacgttgtccaaagagaaagagttatggggacgaatgcttctggttgtcctgagacttttg

SEQ ID NO: 146282 - DNA, 511 bp, Arabidopsis thaliana
ctctctctctatcactctgcatttagccatgggagacgcagagagcactaaggatcgcttgctgctgccggtagagagagtggagaacgtgacatggagcgatctgcgagatggttcattcaccgtagaactcaaaaggcttatcttcttcgccgctcctatggctgctgttgttatcgctcagttcatgttacaaatcgtttcaatgatgatggttggtcacctcggcaatctctccctcgctcgcgcctttctgcgctgcttcttctgcaacgtcactggcttcagcttcatcataggattgtcatgtgccttagatactttgagtggtcaagcttatggagctaagctataccggaaactaggagttcagacttacactgctatgttctgtcttgcattagtgtgtctccctctttctctcatttggttcaacatggaaaagcttcttttgatccttggccaagacccttctattgctcacgaagcccggaaatatgccacctggctt

SEQ ID NO: 146283 - DNA, 484 bp, Arabidopsis thaliana
  unsure (1)..(484): unsure at all n locations
gttttcctttttttttctccttcctctcctctctctctctctggtttttttttgccctatccatagggttttctgcgctggctatctcctcgatcttcatgtgcatctctctctttggtataatcggagctaattcgttcgttttcttcttcatcttcgtcggatctctcttttttgctctttcccacgggttttcgcttgagaaatcaagcgttttcgtttgtcctgggagttttgagctcaaatcatgtctcagatctttagttttgccggtgaaaatgatttttaccgtcgtggcgcaatatacccaaacccaaaggatgctagtcttttgttatcacttggtagtttcgctgatgtntatttccctccaagcaagagatcacgtgttgttgcacctacgatcttcagtgctttcgagaaaaagccagtttcccattgatgtgctaccagatgagtgtctttttgagatctttaggcgttt

SEQ ID NO: 146284 - DNA, 516 bp, Arabidopsis thaliana
caatcctctgctgctcaatctctcatcatcggcatcgctctctctattaatgtctcagatggatcccgacgctgtatctaaggccttcgtcgaacattactattccaccttcgacaccaaccgtgtcggtctcgctggtctctatcaggaagcttctatgctcaccttcgaaggtcaaaagatccaaggagtccagagcatcgtcgctaagctcacctctcttcctttccagcagtgcaagcatcacatctccaccgttgattgtcagccttctggtcctgcttccggtatgctcgttttcgtctccggtaatctccagctcgccggagaagaacacgctctcaagttcagccagatgtttcatttgatgccgacgccacaaggaagcttttacgtgttcaacgatatattcaggttgaactatgcctgaacagaaatcagattgtgttagcatacatcattgttgcatttctatactatttgagcaaatccttctatcaatttttctcggctttt

SEQ ID NO: 146285 - DNA, 529 bp, Arabidopsis thaliana
cttcaagatcaatgtcgagacggctcagcagctccagaaccagcaagataaccgtggcaacatcgtcaaggtcaacggacctttcggcgtcattaggccacccttgagacgcggcgaaggcggccaacaaccacatgaaatagctaatggtttagaggagactttgtgcaccatgcgatgcactgaaaacctcgatgacccgtcggatgctgacgtgtacaagccatcactcggatacattagcacacttaacagctacaatcttcctatcctcagacttctccgccttagcgctcttcgtggctccatccgtaaaaacgctatggtgctaccgcaatggaacgtaaacgcaaacgcggcactctacgtgacaaacggaaaggctcatatacaaatggtgaacgacaacggagaaagagtgttcgaccaagagatctccagcggacagttactagtcgtgccacaaggcttttcggtcatgaaacatgccataggcgaacagttcgagtggatcgaattcaagacaaac

SEQ ID NO: 146286 - DNA, 527 bp, Arabidopsis thaliana
  unsure (1)..(527): unsure at all n locations
cgcgtacaacaaggccaaccatgggaaggacagggacagcagggacaacaagggttccgtgacatgcaccagaaggtggaacatgtgagacgcggagacgtctttgccaacactccaggctctgcccactggatctacaactcaggagaacagccacttgtcatcatcgctcttctcgacatcgccaactaccaaaaccaactcgaccgcaaccctagagtgttccatttggccggaaacaaccagcagggaggctttggcggttcacagcaacaacaagaacagaaaaacttgtggagcgggttcgacgcacaggtcatagctcaagcattgaaaattgacgttcagttggctcagcagcttcagaaccaacaagacagcagaggaaacatcgttcgtgttaagggacctttccaggtcgtgaggccacctctaagacagccctacgagagcgaggagtggagacacccacgtagcccacagggcaacggncttgaggagactatctgcagcatgaggtcccacga

SEQ ID NO: 146287 - DNA, 438 bp, Arabidopsis thaliana
gaattttcatcatagccaaaatcacactaagacataaccttccataacagtgactgctttgcctctcagtagaacggtctgcttctctttgtccaggtgcaccttcaacgttcctcctctgcttgaagcctaaacacattccaataataaccaaatctttcttcaggtaactttatacgaatcacttcagaatttgtcttttaagtgtctgcgtggagagaaagagagagagaacctggtaggcgaagaaatcacacttgttcatcctgaggctccagtaatgagctaaagcacaatgagcacttccagtaacagggtcctgaagagccacacagtaaaaagaaagcaaaagaggtcacgtttttgctgttttgaccactcgctcttaatcttctaagagcaaaagactaaatgataaccttattgattccgaaatct

SEQ ID NO: 146288 - DNA, 303 bp, Arabidopsis thaliana
caaaaagaaaatggttaagctcagcaatctcctcgttgcaaccttcggggttctcctcgtccttaacggctgccttgcgaggcagtcacttggggttcctcctcagctacagaacgagtgtaacctcgacaacctagatgttctccaagccaccgaaactatcaagagtgaagccggtcagatcgagtactgggaccacaaccaccctcagctccgatgtgttggtggttcccgtgctcgttatgtaattgaacaaggccgtctttacttgcccaactttttcactttcccaaaaattttcta

SEQ ID NO: 146289 - DNA, 411 bp, Arabidopsis thaliana
ggaacatgcgattactggagaaaccaccctacattgatatggggcttgcttggatggtggggaactgttggaggagcttttggtacagtcagtattcccagtagcattccagggtttgatcctcacatgaaccttcttcaggcactttccaacacccgctctgatcccattggtgctctctaccgtgaaggcacagcttcttggttaaactccatggtcaaccataagttccctttcacaacccctcaagttagagaccactttgttgcaggactttcctcaaacaaggcagccacaaagcaggcccataccttcaagcttgctaatgaaggtcgtctaaagcctagagtctgaagttaagagagtttcatttctcagtttgtttggtggtttatatcaaaaacaatctta

SEQ ID NO: 146290 - DNA, 446 bp, Arabidopsis thaliana
cacatagcaaaaaatggcaaacaagttgttcctcgtctgcgcagctctcgctctctgcttcctcctcacggacgcttccatctaccgcaccgtcgttgagttcgaagaagatgacgccactaaccccataggcccaaaaatgaggaaatgccgcaaggagtttcagaaagaacaacacctaagagcttgccagcaattgatgctccagcaagcaaggcaaggccgtagcgatgagtttgatttcgaagacgacatggagaacccacagggacaacagcaggaacaacagctattccagcagtgctgcaacgagcttcgccaggaagagccagattgtgtttgccccaccttgaaacaagctgtcaaggccgttagactccagggacagcaccaaccaatgcaagtcaggaaaatttaccagacagtcaagcacttgcccaacgttt

SEQ ID NO: 146291 - DNA, 459 bp, Arabidopsis thaliana
ccgcactgttgtcgagttcgacgaagatgacgccagcaaccccatgggcccaagacagaaatgtcagaaggagtttcagcaatcacagcacctaagagcttgccagaaattgatgcgcatgcaaatgaggcaaggccgtggtggtggtccctccctcgacgatgagttcgatttggaagacgacatcgagaacccacaaggcccccagcagggacaccagatcctccagcagtgctgcagcgagcttcgccaggaagagccagtttgtgtttgccccaccttgagacaagctgccagggccggtagcctccaaggacaacacggaccattccaatccaggaaaatttacaaggacagctaagtacttgcctaacatttgcaagaaccagcaaagtggtgaatgcccctttcaaaccaacattcctttcttccttcttactaaatgatttccaacaaaaa

SEQ ID NO: 146292 - DNA, 368 bp, Arabidopsis thaliana
cgactcacgcgtccggagattctcaaaccggttaaagccgccgctgctgaaggtggagataccgctggggaagctaaagttggattccgtggccaagtatccatggctagtcactggattcttcttcttcatgtggtacttcttaaatgtgattttcaacatccttaacaagaagatctataattacttcccttatccctattttgtatcggtgatacacttgttcgtgggagttgtttactgcttgatcagctggtccgtgggtcttcctaaacgtgccccgattgactcgaacctcctcaaggtattgataccagtctcagtcctgtcactccttattccatgttactagcaatgtcctttttcgc

SEQ ID NO: 146293 - DNA, 476 bp, Arabidopsis thaliana
ggaatcgcagattcgacccacgcgtacgagtgcgatttacaaaaaataattcgtacgagtctatgaagctttctatacggccgataacaaccagaagggaggctttggcggttcacagtagcaacatgaacagaaaaacttgtggagcgggttcgacgcacaggtcatagctcaagcattgaaaattgacgttcagttggctcagcagcttcagaaccaacaagacagcagaggaaacatcgttcgtgttaagggacctttccaggtcgtgaggccacctctaagacagccctacgagagcgaggagtggagacacccacgtagcccacatggcaacagccttgaggagactatctgcagcatgaggtcccacgagaacattgacgaccctgctcgtgctgacgtgtacaagcccagcctaggtcgcgtgaccagcgtcaacagctataccttgcccatcttggagtatgtcaagc

SEQ ID NO: 146294 - DNA, 371 bp, Arabidopsis thaliana
caacaacaacaacaacccaaaacccaattttgttacctcttcttttctcaatcctaaagtcaaaacaaacaaaaagcttccttttgattatcttcaatcggaatttcaggtgggagagatgggttctgaaggaccaaaagcaataacgattcatgtgactggtttcaagaaatttcttggggtttcagagaatcctactgagaagatagctaatggtttgaaatcgtatgtggagaaacgaggtttgccttctggattgtgtcttggtagctgtagtgttcttgacactgctggggaaggtgcaaaatctaagctttatgaggttttggagtctagtgttgtctctggagatatagaacaacaatggaact

SEQ ID NO: 146295 - DNA, 241 bp, Arabidopsis thaliana
catagagaatatgggaacactcagcattctctctctaagaagcctaagtggttttgctactgcttaacggttgtcttgcgaggcagtgacgtgatggtatctcctaagctacagaacgagcgtaagccctgacaacctatatgttctacaggccagcgtaactatcaagagtgaagccgctcacatcgagtactgcgaccacaaccaccctcagctctgatgtggtggtgtctccgtagtt

SEQ ID NO: 146296 - DNA, 295 bp, Arabidopsis thaliana
aagaaaaatgggtcgagtctcatctattatctctttctctttgacatttttgatcctcttcaatggctagactggccaacagtggcccaacgagtgccagctcgatcaactcaatgcgctcgaaccatcccaaatcatcaagagcgagggtggtcgcatcgaggtctgtgaccaccattgcaccccagcttcgatgctcctgctttgcctttgagcgttttcgtattgagcctcaaggtcttttcttgcccactttcttgaacgccggcaaactcacgtttgttgttcacggtag

SEQ ID NO: 146297 - DNA, 514 bp, Arabidopsis thaliana
aattaactaacaacaaatggcgaacaagctcttcctcgtctgcgcagctctcgccctgtgtttcatcctcaccaacgcttccgtctatcgcacggttgtcgagttcgacgaagatgacgccagtaaccccataggcccaatacagaaatgtcagaaggagtttcagcaagaacagcacctaagagcttgccagagatggatgcgcaagcaaatgtggcaaggacgtggtggtggtccttccctcgacgatgagttcgatatggaagacgacatcgagaacccgcagagacgacagctactccagaagtgctgcagcgagcttcgccaagaagagccagtttgcgtttgccccaccttgagacaagctgccaaggccgttagattccagggacagcaacaccaaccagagcaagtcaggaaaatttaccaggcagctaagtacttgcctaacatttgcaaaatccagcaagttggtgtttgccccttccagatcccttcaatcccttcttactac

SEQ ID NO: 146298 - DNA, 349 bp, Arabidopsis thaliana
ctctctcgtcttctttctttcttcttaacactatagatcctttaccatttatccacggctcaacaaggtggggagggtcagtagtttccgaacgagtgccagctttaccagctcaaagcgcctaagccgttacacttactgaagagcgaggctgcccgcattaaggtgtggcaccatcacgcttctaaggtatcaagctcatgtgtttgctttaacgtctcttgatctagtgcaaagttatttacttgccctgtttctttaacaccgtcaagctctgcttctagtccttaaggtctaggttttattggaaaagttatctgtgtatgcgctgtaatattctatgacttat

SEQ ID NO: 146299 - DNA, 475 bp, Arabidopsis thaliana
acaaaacaaaacacacccaaatatgcataagcttttgttttctcttctctccgtcgtctcactctcatttctcctcttcttccatggcgccgaggcacgccagcgagaggcgccgtttccaaacgcctgccatttcagccaaatcaacagcctcgcgcccgctcaggcgacgaagttcgaagccggtcagatggaagtatgggaccacatgagccctgagctccgatgcgccggtgtaacggtggctcgcatcacccttcagcccaattccattttcttgcccgctttctttagcccacctgcccttgcttacgttgtccaaggagaaggagttatggggacgattgcttctggttgtcctgagacttttgcagaagttgaaggatcatcaggaagaggaggaggaggagacccgggtcgacgttttgaggacatgcaccagaagttggagaaatttcggcgaggggatgtgttt

SEQ ID NO: 146300 - DNA, 446 bp, Arabidopsis thaliana
accaaattcatcatctttctttcttcttcttcctcatcctctcaatcatatctcgctctctcacagagagggcgactttacgcacacgtaacctaaatcgaagatggtgagaaaatatagaaaagctaaaggaattgtagaagctggagtttcgtcaacgtatatgcagctacggagccggagaattgtttatgttagatcggaaaaatcaagctctgtctccgtcgtcggtgataatggagtttcatcgtcttgtagtgggagcaatgaatataagaagaaagtattaatacatctggaggagggagataaagatggtgacactgaaacgttgacgtatcgacggggtacgaagaggaagctttttgaaaatctgagagaggaggagaaagaagaattaagtaaatccatggagaattattcatcggaatttgaatcggcggtta

SEQ ID NO: 146301 - DNA, 362 bp, Arabidopsis thaliana
gacccacgcgtacgatcgcatcgaggtctgggaccaccatgcaccccagctccgttgctccggctttgcctttgagcgtttcgtcattgagcctcagggtcttttcttgcccactttcttgaacgccggcaaactcacgtttgttgttcacggaaggggtctaatgggaagagttattccgggatgcgccgagacgttcatggagtcaccggtatttggagaaggtcaaggtcagggtcagagtcaagggttccgtgacatgcaccagaaagtatagcacctactgtgcggtgacaccattgcaacaccatctggtgtagctcaatggttctacaacaatggaaatgagcctttcattcttg

SEQ ID NO: 146302 - DNA, 490 bp, Arabidopsis thaliana
  unsure (1)..(490): unsure at all n locations
ctctcggccattggaagtttggatcttaattttaacagattttttagaaaagatagattgagggaatttaaccaaatattggtcttatatatattgaagaagcacgatgaaagatgaatatagattcagtgaatatctatgaaaggtttcttgctatatatacgttcaaatcatttagtcaatctctaattatgtgctaaccgattctgtagccaatcaccatatattaaagtctttttgctaatgattgcatatacagtagaaactctataaattaataatgctgggaccatgaaattttattaatttatactgatattaatttatcgtataaattaataaatattagtttatagaaatatttacgtaaaatataatactaatttctttttaaaatgttttttaaatntagtttttcttaaggttntggtggtggatattcaaatatggtagattcttaattaattttgatttttaattattttcctac

SEQ ID NO: 146303 - DNA, 521 bp, Arabidopsis thaliana
ggaaacaacccacaagggcaggaatggctacaaggccgaaagcaacataagcaaaacaacatcttcaatggcttcgcacctgagatcttggctcaagccttcaagatcaatgtcgagacggctcagcagctccagaaccagcaagataaccgtggcaacatcgtcaaggtcaacggacctttcggcgtcattaggccacccttgagacgcggcgaaggcggccaacaaccacatgaaatagctaatggtttagaggagactttgtgcaccatgcgatgcactgaaaacctcgatgacccgtcggatgctgacgtgtacaagccatcactcggatacattagcacacttaacagctacaatcttcctatcctcagacttctccgccttagcgctcttcgtggctccatccgtaaaaacgctttggtgctaccgcaatggaacgtaaacgcaaacgcggcactctacgtgacaaacggaaaggctcatatacaaatggtgaacgacaacggagaaagagtggt

SEQ ID NO: 146304 - DNA, 429 bp, Arabidopsis thaliana
tacacacatagcaaaaaatggcaaacaagttgttcctcgtctgcgcagctctcgctctctgcttcctcctcaccaggcgctggcatctaccgcaccgtcgttgagttcgaagaagatgacgccactaaccccataggcccaaaaatgaggaaatgccgcaaggagtttcagaaagaacaacacctaagagcttgccagcaattgatgctccagctagcaaggcatggccgtagcgatgtgtttgatttcgaagacgacatggagaacccacagggacaacagcaggaacaacagctatttcagcagtgctgcaacgagcttcgccaggaagagccagattgtgtttgccccaccttgaaacatgctgccaaggccgttagactccagggacagcaccaaccaatgcatgtcaggaatatttaccagaca

SEQ ID NO: 146305 - DNA, 203 bp, Arabidopsis thaliana
  unsure (1)..(203): unsure at all n locations
agaaataacanaatggctcgaggctcttctcttctttctttcttcttaacacttttgatccttttccatggctacgcggctcaacagggtcagcagggtcagcagtttccgaacgagtgccagctcgaccagctcaatgcgctcgagccgtcacacgtactgaagagcgaggctggtcgcatcgaggtgtgggaccaccacgc

SEQ ID NO: 146306 - DNA, 358 bp, Arabidopsis thaliana
cttgaacttggaggatcaatggccgacgttcgcacacactcgcaccagcttcaagtgcaccctcaacgccagcatgaaggaggcatcaaagtcctttatcctcagagtggcccttcttccactcaggtgctagccgtgtttgtcggtgtaccgataggaggaacgctgctgactatagccggtttgacattagccggttcggttataggactaatgctagcattcccgttgtttctcatctttagtccggttattgtaccagcagcctttgtcatcggtctagctatgactggattcctggcttcaggggccataggtcttaccggactatcattcatgttgtgggtacttaactaca

SEQ ID NO: 146307 - DNA, 311 bp, Arabidopsis thaliana
aattgacgttcagttggctcagcagcttcagaaccaacatgtacagttaggaaacatcgttcgtgttaggggacggttccaggtcgtgaggccacctctaagacagccctacgagagcgaggagtggagacacccacgtagcccacagggcaacggccttgaggagactatctgcagcatgaggtcccactagaacattgacgaccctgctcgtgctgacgagtacaagcccagcctaggtcgcgtgaccagtgttaacagctataccttgcccatcttggtgtatgtcaggctcagtgccactcttggcg

SEQ ID NO: 146308 - DNA, 515 bp, Arabidopsis thaliana
gacaatctgaaggttatggattcattgagttcgtcagccactctgtagcagagcgggttttgcagacttacaatggtgctcccatgccgagcactgaacagacgtttaggctcaactgggctcaggctggggctggagagaaacgattccagactgaagggcctgaccataccattttcgtaggtgacttggcacctgaggtgactgactatatgctctcggacacattcaagaatgtgtatgggtctgtcaaaggggctaaagttgtgcttgacaggaccactggaaggtccaaggggtatgggtttgttaggtttgcggatgaaaatgagcagatgcgtgccatgactgaaatgaatggtcaatactgctcgacaaggcctatgcgtattggtccggctgccaataagaatgctcttccgatgcaaccagctatgtatcaaaacactcaaggagcaaatgctggagataatgatcctaataacacaacaatttttgttggaggtctggatgct

SEQ ID NO: 146309 - DNA, 472 bp, Arabidopsis thaliana
taagcattgggtttggtttggtttggtttggataccgttttgtagaaactacacctagaattttgaatggtttatgaaaaaacaggttttattcgtttttcccccttttcagattagtatggttacacctgcatgtttggatatggaataaaccatcagttcggttaaactgttggacatcccttttatatccaacagttatgaatcaatgttctttacaatgtgtgcaggattaagaacaaagatggtgcgagcagtccaaagacagtgaactgccgctcaagctgtctaagaatctgcacagctgctggttcaactgcagcaatgcattcagcaggtgttttcgtgatgccaattgtgtcttgtgatctacagtttcatgtgtagagagccattttcttctgttcaactcgttctttaatgcattctattttaaactatatcaattcatgtactttatctttttttatta

SEQ ID NO: 146310 - DNA, 466 bp, Arabidopsis thaliana
aaatcctcctcttgttccgccactgccgccgccgctacttttcggtggtgaattttctacacggtcagttcgatgctctttttatcgacaatcctacacaaatccataatcatggccgccactgcttcctacgaagcttctgaaggaccagtgatgggtctcatcaacaagcgtctccgtgctctccgtaagaaatacaaccgaatcactcaaatggaagaatcgatttctcaaggcaaaaccctaaacaaggagcaagaagaagtcctccgctctaaacctgccgtcgtcatcctaatcgacgagcttgaaaagatccgtgctcctctctccgccgctgtgacagaggaaatcagcctcgctactcagtttaaccgcgcttcattcgatcaaaccaccgcatttgagcaaaaagaagtcactgatattcccgcagaagttagcggcggcgatgatggcgcttaga

SEQ ID NO: 146311 - DNA, 176 bp, Arabidopsis thaliana
ggtttatgatcggtatcagaatcatataaaaagattatactttgtttatatctaaaactctagctatctgtatccaaggtaacatgatgtagtcatgtacagctaagacctaagggatactccaaaatatagtagagactctaaccacataaatagtcacatgaattacatgttct

SEQ ID NO: 146312 - DNA, 459 bp, Arabidopsis thaliana
ctaccaaaaccaactcgaccgcaaccctagagtgttccatttggcctgaaacaaccagcagggaggctttggcggttcacagcaacaacaagaacagaaaaacttgtggagcgggttcgacgcacaggtcatagctcaagcattgaaaattgacgttcagttggctcagcagcttcagaaccaacaagacagcagaggaaacatcgttcgtgttaagggacctttccaggtcgtgaggccacctctaagacagccctacgagagcgaggagtggagacacccacgtagcccacagggcaacggccttgaggagactatctgcagcatgaggtcccacgagaacattgacgaccctgctcgtgctgacgtgtacaagcccagcctaggtcgcgtgaccagcgtcaacagctataccttgcccatcttggagtatgtcaggctcagtgccactcgtggcgt

SEQ ID NO: 146313 - DNA, 444 bp, Arabidopsis thaliana
aaagaaaatggttaagctcagcaatctcctcgttgcaaccttcggggttctcctcgtccttaacggctgccttgcgaggcagtcacttggggttcctcctcagctacagaacgagtgtaacctcgacaacctagatgttctccaagccaccgaaactatcaagagtgaagccgcgcacatcgagtactgggaccacaaccaccctcagctccgatgtgttggagtatccgccgctcgttatgtaatcgaacaaggcggtctttacatgcccaccttcttcacttccccaaaaatttcctacgtcgtttaaggaacgggtatcatcggaagagtggaccctggatgtgccgagacctttatggactcacattcgatgcaaggacaacaacaaggccaaccatggcatggaccactggtgcaacaaggtcaaccaatggaaggaca

SEQ ID NO: 146314 - DNA, 442 bp, Arabidopsis thaliana
agggacaacaagggttccgtgacatgcaccagaaggtggaacatgtgagacgcggagacgtctttgccaacactccaggctctgcccactggatctacaactcaggagaacagccacttgtcatcatcgctcttctcgacatcgccaactaccaaaaccaactcgaccgcaaccctagagtgttccatttggccggaaacaaccagcaaggaggctttggcggttcacagcaacaacaagaacagaaaaacttgtggagcgggttcgacgcacaggtcatagctcaagcattgaaaattgacgttcagttggctcagcagcttcagaaccaacaagacagcagaggaaacattcgtcgtgttaagggacctttccaggtcgtgaggccacctctaagacagccctacgagagcgaggagtggagacacccacgtagcccaca

SEQ ID NO: 146315 - DNA, 299 bp, Arabidopsis thaliana
caaaaagaaaatggttaagctcagcaatctcctcgttgcaaccttcttgttcttctcgtccttaacggctgcctggcgaggcagtcacttggggttcctcctcagctacagaacgagtgtaacctcgacaacctagatgttcttcaagccaccgaaactatcaagagtgaagccggtcagatcgagtactgggaccacaaccaccctcagctccgatgtgatggtgtttccgttgctcgttatgtaattgaacaaggcggtctttacttgcccacctttcttacttccccaaaaatttt

SEQ ID NO: 146316 - DNA, 420 bp, Arabidopsis thaliana
tcgactcacgcgtccgaggaagaaaaatgggtcgagtctcatctattatctctttctctttgtactcttgatcctcttcaatggctacactgcccaacagtggcccaacgagtgccagctcgatcaactcaatgcgctcgaaccatcccaaatcatcaagagcgagggtggtcgcatcgaggtctgggaccaccatgcaccccagctccgttgctccggctttgcctttgagcgtttcgtcattgagcctcagggtcttttcttgcccactttcttgaacgccggcaaactcacgtttgttgttcacggaaggggtctaatgggaagagttattccgggatgcgccgagacgttcatggagtcaccggtatttggagaaggtcaaggtcagggtcagagtcaagggttccgtgacatgca

SEQ ID NO: 146317 - DNA, 483 bp, Arabidopsis thaliana
cctctccaccgttctttctcttccttctctctctggacttcaacttttggagaagtacaagacatttataaagtgctgctcatcacccaacactaaacacaattgtcaaaagggtgtggtggaaggagaatctacttctatctgaacatcgatcagtcatatcttttcaatcaaatcaaagccctcctctctctcttactccttttttgttttaaatcaagaaaaagactccatgtcgagcatgtccatgtcgtcctcctcatctccagcttttccaccggaccacttctcatctacggaccagctctgttacgtccattgcagcttctgcgacactgtccttgctgtgagtgttcctccgagtagtttgttcaagacggtgacggtcagatgcggtcactgttcgaaccttttgtcggtgaccgtgagcatgagagcttttttttcttcatccgtttccaacctttgccattcctttttacc

SEQ ID NO: 146318 - DNA, 208 bp, Arabidopsis thaliana
aaacaaaaagaaaatggttaagctcagcaatctcctcgttgcaaccttctgggttctcctcgtccttaacggctggcttgcgaggcagtcacttggggttcctcctcagctacagaacgagtgtaaccttgacaacctagatgttctacaagccactctaactattaagagtgaagctcttcatatctattacttttacctcaactac

SEQ ID NO: 146319 - DNA, 506 bp, Arabidopsis thaliana
acactccaggctctgcccactggatctacaactcaggagaacagccacttgtcatcatcgctcttctcgggtcgccaactaccaaaaccaactcgaccgcaaccctagagtgttccatttggccggaaacaaccagcagggaggctttggcggttcacagcaacaacaagaacagaaaaacttgtggagcgggttcgacgcacaggtcatagctcaagcattgaaaattgacgttcagttggctcagcagcttcagaaccaacaagacagcagaggaaacatcgttcgtgttaagggacctttccaggtcgtgaggccacctctaagacagtcctactagagcgaggagtggagacacccacgtagcccacagggcaacggccttgaggagactatctgcagcatgaggtcctacgagaacattgacgaccctgctcgtgctgtcgtgtacaagcccagcctaggtcgcgtgaccagcgttaacagctataccttgcccatcttgg

SEQ ID NO: 146320 - DNA, 111 bp, Arabidopsis thaliana
ttggcaccacaaccaccctcagttccgatgtgttggtgttttcgtttctcgatatgtaatagaacaaggcggtctttacttgcccaccttcttcactcccacaaaaatttc

SEQ ID NO: 146321 - DNA, 374 bp, Arabidopsis thaliana
ggttattgctcaagctttgaagatcgatcttcagacagcgtatcattttcagaaccaagatgacaaccgtggaaacattgtccgagtccaaggcccgttcggtgtcattaggccgtctttgaggggccagagacctcaggaggaggaagaagaagaagaaggacgacatggacgacacggtaatggcttataggagaccatctgcagcgccaggtgcaccgattacctcgatgacccgtctcgtgctgacgtgtacaagccacagttcggtttcatcagcactttcaacagttacgatctccccatccttcgcttcattcgtcttttaacccttcgtggatctattcgtcaaaacgcaatggtgctttctcagt

SEQ ID NO: 146322 - DNA, 465 bp, Arabidopsis thaliana
ggtgcttccacagtggaacgcaaacgcgaacgctattctttacgtgtcagacggggaagcccaaatccagatcgtaaacgacaatggtaacagagtgtttgacggacaagtctctcaaggacagctcatagccgtaccacaaggtttctcggtggtgaaacgcgcaacaagcaaccgattccagtgggttgagttcaaaacaaacgctaacgcgcaaatcaacactctggcgggacgaacctcagtcttgagaggtttaccacttgaagtcataaccaatgggttccaaatctcacccgaagaagcaaggagggtcaagttcaacacgctcgagaccactttgactcacagcagtggcccagctagctacggaaggccaagagtggctgcagcttaagagcttaaaaccgcggcttaacaatgaactcgtactgtaataggaagtaaatagtacgtattatttat

SEQ ID NO: 146323 - DNA, 481 bp, Arabidopsis thaliana
ctctctctctctctctctctctctttagccactaatctcactctgttttctctccctcgtttcttgctttcaatggagaaacagtacctcactttcatttctttttgtttctccatcaccatttgtgggttcctcatagtttcttggcttgcaagaagcataatccgtaatgggattagaacattaacatggagaaaggaaacgaagaggaagaaaaagaatcaagaagatgaaaacaaaatgtctctcctggatttgccggacttaaccttagactgcatattagagaagctctcaccatcagagctctgtgcaatgactagtgtttgctccgagctaagagataagtgtgtaagcgatcatctatgggagaagcatatggagacaaaatggggaagattgatgggtgatgcagcgattcaagagtggaaatctcacgttgctacgataatgagatgtcttacaagtagtagtagtagta

SEQ ID NO: 146324 - DNA, 474 bp, Arabidopsis thaliana
cgcgcccgggaaaagtgatccctggatgcgccgaaacattccaagactcatcagagttccaaccacgcttcgaaggtcaaggtcaaagcgagaggttccgtgacatgcaccagaaagtggagcacattaggagcggtgataccattgccacaacacccggtgtagcccagtggttctacaacgacggacagcaaccacttgtcatcgtcagcatcttcgatctagccagtcaccagaaccagcttgaccgcaacccaaggccattttacttagccggaaacaacccacaaggtcaagtatggctacaaggacgagagcaacagccacagaagaacatcttcaatggatttggacccgaggttattgctcaagctttgaagattgatctttagacagcgcaataacttcagaaccaagatgacaaccgtggaaacattgttcgagtcccaaggcccgttcggtgtaattaggccg

SEQ ID NO: 146325 - DNA, 343 bp, Arabidopsis thaliana
caaaaagaaaatggttaatctcatcaatctcactagatgcaacctggttgttctcctcgtccttaacggctgactggcgaggcagtcacttagtgttactcctcagctacagaacaagacgcaaccgtgacaacctaaatgttcttcaagtcaccagaactatcatgagtgaagccagtcagacagtgacatgggaccacggaccaccctcaggatcaaatagaatgaagaatacgaagcacagatatgttatcgtacatgggccggactaaacgttcaactgcataacttagaagctattaccatacgagctctaagcaacgactattatctgctgagagct

SEQ ID NO: 146326 - DNA, 455 bp, Arabidopsis thaliana
catacacacatagcaaaaaatggcaaacaagttgttcctcgtctgcgcagctctcgctctctgcttcctgggcaccaacgcttccatctaccgcaccgtcgttgagttcgaagaagatgacgccactaaccccataggcccaaaaatgaggaaatgccgcaaggagtttcagaaagaacaacacctaagagcttgccagcaattgatgctccagcaagcaaggcaaggccgtagcgatgagtttgatttcgaagacgacatggagaacccacagggacaacagcaggaacaacagctattccagcagtgctgcaacgagcttcgccaggaagagccagattgtgtttgccccaccttgaaacaagctgccaaggccgttagactccagggacagcaccaaccaatgcatgtcaggaaaatttaccagacagtcaagcacttgcccaacgtttgcg

SEQ ID NO: 146327 - DNA, 373 bp, Arabidopsis thaliana
aaaaattcgtcgggccccttaggaacagctaccccaatttcaaatttttattcgtttttgcctttactaacttatggtcagatctctttaattaaatattttcaacttgataacttaaaatatatttttcaaaaaattaactcttatttaatcgatgaaaacggaataattttaaatctcgacccatatagtaacgttgttttgaatccattcaaattgaattggtattttcttcatcaaaattatcatcataattattgtgaggaaacgtccacaataattagtcttggacaatttttttgtgaaaatgtatgtatagctaaaaaagaaccgcacctaaattcgggtcaagttttaattgtattaaggtttt

SEQ ID NO: 146328 - DNA, 453 bp, Arabidopsis thaliana
caagtagccaagggcgttgctggagatggaggcggagttacgtcgcctaagacggccacacgaaggtacaagcttctcaaagatgtcatgtgttagttccacctaaacgagaggtattagaagacttactataatcatactactctttcgagactgtgtgattaaattatgtataattagccactacggagagagcaaattaaaaaagaaaacgtcgttgtttgttttcatccttttttcctttttactttgtgtttatatatatgaaatgaatgtgtgtttggcgtgagcttgtgttttcttaatcaccatataagctattaataactgcaatttgcgtaaaagactcctttttctttaaaacctttcgtaaagatctttattaaacttaacatccacgtatatatactggttcctttaggttttcgtcgtaaataccattaataatgcgag

SEQ ID NO: 146329 - DNA, 426 bp, Arabidopsis thaliana
cacacatagcaaaaaatggcaaacaagttgttcctcgtctgcgcagctctcgctctctgcttcctcctgaccaacgcttccatctaccgcaccgtcgttgagttcgaagaagatgacgccactaaccccataggcccaaaaatgaggaaatgccgcaaggagtttcagaaagaacaacacctaagagcttgccagcaattgatgctccagcaagcaaggcaaggccgtagcgatgagtttgatttcgaagacgacatggagaacccacagggacaacagcaggaacaacagctattccagcagtgctgcaacgagcttcgccaggaagagccagattgtgtttgccccaccttgaaacaagctgccaaggccgttagactccagggacagcaccaaccaatgcaagtcaggaaaatttaccagaca

SEQ ID NO: 146330 - DNA, 482 bp, Arabidopsis thaliana
ctctctttctccctgtgaaaaaatggactcggtggctctctactgctccgctggtctcattgccggcgccgtctactggttcatatgcgtgctaggtccagcagaacgaaaaggcaaacgagcctctgatctctccggcggctcaatctccgcagaaaaagtcaaagacaactataaccaatactggtctttcttccgcaaaccaaaagagatcgaatcagccgagaaagtacctgacttcgtcgacacgttctacaatcttgtcactgatatctacgagtggggatggggacaatctttccatttctctcctcatgtccctggaaaatccgacaaagacgccacatgaattcacgaagaaatggccgtcgatctcatcaaagtgaaaccgggacaaaagaatcttgacgctggttgcggcgtgggtgggccgatgagagccatcgcgggccaatccaaggtccatgtactgtgatcactat

SEQ ID NO: 146331 - DNA, 400 bp, Arabidopsis thaliana
aaacaaaatgcaaaatattaagaaatctttatatgtttttttatctgtttatacattttatgccttttaaatttaatttgtaaattctactacgtctttttacaaaaaaaaaaatcacaaagattttttacatttaattatgttttactgtttaaattttttttatacgaaaacaatttcagaaaatttattcgtgcaattgtataattttgattactattttattgtgttattataaagtttacgttgtcatttctgttatgtctgtaatcaatttacattcattttgtacgcatcaatttactatgtgtaaatacatttttaccattttattttcattgtatgttgaataacatgtaaatattaataatcagactattctcaacataaatgtattaat

SEQ ID NO: 146332 - DNA, 499 bp, Arabidopsis thaliana
cgactcacgcgtccgaagaaaaatgggtcgagtctcatctattatctctttctctttgacactcttgatcctcttcaatggctacactgcccaacagtggcccaacgagtgccagctcgatcaactcaatgcgctcgaaccatcccaaatcatcaagagcgagggtggtcgcatcgaggtctgggaccaccatgcaccccagcttcgttgcttcggctttgcctttgagcgtttcgtcattgagcctcagggtcttttcttgcccactttcttgaacgccggcaaactcacgtttgttgttcacggaaggggtctaatgggaagagttattccgggatgcgccgagacgttcatggagtcaccggtatttggagaaggtcaaggtcagggtcagagtcaaagggttcgtgacatgcaccataaagtatagcatctacggtgcggtgacaccattgcaacaccatttggtgttgttcaaaggttttcaccaatggaaatg

SEQ ID NO: 146333 - DNA, 223 bp, Arabidopsis thaliana
caaaaagaaaatggttaagctcagcaatctcctcgttgcaactcttcttggttctcctcgtccttaaccgggtccttgcgaggcagtcacttggggttcctcctcagctacagaacgagtgtaacctctacaacctagatgttctccaatccaccgaaactatcaagagtgaagccggtcaaatcgagtactggtaccacaaccaccctcagctcctatgtgt

SEQ ID NO: 146334 - DNA, 368 bp, Arabidopsis thaliana
  unsure (1)..(368): unsure at all n locations
gttttctcaacatttcangaaatcagtttgatggttcagtgacaggtgtgttcaaggagactttagaagtggctgatctcagcaaaaaccggtttcaaggtcatatctcatctcaggtagactccaactggtttagtttggtttatcttgacttgtctgagaatgagctcagtggagttatcaagaatctgacactactaaagaagctcaagcacttaaatctagcttggaatagattcaacagaggaatgtttccgaggattgagatgctttctggtttagagtatcttaacttgtcaaacacaaatctttctggtcacatacctagagagatctcaaagctgagtgatttgagtacactcgatgtt

SEQ ID NO: 146335 - DNA, 426 bp, Arabidopsis thaliana
  unsure (1)..(426): unsure at all n locations
aagtcattcatttttggtgtctctgcttcagaagatacttgacgatctctcctactgaaaggagcttgctttcttcagtgtgacggttgagattggttgaaagatgggttatatgtgtgatttctgtggtgaacaaagatcaatggtgtattgtcgatctgatgcagcgtgtttgtgtctttcgtgtgaccgtaatgttcattctgctaatgctctatcgaaacgtcattcgcggactttggtatgtgagaggtgtaatgcacagccagcttctgtccggtgtagtgatgagagggtttctctatgtcaaaactgtgattggtcacgccatgcccgcccgcccccccccactactttanattattaaaggcaaaccattaacccccccccccccccgcccctccagtgccgaattattctcgatat

SEQ ID NO: 146336 - DNA, 344 bp, Arabidopsis thaliana
acggaagatagatgctgaatggtaagctcgatatatctaggttgcttcagttgatcgtcgatctagtttctagatcttttctttcttccgcgaaacgaaaatgagagagtgcatttcgatccacattggtcaggccggtatccaggtcggaaatgcttgctgggagctttactgtcttgaacatggcattcagcctgatggccagatgccgagtgacaagactgttggcggaggtgacgatgctttcaacaccttcttcagtgagaccggtgcagggaagcacgtcccacgtgctgtctttgttgatcttgagccaactgtgatcgatgaggtcaggactggta

SEQ ID NO: 146337 - DNA, 381 bp, Arabidopsis thaliana
gcagaggaaacatcgttcgtgttaagggacctttccaggtcgtgaggccacctctaagacagccctacgagagcgaggagtggagacacccacgtagcccacagggcaacggccttgaggagactatctgcagcatgaggtcccacgagaacattgacgaccctgctcgtgctgacgtgtacaagcccagcctaggtcgcgtgaccagcgtcaacagctataccttgcccatcttggagtatgtcaggctcagtgccactcgtggcgttctccagggtaatgcgatggtgctttctaaatacaacatgaacgctaacgagatcttgtactgcactggaggacaagggaggatccaagtggtcaacgacaacggacagaacg

SEQ ID NO: 146338 - DNA, 437 bp, Arabidopsis thaliana
cgaaatggtcgaagaactagacttaaccgatgatcaagatatctcaacgatagctaaaatgatcgacacagagatacattcacacatccccgattggaccccttctcgacttatcggtgatgattcagcggtacaaaaatgtttgtcttctccagagacgctccatttagatagatttccttcagggagaaaattctggtcctctcctaaagctggagctggagactcacgttcaccgtttgcgccacggtctaattctaagttgtcgtcagcacaaggaccgatcaatcaagaagttggggttatagtagagaaacttgagtctttgttgaggaaacagagagaggagattgaagagatgcagagagatcaagaacgtattgttactgagttcttaaaagagtttcctcctgagatttgtgaagaggctttggtga

SEQ ID NO: 146339 - DNA, 428 bp, Arabidopsis thaliana
aatttaacaaattcagaaacttgttttgcttttagactgaattcattaaaactttaattaaattgtaattatttgggggaggaatttacattcaagtttcgatcaactgatgaaattgcgaggcaaaaagctctaaattatgtctatcttcttccaggtacggtatcacaatctaatggttatgctgagccaaaataaactatttgttattgagaaaattttaaacaatcgtgtatatatatttttttgttaggagttagttctgcgacattttgtgaacgaagcaactaactaaccgtgaagggagaaagaatcgataaggctaaaataatgaggaagatagatcagatttttcaacctaaaaaattcgttcttttcgtgttttagtcccaaatactaggacatggcgtttatttctgactttacat

SEQ ID NO: 146340 - DNA, 424 bp, Arabidopsis thaliana
gaacctttacagatcagaggatccaatgtcgagattctcgctactaagcgctgaatttgatcaatctctgttctctttttccttcatttgattcccttttctgggtctctctaatttattggcgtcgttgtttccttatcctgaatccttatcttcaatcctctgttctgtttctcaaacctaaaaaagtttgaaactttcctgaaaaaatggcgactagaggaagcagatcggagaaagttaagagaattttccagcaattcgacgggaatcatgatggtgggcttaaccgtgaagagatggcggctcttgtcgtagctgttaaccctagggttaaattcagtgacgagcagatcaacgccattctcgatgaagtttttcgaacttacgctgaattcatcgatccaaacaagggtttgaccta

SEQ ID NO: 146341 - DNA, 400 bp, Arabidopsis thaliana
accgaagatagaagctgaatggtaagctcgatatatctaggttgctccagctgaactagaaggtcttcttgtatcacatcctgatatactagatgctgtcgttatcccgtgagtcatatattcagataaataccgagttgattccacgtccgaacacattaacatttgtgtatgttgtaggttccctgatgaagaagcaggtgaagttccaattgcgtttgttgttcgatcaccaaatagctcaataacagagcaagatattcaaaagttcatagccaaacaggttaataacttatgacccaagtcgtttgaatcaatcggaccgatatcatcttgttttctaaggctcaaaaccatttcatcaggtcgctccttacaaaagattacgacgagtgagctt

SEQ ID NO: 146342 - DNA, 422 bp, Arabidopsis thaliana
gcggtgataccattgccacaacaccctttgtagcccagtggttctacaacgacggacagcaaccacttgtcatcgtcagcatcttcgatctagccagtcaccagaaccagcttgaccgcaacccaaggccattttacttagccggaaacaacccacaaggtcaagtatggctacaaggacgagagcaacagccacagaagaacatcttcaatggatttggacccgaggttattgctcaagctttgaagattgatcttcagacagcgcagcaacttcagaaccaagatgacaaccgtggaaacattgtccgagtccaaggcccgttcggtgtcattaggccgcctttgaggggccagagaccttatgaggaggaagaagaagagaaggacgacacggacgacacggtaatggcttaaaggaga

SEQ ID NO: 146343 - DNA, 420 bp, Arabidopsis thaliana
agaaaaatgggtcgagtctcatctattatctctttctctttgacactcttgatcctcttcaatggctacactgcccaacagtggcccaacgagtgccagctcgatcaactcaatgcgctcgaaccatcccaaatcatcaagagcgagggtggtcgcatcgaggtctgggaccaccatgcaccccagctccgttgctccggctttgcctttgagcgtttcgtcattgagcctcagggtcttttcttgcccactttcttgaacgccggcaaactcacgtttgttgttcacggaaggggtctaatgggaagagttattccgggatgcgccgagacgttcatggagtcaccggtatttggagaaggtcaaggtcagggtcagagtcaagggtccgtgacatgcaccagaaagtagagcacctac

SEQ ID NO: 146344 - DNA, 343 bp, Arabidopsis thaliana
cgctgcgcagttccgggatcgccccacccgtccgcatttgcaaaaaactgctctctgaatttaagtgagttctcataaaatgagagggatggtgagttttgccgttcgggctctctatgctgctttactctcacagcagctctatgcttctgttgcttccgtaaggttagaggatgccaaatcatactaggtatctcctacctatggctcacatggaactcctccataacacacgctctcatttttataactgtggcagaccaccttactacccttctgcttcaacttcgtgtcacccttgacccacatgacatacctaaacttcttccactacatcacacac

SEQ ID NO: 146345 - DNA, 424 bp, Arabidopsis thaliana
gcgtctctctcccgcaaccttcgattttcgtttattcgcatccatcggagagagaaaacaatcaataagcgaccatgttggtgtaccaagatcttctcaccggtgatgagcttctgtctgactctttcccttacaaggagattgagaatggaatcctctgggaagtagaaggaaagtgggttactgtgggagctgtagatgttaacattggtgccaatccatctgctgaagaaggtggtgaggatgaaggtgttgatgactctgctcaaaaggttgttgacattgtcgacaccttcagacttcaggagcaaccaacttatgacaagaagggattcatcgcttacattaagaaatacattaagcttttgacacccaagctcagcgaagaagatcaagctgtcttcaagaagggtattgagggagc

SEQ ID NO: 146346 - DNA, 358 bp, Arabidopsis thaliana
agaaaaatgggtcgagtctcatctattatctctttctctttgacactcttgatcctcttcaatggctacactgcccaacagtggcccaacgagtgccagctcgatcaactcaatgcgctcgaaccatcccaaatcatcaagagcgagggtggtcgcatcgaggtctgggaccaccatgcaccccagctccgttgctccggctttgcctttgagcgtttcgtcattgagcctcagggtcttttcttgcccactttcttgaacgccggcaaactcacgtttgttgttcacggaaggggtctaatgggaagagttattccgggatgcgccgagacgttcatggagtcaccggtatttggag

SEQ ID NO: 146347 - DNA, 361 bp, Arabidopsis thaliana
atccgatcactgccctcgaataccaccttctcgttctgctcaacaccatctcgattaggccggaaagtcactggagttagttttgccaccacttctgatcagcaaaagatggataaaaagcctgaaaatccaaacgagaaaaccggtgacgtgatgtcgcattcttatggagaagggtacgcaacaaggtctgacgaagaagggtttggaggaatctatggaggaaatcaaacacttcagaaggaaaacgagatccatgagaatcaccctgattacgacaaaacgcaaggtagcgaatcgaaggagaaggagaaagcaaggaaccagacacaatccccactgctaaagaaaaattgatgat

SEQ ID NO: 146348 - DNA, 429 bp, Arabidopsis thaliana
acaaaaagaaaatggttaagctcagcattctcctcgttgcaaccttcggggttctcctcgtccttaacggctgccttgcgaggcagtcacttggggttcctcctcagctacagaacgagtgtaacctcgacaacctagatgttctccaagccaccgaaactatcaagagtgaagccggtcagatcgagtactgggaccacaaccaccctcagctccgatgtgttggtgtttccgttgctcgttatgtaattgaacaaggcggtctttacttgcccaccttcttcacttccccaaaaatttcctacgtcgttcaaggaacgggtatcagcggaagagtggtccctggatgtgccgagaccttcatggactcgcagccgatgcaaggacaacaacaaggccaaccatggcaagggcgacagggacaacaag

SEQ ID NO: 146349 - DNA, 430 bp, Arabidopsis thaliana
ccacccgtccggaaaagggaaagaaaaatctaacctttgatcctttctccctctatatatacttaattaattctccactcataatagtttcatcatctctttcggtctatgaaaaacattggaaaaaccctaattcctagtgttgcgaatcacttttcattgcagctttgaacttcagtctgtgaatttccaacagcaatgacaactccagcaaaaaaagagactgatgtgggatttcaagagactgcagaaagatcctcctgtgggaataagtggagctccacaagataacaatatcatgcattggaatgctctcatctttggacctgaggaccactcatgggatggaggtcctttcaagttgacttttcacttcaccgaggattatccgaacaaacccccgatggttcggtttgtttcacggatgttt

SEQ ID NO: 146350 - DNA, 400 bp, Arabidopsis thaliana
caagctcttcctcgtctgcgcagctctcgccctgtgtttcatcctcaccaacgcttccgtctatcgcacggttgtcgagttcgacgaagatgacgccagtaaccccataggcccaatacagaaatgtcagaaggagtttcagcaagaacagcacctaagagcttgccagagatggatgcgcaagcaaatgtggcaaggacgtggtggtggtccttccctcgacgatgagttcgatatggaagacgacatcgagaacccgcagagacgacagctactccagaagtgctgcagcgagcttcgccaagaagagccagtttgcgtttgccccaccttgagacaagctgccaaggccgttagattccagggacagcaacaccaaccagagcaagtcaggaaaatt

SEQ ID NO: 146351 - DNA, 325 bp, Arabidopsis thaliana
aaagaaaatggttaagctcagcaatctcctcgttgcaaccttcggggttctcctcgtccttaacggctgccttgcgaggcagtcacttggggttcctcctcagctacagaacgagtgtaacctcgacaacctagatgttctccaagccaccgaaactatcaagagtgaagccggtcagatcgagtactgggaccacaaccaccctcagctccgatgtgttggtgtttccgttgctcgttatgtaattgaacaaggcggtctttacttgcccaccttcttcacttccccaaaaatttcctacgtcgttcaaggaacgggtatcagc

SEQ ID NO: 146352 - DNA, 313 bp, Arabidopsis thaliana
tcaagactggtcaatttgaagaatgtttcaatcaaccgtagatgtgccgccaaagggtgggtttagcttcgatctgtgtaagagaaatgatatgcttacacaaaagggtcttaaagctccgtcttttttgaagactggaactaccattgttggtttgattttcaaggatggtgtgatactaggggcggatacccgagcaactgaggggccaattgttgctgataagaactgtgagaagattcactatatggcaccaaacatatattgctgtggtgcaggaactgcggctgatacttgaacagtcactgatatg

SEQ ID NO: 146353 - DNA, 379 bp, Arabidopsis thaliana
agccgtccgaccttccccccatggcaaaaaagggcaaccagtttgttcttggtttgcgcagttttggttttttgtttcctcttaaccaacgtttccatttaccgaaccgtcgttgagttcgaagaagatgccgccactaaccccataggcccaaaaatgaggaaatgccgcaaggagtttcagaaagaacaacacctaagagcttgccagcaattgatgctccagcaagcaaggcaaggccgtagcgatgagtttgatttcgaagacgacatggtgaacccacagggacaacagcaggaacaacagctattccagcagtgctgcaacgagctttttcaaggagagccagattgtgtttggcccacctttgaaacaagct

SEQ ID NO: 146354 - DNA, 338 bp, Arabidopsis thaliana
attttggaaaaaaagcaaggggaaaaacctcaaattgaaagttctcaatatgagcggagtcctttaaattccaaaggcattaatgtggtgaatggaacatcagttaataatggggggaaaccgttgggaattaagataggttcaagtgagatgctaatagaaggtgaagatgttcgtgtctcctccactgatgcaaatgaacgggctgttaatatctcttcacttctaggaatatctacagatacagttagtaaggataaaagttttgaaaagctttcctcgatctcgactcctactgaaacttaggggtatcctagaaaatgtgtgcaagctacaat

SEQ ID NO: 146355 - DNA, 428 bp, Arabidopsis thaliana
ggaacgggtatcagcggaagagtggtccctggatgtgccgagaccttcatggactcgcagccgatgcaaggacaacaacaaggccaaccatggcaaggacgacagggacaacaaggccaaccatgggaaggacagggacaacagggacaacaaggaagacaaggccaaccatgggaaggacagggacaacagggacaacaaggacgacagggacaacaaggccaaccatgggaaggacagggacagcagggacaacaagggttccgtgacatgcaccagaaggtggaacatgtgagacgcggagacgtctttgccaacactccaggctctgcccactggatctacaactcaggagaacagccacttgtcatcatcgctcttttcgacatcggcaactaccaaaaccaactcgaccgcaaccctagagt

SEQ ID NO: 146356 - DNA, 431 bp, Arabidopsis thaliana
tttctccgcttctgtagcaatgtcaatgtggtaccctctaccttcttcttcttcctccactcactaaccaaatccagaatcaacaataatagaaaaagccctaactttctccgtcgatggctttcttcttctactttttcttcctcttgactctttcttctccttcttcttctgcttcctcttcaaactccttgacttacatcgtccacgtcgaccacgaagctaaaccctcaatcttccccactcattttcactggtacacttcctctcttgcctcactcacctcttctcctccctccattatccacacatacgacaccgttttccatggcttctccgctagactcacttcacaagacgctagtcaactcttagaccatcctcatgtcatctctgttatcccggaacaagttcgtcacttgcacaccact

SEQ ID NO: 146357 - DNA, 423 bp, Arabidopsis thaliana
  unsure (1)..(423): unsure at all n locations
gccaagtcacttaccgcaggatggtttcttcttcttcttcttcgcttccttcctttgaaattgaattcagatattttttttaaaattttttgagaggaagaaatggagatttcgcagagagtgaaagctagattagccgttctcaccgcgcatttggcggtgtctgataccgtcggattggaacaggtgttgccggcgatcgcgccatggtgtacatcggctcacattaccgctgcacctcatggatcactcaaaggaaacttgacgatcgtcgatgagcgtacggngaagaaatatcaggtccctgtctcagagcatggtaccgttaaagccgttgatctcaagaagataacgacggggaaggatgataaggggcttgaagtgtacgatcctggttacttgaacacggctccggttcgatct

SEQ ID NO: 146358 - DNA, 437 bp, Arabidopsis thaliana
gcagcatgaggtcccacgagaacattgacgaccctgctcgtgctgacgtgtacaagcccagcctaggtcgcatgaccagcgtcaacagctataccttgcccatcttggagtatgtcaggctcagtgccactcgtggcgttctccagggtaatgcgatggtgcttcctaaatacaacatgaacgctaacgagatcttgtactgcactggaggacaaggaaggatccaagtggtcaacgacaacggacagaacgtgttggaccaacaggtgcagaagggacagctcgtggtcatcccacaagggttcgcatacgttgtccagtcccacggaaacaagttcgagtggatctctttcaaaactaatgaaaacgcaatgatcagcactttggcgggtagaacctcgctcttgagggcattgccattggaggtcatatcaaat

SEQ ID NO: 146359 - DNA, 351 bp, Arabidopsis thaliana
gtttctctctttcgcatcgtcactctctttcgattccttgatcttcaaatctgggtttccaattttcggattcaattgtttcttcgattgattcgtcgatttcttcttagtctctgatctgatctatgaatatcgcaatgtctccgacgagctcagtttttccataaatttgatctcaatttcttctgtgtgatccataatccagccgagaccctaagcttgattcgatctaactctggcttatcaattctgatcttgtcgtttcgcaatggtggtctgcaaatgcaaaaaggctaccaggctgtattgctttgttcacaaggccccttgttgcggcgaatgcatttgttt

SEQ ID NO: 146360 - DNA, 363 bp, Arabidopsis thaliana
gttcgtgttaagggacctttccaggtcgtgaggccacctctaagacagccctacgagagcgaggagtggagacacccacgtagcccacagggcaacggccttgaggagactatctgcagcatgaggtcccacgagaacattgacgaccctgctcgtgctgacgtgtacaagcccagcctaggtcgcgtgaccagcgtcaacagctataccttgcccatcttggagtatgtcaggctcagtgccactcgtggcgttctccagggtaatgcgatggtgcttcctaaatacaacatgaacgctaacgagatcttgtactgcactggaggacaaggaaggatccaagtggtcaacgacaaccgacag

SEQ ID NO: 146361 - DNA, 372 bp, Arabidopsis thaliana
  unsure (1)..(372): unsure at all n locations
aacgcttcatttctatataaacatctcttatcttgttgaaaatctctcgcagcttttgaaaaacatgacctttctaaaaatgaaaagcctttctttcttcttcaccatcctcctctctctctcgaccctcttcaccatctccaacgcacggaagtttaatgtcggaggcagtggcgcgtgggttacaaacccacctgaaaactacgaatcttggtctggcaaaaaccgtttccttgttcacgacactctctattntagctacgctaagggagctgactcggtgctagaggtgaacaaggctgattacgacgcttgtaatacaaagaattcgatccaaagagtggacgatggagaatctgagatctctcttga

SEQ ID NO: 146362 - DNA, 416 bp, Arabidopsis thaliana
ggaaagtgaagaaatctctcttgcaagtaccttataactttttctttatattatataaaaaatacttggacgaaaacaaatcgttgattctgaagattgttgagtctcaaaactctggaaagcttagcgaatgcgccgagaatcaagcaaggcttcaacgcaacctaatgtacctagctgcaatagcagattctcagcctcagccaccaagtgtgcatagccagtatggatctgctggtggtgggatgattcagggagaaggagggtcacactatttgcagcagcaacaagcgactcaacagcaacagatgactcagcagtctctaatggcggctcgatcttcaatgttgtatgctcagcaacagcagcagcagcagcagccttacgcgacgcttcagcatcagcaattgcaccat

SEQ ID NO: 146363 - DNA, 426 bp, Arabidopsis thaliana
agagtttccgcacgaatcacgaatctctctctctttcacacacttcacactttcaatatacactctcattatgactaccgaagagaaagagatcctcgccgccaaattggaagaacagaagatcgatctcgataagcccgaagttgaggacgatgatgataacgaagacgatgactctgatgacgatgataaggatgatgacgaggctgatggactagatggagaggcaggaggtaagtcaaaacaaagcagaagtgagaagaagagtcgcaaagccatgctcaagcttggcatgaaacccatcactggtgttagccgagtcaccgtcaaaaagagcaagaatatcttgtttgtcatatcaaagcctgatgtgttcaagagtccagcatcagacacatatgtgatctttggagaggcgaagatcga

SEQ ID NO: 146364 - DNA, 430 bp, Arabidopsis thaliana
cttcttcttctactaacatcaatttctctcgagaaaaactgaatcttcgctgaaaaaatgtcgggtcgtggaaagggaggaaaaggtttgggtaaaggaggagccaagcgtcacaggaaggttctgagagacaacatccaaggaatcaccaagcctgcgatccgaagattggctcgtagaggtggagtcaagcgtatcagtggtttgatttacgaagagactcgtggcgttctcaagatctttctcgagaacgtgattcgtgatgctgtcacttacaccgagcacgctaggaggaaaactgtgaccgccatggatgttgtctacgctctcaagaggcaaggaaggactctttacggattcggtggttaattagagtttttcagatccgcgtttgtgttttctgggtttctcacttaagcgtctgcgtttt

SEQ ID NO: 146365 - DNA, 427 bp, Arabidopsis thaliana
cgctaccatggctaagtcttgctatttcagaccagctcttcttcttctgttagttcttttggttcatgccgagtcacgcggtcggttcgagccaaagattcttatgccgacagaggaagctaacccggctgaccaagacgaagatggtgtcggtacaagatgggcggttctcgtcgctggttcttctggatatggaaactacagacaccaggctgacgtgtgtcacgcatatcaaatactaagaaaaggaggtttaaaggaagagaacatagtcgttttgatgtatgatgatatcgcaaaccacccacttaatcctcgtccgggtactctcaataaccattctgacggtgacgatgtttacgccggagtccctaaagactatactggttgtagtgttacggctgcaaacttctacgctgtacctcta

SEQ ID NO: 146366 - DNA, 399 bp, Arabidopsis thaliana
gtgagaaggagaagaaagaagcaatggagaagatagagcacacgacgatatctaccaatggtattaacatgcatgtggcttcgattggttcaggtccagtgatcctattcgtccatggctttcccgatctctggtactcatggcgtcaccagcttgtctctttcgctgccttaggttaccgcgcaatcgctccagatcttcgaggatacggcgattccgatgcgccgccgtctcgtgaatcttacaccatccttcatatcgtcggagacctcgtcggattactggattcgctcggtgttgatcgggttttcctcgtcggtcacgattggggagcaattgttgcgtgtgtggcttgtatgatcaggcctgatcgagtcaacgcgttggtcaacactagcg

SEQ ID NO: 146367 - DNA, 430 bp, Arabidopsis thaliana
gagacacccacgtagcccacagggcaacggccttgaggagactatctgcagcatgaggtcccacgagaacattgacgaccctgctcgtgctgacgtgtacaagcccagcctaggtcgcgtgaccagcgtcaacagctataccttgcccatcttggagtatgtcaggctcagtgccactcgtggcgttctccagggtaatgcgatggtgcttcctaaatacaacatgaacgctaacgagatcttgtactgcactggaggacaaggaaggatccaagtggtcaacgacaacggacagaacgtgttggaccaacaggtgcagaagggacagctcgtggtcatcccacaagggttcgcatacgttgtccagtcccacggaaacaagttcgagtggatctctttcaaaactaatgaaaacgcaatgatcagcact

SEQ ID NO: 146368 - DNA, 398 bp, Arabidopsis thaliana
  unsure (1)..(398): unsure at all n locations
ctcctcgttgcaaccttcgttgttctcctcgtccttaacggctgccttgcgaggcagtcacttggngttcctcctcagctacagaacgagtgtaacctcgacaacctagatgttctccaagccaccgaaactatcaagagtgaagccggtcagatcgagtactgggaccacaaccaccctcagctccgatgtgttggtgtttccgttgctcgttatgtaattgaacaaggcggtctttacttgcccacctttttcacttccccaaaaatttcctacgtcgttcaaggaacgggtatcagccggagagtggtccctggatgtgccgagacctttatggactcgcagccgatgcaaggacaacaacatggccaaccatggcaaggacgacagggacaaca

SEQ ID NO: 146369 - DNA, 398 bp, Arabidopsis thaliana
atttttctccactccaaaattagaatgtaaagaaaaaaacatcaatcatgacaacaacaacaacgaagaagccgcacgttctggtgataccgtttccacaatccggtcacatggttccacatcttgacctcacgcatcagattcttctccgtggagccaccgtcactgtcctcgtcacacccaaaaactcttcctatctcgatgctctccgttctcttcactccccggaacacttcaaaaccctaatccttccttttccttttcacccttgtataccttccggtgtcgaatcttttcagcaactttcctctcgaagctatagttcacatgtttgatgctctttttcgtcttcacgacccttttcgttgacttttttagccgttaaccaccgtctgatt

SEQ ID NO: 146370 - DNA, 431 bp, Arabidopsis thaliana
gtgagagtgagcttgagcttggtctatggctgagtcttggcggtggaacggcggccaagattggtaaatcaggtggtggtggcgcgtggggagagcgtggaaggcttttgacggctaaggattttccttctgttggttctaaacgtgctgctgattctgcttctcatgctggttcatctcctcctcgttcaagcagtcaagttgttggatggcctcctatagggtcacacaggatgaacagtttggttaataaccaagctacaaagtcagcaagagaagaagaagaagctggtaagaagaaagtgaaagatgatgaacctaaagatgtgacaaagaaagtgaatgggaaagtacaagttggatttattaaggtgaacatggatggagttgctataggaagaaaagtggatttgaatgctcattcttcttac

SEQ ID NO: 146371 - DNA, 432 bp, Arabidopsis thaliana
gcttctgctttctttgtgactcagactttgcgtgctttatcacgagatggaaggacggtgatagcatcgatccaccaaccgagcagtgaggtttttgagttgtttgatcggttgtatctgctttctggaggcaaaactgtttactttggtcaagcttcagatgcatatgagttctttgcacaagctgggtttccatgtcctgcgttaaggaacccttctgatcatttcctgagatgcataaactcagactttgacaaagttagagccactttgaaaggttctatgaagctaaggtttgaagcaagcgatgatccgttggaaaagattaccacagccgaagctattagactattggttgactattaccacacttctgattactactacacagcaaaagctaaggttgaggagatatcccaatttaaagggact

SEQ ID NO: 146372 - DNA, 426 bp, Arabidopsis thaliana
ggacgaccgagctatgatggaagctgtaggagtaacgagcttctccgaacttcttatgttctctgacggcgttctcagctcctcttccgaccaccaacctgagggtaatgtcggcgatggtggagaagacagtttaggttttgtattctccggcaaaactggctcaagaatgctctgttttagtggaggctatcaaaacgacgacgagtcactcttcctagaaccttctgttccaacctccggagtctctgatcttgacccttcatgcattaagattgattgcaggaactcaaacgacgcgtgtacggtcgataaatctactaaatcatcaaccaagaagagaaccggaacgggtaatgggcaagagtcggatcaaaatcgaaaaccgggcaagaaagggaaacgaaatcaagagaaatcatcagt

SEQ ID NO: 146373 - DNA, 433 bp, Arabidopsis thaliana
gtcacaaccaaaaaaaagaaaacacataaacaaagattataatggcttcctcaaccatggctttgtcctcccctgccgtcgccggaaaggctgtgaagcctgccgcatcagatgtcctcggaagcggccgtgtgaccatgaggaagactgtcgccaagccaaagggtccatcaggcagcccatggtacggatctgaccgagtcaagtacttgggtccattctccggcgagcccccgagctaccttaccggtgagttccccggtgactacggatgggacaccgctggtctatccgccgacccagagaccttcgccaggaaccgtgagctagaagttatccacagcagatgggccatgctcggagccctaggctgcgttttccctgagctattggctaggaacggagtgaaagttcgagaagcggtttggttcaa

SEQ ID NO: 146374 - DNA, 328 bp, Arabidopsis thaliana
ttctggctttggggtaaggaggaaaatcctatccttaaagctcctgatttcggtttgtccgccttcatcgaagaaggaaaagtttaccgggatatagttgggagtgcttactacgttgctccagaagtattaaggcgaagttacggaaaagaaatcgacatttggagtgcaggtgtcattttatacatcctactcagcggtgtacctcctttttgggccgaaaatgagaaaggaatattcgatgaggtcataaaaggcgaaattgattttgtaagtgagccatggccttctatatcttgaagcgcgaaagatcttgttaggaagatgc

SEQ ID NO: 146375 - DNA, 342 bp, Arabidopsis thaliana
accagcgtcaacagctataccttgcctatcttgtagtatgtcaggctcagtgccagtcgtggcgttctccagggggagtgcgatggtgcttcctaaatacaacatgaacgctaacgagatcttgtactgcactggaggacaaggaaggatccaagtggtcaacgacaacggacagaacgtgttggaccaacaggtgcagaagggacagctcgtggtcatcccacaagggttcgcatacgttgtccagtcccacggaaacaagttcgagtggatctctttcaaaactaatgaaaacgcagtgatcagcactttggcggttagaacctctctcttgagggcatt

SEQ ID NO: 146376 - DNA, 432 bp, Arabidopsis thaliana
gaagaagaaagaagaagagacgagtttgatatttaaaggaatcatttttgacggatttaggatctaagtaaaccctagattgaccgaatatgagtactcaagcgacgggtccttcttcaacatcagggaggagaagcaattctactgtacggcgaggaccaccaccttctaagaaaccagtacaatcagagaatggaagtgttaatgggaacacctcaaaacccaattcacctcctcctcaacctcaatctcaagctccttctaatggagagagaacagtgaagaagcttaggttatcgaaagctcttactattcctgaaggaactactgttttcgatgcttgtcgaagaatggctgctaggcgtgttgatgcttgtttgttgactgattcaagtgcgcttctttccgggattgttactgataaagatgtag

SEQ ID NO: 146377 - DNA, 433 bp, Arabidopsis thaliana
tagaaagcatgaagcttgatataacatcgttggagcaagcactctttgacgctatgaaaatccaagaagaaagcatccaagaaaaagatcaattaaaaggaataatcgaagagtcccagtttcagtctcaaagggcaaaagagaatgtcaagtacatcgaaaagcaaaacgaagacctgagggagaaatttactgcctctgaaaagagtatcaaagatttctttcaaagtactaaagaacggttagaaagtgaagatgaacagcctctaaatgcaatgtgcttcttcgctgaactgagccatgtgcttccagtgtctaatgaagttcgcaattgttttgatgctatcatgaagaaactagaactttctcagaatgtgaatttgattgataaagtggagggtatggggaaacagatacatcagcacgaagatgt

SEQ ID NO: 146378 - DNA, 349 bp, Arabidopsis thaliana
ggcgaacaagctcttcctcgtctgcgcagctctcgccctgtgtttcatcgtcaccgacgcttccgtctatcgcacgggtgtcgagttcgacgaagatgacgccagtaaccccataggcccaatacagaaatgtcagaaggagtttcagcaagaacagcacctaagagcttgccagagatggatgcgcaagcaaatgtggcaaggacgtggtggtggtccttccctcgacgatgagttcgatatggaagacgacatcgagaacccgcagagacgacagctactccagaagtgctgcagcgagcttcgccaagaagagccagtttgcgtttgccccacccttgagacaagc

SEQ ID NO: 146379 - DNA, 319 bp, Arabidopsis thaliana
cactcgtctgggaggaaagcttcctaagggtgtgttgcttgtcggtcctcctgggacaggaaaaactatgcttgctagagctattgctggagaagctggagtgcctttcttctcctgcagtggtagtgagtttgaagagatgtttgttggagttggagccagaagagtgagagatctttttagtgctgcaaagaagtgctccccgtgtattatatttatcgatgaaatagatgctattggaggaagtcgcaatcccaaggaccagcaatacatgaagattacattgaaccagatgctcgttgagttggatgggtttaaa

SEQ ID NO: 146380 - DNA, 388 bp, Arabidopsis thaliana
agagggagtttggtcctccttctttctggttccttggctttgctttggttgcgtgatctcctctctcatcaatcttcttcatcatcattctcatcatcattagcttcttgatttttttttccttctttttttcgtttcaagaaactaaacaaagtttctatttatggttttctgattcttcttctatagatctattatttgattctccttcgatcattgtcaacgttttcttcttttgtaatcatcacagtttttttgagaatttgttcatttttttttctcatatattgattcgagttcttttcttcttgaatcttggtcttcatagatctagtttttggtttttactctctagatctatagatctgttggattcacttctttaatc

SEQ ID NO: 146381 - DNA, 426 bp, Arabidopsis thaliana
attctcttctctctcgatatcatctaaatctctctcgatctcaatttcgcaaaatggctgacaagaagatcagaatcggaatcaacggtttcggaagaatcggtcgtttggttgctagagttgttcttcagagggatgatgttgagctcgtcgctgttaacgatcccttcatcaccaccgagtacatgacatacatgtttaagtatgacagtgttcacggtcagtggaagcaccatgagcttaaggtgaaggatgacaaaactcttctcttcggtgagaagccagtcactgttttcggcatcaggaaccctgaggacatcccatggggtgaggctggagctgactttgttgttgagtctactggtgtcttcactgacaaagacaaggctgctgctcacttgaagggtggtgctaaaaaggttgtca

SEQ ID NO: 146382 - DNA, 431 bp, Arabidopsis thaliana
ggttcatgatgagagagtctaggcatgtgatcaaatcagaaggtggagagatgagagttgtgttatcacgaagaggaaggatcattgagaagccaatgcacattgggtttctaacaatggaacctaagaccctctttgtccctcagtatcttgactcaagccttctcatctttattcgtcaaggtgaagcaacccttggagtgatatgcaaagacgaattcggagagaggaaactgaaagcaggagacatctactggattccggctggttctgtcttttatttacataacacaggcctaggtcaacgccttcatgtcatttgcagcattgatccaacgcagagtctcggcttcgaaacctttcaacctttctatataggtggagggccttcgtctgttctagctggatttgatcctcacactttaacttca

SEQ ID NO: 146383 - DNA, 432 bp, Arabidopsis thaliana
gaaaaaaaaaagacttgggaaacgagcagagtcagtgagagaacaacactagtcacaagggacaaagagagaggaagaagatgatatccatagctcaattggtctcaacccttccgtagtttagctctttcttcaatctctcatcttttcttcattacatttcgatctctctgttcttaaaacatttcggaccaaaagaggaaagctgcagccacagttgcagagtttatcttcaaaggacccaaaagagagtgttttagaactctaatctcaagcaatgcagactccaaaacctaggccgggatcgttggaggtgcctcagaagaaatctcctgcatcaactcctaaaactgctcggaagctcaagacttcagaatccgaccctgtctcgtctcctaacacgaaaatcaggacaccgaaaactcaaagccc

SEQ ID NO: 146384 - DNA, 375 bp, Arabidopsis thaliana
acgttttcaagagacgaatcgttcttagatttttttagaacctactcctgctccttcgacgcgtcatcaccttcaagatcacactacctcgcacaacaataggagttctgaggtgtgcgaagataagattggcaaaccacttgacctagatcctgggctagacaggctcgtgcacatttatcaggttgctttgggagagagtaagaacaacgtaaccgtaccaatccagctttacgtgactgttggatcggagtagcttctcattggaacgctatcttatgagaagtttcctcaggtgtctacggagattgactttggaaggtactttgcgctgtattatacttggcagaatgggagcgtctttttttttggttt

SEQ ID NO: 146385 - DNA, 271 bp, Arabidopsis thaliana
ctcgttgcaaccttcggggttctccttgtccttatacggctgccttgcgaggcagtcacttggggttcctcctcagctacagagcgagtgtaacctcgacaacctagatgttctccaagccaccgaaactatcaagagtgaagccggtcagatcgagtactgggaccacaaccacgaatgctcttgtttttgtggagtgttatcaaaacgacgtactgtatattttcactagaacctttttgtttgctacctttggtagtacttttattca

SEQ ID NO: 146386 - DNA, 425 bp, Arabidopsis thaliana
taaagaggaagaaaaatgggtcgagtttcatctattatctctttctctttgacactcttgatcctcttcaatggctacactgcccaacagtggcccaacgagtgccagctcgatcaactcaatgcgctcgaaccatcccaaatcatcaagagcgagggtggtcgcatcgaggtctgggaccaccatgcaccccagctccgttgctccggctttgcctttgagcgtttcgtcattgagcctcagggtcttttcttgcccactttcttgaacgccggcaaactcacgtttgttgttcacggaaggggtctaatgggaagagttattccgggatgcgccgagacgttcatggagtcaccggtatttggagaaggtcaaggtcagggtcagagtcaagggttccgtgacatgcaccagaaagtagagca

SEQ ID NO: 146387 - DNA, 389 bp, Arabidopsis thaliana
attaaagaggaggataaatgggtcgtttttaatttataatctctttctctttgacggtcttgatccttttcaatgggtacactgcccaacagtggcccaacgagtgccagctcgatcaactcaatgcgctcgaaccatcccaaatcatcaagagcgagggtggtcgcatcgaggtctgggaccaccatgcaccccagctccgttgctccggctttgcctttgagcgtttcgtcattgagcctcagggtcttttcttgcccactttcttgaacgccggcaaactcacgtttgttgttcacggaaggggtctaatgggaagagttattccgggatgcgccgagacgttcatggagtcaccggtatttggagaaggtcaaggtcagggtcag

SEQ ID NO: 146388 - DNA, 425 bp, Arabidopsis thaliana
aaacaatggagcaaacttttattatgatcaagcctgacggcgtccagagaggactcatcggtgaagtcatctgcaggtttgagaagaagggtttcactttgaaaggtctgaagttgatcagtgtagagagatcttttgctgagaagcactacgaagacttatcttcaaagtctttcttcagtggactcgttgactacattgtatccggccctgttgttgctatgatctgggaaggaaagaatgttgtcttgaccggaagaaagatcattggagctaccaacccagcagcttctgagcctggaactatccgtggggactttgctattgacattggcaggaacgtgatccatggtagtgactctgtcgagagtgcaagaaaggagattgcttttgggttccctgatggacctgtcaactggcagagc

SEQ ID NO: 146389 - DNA, 418 bp, Arabidopsis thaliana
atcttcttcttcttcctctctccttctccggccactttcctcactctctggtctccctatatcagcgctttttagctgatcctctctccggcatttctctctctctcttttttttagccatggagaaatttgcgcctgtcgctgctctgttactgcttcttctctgttttccggtagctttctccggtcatgattatggtcaagctctttccaagagtcttctcttcttcgaagctcagagatctggtgttcttcctcgtaaccagagagtcacttggcgctctcactccggtctcaccgatggcaaatcaagcggcgtgaatctggtcggaggttactacgacgccggagacaatgtgaaatttggattaccgatggcttttacggtgacgatgatggcgtggagtgtgattgagta

SEQ ID NO: 146390 - DNA, 384 bp, Arabidopsis thaliana
gaaatataagaaataacaaaatggctcgagtctcttctcttctttctttcttcttgacacttttgatccttttccatggctacgcggctcaacagggtcagcagggtcagcagtttccgaacgagtgccagctcgaccagctcaatgcgctcgagccgtcacacgtactgaagagcgaggctggtcgcatcgaggtgtgggaccaccacgctcctcagctccgttgctcaggtgtctcctttgcacgttacatcatcgagtctaagggtctctacttgccctctttctttaacaccgcgaagctctctttcgtggctaagggacgaggtcttatgggaaaagtgatccctggatgcgccgaaacattccaagactcatcagagt

SEQ ID NO: 146391 - DNA, 397 bp, Arabidopsis thaliana
cccactacgattcatcagagggggactggctcaggggagctttggctaccgtagacagagactacggaatcttgaacaaggtgttccacaacattacagacacacacgtggctcatcacctgttctcgacaatgccgcattataacgcaatggaagctacaaaggcgataaagccaattctgggagactattaccagttcgatggaacaccgtggtatgtagcgatgtatagggaggcaaaggagtgtatctatgtagaaccggacagggaaggtgacaagaaaggtgtgtactggtacaacaataagttatgaggatgatggtgaagaaattgtcgacctttctcttgcctggttgtcttttgttaaagaagctatgcttcgttttaataatctta

SEQ ID NO: 146392 - DNA, 424 bp, Arabidopsis thaliana
cgtttcgtcattgagcctcagggtcttttcttgcccactttcttgaacgccggcaaactcacgtttgttgttcacggaaggggtctaatgggaagagttattccgggatgcgccgagacgttcatggagtcaccggtatttggagaaggtcaaggtcagggtcagagtcaagggttccgtgacatgcaccagaaagtagagcacctacggtgcggtgacaccattgcaacaccatctggtgtagctcaatggttctacaacaatggaaatgagcctctcattcttgttgcagccgcggatctcgccagcaaccagaaccagcttgaccgcaaccttagaccatttttgatagccggaaacaacccacaagggcaggaatggctacaaggccgaaagcaacagaagcaaaacaacatcttcaatg

SEQ ID NO: 146393 - DNA, 374 bp, Arabidopsis thaliana
gtcttgtctagctacttttgctctcgtagtgttagtaacacaaggaaggagtttttagtttgtgtttggggtcctctgcttctacaaactctgttcctaattggtttcatcattggccgccgtttaaatggggaccaaaatttccatattctccacctaaaccgccgccaatcgagaaatatcctccaccggtgcagtatccaccaccgatcaagaagtatccaccgccaccatacgagcatccaccggtgaagtatccaccaccgatcaagacttacccttatccgccggtgaagtatcctccaccagaacagtatccaccgccgattaagaagtattctccaccagaacagtatccaccgccgattaaaaag

SEQ ID NO: 146394 - DNA, 420 bp, Arabidopsis thaliana
ttttctctctataaattaaaaacattacttactctttctctcttccacttaactcatatcaaccttcgccggaaataatggcggtcccgcgatttctttctctcctcgccgtcgtcactctctctcttttcctcaccaccactgatgcttcctctcgctctctatccactccacctaaaacgaacgtactcgacgtcgtttcatctctccagcaaacacaaactatcctctcactcgacccgactcgttcctcactcaccaccaccaaacccgaatccctatccgacccggttttcttcaattcatcttcaccactatctctagagcttcactctcgagacactttcgtcgcgtcacagcacaaagactacaaaagcttaacactcagtcgactcgagcgcgactcatcccgagtcgccg

SEQ ID NO: 146395 - DNA, 442 bp, Arabidopsis thaliana
ccattgcaacaccatctggtgtagctcaatggttctacaacaatggaaatgagcctctcattcttgttgcagccgcggatctcgccagcaaccagaaccagcttgaccgcaaccttagaccatttttgatagccggaaacaacccacaagggcaggaatggctacaaggccgaaagcaacagaagcaaaacaacatcttcaatggcttcgcacctgagatcttggctcaagccttcaagatcaatgtcgagacggctcagcagctccagaaccagcaagataaccgtggcaacatcgtcaaggtcaacggacctttcggcgtcattaggccacccttgagacgcggcgaaggcggccaacaaccacatgaaatagctaatggtttagaggagactttgtgcaccatgcgatgcactgaaaaccttgatgacccgtcggatgc

SEQ ID NO: 146396 - DNA, 361 bp, Arabidopsis thaliana
cacatagcaaaaaatggcaaacaagttgttccttgtctgcgcagctctcgctctctgcttcctcctcaccaacgcttccatctaccgcaccgtcgttgagttcgaagaagatgacgccactaaccccataggcccaaaaatgaggaaatgccgcaaggagtttcagaaagaacaacacctaagagcttgccagcaattgatgctccagcaagcaaggcaaggccgtagcgatgagtttgatttcgaagacgacatggagaacccacagggacaacagcaggaacaacagctattccagcagtgctgcaacgagctttgccaggaagagccagattgtgtttgccccaccttgaaacaagct

SEQ ID NO: 146397 - DNA, 403 bp, Arabidopsis thaliana
ccaaaactgtggaagcctagaaatatacatacccagttgagatgtgatatgattgcatcgcgatgcctcaggacacgatctaataaatcgttatatcgattagttggatcatagtctcttaccataaaaatggctgcatgcgcagcagcaccaactatgagaaatccaccaatccacatgtgatgtgtgaacaatgacagttgtgtagcatagtcagtagctagatatggataagggggcatggaatacatatggtgagctacaataatggttaaagagcctaacatagctaggttaagagataattgagcatgccatgatgttgttagaatttcatataggcctttatggccttggcctgtaaatggacctttatgagcctctaaaaatatttttataccat

SEQ ID NO: 146398 - DNA, 424 bp, Arabidopsis thaliana
cttcgccacatcacagattttgttttcttccgtttctcgaaattcagtttcatcatcatcctctctggatttataaattttcaatctacctttcaatcgccgggggataatcgaaacccgatctgtgtaaaaaaaatgatgaaatcgacggcgagatttgcgtctgattgtcgttataatgatcacaaaagcataaaagcgtgacgtttccgcgtcttcgcgtatctcggaaactttaatccgtatctaaagagctaaatttgaagcgatctttctctttttcttttaatattgttttttttccttgaagcttgcctactttcgaagttattccatgttttatcttcaattctagatcatagtttttggaaatttaagttttagttttttttgttaagctcgatctggatttgccgatttgaat

SEQ ID NO: 146399 - DNA, 365 bp, Arabidopsis thaliana
ggactctcagccgatgcatttacaacaacaaggccaaccatggcaagtgcgacagggacaacaaggccgggcatgggaaggacagggacaacagggacaacaaggaagacaaggccaaccatgggaaggacagggacaacagggacaacaaggactacagggacaacaaggccaaccatgggaaggacagggacagcagggacaacaagggttccgtgacatgcaccagaaggtggaacatgtgagacgcggagacgtctttgccaacactccaggctctgcccactggatctacaactcaagagaacagccacttgtcatcatcgctcttttcgacatcgtcaactaccaaaaccaactcgacc

SEQ ID NO: 146400 - DNA, 427 bp, Arabidopsis thaliana
  unsure (1)..(427): unsure at all n locations
ccggaacgaccgcaggcgacccacgcatccgaaacaaaaagaaaatggttatagctcattaatctcctcgttgcaaccttgggggttctcctcgtccttaacggctgcgttgcgaggcantcacttggggttcctcctcagctacagaacgagtgtaacctcgacaacctagatgttctccaagccaccgaaactatcaagagtgaagccggtcagatcgagtactgggaccacaaccaccctcagctccgatgtgttggtgtttccgttgctcgttatgtaattgaacaaggcggtctttacttgcccaccttcttcacttccccaaaaatttcctacgtcgttcaaggaacgggtatcagcggaagagtggtccctggatgtgccgagaccttcatggactcgcagccgatgcaaggacaacaac

SEQ ID NO: 146401 - DNA, 343 bp, Arabidopsis thaliana
gcgaaaacaaaactcatttaggaaacttcatttggttaccaaaaaagacagtacatatgatgacaagcaaaacattgaggaaggacaacaaagttagcaagtctcacttcttaaatacagcccaaacttttttttgcagttctggatccgggggttgagcgtgcataagaagctttgcatatgtggaaagaagaataggaatggtgggagtcctgagaaaaaaaacgaaaaaaagctattaagacatacccaaagacgagaagagcgcaattcaacatttgtgttgtccttacgatattttaggaagcttctcatgtaagatgctaaagagttcacttgcact

SEQ ID NO: 146402 - DNA, 431 bp, Arabidopsis thaliana
taagaaataacaaaatggctcgagtcttttctcttctttctttcttcttaacactggtgatccttttccatggctgcgcggcgcaacagggtcagcagggtcagcagtttccgaacgagtgccagctcgaccagctcaatgcgctcgagccgtcacacgtactgaagagcgaggctggtcgcatcgaggtgtgggaccaccacgctcctcagctccgttgctcaggtgtctcctttgcacgttacatcatcgagtctaagggtctctacttgccctctttctttaacaccgcgaagctctctttcgtggctaaaggacgaggtcttatgggaaaagtgatccctggatgcgccgaaacattccaagactcatcagagttccaaccacgcttcgaaggtcaaggtcaaagccaggagttccgtgacatgcac

SEQ ID NO: 146403 - DNA, 440 bp, Arabidopsis thaliana
ggcccaagccgtccgaaaaagaaaatggttaagctcagcaatttcctctttgcaaccttcggggttctcctcgtccttaacggctgccttgcgaggcagtcacttggggttcctcctcagctacagaacgagtgtaacctcgacaacctagatgttctccaagccaccgaaactatcaagagtgaagccggtcagatcgagtactgggaccacaaccaccctcagctccgatgtgttggtgtttccgttgctcgttatgtaattgaacaaggcggtctttacttgcccaccttcttcacttccacaaaaatttcctacgtcgttcaaggaacgggtatcagcggaagagtggtccctggatgtgccgagacctttatggactcgcagccgatgcaaggacaacaacaaggccaaccatggcaaggacgacagggacaaca

SEQ ID NO: 146404 - DNA, 436 bp, Arabidopsis thaliana
cccacgcgtccgaagaaaacatacacatatagcaaaacttggctaacaagctcttcctcgtctgcgcagcgtctcgccctctgcttcctggtcaccaacacttccatctaccgcaccgttgtcgaattcgaagaagatgacgccagcaaccccgtaggtccaagacagagatgccagaaggagtttcagcaatcacaacacctaagagcttgccagagatggatgagcaagcaaatgaggcaaggacgtggtggtggtccttccctcgacgatgagttcgatttcgagggcccccagcagggataccagctactccagcagtgctgcaacgagcttcgccaggaagagccagtttgcgtttgccccaccttgaaacaagctgccagggcagttagcctccagggacagcacggaccattccaatccaggaaaattt

SEQ ID NO: 146405 - DNA, 391 bp, Arabidopsis thaliana
  unsure (1)..(391): unsure at all n locations
ccggaacgaccgcggcgacccacacattcgatacagactcatactcttttttctttcttctaaacacttttgatccttgtccatgggtacacggctcagcagggtgagcanggtcagcagtttccgaacgagtgccagctcgaccagctcaatgcgctcgagccgtcacacgtactgaagagcgaggctggtcgcatcgaggtgtgggaccaccacgctcctcagctccgttgctcaggtgtctcctttgcacgttacatcatcgagtctaagggtctctacttgccctctttctttaacaccgcgaagctctctttcgtggctaagggacgaggtcttatgggaaaagtgatccctggatgcgccgaaacattccaagactcatcagagt

SEQ ID NO: 146406 - DNA, 416 bp, Arabidopsis thaliana
  unsure (1)..(416): unsure at all n locations
gcgaaaacaaaactcatttacgaaacttcatttggttaccaaaccaaacagtacatgtgataacattcaggctaccgcttctgccatantgtcctctagaaagccatcgattcttgctgatggaacttatgctacccaaagcgcagcctctgaaaccacattcttctcacctacagttgttcaaggatcactgacttctggaaatttgagagcactgctactaactggtgattttttcctcggagcaattgttgcttgcacgttgaccaaacttgttcttaggttagaagaggttcagtcttctaaaactgtattaaataagacagttacacatgcttttgtgaccatgggggctatgtagcaacttgggcaatcttctgtttcttcacaccctatttatattgattcgtatgaaa

SEQ ID NO: 146407 - DNA, 466 bp, Arabidopsis thaliana
  unsure (1)..(466): unsure at all n locations
cacgccgtccnnngcgttattcnntaaatctnnccggtcatcaatgtgccanntgttctcgcnnatcgtctcgcgaccgaagtgagtcgcacccttccgtgatttccgaacgannttctccactctnnatctcgtccctcccgnnatttcactcnnccgtgccnnatcgttattaccnnngagatctgnntggtgaagccaatcgaccggcnatattaatcgatccctcccgcgaggattggttctcgacgacctcagtatcnagtatgatccatacanctggagaagattctttcatgccggataatgaaggatgcgattttaatcattggttaattacaatgaatttccctaaagataatcttccatctagagaagaaatgatttcgatttttgagcaaacttgcgccaaaggacttgctattagtttggaagaagctaagaagaaaatttatgcaatttgcac

SEQ ID NO: 146408 - DNA, 477 bp, Arabidopsis thaliana
attttacttagccggaaacaacccacaaggtcaagtatggctacaaggacgagagcaacagccacagaagaacatcttcaatggatttggacccgaggttattgctcaagctttgaagattgatcttcagacagcgcagcaacttcagaaccaagatgacaaccgtggaaacattgtccgagtccaaggcccgttcggtgtcattaggccgcctttgaggggccagagacctcaggaggaggaagaagaagaagaaggacgacacggacgacacggtaatggcttagaggagaccatctgcagcgccaggtgcaccgataacctcgatgatccgtctcgtgctgacgtgtacaagccacagctcggttacatcagcactctcaacagttacgatctccccatccttcgcttcatccgtctctcagccctccgtggatctatcccgcaaaacgccatggtgcttccacagtggaacgc

SEQ ID NO: 146409 - DNA, 527 bp, Arabidopsis thaliana
cggacaaacacaatctaatcccaaaaatcaaaagatgaatgccacaaagtttgttgtgcttctcgtgattggcgttttgtgtgccattgtcaccgcaaggcaggtcaaagatttgtccacggagaccaaattaggggcctctcttccaaaaactactaccaaaggcattggagctcagctttctgcaactggcacaacttacagcaccagcagtgtcgttagctatgctaatggttttaacaatcccaaaggtccaggggccaatgcattcgaaagtgccaacacatttaccagcggacaagtcactgccaagggtcgcaaggcaagagtttcttctacaagtgcttctgccgctgaaggcgatgctgcagctgcagtgactcgcaaagctgctgctgcacgtgcaaagggtaaggtagcttccgcatcaagggtgaagggttcctctgagaagaagaagaaggaccgcataggaaaaaaggattgagcgtgaggtcatctcatattctcatgccatgcgtatcctc

SEQ ID NO: 146410 - DNA, 499 bp, Arabidopsis thaliana
agaaaatggttaagctcagcaatctcctcgttgcaaccttcggggttctccttgtccttaacggctgccttgcgaggcaggcacttggggttcctcctcagctacagaacgagtgtaacctcgacaacctagatgttctccaagccaccgaaactatcaagagtgaagccggtcagatcgagtactgggaccacaaccaccctcagctccgatgtgttggtgtttccgttgctcgttatgtaattgaacaaggcggtctttacttgcccaccttcttcacttccccaaaaatttcctacgtcgttcaaggaacgggtatcagcggaagagtggtccctggatgtgccgagaccttcatggactcgcagccgatgcaaggacaacaacaaggccaaccatggcaaggacgacagggacaacaaggccaaccatgggaaggacagggacaacagggacaacaaggaagacaaggccaaccatggggaggacagggacaaca

SEQ ID NO: 146411 - DNA, 544 bp, Arabidopsis thaliana
  unsure (1)..(544): unsure at all n locations
caaaaagaaaatggttaagctcagcaatctcctcgttgcaaccttcggggttctcctcgtccttaacggctgccttgcgaggcagtcacttggggttcctcctcagctacagaacgagtgtaacctcgacaacctagatgttctccaagccaccgaaactatcaagagtgaagccggtcagatcgagtactgggaccacaaccaccctcagctccgatgtgttggtgtttccgttgctcgttatgtaattgaacaaggcggtctttacttgcccaccttcttcacttccccaaaaatttcctacgtcgttcaaggaacgggtatcagcggaagagtggtccctggatgtgccgagaccttcatggactcgcagccgatgcaaggacaacaacaaggccaaccatggcaaggacgacagggacaacaaggccaaccatgggatggacagggacaacagggacaacatggaagacaaggccaacctatggaaggacagggacaacatggacaacanggacgacagggacaacaaggccaccttggg

SEQ ID NO: 146412 - DNA, 244 bp, Arabidopsis thaliana
  unsure (1)..(244): unsure at all n locations
caaaaagaaaatggttaagctcagcaatctcctcgttgcaaccttcggggttctcctcgtccttaacggctgccttgcgaggcagtcacttggggttcctcctcagctacagaacgagtgtaacctcgacaacctagatgttctccaagccaccgaaactatcaagagtgaagccggtcagatcgagtactgngaccacaaccaccctcagctccgatgtgttggtgtttccgttgctcgttat

SEQ ID NO: 146413 - DNA, 429 bp, Arabidopsis thaliana
caaaaagaaaatggttaagctcagcaatctcctcgttgcaaccttcgtgggttctcctcgtccttaacggctgccttgcgaggcagtcacttggggttcctcctcagctacagaacgagtgtaacctcgacaacctagatgttctccaagccaccgaaactatcaagagtgaagccggtcagatcgagtactgggaccacaaccaccctcagctccgatgtgttggtgtttccgttgctcgttatgtaattgaacaaggcggtctttacttgcccaccttcttcacttccccaaaaatattctacgtcgttcaaagaacgggtatcacctgaagagtggtccctggatgtgccgagaccttcatggactcgcagccgatgcatggacaacaacaaggccaaccatggctaggacgacagggacaacaag

SEQ ID NO: 146414 - DNA, 472 bp, Arabidopsis thaliana
cacaaacgagtaagaatacaaatacaaatagcaaaaaaatggcaaacaagctcttcctcgtctgcgcaactttcgccctctgcttcctcctcaccaacgcttccatctaccgcactgttgtcgagttcgacgaagatgacgccagcaaccccatgggcccaagacagaaatgtcagaaggagtttcagcaatcacagcacctaagagcttgccagaaattgatgcgcatgcaaatgaggcaaggccgtggtggtggtccctccctcgacgatgagttcgatttggaagacgacatcgagaacccacaaggcccccagcagggacaccagatcctccagcagtgctgcagcgagcttcgccaggaagagccagtttgtgtttgccccaccttgagacaagctgccagggccgttagcctccagggacaacacggaccattccaatccaggaaaatttacaagacagctaagta

SEQ ID NO: 146415 - DNA, 483 bp, Arabidopsis thaliana
ggaagaaaaatgggtcgagtctcatctattatctctttctctttgacactcttgatcctcttcaatggctacactgcccaacagtggcccaacgagtgccagctcgatcaactcaatgcgctcgaaccatcccaaatcatcaagagcgagggtggtcgcatcgaggtctgggaccaccatgcaccccagctccgttgctccggctttgcctttgagcgtttcgtcattgagcctcagggtcttttcttgcccactttcttgaacgccggcaaactcacgtttgttgttcacggaaggggtctaatgggaagagttattccgggatgcgccgagacgttcatggagtcaccggtatttggagaaggtcaaggtcagggtcagagtcaagggttccgtgacatgcaccagaaagtagagcacctacggtgcggtgacaccattgcaacaccatctggtgtagctcaatggttctacaacaatgga

SEQ ID NO: 146416 - DNA, 508 bp, Arabidopsis thaliana
  unsure (1)..(508): unsure at all n locations
gttcataagcctcgtcccattttctttgagactttgactatcacccaaatacaaatcttcatgcagtcgtacagccgtctgatgcagttcaaggtcaaagatctgatgatcgacaagcggcggctggtcgaagttcctgataatgccactctaggggacgccttgaacactatggtaaaccacggctaaataattgttatttttttggttggagtcaaccgttttaagtatcaagaattactaacaagactattcttggtatcaaaccggtggcaaaccgagttagagctgtaccggtggctgccaaaccaggccaatggctgggagccgggggatcaatgatagtagagttggacaaacagagcggaagtgcaagaaaacagtacataggaatggtgaccatgctcgacgttgtggctcacatcgncggcgatgacggcgagagtgggcttgataagaaaatggctgcccctgtctcttctatcattggtcattgccctgagggtct

SEQ ID NO: 146417 - DNA, 452 bp, Arabidopsis thaliana
  unsure (1)..(452): unsure at all n locations
nngaaacatacacaaatagcaaaacatggctaacaagctcttcctcgtttgcgtaactctcgccctctgcttcctgctcaccaacgcttgcatctaccgtaccgatgtgggattcgaagaagatgactccagcaaccccgtacgtgcaagacagagatgccagaaggagtttcagcaatcacaacacctaagagcttgccagagatggatgagcaagcaaatgaggcatggacgtggtggtggtgctttcctcgacgatgagttcgatttcgagggcccgcagcagggataccagctactccagcagtgcttgaacgagcttttgcaggaagagccagattgcgtttgccccaccttgaaacaagctgtcagggcagttagccttcagggacagcacggaccattccaatacaggaaaatttaccagtcagctaagtacttgcctaacattt

SEQ ID NO: 146418 - DNA, 266 bp, Arabidopsis thaliana
aacaaagcaacatgaaaaaatggcaataaccaacaaattaatcatattacttcttctacttatctccatagctgccgtgcactgcttatccttacgtgtggagatcgacgagttcgagccaccacagcacggagaacaagaaggtccccgtcgccgtcctggtggtggctctggccagggatgggaggaagagtcgacgaatcatccataccatttaaggaagcggagtttaagcgatgggttccagccaagggaaggttttggaa

SEQ ID NO: 146419 - DNA, 499 bp, Arabidopsis thaliana
caagagtgaagccggtcagatcgagtactgggaccacaaccaccctcagctcctatgtgttggtgtttccgttgctcgttatgtaattgaacaaggcggtctttacttgcccaccttcttcacttccccaaaaatttcctacgtcgttcaaggaacgggtatcagcggaagagtggtccctggatgtgccgagaccttcatggactcgcagccgatgcaaggacaacaacaaggccaaccatggcaaggacgacagggacaacaaggccaaccatgggaaggacagggacaacagggacaacaaggaagacaaggccaaccatgggaaggacagggacaacagggacaacaaggacgacagggacaacaaggccaaccatgggaaggacagggacagcagggacaacaagggttccgtgacatgcaccaagaggtggaacatgtgagacgcggagacgtctttgccaacacttcaggctctgcccactggatctacaac

SEQ ID NO: 146420 - DNA, 493 bp, Arabidopsis thaliana
caagaaccctagaattcgcctcctctttccaaaattcccaatttttgttatgacgggatagaaaaattcccaatgtccgctttatctttcattctcgattagaattcttcaaccaaaggtcactctctctccgttccattgcttctggatttcgtttttaagggttttacatttttcctgccttcttttacccatcagaggaagtttcaagccattttgttaatcagctctctcataagctaagatgtcgtcatcgccttttccagtcttggacaaccgaccaattgataagtggaaggttacggaattgaaagaagagcttaaaagacggagactaacaacaagaggcttgaaggaggaattggttaggcgtcttgatgaagcacttcgtgctgagcaagaagagtctgaaaggatcaatagtgctactgttgctgctgctgaaaaagccaatcaagagcctcagatgtttcctgttactgtaggtgatcgt

SEQ ID NO: 146421 - DNA, 543 bp, Arabidopsis thaliana
ggccaacaaccacatgaaatagctaatggtttagaggagactttgtgcaccatgcgatgcactgaaaacctcgatgacccgtcggatgctgacgtgtacaagccatcactcggatacattagcacacttaacagctacaatcttcctatcctcagacttctccgccttagcgctcttcgtggctccatccgtaaaaacgctatggtgctaccgcaatggaacgtaaacgcaaacgcggcactctacgtgacaaacggaaaggctcatatacaaatggtgaacgacaacggagaaagagtgttcgaccaagagatctccagcggacagttactagtcgtgccacaaggcttttcggtcatgaaacatgccataggcgaacagttcgagtggatcgaattcaagacaaacgaaaacgcacaggtcaacacactcgcgggccgtacctcagtcatgagaggtttgccgcttgaggttataaccaatgggtaccagatctctcccgaagagcttaacgagtaaagttagcacgattgagaccacact

SEQ ID NO: 146422 - DNA, 67 bp, Arabidopsis thaliana
aagtaagaagataaaaatggctcgagtctcttctcttctttctttctccttaccacttttgaccctt

SEQ ID NO: 146423 - DNA, 480 bp, Arabidopsis thaliana
caacaaacaaaaagaaaatggttaagctcagcaatctcctcgttgcaaccttcggggttctcctcgtccttaacggctgccttgcgaggcagtcacttggggttcctcctcagctacagaacgagtgtaacctcgacaacctagatgttctccaagccaccgaaactatcaagagtgaagccggtcagatcgagtactgggaccacaaccaccctcagctccgatgtgttggtgtttccgttgctcgttatgtaattgaacaaggcggtctttacttgcccaccttcttcacttccccaaaaatttcctacgtcgttcaaggaacgggtatcagcggaagagtggtccctggatgtgccgagaccttcatggactcgcaaccgatgcaaggacaacaacaaggccaaccatggcaaggacgacagggacaacaaggtccaaccatgggaggaccagggccacaaggacaacaaggaagac

SEQ ID NO: 146424 - DNA, 507 bp, Arabidopsis thaliana
ctcgccaaaaaccttgaaacctttaaaaaatcgaaactatggctaagctcattctcgttttcgcaactcttgccctcttcatcctcctagccaacgcatccatctaccgcacagtggtggagttcgaggaagatgatgacgtgagcaacccacaacaaggtaagtgccagagggagtttatgaagcatcagcaactaagaggttgcaagcaatggatccgcaagagagctcaacaaggaagaatcggatacgaagctgatgactttgagctcactcttgatgtcgatcttgaggacgatgagaacccaatggggcctcaacaacagtcatctcttaaaatgtgttgtaatgaattaaggcaagtggacaagatgtgtgtgtgtcctacactgaaaaaggcggctcaacaagtcagattccagggaatgcatggacagcaacaggtgcaacatgtgtttcagactgctaagaacttgcctaacgtttgcaaaatccctaccgttggat

SEQ ID NO: 146425 - DNA, 451 bp, Arabidopsis thaliana
atatgcataagcttttgttttctcttctctccgtcgtctcactctcatttctcctcttcttccatggcgccgaggcacgccagcgagaggcgccgtttccaaacgcctgccatttcagccaaatcaacagcctcgcgcccgctcaggcgacgaagttcgaagccggtcagatggaagtatgggaccacatgagccctgagctccgatgcgccggtgtaacggtggctcgcatcacccttcagcccaattccattttcttgcccgctttctttagcccacctgcccttgcttacgttgtccaaggagaaggagttatggggacgattgcttctggttgtcctgagacttttgcagaagttgaaggatcatcaggaagaggaggaggaggagacccgggtcgacgttttgaggacatgcaccagaagttggagaattttcggcgaggggatgt

SEQ ID NO: 146426 - DNA, 501 bp, Arabidopsis thaliana
cgattctcttcgtctcaacatttagggtttcagagatcggctgattttcacatccacaagtatggcgactcaaatcagcaagaagagaaagtttgtagcggatggtgtattctacgctgaattgaatgaggttctcacaagagagctagcagaggatggttactctggtgttgaggttagggttactccaatgaggactgagattatcatcagagctactcgtactcagaatgttcttggtgagaaggggaggagaattagggaattgacatctcttgtccagaagagattcaagtttccagttgacagtgttgagctctatgctgagaaggttaacaacagaggtctctgtgccattgctcaggctgagtctctacgttacaagcttctcggtggtcttgctgttcgcagggcctgttatggtgttttgagatttgttatggagagtggagctaagggatgtgaggtcatcgtgagtggaaagctccgtgctgcacgtgc

SEQ ID NO: 146427 - DNA, 380 bp, Arabidopsis thaliana
  unsure (1)..(380): unsure at all n locations
gnggaacgaactatggccgagagatggaggaacacggctctactcgtcatcgacatgcagaacgatttcatagaggaaggtgctgtgacgcaagtgaaaggaggaaaatctatagttcccaatgttattagagtcgtcgaactcgcgaggcagcgtggtattctcgtaatttgggttgttcgagaacatgatcctcaaggaagagatgttgaattattcaggcgccataactacagttctgagaaagttgggccagttgttaaaggcaccgtaggagcagaattggttgatggattgatgatcaaagaagaagatgactataagattgtgaaaactcggttcagtgctttttttagtaccaatcttcattccttcttgct

SEQ ID NO: 146428 - DNA, 434 bp, Arabidopsis thaliana
aaaacatacacacatagcaaaaaatggcaaacaagttgttcctcgtctgcgcagctctcgctctctgcttcctcctcaccaacgcttccatctaccgcaccgtcgttgagttcgaagaagatgacgccactaaccccataggcccaaaaatgaggaaatgccgcaaggagtttcagaaagaacaacacctaagagcttgccagcaattgatgctccagcaagcaaggcaaggccgtagcgatgagtttgatttcgaagacgacatggagaacccacagggacaacagcaggaacaacagctattccagcagtgctgcaacgagcttcgccaggaagagccagattgtgtttgccccaccttgaaacaagctgccaagggccgtagactccagggacagcaccaaccaatgcaagtcagggaaaattaccagaca

SEQ ID NO: 146429 - DNA, 511 bp, Arabidopsis thaliana
taaagaggaagaaaaatgggtcgagtctcatctattatctctttctctttgacactcttgatcctcttcaatggctacactgcccaacagtggcccaacgagtgccagctcgatcaactcaatgcgctcgaaccatcccaaatcatcaagagcgagggtggtcgcatcgaggtctgggaccaccatgcaccccagctccgttgctccggctttgcctttgagcgtttcgtcattgagcctcagggtcttttcttgcccactttcttgaacgccggcaaactcacgtttgttgttcacggaaggggtctaatgggaagagttattccgggatgcgccgagacgttcatggagtcaccggtatttggagaaggtcaaggtcagggtcagagtcaagggttccgtgacatgcaccagaaagtagagcacctactgtgcggtgacaccattgcaacaccatctggtgtagctcaatggtttacaacaatggaaatgagccttttattcttgttgc

SEQ ID NO: 146430 - DNA, 530 bp, Arabidopsis thaliana
caaaaagaaaatggttaagctcagcaatctcctcgttgcaaccttcggggttctcctcgtccttaacggctgccttgcgaggcagtcacttggggttcctcctcagctacagaacgagtgtaacctcgacaacctagatgttctccaagccaccgaaactatcaagagtgaagccggtcagatcgagtactgggaccacaaccaccctcagctccgatgtgttggtgtttccgttgctcgttatgtaattgaacaaggcggtctttacttgcccaccttcttcacttccccaaaaatttcctacgtcgttcaaggaacgggtatcagcggaagagtggtccctggatgtgccgagaccttcatggactcgcagccgatgcaaggacaacaacaaggccaaccatggcaaggacgacagggacaacaaggccaaccatgggaaggacagggacaacagggacaacaaggaagacatggccaaccatgggaaggacagggacaacatggacaacatggacgacagggacaac

SEQ ID NO: 146431 - DNA, 553 bp, Arabidopsis thaliana
aaagaaaatggttaagctcagcaatctcctcgttgcaaccttcggggttctcctcgtccttaacggctgccttgcgaggcagtcacttggggttcctcctcagctacagaacgagtgtaacctcgacaacctagatgttctccaagccaccgaaactatcaagagtgaagccggtcagatcgagtactgggaccacaaccaccctcagctccgatgtgttggtgtttccgttgctcgttatgtaattgaacaaggcggtctttacttgcccaccttcttcacttccccaaaaatttcctacgtcgttcaaggaacgggtatcagcggaagagtggtccctggatgtgccgagaccttcatggactcgcagccgatgcaaggacaacaacaaggccaaccatggcaaggacgacagggacaacaaggccaaccatgggaaggacagggacaacagggacaacaaggaagacaaggccaaccattgggaggacagggacaacagggacaacaaggacgacagggacaacaaggccaaccatgggaaggacaggga

SEQ ID NO: 146432 - DNA, 458 bp, Arabidopsis thaliana
gttgcaaagacaatgaagatgaattcgcgagctttaatagtttggtttttattgttgtcggctgttttcgccatcaaggttgttgcctccatcgatgacacaaaacaagttggtgaaaaccaagtggaggagtcaaagtcgacatgcaagtatggaaattgtgcacagtatggagagaatcattttgtagaaacagatgaagtccttgatggggaagaagaagaagaatccaaaaataaccaaggtggaattgggagaggccaaggaggacaaaaaggcggtggtggtggtggccaaggaggacaaaaaggcggtggcggtggtggccaaggaggacaaaagggtggcggtggtggccaaggaggacaaaagggcggtggcggtggtggccaatggggacaaaaaggcggtggcggttgtggacaaggtggacagataggtggtggtgggggcggtct

SEQ ID NO: 146433 - DNA, 500 bp, Arabidopsis thaliana
aagaaataacaaaatggctcgagtctcttctcttctttctttcttcttaacacttttgatccttttccatggctacgcggctcaacagggtcagcagggtcagcagtttccgaacgagtgccagctcgaccagctcaatgcgctcgagccgtcacacgtactgaagagcgaggctggtcgcatcgaggtgtgggaccaccacgctcctcagctccgttgctcaggtgtctcctttgcacgttacatcatcgagtctaagggtctctacttgccctctttctttaacaccgcgaagctctctttcgtggctaagggacgaggtcttatgggaaaagtgatccctggatgcgccgaaacattccaagactcatcagagttccaaccacgcttcgaaggtcaaggtcaaagccagaggttccgtgacatgcaccagaaagtggagcacattaggagcggtgataccattgccacaacacccggtgtagcacagtggttctaca

SEQ ID NO: 146434 - DNA, 523 bp, Arabidopsis thaliana
agaaaacatacacaaatagcaaaacatggctaacaagctcttcctcgtctgcgcaactctcgccctctgcttcctcctcaccaacgcttccatctaccgcaccgttgtcgaattcgaagaagatgacgccagcaaccccgtaggtccaagacagagatgccagaaggagtttcagcaatcacaacacctaagagcttgccagagatggatgagcaagcaaatgaggcaaggacgtggtggtggtccttccctcgacgatgagttcgatttcgagggcccccagcagggataccagctactccagcagtgctgcaacgagcttcgccaggaagagccagtttgcgtttgccccaccttgaaacaagctgccagggccgttagactccagggacagcaccaaccaatgcaagtcaggaaaatttaccagacagccaagcacttgcccaacgtttgcgacatcccgcaagttgatgtttgtcccttcaacatcccttcattcccttctttctactaaatctcaaac

SEQ ID NO: 146435 - DNA, 562 bp, Arabidopsis thaliana
ctcatcatcacaaacgagtaagaatacaaatacaaatagcaaaaaaaatggcaaacaagctcttcctcgtctgcgcaactttcgccctctgcttcctcctcaccaacgcttccatctaccgcactgttgtcgagttcgacgaagatgacgccagcaaccccatgggcccaagacagaaatgtcagaaggagtttcagcaatcacagcacctaagagcttgccagaaattgatgcgcatgcaaatgaggcaaggccgtggtggtggtccctccctcgacgatgagttcgatttggaagacgacatcgagaacccacaaggcccccagcagggacaccagatcctccagcagtgctgcagcgagcttcgccaggaagagccagtttgtgtttgccccaccttgagacaagctgccagggccgttagcctccagggacaacacggaccattccaatccaggaaaatttacaagacagctaagtacttgcctaacatttgcaagatccagcaaggtggtgaatgccccttccagaccaccatccctttcttccctcttactaatag

SEQ ID NO: 146436 - DNA, 561 bp, Arabidopsis thaliana
caaaaagaaaatggttaagctcagcaatctcctcgttgcaaccttcggggttcttctcgtccttaacggctgccttgcgaggcagtcacttggggttcctcctcagctacagaacgagtgtaacctcgacaacctagatgttctccaagccaccgaaactatcaagagtgaagccggtcagatcgagtactgggaccacaaccaccctcagctccgatgtgttggtgtttccgttgctcgttatgtaattgaacaaggcggtctttacttgcccaccttcttcacttccccaaaaatttcctacgtcgttcaaggaacgggtatcagcggaagagtggtccctggatgtgccgagaccttcatggactcgcagccgatgcaaggacaacaacaaggccaaccatggcaaggacgacagggacaacaaggccaaccatgggaaggacagggacaacagggacaacaaggaagacaaggccaaccatgggaaggacagggacaacagggacaacaaggacgacagggacaacaaggccaaccatgggaaggacagggacagca

SEQ ID NO: 146437 - DNA, 531 bp, Arabidopsis thaliana
caatggaacgtaaacgcaaacgcggcactctacgtgacaaacggaaaggctcatatacaaatggtgaacgacaacggagaaagagtgttcgaccaagagatctcgagcggacagttactagtcgtgccacaaggcttttcggtcatgaaacatgccataggcgaacagttcgagtggatcgaattcaagacaaacgaaaacgcacaggtcaacacactcgcgggccgtacctcagtcatgagaggtttgccgcttgaggttataaccaatgggtaccagatctctcccgaagaagctaaacgagtaaagtttagcacgattgagaccacactgacccatagcagtccaatgagctacggaaggcctagggcttgaggcttgatgagcgcgtggtggaatagcgtttgaatctaaagttcggtttggtacgacttgtaatatgaaataataatgtacaaagaagttctacgcttaagggaactgttttgttttgagctttgtattatgacgtctagtgtacaacaacgaacg

SEQ ID NO: 146438 - DNA, 449 bp, Arabidopsis thaliana
gaagaacattggaagagattttgtatgcattggtggttcaaaagttcatggaagctaacgtatcacttgtaccttcagtaagcccatcttcagatccgtctggtcgggttgatacttggccgaccaaagtggagaaactcgagcggcttcactcgcccgagatgtacgagatgattcacaaccatcttgccttgattcttggaagcagaatgggtgatctgaactctgttgcacagataagcaagctcagagttggccaagtttacgctgcttctgtgatgtatggatatttcttgaagagggtggaccaaaggtttcagcttgagaagacgatgaagattcttccgggtgggtcggatgaaagtcaaacaagcgttgagcaagccgaggggacggcaacatatcaggcggctgtatcgtctcacccagaggttggtgcatttgcgggc

SEQ ID NO: 146439 - DNA, 520 bp, Arabidopsis thaliana
agaaaacatacacaaatagcaaaacatggctaacaagctcttcctcgtctgcgcaactctcgccctctgcttcctcctcaccaacgcttccatctaccgcaccgttgtcgaattcgaagaagatgacgccagcaaccccgtaggtccaagacagagatgccagaaggagtttcagcaatcacaacacctaagagcttgccagagatggatgagcaagcaaatgaggcaaggacgtggtggtggtccttccctcgacgatgagttcgatttcgagggcccccagcagggataccagctactccagcagtgctgcaacgagcttcgccaggaagagccagtttgcgtttgccccaccttgaaacaagctgccagggcagttagcctccagggacagcacggaccattccaatccaggaaaatgtaccagtcagctaagtacttgcctaacatttgcaagatccagcaagttggtgaatgtccctttcagaccaccatccctttcttccttcttactactaga

SEQ ID NO: 146440 - DNA, 551 bp, Arabidopsis thaliana
gctcagcaatctcctcgttgcaaccttcggggttctcctcgtccttaacggctgccttgcgaggcagtcacttggggttcctcctcagctacagaacgagtgtaacctcgacaacctagatgttctccaagccaccgaaactatcaagagtgaagccggtcagatcgagtactgggaccacaaccaccctcagctccgatgtgttggtgtttccgttgctcgttatgtaattgaacaaggcggtctttacttgcccaccttcttcacttccccaaaaatttcctacgtcgttcaaggaacgggtatcagcggaagagtggtccctggatgtgccgagaccttcatggactcgcagccgatgcaaggacaacaacaaggccaaccatggcaaggacgacagggacaacaaggccaaccatgggaaggacagggacaacagggacaacaaggaagacatggccaaccatgggaaggacagggacaacagggacaacatggacgacagggacaacaaggccaaccatgggaaggacagggacagcagggacaac

SEQ ID NO: 146441 - DNA, 520 bp, Arabidopsis thaliana
cgctcttctcgacatcgccaactaccaaaaccaactcgaccgcaactttagagtgttccatttggccggaaacaaccagcagggaggctttggcggttgacagcaacaacaagaacagaaaaacttgtggagcgggttcgacgcacaggtcatagctcaagcattgaaaattgacgttcagttggctcagcagcttcagaaccaacaagacagcagaggaaacatcgttcgtgttaagggacctttccaggtcgtgaggccacctctaagacagccctacgagagcgaggagtggagacacccacgtagcccacagggcaacggccttgaggagactatctgcagcatgaggtcccacgagaacattgacgaccctgctcgtgctgacgtgtacaagcccagcctaagtcgcgtgaccagcgtcaacagctataccttgcccatcttggagtatgtcaagctcagtgccactcgtggcgttctccagggtaatgcgatggtgcttcctaaatacaacatg

SEQ ID NO: 146442 - DNA, 514 bp, Arabidopsis thaliana
accaaaaagaaaatggttaagctcagcaatctcctcgttgcaaccttcggggttctcctcgtccttaacggctgccttgcgaggcagtcacttggggttcctcctcagctacagaacgagtgtaacctcgacaacctagatgttctccaagccaccgaaactatcaagagtgaagccggtcagatcgagtactgggaccacaaccaccctcagctccgatgtgttggtgtttccgttgctcgttatgtaattgaacaaggcggtctttacttgcccaccttcttcacttccccaaaaatttcctacgtcgttcaaggaacgggtatcagcggaagagtggtccctggatgtgccgagaccttcatggactcgcagccgatgcaaggacaacaacaaggccaaccatggcaaggacgacagggacaacaaggccaaccatgggaaggacagggacaacagggacaacaaggaagacatggccaaccatgggaaggacaggtacaacagggacaac

SEQ ID NO: 146443 - DNA, 529 bp, Arabidopsis thaliana
aacaaaaagaaaatggttaagctcagcaatctcctcgttgcaaccttcggggttctcctcgtccttaacggctgccttgcgaggcagtcacttggggttcctcctcagctacagaacgagtgtaacctcgacaacctagatgttctccaagccaccgaaactatcaagagtgaagccggtcagatcgagtactgggaccacaaccaccctcagctccgatgtgttggtgtttccgttgctcgttatgtaattgaacaaggcggtctttacttgcccaccttcttcacttccccaaaaatttcctacgtcgttcaaggaacgggtatcagcggaagagtggtccctggatgtgccgagaccttcatggactcgcagccgatgcaaggacaacaacaaggccaaccatggcaaggacgacagggacaacaaggccaaccatgggaaggacagggacaacagggacaacatggaagacatggccaaccatgggaaggacagggacaacagggacaacaaggacgacagggac

SEQ ID NO: 146444 - DNA, 484 bp, Arabidopsis thaliana
caaattcctcaacagagtctgctgcaaggaaccatctaacatctagacaacaaacttcttctcctggattgagctcttccagtggagcaagtcgaagaccttcatcatctggaggacctggatcaagacctgccacacccactggaagatcatcaacactgacggcaaattcaaaatcctcaaggccttcaacacccacttcgcgagccactgtctcctcagctactcgaccttctttgactaactcgaggtccacagtatctgcaacgactaagcccacgcctatgagtaggtcaacaagtttatcatcatctaggctcacacctactgcatctaagccgactacctcaactgctagatctgctggttcagtaactagatctacccctagcaccaccacaaaatctgcaggtccttcaaggtccaccacacctctgtcaagatctactgtcagatctttaacaaccaacttcaagacccacac

SEQ ID NO: 146445 - DNA, 546 bp, Arabidopsis thaliana
aaaagaaaatggttaagctcagcaatctcctcgttgcaaccttcggggttctcctcgtccttaacggctgccttgcgaggcagtcacttggggttcctcctcagctacagaacgagtgtaacctcgacaacctagatgttctccaagccaccgaaactatcaagagtgaagccggtcagatcgagtactgggaccacaaccaccctcagctccgatgtgttggtgtttccgttgctcgttatgtaattgaacaaggcggtctttacttgcccaccttcttcacttccccaaaaatttcctacgtcgttcaaggaacgggtatcagcggaagagtggtccctggatgtgccgagaccttcatggactcgcagccgatgcaaggacaacaacaaggccaaccatggcaaggacgacagggacaacaaggccaaccatgggaaggacagggacaacagggacaacaaggaagacaaggccaaccatgggaaggacagggacaacagggacaacatggacgacagggacaacatggcctaccatgggaag

SEQ ID NO: 146446 - DNA, 563 bp, Arabidopsis thaliana
cggacgcgtgggtgaaaattgacgttcagttggctcagcagcttcagaaccaacaagacagcagaggaaacatcgttcgtgttaagggacctttccaggtcgtgaggccacctctaagacagccctacgagagcgaggagtggagacacccacgtagcccacagggcaacggccttgaggagactatctgcagcatgaggtcccacgagaacattgacgaccctgctcgtgctgacgtgtacaagcccagcctaggtcgcgtgaccagcgtcaacagctataccttgcccatcttggagtatgtcaggctcagtgccactcgtggcgttctccagggtaatgcgatggtgcttcctaaatacaacatgaacgctaacgagatcttgtactgcactggaggacaaggaaggatccaagtggtcaacgacaacggacagaacgtgttggaccaacaggtgcagaagggacagctcgtggtcatcccacaagggttcgcatacgttgtccagtcccacggaaacaagttcgagtggatctctttcaaaactaatgaaaacgcaatg

SEQ ID NO: 146447 - DNA, 527 bp, Arabidopsis thaliana
  unsure (1)..(527): unsure at all n locations
gcggagagtgcgagttctcaagaaacatggccactaggagacactgttgctgtgtaagaagtcaatgagtcaaaagacagagcctgattctatggaacaaactgtgaatgtgatgcaccatgtttcgaatgcggacaaggtatcggtacgggatatcgctagggaaagagttgagttagttgcagagagaatgcatcgattaccggatgagtttcttgacgagttaaagaacggtcttaagtctatccttgaagggaatgtagcgcagagtgttgatgagttcatgttcttgcagaaggttgttcagagtagaactgatttgagctctgtaacacttgttagagctcatcgggtgcagcttgagatacttgtagcgataaataccgggattcaggcgtttntgcatccgaatattagtctgtctcagccgtctcttatcgagattttcgtatacaagagatgtagaaacatagcttgccaaaatcaactacctgctgatgattgctactgtgatatatgtactaata

SEQ ID NO: 146448 - DNA, 304 bp, Arabidopsis thaliana
aaacgagtaagaatacaaatacaaatagcaaaaaaaatggcaaacaagctcttcctcgtctgcgcaactttcgccctctgcttcctcctcaccaacgcttccatctaccgcactgttgtcgagttcgacgaagatgacgccagcaaccccatgggcccaagacagaaatgtcagaaggagtttcagcaatcacagcacctaagagctggccagaaattgatgcgcatgcaaatgaggcaaggccgtggtggtggtcccttcctcgacgatgagttcgaattgaagacgacatcgagaacccaca

SEQ ID NO: 146449 - DNA, 548 bp, Arabidopsis thaliana
  unsure (1)..(548): unsure at all n locations
aacaaggcggtctttacttgcccaccttcttcacttccccaaaaatttcctacgtcgttcaaggaacgggtatcagcggaagagtggtccctggatgtgccgagaccttcatggactcgcagccgatgcaaggacaacaacaaggccaaccatggcaaggacgacagggacaacaaggccaaccatgggaaggacagggacaacagggacaacaaggaagacaaggccaaccatgggaaggacagggacaacagggacaacaaggacgacagggacaacaaggccaaccatgggaaggacagggacagcagggacaacaagggttccgtgacatgcaccagaaggtggaacatgtgagacgcggagacgtctttgccaacactccaggctcttgccactggatctacaactcaagagaacagncactngtcatcatcgctcttctcgacatcgccaactaccaaaaccaactcgaccgaacccctagagtgtccatttggccgaaacaccagcaggaggctttgcgttcacagaacacaagacagaaa

SEQ ID NO: 146450 - DNA, 515 bp, Arabidopsis thaliana
cgttcatggagtcaccggtatttggagaaggtcaaggtcagggtcagagtcaagggttccgcgacatgcaccagaaagtagagcacctacggtgcggtgacaccattgcaacaccatctggtgtagctcaatggttctacaacaatggaaatgagcctctcattcttgttgcagccgcggatctcgccagcaaccagaaccagcttgaccgcaaccttagaccatttttgatagccggaaacaacccacaagggcaggaatggctacaaggccgaaagcaacagaagcaaaacaacatcttcaatggcttcgcacctgagatcttggctcaagccttcaagatcaatgtcgagacggctcagcagctccagaaccagcaagataaccgtggcaacatcgtcaaggtcaacggacctttcggcgtcattaggccacccttgagacgcggcgaaggcggccacaaccacatgaaatagctaatggtttagaggaagacttgtgcaccatgcgatgca

SEQ ID NO: 146451 - DNA, 536 bp, Arabidopsis thaliana
ggcccgttcggtgtcattaggccgcctttgaggggccagagacctcatgaggaggaagaagaagaagaaggacgacatggacgacacggtaatggcttagaggagaccatctgcagcgccaggtgcaccgataacctcgatgacccgtctcgtgctgacgtgtacaagccacagctcggttacatcagcactctcaacagttacgatctccccatccttcgcttcatccgtctctcagccctccgtggatctatccgtcaaaacgcaatggtgcttccacagtggaacgcaaacgcgaacgctattctttacgtgacagacggggaagcccaaatccagatcgtaaacgacaatggtaacagagtgtttgacggacaagtctctcaaggacagctcatagccgtaccacaaggtttctcggtggtgaaacgcgcaacaagcaaccgattccagtgggttgagttcaaaacaaacgctaacgcgcaaatcaacactctggcgggacgaacctcagtcttgagaggtttaccacttga

SEQ ID NO: 146452 - DNA, 450 bp, Arabidopsis thaliana
atggactcgcagccgatgcaaggacaacaacaaggccaaccatggcatggacgacagggacaacaaggccaaccatgggaaggacagggacaacagggacaacaaggaagacaaggccaaccatgggaaggacagggacaacagggacaacaaggacgacagggacaacaaggccaaccatgggaaggacagggacagcagggacaacaagggttccgtgacatgcaccagaaggtggaacatgtgagacgcggagacgtctttgccaacactccaggctctgcccactggatctacaactcaggagaacagccacttgtcatcatcgctcttctcgacatcgccaactaccaaaaccaactcgaaccgaaccctagagtgttccatttggccggaaacaaacagcagggaggctttggcggttcacagcaacaacaagaacaggaaaac

SEQ ID NO: 146453 - DNA, 548 bp, Arabidopsis thaliana
ccggaaacaaccagcagggaggctttggcggttcacagcaacaacattaacagaaaaacttgtggagcgggttcgacgcacaggtcatagctcaagcattgaaaattgacgttcagttggctcagcagcttcagaaccaacaagacagcagaggaaacatcgttcgtgttaagggacctttccaggtcgtgaggccacctctaagacagccctacgagagcgaggagtggagacacccacgtagcccacagggcaacggccttgaggagactatctgcagcatgaggtcccacgagaacattgacgaccctgctcgtgctgacgtgtacaagcccagcctaggtcgcgtgaccagcgtcaacagctataccttgcccatcttggagtatgtcaggctcagtgccactcgtggcgttctccagggtaatgcgatggtgcttcctaaatacaacatgaacgctaacgagatcttgtactgcactggaggacaaggaaggatccaagtggtcaacgacaacggacagaacgtgttggaccaacaggtgcag

SEQ ID NO: 146454 - DNA, 497 bp, Arabidopsis thaliana
  unsure (1)..(497): unsure at all n locations
ttcgccaaaaaccttgaaacctttaaaaaatcgaaactatggctaagctcattctcgttttcgcaactctggccctcttcatcctcctagccaacgcatccatctaccgcacagtggtggagttcgaggaagatgatgacgtgagcaacccacaacaaggtaagtgccagagggagtttatgaagcatcagcaactaagaggttgcaagcaatggatccgcaagagagctcaacaaggaagaatcggatacgaagctgatgactgtgagctcactctcgatgtcgatcttgaggacgatgagaacccaatggggcctcaacaacagtcatctcttaaaatgtgttgtaatgaattaaggcaagtggacaagatgtgtgtgtgtcctacactgaaaaaggcggctcaacaagtcagattccagggaatgcatggacagcaacaggtgcaacatgtgnttcagactgctaagaacttgcctaacgtttgcaaaatccct

SEQ ID NO: 146455 - DNA, 465 bp, Arabidopsis thaliana
aaatacaaattaacgtaattttattaaattactagtcgttgagtctacgagttcttttgtagaactgaatagaatgacaatggatgagccaatttttagaaaatattgtttatatatgtaatgtattgcagttcagtataaatttttagtgttaaattatatgttttaacatccggtcgtaaatcaaacatgaaaaataaataaataaaattcatctttgtggttataaacttactccaaataaacaaaaaagtttggctattttataagaggaaacaccattttcaccatggccggaataatcggtaaaaaaatgttacatctagcttgttgttggcaccttatgttcatgcatgtgaaagtataaagatctacttaaccatccaaaaaatttatgatataccaaatacgcaatttttttgggtagttacttaaattttaaatcccgttttttctggtaggttt

SEQ ID NO: 146456 - DNA, 493 bp, Arabidopsis thaliana
taaagaggaagaaaaatgggtcgagtctcatctattatctctttctctttgacactcttgatcctcttcaatggctacactgcccaacagtggcccaacgagtgccagctcgatcaactcaatgcgctcgaaccatcccaaatcatcaagagcgagggtggtcgcatcgaggtctgggaccaccatgcaccccagctccgttgctccggctttgcctttgagcgtttcgtcattgagcctcagggtcttttcttgcccactttcttgaacgccggcaaactcacgtttgttgttcacggaaggggtctaatgggaagagttattccgggatgcgccgagacgttcatggagtcaccggtatttggagaaggtcaaggtcagggtcagagtcaagggttccgtgacatgcaccagatagtagagcacctactgtgcggtgacaccattgcaacaccaattggtgtagctcaatggttctacaacaatggaaatg

SEQ ID NO: 146457 - DNA, 557 bp, Arabidopsis thaliana
aagaaaatggttaagctcagcaatctcctcgttgcaaccttcggggttctcctcgtccttaacggctgccttgcgaggcagtcacttggggttcctcctcagctacagaacgagtgtaacctcgacaacctagatgttctccaagccaccgaaactatcaagagtgaagccggtcagatcgagtactgggaccacaaccaccctcagctccgatgtgttggtgtttccgttgctcgttatgtaattgaacaaggcggtctttacttgcccaccttcttcacttccccaaaaatttcctacgtcgttcaaggaacgggtatcagcggaagagtggtccctggatgtgccgagaccttcatggactcgcagccgatgcaaggacaacaacaaggccaaccatggcaaggacgacagggacaacaaggccaaccatgggaaggacagggacaacagggacaacaaggaagacaaggccaaccatgggaaggacagggacaacagggacaacaaggacgacagggacaacaaggccaaccatgggaaggacagggacagca

SEQ ID NO: 146458 - DNA, 508 bp, Arabidopsis thaliana
  unsure (1)..(508): unsure at all n locations
gtttctcattgttttgcttcaaattacgcattcgaatctgatcttcgttgatctctgtggaagaaacagataagagaaaatcgcatgaatttttttagaaaactaggttttaatccttcgattgcaagctacttcactaatacgagtcttctgatctcaattcttagtttttctcctcaattgccgatttctctctttcttttcgagcagaaatcgttagatcctttatcgctgtgtaatagtagtactaattttaataatcttgagagtaattactccgttcattgttgaatcatggagtccggaggcaaaactaatcgtcagctgcgtaaagctatttgcgtctcaacagacgagaagatgaagaagaagagatcaccttcagtgatagtaattggaggtggtatggctggaatttcagctgctcgcactcttcaagatgcttnctttcacgttgttgtattggagtctcgtgacagaattggtggacgagttcacactgattact

SEQ ID NO: 146459 - DNA, 517 bp, Arabidopsis thaliana
gttaagctcagcaatctcctcgttgcaaccttcggggttctcctcgtccttaacggctgccttgcgaggcagtcacttggggttcctcctcagctacagaacgagtgtaacctcgacaacctagatgttctccaagccaccgaaactatcaagagtgaagccggtcagatcgagtactgggaccacaaccaccctcagctccgatgtgttggtgtttccgttgctcgttatgtaattgaacaaggcggtctttacttgcccaccttcttcacttccccaaaaatttcctacgtcgttcaaggaacgggtatcagcggaagagtggtccctggatgtgccgagaccttcatggactcgcagccgatgcaaggacaacaacaaggccaaccatggcaaggacgacagggacaacaaggccaaccatgggaaggacagggacaacaaggacaacaaggaagactaggccaaccatggtgaggacagggacaacagggacaacaaggacgacagggacaac

SEQ ID NO: 146460 - DNA, 479 bp, Arabidopsis thaliana
ataagaaataacaaaatggctcgagtctcttctcttctttctttcttcttaacacttttgatccttttccatggctacgcggctcaacagggtcagcagggtcagcagtttccgaacgagtgccagctcgaccagctcaatgcgctcgagccgtcacacgtactgaagagcgaggctggtcgcatcgaggtgtgggaccaccacgctcctcagctccgttgctcaggtgtctcctttgcacgttacatcatcgagtctaagggtctctacttgccctctttctttaacaccgcgaagctctctttcgtggctaagggacgaggtcttatgggaaaagtgatccctggatgcgccgaaacattccaagactcatcagagttccaaccacgcttcgaaggtcaaggtcaaagccagaggttccgtgacatgcaccagaaagtggagcacattatgagcggtgataccattgccacaacacc

SEQ ID NO: 146461 - DNA, 548 bp, Arabidopsis thaliana
aaaacatacacacatagcaaaaaatggcaaacaagttgttcctcgtctgcgcagctctcgctctctgcttcctcctcaccaacgcttccatctaccgcaccgtcgttgagttcgaagaagatgacgccactaaccccataggcccaaaaatgaggaaatgccgcaaggagtttcagaaagaacaacacctaagagcttgccagcaattgatgctccagcaagcaaggcaaggccgtagcgatgagtttgatttcgaagacgacatggagaacccacagggacaacagcaggaacaacagctattccagcagtgctgcaacgagcttcgccaggaagagccagattgtgtttgccccaccttgaaacaagctgccaaggccgttagactccagggacagcaccaaccaatgcaagtcatgaaaattaccagacagccaagcacttgcccaacgtttgcgacattccgcaagttgatgtttgtcccttcaacatcccttcattcccttctttctactaaatctcaaacaaaccctcaaagcgtatgagag

SEQ ID NO: 146462 - DNA, 558 bp, Arabidopsis thaliana
atcatcacaaacgagtaagaatacaaatacaaatagcaaaaaaaatggcaaacaagctcttcctcgtctgcgcaactttcgccctctgcttcctcctcaccaacgcttccatctaccgcactgttgtcgagttcgacgaagatgacgccagcaaccccatgggcccaagacagaaatgtcagaaggagtttcagcaatcacagcacctaagagcttgccagaaattgatgcgcatgcaaatgaggcaaggccgtggtggtggtccctccctcgacgatgagttcgatttggaagacgacatcgagaacccacaaggcccccagcagggacaccagatcctccagcagtgctgcagcgagcttcgccaggaagagccagtttgtgtttgccccaccttgaaacaagctgccagggcagttagcctccagggacagcacggaccattccaatccaggaaaatttaccagtcagctaagtacttgcctaacatttgcaagatccagcaaggtggtgaatgtcccttccagaccaccatccctttcttccctccttactact

SEQ ID NO: 146463 - DNA, 519 bp, Arabidopsis thaliana
attaaaagcaacttacttaattacatatcgttcgtgtttttttctttaaaaaatggcgtcaaagcaactgagcagagaagagcttgatgagaaggcgaagcaaggagagaccgtcgtcccaggtggcaccggtggccacagcctcgaagctcaagagcatcttgctgaaggaaggagcaagggagggcagacgaggaaggagcagctaggacatgaaggttatcaggagatcggtcacaaaggtggagaggcgaggaaggagcagttagggcacgagggttatcaggagatgggtcacaaaggtggagaggcgaggaaggagcagctagggcacgagggttatcaggagatgggacacaaaggaggagaggcgaggaaggagcatctagggcacgagggttataaggagatgggacgtaaaggaggactcagtacgatggaaaaatctggttgagagcgtgcggaggaagaagggattgtgatcgatgagtcaaagttcatcaacaagtgattagtgtt

SEQ ID NO: 146464 - DNA, 525 bp, Arabidopsis thaliana
ttgcactcagtctagagacaaagagagagagagatggggtcaaagacggagatgatggagagagacgcaatggctacggtggctccctatgcgccggtcacttaccatcgccgtgctcgtgttgacttggatgatagacttcctaaaccttatatgccaagagcattgcaagcaccagacagagaacacccgtacggaactccaggccataagaattacggacttagtgttcttcaacagcatgtctccttcttcgatatcgatgataatggcatcatttacccttgggagacctactctggactgcgaatgcttggtttcaatatcattgggtcgcttataatagccgctgttatcaacctgacccttagctatgccactcttccggggtggttaccttcacctttcttccctatatacatacacaacatacacaagtcaaagcatggaagtgattcaaaaacatatgacaatgaaggaaggtttatgccggtgaatcttgagttgatatttagcaaatatgcg

SEQ ID NO: 146465 - DNA, 477 bp, Arabidopsis thaliana
catgcaccagaaagtggagcacattaggagcggtgataccattgccacaacacccggtgtagcacagtggttctacaacgacggacaggaaccacttgtcatcgtcagcgtcttcgatctagccagtcaccagaaccagcttgaccgcaacccaaggccattttacttagccggaaacaacccacaaggtcaagtatggctacaaggccgagagcaacagccacagaagaacattttcaatggatttggacccgaggttattgctcaagctttgaagatcgatcttcagacagcgcagcaacttcagaaccaagatgacaaccgtggaaacattgtccgagtccaaggcccgttcggtgtcattaggccgcctttgaagggccagagacctcatgaggaggaagaagaagaagaaggacgacatggacgacacggtaatggcttagaggagaccatctgcagcgccaggtgcaccga

SEQ ID NO: 146466 - DNA, 539 bp, Arabidopsis thaliana
cggaatttgtgaaacgacacacgcgtccgaaaatgaccaccattttgggtattcacttaattttgttaggtgtatgtgcctttcttctagtattcaaggctcccgattttttgggcatatatgatgcgcggggctccaaaagggggggatgtaagaaaaattacaaacttgactcttagcccaagtgttatatttggttatttactaaaatctccctttgggggagaaggatggattgttagtgtggacgatttggaagatataattggaggacatgtatggttaggttccatttgtatatttggtggaatctggcatatcttaaccaagccttttgcatgggctcgccgcgcacttgtatggtctggggaggcttacttgtcttatagtttagctgctttatctgtttgtggtttcattgcttgttgttttgtctggtttaataataccgcttaccctagtgaagtttacggacctacggggccagaagcttcttaagctcaagcatttacttttctagttagagaccaacgtcttgg

SEQ ID NO: 146467 - DNA, 383 bp, Arabidopsis thaliana
  unsure (1)..(383): unsure at all n locations
tgttgaagcgattctcactaaaaccctcgaacacatcgcctttatctctttctctagatctactcgctatggctagtatcaccgttgttaaggctagggagatcttcnacagtcgtggtaatcccaccgttgaggttgatatccacacgtcaaatggtattaaggttacagcagctgttccaagtggagcttccactggtatctatgaggctcttgagctgagggatggaggatctgactaccttggaaagggtgtatctaaggctgttggcaatgtgaacaacatcatcgggccagcacttattggaaaggacccaactcagcagactgctattgacaacttcatggtccatgaacttgacggaacccaaaacgagtggggg

SEQ ID NO: 146468 - DNA, 470 bp, Arabidopsis thaliana
gaaccaacaagacagcagaggaaacatcgttcgtgttaagggacctttccaggtcgtgaggccacctctaagacagccctacgagagcgaggagtggagacacccacgtagcccacagggcaacggccttgaggagactatctgcagcatgaggtcccacgagaacattgacgaccctgctcgtgctgacgtgtacaagcccagcctaggtcgcgtgaccagcgtcaacagctataccttgcccatcttggagtatgtcaggctcagtgccactcgtggcgttctccagggtaatgcgatggtgcttcctaaatacaacatgaacgctaacgagatcttgtactgcactggaggacaaggaaggatccaagtggtcaacgacaacggacagaacgtgttggaccaacaggtgcagaagggacagctcgtggtcattccacaagggttcgcatacgttgtccagtcccacg

SEQ ID NO: 146469 - DNA, 533 bp, Arabidopsis thaliana
aaacaaaaagaaaatggttaagctcagcaatctcctcgttgcaaccttcggggttctcctcgtccttaacggctgccttgcgaggcagtcacttggggttcctcctcagctacagaacgagtgtaacctcgacaacctagatgttctccaagccaccgaaactatcaagagtgaagccggtcagatcgagtactgggaccacaaccaccctcagctccgatgtgttggtgtttccgttgctcgttatgtaattgaacaaggcggtctttacttgcccaccttcttcacttccccaaaaatttcctacgtcgttcaaagaacgggtatcagcggaagagtggtccctggatgtgccgagaccttcatggactcgcaaccgatgcaaggacaacaacaaggccaaccatggcaaggacgacagggacaacatggccaaccatgggaaggacagggacaacagggacaacaaggaagacagggcaaccatgggaaggacagggacacagggacaacaaggacgacagggacaacaa

SEQ ID NO: 146470 - DNA, 484 bp, Arabidopsis thaliana
cacaaacgagtaagaatacaaatacaaatagcaaaaaaaatggcaaactagctcttcctcgtctgcgcaactttcgccctctgcttcctcctcaccaacgcttccatctaccgcactgttgtcgagttcgacgaagatgacgccagcaaccccatgggcccaagacagaaatgtcagaaggagtttcagcaatcacagcacctaagagcttgccagaaattgatgcgcatgcaaatgaggcaaggccgtggtggtggtccctccctcgacgatgagttcgatttggaagacgacatcgagaacccacaaggcccccagcagggacaccagatcctccagcagtgctgcagcgagcttcgccaggaagagccagtttgtgtttgccccaccttgagacaagctgccagggccgttagcctccagggacaacacggaccattccaatccaggaaaatttacaagacagctaagtacttgcctaaca

SEQ ID NO: 146471 - DNA, 563 bp, Arabidopsis thaliana
  unsure (1)..(563): unsure at all n locations
gaaaatggttaagctcagcaatctcctcgttgcaaccttcggggttctcctcgtccttaacggctgccttgcgaggcagtgacttggggttcctcctcagctacagaacgagtgtaacctcgacaacctagatgttctccaagccaccgaaactatcaagagtgaagccggtcagatcgagtactgggaccacaaccaccctcagctccgatgtgttggtgtttccgttgctcgttatgtaattgaacaaggcggtctttacttgcccaccttcttcacttccccaaaaatttcctacgtcgttcaaggaacgggtatcagcggaagagtggtccctggatgtgccgagaccttcatggactcgcagccgatgcaaggacaacaacaaggccaaccatggcaaggacgacagggacaacaaggccaaccatgggaaggacagggacaacagggacaacaaggaagacaaggccaaccatgggaaggacagggacaacagggacaacanggacgacagggacaacatggccaaccatgggaaggacagggacagcaaggacaac

SEQ ID NO: 146472 - DNA, 442 bp, Arabidopsis thaliana
gaaaggaaaagcatgtttaaactctgtctcgttctcgtcttggttattgcagtagatgcaaatccggttaagtccggttcttgtagttgctccgggaatatatcagcgagcgatgtcgatcgagttcatttcgcgatgaacttggagttcaccgaggcggagttcttcttgaaaggggctaccggaaaaggacttgatgcctataacgcgacacttgctaaaggcggaccaccgccggtaggggccaagaaagccaaccttgatcctataactaaccgaatcatcgaggagtttggttatcaagaaatcggtcatcttagggcgattacggatatgacgggaggaattccacgtccgctaataaatctgacgagagagaaatttcgcagtgttatggacagagcggttggacgcaaatctaattcgcggtttgatccttacg

SEQ ID NO: 146473 - DNA, 455 bp, Arabidopsis thaliana
cttctctccgtcgtctcactctcatttctcctcttcttccatggcgccgaggcacgccagcgagaggcgccgtttccaaacgcctgccatttcagccaaatcaacagcctcgcgcccgctcaggcgacgaagttcgaagccggtcagatggaagtatgggaccacatgagccctgagctccgatgcgccggtgtaacggtggctcgcatcacccttcagcccaattccattttcttgcccgctttctttagcccacctgcccttgcttacgttgtccaaggagaaggagttatggggacgattgcttctggttgtcctgagacttttgcagaagttgaaggatcatcatgaagaggaggaggaggagacccgggtcgacgttttgaggacatgcaccagaagttggagaattttcggcgaggggatgtgtttgcttcgcttgccggagtttcaca

SEQ ID NO: 146474 - DNA, 484 bp, Arabidopsis thaliana
cggtttctcaccgtctcctcaggccggcgacgacgacgataaagaatactttttcttctctctttattaggtctctctcttcttcttcgtctgggtcctcgctagaccccaaaatcgatctggaggaggctgcggctcagctcgggaagtcttcgtctacgtcaacgtctccatacaaaggcagaaatttccactgggtgtttcttggatgtcctggtgttggtaaaggaacctatgcctctcgtctctcttctctcctcggcgttcctcatattgccactggtgatctcgttcgtgaagagctctcctcctctggccttctctcctctcagctcaaggagcttgttaaccatggaaaactagttcctgatgaattcataataagtttgttatcaaagcgtcttcaagctggcaaagacaagggtgaatctggatacattcttgatggtttttcacgcaccgtgactcaagcggaaatactgga

SEQ ID NO: 146475 - DNA, 534 bp, Arabidopsis thaliana
ctggttcattttccatggacggaccttgacctctctgcttttcttcgtgcattttctctctctcactatgctctctctttctagtgtttgttggatcctctgcgtactctgttcttcttctctcttcagataaaacaagtcctgcaaaattaagacctgatgtcttatcgattgctaagtgtggataaggaggaactggttacatcaccttgtttgaaagaacgtaactacttgggtctctctgattgttcctctgttgatagctcaactattcccaatgttgttgggaagagcaatctcaatttcaaagctactgaactgaggctaggtcttcctgagtctcaatctcctgagagagagactgatttcggtttgctgagtccgagaacacccgatgagaagcttctcttcccgttgctaccttctaaagacaatggttctgctactacagggcataagaatgttgtttctggtaacaagagaggatttgctgacacttgggatgagttttcgggtgtgaaaggatctgttaga

SEQ ID NO: 146476 - DNA, 540 bp, Arabidopsis thaliana
gtcatagctcaagcattgaaaattgacgttcagttggctcagcagcttcagaaccaacaagacagcagaggaaacatcgttcgtgttaagggacctttccaggtcgtgaggccacctctaagacagccctacgagagcgaggagtggagacacccacgtagcccacagggcaacggccttgaggagactatctgcagcatgaggtcccacgagaacattgacgaccctgctcgtgctgacgtgtacaagcccagcctaggtcgcgtgaccagcgtcaacagctataccttgcccatcttggagtatgtcaggctcagtgccactcgtggcgttctccagggtaatgcgatggtgcttcctaaatacaacatgaacgctaacgagatcttgtactgcactggaggacaaggaaggatccaagtggtcaacgacaacggacagaacgtgttggaccaacaggtgcagaagggacagctcgtggtcatcccacaagggttcgcatacgttgtccagtcccacggaaacaagttcgagtggatc

SEQ ID NO: 146477 - DNA, 535 bp, Arabidopsis thaliana
caaaaagaaaatggttaagctcagcaatctcctcgttgcaaccttcggggttctcctcgtccttaacggctgccttgcgaggcagtcacttggggttcctcctcagctacagaacgagtgtaacctcgacaacctagatgttctccaagccaccgaaactatcaagagtgaagccggtcagatcgagtactgggaccacaaccaccctcagctccgatgtgttggtgtttccgttgctcgttatgtaattgaacaaggcggtctttacttgcccaccttcttcacttccccaaaaatttcctacgtcgttcaaggaacgggtatcagcggaagagtggtccctggatgtgccgagaccttcatggactcgcagccgatgcaaggacaacaaccaggccaaccatggcaaggacgacagggacaacaaggccaaccatgggaaggacaggacaacagggacaacaaggaagacaaggccaccatgggaaggacaggacaacagggacaacaggacaacagggcaacaaggcaacat

SEQ ID NO: 146478 - DNA, 323 bp, Arabidopsis thaliana
tattatctctagtctgtttgacactcttgatcctcttcaatggctacactgcccaacagtggcccaacgagtgccagctcgatcaactcaatgcgctcgaaccatcccaaatcatcaagagcgagggtggtcgcatcgaggtctgggaccaccatgcaccccagctccgttgctccggctctgcctttgagcgtttcgtcattgagcctcaaggtcttttcttgcccactttcttgaacgccggcaaactcacgtttgttgttcacggaaggtgtctaatgggaagagttattccgggatgcgccgagacgttcatggagtca

SEQ ID NO: 146479 - DNA, 526 bp, Arabidopsis thaliana
aagaaaatggttaagctcagcaatctcctcgttgcaaccttcggggttctccttgtccttaacggctgccttgcgaggcagtcacttggggttcctcctgagctacagaacgagtgtaacctcgacaacctagatgttctccaagccaccgaaactatcaagagtgaagccggtcagatcgagtactgggaccacaaccaccctcagctccgatgtgttggtgtttccgttgctcgttatgtaattgaacaaggcggtctttacttgcccaccttcttcacttcctcaaaaatttcctacgtcgttcaaggaacgggtatcagcggaagagtggtccctggatgtgccgagaccttcatggactcgcagccgatgcaaggacaacaacaaggccaaccatggcaaggacgacagggacaacaaggccaaccatgggaaggacagggacaacagggacaactaggaagacaaggccaatcatgggaaggacagggacaacagggacaacaaggacgacagggacaac

SEQ ID NO: 146480 - DNA, 554 bp, Arabidopsis thaliana
aacaaaaagaaaatggttaagctcagcaatctcctcgttgcaaccttcggggttctcctcgtccttaacggctgccttgcgaggcagtcacttggggttcctccgcagctacagaacgagtgtaacctcgacaacctagatgttctccaagccaccgaaactatcaagagtgaagccggtcagatcgagtactgggaccacaaccaccctcagctccgatgtgttggtgtttccgttgctcgttatgtaattgaacaaggcggtctttacttgcccaccttcttcacttccccaaaaatttcctacgtcgttcaaggaacgggtatcagcggaagagtggtccctggatgtgccgagaccttcatggactcgcagccgatgcaaggacaacaacaaggccaaccatggcaaggacgacagggacaacaaggccaaccatgggaaggacagggacaacagggacaacaaggaagacaaggccaaccatgggaaggacagggacaacagggacaacaaggacgacagggacaacaaggccaaccatgggaaggaca

SEQ ID NO: 146481 - DNA, 465 bp, Arabidopsis thaliana
acgatcatagctcaagcattgaaaatcgacgttcaaccgctttatggtttcttcgcccttaacggctgccttgcaaggcagtaacttggggttcctcctaagctacagaacgagtgtaacctcaacaacctaaatgttctccaagccaccgaaactatcaagagtgaagccggtcagatcgagtactgggaccacaaccaccctgacctacgagaacatggactaccctgctcgtgctgacgtgtacaagcccagcctaggtcgcgtgaccagtttttacatctctacaaaatccatctcggagtttatcaaagctcattgccactcgagacgttctccatgataatgcgatgctgctttctaattacaacatgtacgctgacgacatcttggtctgcactggaagacacggcaggatccacgtggtcaaccacaacggacagaacgtgttggaccaacacgtgc

SEQ ID NO: 146482 - DNA, 488 bp, Arabidopsis thaliana
cttagcctttactctatagttttatatcatatcaatcgacatggcgaatgtggaccgtgatcggcgtgtgcatgtagaccgtactgacaaacgtgttcatcagccaaactacgaagatgatgtcggttttggtggctatggcggttatggtgctggttctgattataagagtcgcggcccctccactaaccaaatcttggcacttatagcaggagttcccattggtggcacactgctaaccctagctggactcactctagccggttcggtgatcggcttgctagtctccatacccctcttcctcctcttcagtccggtgatagtcccggcggctctcactattgggcttgctgtgacgggaatcttggcttctggtttggttgggttgacgggtctgagctcggtctcgtgggtccttaactaccttcgtgggacgagtgatacagtgccagagcaattggactacgcttaacggcgtatggctgatg

SEQ ID NO: 146483 - DNA, 536 bp, Arabidopsis thaliana
ctccctctctctctgctcgaatcgaaccgttcccaggagctgctttgatttggtttatcgttgatctgtgaaaatggggacgaatgatctcgacatcggggaagggactctggagatcggcatggagtatagaactgtttctggtgttgctggaccattggtcattcttgacaaagtgaagggtccaaagtaccaggagattgttaatattcgcttaggagatggatcaacgagacgtggtcaggttttggaagttgatggcgagaaagcagttgtgcaggtttttgaaggaacatctggaattgacaacaagtttacaaccgtgcaattcacaggagaggttttgaaaacacctgtatcattggacatgcttgggcgcatatttaacggttcaggaaagccgattgataatggccctcctattctgccagaagcataccttgatatttcaggaagttcaatcaaccccagtgaaagaacctatcctgaagagatgatacagacaggcatatcgaccatcgatgtcatgaaatcca

SEQ ID NO: 146484 - DNA, 515 bp, Arabidopsis thaliana
tcacaaacgagtaagaatacaaatacaaatagcaaaaaaaatggcaaacaagctcttcctcgtctgcgcaactttcgccctctgcttcctcctcaccaacgcttccatctaccgcactgttgtcgagttcgacgaagatgacgccagcaaccccatgggcccaagacagaaatgtcagaaggagtttcagcaatcacagcacctaagagcttgccagaaattgatgcgcatgcaaatgaggcaaggccgtggtggtggtccctccctcgacgatgagttcgatttggaagacgacatcgagaacccacaaggcccccagcagggacaccagatcctccagcagtgctgcagcgagcttcgccaggaagagccagtttgtgtttgccccaccttgagacatgctgccagggccgttagcctccagggacaacacggaccattccaatccaggaaaatttacaagacagctaagtacttgcctaacatttgcaagatccagcaagttggtgaatgcc

SEQ ID NO: 146485 - DNA, 552 bp, Arabidopsis thaliana
ccagaaccagcttgaccgcaaccttagaccatttttgatagccggaaacaacccacaagggcaggaatggctacagggccgaaagcaacagaagcaaagcgagacatcttcaatggcttcgcacctgagatcttggctcaagccttcaagatcaatgtcgagacggctcagcagctccagaaccagcaagataaccgtggcaacatcgtcaaggtcaacggacctttcggcgtcattaggccacccttgagacgcggcgaaggcggccaacaaccacatgaaatagctaatggtttagaggagactttgtgcaccatgcgatgcactgaaaacctcgatgacccgtcggatgctgacgtgtacaagccatcactcggatacattagcacacttaacagctacaatcttcctatcctcagacttctccgccttagcgctcttcgtggctccatccgtaaaaaccgccatgtgctaccgcaatggaacgtaaacgcaaacgcggcactctacgtgacaaacggaaaggctcatatacaaatggtgaacgacaac

SEQ ID NO: 146486 - DNA, 503 bp, Arabidopsis thaliana
gaaaaattcagattttgaaatgaggatatcaagatgccgcttgttttcgacgccaggttcttggatatccaaaattttgaaacggaatgttatgactctagagattttgtttacctctctagcaatagttggttatatatgcttacctctctaggagttatttatcttgtttcaaaatattagttggttatatatgctttcgagatctttctgatatttattctgccaactcatttttcttcctctttcctttaacctttaaatcgatttaagtagattcctatgcatgcctctctttcactctcctcttctatgcaagtaaacacaaatcctcagttttctacttgtttacgggatctggatattgactaggagcagaactttatgtaatactatggtataatggtttagcataaagagctattcactttgtgcccaaagacagcttctgcatagatgttgcagaccaaataaataaaacttcatgctgtgtttcgacatgc

SEQ ID NO: 146487 - DNA, 470 bp, Arabidopsis thaliana
cgcgtcacgcagataggctcactctctctctctttcgtttctcgctaccatggctaagtcttgctatttcagaccagctcttcttcttctgttagttcttttggttcatgccgagtcacgcggtcggttcgagccaaagattcttatgccgacagaggaagctaacccggctgaccaagacgaagatggtgtcggtacaagatgggcggttctcgtcgctggttcttctggatatggaaactacagacaccaggctgacgtgtgtcacgcatatcaaatactaagaaaaggaggtttaaaggaagagaacatagtcgttttgatgtatgatgatatcgcaaaccacccacttaatcctcgtccgggtactctcatcaaccatcctgacggtgacgatgtttacgccggagtccctaaggactatactggtagtagtgttacggctgcaaacttctacgctgtactcctag

SEQ ID NO: 146488 - DNA, 105 bp, Arabidopsis thaliana
acgcgtttctttagaaagaaaattgtcataggatattccaaaaattaattctacacctaaatatttagaagatgtaaaaatttacaattttaatcaaccaccaaa

SEQ ID NO: 146489 - DNA, 554 bp, Arabidopsis thaliana
  unsure (1)..(554): unsure at all n locations
ggaccacgcgtccgaaacggaaaggctcatatacaaatggtgaacgacaacggagaaagagtgttcgaccaagagatctccagcggacagttggtagtcttgccacaaggcttttgggtcatgaaacatgccataggcgaacagttcgagtggatcgaattcaagacaaacgaaaacgcacaggtcaacacactcgcgggccgtacctcagtcatgagaggtttgccgcttgaggttataaccaatgggtaccagatctctcccgaagaagctaaacgagtaaagtttagcacgattgagaccacactgacccatagcagtccaatgagctacggaaggcctagggcttgaggcttgatgagcgcgtggtggaatagcgtctgaatctaaagttcggtttggtacgactttgaatatgaaataataatgtacaaagaagttctacgcttaagggaactgttttgttntgagcttttattatgacgtctagtgtacaacaacgaacgtcgtgtataagcgatcgttgactcttcacatgtaactctttcctgaat

SEQ ID NO: 146490 - DNA, 528 bp, Arabidopsis thaliana
tctccggatttcgattcccgaggctcgaaaaaaccctaaatctcttctccgttcactcatccaaccgaagatgcgtgagaggcttcacatccagggtggtcaatgcggtaaccagatcggcgccaagttctgggaagtggtttgcgccgagcacggcatcgatccaaccggaaggtacaccggagactcagatctgcaacttgagcgcatcaacgtttactacaatgaagcgagttgcggtagattcgttcctcgtgcagtgctcatggatttggagcctgggactatggatagtctcagatctggaccgtacggtcagacctttcgacctgataacttcgtctttggtcaatccggtgctggtaacaactgggccaagggacactacacggaaggagctgaactaatcgattccgttctcgatgttgttcgtaaggaagctgagaactgtgactgtctccaagggttccaggtttgtcactcgttgggaggaggaactggatctggtatgggaacattgtgatctct

SEQ ID NO: 146491 - DNA, 467 bp, Arabidopsis thaliana
caggtaattaactaacaacaaatggcgaacaagctcttcctggtctgcgcagttctcgccctgtgtttaatcctcaccaacgcttccgtctatcgcacggttgtcgagttcgacgaagatgacgccagtaaccccataggcccaatacagaaatgtcagaaggagtttcagcaagaacagcacctaagagcttgccagagatggatgcgcaagcaaatgtggcaaggacgtggtggtggtccttccctcgacgatgagttcgatatggaagacgacatcgagaacccgcagagacgacagctactccagaagtgctgcagcgagcttcgccaagaagagccagtttgcgtttgccccaccttgagacaagctgccaaggccgttagattccagggacagcaacaccaaccagagcaagtcaggaaaatttaccaggcagctaagtacttgcctaacatttgcaaaat

SEQ ID NO: 146492 - DNA, 488 bp, Arabidopsis thaliana
tcacaaacgagttagaatacaaagacaaatagcaaaaaaaatggcaaacaagctcttcctcgtctgcgcaactatggccctctgattactcctcaccaacgctttcatctaccgcactgttgtcgagtgcgacgaagatgacgccagcaaccccatgggcccaagacagaaatgtcagaaggagtgtcagcaatcacagcacctaagagcttgccagaaattgatgcgcatgcaaatgaggcatggccgtggtggtggtccctccctcgacgatgagtacgatgtggaagacgacatcgagaacccacagggcccccagcagggacaccagatcctccagcagtgctgcagcgagcttcgccaggaagagccagtttgtgtttgccccaccttgagacaagctgtcagggccgttagcctccagggacaacacggaccattccaatccaggaaaatttacaagacagctaagtacttgcctaacattt

SEQ ID NO: 146493 - DNA, 528 bp, Arabidopsis thaliana
tgagaaattctcatggggcaaacctgatctttcagtacttagaaagctatgctgggaaaagtttaattggaacggcaagaaaacagatgatctactattaccagtcttgaaggagtatgaaaagcgcgagacgcaacttcggattgaagctttctattcctttaatgaaagatttgcaaagatccgtagtaaaagaatcaacaaagctgtcaaaggaattggtggaggtctatcgtcagaagtgactgatcatactctccaggaaggtccaagaaaacgaaataagaaaagagttactcctcatgaaactgaagataacaacacctcagacaaagatacacctatagccaatgagaaagtgaaaaacaaaaggaagcgcgtagaaaaaccatctagtagtagaggtagaggcagagcccagaaaagaggacgaggaagaggaagagtccaaaaacatctccttgagctatccgacggcagttctgatgatgatgatgatgacaaggtagttggaatggaggcaaaact

SEQ ID NO: 146494 - DNA, 492 bp, Arabidopsis thaliana
cccgttcggtgtcattaggccgcctttgaggggccagagacctcaggaggaggaagaagaagaagaaggacgacatggacgacacggtaatggcttagaggagaccatctgcagcgccaggtgcaccgataacctcgatgacccgtctcgtgctgacgtgtacaagccacagctcggttacatcagcactctcaacagttacgatctccccatccttcgcttcatccgtctctcagccctccgtggatctatccgtcaaaacgcaatggtgcttccacagtggaacgcaaacgcgaacgctattctttacgtgacagacggtgaagcccaaatccagatcgtaaacgacaatggtaacagagtgtttgacggacaagtctctcaaggacagctcatagccgtaccacaaggtttctcggtggtgaaacgcgcaacaagcaaccgattccagtgggttgagttcaaaacaaacgctaacgcgcaaatcaacac

SEQ ID NO: 146495 - DNA, 443 bp, Arabidopsis thaliana
cggacgcgtgggtggatgtgccgagaccttcatggactcgcagtctattcaaggacaacaacaaggccaaccatggcaaggactacagggacaacaagggcaaccatgggaaggacagggacaacagggacaacatggaagacaaggccaaccatgggaaggacagggacaacagggacaacaaggacgacagggacaacaaggccaaccatgggaaggacagggacagcagggacaacaagggttccgtgacatgcaccagaaggtggaacatgttgtgacgcgtagacgtctttgccaacactccaggctctgaccactggatctacaactcatgagaacagccacttgttatcatcgctcttatagaattgtcaactaccaaaaccaactcgtccgttaccttagagtgttcatttggctggatacaaccagtattttgt

SEQ ID NO: 146496 - DNA, 439 bp, Arabidopsis thaliana
ctcacaagtcacaactcaaataatctttgtcttcctcctacaaatattgggttttctccttcattttcttgcagtgctattggagccctaattttgggttgccttctgcttcaagcatcaaactctaatgctcagttgaggcctgatttctacttcgggacgtgcccatttgtttttgatatcattggaaatatcatcgtcgatgaactgcagactgatcctcgtattgccgcgagcctccttcgtcttcactttcacgactgctttgttcgtggttgtgatgcatcgatcttgcttgacaattccacatcattccggactgagaaagatgctgctccgaacgcaaattcggctcgagggtttaatgtcatagatagaatgaaagtagcccttgagagagcttgcccaggaagagtctcttgtgcagatattctcacca

SEQ ID NO: 146497 - DNA, 527 bp, Arabidopsis thaliana
cggacgcgtgggcaaaagtcttacaagctgttcaagagtcttgtggttgtcggagaatacggtgttgggaagacagcattatgccagcagatcttcaatgattatgatgtgaggaatgcttatgccccgaggatttgggtatctatgcatagcaatgaatctaaggagggacttgatgggaagatatgtgtgttgaagacgatcttgaagggtcttggagttgaagagtcaatgttcgaatccatccatagagaagtagtagaagaagtttcaaacaggcaggaagctggagaaattgatggagagacggctaaagagaaggagatctctgctctgctctatgcacttcacttgaatctgaggtggaagaagtatctgattgtgtttgatgatgtccaggagatcgataactgtgacgagaaactcgatgcgaaactcaacgagggtgaaaaatggggaaagtatctttcagatggattccctaaagggtctggtgggagggtcatatacacgaccagagatgagaa

SEQ ID NO: 146498 - DNA, 541 bp, Arabidopsis thaliana
gacaaacaaaacaaaggatgccgaagaagaagccggcgaaacattccggcgttgatgacatcaccattccggtatcaccacaaaccggatcttcgattgatacttggtggtggctaacacataaaggaaccacaacttcatttctctgcatctccctcttcgcattactgatccgatctgctgtaacaatgtatccatactccggcgccggaattcctcctaaattcggcgatttcgaagctcagagacattggatggagataaccacaaatcttccagttatcgattggtatagaaatggcacttacaacgatctcacttactggggattagattatcctcctttaactgcttatcaaagttacatccatggaatcttcctccgattcttcaatcctgaatctgttgctcttctaagctctcgtggtcacgaatcttatcttggaaaattgttgatgagatggacagttttatcgtctgatgctttcatattttttccagcttgttctgttttcgtgtggtgtaccataggaatcgaact

SEQ ID NO: 146499 - DNA, 494 bp, Arabidopsis thaliana
gtcactcaggatcagatcttagctaaattgagacaagctcaaaatgagtaagtttcagagtgaggccgttcgtgaagccatcactactatcacagggaaatccgaggcaaagaaacgtaactttgtcgagactattgagctccagatcggtctgaagaactatgaccctcaaaaggacaagcgtttcagtggatctgtcaagttaccacatatcccccgtcctaaaatgaagatctgcatgctcggagatgcccagcatgttgaagaggctgagaagatggggttggaaaacatggatgttgagtctctaaaaaagcttaacaagaacaagaaactcgtcaagaagcttgcaaagaaataccatgctttcttggcctctgagtctgtcattaagcagattcctcgtcttcttggtcctggtcttaacaaggcaggaaaattcccaactcttgtgagccaccaggattccttggagtcaaaggtgaatgaaacaa

SEQ ID NO: 146500 - DNA, 481 bp, Arabidopsis thaliana
  unsure (1)..(481): unsure at all n locations
cgtgttttttatatatattttgaaaatcttttacgccttaaaaggatctactttaattaaaaaaaaaatggcaccggaatgcattgcaacggtccctcaaatattcagtgaaaacaaaaccaaagaggattcttcgatcttcgatgcaaagctccttaatcagcactcacaccacatacctcaacagttcgtatggcccgaccacgagaaaccttctacggatgttcaacctctccaagtcccactcatagacctagccggtttcctctccggcgactcgtgcttggcatcggaggctactagactcgtctcaaaggctgcaacgaaacatggcttcttcctaatcactaaccatggtgtcgatgagagcctttngtctcgtgcctatctgcatatggactctttctttaaagccccggcttgtgagaagcagaaggctcagaggaagtgtggtgagagctccggttacgctagtagtttc

SEQ ID NO: 146501 - DNA, 457 bp, Arabidopsis thaliana
gtttttgaaaatgacatcgagactttggcaaaggaagtacaagagggttgatctgcttcagatctaaaggcaatcaaagagaagaagaagaaagctaagcgttcccgcaaaaagcagcttgttcaagaagaggaacgagtaaagggaaaagtcagcatgaaggtgtacttgtcatacatgggtgctgcatataaaggggctctgatttctcttattatactcgcacaagctgctttccaatttcttcagattgctagtaattggtggatggcttgggcaaattctcaaactgaaggtgacgaatctaaagtggatcctactctgcttctcatcgttcatacggctatagctttcgggagctctgagtacatatttgttcgagctgctctggttgcaacttttggtcttgcagctgctcagaaactgtccataaatatgcttatatgtgtgttccgag

SEQ ID NO: 146502 - DNA, 387 bp, Arabidopsis thaliana
gccgccgtcacttgcaaagccgacgccgccgctctttgcgtcacttgtgattccgatatccactctgctaatccactcgctagccgacacgaacgtgtccccgtcgaaactttcttcgactccgccgaaaccggcgtcgccaaaatctcagcttcttcgacttttggtatccttggctcgtccgccaccaccgttgatttaaccgctgttccggttatggctgatgatctcggtttatgtccgtggttacttcctaatgatttcaacgaaccggctaaaatcgaaatcggaactgtaaacatgaaaggtccttctgacttgatgattgctgatttcgatcggcttattgatttcgaggtttcgaattcgttcaatcatcatcaaaac

SEQ ID NO: 146503 - DNA, 504 bp, Arabidopsis thaliana
taaaaatggctcgagtctcttctcttctttctttctccttaacacttttgatccttttccatggctacgcggctcaacagggtcagcagggtcagcagtttccgaacgagtgccagctcgaccagctcaatgcgctcgagccttcacacgtactgaagagcgaggctggtcgcatcgaggtgtgggaccaccacgctcctcagctccgttgctcaggtgtctcctttgcacgttacatcatcgagtctaagggtctctacttgccctctttctttaacaccgcgaagctctccttcgtggctaaaggacgaggtcttatgggaaaagtgatccctggatgcgccgaaacattccaagactcatcagagttccaaccacgcttcgaaggtcaaggtcaaagccagaggttccgtgacatgcaccaaaaagtggagcacattaggagcggtgataccattgccacaacacccggtgtagcccagtggttctacaacgacggacagc

SEQ ID NO: 146504 - DNA, 519 bp, Arabidopsis thaliana
aacatcgtcaaggtcaacggacctttcggcgtcattaggccacccttgagacgcggcgaaggcggccaacaaccacatgaaatagctaatggtttagaggagactttgtgcaccatgcgatgcactgaaaacctcgatgacccgtcggatgctgacgtgtacaagccatcactcggatacattagcacacttaacagctacaatcttcctatcctcagacttctccgccttagcgctcttcgtggctccatccgtaaaaacgctatggtgctaccgcaatggaacgtaaacgcaaacgcggcactctacgtgacaaacggaaaggctcatatacaaatggtgaacgacaacggagaaagagtgttcgaccaagagatctccagcggacagttactagtcgtgccacatggcttttcggtcatgaaacatgccataggcgaacagttcgagtggatcgaattcaagacaaacgaaaacgcacaggtcaacacactcgcgggccgtacctcagtcatgaga

SEQ ID NO: 146505 - DNA, 500 bp, Arabidopsis thaliana
gataataatcaatacaaaataatggcttggttcatgcataaatggccatccccggtacaagagaaggttccatcggaacaaaattttattttagtttggggtgcccccctttttaagtgtgaaaagaaatgacaaaaagatattggaacatcgatttggaagagatgatgagagcaggagttcattttggacatggtacgaggaaatggaatcctagaatggcaccttatatttctgcaaagcgtaaaggtattcatattataaatctgactagaactgctcgttttttatcagaagcttgtgatttagtttttgatgcggcaagtaggggaaaacaattcttaattgttgggacaaaaaataaagcagctgatttagtgtcgcgggctgcaatacgggctcggtgtcattatgttaataaaaaatggctcggcggcatgttaacaaattggtccactaccgaaaaaagacttcataagttttaggacttgagaactgaa

SEQ ID NO: 146506 - DNA, 492 bp, Arabidopsis thaliana
cggacgcgtggggaaaaaatcaaaatcaaaatcagagcaccaaaaccgactcagatctagatcggaattctccaatggctctcgaatgggttgtgttaggttacgcagcagcagctgaagcgatcatggtgatcctcttgacgatgcctggacttgacgctctccgcaaaggattagtcgctgtaactcgtaatctcttaaaaccgtttctctctataatcccgttttgtctcttccttcttatggatatttactggaagtacgagactcgaccttcttgcgatggtgattcgtgtactccttctgagcatcttcgtcaccagaaatcgatcatgaagtctcagcgtaacgcgcttctgattgcgtcggctcttgttttctactggattttgtactctgtcacgaatttggttgtgaggattgagcagcttaatcagagggttgagaggctcaagaacaaggattaagatccagcttcttcttccctcgtcg

SEQ ID NO: 146507 - DNA, 491 bp, Arabidopsis thaliana
ggaagaaaaatgggtcgagtctcatctattatctctttctcttggacactcttgatcctcttcaatggctacactgcccaacagtggcccaacgagtgccagctcgatcaactcaatgcgctcgaaccatcccaaatcatcaagagcgagggtggtcgcatcgaggtctgggaccaccatgcaccccagctccgttgctccggctttgcctttgagcgtttcgtcattgagcctcagggtcttttcttgcccactttcttgaacgccggcaaactcacgtttgttgttcacggaaggggtctaatgggaagagttattccgggatgcgccgagacgttcatggagtcaaccggtattggagaaggtcaaggtcagggtcagagtcaagggttccgtgacatgcaccagaaagtagagcacctacggtgcggtgacaccattgcaacaccatctggtgtagctcaatggttctacaacaatggaaatgagcc

SEQ ID NO: 146508 - DNA, 556 bp, Arabidopsis thaliana
  unsure (1)..(556): unsure at all n locations
cttttcagcagcctcttagtaatatggatggttggcttccacatcgtcagtttcctccgtcaggggattttgagcgtcctcgaagttctggtgctgcttttgctgatttccaggagaagtttccgttgcttaaccttccatttgatgataagctgcttcctcgatttccatttcagccgagaacaatgggaacttcgcatcaagacataatggccaatctttcgatgaggaaaagatttgaaggtactggtcattctatgcaagacctatttggcggaacaccaatgccgtttctacccaatatgaaaatccctcctatggatccacctgtcttcaaccaacaagagaaggacttaccgcctttgggtttggatcagtttccatcagctctttcatctatcccagagaaccatttaaaggtgctggagaatataatgcttagaactggctctggaattgggcacgtacagaaaaagaaaacatgagttgatgcatggtccgaggatgaactatattctttctgtattgngattcgcagacatgggtatggaaactg

SEQ ID NO: 146509 - DNA, 506 bp, Arabidopsis thaliana
gaaaatggttaagctcagcaatctcctcgttgcaaccttcggggttctcctcgtccttaacggctgccttgcgaggcagtcacttggggttcctcctcagctacagaacgagtgtaacctcgacaacctagatgttctccaagccaccgaaactatcaagagtgaagccggtcagatcgagtactgggaccacaaccaccctcagctccgatgtgttggtgtttccgttgctcgttatgtaattgaacaaggcggtctttacttgcccaccttcttcacttccccaaaaatttcctacgtcgttcaaggaacgggtatcagcggaagagtggtccctggatgtgccgagacctttatggactcgcagccgatgcaaggacaacaacaaggccaaccatggcatggacgacagggacatcaaggccaaccatgggaaggacagggacaacatggacaacaaggaagacaaggccaaccatgggaaggacagggacatcagggacaac

SEQ ID NO: 146510 - DNA, 497 bp, Arabidopsis thaliana
taagaaccaagtcaagatgatacggattaatcctttattcttgcgcttaagatcttcctatttccaaaggaactggagttacatctcttttccatttccattcaagagttcttatgtgtttccacgcccctttaagaccccgaaaaatcgacaaattcccttttcttaggaccacatgcgagataacgaaaaaaaaaaagagagaatggtaaccccacgattaactattttatttatgaatttcatagtaatagaaatacatgtcctaccgaaacagaatttgtaacttgctatcctatcatcttgcctagcaggcaaagatttcactccgcgaaaaagatgattcattcggatcaacatgaaagcccaactacattgccagaatttatatattggaaagaggtttacctccgtgcttctatggtacaatccttttcccgcggagccttctttcttctcggtccgcagagacaaaatgtaggactggtgccaacatg

SEQ ID NO: 146511 - DNA, 404 bp, Arabidopsis thaliana
  unsure (1)..(404): unsure at all n locations
gtttcgagtctctntaatctttggcgggttccgtaaaaaaaaaaatggccttttctagattccaatctgggttttgtcctatctcttcgtgtccctctcttgagaatttcatcgaaaggattaaagacgcatgtcgtttcaccctctccgctgttctagggacaattctctcggcggtcttgactttcttcttcgctttagtgggcacattgcttggagcacttactggagctttgataggccaagaaaccgaaagtgggtttatccgaggagcggcggttggagccatttcgggagctgttttctctatcgaagtctttgaaacatctcttgttctttggaaatctaatgagtcacgttttggatgtcttctctacttgattgatgtcatttgttagtctgat

SEQ ID NO: 146512 - DNA, 485 bp, Arabidopsis thaliana
acttatctctatatacccccttttaatttgtgtgctcttagcctttactctatagttttatatcatatcaatcgacatggcgaatgtggaccgtgatcggcgtgtgcatgtagaccgtactgacaaacgtgttcatcagccaaactacgaagatgatgtcggttttggtggctatggcggttatggtgctggttctgattataagagtcgcggcccctccactaaccaaatcttggcacttatagcaggagttcccattggtggcacactgctaaccctagctggactcactctagccggttcggtgatcggcttgctagtctccatacccctctttctcctcttcagaccggtgatagtcccggcggctctcacttattgggctagctgagacaggaattttggcttctggtttgtttgggttgactggtctgagctcggtcttgtgggttctaacttcctttggggactagtgatacatgcca

SEQ ID NO: 146513 - DNA, 389 bp, Arabidopsis thaliana
  unsure (1)..(389): unsure at all n locations
cagacgaagcttttaggcccttgtcatccattctcaagaaacggttttggccacttgactcttttcccaaagtatcagtctctggcgatctctgaagtgttttccttgaataagtggctagagaagaatgccttctgatactcctgttaatagacgtcgagccatcagtctccattttgctcatcccttgctcaggagtcttgtttgcaaccctaatgggtggacacgtaattatgctgctgagcaacacctagatcagtagagaccatcgcttcaaaaggtctgtccgtcctttnaggagttaaccaattatctttggacgtattacataatgatgacccttcctcaagagggaaatcttttcctcccggcttagagattttatctgc

SEQ ID NO: 146514 - DNA, 334 bp, Arabidopsis thaliana
gccggtcagatcgagtactgggaccacaaccaccctcagctccgatgtgttgttgtttccgttgctcgttatgtaattgaacaaggcggtctttacttgcccaccttcttcacttccccaaaaatttcctacgtcgttcaaggaacgggtatcagcggaagagtggtccctggatgtcccgagaccttcatggactcgcagccgatgcagggacaacaacaaggccaaccatggcatggacgacagggacaacaaggccaaccatgggaaggacagggacaacagggacaactgggaagacaaggccaaccattgggaaggacagggacaacag

SEQ ID NO: 146515 - DNA, 513 bp, Arabidopsis thaliana
acgataatgggaagcgcaccagctcagattccgactagcttcggccatgagcttagggcttgtcttcgttgccgactcgtcaagacctatgaccagtttagagacgctggttgcgagaattgtcctttcttcaagatggaagaggatcatgagcgtatcgtggaggtcactacccctaatttcaatggtataatctctgtgatggatccaagtagaagctgggcggctaggtggttaagaatcgggaagtttgctcctggttgctacacacttgctgtctcagagccactccctgaggaaatgcagcacttatgccaagaggagcgtgtacaatatgttctgccgaaacgcatgtgaagaaatctatcacgatgaaggctagtagggaagaccaagtattccactttttcattaaaagcttcttgaaacattattaggtgctttatttgaatcttcaatcttgtggaatggtcgatgttaatgaagtcagagactccttaacacttttctatg

SEQ ID NO: 146516 - DNA, 369 bp, Arabidopsis thaliana
aacacatacacacatagcggaaaatggcaaccatgtggttcctggaatgcgcaggtttcgctttgtgcttactggttaccaagggtggcatctaccggacggtggttgtgttcgaagaagatggcgccactaacccaataggcccaataatgaggaaatgccgaacggagtttgagaaagaacatcacctaagagcttgccagcaattgatgctccagcaagcaaggcaaggccgtagcgatgagtttgatttcgaagaccacatggagaacccacagggacaacagcatgaacaacagctatttcagcagtgctgcaacgagcttcgccaggaagagccagattgtgtttgccccaccttgaaacaag

SEQ ID NO: 146517 - DNA, 555 bp, Arabidopsis thaliana
  unsure (1)..(555): unsure at all n locations
cacaaacgagtaagattccaaatccaaatagcaaaaaaaatggcaaacaagctcttcctcgtctgcgcaactttcgccctctgcttcctcctaaccaacgcttccatctaccgcactgttgtcgagttcgacgaagatgacgccagcaaccccatgggcccaagacagaaatgtcagaaggagtttcagcaatcacagcacctaagagcttgccagaaattgatgcgcatgcaaatgaggcaaggccgtggtggtggtccctccctcgacgatgagttcgatttggaagacgacatcgagaacccacaaggcccccagcagggacaccagatcctccagcagtgctgcagcgagcttcgccaggaagagccagtttgtgtttgccccacctggagacaagctgccagggccgttaggcctcagggacaacacggaccattccaatccaggaaaanttacaagacagctaagtacttgcctaacatttgcaagatccagcaagttggtgaatgcccctttcagaccaccatccctttcttccttcctactaataga

SEQ ID NO: 146518 - DNA, 462 bp, Arabidopsis thaliana
gtccagttgatgcattcttttaactaaaaaaacagattctttaccaattaatttgagacattttgttttgcagctgataacgaacgataagttcttgagcgtggagcatagggtacgaccgaacaaagatagaccgcggatttcagttgcgtgcttctttagctcgagtctttctccaaattccacggtttatggaccgattaaagatcttttgtctgatgaaaaccctgctaagtacaaagatatcaccataccagagtacactgcaggatttcttgcgagcatctttgatgaaaagtcgtatttgactaattacatgatatgaagaaaatacttgtccgagtgcaagatatatatttgtgcgttttgcatatgttacgctacattttctttgttcccgctatagagttcctcaaccattgtaccaataagaaaaaatgttttctacttcatgcttaaaac

SEQ ID NO: 146519 - DNA, 423 bp, Arabidopsis thaliana
gccgagagcaacagccacagaagaacattttcaatggatttggacccgaggttattgctcaagctttgaagatcgatcttcagacagcgcagcaacttcagaaccaagatgacaaccgtggaaacattgtccgagtccaaggcccgttcggtgtcattaggccgcctttgaggggccagagacctcaggaggaggaagaagaagaagaaggacgacatggacgacacggtaatggcttagaggagaccatctgcagcgccaggtgcaccgataacctcgatgacccgtctcgtgctgacgtgtacaagccacagctcgtgtacattagcacttttaacagtttcgatctctccatccttttcttttattcgctctcagccctccgtggatttatccgtcaatacgcattgttgctttcacagt

SEQ ID NO: 146520 - DNA, 487 bp, Arabidopsis thaliana
aaacaaaaagaaaatggttaagctcagcaatctcctcgttgcaaccttcggggttctcctcgtccttaacggctgccttgcgaggcagtcacttggggttcctcctcagctacagaacgagtgtaacctcgacaacctagatgttctccaagccaccgaaactatcaagagtgaagccggtcagatcgagtactgggaccacaaccaccctcagctccgatgtgttggtgtttccgttgctcgttatgtaattgaacaaggcggtctttacttgcccaccttcttcacttcctcaaaaatttcctacgtcgttcaaggaacgggtatcagctgaagagtggtccctggatgtgccgagaccttcatggacttcgagccgatgcaaggacaacatcatggccaatcatggcaaggacgactgggacaacatggccaaccatgggaaggacagggacaacagggacaacaaggaatacaaggtcaacca

SEQ ID NO: 146521 - DNA, 448 bp, Arabidopsis thaliana
ggagacccgggtcgacgttttgaggacatgcaccagaagttggagattttccggcgaggggatgtgtttgcttcgcttgccggagtttcacagtggtggtacaaccgcggtgattccgatgccgtcattgtcattgttcttgatgtcaccaacagagaaaaccagcttgaccaagtccctaggatgttccaactagccgggagcagaacgcaagaagaagaacaaccattaacgtggccatcaggcaacaacgctttcagcggtttcgacccaaacataatcgcggaagcattcaaaatcaacatcgagacagctaagcaactacaaaaccagatggacaacagaggtaacatattccgagcaaatggtcctttccatttcgtcatcccaccggcttgtgaatggcagcaagatggcattgcttatggcatcgaagtgacttattgca

SEQ ID NO: 146522 - DNA, 106 bp, Arabidopsis thaliana
  unsure (1)..(106): unsure at all n locations
agtcaccgcaagaatgtttgacgtgcatactctgattgcagaccggcctaaaccgtgaggtgatcatgctcnattctccgcctatattatcataaataccttctac

SEQ ID NO: 146523 - DNA, 420 bp, Arabidopsis thaliana
cggaagagaaggccctcggacatggttgttttactctttgcagtaatttattgaaattgtaacaaacgagagaagtaataatgatccttattcgaaagaaaaaaaaatgatccttatttgtgcttgacacaaccaataaaaatatatgcaactccatacgaagggaggaaacgcccctatgatggtttgaagacctaaaatattggttgttccatcttgaagttgaagaatccaagcaacactagacgtttaatccttttgtttttaaggaccatcagtataaaatgtgaaaattatggtttgtaaatcacttgaactatctctactctgacaatccactcaagccttagctatgaattagatctcactttttattgaccgctaaatcatgcatctccaaagttgttcgatcgatgactt

SEQ ID NO: 146524 - DNA, 441 bp, Arabidopsis thaliana
cacacgtggccgttactcctggggaccactgagcctgagcgtctacttctaattagtctaatcacattaatttgattacccgttcattattattagatttcgaagaaaaccattcggttgtacaatagtaagttaaagttattacaaatcgtattgaatcaggcaccactaaataattatttgattaaaaaaacaacacatgaatgattaaataatttaactaattaacatatcatatatagtataaggttggttgattatgcgatcagtccacccacgaaaggcactccggtttgtccaatccaaccttcaccaacaaggaaattggtgaccgtgaaattggaagcatcagttgcgttgatgacgtgataaccaggccatagtgactcgtgttgttgtgtcagatccaggtccggttttttatatttcgcgtagaaagtg

SEQ ID NO: 146525 - DNA, 498 bp, Arabidopsis thaliana
  unsure (1)..(498): unsure at all n locations
aaacaaacagagagcgagtcacgcgccgagttttcctcactggttctcaataaatctctctctcttccttctctatcgctttcatttttctcctccagatctcgattccaatctctctctccctctctacttccttcaacagaaatggaaacgttcctatttacctctgaatccgtcaatgaaggacacccagacaagcnttgtgaccagatttctgatgcgatccttgatgcttgcttagagcaagatcctgaaagcaaagtggcgtgtgagacatgcaccaagaccaacatggtgatggtgtttggtgagatcactaccgctgcgaaagttgactatgagaagattgttagatccacttgcagggagattggttttatctctgctgatgttggtcttgacgctgacaaatgcaatgttttggttaacattgagcaacagagccctgacattgctcatggtgtncatggtcatttgaccaagaagcctgatgatatt

SEQ ID NO: 146526 - DNA, 399 bp, Arabidopsis thaliana
aaagaacttaaatcaaaatacttaatagcatggcgatacatttatacaaaacttctaccccgagcacacgcaatggagccgtagacagtcaagtgaaatccaatccacgaaataatttgatctgtgggcagcatcattgtggtaaaggtcgtaatgccagaggaataattaccgcaaggcatagagggggaggtcataagcgtctataccgtaaaatagattttcgacgaaatgcaaaagacatatatggtagaatcgtaaccatagaatacgaccctaatcgaaatgcatacatttgtctcatacactatggggatggtgagaagagatatattttacattccagaggggctataattggtgataccattgtttctggtacagaagttcctataaaaa

SEQ ID NO: 146527 - DNA, 506 bp, Arabidopsis thaliana
ccttacttgccgcctccacaatatacttctccgctttgtctacatattgaaatggaacgttttcgataaatttacggatcaaaaaataaaaataaaaagaggtcagaggatgaattaatggattggttacctatagtggcaggagtatcgttatagacggtggaggattggacgattgtaactcgcacggtggtggatggggcaacgccgttaaaaggagttgcgttttggacagttgacatatctttagtactagacatatcaactcgagtctttgttttttactttggttcatgacactcagagacttgagagaagcaatatatagactttttttttgttttttttttgtggtcacgtttattttcctattggagacggtaacgaagatcgaacctgtggtggaaatgaaacaaggtgggactagcccacgtggtttcttttctctgcattgaaatgtttttgtttttttttgtaaagttcacatcaaacctacttattattga

SEQ ID NO: 146528 - DNA, 353 bp, Arabidopsis thaliana
ggaagcataacgaacaccaactcggatggagaacatctaatttttggtttagtaatagcacgcaagataaagctacatgtctaccttaagtacactaggtctgacatctgtgcctttttactacgagtgcgattttgtcgagttctatgaaactgtgtctatcactctcttgattagcgacactgtgttgttaatgtgaggtgccagaacataatggcgacatgaggttgaagagcatactgtgtcggtagagccgatgaggctacgcaccctgcctgcactagagcatctacagctgtgtgttttttcacgtgggtcttggtctatgcagcttaaggctgtattccctgtct

SEQ ID NO: 146529 - DNA, 556 bp, Arabidopsis thaliana
agaaaacatacacaaatagcaaaacatggctaacaagctcttcctcgtctgcgcaactctcgccctctgcttcctgctcaccaacgcttccatctaccgcaccgttgtcgaattcgaagaagatgacgccagcaaccccgtaggtccaagacagagatgccagaaggagtttcagcaatcacaacacctaagagcttgccagagatggatgagcaagcaaatgaggcaaggacgtggtggtggtccttccctcgacgatgagttcgatttcgagggcccccagcagggataccagctactccagcagtgctgcaacgagcttcgccaggaagagccagtttgcgtttgccccaccttgaaacaagctgccagggcagttagcctccatggacagcacggaccattccaatccaggaaaatttaccagtcagctaagtacttgcctaacatttgcaagatccagcaagttggtgaatgtcccttccagaccaccaatccctttcttccctccttactactagagtccaagcccggcctagcacgatgatcatgagtg

SEQ ID NO: 146530 - DNA, 538 bp, Arabidopsis thaliana
  unsure (1)..(538): unsure at all n locations
ggaaaacttactgnttattttatttttatttttattttttcctttcctttcctcttatgttaaatgatgaatttatgttgtataatcagaagagttaggaatgaaaatggaaatatatagtgtacaaaattatactaaaacaggtcagttttgttaatatacattatacttttaaacatagaaatatatagtgtacaaaaaaataagggactatattacttttcaaatgcaatagaatacaatgctatttatgatatgtatgccatcaatatatattttagtctagctacatttattgaaatttgcataacttatgtgctacagtacttgaaagaaatatattctcagaaaattatatattcaacatattcagttttataaactngtgagtaatttcaaaactaattaaatttgctattagcaaatatgagttgtttctttagaattttctttnttgacacacttgtgagttgacttggatactctgctntgctgtgttcattttggatattaataaaaatcaaaactttattttgtt

SEQ ID NO: 146531 - DNA, 290 bp, Arabidopsis thaliana
  unsure (1)..(290): unsure at all n locations
catcaaacaaaaagaaaatggttaagctcagcaatctcctcgttgcaaccttcggggttctcctcgtcctaaacggctgccttgcgaggcagtcacttggggtggctcctcagctacagaacgagtgtaacctcgacaacctagatgttctccaagccaccgaaactatcaagagtgaagccggtcagatcgagtactgggaccacaaccaccctcagctccgatgtgttggtgttttcgttgctcgttatgtaattgaacaaggcgggctntacttgcccaccttcttc

SEQ ID NO: 146532 - DNA, 494 bp, Arabidopsis thaliana
aaagaaaatggttaagctcagcaatctcctcgttgcaaccttcggggttctcctcgtccttaacggctgccttgcgaggcagtcacttggggttcctcctcagctacagaacgagtgtaacctcgacaacctagatgttctccaagccaccgaaactatcaagagtgaagccggtcagatcgagtactgggaccacaaccaccctcagctccgatgtgttggtgtttccgttgctcgttatgtaattgaacaaggcggtctttacttgcccaccttcttcacttccccaaaaatttcctacgtcgttcaaggaacgggtatcagcggaagagtggtccctggatgtgccgagaccttcatggactcgcagccgatgcaaggacaacaacaaggccaaccatggcaaggacgacagggacaacaaggccaaccatgggaaggacagggacaacagggacaacaaggaagacaaggccaaccatgggaaggacagg

SEQ ID NO: 146533 - DNA, 413 bp, Arabidopsis thaliana
caagataaccgtggcaacatcgtcaaggtcaacggacctttcggcgttattaggccacccttgagacgcggcgaaggcggccaacaaccacatgaaatagctggtggtttagaggagactttgtgcaccatgcgatgcactgaaaacctcgatgacccgtcggatgctgacgtgtacaagccatcactcggatacattagcacacttaacagctacaatcttcctatcctcagacttctccgccttagcgctcttcgtggctccatccgtaaaaacgctatggtgctaccgcaatggaacgtaaacgcaaacgcggtactctacgtgacaaacggaaaggctcatatacaaatggtgaacgacaacggagaaagagtgttctaccaagagatctccagcggacagttactagt

SEQ ID NO: 146534 - DNA, 389 bp, Arabidopsis thaliana
gaagaagcaaactctcaagctccgtcgggaaaaaaaggaaaaccagatcggaaagttcacgtttttcaaatcttctccggagaaatcagattacttgattcttcaaacaatggatgtgattaagacgcaacagatttcagcaaggacgatcgagaaagtggttgttcatccactagtcttgcttagtatcgtcgaccattacaatcgcgtcgctaaggattcaagcaagcgtgtcgtcggtgttcttctggggagcagctctcgtggtggttgtgatgtcaccaacagctatgcagtgccctttgaggaggatgacaaagacccaagcatctggtttcttgatcacaactaccatgagtcaatgttccacatgttcaagagaattaatg

SEQ ID NO: 146535 - DNA, 516 bp, Arabidopsis thaliana
aaaatcccgagttcccgacacaatcgcccttgttcttcccctttaactctgaacacatcaggtttggtttcgtgtttcaactttgagatacttctctagatttcaatcggagagtcttttgttccgccaaagtttcaatttttcaataccccacgacggcaaatagggttcatggaagatcaacccattaaccagtgctctagtagcaccaatgcgtcggagaaaactccagaatcaacccttgagcttaacatcaaaacgttagactcgcggacgtatactttccaagtgaacaagaatgaaactgttttgctattcaaggagaagattgctagtgagacaggggtgccggttggtcagcagcggctcattttccgaggacgggttttgaaagatgatcatcctctctcggagtatcatttggaaaatgggcatactttacacttgattgtgaggcagccagcaaaatcagctccttcctctggtacaccttcacatggggcaactgcaaatgat

SEQ ID NO: 146536 - DNA, 556 bp, Arabidopsis thaliana
acatagcaaaaaatggcaaacaagttgttcctcgtctgcgcagctctcgctctctgcttcctcctcaccaacgcttgcatctaccgcaccgtcggtgagggcgaagaagatgacgccactaaccccataggcccaaaaatgaggaaatgccgcaaggagtttcagaaagaacaacacctaagagcttgccagcaattgatgctccagcaagcaaggcaaggccgtagcgatgagtttgatttcgaagacgacatggagaacccacagggacaacagcaggaacaacagctattccagcagtgctgcaacgagcttcgccaggaagagccagattgtgtttgccccaccttgaaacaagctgccaaggccgttagactccagggacagcaccaaccaatgcaagtcaggaaaatttaccagacagtcaagcacttgcccaacgtttgcgacatcccgcaagttgatgtttgtcccttcaacatcccttcattcccttctttctactaaatctcatacaaaccctcaaagcgtatgagagtgtgttggtgaatataca

SEQ ID NO: 146537 - DNA, 448 bp, Arabidopsis thaliana
  unsure (1)..(448): unsure at all n locations
agaagaggaagaagaagaagaagcagagacaggaagaagaggaggaaccagtctcatctcgccggagaagaagaaagatgtcgtggcaatcatacgtcgatgaccatctcatgtgcgaggtcgaaggcaaccaccttacacacgccgncatcttcggccaagacggcagtgtctgtgctcagagctcagctttccctcagttgaagcctgcagagatagcaggaatcaacaaagactttgaagaagccggacatcttgccccaaccgggctattccttggcggtgagaagtacatggttgtccaaagtgaggctggagccgtcatccgagggaaaaagggacctggtggagtcactatcaagaagactactcaagctctagtctttggtatctatgatgaaccgatgaccggagggcaatgcaacttggtcgtggagaggcttcgcga

SEQ ID NO: 146538 - DNA, 478 bp, Arabidopsis thaliana
gtgacaacaaggaagacaaggccaaccatgggaaggacagggtcaacatggacaacaaggacgacagggacaacatggccaaccatgggaaggacagggacagcatggacaacaagggttccgtgacatgcaccagaaggtggaacatgtgagacgcggagacgtctttgccaacactccaggctctgcccactggatctacaactcaggagaacagccacttgtcatcatcgctcttctcgacatcgccaactaccaaaaccaactcgaccgcaaccctagagtgttccatttggccggaaacaaccagcagggaggctttggcggttcacagcaacaacatgaacagaaaaacttgtggagcgggttcgacgcacaggtattagcttaagcattgaaaaatgacgtttcagttggcttagcagcttcagatccaacaagacagcagatgaaacatcgtttgtgttaagggaccttt

SEQ ID NO: 146539 - DNA, 557 bp, Arabidopsis thaliana
ggcggaactacagaaccaagagcctctttctaatcggagttactttaatccccttgaaccatgtcaaagagaaagactaaagagccaaaggtcgatgttgtgactcttggaccatctgttcgtgagggagagcaagttttcggtgttgtccacatctttgctttattcaacgacactttcattcatgttactgatttgtctggtcgtgaaactcttgtccgtatcaccggtggaatgaaggtgaaagctgatagagatgagtcctcaccttacgcatctatgcttgcagcacaggatgttgctcagcgatgcaaggaacttggtatcactgccatgcatgtgaagcttcgtgccacaggtggatacaagaccatgacaccttgtcctggagcacagtctgcccttaaagcccttgctcgttccggcattgaaaatatgacgtattgaggatgtttctttcatcccaacagacagtactctcatattggttggtagaagaggaagatagctcttgagtttcccgctttgtgtgatgtttctattaagctctatgtgtt

SEQ ID NO: 146540 - DNA, 451 bp, Arabidopsis thaliana
caataaagaggaagaaaaatgggtcgagtctcatctattatctctttttctttgacactcttgatcctgggcaatggctacactgcccaacaggggccgcaacgagtgccagctcgatcaactcaatgcgctcgaaccatcccaaatcatcaagagcgagggtggtcgcatcgaggtctgggaccaccatgcaccccagctccgttgctccggctttgcctttgagcgtttcgtcattgagcctcatggtcttttcttgcccactttcttgaacgcctgcaaactcacgtttgttgttcacggaaggggtctaatgggaagagttattccgggatgcgccgagacgtacatggagttacctttatcttgagaaggttatggtctgtgtcagagccaagggttccgtgtcatgcaccagaaagattagttcctaccgtgcgtagacaccttt

SEQ ID NO: 146541 - DNA, 516 bp, Arabidopsis thaliana
gggaaggacagggacagcagggacaacaagggttccgtgacatgcaccagatggtggaacatgtgagacgcggagacgtctttgccaacactccaggctctgcccactggatctacaactcaggagaacagccacttgtcatcatcgctcttctcgacatcgccaactaccaaaaccaactcgaccgcaaccctagagtgttccatttggccggaaacaaccagcagggaggctttggcggttcacagcaacaacaagaacagataaacttgtggagcgggttcgacgcacaggtcatagctcaagcattgaaaattgacgttcagttggctcagcagcttcagaaccaacaagacagcagaggaaacatcgttcgtgttaagggacctttccaggtcgtgaggccacctctaagacagccctacgagagcgaggagtggagacacccacgtagcccacagggcaacgggcttgaggagactatctgcagcatgaggtcccacgagtacattgacg

SEQ ID NO: 146542 - DNA, 441 bp, Arabidopsis thaliana
cacaaatagcaaaacatggctaacaagctcttcctcgtctgcgcaactctcgccctctgcttcctcctcaccaacgcttccatctaccgcaccgttgtcgaattcgaagaagatgacgccagcaaccccgtaggtccaagacagagatgccagaaggagtttcagcaatcacaacacctaagagcttgccagagatggatgagcaagcaaatgaggcaaggacgtggtggtggtccttccctcgacgatgagttcgatttcgagggccctcagcagggataccagctactccagcagtgctgcaacgagctttgtcaggaagagccagtttgcgtttgcccaccttgaaacaagctgtcagggcagttagccttcagggacagcacggaccattccaatccatgaaaatttaccagtaagctaagtacttgcctaacattt

SEQ ID NO: 146543 - DNA, 454 bp, Arabidopsis thaliana
gaacaaaaagaaaatcagatttcagtttttttttttcatttctaacataacattccttggtccgatttattctttttttcaagatcatgaagactaacagagaagaacaaatgataaaactgtttggaattcctctttctgataaacccagatggcaacaatttctcatctgttcttctggtttcttctttggttacctcgttaatggcatctgtgaggaatatgtgtacaaccggcttaaattcagttatggatggtatttcacgtttgcgcaaggattggtgtacattgccttgatttacatgtatggcttcaggacgaagcaaatggtgaatccatggaagacttacgtgaaactctcaggtgttcttatgggttctcatggcctcaccaaaggctccttggcttatctcaattattctgctcaaataatgttcataatcactaaggtttt

SEQ ID NO: 146544 - DNA, 290 bp, Arabidopsis thaliana
gttaacactaaactggtttatgtaaaacggattcataaatgtatctagacattcacttacataaaatgcatcacaaaatttcacccaattacggttctgattcggtatagggaccacctccaaaattacccaataaataaagagtggataacaactagcataaaataatcaaagcatccactaagacacaaaacacaagttcataaagatgatgatgaatcacataactttaaataaatattctttcaaaaaggcaaaacttttaaataaatatcattcgcctgtcggcc

SEQ ID NO: 146545 - DNA, 349 bp, Arabidopsis thaliana
cagccttatattccatatataatatgtggcaagtccagaatgttatcacgtatgtcatagttatatgtgcccaaaacctggaaccaagaaacttgcacccgtcttagttgataaaatagaaagctgcacaataccatcacacactttgttaaaaagaaaccctttttatttgacaacagtctgtaacttgcagattacaacatgtcaccaaacttagcaaggtgcttacatttaccctgaactgagagaaagcatgattgaataatatcttggtgagcctggtggcacattttgtattgacagcttatcgacgttactgaatgtcaagtcatcgatattttctagagtt

SEQ ID NO: 146546 - DNA, 531 bp, Arabidopsis thaliana
atcatcacaaacgagtaagaatacaaatacaaatagcaaaaaaattgtttaacaagctcttcctcgtctgcgcaactttcgccctctgcttcctcctcaccaacgcttccatctaccgcactgttgtcgagttcgacgaagatgacgccagcaaccccatgggcccaagacagaaatgtcagaaggagtttcagcaatcacagcacctaagagcttgccagaaattgatgcgcatgcaaatgatgcaaggtcctggtggtggtccctccctcgacgatgagttcgttttggatgacgacatcgtgaacccacaaggcccccaacatggacaccagatcctccagcagtgctgcagcgagcttcgccaggaagagcctgtttgtgtttgcccctacttgtgacatgctgccatggtcttttgcctccagggacaacacggactattccaatcaggaaatttttcagacagcttagtacttgcctaacatttgcatgatccagcaagttgttgaattgccctcccagaccacc

SEQ ID NO: 146547 - DNA, 529 bp, Arabidopsis thaliana
cttcaatttcactctctctcttgagtttattcttctctgctgtatcatatcaaatcaacggagtttgagtttcttttccgattccggcgatggggtcagtcctcgatccaggcgagttaactgagttagctcagccgagtttcgaggagtttcagaaacagacgtcgttgatgactagctgtactcttctatggcaagagctctccgatcacttcacttctctagagcagaatctgatgaagaaatctgaagcgttgaagcagatgattgaaactctagataaccagactcagaccttgctcgagtctctgaagcgtttgaggtaacaatcgaccatatcgtttagatcgtaattgtgaaagtaggtgtactgagctatagcttattttgaatcttttgagaaagcttgttgattttgttgttcaagttcatattttgttttctcttatgtttcctattattattgttttttatattttcttattattttatctcttattttatgttttttttttttcatacttttttt

SEQ ID NO: 146548 - DNA, 303 bp, Arabidopsis thaliana
gtgatcaacatcgactctatcacccgtgggatactagttataaaattgtaattgatgcatatatagatgtggatattcaaagtcccaattggggcgtgcgatctccaatatagtctttgccgatttctgcagcttctcagcctcttcatcagtcatatgcacattggtcacagcaactacaccattccttccaagcatagccggtagactgatgaaaacatcaccaccatcaacaccatataatccacgagcaagatcagtaacctttttgatcttccgctgtgcacgtatgtttgtacgagc

SEQ ID NO: 146549 - DNA, 453 bp, Arabidopsis thaliana
  unsure (1)..(453): unsure at all n locations
acgacccacgcactgcgcacataacaaaaaatggcaaacaagttgttcctcgtctgcgcagctctcgctctctgcttcctcctcaccaacgcgtgcatctaccgcaccgtcgttgagtgcgaagaanatgacgccactaaccccataggcccaaaaatgaggaaatgccgcaaggagtttcagaaagaacaacacctaagagcttgccagcaattgatgctccagcaagcaaggcaaggccgtagcgatgagtttgatttcgaagacgacatggagaacccacagggacaacagcaggaacaacagctattccagcagtgctgcaacgagcttcgccaggaagagccagattgtgtttgccccaccttgaaacaagctgccaaggccgttagactccatggacagcaccaaccaatgcaagtcaggaaaatttaccagacagccaagcacttg

SEQ ID NO: 146550 - DNA, 78 bp, Arabidopsis thaliana
ccggcgtccgaagaaaacactaaaaaggtggtttttcattgacaaaaaagttgaataatttttttttagaaaaaccct

SEQ ID NO: 146551 - DNA, 480 bp, Arabidopsis thaliana
aatgggtcgagtctcatctattatctctttctctttgacactcttgatcctcttcaatggctacactgcccaacagtggcccaacgagtgccagctcgagcaactcaatgcgctcgaaccatcccaaatcatcaagagcgagggtggtcgcatcgaggtctgggaccaccatgcaccccagctccgttgctccggctttgcctttgagcgtttcgtcattgagcctcagggtcttttcttgcccactttcttgaacgccggcaaactcacgtttgttgttcacggaaggggtctaatgggaagagttattccgggatgcgccgagacgttcatggagtcaccggtatttggagaaggtcaaggtcagggtcagagtcaagggttccgtgacatgcaccagaaagtagagcacctacggggcggtgacaccattgcaacaccatctggtgtagcttaatggtctacaacattggaaatgag

SEQ ID NO: 146552 - DNA, 370 bp, Arabidopsis thaliana
caggcaccgatccgaattccgacctacgacgccacgcagtctctattgttgtcgtttcgaaacaatttccttatctcgatctcatatattcatgaagagacatggatgatagctgtgccgtctgcgctgacaatctggagatgggttgcctatggatcttgtggtcaccgagaggtttgctccacatgcgtcgttcgtctccgattcgtcctcgacgatcctcgctgctgtatctgcaagaccgagtctcctatcgtttttgtcaccaaggcatcgaattgtttatacaatgacgatcaatgatttctccaccttcccatcagcaccaagggaaggtcgagtctgagctttctggtatcatgaagacact

SEQ ID NO: 146553 - DNA, 535 bp, Arabidopsis thaliana
  unsure (1)..(535): unsure at all n locations
acaaacncgatcgccattctttacgtgacagacggtgaagcttaaatccagatcgtaaacgacaatggtaacagattgtttgacggacaagtgtggtaaggacagctcatagccgtaccacaaggtttctcggtggtgaaacgcgcaacaagcaaccgattccagtgggttgagttcaaaacaaacgcatacgcgcaaatcaacactcttgcgggacgaacctcagtcttgagaggtttaccacttgaagttataaccaatgggttccaaatctcacctgaagaagcaaggagggtcaagttcaacacgctcgagaccactttgactcacagcagtggcccagctagctacggaaggccaaaggtggctgcagcttaagagcttaaaaccgcggctcaacaatgaacctctagtactgtaaaaggaagttaaatagtacgaagtaataataataatgtacgaacatgtgacangttttgttgaggtttacctgtaaaatgccactccttttctgaataaatcttttttcgatcac

SEQ ID NO: 146554 - DNA, 522 bp, Arabidopsis thaliana
gcgatggtgcttcctaaatacaacatgaacgctaacgagatcttgtactgcactggaggacaaggaaggatccaagtggtcaacgacaacggacagaacgtgttggaccaacaggtgcagaagggacagctcgtggtcatcccacaagggttcgcatacgttgtccagtcccacggaaacaagttcgagtggatctctttcaaaactaatgaaaacgcaatgatcagcactttggcgggtagaacctcgctcttgagggcattgccattggaggtcatatcaaatggtttccagatctcttccgaggaagctaggaagatcaagttcaacacacttgagaccactttgacccgtgctgccgtttggcaacaacaacagttgatcgaggagattgtcgaggcttaaatcaaaacgttgttcttgttcttaataaagtatggtcagtttgtaatcacgttcctttacctttaacgtacgtgttaaatatgtgtctgcggcaccttacttgtaataacacttttt

SEQ ID NO: 146555 - DNA, 529 bp, Arabidopsis thaliana
  unsure (1)..(529): unsure at all n locations
catacacacatagcaaaaaatggcaaacaagttgttcctcgtctgcgcatctctcgctctctgcttcctccggacgcgacgcttccatctaccggagcgtggtggagttcnaanaagatgactccactaaccccataggcccaaaaatgaggaaatgccgcaaggagtttcagaaagaacaacacctaagagcttgccagcaattgatgctccagcaagcaaggcaaggccgtagcgatgagtttgatttcgaagacgacatggagaacccacagggacaacatcatgaacaacagctatttcagcagtgctgcaacgagcttctccaggaagagccagattgtgtttgccccaccttgaaacaagctgccaaggccgttatactccattgacagcaccaaccaatgcatgtcatgaaaatttaccagacagccaatcacttgcccaacgtttgctacatcccgcaagttgattgtttgtcccttcaacatccctncattcccttttttctactaaatctcaaacaaac

SEQ ID NO: 146556 - DNA, 488 bp, Arabidopsis thaliana
caaacgagtaagaatacaaatacaaatagcaaaaaaaatggcatacaagctcttcctcgtctgcgcaacttgcgcgcgctctgcttcctcctcaccagcgctggcatctaccgcactgttgtcgagttcgacgaagatgacgccagcaaccccatgggcccaagacagaaatgtcagaaggagtttcagcaatcacagcacctaagagcttgccagaaattgatgcgcatgcaaatgaggcaaggccgtggtggtggtccctccctcgacgatgagttcgatttggaagacgacatcgagaacccacaaggcccccagcagggacaccagatccttcatcagtgctgcagcgagcttcggcaggaagagccaatttgtgtttgcccacctcgagacaagctgccatggccgttagcctccagggacaacacggaccattccaatccaagataattacaagacagctaaatactctcctaacatttgca

SEQ ID NO: 146557 - DNA, 445 bp, Arabidopsis thaliana
gcgccttaaaaattcccaattttttttttcaaacaaacttgctcagatcctcttcttcttagggatcaatcttcaaatcaattgttgttaaaataaatgggattaaagcgaccttatgatgctgaagagatgcaaaagtgcaatgctaagcatgcaagacagcttagttacaaaaaccataaccaatttgacgaagctattccatatcatcatgcttctatggagaagaagacaaatgttttagtagaggatctgattggtctctgtgagaatcctacgtggactaatgatgcaaatcacgttgacaagggttttgaaacaaccgcgtttgtgtcaggaagattctcagtctggagtgacgactcagtcagatctttctcatcaatcttttggttcagatttcacctggaagccagtggaagatgtttatacttgtttgatgaat

SEQ ID NO: 146558 - DNA, 491 bp, Arabidopsis thaliana
ctaccttgttctcctcaccgcttctttcttccctgaactcagaacttagaacaaagaactctcgtagacgaagaagaagatgacggtagaaggagtgaaccctaaggcgtatccgttagctgattctcagttatcgataacgattcttgatcttgttcaacaagctacgaattacaaacagttaaagaaaggagctaatgaagctaccaagacattgaaccgtgggatctctgagttcattgttatggctgctgatactgagcctctcgagattcttcttcatcttcctcttcttgctgaagataagaatgtgccgtatgtgtttgtgccatcgaaacaagcccttggaagagcatgtggtgtaaccagacccgtgatcgcttgttccgttacatcaaacgaggctagtcagttgaaatctcaaattcagcaccttaaggatgccattgagaagcttctcatctagattcttggtggaatgaatgaatgat

SEQ ID NO: 146559 - DNA, 491 bp, Arabidopsis thaliana
agtctacatgactactcaagtttgttttcatggagatcttgaaaacttaatccgccattgcttttatgtaactgggcaaatccatatttaaattgttgggtataatgttttgtacccacaatctgataggataaacccgtgtaacactttttttatctaatcgatttttatccatttttaataccccgactcggctcctccttatagtggtctaacactacaatgaatcaagtctttgcagtagatagaatgcgattggtttccttatttgcatttcactatcttcacaattacgtcttgtcaattccaaaatctcagttttatctctttggatttaaaacgtttcaccaataggaataattggtagataaaatgtcattatctgataaatagtattcacaaagatgagaccacgcgtcgcttgtttagttaacgtcaacgaatatttggagttttcatcgaacatcataataagacgtcacgtaagctta

SEQ ID NO: 146560 - DNA, 525 bp, Arabidopsis thaliana
caaaaagaaaatggttaagctcagcaatctcctcgttgcaaccttcggggttctcctcgtccttaacggctgccttgcgaggcagtcacttggggttcctcctcagctacagaacgagtgtaacctcgacaacctagatgttctccaagccaccgaaactatcaagagtgaagccggtcagatcgagtactgggaccacaaccaccctcagctccgatgtgttggtgtttccgttgctcgttatgtaattgaacaaggcggtctttacttgcccaccttcttcacttccccaaaaatttcctacgtcgttcaaggaacgggtatcagcggaagagtggtccctggatgtgccgagaccttcatggactcgcagccgatgcaaggacaacaacaaggccaaccatggcaaggacgacagggacaacaaggccaaccatgggaaggacagggacaacagggacaacaagggaagacaaggccaaccatgggaaggacagggacaacagggacaacaaggacgacagg

SEQ ID NO: 146561 - DNA, 490 bp, Arabidopsis thaliana
  unsure (1)..(490): unsure at all n locations
gcgcccgggntnacacatgagatcttggctcaagccttcaagatcaatgttgtgacggttcagcagctccagaaccagtacgataaccgtggcaacatcgtcaaggtcaacggacctttcggcgtcattaggccacccttgagacgcggcgaaggcgggcaacaaccacatgaaatagctaatggcttagaggagactttgtgcaccatgcgatgcactgaaaacctcgatgacccgtcggatgctgacgtgtacaagccatcactcggatacattagcacacttaacagctacaatcttcctatcctgagacttgtccggcttagcgctcttcggggctccatccgtaaaaacgctatggtgctaccgcaatggaacggaaacgcaaacgcggcactgtacgtgacaaacgggaaagggttatatacaaatggtgaacgacaactgagatagagtgttcgaccaagagatcttcagcggacagctacta

SEQ ID NO: 146562 - DNA, 409 bp, Arabidopsis thaliana
cccgatttctccaagcagccatggctccgaaatcgaaagaaaaatccaaaatatcgaattcacaaccacctccagcaatcgaagatctcttcacttccctccaccgacatatcaaggatactaaatatgaagaagccgtcaaggtcgctgatcaagttttgtcgattgtacctaccgatgaggatgcgatccgatgcaaagttgtggctctgataaaagacgataagttcgatgattatctaatcaaagacgttaagatcaatggtgctctctccgtcattaactcgttccagaagcttcccatcgatctaggttttcacaaggcgtattgcttataccgtgtaaacaagctagatgaggctttggtgtgtttaaaaggtctcgagagagatacagatactttggtttt

SEQ ID NO: 146563 - DNA, 551 bp, Arabidopsis thaliana
aaaagaaaatggttaagctcagcaatctcctcgttgcaaccttcggggttcttctcgtccttaacggctgccttgcgagggagtcacttggggttcctcctcaggtacagaacgagtgtaacctcgacaacctagatgttctccaagccaccgaaactatcaagagtgaagccggtcagatcgagtactgggaccacaaccaccctcagctccgatgtgttggtgtttccgttgctcgttatgtaattgaacaaggcggtctttacttgcccaccttcttcacttccccaaaaatttcctacgtcgttcaaggaacgggtatcagcggaagagtggtccctggatgtgccgagaccttcatggactcgcagccgatgcaaggacaacaacaaggccaaccatggcaaggacgacagggacaacaaggccaaccatgggaaggacagggacaacagggacaacatggaagacatggccaaccatggtgaggacatggacaacatggacaacaaggacgacagggacaacaagccaaccatgggaagacaggg

SEQ ID NO: 146564 - DNA, 507 bp, Arabidopsis thaliana; identical to SEQ ID NO: 130205
  unsure (1)..(507): unsure at all n locations

SEQ ID NO: 146565 - DNA, 425 bp, Arabidopsis thaliana
tcgaaagaaaatggttaagctcagcaatctcctcgttgcaaccttcggggttctcctcgtccttaacggctgccttgcgaggcagtcacttggggttcctcctcagctacagaacgagtgtaacctcgacaacctagatgttctccaagccaccgaaactatcaagagtgaagccggtcagatcgagtactgggaccacaaccaccctcagctccgatgtgttggtgtttccgttgctcggtatgtaattgaacaaggcggtctttacttgcccaccttcttcacttccccaaaaatttcctacgtcgttcaaggaacgggtatcagcggaagagtggtccctggatgtgccgagaccttcatggactcgcagccgatgcaaggacaacaacaaggccaaccatggcaaggacgacagggacaac

SEQ ID NO: 146566 - DNA, 539 bp, Arabidopsis thaliana
ggaaaatgttttttctcgctgtcttgttactttcatgctaagtacaagtcctcgcgatcaagcacatataagaagagtggaaaacgtgccgcaatccattacggctcaggatcaatctctggtttctttagttatgatgctgtcacggttggtgatttggttgtcaaagatcaggagtttattgagacaaccagtgagcctggtttaacattcctggtggctaagtttgatggtcttcttggtcttgggttccaagagatcgctgttggaaacgctactcctgtttggtacaatatgctcaagcaaggccttataaagaggccggtcttttcattttggcttaaccgtgatccaaagagtgaagaaggcggtgaaatcgtattcggaggtgttgatccaaagcattttagaggagaacatacatttgttcctgtgacacaaaggggttactggcagttcgacatgggtgaggttctcattgccggtgaatctactggatattggcgaagtgttgttctgcgatagcagattctggaaca

SEQ ID NO: 146567 - DNA, 523 bp, Arabidopsis thaliana
  unsure (1)..(523): unsure at all n locations
ggacgacacggtaatggcttagaggagaccatctgcagcgccaggtgcaccgataacctcgatgacccgtctcgtgctgacgtgtacaagccacagctgggttacatcagcactctcaacagttacgatctccccatccttcgcttcatccgtctctcagccctccgtggatctatccgtcaaaacgcaatggtgcttccacagtggaacgcaaacgcgaacgctattctttacgtgacagacggggaagcccaaatccagatcgtaaacgacaatggtaacagagtgtttgacggacaagtctctcaaggacagctcatagccgtaccacanggtttctcggtggtgaaacgcgcaacaagcaaccgattccagtgggttgagttcaaaacaaacgctaacgcgcanatcaacactctggcgggacgaacctcagtcttgagaggtttaccacttgaagtcataaccaattgggttccaaatctcacccgaagaagcaagggggtcaagttcaacacgctcg

SEQ ID NO: 146568 - DNA, 502 bp, Arabidopsis thaliana
gaaagatagagaaaaaaaatgggaggcaaaggtgtgatgatggtggcgatactttgcctttgggcactctctgcaacatctgaagcagtaacagaggctgagccaggtttgatgatgaacttctacaaggacacgtgtcctcaggccgaagacatcgtccgtgaacaagtcaaactcctctacaaacgccacaagaacaccgctttctcttggctccgtaacatcttccatgactgcgccgttgagtcatgtgatgcgtcgcttttgctggattcgacaagaagagagctaggagagaaagaacacgacaggagcttcggacttagaaactttaagtacatcgaggagatcaaggaagctctcgagagggagtgtcctggtgttgtctcatgttctgacattctcgtcttgtccgcaagagaaggcatcgaagcagtaggaggaccttatattcctttgaagccagaaggagagatggactaaaagcatgacgatatgctcg

SEQ ID NO: 146569 - DNA, 442 bp, Arabidopsis thaliana
catacttaatggcttccaattcggagaaaaatcctcttctttcagatgagaaacccaaatcgacggaggagaataagagttctaagccggaatcagcttctgggagttcaacttcatcagctatgcctggcttgaatttcaatgctttgatttctctaatatggctagtattctcaacgatcctagcatcagagaaatggctgagcaaatagctaaagatcctgcctttaaccaattggctgagcagcttcagagatctattcctaacgctggccaggaaggtggtttccctaactttgatcctcaacagtatgtcaatacaatgcaacaggttatgcataaccctgagtttaagacaatggccgagaaacttggtaccgccttagttcaggatccacaaatggctccttttatggatgcgttctcgaatcctgaaacagca

SEQ ID NO: 146570 - DNA, 463 bp, Arabidopsis thaliana
gattttcgttaagacgttgactgggaaaactatcactttggaggtggagagttctgacaccattgataacgtgaaagccaagatccaagacaaagagggtattcctccggaccagcagagattgatcttcgccggaaaacaacttgaagatggcagaactttggccgactacaacattcagaaggagtccacactccacttggtcttgcgtctgcgtggaggtatgcagatcttcgtgaagactctcaccggaaagaccatcactttggaggtggagagttctgacaccattgataacgtgaaagccaagatccaggacaaagagggtatcccaccggaccagcagagattgatcttcgccggaaagcaacttgaagatggaagaactttggctgactacaacattcagaaggagtccacacttcacttggtcttgcgtctgcgtggaggtatgcagatcttc

SEQ ID NO: 146571 - DNA, 441 bp, Arabidopsis thaliana
ctctttctgtggacgaaactaaacctgagagaaaaagccagaagaaccaaactcagaccgagagatagagattgagggagagctctagctctgtagaaaagaaggattcattcatcatatccagaaatggctctaaagtttaaccctttggtggcatctcagccttacaaattcccttcctcgactcgtccgccaacttcttctttcagatctcccaagttcctctgcctcgcttcttcttctccggctctcagctccggccccaaggaggttgagagtttgaagaaaccatttacgccacccaaggaagtgcatgttcaagtcttgcactccatgccacctcaaaagatcgagatcttcaaatctatggaaaactgggccgaggagaaccttctgattcacctcaaggatgtggagaagtcttggcaaccccaggatttc

SEQ ID NO: 146572 - DNA, 478 bp, Arabidopsis thaliana
gggtcgagtctcatctattatctctttctctttgacactcttgatcctcttcaatggctacactgcccaacagtggcccaacgagtgccagctcgatcaactcaatgcgctcgaaccatcccaaatcatcaagagcgagggtggtcgcatcgaggtctgggaccaccatgcaccccagctccgttgctccggctttgcctttgagcgtttcgtcattgagcctcagggtcttttcttgcccactttcttgaacgccggcaaactcacgtttgttgttcacggaaggggtctaatgggaagagttattccgggatgcgccgagacgttcatggagtcaccggtatttggagaaggtcaaggtcagggtcagagtcaagggttccgtgacatgcaccagaaagtagagcacctacggtgcggtgacaccattgcaacaccatctggtgtagctcaatggttctacaacaatggaaatgag

SEQ ID NO: 146573 - DNA, 490 bp, Arabidopsis thaliana
  unsure (1)..(490): unsure at all n locations
cacaatcattatgcgtttagttacacacaaaaaaacagcaaatggcccaagattcaagctgatcaatccgattccagaatgttattaccttttgcagttctcagggaatcacatagcatgagcaaggcttcaggtggcataagattgtaggatgcgtcgattgagatgagttttggtgccaagggtatgagctttgacaggaatctagcggtctctagtcctccacggtttttgctatagcgtgaaaccacaaaacaaacgtgaggccactgaggcaaagcgatgcattgtatacaaaaatagaagctatggattttgctttggaccttatattaatactcagcagcttcttcgacactttttcaagttttctgcctaatgcaagaaacccgagaggacctagtcctatacccataatattgagcgactcgatggagattgtgaaagagttactacagcctctgcaacctcgctaaagaacangaataat

SEQ ID NO: 146574 - DNA, 557 bp, Arabidopsis thaliana
gtctctctctctctgataaaatcttaaacccacctcgagatcatagtcttcatcaattagccataaaaaagcacaatgctttcttcaatcaaaccatcttcgtcttccttctccaccgctatctccggcagcgtaaggcggtcaattcctacgacgctcaatttttctcctttacccatcatcaaaaactgccataaccaaagctttcactctaatgttgtctcccatcaaaagcctctacacatttcatctgcttcgaatttcaaacgtgaggtcaaagtcgaagcttacgaggcagatcgatcccgtccactggacatcaacatcgagcttcccgatgaacaatccgcgcagaaactgaaaatcggaatctacttcgcaacttggtgggcacttaacgttgtcttcaacatctacaacaagaaagtcctcaatgcttttccttacccgtggcttacttcgacgttgtctctcgcttgtggttctttgatgatgcttgtctcttgggctattagaatcgcagatgctcctaaaactgatctcgagttctggaaaac

SEQ ID NO: 146575 - DNA, 311 bp, Arabidopsis thaliana
aggagagctgaatgctacaaccaaacactgcgcgtacacttgttattttgcaagccgctggctcgcaagagattacaacgtagatgtgtcctaacaagcgcgtatcatcaactcatgacgtatacgcgcgcatcatccgtatatgattatccgaagtacacttatacctatgctgagcataccgcaacgcagcaactgctgataccacaacgacgctcaagtacgatgatacttgatcaacatgagaagtttagtgacaaaactgcgaggaatttaaatattcactggattactgtattcaaaattctcta

SEQ ID NO: 146576 - DNA, 523 bp, Arabidopsis thaliana
cattgccacaacacccggtgtagcacagtggttctacaacgacggacaggaaccacttgtcatcgtcagcgtcttcgatctagccagtcaccagaaccagcttgaccgcaacccaaggccattttacttagccggaaacaacccacaaggtcaagtatggctacaaggccgagagcaacagccacagaagaacattttcaatggatttggacccgaggttattgctcaagctttgaagatcgatcttcagacagcgcagcaacttcagaaccaagatgacaaccgtggaaacattgtccgagtccaaggcccgttcggtgtcattaggccgcctttgaggggccagagacctcatgaggaggaagaagaagaagaaggacgacatggacgacacggtaatggcttagaggagaccatctgcagcgccaggtgcaccgataacctcgatgacccgtctcgtgctgacgtgtacaagccacaagtcgggtacatcagcactctcaacaagtacgatctccccata

SEQ ID NO: 146577 - DNA, 543 bp, Arabidopsis thaliana
caaacctttttctctctgaggcaaaaatgcggcgtaattgctgccatgtttcttttgcttccactctcaagatcctcaattttgttcaagctttcatcggtgtttcgatcattatctactccatttggatgctccatgaatacagccgtcaccttcccgtggacccgcctccgtcagcttcatcaagctccggaaccgagatcgctactagtgtatctgagcccttgaagaatcctattgattttgtggcgagtatcattctcgggtctaatggtggtgatcatgggtttaacctacgctcgttggaccttcctgctccatggttcatctactctttcatggcggttggtatattggtctgtattgttaccttcataggtttcatagcagctgaagcaatcaatggctggtgcttgtgtttttactctatcctcaaaactctgctcatcctacttgaagctgcacttgttgcatacatcgctattgacccgcactgggaaaaggatcttccgtatgatccaactggagaacttagtagtctta

SEQ ID NO: 146578 - DNA, 556 bp, Arabidopsis thaliana
gctaaatgtgaaaaaatcattaacgaaaaaatttgaacatcactaatatagtacctttgatatctcagggattgacaaatgcttaactcctcctaaaggcatatcttcttccacatgcttatctccttccgccggtttatctttttgtggcggtttgtcttcctccaccggtttatctccttccgccggtttatctttttgtggcggtttgtgtccctccgccggcttatctttttgtggcggtttatctttttgtggcggtttttcttcctcagccggcaatttatcctcctcgaccggcttatctcctttcagcagattgtcttccttggatggcttgtcttttctcggcagcttatctctttctggcggcttgtcttccttcaacggattatctcctcctgattgcttgccactttctgccagcttattaggcccatcaggcctaccttctcgtgcatgcaaagtagctctggaatactcttctttcctaagtgtcattcacacatacataatgttaactaacaccacaaataaaaatgtggtcaatgcatgt

SEQ ID NO: 146579 - DNA, 549 bp, Arabidopsis thaliana
  unsure (1)..(549): unsure at all n locations
cttagacttatctctatatacccccttttaatttgtgtgctcttagtctttactctatagttttatatcatatcaatcgacatggcgaatgtggaccgtgatcggcgtgtgcatgtagaccgtactgacaaacgtgttcatcagccaaactacgaagatgatgtcggttttggtggctatggcggttatggtgctggttctgattataagagtcgcggcccctccactaaccaaatcttggcacttatagcaggagttcccattggtggcacactgctaaccctagctggactcactctagccggttcggtgatcggcttgctagtctccatacccctcttcctcctcttcagtccggtgatagtcccggcggctctcactattgggcttgctgtgacgggaatcttggcttctggtttgtttgggttgacgggtctgagctcggtctcgtgggtcctcaactacctccgtgggacgagtgatacagtgccagagcaattggactacgctaaacggcgtatggctgatgcggtangctatgctggtatg

SEQ ID NO: 146580 - DNA, 237 bp, Arabidopsis thaliana
ctcgccaaaaaccttgaaacctttaaaaaatcgaaactatggctaagctcattctcgttttcgcaactcttgccctcttcatcctcctagccaacgcatgcatctaccgcacagtggtggagttcgaggaagatgatgacgtgagcaacccacaacaagggaagtgccagagggaggttatgaagcatcagcaacttagagggtgcaagcaatggatccgcaagagagcttaacaag

SEQ ID NO: 146581 - DNA, 484 bp, Arabidopsis thaliana
catacacacatagcaaaaaatggcaaacaagttgttcctcgtctgcgcagctctcgctctctgcttcctcctcaccaacgcttccatctaccgcaccgtcgttgagttcgaagaagatgacgccactaaccccataggcccaaaaatgaggaaatgccgcaaggagtttcagaaagaacaacacctaagagcttgccagcaattgatgctccagcaagcaaggcaaggccgtagcgatgagtttgatttcgaagacgacatggagaacccacagggacaacagcaggaacaacagctattccagcagtgctgcaacgagcttcgccaggaagagccagattgtgtttgccccaccttgaaacaagctgccaaggccgttagactccaaggacagcaccaaccaatgcaagtcaggaaaatttaccagacaggcaagcacttggcccaacgtttgcgacatcccgcaaggtggatgtttgtccct

SEQ ID NO: 146582 - DNA, 519 bp, Arabidopsis thaliana
acatagcaaaaaatggcaaacaagttgttcctcgtctgcgcagctctcgctctctgcttcctcctcaccaacgcttccatctaccgcaccgtcgttgagttcgaagaagatgacgccactaaccccataggcccaaaaatgaggaaatgccgcaaggagtttcagaaagaacaacacctaagagcttgccagcaattgatgctccagcaagcaaggcaaggccgtagcgatgagtttgatttcgaagacgacatggagaacccacagggacaacagcaggaacaacagctattccagcagtgctgcaacgagcttcgccaggaagagccagattgtgtttgccccaccttgaaacaagctgccaaggcccgtagactctcaggacagcaccaaccaatgcaagtcatgaaatattaccagacaggcaagcacttgcccaacgtttgcgacatcccgcaaagttgatggttggtccttcaacattccttcaattcccttctttctactaaatgtcaaaca

SEQ ID NO: 146583 - DNA, 515 bp, Arabidopsis thaliana
aagaaaaatgggtcgagtctcatctattatctctttctctttgacactcttgatcctcttcaatggctacactgcccaacagtggcccaacgagtgccagctcgatcaactcaatgcgctcgaaccatcccaaatcatcaagagcgagggtggtcgcatcgaggtctgggaccaccatgcaccccagctccgttgctccggctttgcctttgagcgtttcgtcattgagcctcagggtcttttcttgcccactttcttgaacgccggcaaactcacgtttgttgttcacggaaggggtctaatgggaagagttattccgggatgcgccgagacgttcatggagtcaccggtatttggagaaggtcaaggtcagggtcagagtcaagggttccgtgacatgcaccagaaagtagagcacctacggtgcggtgacaccattgcaacaccatctggtgtagctcaatggttctaccaccaatggaaatgagcctctcattcttgtgcagccgcggatc

SEQ ID NO: 146584 - DNA, 533 bp, Arabidopsis thaliana
cggacgcgtgggcagcagggaggctttggcggttcacagcaacaacaagaacagaaaaacttgtggagcgggttcgacgcacaggtcatagctcaagcattgaaaattgacgttcagttggctcagcagcttcagaaccaacaagacagcagaggaaacatcgttcgtgttaagggacctttccaggtcgtgaggccacctctaagacagccctacgagagcgaggagtggagacacccacgtagcccacagggcaacggccttgaggagactatctgcagcatgaggtcccacgagaacattgacgaccctgctcgtgctgacgtgtacaagcccagcctaggtcgcgtgaccagcgtcaacagctataccttgcccatcttggagtatgtcaggctcagtgccactcgtggcgttctccagggtaatgcgatggtgcttcctaaatacaacatgaacgctaacgagatcttgtactgcactggatgacaaggaaggatccatgtggtcaacgacaacggacagaacgtgtt

SEQ ID NO: 146585 - DNA, 530 bp, Arabidopsis thaliana
atttggccggaaacaaccagcagggaggctttggcggttcacagcaacaacaagaacagaaaaacttgtggagcgggttcgacgcacaggtcatagctcaagcattgaaaattgacgttcagttggctcagcagcttcagaaccaacaagacagcagaggaaacatcgttcgtgttaagggacctttccaggtcgtgaggccacctctaagacagccctacgagagcgaggagtggagacacccacgtagcccacagggcaacggccttgaggagactatctgcagcatgaggtcccacgagaacattgacgaccctgctcgtgctgacgtgtacaagcccagcctaggtcgcgtgaccagcgtcaacagctataccttgcccatcttggagtatgtcaggctcagtgccactcgtggcgttctccagggtaatgcgatggtgcttcctaaatacaacatgaacgctaacgagatcttgtactgcactggaggacatggaaggatccatgtggtcaacgacaacggacag

SEQ ID NO: 146586 - DNA, 514 bp, Arabidopsis thaliana
gggacaacagggacaacatggacgacagggacaacaaggccaaccatgggaaggacagggacagcagggacaacaagggttccgtgacatgcaccagaaggtggaacatgtgagacgcggagacgtctttgccaacactccaggctctgcccactggatctacaactcaggagaacagccacttgtcatcatcgctcttctcgacatcgccaactaccaaaaccaactcgaccgcaaccctagagtgttccatttggccggaaacaaccagcagggaggctttggcggttcacagcaacaacaaaaacagaaaaacttgtggagcgggttcgacgcacaggtcatagctcaagcattgaaaattgacgttcagttggctcagcagcttcagaaccaacaagacagcagaggaaacatcgttcgtgttaagggacctttccaggtcgtgaggccacctctaagacagccctacgagagcgaggagtggagacacccacattagcccacaggcaac

SEQ ID NO: 146587 - DNA, 522 bp, Arabidopsis thaliana
  unsure (1)..(522): unsure at all n locations
ccacaattctcaactttggagctgcagacacaattccggcgacgtttacgattctgacaccgccgaacccacttgtagcaaatggaagaagttcaaaaaagagttgcctttatactaattgatggtttgggagatgtatcaataccaagattaggttacaaaacaccattgcaagcagcagcaatacctaaccttgatgcaattgcttcagctggaatcaatggtttaatggatccagttgaagttggattaggttgtggtagtgacactgctcatctttctctaatgggttatgatccaagagtgtattaccgtggacgtggcgcgtttgaatctatgggtgcaggattagctatgtcacctggtgacatagctttcaagtcaaattttgcaactttggatgaggattctgnagttgttgttagtagaagagctgatcgacatttcgaagaagaaggacctatactttgtgctgctcttgatggaatgaagcttccatcattccctgagtatgaagttaga

SEQ ID NO: 146588 - DNA, 367 bp, Arabidopsis thaliana
gtcaaaacgcaatggtgcttccacagtggaacgcaaacgcgaacgctattctttacgtgacagacggggaagcccaaatccagatcgtaaacgacaatggtaacagagtgtttgacggacaagtctctcaaggacagctcatagccgtaccacaaggtttctcggtggtgaaacgcgcaacaagcaaccgattccagtgggttgagttcaaaacaaacgctaacgcgcaaatcaacactctggcgggacgaacctcagtcttgagaggtttaccacttgaagtcataaccaatgggttccaaatctcacccgaagaagcaaggagggtcaagttcaacacgctcgagaccactttgactcacagcag

SEQ ID NO: 146589 - DNA, 271 bp, Arabidopsis thaliana
atacacacatagcaaaaaatggcaaacaagttgttcctcgtctgcgcagctctcgctctctgcttcctcctcaccaacgcttccatctaccgcaccgtcgttgagttcgaagaagatgacgccactaaccccataggcccaaaaatgaggaaatgccgcaaggagtttcagaaagaacaacacctaagagcttgccagcaattgatgctccagcaagcaagggaagggccgaacgatgaggttgatttcgaagaccacatggagaacccac

SEQ ID NO: 146590 - DNA, 555 bp, Arabidopsis thaliana
  unsure (1)..(555): unsure at all n locations
gctaactccccttgaggtaactggataattttccacggtaaaagggctcctgaccagttagaaacaaaaataaataaaaacagggttccaataaagggaacccatggaccatattcttctccaatctgggttttactcacgtctcgaatgaattcaaggacaaattcaaagaaattttggccgtcagttggaattgtttgtggattgcgaatcgctagaactgcggaacctaataagatagcaattacaacccaagaagtaataagaacttgggcatggacctggaaaccccctatttgccaatagaaatgttggcctacttctacaccagatatctcatataacccttcttttattagtgtgttgatggaacatgataaaacattcatattgccctctgacagaaataagaactttaaattattttgattcaagacccccctttttttttacttatttacttaaattttatattttagttttggatcccaactaaacaaatcacacaatatccncagttttttctctctttttcttttctacaattcaagagta

SEQ ID NO: 146591 - DNA, 460 bp, Arabidopsis thaliana
ctcgccaaaaaccttgaaacctttaaaaaatcgaaactatggctaagctcattctcgttttcgcaactcttgccctcttcatcctcctagccaacgcatccatctaccgcacagtggtggagttcgaggaagatgatgacgtgagcaacccacaacaaggtaagtgccagagggagtttatgaagcatcagcaactaagaggttgcaagcaatggatccgcaagagagctcaacaaggaagaatcggatacgaagctgatgactttgagctcactcttgatgtcgatcttgaggacgatgagaacccaatggggcctcaacaacagtcatctcttaaaatgtgttgtaatgaattaaggcaagtggacaagatgtgtgtgtgtcctacactgaaaaaggcggctcaacaagtcagattccaaggaatgcatggacagcaacaagtgcaacatgtgtttca

SEQ ID NO: 146592 - DNA, 260 bp, Arabidopsis thaliana
gatttgaagatcggagatatgaatctcttctttctctggatttgaaagttcgataaaaatctactgatacatcgacttctggaagcgatctcgatctctctagaattgtttcgacgacgaagatgaagaagattcaaattggtgcggtggcgctattggtgtttctatctgtggcctctctctttgaaatcggattggcttctccgaacacagttcctgctttcctctggtctccgcatctccagtctgctaatggagaa

SEQ ID NO: 146593 - DNA, 462 bp, Arabidopsis thaliana
acttatctctatatacccccttttaatttgtgtgctcttagcctttactctatagttttatatcatatcaatcgacatggcgaatgtggaccgtgatcggcgtgtgcatgtagaccgtactgacaaacgtgttcatcagccaaactacgaagatgatgtcggttttggtggctatggcggttatggtgctggttctgattataagagtcgcggcccctccactaaccaaatcttggcacttatagcaggagttcccattggtggcacactgctaaccctagctggactcactctagccggttcggtgatcggcttgctagtctccatacccctcttcctcctcttcagtccggtgatagtcccggcggctctcactattgggcttgctgtgacgggaatcttggcttctggtttgtttggggttgacgggtctgagctcggtctcgtgggtcctcaactacc

SEQ ID NO: 146594 - DNA, 338 bp, Arabidopsis thaliana
atcctctagaaccacaagaatccttagttggaatgggattccagcttttcaccttttgagattttgagaagagttgctctttggagagcacagtacgatgaaagttgtaagctgtgttcgggggggagttcttgtctatcgttggcctctatggtagaatcagtcaggggcctgataggctgtggtttaccctgtggcggatgtcagcggttcgagtccgcttatctacaactcgtgaacttagccgatacaaagctatatgatagcacccaatttttccgattcggcagttcgatctatgattcttcatacatggacgttgataagatctttccatt

SEQ ID NO: 146595 - DNA, 552 bp, Arabidopsis thaliana
  unsure (1)..(552): unsure at all n locations
gacggattcgatttgatctctgtttccacatggaccgtaataatagtcaatacatatcatatagtcaagatgtcggcgttgaatatgtttgggtaatgcaattacgcgttgtatataattaggctataaccggtgcaagttatatctccttgaagcatttggaaatgtatactgaggcaatgtcttcaccatctaatacaacttctcaaaagttcatccaaatttaagtaacccaattgatctatccaacaaacataagatttgagagaaagtttagattttggttcatatttataagaaaatatcgaacaaagtttatggtcatcttcaaatcgatccgaccgttggaagagatttatcacaaacggctctattgagataagtgatttctgtttttctatgaacaaataaataaaataagttaccgaagaagagccaaagtgtgggcttaattcatctntcagatctcaatgaacgggaatgaggcccaattagtttataatgggcactattgaaagccactagacatgtcttatgttcacaaatgatgat

SEQ ID NO: 146596 - DNA, 497 bp, Arabidopsis thaliana
atcacaaacgagtaagaatacaaatacaaatagcaaaaaaaatggcaaacaagctcttcctcgtctgcgcaactttcgccctctgcttcctcctcaccaacgcttccatctaccgcactgttgtcgagttcgacgaagatgacgccagcaaccccatgggcccaagacagaaatgtcagaaggagtttcagcaatcacagcacctaagagcttgccagaaattgatgcgcatgcaaatgaggcaaggccgtggtggtggtccctccctcgacgatgagttcgatttggaagacgacatcgagaacccacaaggcccccagcagggacaccagatcctccagcagtgctgcagcgagcttcgccaggaagagccagtttgtgtttgccccaccttgagacaagctgccagggccgttagcctccagggacaacacggaccattccaatccaggaaaatttacaagacagctaagtacttgcctaacatttgcaagatc

SEQ ID NO: 146597 - DNA, 526 bp, Arabidopsis thaliana
  unsure (1)..(526): unsure at all n locations
catttttgagacaagagactctctctctctctcttctctctttctctccccctctctccggcgatggttgttgctatggaccaacgcaccaatgtgaacggagatcccggcgccggagaccggaagaaagaagaaaggtttgatccgagtgcacaaccaccgttcaagatcggagatataagggcggcgattcctaagcactgttgggttaagagtcctttgagatcaatgagttacgtcgtcagagacattatcgccgtcgcggctttggccatcgctgccgtgtatgttgatagctggttcctttggcctctttattgggccgcccaaggaacacttttctgggccatctttgttctcggccacgactgtggacatgggagtttctcagacattcctctactgaatagtgtggttggtcacattcttcattctttcatcctcgttccttaccatggttggtaagttacttatntttattcttttctactattaatttctcttttactggggtatttgtaattat

SEQ ID NO: 146598 - DNA, 424 bp, Arabidopsis thaliana
cacagggtaataacttaaggcatggaaaatggacgttaagttggttaatcagtttcagacccaccaggccggcgagggaacattggtcgtgttaaaggaccttttcaggtcgtgaggccacctctaagacagccctactagagcgaggagtggagacacccacgtagcccacacggcaacggccttgaggagactatcttcatcatgaggtcccacgagaacattgacgaccctgctcgtgctgacgtgtacaagcccaacctatgtcgcgtgaccagcgacaacagctataccttgcccatcttggagtatgacaagctcaatgccactcgcggcgttggccattgtaatgcgatagtgcttggtaaatacaacatgaacgctgacccgatcttgtactgtacttttggacatggaacgatcc

SEQ ID NO: 146599 - DNA, 554 bp, Arabidopsis thaliana
cacaaacgagtaagaatacaaatacaaatagcaaaaaaaatggcatttatgctcttcctcgtctgcgcaactttcgccctctgcttcctcctcaccaacgcttccatctaccgcactgttgtcgagttcgacgaagatgacgccagcaaccccatgggcccaagacagaaatgtcagaaggagtttcagcaatcacagcacctaagagcttgccagaaattgatgcgcatgcaaatgaggcaaggccgtggtggtggtccctccctcgacgatgagttcgatttggaagacgacatcgagaacccacaaggcccccagcagggacaccagatcctccagcagtgctgcagcgagcttcgccaggaagagccagtttgtgtttgccccaccttgagacaagctgccagggccgttagccttccagggacaacacggaccattccaatccaggaaaatttacaagacagctaagtacttgcctaacatttgcaagatccagcaagttggtgaatgcccctttcagaccaccatccctttcttacctcttactaata

SEQ ID NO: 146600 - DNA, 497 bp, Arabidopsis thaliana
cttcaatggatttggacccgaggttattgctcaagctttgaagattgatcttcagacagcgcagcaacttcagaaccaagatgacaaccgtggaaacattgtccgagtccaaggcccgttcggtgtcattaggccgcctttgaggggccagagacctcaggaggaggaagaagaagaagaaggacgacacggacgacacggtaatggcttagaggagaccatctgcagcgccaggtgcaccgataacctcgatgatccgtctcgtgctgacgtgtacaagccacagctcggttacatcagcactctcaacagttacgatctccccatccttcgcttcatccgtctctcagccctccgtggatctatccgtcaaaacgctatggtgcttccacagtggaacgcaaacgcgaacgccattctttacgtgacagacggggaaggccaaatccagatcgtaaacgacaatggtaacagagtgtttgacggacaagtctctc

SEQ ID NO: 146601 - DNA, 521 bp, Arabidopsis thaliana
gaaaatggttaagctcagcaatctcctcgttgcaaccttcggggttctcctcgtccttaacggctgccttgcgaggcagtcacttggggttcctcctcagctacagaacgagtgtaacctcgacaacctagatgttctccaagccaccgaaactatcaagagtgaagccggtcagatcgagtactgggaccacaaccaccctcagctccgatgtgttggtgtttccgttgctcgttatgtaattgaacaaggcggtctttacttgcccaccttcttcacttccccaaaaatttcctacgtcgttcaaggaacgggtatcagcggaagagtggtccctggatgtgccgagaccttcatggactcgcagccgatgcaaggacaacaacaaggccaaccatgggaaggacgacagggacaacaaggccaaccatgggaaggacagggacaacaaggacaacatggaagacaaggccaaccatgggaaggacagggacaacaaggacaacaaggacgacagggac

SEQ ID NO: 146602 - DNA, 383 bp, Arabidopsis thaliana
cgccactctctcctatatctctctctcgctctcctccccctttccgtcgatcgtcctttccccaccgtcgagtttttccctatccatctccgggctttacgttgcacaccagatgtctgttgatctctgcaagaagaatccatcttttctttggtgtgactgtggttatatgagcagggggaggttgtggtgttttcagattatcctcttcaggcactggacttgacttgtcttcaattcctcgacttctctctctatcttcttctcctctcttctttctcgtttctctgttttttttttctgcttgatttgatcaaagggtattcgtttctgctgctcctcgttactgtgaacttgaagacttagttttctttgctaaactc

SEQ ID NO: 146603 - DNA, 420 bp, Arabidopsis thaliana
gaagaagaagaaggacgacacggacgacacggtaatggcttataggagaccatctgcagcgccaggtgcaccgataacctcgatgatccgtctcgtgctgacgtgtacaagccacagctcggttacatcagcactctcaacagttacgatctccccatccttcgcttcatccgtctctcagccctccgtggatctatccgtcaaaacgcaatggtgcttccacagtggaacgcaaacgcgaacgccattctttacgtgacagacggggaagcccaaatccagatcgtaaacgacaatggtaacagagtgtttgacggacaagtctctcaaggacagctcatagccgtaccacaaggtttctcggtggtgaaacgcgcaacaagcaaccgattccagtgggttgagttcaaaacaaacgca

SEQ ID NO: 146604 - DNA, 447 bp, Arabidopsis thaliana
ctaatcttttcagctctctccatcgtcgtcgtatctgtgactctcgttatcatcgcctgaaaaaaatttgagataatggccagaaagttcttcgtcggaggcaactggaaatgtaacggaactgctgaggaggtgaagaagattgtgaacactcttaatgaagctcaggttccttcacaggatgttgtagaggttgtggttagccctccatatgtttttcttcccctggttaagagcacattgaggtctgacttttttgttgcggcacaaaactgttgggttaagaaaggaggtgctttcactggtgaagtgagtgcggagatgcttgtgaacttggatattccatgggttatccttggtcactctgaaaggagggcaatccttaatgaatcaagcgagttcgttcgagacatggttgcctatgcacttgctcaatgtttgaaagtg

SEQ ID NO: 146605 - DNA, 492 bp, Arabidopsis thaliana
gttttggaaatcttaaatgactaacagcagaatcttttcaacatttaaattttaattactatatctaaatacaaaaaccaataattttttttttctataagaagctattgcattttatatatggaaatatattttcttttgatctcaaatggcaaacatataaataaacaaataataaagggaatatcagtatttcatccacccagaaaaatgtatgcatagcactttccatgaaattaggtttgtgggattttgttgacaaaaaaatattcgtaaaaataaacatgtgtagatggaatcatgatggcattcacacactagaagatatatcgcgaattatcttcaaacttgcgttggatgtttttgacgatatcggaagaggagtgaggtctaaaggatgttcctactacttgaaggagatgttagaagaggtaattaatataaaccattttttcagtaataggagaaaacaaaaacacacacacatcagta

SEQ ID NO: 146606 - DNA, 480 bp, Arabidopsis thaliana
aaaaagaaaatggttaagctcagcaatctcctcgttgcaaccttcggggttctcctcgtccttaacggctgccttgcgaggcagtcacttggggttcctcctcagctacagaacgagtgtaacctcgacaacctagatgttctccaagccaccgaaactatcaagagtgaagccggtcagatcgagtactgggaccacaaccaccctcagctccgatgtgttggtgtttccgttgctcgttatgtaattgaacaaggcggtctttacttgcccaccttcttcacttccccaaaaatttcctacgtcgttcaaggaacgggtatcagcggaagagtggtccctggatgtgccgagaccttcatggactcgcagccgatgcaaggacaacaacaaggccaaccatggcatggacgacagggacaacaaggccaaccatgggaaggacagggacaacagggacaacaaggaaaacaggccaac

SEQ ID NO: 146607 - DNA, 554 bp, Arabidopsis thaliana
gacgtgtacaagccatcactcggatacattagcacacttaacagctacaatcttcctatcctcagacttctccgccttagcgctcttcgtggctccatccgtaaaaacgctatggtgctaccgcaatggaacgtaaacgcaaacgcggcactctacgtgacaaacggaaaggctcatatacaaatggtgaacgacaacggagaaagagtgttcgaccaagagatctccagcggacagttactagtcgtgccacaaggcttttcggtcatgaaacatgccataggcgaacagttcgagtggatcgaattcaagacaaacgaaaacgcacaggtcaacacactcgcgggccgtacctcagtcatgagaggtttgccgcttgaggttataaccaatgggtaccagatctctcccgaagaagctaaacgagtaaagtttagcacgattgagaccacactgacccatagcagttcaatgagctacggaaggcctatggcttgaggcttgatgagcgcgtggtggaataagcgttgatctaaaagttcggttggtacgac

SEQ ID NO: 146608 - DNA, 495 bp, Arabidopsis thaliana
ggaggaagaagaagaagaaggacgacatggacgacacggtaatggcttagaggagaccatctgcagcgccaggtgcaccgataacctcgatgacccgtctcgtgctgacgtgtacaagccacagctcggttacatcagcactctcaacagttacgatctccccatccttcgcttcatccgtctctcagccctccgtggatctatccgtcaaaacgcaatggtgcttccacagtggaacgcaaacgcgaacgctattctttacgtgacagacggggaagcccaaatccagatcgtaaacgacaatggtaacagagtgtttgacggacaagtctctcaaggacagcttatagccggaccacaaggtttctcggtggtgaaacgcgcaacacgcaaccgattccagtgtgttgagttcaaaacaaacgctaacgcgcaaataacacttttggcgggacgaaccttagtcttgagaggtttacctctttgagtcataac

SEQ ID NO: 146609 - DNA, 510 bp, Arabidopsis thaliana
ggtggatctgtatcttacgagaatgttgatgaagctcgattctgtgttggggtgtacatgcatcttcagaaaactctgaagtcgttgggtgcgggtaaagtctctgtgggagtaataaccccgtacaaactgcagctgaaatgccttaagcacgagtttggcaatgctttgggccaagatgaactgaaagagatttatattaatacagtagacgcgtttcagggtcaagaacgtgatgttataatcatgtcatgtgtgcgtgcttcaggtcatggggttggctttgtttcagatatccggcggatgaatgttgctcttacccgtgcgagaagagctctgtgggtgatgggaaatgcatctgctctgatgaagtctgaggattgggcagcgttgatctctgacgcgagaggcagaaactggtttatggaaatggactctcttcccctggatttcccaatccctaaagtatctagttataatcccatggcacctaataatgggttaataaca

SEQ ID NO: 146610 - DNA, 489 bp, Arabidopsis thaliana
ggaagaaaaatgggtcgagtctcatctattatctctttctctttgacactcttgatcctcttcaatggctacactgcccaacagtggcccaacgagtgccagctcgatcaactcaatgcgctcgaaccatcccaaatcatcaagagcgagggtggtcgcatcgaggtctgggaccaccatgcaccccagctccgttgctccggctttgcctttgagcgtttcgtcattgagcctcagggtcttttcttgcccactttcttgaacgccggcaaactcacgtttgttgttcacggaaggggtctaatgggaagagttattccgggatgcgccgagacgttcatggagtcaccggtatttggagaaggtcaaggtcagggtcagagtcaagggttccgtgacatgcaccagaaagtagagcacctacggtgcggtgacaccattgcaacaccactcttggtgtagctaatggttctacaacaatggaaatga

SEQ ID NO: 146611 - DNA, 294 bp, Arabidopsis thaliana
ccggccggattccggtcgaccacgcgtcgataatgaactctgtgagtcatttattttgagaagcttcatcgtttctggaaaatgctcatgcactagcggaataaaagacagatcttttatccactatagaaaccgcgttttctgaaaatgcggctgcgttttgcgatgaaatccgacgttttagcggacgctatctttctggtgattattccactgttttgcgtcggaatacggatgatttcgggaagactgaccggcgtattcgccaccgtcggaaatggctttgatctgggg

SEQ ID NO: 146612 - DNA, 461 bp, Arabidopsis thaliana
aacgagtaagaatacaaatacaaatagcaaaaaaaatggcaaacaagctcttcctcgtctgcgcaactttcgccctctgcttcctcctcaccaacgcttccatctaccgcactgttgtcgagttcgacgaagatgacgccagcaaccccatgggcccaagacagaaatgtcagaaggagtttcagcaatcacagcacctaagagcttgccagaaattgatgcgcatgcaaatgaggcaaggccgaggtggtggtccctccctcgacgatgagttcgatttggaagacgacatcgagaacccacaaggcccccagcagggacaccagatcctccagcagtgctgcagcgagcttcgccaggaagagccagtttgtgtttgccccaccttgggacaaggtggccaggcccgtagccttcagggacaacacggaccattccaatccaggaaaaattacaagaca

SEQ ID NO: 146613 - DNA, 554 bp, Arabidopsis thaliana
caaaaagaaaatggttaagctcagcaatctcctcgttgcaaccttcggggttctcctcgtccttaacggctgccttgcgaggcagtcacttggggttcctcctcagctacagaacgagtgtaacctcgacaacctagatgttctccaagccaccgaaactatcaagagtgaagccggtcagatcgagtactgggaccacaaccaccctcagctccgatgtgttggtgtttccgttgctcgttatgtaattgaacaaggcggtctttacttgcccaccttcttcacttccccaaaaatttcctacgtcgttcaaggaacgggtatcagcggaagagtggtccctggatgtgccgagaccttcatggactcgcagccgatgcaaggacaacaacaaggccaaccatggcaaggacgacagggacaacaaggccaaccatgggaaggacagggacaacagggacaacaaggaagacaaggccaaccatgggaaggacagggacaacagggacaacaaggacgacagggacaacaaggccaaccatgggaaggacagg

SEQ ID NO: 146614 - DNA, 466 bp, Arabidopsis thaliana
atgagtacttacggtatcatatccactcgagattggaggattctaagctgaaagatggttacttggttgacatggggataggagttctcactggtgggcttggaggcatagctgtaggaatctatatagtgtgtttcataaattccatcataaaaaatgttgctattttatatgaatattacttctgcttctatgatgcagtgctggtcagctgttttgccttttgatgtagcaaaaaccataatccagacctcttcagagaaagctacagagagaaatccttttaaagtgttgagctcggtcagtcagccatcttccctctatgaatctaattaccgatacaaaagagtatatgaaatatttgttttgactttaaatcatctctgcagattcacaagagggcaggactcaagggatgctattccaggtttgggtccaacccattgtgagagcattccctgctaat

SEQ ID NO: 146615 - DNA, 530 bp, Arabidopsis thaliana
  unsure (1)..(530): unsure at all n locations
cgaggttattgctcaagctttgaagattgatcttcagacagcgcagcaacttcagaaccaagatgacaaccgtggaaacattgtccgagtccaaggcccgttcggtgtcattaggccgcctttgaggggccagagacctcaggaggaggaagaagaagaagaaggacgacacggacgacacggtaatggcttagaggagaccatctgcagcgccaggtgcaccgataacctcgatgatccgtctcgtgctgacgtgtacaagccacagctcggttacatcagcactctcaacagttacgatctccccatccttcgcttcatccgtctctcagccctccgtggatctatccgtcaaaacgcaatggtgcttccacagtggaacgcanacgcgaacgccattctttacgtgacagacggtgaagcccaaattccagatcgtaaacgacaatggtaacagagtgtttgacggacaagtctctcaaggacagctcatagccgacacaacaggtttctcggtggtgaaacgcgca

SEQ ID NO: 146616 - DNA, 456 bp, Arabidopsis thaliana
  unsure (1)..(456): unsure at all n locations
gcaacaaacaaaaagaaaatggttaagctcagcaatctcctcgttgcaacctttttggttctcctcgtccttaacggctgggttgcgaggcagtcacttggggttgctcctcaactacanaacgagtgtaacctcgacaacctagatgttctccaagccaccgaaactatcaagagtgaagccggtcagatcgagtactgggaccacaaccaccctcagctccgatgtgttggtgtttccgttgctcgttatgtaattgaacaaggcggtctttacttgcccaccttcttcacttccccaaaaatttcctacgtcgttcaaggaacgggtatcagcggaagagtggtccctggatgtgccgagaccttcatggactcgcagccgatgcaaggacaacaacaaggccaaccatggcaaggacgacagggacaacatggtcaaccatgggaaggacag

SEQ ID NO: 146617 - DNA, 515 bp, Arabidopsis thaliana
agaaaaatgggtcgagtctcatctattatctctttctctttgacactcttgatcctcttcaatggctacactgcccaacagtggcccaacgagtgccagctcgatcaactcaatgcgctcgaaccatcccaaatcatcaagagcgagggtggtcgcatcgaggtctgggaccaccatgcaccccagctccgttgctccggctttgcctttgagcgtttcgtcattgagcctcagggtcttttcttgcccactttcttgaacgccggcaaactcacgtttgttgttcacggaaggggtctaatgggaagagttattccgggatgcgccgagacgttcatggaggcaaccggtatttggagaaggtcaaggtcagggtcagagtcaagggtttcgtgacatgcaccagaaagtagagcacctacggtgcggtgacaccattgcaacaccatctggtgtagctcaatggttctacaacaatggaaatgagcctttcattcttgttggagccgcggatc

SEQ ID NO: 146618 - DNA, 443 bp, Arabidopsis thaliana
ccagaaccagcttgaccgcaacccaaggccattttacttagccggaaacaacccacaaggtcaagtatggctacaaggccgagagcaacagccacagaagaacattttcaatggatttggacccgaggttattgctcaagctttgaagatcgatcttcagacagcgcagcaacttcagaaccaagatgacaaccgtggaaacattgtccgagtccaaggcccgttcggtgtcattaggccgcctttgaggggccagagacctcaggaggaggaagaagaagaagaaggacgacatggacgacacggtaatggcttagaggagaccatctgcagcggcaggtgcaccgataaccttgatgacccgtcttgtgctgacgtgtacaagccacagatcgggtacatataagattctaaacagttacgatcttcccatactttggttt

SEQ ID NO: 146619 - DNA, 487 bp, Arabidopsis thaliana
ttcattcctccatcctatttttcttctgcaccaaagtgttattcgtcaactttatatattacacaaatgtctttagcggcggataatgtgttgttggtggaacaaggaaagccagccacagcggaacatccatcggccggaccggtttatcgatgtaaatacgctaaagatggcctcctcgatctccctacccatattgattccccttggcagttctttagtgaggctgtgaagaaatatccgaatgagcaaatgttgggccaacgcttaacgactgattctaaggtcggtccatacacatggatcacatataaggaagcccacgacgctgcaattcggattggatcagcaatcaaaaagccgaggcgttgatccgggacactgttgtggtatttacggagctaattgtccagaatggattatttgcaatggaggcctgcatgagccaagggatcacctacgtgcctctatacgattctttaggcgt

SEQ ID NO: 146620 - DNA, 468 bp, Arabidopsis thaliana
aaaaacatgacctttctaaaaatgaaaagcctttctttcttcttcaccatcctcctctctctctcgaccctcttcaccatctccaacgcacggaagtttaatgtcggaggcagtggcgcgtgggttacaaacccacctgaaaactacgaatcttggtctggcaaaaaccgtttccttgttcacgacactctctattttagctacgctaagggagctgactcggtgctagaggtgaacaaggctgattacgacgcttgtaatacaaagaatccgatcaaaagagtggacgatggagattctgagatctctcttgatcgttatggtccgttttacttcatcagtggcaatgaagataactgtaagaagggtcaaaagcttaatgtcgttgtcatatctgctaggatttcaatcaacggctcagtctcctcacgccgctgcaccgggaagctttacgccgggatcaatgac

SEQ ID NO: 146621 - DNA, 501 bp, Arabidopsis thaliana
  unsure (1)..(501): unsure at all n locations
atctctatatacccccttttaatttgtgtgctcttagcctttactctatagttttatatcatatcaatcgacatggcgaatgtggaccgtgatcggcgtgtgcatgtagaccgtactgacaaacgtgttcatcagccaaactacgaagatgatgtcggttttggtggctatggcggttatggtgctggttctgattataagagtcgcggcccctccactaaccaaatcttggcacttatagcaggagttcccattggtggcacactgctaaccctagctggactcactctagccggttcggtgatcggcttgctagtctccatacccctcttcctcctcttcagtccggtgatagtcccggcggctctcactattgggcttgctgtgacgggaatcttggcttctggtttgtttgggttgacgggtctgagctcggtctcgtgggtcctcaactacctncgtgggacgagtgatacagtgccagagcaattgggactacgc

SEQ ID NO: 146622 - DNA, 498 bp, Arabidopsis thaliana
caaaaagaaaatggttaagctcagcaatctcctcgttgcaaccttcggggttctcctcgtccttaacggctgccttgcgaggcagtcacttggggttcctcctcagctacagaacgagtgtaacctcgacaacctagatgttctccaagccaccgaaactatcaagagtgaagccggtcagatcgagtactgggaccacaaccaccctcagctccgatgtgttggtgtttccgttgctcgttatgtaattgaacaaggcggtctttacttgcccaccttcttcacttccccaaaaatttcctacgtcgttcaaggaacgggtatcagcggaagagtggtccctggatgtgccgagaccttcatggactcgcagccgatgcaaggacaacaacaaggccaaccatggcatggacgacagggacaacaaggtcaaccatgggaaggacagggacaacatggacaacaaggaagacaaggccaaccatgggaaggcaggga

SEQ ID NO: 146623 - DNA, 433 bp, Arabidopsis thaliana
cggacgcgtgggtaacaaaatggctcgagtctcttctcttctttctttcttcttaacacttttgatccttttccatggctacgcggctcaacagggtcagcagggtcagcagtttccgaacgagtgccagctcgaccagctcaatgcgctcgagccgtcacacgtactgaagagcgaggctggtcgcatcgaggtgtgggaccaccacgctcctcagctccgttgctcaggtgtctcctttgcacgttacatcatcgagtctaagggtctctacttgccctctttctttaacaccgcgaagctctctttcgtggctaagggacgaggtcttatgggaaaagtgatccctggatgcgccgaaacattccaagactcatcagagttccaaccacgcttcgaaggtcaaggtcaaagccagaggttccgtgacatg

SEQ ID NO: 146624 - DNA, 433 bp, Arabidopsis thaliana
  unsure (1)..(433): unsure at all n locations
agaaaaatgggtcgagtctcatctattatctctttctctttgacactcttgatcctcttcaatggctacactgcccaacagtggcccaacgagtgccagctcgatcaactcaatgcgctcgaaccatcccaaatcatcaagagcgagggtggtcgcatcgaggtctgggaccaccatgcaccccagctccgttgctccggctttgcctttgagcgtttcgtcattgagcctcanggtcttttcttgcccactttcttgaacgccggcaaactcacgtttgttgttcacggaaggggtctaatgggaagagttattccgggatgcgccgagacgttcatggagtcaccggtatttggagaaggtcaaggtcagggtcagagtcaagggttccgtgacatgcaccagatagtagagcacctacggtgcggtgaca

SEQ ID NO: 146625 - DNA, 503 bp, Arabidopsis thaliana
aagaggaagaaaaatgggtcgagtctcatctattatctctttctctttgacactcttgatcctcttcaatggctacactgcccaacagtggcccaacgagtgccagctcgatcaactcaatgcgctcgaaccatcccaaatcatcaagagcgagggtggtcgcatcgaggtctgggaccaccatgcaccccagctccgttgctccggctttgcctttgagcgtttcgtcattgagcctcagggtcttttcttgcccactttcttgaacgccggcaaactcacgtttgttgttcacggaaggggtctaatgggaagagttattccgggatgcgccgagacgttcatggagtcaccggtatttggagaaggtcaaggtcagggtcagagtcaagggttccgtgacatgcaccagaaagtagagcacctacggtgcggtgacaccattgcaacaccatctggtgtagctcaatggttctacaacaatggaaatgagcctctcattc

SEQ ID NO: 146626 - DNA, 457 bp, Arabidopsis thaliana
gagtaagaatacaaatacaaatagcaaaaaaaatggcaaacaagctcttcctcgtctgcgcaactttcgccctctgcttcctcctcaccaacgcttccatctaccgcactgttgtcgagttcgacgaagatgacgccagcaaccccatgggcccaagacagaaatgtcagaaggagtttcagcaatcacagcacctaagagcttgccagaaattgatgcgcatgcaaatgaggcaaggccgtggtggtggtccctccctcgacgatgagttcgatttggaagacgacatcgagaacccacaaggcccccagcagggacaccagatcctccagcagtgctgcagcgagcttcgccaggaagagccagtttgtgtttgccccaccttgagacaagctgccagggccgttagcctccagggacaacacggaccattccaatccaggaaaattacaagaca

SEQ ID NO: 146627 - DNA, 492 bp, Arabidopsis thaliana
aaaaatgggtcgagtctcatctattatctctttctctttgacactcttgatcctcttcaatggctacactgcccaacagtggcccaacgagtgccagctcgatcaactcaatgcgctcgaaccatcccaaatcatcaagagcgagggtggtcgcatcgaggtctgggaccaccatgcaccccagctccgttgctccggctttgcctttgagcgtttcgtcattgagcctcagggtcttttcttgcccactttcttgaacgccggcaaactcacgtttgttgttcacggaaggggtctaatgggaagagttattccgggatgcgccgagacgttcatggagtcaccggtatttggagaaggtcaaggtcagggttaagagtcaagggttccgtgacatgcaccagaaagtagagcacctacggggccgggacacaatgcaacaacatgtggggagttcaatgggatacaacaatggaaatgggcctcttattc

SEQ ID NO: 146628 - DNA, 445 bp, Arabidopsis thaliana
cccacgtagcccacagggcaacggccttgaggagactatctgcagcatgaggtcccacgagaacattgacgaccctgctcgtgctgacgtgtacaagcccagcctaggtcgcgtgaccagcgtcaacagctataccttgcccatcttggagtatgtcaggctcagtgccactcgtggcgttctccagggtaatgcgatggtgcttcctaaatacaacatgaacgctaacgagatcttgtactgcactggaggacaaggaaggatccaagtggtcaacgacaacggacagaacgtgttggaccaacaggtgcagaagggacagctcgtggtcatcccacaagggttcgcatacgttgtccagtcccacggaaacaagttcgagtggatctctttcaaaactaatgaaaacgcaatgatcagcactttggcgggtagaacctcgctc

SEQ ID NO: 146629 - DNA, 263 bp, Arabidopsis thaliana
  unsure (1)..(263): unsure at all n locations
ccggggacgctggattatcctccaggatcttaagatttcctcctaatttcgtccgtcagctgagcattaaagcccgtagaaactgtagcaacatcggtgttgcacagatcgtggcggctaagtggtccaacaacccatcctccgcgttaccttcggcggcggnggntgntgctacctcgtctgcatctgcggtttcttccgccgcatctgccgccgtatgctctttcgtcttctttggccttgtgtctggcgttccttccgtt

SEQ ID NO: 146630 - DNA, 477 bp, Arabidopsis thaliana
cctcagacttctccgccttagcgctcttcgtggctccatccgtaaaaacgctatggtgctaccgcaatggaacgtaaacgcaaacgcggcactctacgtgacaaacggaaaggctcatatacaaatggtgaacgacaacggagaaagagtgttcgaccaagagatctccagcggacagttactagtcgtgccacaaggcttttcggtcatgaaacatgccataggcgaacagttcgagtggatcgaattcaagacaaacgaaaacgcacaggtcaacacactcgcgggccgtacctcagtcatgagaggtttgccgcttgaggttataaccaatgggtaccagatctctcccgaagaagctaaacgagtaaagtttagcacgattgagaccacactgacccatagcagtccaatgagctacggaaggcctatggcttgaagcttgatgagcgcgtggtggaatagcggttgaatcta

SEQ ID NO: 146631 - DNA, 330 bp, Arabidopsis thaliana
  unsure (1)..(330): unsure at all n locations
agaaaacatacacaaatagcaaaacatggctaacaagctcttcctcgtctgcgcaactctcgccctctgcttcctcctcaccaacgcttccatctaccgcaccgttgtcgaattcgaagaagatgacgccagcaaccccgtaggtccaagacagagatgccagaaggagtttcagcaatcacaacacctaagagcttgccagagatggatgagcaagcaaatgaggcaaggacgtggtggtggtccttccctcgacgatgagttcgatttcgagggcccncagcagggataccagctactccagcagtgctgcaacgagcttcggcagga

SEQ ID NO: 146632 - DNA, 461 bp, Arabidopsis thaliana
aaatttctcaaactctgaaatcgttctctcaaatctctcattcgggttcaagatgcagatctttgttaagactctcaccggaaagactatcaccctcgaggtggaaagctctgacaccatcgacaacgttaaggccaagatccaggataaggaaggcattcctccggatcagcagaggcttattttcgccggaaaacagctagaggatggccgtacgttggctgattacaatatccagaaggaatccaccctccacttggttctcaggctccgtggtggtatgcagattttcgtcaagaccttaacgggaaagacgattactcttgaggtggagagttctgacaccatcgacaacgtcaaggccaagattcaagacaaggagggtattcctaccgaccagcagatgttgatcttcgctggaaagcagttggaggatggcaaaactcttgcttactacaaca

SEQ ID NO: 146633 - DNA, 406 bp, Arabidopsis thaliana
cctcttcaaaggcaaacaatttacacagctatatatatatttttagggttttttcagtatctcgcgaggttttacatagatttctccattatggattcgatgatgaatcagaagactgttttggctgtgacggatgatgtggtgttacctgttagctctgttttagctataatgaaagagcttggaaaggaagtgattgagagttttgatcctctgattattactcaagcatccacaataaatcagtttcctttggatgcttcctctgtggaggcggtgctagccatttccaaaacatctgatttcccaagtgataaaatatgtggtgagttctcaagaatcttgaagcctggtggtacgggtttttgtgtgcaaagttttggagggtgaaacgggaggaatttaa

SEQ ID NO: 146634 - DNA, 470 bp, Arabidopsis thaliana
  unsure (1)..(470): unsure at all n locations
aaacatacacacnttagagacaaagggagagagagatggggtcaaagacggagatgatggagagagacgcaatggctacggtggctccctatgcgccggtcacttaccatcgccgtgctcgtgttgacttggatgatagacttcctaaaccttatatgccaagagcattgcaagcaccagacagagaacacccgtacggaactccaggccataagaattacggacttagtgttcttcaacagcatgtctccttcttcgatatcgatgataatggcatcatttacccttgggagacctactctggactgcgaatgcttggtttcaatatcattgggtcgcttataatagccgctgttatcaacctgacccttagctatgccactcttcccggggggtgaccttcaccttttttcctatatacatacccaacattcccatgtcaaagcatggaagtgattcaaaaacatatg

SEQ ID NO: 146635 - DNA, 514 bp, Arabidopsis thaliana
cagaaacccaaaccctcattccaaaaaatggggtctcgctctcaaaacctcttctttatcgtcctcctcctccttggcttcgttgccgtctcctatgcttgcgactgtacccctcctaaaccatcaccagcacctcacaaaccaccaaaacatccagtcaaaccgcctaaacctcctgccgtcaaaccaccttaaccaccggcagtaaaaccacctactccaaaacctcccaccgtgaaaccccatcctaaaccaccaaccgtcaaaccccatcctaaaccaccaaccgtcaaaccccaccctaagccacccaccgtcaaaccaccccaccctaaaccacccaccaaaactcaccctcacccaaaaccttccattgtaagccaccaaccaagccttcttcgtccacccctaaaccttccaccaaaccttccccgtcacacctaaacctccacgaccaacctctttcgttacttcgaacaccccacccaagctttgttctacaccatgccaccac

SEQ ID NO: 146636 - DNA, 500 bp, Arabidopsis thaliana
cgactggtgggtttcttgcaccggaccctcctccgtccgggggattaatagtcccggacatgattgctgaaaattagttgcctgcaattgttatcaataaacattatttaaaatatagaaatgaagtaatgactagcttcttaatgtgttaatgaggtatagttttaaaccttagagggagggtattattatttggaggaactgtagattttcttgagagattggaatgttgctgcgtatttatataagttgtgatatatttaaaagtcaactctcaagatcacacaacgtgaatttctttttatttttttgtaagataaaacatgttgcactttgataaattcagcgaaagccaacatgataatactattaaacaatattgaggtgtataaattaatatggttttgtgaggaatgaaatatcaaaaggttgacttttggcaattatgcggtgtgaagataggtctaaaaaaagtatacataaaattactgttccaaata

SEQ ID NO: 146637 - DNA, 434 bp, Arabidopsis thaliana
  unsure (1)..(434): unsure at all n locations
cacatagcaaaaaatggcaaacaagttgttcctcgtctgcgcagctctcgctctctgcttcctcctcaccaacgcttccatctaccgcaccgtcgttgagttcgaagaagatgacgccactaaccccataggcccaaaaatgaggaaatgccgcaaggagtttcagaaagaacaacacctaagagcttgccagcaattgatgctccagcaagcaaggcaaggccgtagcgatgagtttgatttcgaagacgacatggagaacccacagggacaacagcaggaacaacagctattccagcagtgctgcaacgagcttcgccaggaagagccagattgtgtttgccccaccttgaaacaagctgccaaggccgttagacntccaggacagcaccaaccaatgcatgttaggaaaatttaccagacagccaagcact

SEQ ID NO: 146638 - DNA, 337 bp, Arabidopsis thaliana
aaacatacacacatagcaaaaaatggcaaacaagttgttcctcgtctgcgcagttctcgctctctgcttcctcctcaccaacgcttccatctaccgcaccgtcgttgagttcgaagaagatgacgccactaaccccataggcccaaaaatgaggaaatgccgcaaggagtttcagaaagaacaacacctaagagcttgccagcaattgatgctccagcaagcaaggcaaggccgtagcgatgagtttgatttcgaagacgacatggagaacccacagggacaacagcaggaacaacagctattccagcagtgctgcaacgagcttcgccaggaagag

SEQ ID NO: 146639 - DNA, 408 bp, Arabidopsis thaliana
aactgacacccgtatgtgccaaaaaccctctaaccactcaaaaaaatatctgtgctctgctccaatggcgtctgtactcgattgcgtcaccgtgacccgcgtgtttactttgacgattgcggcttccgtctcgtcttattcagctgctccgtcggtttcacgacgccggatgtctcccgccaggtttctggaattcacaggtttgaagttttcgcggagtttggtgactcagtcgggcaggctgggtgcgaatcgaagaaccagaatcgctcgcggcggacgaatcgcctgtgaggctcaggacaccactgacggcgccgtcgaagtaccaaatatggctgattcagaatggcaaacaaaggatgtggaatcagatgttccaagtctggtcgcgttgtgggcaccatg

SEQ ID NO: 146640 - DNA, 474 bp, Arabidopsis thaliana
ggaagacaaggccaaccatgggaaggacagggacaacagggacaacaaggacgacagggacaacaaggccaaccatgggaaggacagggacagcagggacaacaagggttccgtgacatgcaccagaaggtggaacatgtgagacgcggagacgtctttgccaacacttcaggctctgcccactggatctacaactcaggagaacagccacttgtcatcatcgctcttctcgacatcgacaactaccaaaaccaactcgaccgcaaccctagagtgttccatttggccggaaacaaccagcagggaggctttggcggttcacagcaacaacaagaacagaaaaacttgtggagcgggttcgacgcacaggtcatagctcaagcattgaaaattgacgttcagttggctcagcagcttcagaaccaacaagacagcagaggaaacatcgttcgtgttaagggacctttccaggtc

SEQ ID NO: 146641 - DNA, 476 bp, Arabidopsis thaliana
cttcctctgacccttctcctcaaaatttcgaacctctctatcagatctccaacaatccttctcctccacaacagcaacagcagcaccaacaacaacaacaacaacaacagcataagcctcctcctcctccgattcagcagcaagaaagagaaaattcttccaccgatgcaccaccgcaaccagagacagtgacggccactgttcccgccgtccaaacaaatacggcggaggctttaagagagaggaaggaagagattaagaggcagaagcaagacgaagaaggattacaccttctcacattgctgctacagtgtgctgaagctgtctctgctgataatctcgaagaagcaaacaagcttcttcttgagatctctcagttatcaactccttacgggacctcagcgcagagagtagctgcttacttctcggaagctatgtcagcgagattactcaacttgtgtgttcggaatttacgc

SEQ ID NO: 146642 - DNA, 408 bp, Arabidopsis thaliana
cagctaagcaactacaaaaccagaaggacaacagaggaaacataatccgagcaaatggtcctctgcatttcgtcatcccaccgcctcgtgaatggcagcaagatggcattgctaatggcatcgaagagacttattgcacggctaagattcatgagaatatcgatgatccagaacggtctgaccattttagcacacgagccggaagaatcagcactcttaacagccttaatctccctgttctacgtctagtcagacttaacgcccttagagggtatctctacagcggaggaatggtgttgccacaatggacggcaaacgcgcacacggtgctatacgtcacaggaggtcaagccaagatacaagtggtggacgacaatggtcaagtcgtgtcaatgagcaagtgggaca

SEQ ID NO: 146643 - DNA, 446 bp, Arabidopsis thaliana
ataaatctcacctccctttttttttttttttttgtctcgctacttttgattatcatttaaagccaaaaaacctaccatgaatgagaatcacattcaaagtgatcacatgaacaacaccattcatgtaacaaacaaaaaactcccaaacttcctcttatccgtacgtctcaaatatgttaaacttggttaccattacctaatctcgaatgccgtctacattctcatactccccgtcggcctcctcgccgcaacctcctcctcctttagtctctccgatctcacactcttatacaaccaccttctcaaattccactttctctcgtccactctcttcgccgctcttcttatctttctaaccaccctctacttcacaactcgtcctcgcagaatctttctcctcgatttcgcttgttacaaacccgactcttctctaatatgcacacgag

SEQ ID NO: 146644 - DNA, 460 bp, Arabidopsis thaliana
caacaaacaaaaagaaaatggttaagctcagcaatctcctcgttgcaaccttcgggggtctgctcgtccttaacggctgccttgcgaggcagtcacttggggttcctcctcagctacagaacgagtgtaacctcgacaacctagatgttctccaagccaccgaaactatcaagagtgaagccggtcagatcgagtactgggaccacaaccaccctcagctccgatgtgttggtgtttccgttgctcgttatgtaattgaacaaggcggtctttacttgcccaccttcttcacttccccaaaaatttcctacgtcgttcaaggaacgggtatcagcggaagagtggtccctggatgtgccgagaccttcatggactcgcagccgatgcaaggacaacaacaaggccaaccatggcaaggacgacagggacaacaaggccaaccatgggaaggacagggaca

SEQ ID NO: 146645 - DNA, 460 bp, Arabidopsis thaliana
  unsure (1)..(460): unsure at all n locations
ggaagctctctgttcaaatcaaaaagagagatcgtacgcaaaagtttccgatatggctcgctcgtttggagcaaacagcactgttgtgcttgcgatcatcttcttcggatgtttatttgcgttttccactgcaaaagaagaggctacgaagttaggatcagttattgggatagatcttggtaccacttactcttgtgttggtgtttacaagaatggtcatgttgaaattattgccaatgaccaaggaaaccgtattacaccttcatgggttggttttactgactctgaaaggctcattggtgaggctgctaagaatcaagcagctgttaatccagagaggactgtcttcgacgttaagagattgatcgggcgaaaatttgaggacaaggaggttcaaaaggacaggaaactngtaccttaccagattgtgaacaaggatggtaagccatacattcaagtc

SEQ ID NO: 146646 - DNA, 443 bp, Arabidopsis thaliana
cacagggcaacggccttgaggagactatctgcagcatgaggtcccacgagaacattgacgaccctgctcgtgctgacgtgtacaagcccagcctaggtcgcgtgaccagcgtcaacagctataccttgcccatcttggagtatgtcaggctcagtgccactcgtggcgttctccagggtaatgcgatggtgcttcctaaatacaacatgaacgctaacgagatcttgtactgcactggaggacaaggaaggatccaagtggtcaacgacaacggacagaacgtgttggaccaacaggtgcagaagggacagctcgtggtcatcccacaagggttcgcatacgttgtccagtcccacggaaacaagttcgagtggatctctttcaaaactaatgaaaacgcaatgatcagcactttggcgggtagaacctcgctcttgagggca

SEQ ID NO: 146647 - DNA, 413 bp, Arabidopsis thaliana
cacaaacacaatctaatcccaaaaatcaaaagatgaatgccacaaagtttgttgtgcttctcgtgatgggcgttttgtgtgccattgtcaccgcaaggcaggtcaaagatttgtccacggagaccaaattaggggcctctcttccaaaaactactaccaaaggcattggagctcagctttctgcaactggcacaacttacagcaccagcagtgtcgttagctatgctaatggttttaacaatcccaaaggtccaggggccaatgcattcgaaagtgccaacacatttaccagcggacaagtcactgccaagggtcgcaaggcaagagtttcttctacaagtgcttctgccgctgaaggcgatgctgcagctgcagtgactcgcaaagctgctgctgcacgtgcaaagggtaag

SEQ ID NO: 146648 - DNA, 382 bp, Arabidopsis thaliana
gcgaaaccgaagcaaccggcgttaccgatgattcggctccagcgattgagactgaaactgtttctgatgcgatggagcatacagcgatcggagtggttgaatcggtggaaggagccatagaaggagcagagaaatgggtgggtgatttgcaacggacggtgaaggaatcgaaggataccgcaatgcgttctgctcgttccctccgtgaaaattctacctctcagttccgctctatacaggatttcattccacatgctttgactcagtataagacctatgagaatgctttcttcagtaaagttacagacgaattgatatacgcaaaagagcatccggctgctgctattgggatgggtgtcgctgctagtctcgttctgatgcg

SEQ ID NO: 146649 - DNA, 418 bp, Arabidopsis thaliana
  unsure (1)..(418): unsure at all n locations
cgggcccgacccacgcgtnccgaacaagaaagnnaaaatggtttatgctcagctaatttttctcgttcgcaacccttcggnggttcttcctcgtgccttaatcggctgcgcttgcgagggcagtcacaattggggttccttcctcagctaccagaacgagtgtagacctcgacccaacctagatgttctccaagccagccgaaactatcaagagtgaagccggtcagatcgagtactgggaccacaaccaccctcagctccgatgtgttggtgtttccgttgctcgttatgtaattgaacaaggcggtctttacttgcccaccttcttcacttccccaaaaatttcctacgtcgttcaaggaacgggtatcagcggaagagtggtccctggatgtgccgagaccttcatggactcgca

SEQ ID NO: 146650 - DNA, 463 bp, Arabidopsis thaliana
cgttgataataatagaacactttctttctctctctaaaaagcaaaagtagtctagtcactgatttcttctaatcctccggtggagtgagagatgatatctccgacgttgtttcctctcctctgcgctttatttctatgtcttccagtggctgttatcttcacagtccagcgagaactcacctgcgttatctcgccggagtttggtttccgctctctttccgtcttctctctttactctcgaaatgtccccgactcttcttcttcttctccggcggttcggattcgacagccgattcccaaagaagacgaccctcttcttcgactatcttctcgggttaacccgaatctacctcccggttcgacccggaaaatagcttttatgtacttaacgacgtcgcctcttccgttcgcgcctctttgggagatgttcttcgacggaatctccaagaatctttacaatgtc

SEQ ID NO: 146651 - DNA, 461 bp, Arabidopsis thaliana
gacgtccgttaacgttaagctcctttaccgttacgtcttaaccaactttttcaacctctgtttgttcccgttaacggcgttcctcgccggaaaagcctctcggcttaccataaacgatctccacaacttcctttcctatctccaacacaaccttataacagtaactttactctttgctttcactgttttcggtttggttctctacatcgtaacccgacccaatccggtttatctcgttgactactcgtgttaccttccaccaccgcatctcaaagttagtgtctctaaagtcatggatattttctaccaaataagaaaagctgatacttcttcacggaacgtggcatgtgatgatccgtcctcgctcgatttcctgaggaagattcaagagcgttcaggtctaggtgatgagacgtacagtcctgagggactcattcacgtaccaccgcggaagacttttg

SEQ ID NO: 146652 - DNA, 474 bp, Arabidopsis thaliana
caaaaagaaaatggttaagctcagcaatctctctcgttgcaaccttcggggttctcctcgtgcttaacggctgccttgcgaggcagtcacttggggttcctcctcagctacagaacgagtgtaacctcgacaacctagatgttctccaagccaccgaaactatcaagagtgaagccggtcagatcgagtactgggaccacaaccaccctcagctccgatgtgttggtgtttccgttgctcgttatgtaattgaacaaggcggtctttacttgcccaccttcttcacttccccaaaaatttcctacgtcgttcaaggaacgggtatcagcggaagagtggtccctggatgtgccgagaccttcatggactcgcagccgatgcaaggacaacaacaaggccaaccatggcaaggacgacagggacaaacaggccaaccatgggatggacagggaccacagggacaacatggaagac

SEQ ID NO: 146653 - DNA, 450 bp, Arabidopsis thaliana
aagaaaacatacacaaatagcaaaacatggcttacatgctcttcctcgtctgcgcaactctcgccctctgcttcctcctcaccaacgcttccatctaccgcaccgttgtcgaattcgaagaagatgacgccagcaaccccgtaggtccaagacagagatgccagaaggagtttcagcaatcacaacacctaagagcttgccagagatggatgagcaagcaaatgaggcaaggacgtggtggtggtccttccctcgacgatgagttcgatttcgagggcccccagcagggataccagctactccagcagtgctgcaacgagcttcgccaggaagagccagtatgcgtttgccccaccttgaaacaagctgtcagggcagttagccttcagggacagcacggaccattccaatccaggaaaattaccagtcagctaatacttgcctaacatt

SEQ ID NO: 146654 - DNA, 451 bp, Arabidopsis thaliana
ggagaattttgcatttgcatttgcacaacgttataagaagaccacaagagccatttgcaatggggcataatatatgtcctaactcaccaaccccctcaaaattgccaccaacttcaaatttctctcctttaaacctttctcaatcatctttcttctgccttggaatcctgatcatggcgtcttctctcacttccaaatccattctcggatccaccaaacccggttcttcttctcttccctcggagctccgtcgtctttcttctcccgccgttcagatctctctccgtacccaaaccaggaagaacttccagatacaagctactggaagttcatatgggactcattttcgagtttcaacttttggagaatcacatggaggaggagttggttgtatcattgatggttgtcctcctcgtattccacttactgaatctgatttgcaattcgatct

SEQ ID NO: 146655 - DNA, 470 bp, Arabidopsis thaliana
  unsure (1)..(470): unsure at all n locations
caacaacaaatcttaaacgttttactttgtgctgcactactcaacctcaatggccgcctcaacaatggctctctcctcccctgccttcgccggtaaggccgtcaagctttcccccgcggcatctgaagtccttggaagcggccgtgtgacaatgaggaagactgttgccaagccaaagggcccatcaggcagcccatggtacggatctgaccgtgtcaagtacttgggtccattctctggcgaatcaccgagctaccttaccggagagttccccggagactacggatgggacaccgccggactttcagctgaccccgagacattcgcaaggaaccgtgagctagaagttatccacagcaggtgggctatgctcggagccctaggctgcgtcttccctgagcttttggctaggaacggagtcaagttcggagaggcggnttggttcaaggccggttcacagatcttcagcg

SEQ ID NO: 146656 - DNA, 464 bp, Arabidopsis thaliana
aacaaaaagaaaatggttaagctcagcaatcttctcgttgcaaccttcggggttctgctcgtccttaacggctgccttgcgaggcagtcacttggggttcctcctcagctacagaacgagtgtaacctcgacaacctagatgttctccaagccaccgaaactatcaagagtgaagccggtcagatcgagtactgggaccacaaccaccctcagctccgatgtgttggtgtttccgttgctcgttatgtaattgaacaaggcggtctttacttgcccaccttcttcacttccccaaaaatttcctacgtcgttcaaggaacgggtatcagcggaagagtggtccctggatgtgccgagaccttcatggactcgcagccgatgcaaggacaacaacaaggccaaccatggcaaggacgacagggacaacaaggccaaccatgggaaggacagggacaacagggaca

SEQ ID NO: 146657 - DNA, 462 bp, Arabidopsis thaliana
caaaaagaaaatggttaagctcagcaatctcctcgttgcaaccttcggggttctcctcgtccttaacggctgccttgcgaggcagtcacttggggttcctcctcagctacagaacgagtgtaacctcgacaacctagatgttctccaagccaccgaaactatcaagagtgaagccggtcagatcgagtactgggaccacaaccaccctcagctccgatgtgttggtgtttccgttgctcgttatgtaattgaacaaggcggtctttacttgcccaccttcttcacttccccaaaaatttcctacgtcgttcaaggaacgggtatcagcggaagagtggtccctggatgtgccgagaccttcatggactcgcagccgatgcaaggacaacaacaaggccaaccatggcaaggacgacagggacaaccaggccaaccatgggaaggacagggacaacagggaca

SEQ ID NO: 146658 - DNA, 464 bp, Arabidopsis thaliana
caaaaagaaaatggttaagctcagcaatctcctcgttgcaaccttcggggttctcctcgtgcttaacggctgccttgcgaggcagtcacttggggttcctcctcagctacagaacgagtgtaacctcgacaacctagatgttctccaagccaccgaaactatcaagagtgaagccggtcagatcgagtactgggaccacaaccaccctcagctccgatgtgttggtgtttccgttgctcgttatgtaattgaacaaggcggtctttacttgcccaccttcttcacttccccaaaaatttcctacgtcgttcaaggaacgggtatcagcggaagagtggtccctggatgtgccgagaccttcatggactcgcagccgatgcaaggacaacaacaaggccaaccatggcaaggacgacagggacaacaaggccaaccatgggaaggacagggacaacagggacaac

SEQ ID NO: 146659 - DNA, 435 bp, Arabidopsis thaliana
ctttctctggatttgaaagttcgataaaaatctactgatacatcgacttctggaagcgatctcgatctctctagaattgtttcgacgacgaagatgaagaagattcaaattggtgcggtggcgctattggtgtttctatctgtggcctctctctttgaaatcggattggcttctccgaacacagttcctgctttcctctggtctccgcatctccagtctgctaatggtgaattggatgaggctgtaaattatcaggtcatgtctgcaaaggatctagttggttctgctttcactcaaggaggttggtcaaactttctgtgctcagagaagaagcttgagcaaccttgtgatgttgcactagtgttcataggcagagagttactgtcttctgatgtttcttcaaaaaggaactcagatcctgcccttgttaacaca

SEQ ID NO: 146660 - DNA, 464 bp, Arabidopsis thaliana
aagaaataacaaaatggctcgagtctcttctcttctttctttcttcttaacacttttgatccttgtccatggctacgcggctcaacagggtcagcagggtcagcagtttccgaacgagtgccagctcgaccagctcaatgcgctcgagccgtcacacgtactgaagagcgaggctggtcgcatcgaggtgtgggaccaccacgctcctcagctccgttgctcaggtgtctcctttgcacgttacatcatcgagtctaagggtctctacttgccctctttctttaacaccgcgaagctctctttcgtggctaagggacgaggtcttatgggaaaagtgatccctggatgcgccgaaacattccaagactcatcagagttccaaccacgcttcgaaggtcaaggtcaaagccagaggttccgtgacatgcaccagaaagtggagcacattatgagcggtgatacca

SEQ ID NO: 146661 - DNA, 444 bp, Arabidopsis thaliana
cacaaatccaaaactcaaaaccgaatcgtttttagcctccaagagagagagagaaagagagatctgcatatagagaatgatagaaccgtcgatggagagagagaatggtgctttaacggcggcgacaacaacgacgacggcggtgacttctcctcctccgatggcttcttcaccgcgtcaagctttagttgagagattgaaagattatggacaagaagatattttctctctttgggatgaactttcaccagacgagaaagattttctcgttagagatattgagaatttggatcttccaagaatagatcggatcattagatgttcacttcactctcaaggtttaccggttgcggcgattgaaccggtaccggagaattgggtttcgacagtagatggtagaacaatggaagatagagagaaatggtggaaaatgggattaaaaac

SEQ ID NO: 146662 - DNA, 458 bp, Arabidopsis thaliana
gaactcggatccaactcgcagttcaatgacccgacctgacaatccgacccgacgcatctccactcgggttcttgatcggcaaatatcatcaccatcgtgtggaacgcctctaaagcccaagcaatacacgtcaacacgaagtgtttcaactgccacctcccaaactcgccgcaatatctttgtaacatctcatctatgcataatctctcctctccctccgcttctttcttcaccggaattttctctagcagcggttgtcggacatcgttaccgtttctatcctccggagattccataatttatgttttgatttttacagtgtttttgtttttgtgtttgtgtttttgtttaaaaggcgttcttgatttggtttgacgcgaagaaggaggtggcttctttgtcgtatttatatctcttggttatcggaaaacaatttttccttctttttttctctagcg

SEQ ID NO: 146663 - DNA, 454 bp, Arabidopsis thaliana
aaaatggctcgagtctcttctcttctttctttctccttaacacttttgatccttttccatggctacgcggctcaacagggtcagcagggtcagcagtttccgaacgagtgccagctcgaccagctcaatgcgctcgagccttcacacgtactgaagagcgaggctggtcgcatcgaggtgtgggaccaccacgctcctcagctccgttgctcaggtgtctcctttgcacgttacatcatcgagtctaagggtctctacttgccctctttctttaacaccgcgaagctctccttcgtggctaaaggacgaggtcttatgggaaaagtgatccctggatgcgccgaaacattccaagactcatcagagttccaaccacgcttcgaaggtcaaggtcaaagccagaggttccgtgacatgcaccagaaagtggagcacattaggagcggtgatacca

SEQ ID NO: 146664 - DNA, 452 bp, Arabidopsis thaliana
cggacgcgtgggttacaattttaaaaatcttatcttaagctctcctctcttctctctccaaaatctttcagagaggagagcttgataatcgttttgtctccggtttgatccggatttgtttatattctcgtctctatgcgagatcaataatttccgattacatatcggatcttctgttaccggctatgaccggtcttttctccgtttttaacggaacttgatctctatctccatcgttgctcacccatcgatctcaacgttttcttccaagatttttgttgtctccatttcttcgtggattaacatcttcgtcacctccgattgctcaagacgcaagagcaaaaatggactttagactacatcaagatagatgtagtcggtggtggagtctcccgaaactggtgattccaaagaatttatgaagcagctctaccctttatccggtaatgatt

SEQ ID NO: 146665 - DNA, 454 bp, Arabidopsis thaliana
cacaaacacacacaaatctctgaagtaaaatgacgttcccttctctttctgtctcatttctcttctttgccttcatattcgttacgcatgcattcgacctcagcatcatccagatgcaacagggaacatgtccgtacacggtggttgtcatgacaagctgtctttctccggagtcgacaagagatcagatcagcattgtttttggcgatgccgacggtaacaaggtgtatgcaccgaaactagggggtttggtaagaggaccagggggtttggggaagtgttcaacgaacacattccaagtcagaggtcaatgtttgaatgaccctatctgctctctctatatcaaccggaatggacccgacggttgggtcccggagtccattgagatctactcagaaggttcaaagtccgttaaattcgatttcagcaagagcgtccctcaactaaacacttg

SEQ ID NO: 146666 - DNA, 468 bp, Arabidopsis thaliana
agaaaatggttaagctcagcaatctcctcgttgcaaccttcggggttctcctcgtccttaacggctgccttgcgaggcagtcacttggggttcctcctcagctacagaacgagtgtaacctcgacaacctagatgttctccaagccaccgaaactatcaagagtgaagccggtcagatcgagtactgggaccacaaccaccctcagctccgatgtgttggtgtttccgttgctcgttatgtaattgaacaaggcggtctttacttgcccaccttcttcacttccccaaaaatttcctacgtcgttcaaggaacgggtatcagcggaagagtggtccctggatgtgccgagaccttcatggactcgcagccgatgcaaggacaacaacaaggccaaccatggcaaggacgacagggacaacatggccaaccatgggaaggacagggacaacagggacaacaaggaagac

SEQ ID NO: 146667 - DNA, 454 bp, Arabidopsis thaliana
ggaagaaaaatgggtcgagtctcatctattatctctttctctttgacactcttgatcctcttcaatggctacactgcccaacagtggcccaacgagtgccagctcgatcaactcaatgcgctcgaaccatcccaaatcatcaagagcgagggtggtcgcatcgaggtctgggaccaccatgcaccccagctccgttgctccggctttgcctttgagcgtttcgtcattgagcctcagggtcttttcttgcccactttcttgaacgccggcaaactcacgtttgttgttcacggaaggggtctaatgggaagagttattccgggatgcgccgagacgttcatggagtcaccggtatttggagaaggtcaaggtcagggtcagagtcaagggttccgtgacatgcaccagaaagtagagcacctacggtgcggtgacaccattgcaacaccatctg

SEQ ID NO: 146668 - DNA, 468 bp, Arabidopsis thaliana
agacagcagaggaaacatcgttcgtgttaagggacctttccaggtcgtgaggccacctctaagacagccctacgagagcgaggagtggagacacccacgtagcccacagggcaacggccttgaggagactatctgcagcatgaggtcccacgagaacattgacgaccctgctcgtgctgacgtgtacaagcccagcctaggtcgcgtgaccagcgtcaacagctataccttgcccatcttggagtatgtcaggctcagtgccactcgtggcgttctccagggtaatgcgatggtgcttcctaaatacaacatgaacgctaacgagatcttgtactgcactggaggacaaggaaggatccaagtggtcaacgacaacggacagaacgtgttggaccaacaggtgcagaagggacagctcgtggtcatcccacaagggttcgcatacgttgtccagtcccacggaaacaa

SEQ ID NO: 146669 - DNA, 465 bp, Arabidopsis thaliana
attgaaaattgacgttcagttggctcagcagcttcagaaccaacaagacagcagaggaaacatcgggcgtgttaagggacctttccaggtcgtgaggccacctctaagacagccctacgagagcgaggagtggagacacccacgtagcccacagggcaacggccttgaggagactatctgcagcatgaggtcccacgagaacattgacgaccctgctcgtgctgacgtgtacaagcccagcctaggtcgcgtgaccagcgtcaacagctataccttgcccatcttggagtatgtcaggctcagtgccactcgtggcgttctccagggtaatgcgatggtgcttcctaaatacaacatgaacgctaacgagatcttgtactgcactggaggacaaggaaggatccaagtggtcaacgacaacggacagaacgtgttggaccaacaggtgcagaagggacagctcgt

SEQ ID NO: 146670 - DNA, 454 bp, Arabidopsis thaliana
cacacatagcaaaaaatggcaaacaagttgttcctcgtctgcgcagctctcgctctgtgcttcctcctcaccaacgcttccatctaccgcaccgtcgttgagttcgaagaagatgacgccactaaccccataggcccaaaaatgaggaaatgccgcaaggagtttcagaaagaacaacacctaagagcttgccagcaattgatgctccagcaagcaaggcaaggccgtagcgatgagtttgatttcgaagacgacatggagaacccacagggacaacagcaggaacaacagctattccagcagtgctgcaacgagcttcgccaggaagagccagattgtgtttgccccaccttgaaacaagctgccaaggccgttagactccagggacagcaccaaccaatgcaagtcaggaaaatttaccagacagccaagcacttgcccaacgtttgcgaca

SEQ ID NO: 146671 - DNA, 459 bp, Arabidopsis thaliana
gggacttatagttgtgctggttgtggaactgctctttataaatcgaccactaagttcgactgcggttgcggttggcctgcgttcttcgacgccatccccggtgctattaaacaaacagtaattcgttgactctctttctctatagcaaataacatatttcgagcatccatattcgtgaaactcatttatatatgtgcatttaattttgacgtttttttagtttgaacctaactgatatattggcggaacaacatgagacatcacatgcaattatgcttaaagtactttttgttgtttttataattcatcttttggcttcttcttttttatcgtatgactttttatagaagaacccgccaattttattggccaccacgtcaagattctcgtatgtaaaaaagagttaattagttttttggtgttagaaaagtaattccaaaacaactttaaaagattgac

SEQ ID NO: 146672 - DNA, 464 bp, Arabidopsis thaliana
aacaaacaaaaagaaaatggttaagctcagcaatctcctcgttgcaaccttcggggttctgctcgtccttaacggctgccttgcgaggcagtcacttggggttcctcctcagctacagaacgagtgtaacctcgacaacctagatgttctccaagccaccgaaactatcaagagtgaagccggtcagatcgagtactgggaccacaaccaccctcagctccgatgtgttggtgtttccgttgctcgttatgtaattgaacaaggcggtctttacttgcccaccttcttcacttccccaaaaatttcctacgtcgttcaaggaacgggtatcagcggaagagtggtccctggatgtgccgagaccttcatggactcgcagccgatgcaaggacaacaacaaggccaaccatggcaaggacgacagggacaacaaggccaaccatgggaaggacagggacaacagg

SEQ ID NO: 146673 - DNA, 468 bp, Arabidopsis thaliana
  unsure (1)..(468): unsure at all n locations
gtctttgccaacactccaggctctgcccactggatctacaactcaggagaacagccacttgtcatcatcgctcttctcgacatcgccaactaccaaaaccaactcgaccgcaaccctagagtgttccatttggccggaaacaaccagcagggaggctttggcggttcacagcaacaacaagaacagaaaaacttgtggagcgggttcgacgcacaggtcatagctcaagcattgaaaattgacgttcagttggctcagcagcttcagaaccaacaagacagcagaggaaacatcgttcgtgttaagggacctttccaggtcgtgaggccacctctaagacagccctacgagagcgaggagtggagacacccacgtagcccacagggcaacggcctngaggagactatctgcagcatgaggtcccacgagaacattgacgaccctgctcgtgctgacgtgtacaagccc

SEQ ID NO: 146674 - DNA, 167 bp, Arabidopsis thaliana
aaggcaaacaaactcggtctgtgcttatcaactaacggcctgggcttcctactcaccaactcttccatctaccacactgttgtctagtacttctaatatgacaccagcaaccacatcctcccaagacataaatgtcatatgtaattacaaaattcacagcacctaat

SEQ ID NO: 146675 - DNA, 462 bp, Arabidopsis thaliana
caacaaacaaaaagaaaatggttaagctcagcaatctcctcgttgcaaccttggggttctcctcgtccttaacggctgccttgcgaggcagtcacttggggttcctcctcagctacagaacgagtgtaacctcgacaacctagatgttctccaagccaccgaaactatcaagagtgaagccggtcagatcgagtactgggaccacaaccaccctcagctccgatgtgttggtgtttccgttgctcgttatgtaattgaacaaggcggtctttacttgcccaccttcttcacttccccaaaaatttcctacgtcgttcaaggaacgggtatcagcggaagagtggtccctggatgtgccgagaccttcatggactcgcagccgatgcaaggacaacaacaaggccaaccatggcaaggacgacagggacaacaaggccaaccatgggaaggacagggacaaca

SEQ ID NO: 146676 - DNA, 454 bp, Arabidopsis thaliana
ataaagaggaagaaaaatgggtcgagtttgatctattatctctttctcttcgacactcttggtcctcttcaatggctacactgcccaacagtggcccaacgagtgccagctcgatcaactcaatgcgctcgaaccataccaaatcatcaagagcgagggtggtcgcatcgaggtctgggaccaccatgcaccccagctgcgatgctacggctgtgcctttgagcgtttcgtcattgagcctcagggtcttttcttgcccactttcttgaacgcccgcaaactcacctttgttgttcacggaaggggtctaatgggaagagctattccgggatgcgccgagacgttcatggagtcaccggtatttggagaaggtcaaggtcagggtcagagtcaagggttccgtgacatgcaccagaaagtagagcacctacggtgcggtgacaccattgcaaca

SEQ ID NO: 146677 - DNA, 448 bp, Arabidopsis thaliana
aaaaaaacaaaaaaaaaaaaaaaaaaacttttaatccgtttgttgcttcttcgcaacgttctctctgaaactcgcagagtaacagattcgataatgggaggaggatttagagttttgcatttggtgaggccattcttggcttttcttccagaagtgcaaagtgctgacaggaagattccatttagagagaaagtgatctacactgtcatctccctcttcattttccttgtttgtagtcagcttcctctctatgggatccattctaccaccggtgctgatccgttctattggatgcgtgtcattctcgcatcgaatcgtggaacggtgatggagcttggtattactcctattgtcacatctggattagtgatgcaactcttagcagggtcaaagattattgaggttgacaacaatgttcgtgaggatcgtgctctcttgaatggtgctc

SEQ ID NO: 146678 - DNA, 467 bp, Arabidopsis thaliana
cgatttttagggatctgacttcttttcttttttttttgaattttttgctaggtttctgaattaaatcactcgtcctttattgtgtaaataatataaacctagaggtccttaaacggaaatattatgttttatcggcccgatccgacccaaactgtatacaccaataataatataacacgtggagattcgatcttttttcttttatgagaaacgacgtcgtattatattttgtttgccagaaagaaactgaagaactcttgactgtctctctgcggcgaaaaagagagcgaagcttgaaatctccgattaagccatgaatgctcccgaacgatatgagcgattcgtcgtccctgaaggcaccaagaaagaattgaagtttctatcactcgaaatcatactcgatagtcctcttacatgtgctaaaccctctcgatttctatgttctagggtttcttatgatagggata

SEQ ID NO: 146679 - DNA, 451 bp, Arabidopsis thaliana
ctccgatgtgttggtgtttccgttgctcgttatgttattgaacaaggcggtctttacttgcccacggttcttcacttccccaaaaatttcctacgtcgttcaaggaacgggtatcagcggaagagtggtccctggatgtgccgagaccttcatggactcgcagccgatgcaaggacaacaacaaggccaaccatggcaaggacgacagggacaacaaggccaaccatgggaaggacagggacaacagggacaacaaggaagacaaggccaaccatgggaaggacagggacaacagggacaacaaggacgacagggacaacaaggccaaccatgggaaggacagggacagcagggacaacaagggttccgtgacatgcaccagaaggtggaacatgtgagacgcggagacgtctttgccaacactccaggctctgcccactggatctacaac

SEQ ID NO: 146680 - DNA, 470 bp, Arabidopsis thaliana; identical to SEQ ID NO: 130292

SEQ ID NO: 146681 - DNA, 467 bp, Arabidopsis thaliana
ctctcttccacccattgttatctctgtagattcgtgagagagatcacgcgtattcaccgacacaatcaaaatatggcgaacggagccgatagattggatctggacggtaaaccgattaagccgatgacgatatgcatgatcggtgccggaggtttcattggctctcatctctgtgagaagcttatgacggagactcctcacaaggttcttgcgcttgatgtttacaatgataagatcaagcacttgcttgagcctgataccgttcaatgggctggtcggatccagtttcatcgtatcaacattaagcatgattctagactcgaaggactgatcaagatggcagatctgacgataaatctagctgcgatctgtactcccgcagattacaatacgcgttctcttgacactatctacagcaatttcattgatgctctcccagtggttaagtactgctcagagaacaacaa

SEQ ID NO: 146682 - DNA, 371 bp, Arabidopsis thaliana
  unsure (1)..(371): unsure at all n locations
gcgatcacanaacgagtacagaatacaanattcatattttgtcataaaaaatggcgaaacacagctctgtnctggtcttgcgcaactgttcggcctcgtgcattcctactcaccaacgcgttccatctacccgcacctgttgtgcgagttacgaccgaagatgacgaccagcaacgcgccatgggcccaagacaagaaatgtcagaacggagtttcagcaatcacagcacctaagagcttgccagaaattgatgcccatgcaaatgaggcaaggccggggtggcggcccctcccttgaccatgagatcgattnggaagacgacaatcagaacccacacggcccccagcagggacaccagatccttcagcag

SEQ ID NO: 146683 - DNA, 450 bp, Arabidopsis thaliana
agcgtttcgtcattgagcctcagggtcttttcttgtccactttcttgaacgccggcaaactcacgtttgttgttcacggaaggggtctaatgggaagagttattccgggatgcgccgagacgttcatggagtcaccggtatttggagaaggtcaaggtcagggtcagagtcaagggttccgtgacatgcaccagaaagtagagcacctacggtgcggtgacaccattgcaacaccatctggtgtagctcaatggttctacaacaatggaaatgagcctctcattcttgttgcagccgcggatctcgccagcaaccagaaccagcttgaccgcaaccttagaccatttttgatagccggaaacaacccacaagggcaggaatggctacaaggccgaaagcaacagaagcaaaacaacatcttcaatggcttcgcacctgagatcttggctc

SEQ ID NO: 146684 - DNA, 462 bp, Arabidopsis thaliana
tttctctcctgcgttttaatttctctcggattgaaatcatccatggctgccaccgcaaccgagaagctccctcagctcaaatccgccgtcgatggacttactgagatgagcgagaatgagaagagtggattcatcaacctcgtttcacgttacctcagtggtgaagcccagcacattgaatggagcaagatccagacacctactgatgaaattgttgttccttatgataaaatggctaacgtctctgaagatgcttccgagaccaaatatctgttggacaagcttgttgtgctgaagcttaatggaggtttgggaaccacaatgggatgcactggtccaaaatcggttattgaagttcgtgatggtttgacatttcttgacctgattgttatccagattgagaatctcaacaacaagtataactgcaaggttcctttggttcttatgaactcattcaataca

SEQ ID NO: 146685 - DNA, 459 bp, Arabidopsis thaliana
caaaaagaaaatggttaagctcagcaatcttctcgttgcaaccttcggggttctcctcgtccttaacggctgccttgcgaggcagtcacttggggttcctcctcagctacagaacgagtgtaacctcgacaacctagatgttctccaagccaccgaaactatcaagagtgaagccggtcagatcgagtactgggaccacaaccaccctcagctccgatgtgttggtgtttccgttgctcgttatgtaattgaacaaggcggtctttacttgcccaccttcttcacttccccaaaaatttcctacgtcgttcaaggaacgggtatcagcggaagagtggtccctggatgtgccgagaccttcatggactcgcagccgatgcaaggacaacaacaaggccaaccatggcaaggacgacagggacaacaaggccaaccatgggaaggacagggacaacaggg

SEQ ID NO: 146686 - DNA, 454 bp, Arabidopsis thaliana
  unsure (1)..(454): unsure at all n locations
ctctcgctgagctctatggctcccctgaagtcttgcccttagtagccgatgtttccaaactccaagactgcgagcgttttatccgagccacggttcttcattttggacgattggatcatctagtgacaaatgcaggagttgctccactctatttttttgcagacatcgaagatgtctctaaggcttcgccggctatggacatcaacttttggggatctgtgtattgcacattttttgcttctccatacctaaagaagtttagaggaaggattgtggtgattgcttctggatgtggatacattgcttcacctagactaagcttttactgtgcgagtaaagctgctgtgatcgccttttatgaaacactaagaactgagtttggatcagatattggggttaccattgtagcaccggngatcgtcgattcggaaatgagccgaggcaagttcatgac

SEQ ID NO: 146687 - DNA, 256 bp, Arabidopsis thaliana
tgcagcatgaggtcccacgagaacattgactaccctgctcgtgctgacgtgtacaagcccagcctaggtcgcgtgaccagcgtcaacagctataccttgcccatcttggagtatgtcaggctcagtgccactcgtggcgttctccagggtaatgcgatggtgcttcctaaaacaacatgaacgctaacgagatcttgtactgcactggaggacaaggaaagatccaagtggtcaacgacaacggacagaaacgtgt

SEQ ID NO: 146688 - DNA, 465 bp, Arabidopsis thaliana
cggacgcgtgggtttatacatccccatttatatgtttggtaacgccgactctgtgaagcggtttgcagcactcctttcctgggccgcacaaactaaacaaaaaaccattcacaaaaaaaatagagagaatcatctgagagagtagtagtgatgatatgatcgcttcttctcctacaatctcagaaacctccgatcacggttttagatatcttctacaacggatacaatggagagcaccgattcttccggtggtccaccaccgccacaacctaaccttcctccaggcttccggtttcaccctaccgacgaagagcttgttgttcactacctcaaacgcaaagcagcctctgctcctttacctgtcgccatcatcgccgaagtcgatctctataaatttgatccatgggaacttcccgctaaagcatcgtttggagaacaagaatggtacttctttagtccacgaga

SEQ ID NO: 146689 - DNA, 461 bp, Arabidopsis thaliana
aagaggaagaaaaatgggtcgagtctcatctattatctctttctctttgacactcttgatcctctgcaatggctacactgcccaacagtggcccaacgagtgccagctcgatcaactcaatgcgctcgaaccatcccaaatcatcaagagcgagggtggtcgcatcgaggtctgggaccaccatgcaccccagctccgttgctccggctttgcctttgagcgtttcgtcattgagcctcagggtcttttcttgcccactttcttgaacgccggcaaactcacgtttgttgttcacggaaggggtctaatgggaagagttattccgggatgcgccgagacgttcatggagtcaccggtatttggagaaggtcaaggtcagggtcagagtcaagggttccgtgacatgcaccagaaagtagagcacctacggtgcggtgacaccattgcaacaccatctggtg

SEQ ID NO: 146690 - DNA, 458 bp, Arabidopsis thaliana
ctcttctcttctttctttctccttaacacttttgatccttttccatggctacgcggctcaacagggtcagcagggtcagcagtttccgaacgagtgccagctcgaccagctcaatgcgctcgagccttcacacgtactgaagagcgaggctggtcgcatcgaggtgtgggaccaccacgctcctcagctccgttgctcaggtgtctcctttgcacgttacatcatcgagtctaagggtctctacttgccctctttctttaacaccgcgaagctctccttcgtggctaaaggacgaggtcttatgggaaaagtgatccctggatgcgccgaaacattccaagactcatcagagttccaaccacgcttcgaaggtcaaggtcaaagccagaggttccgtgacatgcaccagaaagtggagcacattaggagcggtgataccattgccacaacacccggtg

SEQ ID NO: 146691 - DNA, 446 bp, Arabidopsis thaliana
caggcgaccgagcgtgtcttcattgagcctcatggtctttttttgtctactttcttgaacgccggcaaactggcgggtgttgttcacggaaggggtgtaatgtaaagagttattccgggatgcgccgagacgttcatggagtcaccggtatttggagaaggtcaaggtcagggtcagagtcaagggttccgtgacatgcaccagaaagtagagcacctacggtgcggtgacaccattgcaacaccatctggtgtagctcaatggttctacaacaatggaaatgagcctctcattcttgttgcagccgctgatcttgtcagctaccagaaccagcttgaccgcaaccttagaccattttttgatagccggaaacaacccacaatggcaggtatggctacaaggtcgaaagcaactgaagcaatcaacattttcaatggcttttcacc

SEQ ID NO: 146692 - DNA, 426 bp, Arabidopsis thaliana
taaatctccggatttcgattcccgaggctcgaaaaaaccctaaatctcttctccgttcactcatccaaccgaagatgcgtgagattcttcacatccagggtggtcaatgcggtaaccagatcggcgccaagttctgggaagtggtttgcgccgagcacggcatcgatccaaccggaaggtacaccggagactcagatctgcaacttgagcgcatcaacgtttactacaatgaagcgagttgcggtagattcgttcctcgtgcagtgctcatggatttggagcctgggactatggatagtctcagatctggaccgtacggtcagacctttcgacctgataacttcgtctttggtcaatccggtgctggtaacaactgggccaagggacactacacggaaggagctgaactaatcgattccgttctcg

SEQ ID NO: 146693 - DNA, 467 bp, Arabidopsis thaliana
gaaaatggttaagctcagcaatctcctcgttgcaaccttcggggttctcctcgtccttaacggctgccttgcgaggcagtcacttggggttcctcctcagctacagaacgagtgtaacctcgacaacctagatgttctccaagccaccgaaactatcaagagtgaagccggtcagatcgagtactgggaccacaaccaccctcagctccgatgtgttggtgtttccgttgctcgttatgtaattgaacaaggcggtctttacttgcccaccttcttcacttccccaaaaatttcctacgtcgttcaaggaacgggtatcagcggaagagtggtccctggatgtgccgagaccttcatggactcgcagccgatgcaaggacaacaacaaggccaaccatggcaaggacgacagggacaacaaggccaaccatgggaaggacagggacaacaaggacaacaaggaagac

SEQ ID NO: 146694 - DNA, 459 bp, Arabidopsis thaliana
cggacgcgtgggaagaaaaatgggtcgagtctcatctattatctctttctctttgacactcttgatcctcttcaatggctacactgcccaacagtggcccaacgagtgccagctcgatcaactcaatgcgctcgaaccatcccaaatcatcaagagcgagggtggtcgcatcgaggtctgggaccaccatgcaccccagctccgttgctccggctttgcctttgagcgtttcgtcattgagcctcagggtcttttcttgccactttcttgaacgccggcaaactcacgtttgttgttcacggaaggggtctaatgggaagagttattccgggatgcgccgagacgttcatggagtcaccggtatttggagaaggtcaaggtcagggtcagagtcaagggttccgtgacatgcaccagaaagtagagcacctacggtgcggtgacaccattgcaacacca

SEQ ID NO: 146695 - DNA, 446 bp, Arabidopsis thaliana
ccgctctcgagagacgaatcgctctcagcttcttctagaaccttctccttctccttcgacgcatcgtcgccttcaagatcacactacctcgcacaacaatggagttctggggtgttgaagttaagaatggcaaaccacttcacctagatcctgggctagacaggctcgtgcacatctctcaggttgctttgggagagagtaagaacaatgtaaccgaaccaatccagctttacgtgactgttggatcggataagcttctcattggaacgctatctcatgagaagtttcctcagctgtctacggagattgtcttggaaaggaactttgcgctgtctcatacttggaagaatgggagcgttttcttctctggttacaaagttgatgcatctgatcccgagcctgaggatttgattgatgatcaacttgaggctgctggtttcaaagct

SEQ ID NO: 146696 - DNA, 436 bp, Arabidopsis thaliana
ggttaagctcagcaatctcctcgttgcaaccttcggggttctcctcgtccttaacggctgccttgcgaggcagtcacttggggttcctcctcagctacagaacgagtgtaacctcgacaacctagatgttctccaagccaccgaaactatcaagagtgaagccggtcagatcgagtactgggaccacaaccaccctcagctccgatgtgttggtgtttccgttgctcgttatgtaattgaacaaggcggtctttacttgcccaccttcttcacttccccaaaaatttcctacgtcgttcaaggaacgggtatcagcggaagagtggtccctggatgtgccgagaccttcatggactcgcagccgatgcaaggacaacaacaaggccaaccattgcaaggacgacagggacaacaaggccaaccatgggaagacagg

SEQ ID NO: 146697 - DNA, 419 bp, Arabidopsis thaliana
atcagagttccaaccacgcttcgaaggtcaaggtcaaagccagaggttccgtgacatgcaccagaaagtggagcacattaggagcggtgataccattgccacaacacccggtgtagcacagtggttctacaacgacggacaggaaccacttgtcatcgtcagcgtcttcgatctagccagtcaccagaaccagcttgaccgcaacccaaggccattttacttagccggaaacaacccacaaggtcaagtatggctacaaggccgagagcaacagccacagaagaacattttcaatggatttggacccgaggttattgctcaagctttgaagatcgatcttcagacagcgcagcaacttcagaaccaagatgacaaccgtggaaacattgtccgagtccaaggcccgttcggtgtcatta

SEQ ID NO: 146698 - DNA, 437 bp, Arabidopsis thaliana
accgacgagaagaatatgactacggaggaggagtccctttctgcggcggaggagtccctttctgcggcggaggagggttacaatgtacagagagactattggcgtcaagcggaggaatccgatggtttcgatatagagaacattaaactaccaccaggtatgcatggacgggtcatgggactgattacctataactgtcaactttgttaccgttatccgtttcctgtcttggtcaaactttatgctaagtttgggcttcatcgttacaatttgatcaagggaacaagcttcgagctcgctgccttaatgaagttcaacatgttacaaaactatatgtcctctttctacatgactctgcttgcacatgatcccgatccagctgctagctcatcgcagaaaacctttcaggttcgagttgatgaacaaacaattggcac

SEQ ID NO: 146699 - DNA, 502 bp, Arabidopsis thaliana
  unsure (1)..(502): unsure at all n locations
ggaanttcccgggntcgaccccacgcccgtccgtatttaagcatcatnncattatagttttgggtctcccctttttttnncttcttcttttcttttttcttttcttagctacgtcnntcttcttcaatagcttagatcgagagatgttagagatccattaccggtaaggaaagggtgttcttgatccggattcttgatcnttgatacctgaattgggtattggagaggctgtgaattgggttntggttaagggccaaagagacctggagaaatatctgaagaaacaaggattctctgggaattcttatagaattttaatgggagatatgagagagagtaatcagatggatcaagttgctcactctcttcctcttcctctcgacgccgattttctccctcgcatgatgccttttctccaccacactgttctaaaacatgggaagaagtgtttcacatggtacggaccgtacccgaacgtgatagtaatggatccagagacact

SEQ ID NO: 146700 - DNA, 449 bp, Arabidopsis thaliana
gctccacatctagtggagtgtaaattcaaatcttgtggaaggatctgaatccaagtacctggtttctgtaaggctgaatatattcagcattcaactcaacatatttgcatttcatgataccagctggaccacccttgaacccgtaaaatgtgctacctttcgcacgctcttgcaggtaatctaacacgccgaaaacaaaatcaagagtggaacaatgtcagcaactattctacaaaaaaaaaaaaaaacatcatttgacgtaaaaatcaaacccttaccaaacagtccagaaataacattgtgcccaccaggtgcctgacctccagacaaaacaacaccaatcttcaatttcggtgccgacgaaggtgcatcctgatctggaaccactgctactgatggctggccatatagacccggaaacaacttcgctttctcatctacaaccacat

SEQ ID NO: 146701 - DNA, 460 bp, Arabidopsis thaliana
aagaaaacatacacaaatagcaaaacatggctaacaagctcttcctcgtctgcgcaactctcgccctctgcttcctcctcaccaacgcttccatctaccgcaccgttgtcgaattcgaagaagatgacgccagcaaccccgtaggtccaagacagagatgccagaaggagtttcagcaatcacaacacctaagagcttgccagagatggatgagcaagcaaatgaggcaaggacgtggtggtggtccttccctcgacgatgagttcgatttcgagggcccccagcagggataccagctactccagcagtgctgcaacgagcttcgccaggaagagccagtttgcttttgccccaccttgaaacaagctgccagggcagttagcctccagggacagcacggaccattccaatccaggaaaatttaccagtcagctaagtacttgcctaacatttgcaagat

SEQ ID NO: 146702 - DNA, 463 bp, Arabidopsis thaliana
  unsure (1)..(463): unsure at all n locations
tttctctcctgcgttttaatttctctcggattgaaatcatccatggctgccaccgcaaccgagaagctccctcagctcaaatccgccgtcgatggacttactgagatgagcgagaatgagaagagtggattcatcaacctcgtttcacgttacctcagtggtgaagcccagcacattgaatggagcaagatccagacacctactgatgaaattgttgttccttatgataaaatggctaacgtctctgaagatgcttccgagaccaaatatctgttggacaagcttgttgtgctgaagcttaatggaggtttgggaaccacaatgggatgcactggtccaaaatcggttattgaagttcgtgatggtttgacatttcttgacctgattgttatccagattgagaatctcaacaacangtataactgcaaggttcctttggttcttatgaactcattcaatacac

SEQ ID NO: 146703 - DNA, 467 bp, Arabidopsis thaliana
gaaatcgcttttggagaggaaggctaagggtcgtgcagctgctgacaaagagaagggtactaagtttatcaagacgaagcttcgttatcacaactttcgacggctgaatcccaacgttcacggtggttccattcaccttctctctggtaatcctctcgatgtgaatcacccacttgcgacggtaaacctgaacaactttgccttcacgtcccttgtaagtaccacgaacgatctgaacctcgtcgtctttacggatcggcatggatctgactcacaaacgagtaagaatacaaatacaaatagcaaaaaaaatggcaaacaagctcttcctcgtctgcgcaactttcgccctctgcttcctcctcaccaacgcttccatctaccgcactgttgtcgagttcgacgaagatgacgccagcaaccccatgggcccaagacagaaatgtcagaaggagtttcagcaatca

SEQ ID NO: 146704 - DNA, 447 bp, Arabidopsis thaliana
gcgtccgcgttgcgtattgagcctcaaggtctttttttgttacttcctggaacgccgccaaactgacgggggttgttaacggaaggggtctaatggaaagagttattccgggatgcgccgagacgttcatggagtcaccggtatttggagaaggtcaaggtcagggtcagagtcaagggttccgtgacatgcaccagaaagtagagcacctacggtgcggtgacaccattgcaacaccatctggtgtagctcaatggttctacaacaatggaaatgagcctctcattcttgttgcagccgcggatctcgccagcaaccagaaccagcttgaccgcaaccttagaccatttttgatagccggaaacaacccacaagggcaggaatggctacaaggccgaaagcaacagaagcaaaacaacatcttcaatggcttcgcacctgagatct

SEQ ID NO: 146705 - DNA, 373 bp, Arabidopsis thaliana
ctcgagacactctgtgatctctacgtgactcttgccatcactcagagtgtcatctgggtgaacaccaggcgtaaggttgattggctcacagacaaaatgagaagccgtgaccacacagtctctgcaactcacggagacatggaccagaacaccagggacatcatcatgagagagttcaggtctggttcctcccgtgttctcatcaccactgacctcttagctcgtggtattgatgtccaacaagtctccctggttatcaacttcgatctcccaactcagccagagaactaccttcaccgtatcggaagaagtggaaggttcgggagaaagggtgttgcgatcaatttcgtgacccgtgatgatgagaggatgc

SEQ ID NO: 146706 - DNA, 394 bp, Arabidopsis thaliana
cttctttatccattaaggtttgatcctctcacttaaattaggattatatatggctacatctgctagaagagcatatggattcgggagagctgacgaggcgactcacccggactccattagagccactttggctgagtttctttccacgttcgtcttcgtctttgctggagaaggctcaatcctcgctctagacaagttgtattgggacacggcggctcacacggggacaaacacgcctggagggttagttctggtggcgttagctcatgcattggccttgttcgcggctgtttctgcagccatcaatgtctctggtggccacgtcaaccccgctgtcacttttgctgctctaatcggaggcaggatctcggtcattcgagctatctactattgg

SEQ ID NO: 146707 - DNA, 447 bp, Arabidopsis thaliana
ctgttgtatatgtaaatcctagatatgacaatatgcggaattcatccatgaaaatgaaaaacaagggggggttgctaaagggatgaataaatgggacgcataaccggatatgctaaaatgaaaatacgaaaaaaaaggctaatgagatcgaaataatgaatcataactaaagttccgtttcgaattcgctagataaaacaaaggcttgcctattcctattatgataaaaaaataaaagactttccgcaaaaaatttttttattcatatattttttattttaaaactaggtttcagttagttgagcttgaaaatgactattccttcattgaatgaataaaaaattgaattccacatccgcttgggtgggaccaacgaaatcgagtgcttactcccactttttattgaattaaccgattaatttgctatcgaagatttttctgtattcg

SEQ ID NO: 146708 - DNA, 325 bp, Arabidopsis thaliana
caacaaacaaaaagaaaatggttaagctcagtaatcttctcgttgcaaccttcggggttctgctcgggcttaacggctgccttgcgaggcagtcacttggggttcctcctcagctacagaacgagtgtaacctcgacaacctagatgttctccaagccaccgaaactatcaagagtgaagccggtcagatcgagtactgggaccacaaccaccctcagctccgatgtgttggtgtttccgttgctcgttatgtaattgaacaaggcggtctttacttgcccaccttcttcacttccccaaaaatttcctacgtcgttcaaggaac

SEQ ID NO: 146709 - DNA, 416 bp, Arabidopsis thaliana
gtaaaaacaatttctcattagcttacaatggttgatacacaccgtgtcgaccgtactgatagacactttcaatttcagtcgccctatgaaggcggccgaggtcaaggtcagtatgaaggtgaccgtggttacggtggtggcggttacaagagcatgatgcctgaaagtggcccatctagtacccaagtattgtccctgttgattggagtccctgtcgtcggttcgctacttgccttggctggattacttctagctggttcggtgatcggcttaatggttgctttaccactatttctcctcttcagcccggttatagtcccagcggctctaactatcgggcttgcaatgacaggctttttagcctcggggatgttcggtctaaccgggctaagctcaatctaatgggtcatgaacta

SEQ ID NO: 146710 - DNA, 556 bp, Arabidopsis thaliana
  unsure (1)..(556): unsure at all n locations
cccgggccgaccccacgccgtccggaaaagtnagcgagtgtaatgttgttcgtacattctcatagtcaatggaaagggcccacatgtgcgtgggtgagaaatctcttagaagaacacgtgagttcgtggtnncaatggcgtcttcnnaatgggtacccattgtcttttcagattggtgaccctctgtnntgatgtnntttcttcaaccccaacaaccattacccactagcnnactccggaagggaagccccgccgccgcattccattataagnnccggtttggactttggacctgcgggccccgtttttggcgtattttcaccggaagggtgccagtgatagaaagggatttgttaacccggagaatgaccatcaatttagcaccttgctaatacattaaccagtccataatgagaacttggtattgtttgatggtaacccttgggcccgtacgctatatcttgggccaaagagatgtttgtactccggcccataaacatttagctcttgaagcagcccatcaagggattgttcttctcaaaaactctgctcgctc

SEQ ID NO: 146711 - DNA, 446 bp, Arabidopsis thaliana
atttcgaaatcgtcacactttgttgcgtgtcgtcttctctctctcataattcttgagtttcacgtctcaagatttgatcacttctgccaattttccagattgatctctctaattatggcttccatgagtttcgccttgaatcgcttctctggactctcctctaaaaccaccttatcagctgacttcaatccatcctctcgccggagttttctaccgccgactagagttggacttaagatctcttccgccgccgaatcggagcctgatctcagtgtcactgtaaatggcctgaaaatgcccaatcctttcgtgatcgggtcgggtccaccgggtaccaactacaccgtcatgaagagagcctttgatgaaggttggggggccgtcatcgccaaaaccgtatctttagatgcatccaaagttatcaacgtgacacctagatatgctcg

SEQ ID NO: 146712 - DNA, 417 bp, Arabidopsis thaliana
attaaggtttgatcctctcacttaaattaggattatatatggctacatctgctagaagagcatatggattcgggagagctgacgaggcgactcacccggactccattagagccactttggctgagtttctttccacgttcgtcttcgtcttgctggagaaggctcaatcctcgctctagacaagttgtattgggacacggcggctcacacggggacaaacacgcctggagggttagttctggtggcgttagctcatgcattggccttgttcgcggctgtttctgcagccatcaatgtctctggtggccacgtcaaccccgctgtcacttttgctgctctaatcggaggcaggatctcggtcattcgagctatctactattgggttgctcagcttataggtgctatcctcgcttgtct

SEQ ID NO: 146713 - DNA, 450 bp, Arabidopsis thaliana
  unsure (1)..(450): unsure at all n locations
ccggccggaancccggncgaccacgcgtccgacaacattttttctctctcttaaaactncgatgcgatttttgatttacagactatggaaatggaatcattcatggacgacctggtgaacttctctgtaccggaagaggaagaagacgacgacgaacatacgcaaccaccgaggaatattactcgccggaaaactggattacggccaacagactccttcggtctctttaataccgacgaccttggagtggttgaagaagaggatttggaatggatttcaaacaaaaatgcttttccggtgattgaaacattcgtcggtgtattaccgtcggagcatttttctataacgtctcttctggaaagagaagcgactgaggtaaaacagctgagtccggtttcagtacttgagacgagtagccatagctccacaacgactacctcaaacagtagc

SEQ ID NO: 146714 - DNA, 431 bp, Arabidopsis thaliana
  unsure (1)..(431): unsure at all n locations
caaaatgaaaatggnnaagctcagcaattctcctcgttgncaaccnncggggnnncacctgggcccgtaacggtctgccttgcgaggcaggtcacattggaggttccctcctcagctacccagacgagtgtaactctcgacaaccctagatgttctccaagccaccgaaactatcaagagtgaagccggtcagatcgagtactgggaccacaaccaccctcagctccgatgtgttggtgtttccgttgctcgttatgtaattgaacaaggcggtctttacttgcccaccttcttcactttcccaaaaatttcctacgtcgttcaaggaacgggtatcagcggaagagttggccctggatgtgccgagaccttcatggactcgcagccgatgcaaggacaacaacaaggccaaccatggcaaggacgacagg

SEQ ID NO: 146715 - DNA, 321 bp, Arabidopsis thaliana
gggacaacaaggccaaccatgggatgttcatgttataacagggacaacaaggaagacaaggccaaccatgggaaggacagggacagcagggacaacaaggacgacagggacaacaaggccaaccatgggaaggacagggacagcagggacaacaagggttccgtgacatgcaccagaaggtggaacatgtgagacgcggagacgtctttgccaacactccaggctctgcccactggatctacaactcaagagaacagccacttgtcatcatcgctcttctcgacatcgccaactaccaaaaccaactcgaccgcaacccta

SEQ ID NO: 146716 - DNA, 192 bp, Arabidopsis thaliana
cagctagctacgtaaggcctagagtggctgcagcttaagagctgaaaaccgcggcttaacaatgaaccgctactgtaaaaggaagttaaatagtacgtagtaattataataatgtacgaaaatgtgacaagttttgttgaggtttacctgtaaaatgccactccttttctgaataaaatctttctttccgat

SEQ ID NO: 146717 - DNA, 475 bp, Arabidopsis thaliana
ggtcgaccacgcgtccgcgtgacatgcaccagaaaggagagcacctactttgcgtttacaccattgcaacaccatctggtgtagctcaatggttctacaacaatggaaatgagcctctcattcttgttgcagccgcggatctcgccagcaaccagaaccagcttgaccgcaaccttagaccatttttgatagccggaaacaacccacaagggcaggaatggctacaaggccgaaagcaacagaagcaaaacaacatcttcaatggcttcgcacctgagatcttggctcaagccttcaagatcaatgtcgagacggctcagcagctccagaaccagcaagataaccgtggcaacatcgtcaaggtcaacggacctttcggcgtcattaggccacccttgagacgcggcgaaggcggccaacaaccacatgaaatagctaatggtttagaggagaacttgtgcaccatgcgatgcac

SEQ ID NO: 146718 - DNA, 398 bp, Arabidopsis thaliana
tcactcgccaaaaaccttgaaacctttaaatattcgtttttatggctaagctcattctcgttttcgcaactcttgccctcttcatgctcctagccaacgcatccatctaccgcacagtggtggagttcgaggaagatgatgacgtgagcaacccacaacaaggtaagtgccagagggagtttatgaagcatcagcaactaagaggttgcaagcaatggatccgcaagagagctcaacaaggaagaatcggatacgaagctgatgactttgagctcactcttgatgtcgatcttgaggacgatgagaacccaatggggcctcaacaacagtcatctcttaaaatgtgttgtaatgaattaaggcaagtggacaagatgtgtgtgtgtcctacactgaaa

SEQ ID NO: 146719 - DNA, 457 bp, Arabidopsis thaliana
acgagagcgaggagtggagacacccacgtagctcattgtgcaacggccttgaggagactatctgcagcatgaggtcccacgagaacattgacgaccctgctcgtgctgacgtgtacaagcccagcctaggtcgcgtgaccagcgtcaacagctataccttgcccatcttggagtatgtcaggctcagtgccactcgtggcgttctccagggtaatgcgatggtgcttcctaaatacaacatgaacgctaacgagatcttgtactgcactggaggacaaggaaggatccaagtggtcaacgacaacggacagaacgtgttggaccaacaggtgcagaagggacagctcgtggtcatcccacaagggttcgcatacgttgtccagtcccacggaaacaagttcgagtggatctctttcaaaacttatgaaaacgcaatgatcagcactttggcgggtag

SEQ ID NO: 146720 - DNA, 432 bp, Arabidopsis thaliana
  unsure (1)..(432): unsure at all n locations
cgaagaaaatggttaacgctcacacaacctcctcgngtgcatcttttcnggggtnctcctcgncccttaacgggctgctcttgcagaggcagtcacgttggggttccttcctcagctaccagaaccgagtgtaacttcgacaaccctagatgttctccaagccaccgaaactatcaagagtgaagccggtcagatcgagtactgggaccacaaccaccctcagctccgatgtgttggtgtttccgttgctcgttatgtaattgaacaaggcggtctttacttgcccaccttcttcacttccccaaaaatttcctacgtcgttcaaggaacgggtatcagcggaagagtggtccctggatgtgccgagaccttcatggactcgcagccgatgcaaggacaacaacaaggccaaccatggcaaggacgacaggg

SEQ ID NO: 146721 - DNA, 469 bp, Arabidopsis thaliana
  unsure (1)..(469): unsure at all n locations
tcgccggacccacccacgcgtccgaagaaaaatgggtcgagtctcatcttttatttttttctctnngacactcttgatcctcttcaatggctacactgccgagcagtggcccaacgagtgccagctcgatcaactcaatgcgctcgaaccatcccaaatcatcaagagcgagggtggtcgcatcgaggtctgggaccaccatgcaccccagctccgttgctccggctttgcctttgagcgtttcgtcattgagcctcagggtcttttcttgcccactttcttgaacgccggcaaactcacgtttgttgttcacggaaggggtctaatgggaagagttattccgggatgcgccgagacgttcatggagtcaccggtatttggagaaagtcaaggtcagggtcagagtcaagggttccgtgacatgcaccagaaagtagagcacctacggtgcggtgacaccattgcaaca

SEQ ID NO: 146722 - DNA, 476 bp, Arabidopsis thaliana
tgtgctcttagcctttactctattgttttgattcatatcaatcgacatggcgaatgtggaccgtgatcggcgtgtgcggtgtagaccgtactgacaaacgtgttcatcagccaaactacgaagatgatgtcggttttggtggctatggcggttatggtgctggttctgattataagagtcgcggcccctccactaaccaaatcttggcacttatagcaggagttcccattggtggcacactgctaaccctagctggactcactctagccggttcggtgatcggcttgctagtctccatacccctcttcctcctcttcagtccggtgatagtcccggcggctctcactattgggcttgctgtgacgggaatcttggcttctggtttgtttgggttgacgggtctgagctcggtctcgtgggtcctcaactacctccgtgggacgagtgatacagtgccagagcaattggactacgct

SEQ ID NO: 146723 - DNA, 478 bp, Arabidopsis thaliana
  unsure (1)..(478): unsure at all n locations
aaataacaaaatggctcgagtctcttttcttttttctttcttctnaacacttttgatccttttccatggctacgcggctcaacagggtcagcagggtcagcagtttccgaacgagtgccagctcgaccagctcaatgcgctcgagccgtcacacgtactgaagagcgaggctggtcgcatcgaggtgtgggaccaccacgctcctcagctccgttgctcaggtgtctcctttgcacgttacatcatcgagtctaagggtctctacttgccctctttctttaacaccgcgaagctctctttcgtggctaagggacgaggtcttatgggaaaagtgatccctggatgcgccgaaacattccaagactcatcagagttccaaccacgcttcgaaggtcaaggtcaaagccagaggttccgtgacatgcaccagaaagtggagcacattaggagcggtgataccattgccacaacacccggt

SEQ ID NO: 146724 - DNA, 481 bp, Arabidopsis thaliana
  unsure (1)..(481): unsure at all n locations
tcgaccacgcgtccggtgtgctcttagcctttactctatagntntattttatattaatcgacatggcgaatgtggaccgtgatcggcgtgtgcatgtagaccgtactgacaaacgtgttcatcagccaaactacgaagatgatgtcggttttggtggctatggcggttatggtgctggttctgattataagagtcgcggcccctccactaaccaaatcttggcacttatagcaggagttcccattggtggcacactgctaaccctagctggactcactctagccggttcggtgatcggcttgctagtctccatacccctcttcctcctcttcagtccggtgatagtcccggcggctctcactattgggcttgctgtgacgggaatcttggcttctggtttgtttgggttgacgggtctgagctcggtctcgtgggtcctcaactacctncgtgggacgagtgatacagtgccagagcaatt

SEQ ID NO: 146725 - DNA, 413 bp, Arabidopsis thaliana
  unsure (1)..(413): unsure at all n locations
cggacgcgtgggcggctgccngcgttgagttactttttgnnccnccncagctacagaacgggtgnaacctagacaacctagatgctctccaagccaccgaaactatcaagagtgaagccggtcagatcgagtactgggaccacaaccaccctcagctccgatgtgttggtgtttccgttgctcgttatgtaattgaacaaggcggtctttacttgcccaccttcttcacttccccaaaaatttcctacgtcgttcaaggaacgggtatcagcggaagagtggtccctggatgtgccgagaccttcatggactcgcagccgatgcaaggacaacaacaaggccaaccatggcaaggacgacagggacaacaaggccaaccatgggaaggacagggacaacagggacaacaagga

SEQ ID NO: 146726 - DNA, 429 bp, Arabidopsis thaliana
  unsure (1)..(429): unsure at all n locations
aacaaaaagaaaanggnnaagcncattatnnttttcgttgcaaccnncgggagacggggcgggcttaacggcagccgggcgaggcacccacttggggttcctcctcagctacagaacgagtgtaacctcgacaacctagatgttctccaagccaccgaaactatcaagagtgaagccggtcagatcgagtactgggaccacaaccaccctcagctccgatgtgttggtgtttccgttgctcgttatgtaattgaacaaggcggtctttacttgcccaccttcttcactttcccaaaaatttcctacgtcgttcaaggaacgggtatcagcggaagagtggtccctggatgtgccgagaccttcatggactcgcagccgatgcaaggacaacaacaaggccaaccatggcaaggacgacagggacaacaa

SEQ ID NO: 146727 - DNA, 359 bp, Arabidopsis thaliana
  unsure (1)..(359): unsure at all n locations
cacggcgatgaagtgtcaatagaancttctattgtacacaaatgatctaattattcaaaccacaacattgtcttctttgatgttaatatataagtcttgcatcttatttagagtgtttgtgtttggttccggttgatctgtgtaactgtctttatgtaatcacacaagtgtatgctgtctggttagtcggagacagagtaagaagacatcctacacatgacattggagaattataaggtaaaatcttgaaccatagatttctaaagacttttgagaaccaaagtaaggattgtattgaacattacaagtttcattggggaatttccacaaacaccttagcttgccaataaagcattaac

SEQ ID NO: 146728 - DNA, 378 bp, Arabidopsis thaliana
  unsure (1)..(378): unsure at all n locations
caacaatggaaatgagcctctcatncngggtgtagccgttgttctcgccagcaaccagaaccagcttgaccgcaaccttagaccatttttgatagccggaaacaacccacaagggcaggaatggctacaaggccgaaagcaacagaagcaaaacaacatcttcaatggcttcgcacctgagatcttggctcaagccttcaagatcaatgtcgagacggctcagcagctccagaaccagcaagataaccgtggcaacatcgtcaaggtcaacggacctttcggcgtcattaggccacccttgagacgcggcgaaggcggccaacaaccacatgaaatagctaatggtttagaggagactttgtgcaccatgcgatgcac

SEQ ID NO: 146729 - DNA, 455 bp, Arabidopsis thaliana
  unsure (1)..(455): unsure at all n locations
cgctcttctcgacatcgccaactaccaaaatcttcttgtccgcaaccctagagngnnccatttggccggaaacaaccagcagggaggctttggcggttcacagcaacaacaagaacagaaaaacttgtggagcgggttcgacgcacaggtcatagctcaagcattgaaaattgacgttcagttggctcagcagcttcagaaccaacaagacagcagaggaaacatcgttcgtgttaagggacctttccaggtcgtgaggccacctctaagacagccctacgagagcgaggagtggagacacccacgtagcccacagggcaacggccttgaggagactatctgcagcatgaggtcccacgagaacattgacgaccctgctcgtgctgacgtgtacaagcccagcctaggtcgcgtgaccagcgtcaacagctataccttgcccatcttggagtatg

SEQ ID NO: 146730 - DNA, 428 bp, Arabidopsis thaliana
  unsure (1)..(428): unsure at all n locations
caaaaagaaaatggttaagctcagcaatctccttgttgtaaccttcgggggnctcctcgnccttaacggctgccttgcgaggcagtcacttggggttcctcctcagctacagaacgagtgtaacctcgacaacctagatgttctccaagccaccgaaactatcaagagtgaagccggtcagatcgagtactgggaccacaaccaccctcagctccgatgtgttggtgtttccgttgctcgttatgtaattgaacaaggcggtctttacttgcccaccttcttcacttccccaaaaatttcctacgtcgntcaaggaacgggtatcagcggaagagtggtccctggatgtgccgagaccttcatggactcgcagccgatgcaaggacaacaacaaggccaaccatggcaaggacgacagggacaacaag

SEQ ID NO: 146731 - DNA, 455 bp, Arabidopsis thaliana
  unsure (1)..(455): unsure at all n locations
aagaaatataagaaataccaaaagggcccgagtgcttttcttcttccnnccnnctaaacactgtggatccttttccatggctacgcggctcaacagggtcagcagggtcagcagtttccgaacgagtgccagctcgaccagctcaatgcgctcgagccgtcacacgtactgaagagcgaggctggtcgcatcgaggtgtgggaccaccacgctcctcagctccgttgctcaggtgtctcctttgcacgttacatcatcgagtctaagggtctctacttgccctctttctttaacaccgcgaagctctctttcgtggctaagggacgaggtcttatgggaaaagtgatccctggatgcgccgaaacattccaagacttatcagagttccaaccacgctttcgaagtcaaggtcaaagccagaggttccgtgacatgcaccagaaagtggagcacat

SEQ ID NO: 146732 - DNA, 476 bp, Arabidopsis thaliana
  unsure (1)..(476): unsure at all n locations
aacaaaaagaaaatggnnaagctctttattcgtcncgttgcaaccttcggggntctcctcgtgcttaacggctgccttgcgaggcagtcacttggggttcctcctcagctacagaacgagtgtaacctcgacaacctagatgttctccaagccaccgaaactatcaagagtgaagccggtcagatcgagtactgggaccacaaccaccctcagctccgatgtgttggtgtttccgttgctcgttatgtaattgaacaaggcggtctttacttgcccaccttcttcacttccccaaaaatttcctacgtcgttcaaggaacgggtatcagcggaagagtggtccctggatgtgccgagaccttcatggactcgcagccgatgcaaggacaacaacaaggccaaccatggcaaggacgacagggacaacatggccaaccatgggaaggacagggacaacagggacaacaaggaagaca

SEQ ID NO: 146733 - DNA, 468 bp, Arabidopsis thaliana
  unsure (1)..(468): unsure at all n locations
agaaaatggttaagctcagcaatcttttcngttcttccttcggggttctcctcgtccttaacggctgccttgcgaggcagtcacttggggttcctcctcagctacagaacgagtgtaacctcgacaacctagatgttctccaagccaccgaaactatcaagagtgaagccggtcagatcgagtactgggaccacaaccaccctcagctccgatgtgttggtgtttccgttgctcgttatgtaattgaacaaggcggtctttacttgcccaccttcttcacttccccaaaaatttcctacgtcgttcaaggaacgggtatcagcggaagagtggtccctggatgtgccgagaccttcatggactcgcagccgatgcaaggacaacaacaaggccaaccatggcaaggacgacagggacaacaaggccaaccatgggaaggacagggacaacagggacaacaaggaagac

SEQ ID NO: 146734 - DNA, 470 bp, Arabidopsis thaliana
  unsure (1)..(470): unsure at all n locations
aaagaaaatggttaagctcagcanattcctcgtttcaaccttcggggttctcctcgtccttaacggctgccttgcgaggcagtcacttggggttcctcctcagctacagaacgagtgtaacctcgacaacctagatgttctccaagccaccgaaactatcaagagtgaagccggtcagatcgagtactgggaccacaaccaccctcagctccgatgtgttggtgtttccgttgctcgttatgtaattgaacaaggcggtctttacttgcccaccttcttcacttccccaaaaatttcctacgtcgttcaaggaacgggtatcagcggaagagtggtccctggatgtgccgagaccttcatggactcgcagccgatgcaaggacaacaacaaggccaaccatggcaaggacgacagggacaacaaggccaaccatgggaaggacagggacaacagggacaacaaggaagac

SEQ ID NO: 146735 - DNA, 378 bp, Arabidopsis thaliana
  unsure (1)..(378): unsure at all n locations
cnccaaccncttccngaacaagangttgaggtggttttnnnaagcncanangacggagaggggganattagngaatctgaaatggatgattatggagacaaaatgtacctaaaccttaaaggtgggaagctgaaagtgagactctctcctcaagcttttatctgtccttattgtccaaacaagaagaaaactagttttcaatacaaagatcttcttcaacatgcttctggagttggtaatagcaattctgataaaagaagtgcaaaggagaaagcaagtcaccttgctcttgtcaaataccttcaacaagatcttgctgattcagcttcagaagcagagccttcatcaaagcgtcagaaaaacggaaaccctattcaa

SEQ ID NO: 146736 - DNA, 456 bp, Arabidopsis thaliana
  unsure (1)..(456): unsure at all n locations
ctggattccggctggnncgncntngtttatttatttacaggccnaggncaacgccggcatgtcatttgcagcattgatccaacgcacagtctcggcttcgaaaccttccaacctttctatataggtggagggccttcgtctgttctagctggatttgatcctcacactttaacttcagcattcaacgtttccctacctgagctgcaacaaatgatgatgagtcaattccgtggcccgattgtacacgtcaccgaagggccacaaccacaaccacaatcgacggtatggacccaatttttggggttgagaggggaagagaaacataagcaactcaagaaactcttggagactaaacaaggatcccctcaagatcaacaatacagttcagggtggtcttggaggaatattgtaagatcgattttggatctaacagaagaaaagaataagggtcaggat

SEQ ID NO: 146737 - DNA, 407 bp, Arabidopsis thaliana
  unsure (1)..(407): unsure at all n locations
gaaagaagtaaggaagctcgctgtnctagaactttttcagtagtaaacaagttcactcgatacaaccgatgaaggacgaggaggtcaagaaactgatcgattcaatctccgaatcagctgctcagaagactccgatcaacttgaacaagacatttctggctttaactgttagtgtggtctgcaggacagcgtttagtgtgaattttgagggaactgtgctcaacagtgaacgattcaataacatagtccgtgaggcgctcgagatgttgggaagcttttctgcctcagatttcattccgtatgtcggaaggatcatcgacttgttgacgggtttgcaaggacggcgagagagaagcatgagagatcttgatgccttctatgaacaaatgtttgatctgcataaacat

SEQ ID NO: 146738 - DNA, 457 bp, Arabidopsis thaliana
  unsure (1)..(457): unsure at all n locations
ataaaaatggctcgagtctctnctctncttnttttctctttaacactnnnganccttnnccatggctacgcggctcaacagggtcagcagggtcagcagtttccgaacgagtgccagctcgaccagctcaatgcgctcgagccttcacacgtactgaagagcgaggctggtcgcatcgaggtgtgggaccaccacgctcctcagctccgttgctcaggtgtctcctttgcacgttacatcatcgagtctaagggtctctacttgccctctttctttaacaccgcgaagctctccttcgtggctaaaggacgaggtcttatgggaaaagtgatccctggatgcgccgaaacattccaagactcatcagagttccaaccacgcttcgaaggtcaaggtcaaagccagaggttccgtgacatgcaccagaaagtggagcacattaggagcggtgatacca

SEQ ID NO: 146739 - DNA, 358 bp, Arabidopsis thaliana
  unsure (1)..(358): unsure at all n locations
agaaaatggttaagctcagcaatctccncgnttcaactttttgggttctccncgnccttaacggctgccttgcgaggcagtcacttggggttcctcctcagctacagaacgagtgtaacctcgacaacctagatgttctccaagccaccgaaactatcaagagtgaagccggtcagatcgagtactgggaccacaaccaccctcagctccgatgtgttggtgtttccgttgctcgttatgtaattgaacaaggcggtctttacttgcccaccttcttcactttcccaaaaatttcctacgtcgttcaaggaacgggtattagcggaagagtggtccctggatgtgccgagaccttcat

SEQ ID NO: 146740 - DNA, 349 bp, Arabidopsis thaliana
  unsure (1)..(349): unsure at all n locations
catccgctagatccagcctctggccggccgagtgnttttatcgaatcgcaaacgaacagacactaataagaatagtctgacaaactctgcaactggaataatgacaacgagcaatttcttgaaaacgctctatctttgaggagtgattgatctcgatgggacctcaatcaacacagacggcgttggtggcgacatgttgaggaaatacttgcgcgaatatggaaaacacaagggatggaagagaatcatagcaaatagacggcaaaactacattagaagctgctactacgatcggtgaagattatgaacttgcttgtaaagatgacgaatacaattctggactctaccc

SEQ ID NO: 146741 - DNA, 368 bp, Arabidopsis thaliana
  unsure (1)..(368): unsure at all n locations
aagaaaccatccacaaatggcaaaccaggggttacatttttttcctcgncggcgcaactctcggcctctgcttcctcctcaccaacgctgccatctaccgcaccgttgtcgaattcgaagaagatgacgccagcaaccccgtaggtccaagacagagatgccagaaggagtttcagcaatcacaacacctaagagcttgccagagatggatgagcaagcaaatgaggcaaggacgtggtggtggtccttccctcgacgatgagttcgatttcgagggcccccagcagggataccagctactccagcagtgctgcaacgagcttcgccaggaagagccagtttgcgtttgccccaccttgaaacaagct

SEQ ID NO: 146742 - DNA, 472 bp, Arabidopsis thaliana
  unsure (1)..(472): unsure at all n locations
aaagaaaatggttaagctcagcaattttctngttgttaccttcggggttctcctcgtccttaacggctgccttgcgaggcagtcacttggggttcctcctcagctacagaacgagtgtaacctcgacaacctagatgttctccaagccaccgaaactatcaagagtgaagccggtcagatcgagtactgggaccacaaccaccctcagctccgatgtgttggtgtttccgttgctcgttatgtaattgaacaaggcggtctttacttgcccaccttcttcacttccccaaaaatttcctacgtcgttcaaggaacgggtatcagcggaagagtggtccctggatgtgccgagaccttcatggactcgcagccgatgcaaggacaacaacaaggccaaccatggcaaggacgacagggacaacaaggccaaccatgggaaggacagggacaacagggacaacaaggaagacaa

SEQ ID NO: 146743 - DNA, 410 bp, Arabidopsis thaliana
  unsure (1)..(410): unsure at all n locations
cttttgtttctcgctaccatggcttattctngttatttcagaccagctcttcttcttctgttagttcttttggttcatgccgagtcacgcggtcggttcgagccaaagattcttatgccgacagaggaagctaacccggctgaccaagacgaagatggtgtcggtacaagatgggcggttctcgtcgctggttcttctggatatggaaactacagacaccaggctgacgtgtgtcacgcatatcaaatactaagaaaaggaggtttaaaggaagagaacatagtcgttttgatgtatgatgatatcgcaaaccacccacttaatcctcgtccgggtactctcatcaaccatcctgacggtgacgatgtttacgccggagtccctaaggactatactggtagtagtgttac

SEQ ID NO: 146744 - DNA, 469 bp, Arabidopsis thaliana
  unsure (1)..(469): unsure at all n locations
ggctcagcagcttcagaaccaacattttctgcatagtaaacatcgnncgngttaagggacctttccaggtcgtgaggccacctctaagacagccctacgagagcgaggagtggagacacccacgtagcccacagggcaacggccttgaggagactatctgcagcatgaggtcccacgagaacattgacgaccctgctcgtgctgacgtgtacaagcccagcctaggtcgcgtgaccagcgtcaacagctataccttgcccatcttggagtatgtcaggctcagtgccactcgtggcgttctccagggtaatgcgatggtgcttcctaaatacaacatgaacgctaacgagatcttgtactgcactggaggacaaggaaggatccaagtggtcaacgacaacggacagaacgtgttggaccaacaagtgcagaagggacagctcgtggtcattccacaagggttcgcata

SEQ ID NO: 146745 - DNA, 441 bp, Arabidopsis thaliana
  unsure (1)..(441): unsure at all n locations
ataaaaatggctcgagtctctncnctnctttctttcnctttaacactnnnnganccttttccatggctacgcggctcaacagggtcagcagggtcagcagtttccgaacgagtgccagctcgaccagctcaatgcgctcgagccttcacacgtactgaagagcgaggctggtcgcatcgaggtgtgggaccaccacgctcctcagctccgttgctcaggtgtctcctttgcacgttacatcatcgagtctaagggtctctacttgccctctttctttaacaccgcgaagctctccttcgtggctaaaggacgaggtcttatgggaaaagtgatccctggatgcgccgaaacattccaagactcatcagagttccaaccacgcttcgaaggtcaaggtcaaagccagaggttccgtgacatgcaccagaaagtggagcacat

SEQ ID NO: 146746 - DNA, 153 bp, Arabidopsis thaliana
  unsure (1)..(153): unsure at all n locations
ganctctccctcccncnncnccgttttatttcattcaacaancnccaaagaagagggaacgcagnctctncangggggaacaccccacccgacnccgnagaaccagagaaccacgacccaancgagaaggagaaacggcggcaacgncgagga

SEQ ID NO: 146747 - DNA, 432 bp, Arabidopsis thaliana
  unsure (1)..(432): unsure at all n locations
caatcttctcttacaaaaaactntgatagagttatattcttctagcatcattgtgtttgatcagtcttctcgtaatcttgccttctgtcttctctgcttcttcttcctctgaagattttgatttcttctacttcgtccaacaatggccaggatcatactgtgacacacagaagaagtgttgttatccaaattcaggcaaaccagctgctgattttggcattcatggtctttggcctaactacaaagatggcacttatccatctaactgtgatgactctaaacctttcgatagctcaacgatatcagatcttctcacctcgatgaagaagagctggccaacactggcttgcccaagcggttcaggtgaagcgttttgggagcacgaatgggagaagcatggtacttgctctgaatcggttatcgatcaacatg

SEQ ID NO: 146748 - DNA, 381 bp, Arabidopsis thaliana
cgaattcggtcgacccacctccgggcgctggtggggtacagcacatctgactgttaactggggcggttcgacgcacaggtcatagctcagcatgaaatgacgttcagtggctcagcagcttagaaccaacagacgcaaggaaacatcgtcggttagggacctttcaggtcggaggccaccttagacagccctacagagcgaggagtggagacacccacgtagcccacagggcaacggcttgggagactatctgcagcatgaggtccacggacattgcaccctgtcggctgacggtcaagcccagctagtcgcgtgaccgcgtaacagctatccttgccatttgggatgtaagctcaggcactcgggcgtctcaggtatgcg

SEQ ID NO: 146749 - DNA, 129 bp, Arabidopsis thaliana
  unsure (1)..(129): unsure at all n locations
gtttcgagttacatactaaaaacttncccttnnatttattaggaagaaacggggattacaagtgaggggcgcgcagacacatatttgacacgtacgttaaaggtaaagggaagtttcgagttacatact

SEQ ID NO: 146750 - DNA, 385 bp, Arabidopsis thaliana
  unsure (1)..(385): unsure at all n locations
ccaacccatcagcccattgagcacanngcaagtttccgtgctatgcccaacactcttatgttgcgncctgctgatggaaatgaaacagccggtgcatacaagatcgctgtcaccaagcgcaagacaccatctatcttagctctgtctaggcaaaagctgcctcatcttccaggtacatccatcgaaggagtggaaaagggtggatatacaatttctgacgactcttcaggcaacaaacccgatgtgatcttgattggaactggttctgagctagagattgctgcacaggctgcggaggtgctcaggaaagacggcaaaaccgntagagttgtttctttcgtgtgctgggaactatttgacgagcaatcagatgagtacaaggaga

SEQ ID NO: 146751 - DNA, 468 bp, Arabidopsis thaliana
  unsure (1)..(468): unsure at all n locations
gcgtccgaacatacacacatagcaaaaaagggcaaacaggtggtttttttgtttgcgcagctctcgctctgggcttgctcctaaccaacggtggcatgtaccgcaccgncgttgagttcgaagaagatgacgccactaaccccataggcccaaaaatgaggaaatgccgcaaggagtttcagaaagaacaacacctaagagcttgccagcaattgatgctccagcaagcaaggcaaggccgtagcgatgagtttgatttcgaagacgacatggagaacccacagggacaacagcaggaacaacagctatttcagcagtgctgcaacgagcttcgtcaggaagagccagattgtgtttgccccaccttgaaacaagctgccaaggcctgttgactccagggacagcaccaaccaatgcaagtcaggaaaatttaccagacagccaagcacttgcccaacagttgcgaca

SEQ ID NO: 146752 - DNA, 441 bp, Arabidopsis thaliana
  unsure (1)..(441): unsure at all n locations
gtcggttttggtggctatggcggttttgtngttggttctgannataagagncgcggcgccctgcactaaccaaatcttggcacggatagcacgagttcccattggtggcacactgctaaccctagctggactcactctagccggttcggtgatcggcttgctagtctccatacccctcttcctcctcttcagtccggtgatagtcccggcggctctcactattgggcttgctgtgacgggaatcttggcttctggtttgtttgggttgacgggtctgagctcggtctcgtgggtcctcaactacctccgtgggacgagtgatacagtgccagagcaattggactacgctaaacggcgtatggctgatgcggtaagctatgctggtatgaagggaaaagagatgggtcagtatgtgcaagattaggcgcatgagggtcgtga

SEQ ID NO: 146753 - DNA, 396 bp, Arabidopsis thaliana
  unsure (1)..(396): unsure at all n locations
aacaaacaaaaagaaaacgggnaatcttatcnatcnttctcgttgcaaccttcggggttctcctggtccttaacggctgccttgcgaggcagtcacttggggttcctcctcagctacagaacgagtgtaacctcgacaacctagatgttctccaagccaccgaaactatcaagagtgaagccggtcagatcgagtactgggaccacaaccaccctcagctccgatgtgttggtgtttccgttgctcgttatgtaattgaacaaggcggtctttacttgcccaccttcttcacttccccaaaaatttcctacgtcgttcaaggaacgggtatcagcggaagagtggtccctggatgtgccgagaccttcatggactcgcagccgatgcaaggacaac

SEQ ID NO: 146754 - DNA, 371 bp, Arabidopsis thaliana
ggctcagcagcttcagaaccaacaagacagcttttgaatcatttttcgtgttaagggacctttccaggtcgtgaggccacctctaagacagccctacgagagcgaggagtggagacacccacgtagcccacagggcaacggccttgaggagactatctgcagcatgaggtcccacgagaacattgacgaccctgctcgtgctgacgtgtacaagcccagcctaggtcgcgtgaccagcgtcaacagctataccttgcccatcttggagtatgtcaggctcagtgccactcgtggcgttctccagggtaatgcgatggtgcttcctaaatacaacatgaacgctaacgagatcttgtactgcactggaggac

SEQ ID NO: 146755 - DNA, 439 bp, Arabidopsis thaliana
  unsure (1)..(439): unsure at all n locations
agaaaacatacacaaatagcaaaatatgggttttttgctcnnccncgncngcgcaacgctcgggctctgcttcctcctgaccaacgcttccatctaccgcaccgttgtcgaattcgaagaagatgacgccagcaaccccgtaggtccaagacagagatgccagaaggagtttcagcaatcacaacacctaagagcttgccagagatggatgagcaagcaaatgaggcaaggacgtggtggtggtccttccctcgacgatgagttcgatttcgagggcccccagcagggataccagctactccagcagtgctgcaacgagcttcgccaggaagagccagtttgcgtttgccccaccttgaaacaagctgccagggcagttagccttcagggacagcacggaccattccaatccaggaaaatttaccagtcagctaagtac

SEQ ID NO: 146756 - DNA, 464 bp, Arabidopsis thaliana
aacaaaaagaaaatgggcaagcgtagtaatctccttgttgcaaccttcggcgttctcctcgttcttaacggctgcctggcgaggcaatcactaggggttcctcctcagctacagaacgagtgtaacctccacaacctagatgttctccaagccaccgaaactatcaagagtgaagccggtcagatcgagtactgggaccacaaccaccctcagctccgatgtgttggtgtttccgtcgctcgttatgtaattgaacaaggcggtctatacttgcccaccttcttcacttccccaaaaattttctacgtcgttcaaggaacgggtattagcggaagagtggtccctggatgtgccgagaccttcatggactcgcagacgatgcaaggacaacaacaaggccaaccatggcaaggacgacagggacaacaaggccaaccatgggaaggacagggacaacagggaca

SEQ ID NO: 146757 - DNA, 416 bp, Arabidopsis thaliana
  unsure (1)..(416): unsure at all n locations
tggacccgaggttattgctcaagctttgaatatctncttcatacagcgcagcaacttcagaaccaagatgacaaccgtggaaacattgtccgagtccaaggcccgttcggtgtcattaggccgcctttgaggggccagagacctcaggaggaggaagaagaagaagaaggacgacatggacgacacggtaatggcttagaggagaccatctgcagcgccaggtgcaccgataacctcgatgacccgtctcgtgctgacgtgtacaagccacagctcggttacatcagcactctcaacagttacgatctccccatccttcgcttcatccgtctctcagccctccgtggatctatccgtcaaaacgccatggtgctttcacagtggaacgcaaacgcgaacgctattctttacgtgac

SEQ ID NO: 146758 - DNA, 419 bp, Arabidopsis thaliana
  unsure (1)..(419): unsure at all n locations
agcaaaaaatggcaaacaaggggnncctcgttttcgcattgtttcgctctctgctncctcctcaccaacgcttccatctaccggaccgtcgttgagttcgaagaagatgacgccactaaccccataggcccaaaaatgaggaaatgccgcaaggagtttcagaaagaacaacacctaagagcttgccagcaattgatgctccagcaagcaaggcaaggccgtagcgatgagtttgatttcgaagacgacatggagaacccacagggacaacagcaggaacaacagctattccagcagtgctgcaacgagcttcgccaggaagagccagattgtgtttgccccaccttgaaacaagctgccaagggccgttagactccagggacagcaccaaccaatgcaggtcagggaaaattaccaga

SEQ ID NO: 146759 - DNA, 418 bp, Arabidopsis thaliana
  unsure (1)..(418): unsure at all n locations
aaaaatgggtcgagtctcatctattatcncngtttctttgacactctngancctcttcaatggctacactgcccaacagtggcccaacgagtgccagctcgatcaactcaatgcgctcgaaccatcccaaatcatcaagagcgagggtggtcgcatcgaggtctgggaccaccatgcaccccagctccgttgctccggctttgcctttgagcgtttcgtcattgagcctcagggtcttttcttgcccactttcttgaacgccggcaaactcacgtttgttgttcacggaaggggtctaatgggaagagttattccgggatgcgccgagacgttcatggagtcaccggtatttggagaaggtcaaggtcagggtcagagtcaagggttccgtgacatgcaccagaaagtagagcaccta

SEQ ID NO: 146760 - DNA, 497 bp, Arabidopsis thaliana
  unsure (1)..(497): unsure at all n locations
gctcagcaatctcctcgttgcaacctncggggttctctttttccttaacggctgccttgcgaggcagtcacttggggttcctgctcagctacagaacgagtgtaacctcgacaacctagatgttctccaagccaccgaaactatcaagagtgaagccggtcagatcgagtactgggaccacaaccaccctcagctccgatgtggtgggggttccggtgctcggtatgtaattgaacaaggggggctttacttgcccaccttcttcacttccccaaaaatttcctaccgcggtcaagggaccggtattaacggaagagtggtccctggatgtgcccagaccttcatggactcgcaggcgatgcaaggacaacaacaaggccaaccatggcaagggacgacaggggacaacaaggcccaaccatggggaaggacaggggacaacagggaacaacanagtaagacaagggccaaccatgggaaggacagggacaacaggg

SEQ ID NO: 146761 - DNA, 473 bp, Arabidopsis thaliana
  unsure (1)..(473): unsure at all n locations
aaaaagaaaatggttaagctcagcaancnccgtgnggtttccttcgggggncnccncnacctgaacggctgccttgcgaggcaggcacttgcggttcctcctcagctacagaacgagtgtaacctcgacaacctagatgttctccaagccaccgaaactatcaagagtgaagccggtcagatcgagtactgggaccacaaccaccctcagctccgatgtgttggtgtttccgttgctcgttatgtaattgaacaaggcggtctttacttgcccaccttcttcacttccccaaaaatttcctacgtcgttcaaggaacgggtatcagcggaagagtggtccctggatgtgccgagaccttcatggactcgcagccgatgcaaggacaacaacaaggccaaccatggcaaggacgacagggacaacaaggccaaccatgggaaggacagggacaacagggacaacaaggaagaca

SEQ ID NO: 146762 - DNA, 398 bp, Arabidopsis thaliana
gtttgttattcggtgaagaagaagattaagaattgtttaagcatattcgacgggcaccaccaaacctcttccgtcggattttcactctccgtttatcgaacatctgagatctctctccacttccgtcaccgaagatgcattccagtcatcttcttctcgaggagccgatcaggatggcttcaatcctcgagccttccaaatctagtttcttcccggcattgactaagatcgtcggaactctaggtcctaaatcccgatccgtcgaggctctctccggctgtctcaaagccggcatgtctgtggctcgatttgatttctcgtggggagatgctgattatcaccaggagacacttgataatttgaaaggtgctgtgaggagcactaagaagctttgtgct

SEQ ID NO: 146763 - DNA, 415 bp, Arabidopsis thaliana
  unsure (1)..(415): unsure at all n locations
gcaaccctagagtgttccatttggccggaaacaattgcagtgatgctnnggcggnncacagcaacaacaagaacagaaaaacttgtggagcgggttcgacgcacaggtcatagctcaagcattgaaaattgacgttcagttggctcagcagcttcagaaccaacaagacagcagaggaaacatcgttcgtgttaagggacctttccaggtcgtgaggccacctctaagacagccctacgagagcgaggagtggagacacccacgtagcccacagggcaacggccttgaggagactatctgcagcatgaggtcccacgagaacattgacgaccctgctcgtgctgacgtgtacaagcccagcctaggtcgcgtgaccagcgtcaacagctataccttgcccatcttggagtatgtc

SEQ ID NO: 146764 - DNA, 423 bp, Arabidopsis thaliana
  unsure (1)..(423): unsure at all n locations
tagatttgcggtattgccactctctgttctngttctcgttctctngnncctctgcactgaggcgttggctaagtcgggggagtctgaacaatacgacgtcgctgtgccttcatgttgcgggttttcgtctcctcttctgattaagaaagatcaatggaaaccaatcttcgagacgaagtttggacagatttcaaccgttcaaatcggcaatggatgcggtggaatgggaccttacaagatacattccataacgttggagccaaacacaattttgctccctcttcttcttcattccgacatggtcttcttcgttgactctggaagtgggattctgaattgggttgacgaggaaagcgaaagtactgagattagactaggggacgtttacaggctacgttccggttcggttttttacttacagag

SEQ ID NO: 146765 - DNA, 309 bp, Arabidopsis thaliana
  unsure (1)..(309): unsure at all n locations
cggccccgggggtccctattttaagactgctttgctttagcgctctccgnggctccatccggaaaaacgttatggtgctaccgcggtggaacgtaaacgcaaacgcggcactctacgtgacaaacggaaaggctcatatacaaatggtgaacgacaacggagaaagagtgttcgaccaagagatctccagcggacagttactagtcgtgccacaaggcttttcggtcatgaaacatgccataggcgaacagttcgagtggatcgaattcaagacaaacgaaaacgcacaggtcaacacactcgcgggcc

SEQ ID NO: 146766 - DNA, 461 bp, Arabidopsis thaliana
gggacaacaaggaagacaaggccatttattgtaatgacagggacaacagggacaacaaggacgacagggacaacaagggcaaccatgggaaggacagggacagcagggacaacaagggttccgtgacatgcaccagaaggtggaacatgtgagacgcggagacgtctttgccaacactccaggctctgcccactggatctacaactcaggagaacagccacttgtcatcatcgctcttctcgacatcgccaactaccaaaaccaactcgaccgcaaccctagagtgttccatttggccggaaacaaccagcagggaggctttggcggttcacagcaacaacaagaacagaaaaacttgtggagcgggttcgacgcacaggtcatagctcaagcattgaaaattgacgttcagttggctcagcagcttcagaaccaacaagacagcagaggaaacatcgttc

SEQ ID NO: 146767 - DNA, 487 bp, Arabidopsis thaliana
cacatagcaaaaaatggcatacatgttgttttttgtctgcgcagctctcgctctctgcttcctgctcaccaacgcttggatctggcgcaccgtcgttgagttcgaagaagatgacgccactaaccccataggcccaaaaatgaggaaatgccgcaaggagtttcagaaagaacaacacctaagagcttgccagcaattgatgctccagcaagcaaggcaaggccgtagcgatgagtttgatttcgaagacgacatggagaacccacagggacaacagcaggaacaacagctattccagcagtgctgcaacgagcttcgccaggaagagccagattgtgtttgccccaccttgaaacaagctgccaaggccgttagactccagggacagcaccaaccaatgcaagtcaggaaaatttaccagacagccaagcacttgcccaacgtttgcgacatcccgcaagttgatgtttggcccttcaacatccct

SEQ ID NO: 146768 - DNA, 440 bp, Arabidopsis thaliana
  unsure (1)..(440): unsure at all n locations
ctcgtcccattttcttcgagtacttttctattantcaaatacaaatcttcatgcagtcgtacagccgtctgatgcaggtcaaggtcaaagatctgatgatcgacaagcggcggctggtcgaagttcctgataatgccactctaggggacgccttgaacactatggtaaaccacggctaaataattgttatttttttggttggagtcaaccgttttaagtatcaagaattactaacaagactattcttggtatcaaaccggtggcaaaccgagttagagctgtaccggtggctgccaaaccaggccaatggctgggagccgggggatcaatgatagtagagttggacaaacagagcggaagtgcaagaaaacagtacataggaatggtgaccatgctcgacgttgtggctcacatcgccggcgatgacggcgagagtgggc

SEQ ID NO: 146769 - DNA, 414 bp, Arabidopsis thaliana
caaatggcctagaggatggcttctctacggtcttctcttgataccggcaagacaagcttggtccgtgctgttgtccaggaatgtgatgcacatttgattgttttaagccctcattctgtacatcgagcacatgctggagaaagcgagaaagtcttaagggaagctttcgctgaggcttcttctcacgctgtttcagacaagccttctgtgatttttattgatgaaatcgatgttctttgtcctcgtcgtgatgctagacgagaacaagatgttcgtattggcttctcaactgtttacacttatggactcaaacaagccttcatcatctgcaccaagagttgttgttgtagcatccacaaatagggtggatgcgattgacccagcgctaaaaagagcgggacgatttgatgcttt

SEQ ID NO: 146770 - DNA, 343 bp, Arabidopsis thaliana
  unsure (1)..(343): unsure at all n locations
caaaagcatacttgagagagatctgtttcgtttantgtcnttaatcaccgggttaatggcggccgtaggagtggaggcgagacgtcctgtgacagcgatggaggaaacctgcaacgttaagggagcggcggcgaaacaaggagaagggcttaacaagtactacctccagcatctcgatgagctccagcgcctgcaacgcgaaaagtcgtataaccttaatcgtcttgaagctcagaggaatgaactcaattctcgagtacgaatgctcagagaagagttacagctccttcaagaacctgggtcctatgtgggtgaagtggtaaaaggtgatgggaaaaaaaca

SEQ ID NO: 146771 - DNA, 467 bp, Arabidopsis thaliana
aacctaacggaaataataatttaactaaccggttaatgttttgattaaaacatttaatgatatgccactaaaagagttagagacgtatggatcacaaaacatgaagctttcttagatggtatcctaaaactaaagttaggtacaagtttggaatttaggtcaaatgcttaagttgcattaatttgaacaaaatctatgcattgaataaaaaaaagatatggattattttataaagtatagtccttgtaatcctaggacttgttgtctaatcttgtcttatgcgtgcaaatctttttgatgtcaatatataatccttggttattagagtcaagctctttcattagtcaactactcaaatatactccaaagtttagaatatagtcttctgactaattagaatcttacaaccgataaacgttacaatttggttatcattttaaaaaacaagattggtcataatatacgat

SEQ ID NO: 146772 - DNA, 367 bp, Arabidopsis thaliana
  unsure (1)..(367): unsure at all n locations
ctcacaacaaacaaaaagaaaatggtttagcnttagtaatctcctcgntgcaaccttcggggttctcctcgtccttaacggctgccttgcgaggcagtcacttggggttcctcctcagctacagaacgagtgtaacctcgacaacctagatgttctccaagccaccgaaactatcaagagtgaagccggtcagatcgagtactgggaccacaaccaccctcagctccgatgtgttggtgtttccgttgctcgttatgtaattgaacaaggcggtctttacttgcccaccttcttcacttccccaaaaatttcctacgtcgttcaaagaaacgggtatcagcggaagagtggtccctggaatgtgccg

SEQ ID NO: 146773 - DNA, 395 bp, Arabidopsis thaliana
gataaaaatggctcgagtctcttcttttctttttttctccttaacacttttgatccttttccatggctacgcggctcaacagggtcagcagggtcagcagtttccgaacgagtgccagctcgaccagctcaatgcgctcgagccttcacacgtactgaagagcgaggctggtcgcatcgaggtgtgggaccaccacgctcctcagctccgttgctcaggtgtctcctttgcacgttacatcatcgagtctaagggtctctacttgccctctttctttaacaccgcgaagctctccttcgtggctaaaggacgaggtcttatgggaaaagtgatccctggatgcgccgaaacattccaagactcatcagagttccaaccacgcttcgaaggtcaag

SEQ ID NO: 146774 - DNA, 348 bp, Arabidopsis thaliana
  unsure (1)..(348): unsure at all n locations
caaaaagaaaatggttaagctcagctttctcctcgttgcaaccttcggggttctcctcgtccttaacggctgccttgcgaggcagtcacttggggttcctcctcagctacagaacgagtgtaacctcgacaacctagatgttctccaagccaccgaaactatcaagagtgaagccggtcagatcgagtactgggaccacaaccaccctcagctccgatgtgttggtgtttccgttgctcgttatgtaattgaacaaggcggtctttacttgcccaccttcttcacttccccaaaaatntcctacgtcgttcaaagaacgggtatcagcggaagagtggtccctggatg

SEQ ID NO: 146775 - DNA, 398 bp, Arabidopsis thaliana
  unsure (1)..(398): unsure at all n locations
acaaaccaccaggaaaaaatggcattaaccatttaatttatcataacacttcttctccttatctccatagctgtcgtccactgcttatccttccgtgtggagatcgacgagttcgagccaccacagcaaggagaacaagaaggtccccgtcgccgtcctggtggtggctctggcgagggatgggaggaagagtcgacgaatcatccataccacttcaggaagcggagtttcagtgattggttccagtcaaaggaaggttttgtgagagtgctgcctaagttcacaaaacatgcaccggctctcttncgaggaatcgagaactacagattctcgttggtggagatggagccaacaactttctttgtgcctcaccatttggatgccgatgcttgttttat

SEQ ID NO: 146776 - DNA, 405 bp, Arabidopsis thaliana
  unsure (1)..(405): unsure at all n locations
ngagaaaccaaagtcttcactctgattctctctcttatcaaaagagacgacagagaaagaagaagaagaaacgcgaagaacagaaacagctctcttaagcttttcttaattattattataattttctcttcttaatccccaaatctcctgatggattcatgaaccagatcggctgatttgagtttccgggtttgatttttttccctttttgtgaaattgggttggaatctggagatctggatcttataaagctggaaactttacgtgtgcttgatgaaccgattttgattaggtgattggttagattcggaaatttgaagacttgttaatttgggtttgggattgggattgatctgaaaatttgtagtttttggaagatatgttggaagatcgatcaccagattc

SEQ ID NO: 146777 - DNA, 380 bp, Arabidopsis thaliana
  unsure (1)..(380): unsure at all n locations
agaaaacatacacaaatagtaaatcttggcttttaagctctncctcgtctgcgcaactctcgccctctgcttcctcctcaccaacgcttccatctaccgcaccgttgtcgaattcgaagaagatgacgccagcaaccccgtaggtccaagacagagatgccagaaggagtttcagcaatcacaacacctaagagcttgccagagatggatgagcaagcaaatgaggcaaggacgtggtggtggtccttccctcgacgatgagttcgatttcgagggcccccagcagggataccagctactccagcagtgctgcaacgagcttcgccaggaagagccagtttgcgtttgccccaccttgaaacaagctgccagggcagtta

SEQ ID NO: 146778 - DNA, 480 bp, Arabidopsis thaliana
ctacacaccactcgtactcctctctttcttgttctcgacgaacacaccgcagatctgttccctgaagccggctcttacagcgacgtcgtcgtcggagttctcgataccggagtttggcccgagagtaaaagctactccgacgaaggattcggtcctattccttcctcctggaaaggcggatgcgaggccggaaccaatttcaccgcttctctctgtaaccgtaaactaatcggagcaagattcttcgctcgtggttacgaatcaacgatgggaccaatcgatgaatctaaagaatcaagatctcctagagacgacgacggtcacggaactcacacctcatcgaccgccgctggatccgtcgttgaaggagctagcttattaggctacgcttcaggaacagctcgtggtatggctccacgcgctcgtgtcgcttgttacaaaagtctgtggcttcgtggggtgttcagctcagatatttta

SEQ ID NO: 146779 - DNA, 411 bp, Arabidopsis thaliana
atcaaactcaatttcttctcaacgatccctaatgtcctattaatcggatgcagtttcttcttcggagactaatcgaatcgcaatggctaagagttccttcaagatctctaaccctctcgaggcaaggatgagtgaatcttctcgaatcagagagaagtaccctgacagaattcccgcgattgtggagaaggctggacaaagtgatgttcctgacattgacaagaagaagtatcttgtaccagctgatctaacagtgggacaatttgcatacgtggttcgtaaaagaatcaagcttggagctgagaaagctatttttgtctttgttaagaacacattgcctccaactgctgcattgatgtctgcgatctatgaagaacacaaagatgaggatgggttcctctacatgactta

SEQ ID NO: 146780 - DNA, 481 bp, Arabidopsis thaliana
  unsure (1)..(481): unsure at all n locations
ctttgtccgtttggttagccaaacgcgggcggtgnttttgatcgttgggcttcgattatcaaggaatagagactttacaaataaagcccgaagattggcattctattgctgtaattttatatgtatatggttacaattatttacgttcgcaatgtgcctatgatgtggcaccaggtggcctcttagccagcgtgtatcatcttacgagaatagaatatggtgttaatcaagcggaagaagtctgcataaaagtatttactcacaggagtaatcctagaattccatccgttttctgggtttggaaaagtacggattttcaagaacgggaatcttatgatatgttaggaatcacttatgatagccatccacgactgaaacggatcctaatgcccgagagttggatagggtggcctttacgtaaggattatattgcccccaatttttatgaaatacaagatgcttattgaatgataaaaaatga

SEQ ID NO: 146781 - DNA, 464 bp, Arabidopsis thaliana
  unsure (1)..(464): unsure at all n locations
cgtctctcagccctccgngtatctattcgtcttatcgttttggtgcttccacagnggaacgcaaacgcgaacgctattctttacgtgacagacggggaagcccaaatccagatcgtaaacgacaatggtaacagagtgtttgacggacaagtctctcaaggacagctcatagccgtaccacaaggtttctcggtggtgaaacgcgcaacaagcaaccgattccagtgggttgagttcaaaacaaacgctaacgcgcaaatcaacactctggcgggacgaacctcagtcttgagaggtttaccacttgaagtcataaccaatgggttccaaatctcacccgaagaagcaaggagggtcaagttcaacacgctcgagaccactttgactcacagcagtggcccagctagctacggaaggccaagagtggctgcagcttaagagcttaaaaccgcggcttaacaatg

SEQ ID NO: 146782 - DNA, 419 bp, Arabidopsis thaliana
  unsure (1)..(419): unsure at all n locations
acgcgtncgaattaactaacaacaaanggcgaacatgctttttctttgntgtgcagcncncgcccngnggggcatgcgcaccaacgcttgcggctatggcacggttgtcgagttcgacgaagatgacgccagtaaccccataggcccaatacagaaatgtcagaaggagtttcagcaagaacagcacctaagagcttgccagagatggatgcgcaagcaaatgtggcaaggacgtggtggtggtccttccctcgacgatgagttcgatatggaagacgacatcgagaacccgcagagacgacagctactccagaagtgctgcagcgagcttcgccaagaagagccagattgcgtttgccccaccttgagacaagctgccaaggccgttagatttcagggacagcaacaccaaccagagc

SEQ ID NO: 146783 - DNA, 363 bp, Arabidopsis thaliana
tgaggtaggaagagaattattaaatgtttcattgaatactgagagatcacgaggctgatggatgggaacgttctgatttcccaatcatctgtgagtcttgtctcggtgacaatccttacgtgagaatgacaaaggcgaattatgataaagagtgtaagatctgcaccagacctttcaccgttttcagatggcgacctggcagggatgcgaggtacaagaagactgaagtttgtcagacatgttgcaagttgaagaatgtgtgccaagtttgtctcttgggatcttgagtatggtcttccagttcaggttagagacacggcgctcaacattagtactcatgattctatcccaaaaagtgatgtg

SEQ ID NO: 146784 - DNA, 433 bp, Arabidopsis thaliana
gcaccaccaggaccagaaaaactggtggagcgtgtttttttcacaggtcatagctcaagcatggaaaattgacgttcagttggctcagcagcttcagaaccaacaagacagcagaggaaacatcgttcgtgttaagggacctttccaggtcgtgaggccacctctaagacagccctacgagagcgaggagtggagacacccacgtagcccacagggcaacggccttgaggagactatctgcagcatgaggtcccacgagaacattgacgaccctgctcgtgctgacgtgtacaagcccagcctaggtcgcgtgaccagcgtcaacagctataccttgcccatcttggagtatgtcaggctcagtgccactcgtgggcgtcttcagggtaatgcgatggtgctttctaaatacaacatgaacgctaacgagatc

SEQ ID NO: 146785 - DNA, 386 bp, Arabidopsis thaliana
  unsure (1)..(386): unsure at all n locations
aacaaaagtctctctctctcgatcttctccgtatcgtgctccttncagatttaaccggaaaagttgaatcacactggcgcatctctcacagtcgtcggagaagaatgcacggtcgtccaaggaatgcttctaagccagaagaggaagcagcttcagctgctaaagctgttcagcttcgctctctccagtctcagtttatgacgaatcatcacgataaaatttataccaatgaagctattgagttaagcacgaagcttctagaaatcaatccggaggcgtacaccgcatggaactaccggaagcttgctgtggaggatcgccttgccagaattgagcctgatccaaacttggtcagcgcaattcttgatgaagaactcagagtggta

SEQ ID NO: 146786 - DNA, 360 bp, Arabidopsis thaliana
  unsure (1)..(360): unsure at all n locations
atacacacatagcaaaaaatggcattcatgttgnttctcgnctgcgcagctctcgctctctgcttcctcctcaccaacgcttgcatctaccgcaccgtcgttgagttcgaagaagatgacgccactaaccccataggcccaaaaatgaggaaatgccgcaaggagtttcagaaagaacaacacctaagagcttgccagcaattgatgctccagcaagcaaggcaaggccgtagcgatgagtttgatttcgaagacgacatggagaacccacagggacaacagcaggaacaacagctatttcagcagtgctgcaacgagctttgccaggaagagccagattgtgtttgccccaccttgaaa

SEQ ID NO: 146787 - DNA, 407 bp, Arabidopsis thaliana
  unsure (1)..(407): unsure at all n locations
cacaaacacacacagatctcttcttcatcacattacttttggctttacatcttttttcttctccatgaggaaagggagaggctcttccgtcgttggacccgcccttccagtaaccgccggtggatctgtgaaggagccgaggtatagaggcgttaggaagagaccttggggtcgattcgcagctgagatccgtgatccattaaaaaaatctcgtgtctggctcggtactttcgattccgccgtagatgctgcacgcgcttacgataccgccgcacgtaacctncgtggtccaaaggccaagaccaatttcccgatcgattgttctccttcttcttcttttcaacctctcacctacctncacaatcaaaacctttggtcttcttccggtgattcagaaccagatcgat

SEQ ID NO: 146788 - DNA, 374 bp, Arabidopsis thaliana
aacgatttacgaatccagatttgttgaatcggtacattttgactccgttaatgttggctgcgatgtatggaagaatctcttgtgtgaagaagctagctgaagttggagctaatattttgatgtttgattctgtgaatcgaagaacatgtttgcattacgctgcttattatggacatgctaattgtgttcaagctattctctctgctgctcaatcaagtcctgttgctgtccattggggatatgcgagatttgtgaacataagagatgataaaggagcgactccgttgcatttagctgctcgacagagacgacctgaatgtgtgaatgttttgttggatagtggttctcttgtttgtgcatctactagtgtatat

SEQ ID NO: 146789 - DNA, 496 bp, Arabidopsis thaliana
  unsure (1)..(496): unsure at all n locations
cggaanngacccacgcgtccgcgcacgagaacattgacgaccctgctcgngcggtcgtgtataagtccagcctaggncgcgtgaccagcgtgaacagctatacctggcccatcttggagtatgtcaggctcagtgccactcgtggcgttctccagggtaatgcgatggtgcttcctaaatacaacatgaacgctaacgagatcttgtactgcactggaggacaaggaaggatccaagtggtcaacgacaacggacagaacgtgttggaccaacaggtgcagaagggacagctcgtggtcatcccacaagggttcgcatacgttgtccagtcccacggaaacaagttcgagtggatctctttcaaaactaatgaaaacgcaatgatcagcactttggcgggtagaacctctctcttgagggcattgccattggaggtcatatcaaatgggttccagatctctcccgaggaagctaggaagatcaagttcaacacact

SEQ ID NO: 146790 - DNA, 380 bp, Arabidopsis thaliana
gcccacagggcaacggccttgaggagactatctgcagcatgaggtcccacgagaacattgacgaccctgctcgtgctgacgtgtacaagcccagcctaggtcgcgtgaccagcgtcaacagctataccttgcccatcttggagtatgtcaggctcagtgccactcgtggcgttctccagggtaatgcgatggtgcttcctaaatacaacatgaacgctaacgagatcttgtactgcactggaggacaaggaaggatccaagtggtcaacgacaacggacagaacgtgttggaccaacaggtgcagaagggacagctcgtggtcatcccacaagggttcgcatacgttgtccagtcccacggaaacaagttcgagtggatc

SEQ ID NO: 146791 - DNA, 448 bp, Arabidopsis thaliana
  unsure (1)..(448): unsure at all n locations
ctcagcaatatcctcgttgcaacctncgggggtcnccttgtccttaacggctgccttgcgaggcagncacttggggttcctcctcagctacagaacgagtgtaacctcgacaacctagatgttctccaagccaccgaaactatcaagagtgaagccggtcagatcgagtactgggaccacaaccaccctcagctccgatgtgttggtgtttccgttgctcgttatgtaattgaacaaggcggtctttacttgcccaccttcttcacttncccaaaaatttcctacgtcgttcaaagaacgggtatcagcggaagagtggtccctggatgtgccgagaccttcatggactcgcagccgatgcaagggcaacaacaaggccaaccatggcaaggacgacagggacaacaaggccaaccatgggaaggacagggacaacaaggacaacaag

SEQ ID NO: 146792 - DNA, 475 bp, Arabidopsis thaliana
aacaaaaagaaaatggttaagctcattttatctttcgttgcaaccttcggggttctcctcgtccttaacggctgccttgcgaggcagtcacttggggttcctcctcagctacagaacgagtgtaacctcgacaacctagatgttctccaagccaccgaaactatcaagagtgaagccggtcagatcgagtactgggaccacaaccaccctcagctccgatgtgttggtgtttccgttgctcgttatgtaattgaacaaggcggtctttacttgcccaccttcttcaacttcccaaaaattttctacgtcgttcaaggaacgggtatcagcggaagagtggtccctggatgtgccgagaccttcatggactcgcagccgatgcaaggacaacaacaaggccaaccatggcaaggacgacagggacaacaaggccaaccatgggaaggacagggacaacagggacaacaaggaagac

SEQ ID NO: 146793 - DNA, 403 bp, Arabidopsis thaliana
ctgacgtgtttcccttcttcggtttcttacctcacgtccgccggatttcgaggaaacgaagaagaagaagaagaacaacaacaaaagccttttgagatatggacagcttctggcaattaggtgatgagctacgaggtcagacgagagcatcagaggatcacaaatggtctactgttgcaacgaagctagctgagcaaactagaatgaaaggggagaggatgaacaatcttgatctctccaaaggttacactgagtttagaccaagtgagaaattcagtttccaggagaacaatcttaacttcaacatgttgaatttggatggtaaatttggtgaaagcatcatggggaagacttcgatgcagagcaatgtttataatatgaatactgtttttcagaagaatga

SEQ ID NO: 146794 - DNA, 406 bp, Arabidopsis thaliana
  unsure (1)..(406): unsure at all n locations
agaggaagaaaaatgggtcgagtctcttttattanctctttctctttgacactcttgatcctcttcaatggctacactgcccaacagtggcccaacgagtgccagctcgatcaactcaatgcgctcgaaccatcccaaatcatcaagagcgagggtggtcgcatcgaggtctgggaccaccatgcaccccagctccgttgctccggctttgcctttgagcgtttcgtcattgagcctcagggtcttttcttgcccactttcttgaacgccggcaaactcacgtttgttgttcacggaaggggtctaatgggaagagttattccgggatgcgccgagacgttcatggagtcaccggtatttggagaaggtcaaggtcagggtcagagtcaaggttccggacatgcac

SEQ ID NO: 146795 - DNA, 397 bp, Arabidopsis thaliana
gccggaacaacagctattccagttgtgctgtatcgagcttcgccaggaagagccagattgtgtttgtcccaacttgaaacaagctgtcaaggacggtagactccagggacagcaccaaccaatgcaagtcaggaaaatttaccagacagccaagcacttggccaacgtttgcgacataccgcaagttgatgtttgtgccttcaacattccttcattccctgctttgtactaaatctcaaacaaaccctcaaagcgtatgagagagcggacgttgacatctacatgttgacacttgacacataccacacctcatcgtgtgttttatgataaatgtaagcttttggatgcttgagggtaacgtgagcactacttaataaataagcagtgttcggtattt

SEQ ID NO: 146796 - DNA, 393 bp, Arabidopsis thaliana
  unsure (1)..(393): unsure at all n locations
caaaaagaaanaggnaagcnctttaactccnttttgcaacccncggggttctcctcgtccttaacggctggcgtgcgaggcactcacttggggttcctcctcagctacagaacgagtgtaacctcgacaacctagatgttctccaagccaccgaaactatcaagagtgaagccggtcagatcgagtactgggaccacaaccaccctcagctccgatgtgttggtgtttccgctgctcgntatgtaattgaacaaggcggtctttacttgcccaccttcttcacttccccaaaaatttcctacgtcgttcaaggaacgggtatcagcggaagagtggtccctggatgtgccgagaccttcatggactcgcagccgatgcaaggacaacaacaag

SEQ ID NO: 146797 - DNA, 426 bp, Arabidopsis thaliana
  unsure (1)..(426): unsure at all n locations
accagcttgaccgcaacccaagtgttntttatttagccggaaacaacccacaaggtcaagtatggctacaaggacgagagcaacagccacagaagaacatcttcaatggatttggacccgaggttattgctcaagctttgaagattgatcttcagacagcgcagcaacttcagaaccaagatgacaaccgtggaaacattgtccgagtccaaggcccgttcggtgtcattaggccgcctttgaggggccagagacctcaggaggaggaagaagaagaagaaggacgacacggacgacacggtaatggcttagaggagaccatctgcagcgccaggtgcaccgataacctcgatgatccgtctcgtgctgacgtgtacaagccacagctcggttacatcagcactctcaacagttacgatcttccca

SEQ ID NO: 146798 - DNA, 431 bp, Arabidopsis thaliana
  unsure (1)..(431): unsure at all n locations
cacaaacgagtaagaatacaaanacatatagcatatttttggcaaacaagctcttcctcgggtgcgcaactttcgccctctggttcctcctcaccaacgcttccatctaccgcactgttgtcgagttcgacgaagatgacgccagcaaccccatgggcccaagacagaaatgtcagaaggagtttcagcaatcacagcacctaagagcttgccagaaattgatgcgcatgcaaatgaggcaaggccgtggtggtggtccctccctcgacgatgagttcgatttggaagacgacatcgagaacccacaaggcccccagcagggacaccagatcctccagcagtgctgcagcgagctttgccaggaagagccaatttgttgttgccccaccttgagacaagctgccagggccggtagccttcaaggacaacac

SEQ ID NO: 146799 - DNA, 413 bp, Arabidopsis thaliana
agaaaaatgggtcgagtctcatctattatttctttctctttgacactcttgatcctcttcaatggctacactgcccaacagtggcccaacgagtgccagctcgatcaactcaatgcgctcgaaccatcccaaatcatcaagagcgagggtggtcgcatcgaggtctgggaccaccatgcaccccagctccgttgctccggctttgcctttgagcgtttcgtcattgagcctcagggtcttttcttgcccactttcttgaacgccggcaaactcacgtttgttgttcacggaagggggctaatgggaagagttattccgggatgcgccgagacgttcatggagtcaccggtatttggagaaggtcaaggtcagggtcagagtcaagggtttcgtgacatgcaccagaaagtaga

SEQ ID NO: 146800 - DNA, 371 bp, Arabidopsis thaliana
cccacgcgtccggaagcaagctttcttttatactctaaatacatggtattgattgtgcaaaagtaaattctacttgtagatgctactaaaaggttccaggcaatcaaagcctggtggcaggacatggccaaccaaaatcacatttctgttggaaaagctaatagccatactctgcaaggctccttgtctagaaaatgcaccacggattcccaacgaggtaattcaagttccatatctacccttctcaagttttacatcataagcttgttttcgatacccatcaccttttcatgatctgactcttatagatgtcacttgattgtattactgtattttgattcggtgattatttatctactttttggtacttg

SEQ ID NO: 146801 - DNA, 413 bp, Arabidopsis thaliana
  unsure (1)..(413): unsure at all n locations
agaagataaaaatggctcgagtttctactcntctttctttctccttaacacttttgatccttttccatggctacgcggctcaacagggtcagcagggtcagcagtttccgaacgagtgccagctcgaccagctcaatgcgctcgagccttcacacgtactgaagagcgaggctggtcgcatcgaggtgtgggaccaccacgctcctcagctccgttgctcaggtgtctcctttgcacgttacatcatcgagtctaagggtctctacttgccctctttctttaacaccgcgaagctctccttcgtggctaaaggacgaggtcttatgggaaaagtgatccctggatgcgccgaaacattccaagactcatcagagttccaaccacgcttcgaaggtcaaggtcaaagccagagg

SEQ ID NO: 146802 - DNA, 427 bp, Arabidopsis thaliana
agagaagaaagatagagaaaaattttggtagtcaaaggtgtgatgatggtggcgatactttgcctttgggcactctctgcaacatctgaagcagtaacagaggctgagccaggtttgatgatgaacttctacaaggacacgtgtcctcaggccgaagacatcgtccgtgaacaagtcaaactcctctacaaacgccacaagaacaccgctttctcttggctccgtaacatcttccatgactgcgccgttgagtcatgtgatgcgtcgcttttgctggattcgacaagaagagagctaggagagaaagaacacgacaggagcttcggacttagaaactttaggtacatcgaggagatcaaggaagctctcgagagggagtgtcctggtgttgtctcatgttctgacattctcgtcttgtccgcaagag

SEQ ID NO: 146803 - DNA, 428 bp, Arabidopsis thaliana
  unsure (1)..(428): unsure at all n locations
caaaaagaaaatggntaagctcagcaaataccttgatgcaacctncggggnnctcctcggccttaacggctgccttgcgaggcagacacttggggttcctcctcagctacagaacgagtgtaacctcgacaacctagatgttctccaagccaccgaaactatcaagagtgaagccggtcagatcgagtactgggaccacaaccaccctcagctccgatgtgttggtgttttcgttgctcgttatgtaattgaacaaggcggtctttacttgcccaccttcttcacttccccaaaaattttctacgtcgttcaaggaacgggtatcagcggaagagagggccctggatgtgccgagacccttatggactcgcatgccgtgcaaggacaacaacatggccaaccatggcaaggactacagggacaacaag

SEQ ID NO: 146804 - DNA, 422 bp, Arabidopsis thaliana
  unsure (1)..(422): unsure at all n locations
ggaagaaaaatgggtcgagtctttctttatctctttctctntgacactcttgatcctcttcaatggctacactggccaacagtggcccaacgagtgccagctcgatcaactcaatgcgctcgaaccatcccaaatcatcaagagcgagggtggtcgcatcgaggtctgggaccaccatgcaccccagctccgttgctccggctttgcctttgagcgtttcgtcattgagcctcagggtcttttcttgcccactttcttgaacgccggcaaactcacgtttgttgttcacggaaggggtctaatgggaagagttattccgggatgcgccgagacgttcatggagtcacccggtatttggagaaggtcaaggtcagggtcagagtcaagggttccgtgacatgcaccagaaagtagagcaccta

SEQ ID NO: 146805 - DNA, 424 bp, Arabidopsis thaliana
caaaaagaaaatggttaagctctttaactcctcgttgcaaccttcggggttctcctcgtccttaacggctgccttgcgaggcagtcacttggggttcctcctcagctacagaacgagtgtaacctcgacaacctagatgttctccaagccaccgaaactatcaagagtgaagccggtcagatcgagtactgggaccacaaccaccctcagctccgatgtgttggtgtttccgttgctcgttatgtaattgaacaaggcggtctttacttgcccaccttcttcacttccccaaaaatttcctacgtcgttcaaggaacgggtatcagcggaagagtggtccctggatgtgccgagaccttcatggactcgcagccgatgcaaggacaacaacaaggccaaccatggcaaggacgacagggacaac

SEQ ID NO: 146806 - DNA, 432 bp, Arabidopsis thaliana
  unsure (1)..(432): unsure at all n locations
cagcaacttcagaaccaagatgtctaccttggaaacattgnccgagtccaaggcccgttcggtgtcattaggccgcctttgaggggccagagacctcaggaggaggaagaagaagaagaaggacgacatggacgacacggtaatggcttagaggagaccatctgcagcgccaggtgcaccgataacctcgatgacccgtctcgtgctgacgtgtacaagccacagctcggttacatcagcactctcaacagttacgatctccccatccttcgcttcatccgtctctcagccctccgtggatctatccgtcaaaacgcaatggtgcttccacagtggaacgcaaacgcgaacgctattctttacgtgacagacggggaagcccaaatccagatcgtaaacgacaatggttacagagtgtttgacggacaagtc

SEQ ID NO: 146807 - DNA, 381 bp, Arabidopsis thaliana
  unsure (1)..(381): unsure at all n locations
ggaannccggggcgacccacgcgnccgagggacaacaaggaagacaaggccattttgtaaatgtcagggacaacagggacaacaagggcgacattgacaacaagggcggccacgccaaggacagggacagcagggacaacaagggnnccgngacangcaccagaaggnggaacaagngagacgcggagacgncnnngccaacacnccaggcgcggcccacnggagcnacaacncaggagaacagccacnnggcaacaacgcacnncncgacaacgccaacgaccaaaaccaacncgaccgcaacccaagagngggccaagnggccggaaacaaccagcagggaggcnnnggcggnncacagcaacaacaagaacagaaaaa

SEQ ID NO: 146808 - DNA, 98 bp, Arabidopsis thaliana
  unsure (1)..(98): unsure at all n locations
acagaacgagaggaaccacgacaacccagaaggacnccaagccaccgaaacaaacaagagcgaagccggacagaacgaggacagggaccacaaccacc

SEQ ID NO: 146809 - DNA, 442 bp, Arabidopsis thaliana
tacacacatagcaaaaaatggcaaacaatgtggtcctcgtctgcgcagctctcgctctctggttccttctcaccaacgcttggatctaccgcaccgtcgttgagttcgaagaagatgacgccactaaccccataggcccaaaaatgaggaaatgccgcaaggagtttcagaaagaacaacacctaagagcttgccagcaattgatgctccagcaagcaaggcaaggccgtagcgatgagtttgatttcgaagacgacatggagaacccacagggacaacagcaggaacaacagctattccagcagtgctgcaacgagcttcgccaggaagagccagattgtgtttgccccaccttgaaacaagctgtcaaggccgttagactccagggacagcaccaaccaatggcagtcatgaaaattaccaggcagccaagctcttgccc

SEQ ID NO: 146810 - DNA, 408 bp, Arabidopsis thaliana
  unsure (1)..(408): unsure at all n locations
cgcagagaggagaaacctgccccnnatttcnctaatgtcaaggagnnnctgagacaaaagcgtatcgtaatggaggttattggtcaaatggaatactcaaggaagattagcccaggagatggtgttactacttctggagctggtgatagggtcatggatttcggctcagtgttccttccatctcctaccaagggtgatacagctgtagcagctgcagcaactcctggaacgaatattgctgaactcattatttcccgtggcttagggactgtggttcgacatcgtgactttgaagagaggtcgaaccattatgacgctctcctggctgctgaagctcgtgctattgcttggaagaagaatatccattctgcaaaggattcttcagccctacacattgcagacctgact

SEQ ID NO: 146811 - DNA, 417 bp, Arabidopsis thaliana
  unsure (1)..(417): unsure at all n locations
aacaaaaagaaaatggttaagctcagcatttctttcgttgcaaccttcggggntctcctcggccttaacggctgccttgcgaggcagtcacttggggttcctcctcagctacagaacgagtgtaacctcgacaacctagatgttctccaagccaccgaaactatcaagagtgaagccggtcagatcgagtactgggaccacaaccaccctcagctccgatgtgttggtgtttccgttgttcgttatgtaattgaacaaggcggtctttacttgcccaccttcttcacttccccaaaaatttcctacgtcgttcaaggaacgggtatcagcggaagagtggtccctggatgtgccgagaccttcatggactcgcagccgatgcaaggacaacaacaaggccaaccatggcaaggacga

SEQ ID NO: 146812 - DNA, 442 bp, Arabidopsis thaliana
  unsure (1)..(442): unsure at all n locations
cgagagcgaggagnggagacactttgaatcctcacagggcaacggccttgaggagactatctgcagcatgaggtcccacgagaacattgacgaccctgctcgtgctgacgtgtacaagcccagcctaggtcgcgtgaccagcgtcaacagctataccttgcccatcttggagtatgtcaggctcagtgccactcgtggcgttctccagggtaatgcgatggtgcttcctaaatacaacatgaacgctaacgagatcttgtactgcactggaggacaaggaaggatccaagtggtcaacgacaacggacagaacgtgttggaccaacaggtgcagaagggacagctcgtggtcatcccacaagggttcgcatacgttgtccagtcccacggaaacaagttcgagtggatctctttcaaaactaatgaaaacgcaatgatcagc

SEQ ID NO: 146813 - DNA, 414 bp, Arabidopsis thaliana
  unsure (1)..(414): unsure at all n locations
ggttaagctcagcaatctcctctttgcatccttcgggggnctcctcgtccttaacgggtgccttgcgaggcagtcacgttggggttcctcctcagctacagaacgagtgtaacctcgacaacctagatgttctccaagccaccgaaactatcaagagtgaagccggtcagatcgagtactgggaccacaaccaccctcagctccgatgtgttggtgtttccgttgctcgttatgtaattgaacaaggcgggctttacttgcccaccttcttcacttccccaaaaatttcctacgtcgttcaaggaacgggtatcagcggaagagtggtccctggatgtgccgagaccttcatggactcccagccgatgcaaggacaacaacaaggccaaccatggcaaggaccacagggacaac

SEQ ID NO: 146814 - DNA, 443 bp, Arabidopsis thaliana
  unsure (1)..(443): unsure at all n locations
cgctgagagacatggngnncaagngatttgggtactttagaaagggnngaatccactctccggttctgatctcatctttacttccccttacatgtccacagctgtcaaaactggcctcatcactggcatcattgctctcgctgaaggaatagcagtggggaggagttttgcgatgttcaagaactacaacatagacgggaacaaagagatgatagcgtttggaatgatgaaccatcgtggttccttcacatcttgttacctcacaaccggaccattttcaaggtcggcagtgaactacaacgcgggttgcaagaccgcaatgtccaacatagtgatggcgattgcggttatgttcacactcctcttcctcacaccgctttttcactacacaccactcgtcgtcctctctgccatcatcatatccgcaatgctcggactcattg

SEQ ID NO: 146815 - DNA, 426 bp, Arabidopsis thaliana
  unsure (1)..(426): unsure at all n locations
aacaaaaagaaaaggntaagctttcattcttctcgtgcaaccttcggggttctgctcgttcttaacggctgccttgcgaggcagtcacttggggttcctcctcagctacagaacgagtgtaacctcgacaacctagatgttctccaagccaccgaaactatcaagagtgaagccggtcagatcgagtactgggaccacaaccaccctcagctccgatgtgttggtgtttccgttgctcgttatgtaattgaacaaggcggtctttacttgcccaccttcttcacttccccaaaaatttcctacgtcgttcaaggaacgggtatcagcggaagagtggtccctggatgtgccgagaccttcatggactcgcagccgatgcaaggacaacaacaaggccaaccatggcaaggacgacagggacaacaa

SEQ ID NO: 146816 - DNA, 427 bp, Arabidopsis thaliana
ctcagggtcttttcttgcccactttcttgaactccggcaaactcacgtttgttgttcacggaaggggtctaatgggaagagttattccgggatgcgccgagacgttcatggagtcaccggtatttggagaaggtcaaggtcagggtcagagtcaagggttccgtgacatgcaccagaaagtagagcacctacggtgcggtgacaccattgcaacaccatctggtgtagctcaatggttctacaacaatggaaatgagcctctcattcttgttgcagccgcggatctcgccagcaaccagaaccagcttgaccgcaaccttagaccatttttgatagccggaaacaacccacaagggcaggaatggctacaaggccgaaagcaacagaagcaaaacaacatcttcaatggcttcgcacctgagatctt

SEQ ID NO: 146817 - DNA, 394 bp, Arabidopsis thaliana
ctcgatcaactcaatgcgctcgaacctacctatatcatcaagagcgagggtggtcggattgaggtctgggaccaccatgcaccccaactccgttgctccggctttgcctttgagcgtttcgtcattgagcctcagggtcttttcttgcccactttcttgaacgccggcaaactcacgtttgttgttcacggaaggggtctaatgggaagagttattccgggatgcgccgagacgttcatggagtcaccggtatttggagaaggtcaaggtcagggtcagagtcaagggttccgtgacatgcaccagaaagtagagcacctactgtgcggtgacaccattgcaacaccatctggtgtagctcaatggttctacaacaatggaaatgagcctttca

SEQ ID NO: 146818 - DNA, 372 bp, Arabidopsis thaliana
tttgcgaggcggccaccttccgatcctcctcagctacagaacgagtgtaacctcgacaacctagatgttctccaagccaccgaaactatcaagagtgaagccggtcagatcgagtactgggaccacaaccaccctcagctccgatgtggtggtgtttccagtgctcgctatgtaattgaacaaggcggtctttacttgcccaccttcttcactttcccaaaaatttcctacgtcgttcaaggaacgggtatcagcggatgagtggtccctggatgtgccgagacctttatggactctgagtcgatgcaaggacaacaactaggccaaccatggcatggacgacagggacatcatgggcaaccatgggaagga

SEQ ID NO: 146819 - DNA, 441 bp, Arabidopsis thaliana
  unsure (1)..(441): unsure at all n locations
ccacgcgnccggcaacaacaagaacagaaaaacnngngatgcgttttcgacgcacaggncanaacnggagcagggaaaattgacgggcggccggcccatcagcaccagaaccaacaagacagcagaggaaacagcgggcgaggcaagggacctttccagggcgggaggccacctctaagacagccctacgagagcgaggagtggagacacccacggagcccacagggcaacggccttgaggagacaatccgcagcatgagggcccacgagaacagagacgaccctgctcgtgcggacgtgtacaagcccagcctaaggcgcgagaccagcgccaacagcaataccacgcccaacatggagaaaggcaggctcagtgccacccgaggcggtccccagggaaatgcgaaggagcgccctaaaaacaacatgaacgccaacgag

SEQ ID NO: 146820 - DNA, 443 bp, Arabidopsis thaliana
  unsure (1)..(443): unsure at all n locations
caacaaacaaaaagaaaanggnnaagctttgctttcttctcgnngcaacctncggggggctgctcgttcttaacggctgccttgcgaggcagncacttggggttcctcctcagctacagaacgagtgtaacctcgacaacctagatgttctccaagccaccgaaactatcaagagtgaagccggtcagatcgagtactgggaccacaaccaccctcagctccgatgtgttggtgttttcgttgctcgttatgtaattgaacaaggcggtctttacttgcccaccttcttcacttccccaaaaatttcctacgtcgttcaaggaacgggtatcaacggaagagtgtgccctggatgtgccgagaccttcatggactcgcagcccgtgcatggacaacatacaaggccaaccatggctaggacgacagggacaacaaggccaccc

SEQ ID NO: 146821 - DNA, 437 bp, Arabidopsis thaliana
  unsure (1)..(437): unsure at all n locations
ccggaggagctcgatccattgattagaagatgacatctccacaagngaagaccgggttgttcgttgggttgaacaagggacatgttgttaccagacgtgaattagctcctcgtcctcgttctcgcaaaggaaaaacgagcaagaggacaatctttatcagaaacttgataaaggaagttgctggtcaagctccctatgagaagagaatcactgagcttttgaaggttggtaaagacaaacgtgctcttaaggttgctaagaggaagttgggaacccacaagagagccaagcgaaagagagaggagatgtccagtgttctccgcaagatgaggtctggcggtggtggtgcaactgagaagaaaagtgaacgtcatcttaagattgtgaatcgctcgtaaagagttatgggttcttgttgcaaaaacgttattatgatt

SEQ ID NO: 146822 - DNA, 440 bp, Arabidopsis thaliana
  unsure (1)..(440): unsure at all n locations
gactatctgcagagaggcttttagtactattgacgaccctgctcgtgctgacgtgtacaatcccagcctaggtcgcgtgaccagcgtcaacagctataccttgcccatcttggagtatgtcaggctcagtgccactcgtggcgttctccagggtaatgcgatggtgcttcctaaatacaacatgaacgctaacgagatcttgtactgcactggaggacaaggaaggatccaagtggtcaacgacaacggacagaacgtgttggaccaacaggtgcagaagggacagctcgtggtcatcccacaagggttcgcatacgttgtccagtcccacggaaacaagttcgagtggatctctttcaaaactaatgaaaacgcaatgatcagcactttggcgggtagaacctcgctcttgagggcattgncattggagggcatatcaa

SEQ ID NO: 146823 - DNA, 277 bp, Arabidopsis thaliana
  unsure (1)..(277): unsure at all n locations
ctcgccaaaaaccttgaaaccttnaaattttctttactatggctaagcncaaacncgggngcgcaacttttgccctcggcaggctcctagccaacgcatccatctaccgcacagtggtggagttcgaggaagatgatgacgtgagcaacccacaacaaggtaagtgccagagggagtttatgaagcatcagcaactaagaggttgcaagcaatggatccgcaagagagctcaacaaggaagaatcggatacgaagctgatgactttgagctcactct

SEQ ID NO: 146824 - DNA, 419 bp, Arabidopsis thaliana
cagaagttgcagagaaaagagtttaaatgattggtgtaatggagaaggcaggtcatttatccatcaaaaatggacccaaggttccaggagagccaacgaagaccggaacctccatggttgacacggcagcttcagccgtacaaagcttcgctccgattaaccaaatccaccaacatctctgcgcgtttcatttctatgcatatgacatgacccgacaagtggaggcacaccatttctgtggtcacatcaacgaagacatgcgccagtgtctgatctacgacggtcctgatgccaacgctcgtctgatcggtctggagtacattgtgacagagaagctctttatgacattgcctgacgatgagaagaagctttggcacactcacgagtgggaagttaaaggaggcttcttggtcatgccc

SEQ ID NO: 146825 - DNA, 97 bp, Arabidopsis thaliana
actgaatcgaagctactgaattgtaactgattcaaaaagaatcgaacaaaatcaaaaatttaaaaataattggatgtatactatattattatataac

SEQ ID NO: 146826 - DNA, 428 bp, Arabidopsis thaliana
  unsure (1)..(428): unsure at all n locations
aacaaacaaaaagaaaaggttatcnctgcattctcctcgttgcaaccttcggggtgtctccttgtccttaacggctgccttgcgaggcagtcacttggggttcctcctcagctacagaacgagtgtaacctcgacaacctagatgttctccaagccaccgaaactatcaagagtgaagccggtcagatcgagtactgggaccacaaccaccctcagctccgatgtgttggtgtttccgttgctcgttatgtaattgaacaaggcggtctttacttgcccaccttcttcacttccccaaaaatttcctacgtcgttcaaggaacgggtatcagcggaagagtggtccctggatgtgccgagaccttcatggactcgcagccgatgcaaggacaacaacaaggccaaccatggcaaggacgacagggaca

SEQ ID NO: 146827 - DNA, 146 bp, Arabidopsis thaliana
  unsure (1)..(146): unsure at all n locations
gccacaaggggcgcggcgggcaacggacaaaagnccnccgcggcccccccagccacccgcaaggcgaacaacgacannacnnccancacaagcaacggcggaagagnnaaccgcangcaggngnggcccccgangggaaagaagaa

SEQ ID NO: 146828 - DNA, 360 bp, Arabidopsis thaliana
  unsure (1)..(360): unsure at all n locations
catccatctttaccgcnnacagtggtggagtttcgatggatagatgtatgacgttgagcaactccacaacaagggtaaggtgccagagtggagtttatgatagcatcatgcaacataagagggttgcatagcaattggattccgcaagagtagctcaacaatggaagaatttggatacgaagcttgatgacttttgagctcactcttgatagtcgatcttgaggacgatgagaacccaatggggcctcaacaacagtcatctcttaaaatgtgttgtaatgaattaaggcaagtggacaagatgtgtgtgtgtcctacactgaaaaaggcggcttaacaagtcatatttcagggaatgca

SEQ ID NO: 146829 - DNA, 372 bp, Arabidopsis thaliana
  unsure (1)..(372): unsure at all n locations
gggtaagctcagcaatctccncgngcttccatggtgttcncccngccnaacggctggcttgctaggcagcacttggggttcctcctcagctacagaacgaggaacctcgacaacctagatgttctccaagccaccgaaactataagaggaagccggtcagatcgagtactgggaccacaaccaccctcagctccgatgtgttggtgtttcccgtgctcgttatgtaattgaacaaggcggtctttacttgcccaccttcttcacttccccaaaaatttcctacgtcgttcaaggaacgggtatcagcggaagagtggtccctggatgtgccgagacctttatggactcgcagccgatgccaggacaacatca

SEQ ID NO: 146830 - DNA, 386 bp, Arabidopsis thaliana
  unsure (1)..(386): unsure at all n locations
agaaaacatacacaaanagcaaaacatgtctttctatctcnnccncgncngcgcaactctcgccttcttcttcctcctgaccaacgcttccatctaccgcaccgttgtcgaattcgaagaagatgacgccagcaaccccgtaggtccaagacagagatgccagaaggagtttcagcaatcacaacacctaagagcttgccagagatggatgagcaagcaaatgaggcaaggacgtggtggtggtccttccctcgacgatgagttcgatttcgagggcccccagcaggggatccagctactccagcagtgctgcaacgagcttcgccaggaagagccagtttgcgtttgccccaccttgaaacaagctgccagggcagttagccttc

SEQ ID NO: 146831 - DNA, 109 bp, Arabidopsis thaliana
agctacagaacgagtgtaacctcgacaacctagatgttctccaagccaccgaaactatcaagagtgaagccgcgcagatcgagaacggggaccacaaccacccccagca

SEQ ID NO: 146832 - DNA, 266 bp, Arabidopsis thaliana
  unsure (1)..(266): unsure at all n locations
agaccaacttatattttnannnnnnggagcanangagaggcaaaggcacggnaaggcggacagggagagcnnnggaggaagagatcgaaganattggngggcaccngaacgcgtatacatcgagggaacagaccacttattatgctaaggttttggattccaatgngaaccaggctttggatgtcttggctgatatcctacagaattctaagttcgatgaacagagaattaaccgcgaacgagatgtcattcttagggaaatgcaa

SEQ ID NO: 146833 - DNA, 414 bp, Arabidopsis thaliana
  unsure (1)..(414): unsure at all n locations
aaanaacaaaanggctcgaggcttttctantttttctnncnncnnaacactggggagccttttccatggctacgcggctcaacagggtcagcagggncagcagtttccgaacgagtgccagctcgaccagctcaatgcgctcgagccgtcacacgtactgaagagcgaggctggtcgcatcgaggtgtgggaccaccacgctcctcagctccgttgctcaggtgtctcctttgcacgttacatcatcgagtctaagggtctctacttgccctctttctttaacaccgcgaagctctctttcgtggctaagggacgaggtcttatgggaaaagtgatccctggatgcgcccaaacattccaagactcattagagttccaaccacgcttcgaaagtcaaggtcaaagccagaggtt

SEQ ID NO: 146834 - DNA, 438 bp, Arabidopsis thaliana
  unsure (1)..(438): unsure at all n locations
ggaagaaaaatgggtcgaggcttttcnattatctcttncncnnngacactcttgatgctcttttatggctacactggccaacagtggcccaacgagtgccagctcgatcaactcaatgcgctcgaaccatcccaaatcatcaagagcgagggtggtcgcatcgaggtctgggaccaccatgcaccccagctccgttgctccggctttgcctttgagcgtttcgtcattgagcctcagggtcttttcttgcccactttcttgaacgccggcaaactcacgtttgttgttcacggaaggggtctaatgggaagagttattccgggatgcgccgagacgttcatggagtcaccggtatttggagaaggtcaaggtcagggtcagagtcaagggttccgtgacatgcaccagtaagtagagcacctacggtgcggggacacc

SEQ ID NO: 146835 - DNA, 409 bp, Arabidopsis thaliana
  unsure (1)..(409): unsure at all n locations
agaacacacaaatggcacctgtattanctcctaccagatcacaccacgtggcggttatcggtgctggacctgcaggtctagtagcggcacgagagcttcgacgagaaggtcactcggtggtcgttttcgagaaacaaaaacaagtcggaggaacctggatctacaccgatgaagtcgaatcggatccgttaagtgttgacccgacccgatccgttgttcattcaagcgtctatagatctctacgaatcaacggtacacgagagtgtaccggatacagagatttcccgttcgtggttcgttccggtgtgtctagagatccgaggaggtttccgagtcatggcgaagttttggcgtatttgaaagatttcgctaaggagtttgggattgaggagatggttagggttgagac

SEQ ID NO: 146836 - DNA, 387 bp, Arabidopsis thaliana
  unsure (1)..(387): unsure at all n locations
gaaagcagcacgaacaccaacttttaataatatacatctaagnnatggttaagtaattgcatgcaatttaaagctacgtgtccagcttaagacactcaagtctcacatctgtccctttttacttcgacttcgcttcttttggcttcttttaaactctctctatctctctctttcttcttcacactttgttgttaatttcaagtgtttgatcataatggcaacatcagctcgtagagcatacggtttcggtagagccgatgaggctacacaccctgactccattagagcaactttagctgagtttctctccacttttgtcttcgtctttgcagctgaaggctctatcctctctctcgataagttgtattgggaacatgcggctcatgc

SEQ ID NO: 146837 - DNA, 323 bp, Arabidopsis thaliana
  unsure (1)..(323): unsure at all n locations
gaaaacagcgcgacccacgcgaccgggccaacaaggccaaccangggaaggatagatacagcagggacaacaaggnaaccgagaggggcaccagaaggnggagcaggccacacacggagacgncnnngccaacacaccaggcacagcccacaggagccacaacncaggagaacagccacaagacaacaacgcacagaacgacaacgccaaccaccaaaaccaacacgaccgcaaccccagagngagccaacnggccggaaacaaccagaagggaggcacnggcgggccacagcaacaacaagaacagaaaaccgggggagcgg

SEQ ID NO: 146838 - DNA, 379 bp, Arabidopsis thaliana
  unsure (1)..(379): unsure at all n locations
caacaaacaacaagagagccgngnnngttacttgatttatncnncncncaagcacggggaaggtctctctcttttccgacgggcctcccccaaatccattctttctagggttcgatctccctctctcaatcatgaaccttcttctcttctagaccccacaaagtttcccccttttatttgatcggcgacggagaagcctaagtctgatcccggaatgtctgtctccgagctcaaagaacgccacgccgtcgctacggagaccgttaataacctccgagaccagcttagacagagacgccttcagctcctcgataccgatgtggcgaggtatttaatcgtcgcaaggacgtactcgggtgagcttctgagcaacggatct

SEQ ID NO: 146839 - DNA, 410 bp, Arabidopsis thaliana
  unsure (1)..(410): unsure at all n locations
ctcgattaagcttgaactnggaggatctttggtcttcgttcgcacacactcncaccagcttgaagtgcaccctcaacgccagcatgaaggaggcatcaaagtcctttatcctcagagtggcccttcttccactcaggtgctagccgtgtttgtcggtgtaccgataggaggaacgctgctgactatagccggtttgacattagccggttcggttataggactaatgctagcattcccgttgttctcatctttagtcccggtattgtaccagcagcctttgtcatcggtctagctatgactggattcctggcttcaggggccataggtctcaccggactatcatccatgtcgtgggtactcaactacattcgccgggccgggcagcatatcccggaggagcttgaggaagc

SEQ ID NO: 146840 - DNA, 411 bp, Arabidopsis thaliana
  unsure (1)..(411): unsure at all n locations
caaaaccaactcgaccgcaacccnagtttgnatcatttggccggaaacaaccagcagggaggctttggcggnncacagcaacaacaagaacagaaaaactngnggagcgggnncgacgcacaggncatagctcaagcattgaaaattgacgttcagttggctcagcagcttcagaaccaacaagacagcagaggaaacatcgttcgtgttaagggacctttccaggtcgtgaggccacctctaagacagccctacgagagcgaggagtggagacacccacgtagcccacagggcaacggccttgaggagactatctgcagcatgaggtcccacgagaacattgacgaccctgcttgtgctgacgtgtacaagcccagcctatgtcgcgtgaccagcgttaacagctatacc

SEQ ID NO: 146841 - DNA, 442 bp, Arabidopsis thaliana
  unsure (1)..(442): unsure at all n locations
gttgaattcagaaatggaggttttgnatactctcaagctctcatcgncgntatctccttccatcatcaaacttcagggttcttcatcaagtattgatataaaattctctaagtacacttcacttcctaaaccgtttcttcaacttgatgataaaagccgacgtcttcgtgaccaacaagtttcacattctctcgagctaaggtcttacagaaaacgggtcactgcgaaatcaggttctcaaggttgggactttggtagattcgtcaaaacattgtactttttcaatggaccaccatctcctctaaagtttgtttcatcggtgtttgagaaacttactaacggagcaacggaggaaccggttgctgaaatgggaacttctggaatcatacttgtggctggagcctccggggggtgtaaggaagaaggatttgtgatatcttga

SEQ ID NO: 146842 - DNA, 341 bp, Arabidopsis thaliana
  unsure (1)..(341): unsure at all n locations
cacanagcaaaaaagggcaaacaaggagtactttgtcttcgcagcncncgctcactggtgggtgctcattaacgcttgcatgtaccgcaccgtcgntgagttcgaagaagatgacgccactaaccccataggcccaaaaatgaggaaatgccgcaaggagtttcagaaagaacaacacctaagagcttgccagcaattgatgctccagcaagcaaggcaaggccgtagcgatgagtttgatttcgaagacgacatggagaacccacagggacaacagcaggaacaacagctttttccagcagtgcttgaacgagcttcgccaggaagagccagattgtgtt

SEQ ID NO: 146843 - DNA, 431 bp, Arabidopsis thaliana
  unsure (1)..(431): unsure at all n locations
gaggagttgncnacannnaatcttccattgnttgcaaaaacnnagaaangacaggcgaattttacctgctggaaagtgctgagggaagcaaggatagaaccaccaatccagacactgtacttcctctcgggtggtgccacgaccttaatcttcatgctgctcggggcaagagctgtgatctctttgctcatacggtctgcaatacctgagaacatagttgtaccaccactgagcacaatgttaccgtaaaggtccttcctgatatcaacatcacacttcatgatcgagttgtaagttgtctcgtggatccctgcagcttccattccaacaaatgatggctggaaaaggacttctgggcacctgaatctctcagcaccgatcgtgatcacttgtccgtcgggtaattcatagttcttttcgatggaggagct

SEQ ID NO: 146844 - DNA, 466 bp, Arabidopsis thaliana
  unsure (1)..(466): unsure at all n locations
gaaaccagcggcccccacgcgnccggacagggacagcagggacaacaagggttccatgacatgcaccanaaggnggaacaggtgggactcagagacgactgggccggcacaccaagctctgcccactggatctacaactcaggagaacagccacttgtcatcatcgctcgtctcgacatcgccaactaccaaaaccaactcgaccgcaaccctagagtgggccatttggccggaaacaaccagcagggaggcgttggcgggtcacagcaacaacaagaacagaaaaacttgtggagcgggttcgacgcacagggcatagctcaagcattgaaaattgacgatcagttggctcagcagcttcagaaccaacaagacagcagaggaaacatctgtccggggaagggacccttccagggcgcgaggccaaccccaaaaacagcccacgagagcgaggaggggagacacc

SEQ ID NO: 146845 - DNA, 323 bp, Arabidopsis thaliana
  unsure (1)..(323): unsure at all n locations
cgctcttctcgacatcgccaacnaccaatacctactctaccgcaaccctagagnngggcatgtggccggaaacaaccagcaggcaggctaaggcggnncacagcaacaacaagaacagaaaaacnngnggagcgggnncgacgcacaggncanagcncaagcanngaaaanngacgnncagnnggcncagcagcnncagaaccaacaagacagcagaggaaacaacgnncgngnnaagggaccnnnccaggncgngaggccaccnncaagacagcccnacgagagcgaggagnggagacacccacgnagcccacagggcaacg

SEQ ID NO: 146846 - DNA, 307 bp, Arabidopsis thaliana
  unsure (1)..(307): unsure at all n locations
caagaagcaaaacanggcnaacaagcattaactcgtctgcgcaacncncgcccacaggaggggccacaccaacgcgggcagggaccgcaccgangnncgaaacgaagaagaagacgccagcaaccccgnagggccaagacagagangccagaaggaggagcagcaagcacaacagccaagagaccgccagagacggaggagcaagcaaacgaggcaaggacgnggnggnggnccancccacgacgaagagagcgagaacgagggcccccagcagggaaaccagcgacaccagcagagcngcaacgag

SEQ ID NO: 146847 - DNA, 360 bp, Arabidopsis thaliana
  unsure (1)..(360): unsure at all n locations
aagaggaagaaaaangggncgaggctcttcnattatctcnnncncnnngacactctggaggctcttcaatggctacagtggccaacagtggcccaacgagtgccagctcgatcaactcaatgcgctcgaaccatcccaaatcatcaagagcgagggtggtcgcatcgaggtctgggaccaccatgcaccccagctccgttgctccggctttgcctttgagcgtttcgtcattgagcctcagggtcttttcttgcccactttcttgaacgccggcaaactcacgtttgttgttcacggaaggggtctaatgggaagagttattccgggatgcgccgagacgttcatggagtcaccggtatt

SEQ ID NO: 146848 - DNA, 432 bp, Arabidopsis thaliana
  unsure (1)..(432): unsure at all n locations
aatgggtaagctcagcaanctcctcgatgcattccttcggggnncnccncgngcttagagcggctttcttgcgaggcagggacttgcggttcctcctcagctacagaacgagtgtaacctcgacaacctagatgttctccaagccaccgaaactatcaagagtgaagccggtcagatcgagtactgggaccacaaccaccctcagctccgatgtgttggtgtttccgttgctcgttatgtaattgaacaaggcggtctttacttgcccaccttcttcacttccccaaaaatttcctacgtcgttcaaggaacgggtatcagcggaagagtggtccctggatgtgccgagaccttcatggactcgcagcccatgcaaggacaacaacaaggccaaccatggcaaggacgacagggacaacatggccaaccatg

SEQ ID NO: 146849 - DNA, 421 bp, Arabidopsis thaliana
  unsure (1)..(421): unsure at all n locations
gggccttncttttaaatgattgaaagacannnattaaaccaaaagaactctttagatcattgcagggaaaaatgttgaaaagtgcaagtccaatggcattctacgatatcggagagcagcaatactctactttcgggtacattttaagcaaacctgggaacgcaggagcttacgagattgacccttcgatcccaaacatcgacgatgcgatctacggctcagatgagttccgtatgtacgcttacaaaatcaaacggtgtcctcgtactcgtagccacgactggacggagtgtccctacgctcaccgtggcgagaaagccacacgccgtgatcctcgccgtgtcacttactgtgcagtcgcatgcccggctttccgaaatggcgcatgccacccgggcgactcatgcgaattcgcacatgg

SEQ ID NO: 146850 - DNA, 422 bp, Arabidopsis thaliana
  unsure (1)..(422): unsure at all n locations
aacaaaacacacccaaaangctttgcttttgtttnctctnctctccgncggctcgctctcatttctcctcttctggcatggcgccgaggcacgccagcgagaggcgccgtttccaaacgcctgccatttcagccaaatcaacagcctcgcgcccgctcaggcgacgaagttcgaagccggtcagatggaagtatgggaccacatgagccctgagctccgatgcgccggtgtaacggtggctcgcatcacccttcagcccaattccattttcttgcccgctttctttagcccacctgcccttgcttacgttgtccaaggagaaggagttatggggacgattgcttctggttgtcctgagacttttgcagaagttgaaggaacatcaagaagaggaggaggaggagacccgggtcgacgttttg

SEQ ID NO: 146851 - DNA, 430 bp, Arabidopsis thaliana
  unsure (1)..(430): unsure at all n locations
cggaaaggctcatatacaaatgttgaatgactatacggagaaagagngnncgaccaagagatctttatcggacaggtactagccgtgccacaaggcttttcggtcatgaaacatgccataggcgaacagttcgagtggatcgaattcaagacaaacgaaaacgcacaggtcaacacactcgcgggccgtacctcagtcatgagaggtttgccgcttgaggttataaccaatgggtaccagatctctcccgaagaagctaaacgagtaaagtttagcacgattgagaccacactgacccatagcagtccaatgagctacggaaggcctagggcttgaggcttgatgagcgcgtggtggaataagcgttgaatctaaagttcggtttggtacgacttgtnatatgaaataataatgtacaaagaagttctac

SEQ ID NO: 146852 - DNA, 292 bp, Arabidopsis thaliana
  unsure (1)..(292): unsure at all n locations
ccaacgagngccancttnatcaactcaatgcgctcgaaccatcccaaatcatcaagagcgagggtggtcgcattgaggtctgggaccaccatgcaccccaacttcgttggttcggctttgcctttgagcgtatcgcaattgagcctcatagttttttttcgctcactttctagaacgcctgcttacttcacgtttgttgtttacggaaggggtctaatgggaagagttattccgggatgcgcctagaccgttattgagtcaccggtttttggagaaggtcaaggtaatggtc

SEQ ID NO: 146853 - DNA, 399 bp, Arabidopsis thaliana
  unsure (1)..(399): unsure at all n locations
atggaagttgggaacgatggngtngctttcaatactatttctaaccctcctgttaactctgtagccagtccaattatttctgggttgaaggagaagtttcgtgacgccaatcaaaggaatgatgttaaggccatcgtgttgatcgggaacaatggaagattttcgggtggttttgatatcaatgtctttcagcaagttcataagactggggatttatcgcttatgcctgaagtatctgttgagcttgtgtgtaacctgatggaagactccaggaagccggttgttgctgcagttgaaggattagctcttggtggtggtttggaacttgcaatggcgtgtcatgccagagttgctgctccgaaagctcaattaggcttaccagaactgactcttggagtg

SEQ ID NO: 146854 - DNA, 180 bp, Arabidopsis thaliana
gtttacggcggatcagaagatcagacccggtaggctcgacgctctgagatcctctcattctgttttcttaggaagatatggacgcggcggcgtcccggttcctccttccgcttcttcgtcgagttcttcgcctattcaagccgtctccactcctgcgaagcctgagactgcgaccaagcg

SEQ ID NO: 146855 - DNA, 414 bp, Arabidopsis thaliana
  unsure (1)..(414): unsure at all n locations
cttttgaacatgagaaggaaatatgtattagcttgcaaagatagntngnacctgagacacaggacagcagtagagatgtctgaactccttgtgatgtttctcaatgtaactttctaatttaggaatatcttctctacggaaaatgtcccaaagagctccatcatcagtttcaacattttggacttgttgtctggaattttcaagaatctccatcatttcctccttgttagctactgagctatacagctccttgagatcttgttcggcatgcttctttttcagatttccaattccaggttgcatattgggcacttcagatatgtgcgtcaaaatattcacctggaataaccaaagggtacagatattaagatactaaagaagaaaagttaagataaaagtggagtaaacttatta

SEQ ID NO: 146856 - DNA, 355 bp, Arabidopsis thaliana
  unsure (1)..(355): unsure at all n locations
cgaaccatcccaaancancaattttggttttttttcatcgaggnctgggaccaccgggcactttagctccgttgctgcgcgctttgcctttgagcgtttcgtcattgagcctcagggtcttttcttgcccactttcttgaacgccggcaaactcacgtttgttgttcacggaaggggtctaatgggaagagttattccgggatgcgccgagacgttcatggagtcaccggtatttggagaaggtcaaggtcagggtcagagtcaagggttccgtgacatgcaccagaaagtagagcacctacggtgcggtgacaccattgcaacaccatctggtgtagcttaatggttctacaac

SEQ ID NO: 146857 - DNA, 371 bp, Arabidopsis thaliana
  unsure (1)..(371): unsure at all n locations
gacggcacattggaatccacatttcaatantattcctgtctggnctcaggtccggatggttgaggatgatctcatgtacaacactttccttgaggtgtatgagaatcactgtgcacgaaatgaccgagaggcagatcttccaattacccactttaaggagcaactcaatcaagctatatcagggcaaatatcagcagaggcaataggagatcttcgtctgcaggcatatattgacatcacaaaaaccttggtcaatgacagtatcttttctcagtacatgtacaagacgttgatgagcggaagccatatgtgggctttcaagaaacaatttgcagtccagctagcagtctccagtttcatgtccttcatgc

SEQ ID NO: 146858 - DNA, 392 bp, Arabidopsis thaliana
  unsure (1)..(392): unsure at all n locations
aacaaaacaacaagaaaaaatttttnnatttatacaaattaancataacacttcttcgccttatctccatagctgtcggccactgcttatccttccgtgtggagatcgacgagttcgagccaccacagcaaggagaacaagaaggtccccgtcgccgtcctggtggtggctctggcgagggatgggaggaagagtcgacgaatcatccataccacttcaggaagcggagtttcagtgattggttccagtcaaaggaaggttttgtgagagtgctgcctaagttcacaaaacatgcaccggctctcttccgaggaatcgagaactacagattctcgttggtggagatggagccaacaactttctttgtgcctcaccatttggatgccgatgct

SEQ ID NO: 146859 - DNA, 428 bp, Arabidopsis thaliana
ggcagcgactccaatggaaggtttatggttttagcttaaacagaaaggaaccggaccaggagcaagaagctctcatgctatagctcttgtgggaaacaaaatgtatgcctttggtggcgagtttcaaccacgtgttcctgttgacaaccagctctacgttttcgacctcgaaactcagacatggtctatccaggaagcttctggggatgctcctcctcctagagtaggtgtagccatggctgcagtcggacccatcatctatttctttggtggccgggactcgactcaccaggagctcaacgagttatactgttttaacactttgaccaaccagtggaaactactctcttcaggggaaaccggtccacagaaccgaagctaccactctattactgcggattctcaaaacgtgtatgtgtttggtggat

SEQ ID NO: 146860 - DNA, 347 bp, Arabidopsis thaliana
  unsure (1)..(347): unsure at all n locations
ggtnnggaaaacccgcggcgacccacgcgaccganggnggagagccggaaacaacccacattggcattgtattgcnacanaggccnaaagcggcaggagcaaatcaacaagcggaagggccccncaccagagancnnggcncaagccnncaagaacaangncgagacggcncagcagcnccagaaccagcaagagaaccgnggcaacaacggcaagggcaacggaccnancggcgncaanaggccaccnccgagacgcggcgaaggcggccaacaaccacanngaaaagcnacaagggnagaggagaccccgngcaccacgcgaggcacagaaaaccncgaagaccc

SEQ ID NO: 146861 - DNA, 410 bp, Arabidopsis thaliana
  unsure (1)..(410): unsure at all n locations
caacaaacaaaaagaaaanngggaagcttagattacttntgntgcaacctncggggggctgctcgnccttaacgggtgccttgcgaggcagtcacttggggttcctcctcagctacagaacgagtgtaacctcgacaacctagatgttctccaagccaccgaaactatcaagagtgaagccggtcagatcgagtactgggaccacaaccaccctcagctccgatgtgttggtgtttccgttgctcgttatgtaattgaacaaggcggtctttacttgcccaccttcttcacttccccaaaaatatcctacgtcgttcaaggaacgggtatcagcggaagaggggtccctggatgtgccgagaccttcatggactcgcagccgatgcaaggacaacaacaaggccaaccat

SEQ ID NO: 146862 - DNA, 339 bp, Arabidopsis thaliana
  unsure (1)..(339): unsure at all n locations
aaggnggaacangngagacgcggagacgtctttgccaacacggcaggctctgcccactggatctacaactcaggagaacagccacttgtcatcatcgctcttctcgacatcgccaactaccaaaaccaactcgaccgcaaccctagagtgttccatttggccggaaacaaccagcagggaggctttggcggttcacagcaacaacaagaacagaaaaacttgtggagcgggttcgacgcacaggtcatagctcaagcattgaaaattgacgttcagttggctcagcagcttcagaaccaacaagacagcagaggaaacatcgttcgtgttaagggacct

SEQ ID NO: 146863 - DNA, 435 bp, Arabidopsis thaliana
  unsure (1)..(435): unsure at all n locations
aacaaatacttnnacgaaaaatgtttataattttatctagnnncgnnngatacacagtttaataaagaaatggcaggcaaccaacagagctacaaagctggtgagaccagaggcaaggcccaggagaagactggacaagctatgggaacgatgagggacaaggctgaggagggccgggacaagacttctcaaacggcccaaacagcccaacagaaggcccatgagacagcccagtcagctaaagataagacatctcaaactgcccaagcggctcagcagaaggcccatgaaacggcccagtcagcaaaagagaagacatcttaaactgcccaaacggcacaacaaaaggcccatgagacgacgcaagcagcaaaagaaaagacatcttaagctggcgacaaagctcgcgaggccaaggacaaggccgggagctac

SEQ ID NO: 146864 - DNA, 412 bp, Arabidopsis thaliana
  unsure (1)..(412): unsure at all n locations
caacaatggcggctgctgcgatgtataatcntcttcgaccagnggcggcaacaataaggctaaccgttccggcgggaggagcgaggccagccccaccggtaggtccggcgctaggtcagtacaggcttaacctgatggctttctgcaaagacttcaacgctaggactcaaaagtacaaaccagacactccgatggccgtgacgataacggcgttcaaggacaactctttcgaattcaccgtcaagtctccgacggtgtcgtggtacatcaagaaagcagctggagtcgataaaggaagcacacgcccgggtcatttgtcggtgacgacgctatcggtgagacacgtgtacgagatcgcgaaggtgaagcagaccgaaccgttttgtcagtatatgcccgtggaatcgatttg

SEQ ID NO: 146865 - DNA, 357 bp, Arabidopsis thaliana
  unsure (1)..(357): unsure at all n locations
ctccgacagaccaacccttcttttccacctcnagggnnctaattgtgcgattaggataatggccggcgccatggttagttccgccggtgggttactggcaatgctcaacgaaccccatccttccttgaaacttcacgctctctcatatctcatcagattggttgaccaattttggcccgagatcttcactagtgtcccaatcatagagagcttatacgaagatgaagagtttgatcagcatcaaagacagcttgctgccttgttggcctccaagggtttctattacttgggagagcgtaacgattcctttggctatgccctttgagctggatcctttgttgatgttgcagaggattc

SEQ ID NO: 146866 - DNA, 371 bp, Arabidopsis thaliana
ggtggatccacacgtattcctgttgtttagtttctcgtgaggaaggtgactgggaaagaacctaatgttacagtaaatcctgacgaggttgtagcgttaggtgctgcagtccaggctggtgttcttgctggagatgtgagtgacattgtgcttcttgatgtgacaccgctttcgattggtttggagaccctaggtggtgttatgactaaaattattccaaggaacaccacactgcctacttctaaatcagaagtcttttcaactgctgctgatggacagacaagtgttgagattaatgtgttgcatggtgagagggagtttgttagggataacaagtctcttggtagcttccgtctagattggtattcccc

SEQ ID NO: 146867 - DNA, 425 bp, Arabidopsis thaliana
cacacatagcaaaaaatggcattttgttgttcctcgtctgcgcagctctcgctctctgcttcctcctcaccaacgcttccatctaccgcaccgtcgttgagttcgaagaagatgacgccactaaccccataggcccaaaaatgaggaaatgccgcaaggagtttcagaaagaacaacacctaagagcttgccagcaattgatgctccagcaagcaaggcaaggccgtagcgatgagtttgatttcgaagacgacatggagaacccacagggacaacagcaggaacaacagctattccagcagtgctgcaacgagcttcgccaggaagagccagattgtgtttgccccaccttgaaacaagctgccaaggccgttagactccagggacagcaccaaccaatgcaagtcaggaaatattaccagaca

SEQ ID NO: 146868 - DNA, 419 bp, Arabidopsis thaliana
  unsure (1)..(419): unsure at all n locations
gttccatttggccggaaacaatttgagtgatgctttggcggntcacagcaacaacatgaacagaaaaacttgtggagcgggttcgacgcacaggtcatagctcaagcattgaaaattgacgttcatttggctcagcagcttcagaaccaacaagacagcagaggaaacatcgttcgtgttaagggacctttccaggtcgtgaggccacctctaagacagccctacgagagcgaggagtggagacacccacgtagcccacagggcaacggccttgaggagactatctgcagcatgaggtcccacgagaacattgacgaccctgctcgtgctgacgtgtacaagcccagcctaggtcgcgtgaccagcgtcaacagctataccttgcccattctggagtatgtcaggctcagtgccactcg

SEQ ID NO: 146869 - DNA, 322 bp, Arabidopsis thaliana
  unsure (1)..(322): unsure at all n locations
acaaaaagaaaaagcgcaagcccagccttccttttttgcaacccncggggnncacgcgtggggcttaacggctgccgggcgaggcacccactaggggnncccccncagctacagaacgagtgtaacctcctcaacctagatgtgctccaagccaccctaactatcaagagagaagccggtcatatcgagtactgggaccacaaccaccctcagctacgatgtgtcaggggttcccgcagctcgttatgtaattgaacaaggcggtttttacttgcccaccttcttcactttcccaaaaatttcctacgtcgctcaaggaacg

SEQ ID NO: 146870 - DNA, 411 bp, Arabidopsis thaliana
  unsure (1)..(411): unsure at all n locations
gaaataacaaaatggctcgagtctctnctcttttttctttcttcttaacacttttgatccttttccatggctacgcggctcaacagggtcagcagggtcagcagtttccgaacgagtgccagctcgaccagctcaatgcgctcgagccgtcacacgtactgaagagcgtggctggtcgcatcgaggtgtgggaccaccacgctcctcagctccgttgctcaagtgtctcctttgcacgttacatcatcgagtctaagggtctctacttgccctctttctttaacaccgcgaagctctctttcgtggcttaaggacgaggtcttatgggaaaagtgatccctggatgcgccgtaacattccaagactcatcagagtttcaaccacgctttgaatgttaagggcaaagccaga

SEQ ID NO: 146871 - DNA, 421 bp, Arabidopsis thaliana
  unsure (1)..(421): unsure at all n locations
cagcttcagaaccaacaagacagcagatttaatatttttcgagnnaagggacctttgcaggtcgtgaggccacctctaagacagccctacgagagcgaggagtggagacacccacgtagcccacagggcaacggccttgaggagactatctgcagcatgaggtcccacgagaacattgacgaccctgctcgtgctgacgtgtacaagcccagcctaggtcgcgtgaccagcgtcaacagctataccttgcccatcttggagtatgtcaggctcagtgccactcgtggcgttctccagggtaatgcgatggtgcttcctaaatacaacatgaacgcttacgagatcttgtactgcactggaggacaaggaaggatccaagtgggcaacgacaacggacagaacgtgttggaccaacaggtgc

SEQ ID NO: 146872 - DNA, 412 bp, Arabidopsis thaliana
gaaccaaaccacacatcactcttcctgtgacagaagaaaagagttgaggaacagagaaaatggcagcacaagcacttgtgtcttcttcacttacctcctctgttcagacagctagacagatatttggctcaaaaccaattgcgtctgcctcacagaagaagagttcctttgttgttaaagctgctgcaactccacctgtcaagcaaggagcaaacagaccattgtggtttgcatcatcgcagagtctctcttacttggatggcagcttacctggtgactatggattcgaccctcttggcctttcagacccagaaggtactggaggattcattgagccaagatggctagcattcggagagatcatcaacggacgggttcgcatggtggttgcaactggagcttttgttcctga

SEQ ID NO: 146873 - DNA, 391 bp, Arabidopsis thaliana
  unsure (1)..(391): unsure at all n locations
cggacgcgtgggagaaaaaggtctagctcatctatctcctcgnagcaacctgggggggtcttcttgtccttaacgggtgccttgcgaggcagtcacttggggttcctcctcagctacagaacgagtgtaacctcgacaacctagatgttctccaagccaccgaaactatcaagagtgaagccggtcagatcgagtactgggaccacaaccaccctcagctccgatgtgttggagtttccgttgctcgttatgtaattgaacaaggcggtctttacttgtccaccttcttcactttcccaaaaatttcctacgtcgttcaaggaacgggtatcatcggtagagtggtcccttgttgtgccgagaccttcatagacttcgcattcgttgcaag

SEQ ID NO: 146874 - DNA, 136 bp, Arabidopsis thaliana
  unsure (1)..(136): unsure at all n locations
ccgcaccgnngnncgaaacgaagaagaagacgccagcaaccccggagggccaagacagagangccagaaggaggnncagcaancacaacacccaagagcgcgccagagaaggaagagcaagcaaaagaggcaagga

SEQ ID NO: 146875 - DNA, 387 bp, Arabidopsis thaliana
  unsure (1)..(387): unsure at all n locations
ctctcactggtaaaaagcaaacaaaggctctttttcttgcaaaaacacnacccaaagccctacataacctccggntatgtctgtccggcggcgaacgcagctctatccctagatcatatccaagaaacccaattaacttacctccctggattccctcgacccgatccaaaacacgcagagacgatcttagccgttccaaggtctgtctccggcaagagcatatcagcgaaagagcgtaaagcgggtcgggttccttcgatcatattcgaacaagaggatggacaacacggaggaaacaagaggcgtatttcagttcagacgaatcagatcaggaagctggggaatcatttggggtactcttttttcctctctaggctctttgaagtt

SEQ ID NO: 146876 - DNA, 368 bp, Arabidopsis thaliana
cgaacttccacacttagcaaaaaagggcgctcacttctgttcctcgccggcgcagccctggctcgctgttttctgctcacgaacgctcccatctaccgcaccgtcgttgagttcgaagaagatgacgccactaaccccataggcccaaaaatgaggaaatgccgcaaggagtttcagaaagaacaacacctaagagcttgccagcaattgatgctccagcaagcaaggcaaggccgtagcgatgagtttgatttcgaagacgacatggagaacccacagggacaacagcaggaacaacagctattccagcagtgctgcaacgagcttcgccaggaagagccagattgtgtttgccccaccttgaaaca

SEQ ID NO: 146877 - DNA, 313 bp, Arabidopsis thaliana
  unsure (1)..(313): unsure at all n locations
gaaaatggttaagctcagcaatctcncttgatttttttcggggnnctcctcgnccttaacggctgccttgcgaggcgggcacttggggttcctcctcagctacagaacgagtgtaacctcgacaacctagatgttctccaagccaccgtaactatcaagagtgaagccggtcagatcgagtactgggaccacatccaccctcagctccgatgtgttggtgttttcgttgctcgttttgtaattgaacaaggtggtcttttcttgccttccttcttcactatccctaaattttccttcattttttcttggttcg

SEQ ID NO: 146878 - DNA, 363 bp, Arabidopsis thaliana
  unsure (1)..(363): unsure at all n locations
gtgagctcttagccnnnacncttcagctgtttttcacancaancgacaaggggaatgtggaccgagagcggggagggcatgcacaccgnaccgacaaacgngnncatcagccaaactacgaagatgatgtcggttttggtggctatggcggttatggtgctggttctgattatatgagtcgcggcccctccactaaccaaatcttggcacttatagcaggagttcccattggtggcacactgctaaccctagctggactcactctagccggttcggtgatcggtttgctagtcttcatacccctcttgcttctcttcagttcgaagtattgatccggcggtttttactatttggcttgcttgt

SEQ ID NO: 146879 - DNA, 218 bp, Arabidopsis thaliana
  unsure (1)..(218): unsure at all n locations
catttgcactcagncnagagacttgtttgtttagtagaaggggncaaagacggagaggatggacagagacgcaagggcgaccgccccccccnaagcgccggncacnnaccaacgccgagcccgagaagaccnggaaganagaccncccaaaccncacaagccaagagcacagcaagcaccagacagagaacacccggacggaacaccaggccanaaga

SEQ ID NO: 146880 - DNA, 238 bp, Arabidopsis thaliana
acggctgcctagcgagggaggcacccggggttcctcctcagctacagaacgagaggaacctcgacaacctagataggctccaagccaccgaaactatcaagagtgaagccggtcagatcgaggacagggaccacaaccaccctcagctccgaagagttggagtttccgctgctcgttaagtaattgaacaaggcgggctttactagcccaccctcttcacttccccaaaaaatcccca

SEQ ID NO: 146881 - DNA, 380 bp, Arabidopsis thaliana
caatggagaagatagagcacactacgacttcttccaatggtattaacatgcatgtggcttcgattggttcaggtccagtgatcctattcgtccatggctttcccgatctctggtactcatggcgtcaccagcttgtctctttcgctgccttaggttaccgcgcaatcgctccagatcttcgaggatacggcgattccgatgcgccgccgtctcgtgaatcttacaccatccttcatatcgtcggagacctcgtcggattactggattcgctcggtgttgatcgggttttcctcgtcggtcacgattggggagcaattgttgcgtggtggtcttgtatgatcaggcctgatcgagtcaacgcgttggtcaacactagcgtt

SEQ ID NO: 146882 - DNA, 374 bp, Arabidopsis thaliana
  unsure (1)..(374): unsure at all n locations
ctcagcaatctcctcgttgctactcnctggtttctcctcgtccttaacggctgccttgcgaggcagtcacttggggttcctcctcagctacagaacgagtgtaacctcgacaacctagatgttctccaagccaccgaaactatcaagagtgaagccggtcagatcgagtactgggaccacaaccaccctcagctccgatgtgttggtgtttccgttgctcgttatgtaattgaacaaggcggtctttacttgcccaccttcttcacttccccaaaaatttcctacgtcgttcaaggaacgggtatcagcggaagagtggtcccttgatgtgccgagaccttcatggactcgcaaccgatgcatggacaacaaca

SEQ ID NO: 146883 - DNA, 425 bp, Arabidopsis thaliana
  unsure (1)..(425): unsure at all n locations
cgaacacaatctgcttcaagatttatgtgtttgatcagacacaaaaaagtatgtctctccgtagttttgtgtcaaggttatgcaagaagcggcgctaggtatgatgggagccaccgtaagcggagatggagacgccgcggtcgtggcggagcagaatagacagttgaaaggtgagatagcgacacatccgatgtatgagcaattattagccgcacacgtggcatgtctaagagtagctactccaatagatcaacttccgatcattgaagctcagctttctcaatctcatcatcttctccgttcttacgctttcacggccgttggataccatcatgatcgtcacgagctcgataatttcttggcacaatatgtaatggtgttgtgtagcnttaaagaacagctgcaacagcacgtgagggttcatg

SEQ ID NO: 146884 - DNA, 409 bp, Arabidopsis thaliana
  unsure (1)..(409): unsure at all n locations
aagaggaagaaaaatgggncgaggctcttcttttttctctnncncnnagacactctggatcctcttcaatggctacactgcccaacagtggcccaacgagtgccagctcgatcaactcaatgcgctcgaaccatcccaaatcatcaagagcgagggtggtcgcatcgaggtctgggaccaccatgcaccccagctccgttgctccggctttgcctttgagcgtttcggcattgagcctcagggtcttttcttgcccactttcttgaacgccggcaaactcacgtttgttgttcacggaaggggtctaatgggaagagttattccgggatgcgccgagacgttcatggagtcaccggtatttggagaaggtcaaggtcagggtcagagtcaagggttccgtgacatgcac

SEQ ID NO: 146885 - DNA, 353 bp, Arabidopsis thaliana
  unsure (1)..(353): unsure at all n locations
ccgaaacattccaagactcatcagagnctccttttctcttcgaaggncaaggncaaagccagttgttccgtgacatgcgaccagaaagtggagcacattaggagcggtgataccattgccacaacacccggtgtagcacagtggttctacaacgacggacaggaaccacttgtcatcgtcagcgtcttcgatctagccagtcaccagaaccagcttgaccgcaacccaaggccattttacttagccggaaacaacccacaaggtcaagtatggctacaaggccgagagcaacagccacagaagaacattttcaatggatttggacccgaggttattgctcaagctttgaagat

SEQ ID NO: 146886 - DNA, 306 bp, Arabidopsis thaliana
  unsure (1)..(306): unsure at all n locations
attgaacaaggcggncnnnactttccctcctttttcactnccccaaaaatttgctacgtcgttcaaggaacgggtatgaccggaagagtggtccctggatgtgccgagaccttcatggactcgcagccgatgcatggacaacaacaatggccaaccatggcaaggacgacagggacatcatggccaaccatgggaaggacagggacaacagggacaacatggaagacaaggccaaccattggaaggacagggacaacagggacaacaaggtcgacagggacaacaaggcctaccatgggaaggaca

SEQ ID NO: 146887 - DNA, 347 bp, Arabidopsis thaliana
caaaaagaaaatgggtaagctcttcactccttttttgcaaccttcggggttctcctcgtccttaacggctgccttgcgaggcactcacttggggttcctcctcagctacagaacgagtgtaacctcgacaacctagatgttctccaagccaccgaaactatcaagagtgaagccggtcagatcgagtactgggaccacaaccaccctcagctccgatgtgttggtgtttccgttgctcgttatgtaattgaacaaggcggtctttacttgcccaccttcttcacttccccaaaaatttcctacgtcgttcaaggaacgggtatcagcggaagagtggtccctggatg

SEQ ID NO: 146888 - DNA, 375 bp, Arabidopsis thaliana
  unsure (1)..(375): unsure at all n locations
cagcaatctcctcgntgcaactttcggtgtttttctcgnccttaacggctgcgcttgcgaggctttcacttggggttgctcctcagctacagaacgagtgtaacctcgacaacctagatgttctccaagccaccgaaactatcaagagtgaagccggtcagatcgagtactgggaccacaaccaccctcagctccgatgtgttggtgtttccgttgctcgttatgtaattgaacaaggcggtctttacttgcccaccttcttcacttccccaaaaatgtcctacgtcgttcaaggaacgggtatcagcggaagagtggtcccctggatgtgccgagaccttcatggtctcgcaatccttgcaaggacaacaacaa

SEQ ID NO: 146889 - DNA, 320 bp, Arabidopsis thaliana
  unsure (1)..(320): unsure at all n locations
aaagaaaatggnnaagcncagctaccctctttttgcaaccnncggggttctgctcgtgcttaacggctgccttgcgaggcagtcacttggggttcctcctcagctacagaacgagtgtaacctcgacaacctagatgttctccaagccaccgaaactatcaagagtgaagccggtcagatcgagtactgggaccacaaccaccctcagctccgatgtgttggtgtttccgttgctcgttatgtaattgaacaaggcggtctttacttgcccacctttttcacttccccaaaaattttctacgtcgttcaaggaacgggta

SEQ ID NO: 146890 - DNA, 341 bp, Arabidopsis thaliana
  unsure (1)..(341): unsure at all n locations
ggcgaagacgnaccagacggcctcacttttttttncgangagaaagancagggncagttcgcctccgtgcagcgctgtcgccgccggntaaaaagtcattctctttggtgttcctggtgctttcactcccacttgcagcttgaagcttgttcctgggttcattgagtaagcagaggagctgtagtcaaagggtgttgatgtgatcattagctttagcgtgaactatccgtttgtgatgaatgcttggtgttatacattcccagtgaacaatcatgtgttagtttgtagcttgatgggtcttttaggaattcactcacctatttttggattttgtggtttgt

SEQ ID NO: 146891 - DNA, 391 bp, Arabidopsis thaliana
taagaaataacaaaaaggctcgtggcctctctcttctttctttcttcttaacacttttgatccttttccatggctacgcggctcaacagggtcagcagggtcagcagtttccgaacgagtgccagctcgaccagctcaatgcgctcgagccgtcacacgtactgaagagcgaggctggtcgcatcgaggtgtgggaccaccacgctcctcagctccgttgctcaggtgtctcctttgcacgttacatcatcgagtctaagggtctctacttgccctctttctttaacaccacgaagctctctttcgtggctaagggacgaggtcttatgggaaaagtgatcccttgatgcgcctaaacattccaagacttatcagagttccaaccacgcct

SEQ ID NO: 146892 - DNA, 272 bp, Arabidopsis thaliana
  unsure (1)..(272): unsure at all n locations
gcggggacccacgcgnncgcaagggcaaagccagaggnnccgngcctcgctccacaaagaggagcacannaagagaggaggttccaaaggcacaagagccggcgcaccccannnggtctacaacgacggacagcaaccacgtggcagcgtcagcagcttcgagcgagccaggcaccaaaaccagctagaccgcagcccaaggccaatggacgaagccggaaacaacccacaaagtcaagcatggccacaaggacgagagccacagccacaga

SEQ ID NO: 146893 - DNA, 421 bp, Arabidopsis thaliana
  unsure (1)..(421): unsure at all n locations
ggaagaaaaatgggtcgaggctcatccctcatttttttctctnagacactctagaggctctttaatggctacactggccaacagtggcccaacgagtgccagctcgatcaactcaatgcgctcgaaccatcccaaatcatcaagagcgagggtggtcgcatcgaggtctgggaccaccatgcaccccagctccgttgctccggctttgcctttgagcgtttcgtcattgagcctcagggtcttttcttgcccactttcttgaacgccggcaaactcacgtttgttgttcacggaaggggtctaatgggaagagttattccgggatgcgccgagacgttcatggagtcaccggtatttggagaaggtcaaggtcagggtcagagtcaagggttccgtgacatgcaccagaaagtagagcacc

SEQ ID NO: 146894 - DNA, 311 bp, Arabidopsis thaliana
  unsure (1)..(311): unsure at all n locations
caacaaacaaaaagaaaaaggnnaagcctagctttttcttcgnngcaaccnncgggaggcggctcgnccttaacgggtgccttgccaggcaancacttggggttcctcctcagctacagaacgagtgtaaccccgacaacctagatgttctccaagccaccgaaactatcaagagcgaagccgatcagatccagggccgtcaccacacccaccctcagctgcgatgtgttggcgctttcgtcgctcgttatggaactgagcaaggcggactttacttgcccaccttcttcactttaataataaattcctac

SEQ ID NO: 146895 - DNA, 307 bp, Arabidopsis thaliana
  unsure (1)..(307): unsure at all n locations
gagaaacgtccttcaaaagtttcctcatatttatagacanccnaggttgtattcgttttttccaagctgtgaagatcttacgttaagtaatcttgtaatccctgacttttcattttaatgatatttacatgcgtttttttttttcgtcgtgacatttacatgcgtttttcagagttttataaagtaatctttaaagtattaattttgttaaaagaaacattacaatgatcaagtatgtatatctttataaatcggttatccactttcactagttaatggaacaactagctaaaactatattacttgt

SEQ ID NO: 146896 - DNA, 368 bp, Arabidopsis thaliana
  unsure (1)..(368): unsure at all n locations
ctccgagacgaancncncnncgctgactccttctatccnncnctatctctgcgacgatgtcttcatctactaagaaggccttgattcccgttgctcatggtacggagccgtttgaagcggtggttatgatcgatgtgctacggcgaggcggagcggatgttacggtggcttccgttgagaatcaggtcggcgttgatgcttgccatggaatcaaaatggtcgctgatactcttctctctgatatcaccgactcggttttcgaccttattatgctccctggaggacttcctggtggtgagactcttaagaattgtaaacctttagagaagatggtgatgaatcaagacacttgttgacgacttaacgct

SEQ ID NO: 146897 - DNA, 152 bp, Arabidopsis thaliana
gagagaatgattatttataagtttggctcttttttagataatggagaagtatgtaaagaaaaataaaatgtagtgggcataatctaaaattaaaatatagaactaagctgttacaataatattttttaaactcatactacaacaacaacaac

SEQ ID NO: 146898 - DNA, 253 bp, Arabidopsis thaliana
tctcgaagaagacggcagcaatcgtgtgctccatctcccaggtttatggctacggcacggtggactacgagagaaggccgattgtccagtggaatgccatctacaagaagatttcgctgatggagaagccagagcttggcgctgcttccgtcttgaatcagtgggagaaagccggccgcaagcttaccaagagggagctctgtcgggtcgtcaaggagcttcgcaagtacaagcgtgccaaccaagctctcga

SEQ ID NO: 146899 - DNA, 320 bp, Arabidopsis thaliana
  unsure (1)..(320): unsure at all n locations
ccgaaacattccaagactcatttgtgctccttctcacgctncgaaggtcaaggtcaaagccagatgttccgtgacatgcaccagaaagtggagcacattaggagcggtgataccattgccacaacacccggtgtagcacagtggttctacaacgacggacaggaaccacttgtcatcgtcagcgtcttcgatctagccagtcaccagaaccagcttgaccgcaacccaaggccattttacttagccggaaacaacccacaaggtcaagtatggctacaaggccgagagcaacagccacagaagaacattttcaatggatt

SEQ ID NO: 146900 - DNA, 301 bp, Arabidopsis thaliana
  unsure (1)..(301): unsure at all n locations
gggaaaggggccaagagaacggctctcgtccatggggnaggcgancccaaaagacgggggaaacccgccggagagcgcggaagcccaaaccccgaaaggggagccggnnaaaaaaccggaaccgggacgcggcgggagacggcaacgcnagggaggccggagacgccagcgggggccccgggaagaagaaacancncagnngaacaacccgcccaccccggaaacggcgcaaccggaggaaggggccaacggccggaagagcaccgcacgccgcggggaggccggggcgcccccggcgggc

SEQ ID NO: 146901 - DNA, 275 bp, Arabidopsis thaliana
  unsure (1)..(275): unsure at all n locations
gataaaaatggctcgaggcncttttcctccctctttcnccnnaacacnnnagagccgtttccatggctacgcggctgaacagggtcagcagggtcagcagtttccgaacgagtgccagctcgaccagctcaatgcgctcgagccttcacacgtactgaagagcgaggctggtcgcatcgaggtgtgggaccaccacgctcctcagctccgttgctcaggtgtctcctttgcacgttacataatcgagtcttaagggcctttacttgccctttttt

SEQ ID NO: 146902 - DNA, 145 bp, Arabidopsis thaliana
  unsure (1)..(145): unsure at all n locations
gcccganaggacacgncaccgaagggccacaaccacaaccacaancgacgggagggacccaannnnagggggggagaggggaagagaaacacaagcaacccaagaaacccnaggagaccaaacaaggagccccncaagaacaaca

SEQ ID NO: 146903 - DNA, 331 bp, Arabidopsis thaliana
  unsure (1)..(331): unsure at all n locations
cgaggctcgagagaaaaccgnaaatcctttcttctttcactcaatcaaccaaagatgcgtgagattcttcacatccagggtggtcaatgcggtaaccagatcggagccaagttctgggaagtggtttgcgccgagcacggcatcgatccaaccggaaggtacaccggagactcagatctgcaacttgagcgcattaacgtttactacaatgaagcgagttgcggtagattcgttcctcgtgcagtgctcatggatttggagcctgggactatggatagtctcagatctggtccgtacggtctgacctttcgacctgaaacttcgtttttgg

SEQ ID NO: 146904 - DNA, 233 bp, Arabidopsis thaliana
  unsure (1)..(233): unsure at all n locations
ctgnnagtagannncnnccnnnnanctctcgcctcttttatacnaaanaaanaaaaggagagagaacttctatttcgattcggcatagcatagaccaaattttaaattttaatgatagagctaatgataaaaactattgtgtcagccggggaagcaggaaaagggaatgaagtgattccccttttttattctatctttgaaagattaaaaaatactatatgtgcacaatatac

SEQ ID NO: 146905 - DNA, 301 bp, Arabidopsis thaliana
  unsure (1)..(301): unsure at all n locations
aaaaatggctcgagactcnnccctccctcctttctccnnaacaccnnagagccttggccatgtctacgcgggtcaacagggtcagcagggtcagcagtttccgaacgagtgccagctcgaccagctcaatgcgctcgagccttcacacgtactgaagagcgaggctggtcgtatcgaggtgtgggtccaccacgctcctcatcttcgtcgttttaagtttttctttgtacgtttcatcatcgtattctaaagtggctctatctgtcctcttttacttgtatctatcagtgaattttttatt

SEQ ID NO: 146906 - DNA, 385 bp, Arabidopsis thaliana
  unsure (1)..(385): unsure at all n locations
gatcttcagacagcgcagcaacttctgtactctttatgacaaccgnggaaacattgggcgagtccaaggcccgttcggggtcattaggccgcctttgaggggccagagacctcaggaggaggaagaagaagaagaaggacgacacggacgacacggtaatggcttagaggagaccatctgcagcgccaggtgcaccgataacctcgatgatccgtctcgtgctgacgtgtacaagccacagctcgagtacatcagcactcttaacatttacgatcgtcccatctttctcttcatactgttctcagtccttcgtggatctatccgttaaaacgcaattggggcttccacagtggaacgcaaacgcgatcgcccatttcttttcgtg

SEQ ID NO: 146907 - DNA, 302 bp, Arabidopsis thaliana
caacacaggggagcctcttccatggctgcgcggctcaacaaggccagcagggtcagcagtttccgaacgagtgccagctcgaccagcttaatgcgctcgagccgtcacacgtactgaagagcgaggctggtcgcatcgtggtgtgggacctccacactcctcatcttcgttgcttatgtgtcttctttgctcgttacatcttcgagtctaaggtgttctacttgtcctctttcttttacaccgcgatgctctcttttgtggctatggactaggtcttattggaaaagtgttccctggttgcg

SEQ ID NO: 146908 - DNA, 308 bp, Arabidopsis thaliana
  unsure (1)..(308): unsure at all n locations
aacaaacaaaaagaaaaaggtctagcctatcattctccncgnagcaaccttcggggtgtctcctcgtccttaacggctgccttgcgaggcagtcacttggggttcctcctcagctacagaacgagtgtaacctcgacaacctagatgttcttcaagccaccgaaactatcaagagtgaagccggtcagatcgagtactgggaccacaaccaccctcagctccgatgtgttggtgtttccgtagctcgttatgtaattgaacaaggctgtctttacttgcccaccttctttactttcccaaatattttc

SEQ ID NO: 146909 - DNA, 295 bp, Arabidopsis thaliana
gaaaatggttaagctcagcatattctctgtttctaccttcggggttctcctggtccttaacggctgccttgcgaggcagtcacttggggttcctcctcagctacagaacgagtgtaacctcgacaacctagatgttctccaagccaccgaaactatcaagagtgaagccggtcagatcgagtactgggaccacaaccaccctcagctccgatgtgttggagtttccgttgctcgttatgtaattgaacaaggcggtctttacttgcccaccttcttcactatcccaaaaatttcc

SEQ ID NO: 146910 - DNA, 367 bp, Arabidopsis thaliana
  unsure (1)..(367): unsure at all n locations
aagaaaacacacacaaanagcaaaactttcttttttagctcnnccncgncagcgcagcgctggccctctgcttactggtcacgcaacgcttccatctaccgcaccgttgtcgaattcgaagaagatgacgccagcaaccccgtaggtccaagacagagatgccagaaggagtttcagcaatcacaacacctaagagcttgccagagatggatgagcaagcatatgaggcatggacgtggtggtggtccttccctcgacgatgagttcgatttcgagggcccccagcagggataccagctactccagcagtgctggaacgagcttcgccaggaagagccagtttgcgtttgccccaccattgaacaag

SEQ ID NO: 146911 - DNA, 308 bp, Arabidopsis thaliana
  unsure (1)..(308): unsure at all n locations
agaaaaaagggncgagncncncnaccttcnctctctcttngacacncnnganccggggcagtggctacacngcccaacaggggcccaacgagngccagcncgancaacncaaagcgcgcgaaccancccaaaacancaagagcgagggagggcgcaccgagggcagggaccaccaagcaccccagcgccggcgcgccggcgangccgcagagcaggccgacaaagagccacagggaccgcgcacgcccacacgccagaacgccggcaaacccacgncagaaggacacggaaggggcccaaagggaaga

SEQ ID NO: 146912 - DNA, 152 bp, Arabidopsis thaliana
  unsure (1)..(152): unsure at all n locations
gtgtgaagcgtatcaccatcaagcctctatcttcattttggagnncccagagaccaaggctggaatcattgacttggctgaggctcgcctcatgaacttgggttgtgccactggtcacccaagtttcgtgatgtcttgctctttcaccaacc

SEQ ID NO: 146913 - DNA, 400 bp, Arabidopsis thaliana
gcgcaaaacaaaaaaagggcaacaagcttctctttgaaagaacagcgcccgcgcgggggtggctactgaccaacgcggccagctaccgcaccggcgttgagagcagaagaagatgacgccaccaaccccacaagcccaaaaaagaggaaaagccccaaggagtaacaaaaagaacaacaccgaaaagcccgccggcgactgaggcaccagcaagcaaggcacggccggagcgaggagtgagaggacaaagacgacaggcagaacccacaggggcaacagcaggaacaccagcgatcccagccgggcaacaacgagcagagccaggaagagccagattgggtctgccccagcaagaaacaagccgccaaggcccgcagactccagggacagcaccaaccaa

SEQ ID NO: 146914 - DNA, 399 bp, Arabidopsis thaliana
  unsure (1)..(399): unsure at all n locations
gaaatataagaaataacaaaaaggctcgtggtttttctctnctnncnnnctncttaacacttttgatccttttccatggctacgcggctcaacagggtcagcagggtcagcagtttccgaacgagtgccagctcgaccagctcaatgcgctcgagccgtcacacgtactgaagagcgaggctggtcgcatcgaggtgtgggaccaccacgctcctcagctccgttgctcatgtgtctcctttgcacgttacatcatcgagtctaagggtctctacttgccctctttctttaacaccgctaagctctctttcgtggctaatggtcgaggtcttatgggaaaagtgatccctggatgcgccgaaacattccaagacttcatagagttccaaccacgcttcg

SEQ ID NO: 146915 - DNA, 332 bp, Arabidopsis thaliana
  unsure (1)..(332): unsure at all n locations
cggacgcgtgggcgcggctcatttgggtctgttggncagcagnnnccgaacgagtgccagcttgaccagctcaatgcgctcgagccgtcacacgtactgaagagcgaggctggtcgcatcgaggtgtgggaccaccacgctcctcagctccgttgctcatgtgtctcctttgcacgttacatcatcgagtctaagggtctctacttgccctctttctttaacaccgcgaagctctctttcgtggctaagggacgaggtcttatgggaaaagtgatccctggatgcgccgaaacattccaagactcattagagttccaaccacgcttcgaagg

SEQ ID NO: 146916 - DNA, 218 bp, Arabidopsis thaliana
  unsure (1)..(218): unsure at all n locations
aaaaagaaaaagggaagcncttttctttcttttttgcaaccnncggggatcgactgagtcctttacggctgcgcgtagcgaggcactccacttgggagntcctctctcagctacagtatcgagtgtaatcctcgtcaactctagatgtttctccaatgccaccgtatctatcaagatgtgaagccgttcagatcgattactgtgaccacaaccaccct

SEQ ID NO: 146917 - DNA, 270 bp, Arabidopsis thaliana
caaaaaataggcaaacaaggtgttcttcttcttttcagctctcgctctctgggtcctggtcaccaacgcttgcatctaccgcaccgccgttgagttcgaagaagatgacgccactaaccccataggcccaaaaatgaggaaaagccgcaaggagtttcagaaagaacaacacctaagagcttgccagcattcgatgctccagcaagcaaggcaaggccgtagcgattagtccgttcttgaagaccacatgcagaacccacaggtgcatca

SEQ ID NO: 146918 - DNA, 404 bp, Arabidopsis thaliana
aaacacatgaaaaatgtggttttatttttcttcaaatcgagacgctcgttttagctcatctgtggcactgataaacaactttcactacatcaccaaagcagtacatcttcctaaaataaaaggcatcaaattgcttcagagaaacgtaaatcagcagggcctggtcccagtattcctttttgttcaacaatcttccctagtccttgtgatggatcttctgctggtgcacttgcgtcagtgatcaccgtgataactggcaattctctctgcaaagttgtcaaaaacaatttaataaatggatcaactacaataacatccgggcaaggagctgagactgaagcactgttgtgctacaaactgaaaactatacagtccatactaaagctatagccagactctttttc

SEQ ID NO: 146919 - DNA, 325 bp, Arabidopsis thaliana
  unsure (1)..(325): unsure at all n locations
aaaccngaaaccnnaaaaaacgactcatttcttagcncanncncgnnnncgcggctggtgccctcttcatcctgctagccaacgcatccatctaccgcacagtggtggagttcgaggaagatgatgacgtgagcaacccacaacaaggtaagtgccagagggagtttatgaagcatcagcaactaagaggttgcaagcaatggatccgcaagagagctcaacaaggaagaatcggatacgaagctgatgactttgagctcactcttgatgtctatcttgaggacgatgagaacccaatggggcctcaacaacagtcatctcttaa

SEQ ID NO: 146920 - DNA, 344 bp, Arabidopsis thaliana
caaaaagaaaatggttaagctcagcaactcccttgtttctaccttcggggttctcctcgtccttaacggctgccttgcgaggcagtcacttggggttcctcctcagctacagaacgagtgtaacctcgacaacctagatgttctccaagccaccgaaactatcaagagtgaagccggtcagatcgagtactgggaccacaaccaccctcagctccgatgtgttggtgtttccgctgctcgttatgtaattgaacatggcggtctttacttgcccaccttcttcacttccccaaaaatttcctacgtcgttcaaggaacgggtttcagcggaagagtggtccctg

SEQ ID NO: 146921 - DNA, 381 bp, Arabidopsis thaliana
  unsure (1)..(381): unsure at all n locations
ggacgacagggacaacaaggccaaccttttgatggttttgacagcagggacaacaaggggtccgngtcatgcaccagaagggggaacatgtgagacgcggagacgtctttgccaacactccaggctctgcccactggatctacaactcaggagaacagccacttgtcatcatcgctcttcttgacattgacaactaccaaaaccaactcgaccgcaaccctagagtgttccatttggccggaatacaaccagcagggaggctttggcggttcacagcaacaacaagaacagaaaaacttgtggagcgggttcgacgcacaggtcatagctcaagcattgaaaattgacgttcaggtggctcatcagctttagaaccaacaa

SEQ ID NO: 146922 - DNA, 401 bp, Arabidopsis thaliana
aaaacatacacaaatagcaaattttggtattatgctcttcctcgtctgcgcaactgtcgccctctgcttcctcctcaccaacgcttccatctaccgcaccgttgtcgaattcgaagaagatgacgccagcaaccccgtaggtccaagacagagatgccagaaggagtttcagcaatcacaacacctaagagcttgccagagatggatgagcaagcaaatgaggcaaggacgtggtggtggtccttccctcgacgatgagttcgatttcgagggcccccagcagggataccagctactccagcagtgctgcaacgagcttcgccaggaagagccagtttgcgtttgccccaccttgaaacaagcttgcagggcagtttgccttcatggacagcacggaccat

SEQ ID NO: 146923 - DNA, 426 bp, Arabidopsis thaliana
  unsure (1)..(426): unsure at all n locations
ggacaggaaccactagncatcttttgttcttcgatctagccagtcaccagaaccagcttgaccgcaacccaaggccattttacttagccggaaacaacccacaaggtcaagtatggctacaaggccgagagcaacagccacagaagaacattttcaatggatttggacccgaggttattgctcaagctttgaagatcgatcttcagacagcgcagcaacttcagaaccaagatgacaaccgtggaaacattgtccgagtccaaggcccgttcggtgtcattaggccgcctttgaggggccagagacctcatgaggaggaagaagaagaagaaggacgacatggacgacacggtaatggcttagaggagaccatctgcagcgccaggtgcaccgataacctcgatgacccgtctcgtgctgacgtgt

SEQ ID NO: 146924 - DNA, 393 bp, Arabidopsis thaliana
agaaaaatgggtcgagtctcatttattttctttttctctttgacactcttgatcctgttcaatggctacactgcccaacagtggcccaacgagtgccagctcgatcaactcaatgcgctcgaaccatcccaaatcatcaagagcgagggtggtcgcatcgaggtctgggaccaccatgcaccccagctccgttgctccggctttgcctttgagcgtttcgtcattgagcctcagggtcttttcttgcccactttcttgaacgccggcaaactcacgtttgttgttcacggaaggggtctaatgggaagagttattccgggatgcgccgagacgttcatggagtcaccggtatttggagaaggtcaaggtcagggtcagagtcaagggttccgt

SEQ ID NO: 146925 - DNA, 111 bp, Arabidopsis thaliana
cacagccacagaacgaggggaaccccgacaaccaagaaggacgccaagccaccgaaacgagcaagagggaagccgggcagaccgagaaccgagaccacaaccacccccagc

SEQ ID NO: 146926 - DNA, 272 bp, Arabidopsis thaliana
  unsure (1)..(272): unsure at all n locations
acccacgcgnccggcgnagaagaagaaacagggnaacgcttttgttttttttaggggacagccgaaacgaggaggttacctgcccgaggcgaccaaccgcaccccacaaaaanatcaggcatttgagaagttcttagaggaaaatgcatattggcgtggcaaatccattgtactttaaattgcagagcccacatcgtactgccttggtgaatgtaatgtttttctatttcttctgcctttttcataagctattatgcgcatcatatttatat

SEQ ID NO: 146927 - DNA, 389 bp, Arabidopsis thaliana
  unsure (1)..(389): unsure at all n locations
cttagacttatctctatataccccctctattttttttgctctnagccnnnactctataggtttatatcatatcaagcgacatggcgaatgtggaccgtgatcggcgtgtgcatgtagaccgtactgacaaacgtgttcatcagccaaactacgaagatgatgtcggttttggtggctatggcggttatggtgctggttctgattataagagtcgcggcccctccactaaccaaatcttggcacttatagcaggagttcccattggtggcacactgctaaccctagctggactcactctagccggttcggtgatcggcttgctagtctccatacccctctttctccttttcagtccggtgttagtaccggcgggttctactattgggctt

SEQ ID NO: 146928 - DNA, 117 bp, Arabidopsis thaliana
  unsure (1)..(117): unsure at all n locations
agggccagcacggncagcagnnaccgaacgagagccagcncgaccagcgcaaagcgcccgagaccgcacacgaaccgaagagcgaggcgggccgcaacgaggagggggaccaccacg

SEQ ID NO: 146929 - DNA, 197 bp, Arabidopsis thaliana
  unsure (1)..(197): unsure at all n locations
acatattaataatggcaacaggctccctttttttttagcncncgcacactgggngcttttctccaacgctgggatctaccgcaccgtcgttgagttcgaagaagatgacgccactttccccataggcctatatattaggaaatgccgcaaggagtttcagaatgaacaacacttattagcttgcctgcaattgatgc

SEQ ID NO: 146930 - DNA, 387 bp, Arabidopsis thaliana
  unsure (1)..(387): unsure at all n locations
cccacgcgtccgcccacgcgttctattgtgtgatccaagaggncaacgacaacggacagtactttttggaccaacaggtgcagaagggacagctcgtggtcatcccacaagggttcgcatacgttgtccagtcccacggaaacaagttcgagtggatctctttcaaaactaatgaaaacgcaatgatcagcactttggcgggtagaacctcgctcttgagggcattgccattggaggtcatatcaaatggtttccagatctctcccgaggaagcttggaagatcaagttcaacacacttgagaccactttgacccgcgctgccggttggcaactacttcagttgatcgaggagattgtcgaggcttttttcaaaacgtttttttttt

SEQ ID NO: 146931 - DNA, 354 bp, Arabidopsis thaliana
  unsure (1)..(354): unsure at all n locations
cacaatgactagatttgcggtctcgcttctctctgnacnccanctcgaactgtagttcctctgcactgagtcgttggctaagtcggaggagtctgaagaatacgacgtcgctgtgccttcatgttgcgggttttcgtctcctcttctgattaagaaagatcaatggaaaccaatcttcgagacgaagtttggacagatttcaaccgttcaaatcggctatggatgcggtggaatgggaccttacaagatacattccataacgttggagccaaacacaattttgctccctcttcttcttcattccgacatggtcttcttcgttgactctggaagtggggatttgaaatggggtga

SEQ ID NO: 146932 - DNA, 443 bp, Arabidopsis thaliana
cgcgaagctctctttcgtggctaagggacgtgtgtcttatgggaaaagtgatccctggatgcgccgaaacattccaagactcatcagagttccaaccacgcttcgaaggtcaaggtcaaagccagaggttccgtgacatgcaccagaaagtggagcacattaggagcggtgataccattgccacaacacccggtgtagcacagtggttctacaacgacggacaggaaccacttgtcatcgtcagcgtcttcgatctagccagtcaccagaaccagcttgaccgcaacccaaggccattttacttagccggaaacaacccacaaggtcaagtatggctacaaggccgagagcaacagccacagaagaacattttcaatggatttggacccgaggttattgctcaagctttgaagatcgatcttcagacagcgcagcaacttcag

SEQ ID NO: 146933 - DNA, 401 bp, Arabidopsis thaliana
aaaaacacgaagccctaaatttcgtcgtaattggcaacagttaagctctttgctaaaagctgtagctgagaagcgaaattcgaagtgaagaatgtctaatcgcaaattcggaatggaaggattcggcattaatcggcaaactagctacagtttcgagcgatctcaagcaccgcaacgtctctacgtccctccctcgtctcgcggcggagacaactccgaagatgccgatcttgataacattgattacatggaaaacgaagaagctgaggaagatattgaggaaggcggttctgctgcggctagcggtggcgaggttgatgagatcgatccattacatgcttttatggagggaattcaccaggagatgaaatctgctccaccttctaagccaaaggagaaac

SEQ ID NO: 146934 - DNA, 426 bp, Arabidopsis thaliana
caacaaacaaaaagaaaatggttaagctcagttatctcctcgttgcaaccttcggggttctggtcgtccttaacggctgccttgcgaggcagtcacttggggttcctcctcagctacagaacgagtgtaacctcgacaacctagatgttctccaagccaccgaaactatcaagagtgaagccggtcagatcgagtactgggaccacaaccaccctcagctccgatgtgttggtgtttccgttgctcgttatgtaattgaacaaggcggtctttacttgcccaccttcttcacttccccaaaaatttcctacgtcgttcaaggaacgggtatcagcggaagagtggtccctggatgtgccgagaccttcatggactcgcagccgatgcaaggacaacaacaaggccaaccatggcaaggacgacagg

SEQ ID NO: 146935 - DNA, 443 bp, Arabidopsis thaliana
  unsure (1)..(443): unsure at all n locations
gcgtgcgaaaagggaaaactttantttttatttagtttttcctcgtctgcgcagctctcgctgtctgcgtcctcctcaccaacgcttccatctaccgcaccgtcgttgagttcgaagaagatgacgccactaaccccataggcccaaaaatgaggaaatgccgcaaggagtttcagaaagaacaacacctaagagcttgccagcaattgatgctccagcaagcaaggcaaggccgtagcgatgagtttgatttcgaagacgacatggagaacccacagggacaacagcaggaacaacagctattccagcagtgctgcaacgagcttcgccaggaagagccagattgtgtttgccccaccttgaaacaagctgccaaggccgttagactccagggacagcaccaaccaatgcaagtcaggaaaatttaccagacagccaagcac

SEQ ID NO: 146936 - DNA, 432 bp, Arabidopsis thaliana
aaaaaacataactttgctgttcaggtttttgttaatgctgaattggctccaacgcggccgagtcgtcttggtttggctttgaatttctctgtgttttactatgagattcttaattctccagatcgtgcttgtaatctcgctaagcaggcgtttgatgaagccattgctgagttagatactcttggagaggagtcatacaaggatagtaccttgatcatgcagcttcttcgtgacaatcttactctctggacttctgacatgcaggacgaaagtccggaggagattaaagaagcagcagcaccaaagcctgctgaagaacagaaggagatctaagtttgtggtttcttttttcagtattcttaagttatgcaattataattatgtttctgcttggtgtttggtttctaatctttcctttgctatccccgaagc

SEQ ID NO: 146937 - DNA, 432 bp, Arabidopsis thaliana
caataaagaggaagaaaaatgggtcgagtctcatctattatctctttctctttgacactctggatcctcttcaatggctacactgcccaacagtggcccaacgagtgccagctcgatcaactcaatgcgctcgaaccatcccaaatcatcaagagcgagggtggtcgcatcgaggtctgggaccaccatgcaccccagctccgttgctccggctttgcctttgagcgtttcgtcattgagcctcagggtcttttcttgcccactttcttgaacgccggcaaactcacgtttgttgttcacggaaggggtctaatgggaagagttattccgggatgcgccgagacgttcatggagtcaccggtatttggagaaggtcaaggtcagggtcagagtcaagggttccgtgacatgcaccagaaagtagagcaccta

SEQ ID NO: 146938 - DNA, 435 bp, Arabidopsis thaliana
aaaaaacaaaactttaccggtagatgacgactgtatcaagctttgttgtctatggaagctttacctttaggtttcagattcaggccaacggatgaagaactcatcaatcattacctaaggttaaaaatcaacggccgtgatttagaggttagagtcatccctgagatcgatgtttgcaagtgggaaccatgggacttacctgggctatcggtgataaagacagatgatcaagaatggttctttttttgtcctcgtgatcgaaagtatccgagtggtcatcgttctaatagagctactgatattggttactggaaagctactgggaaagatcgaactattaagtctaagaagatgattattggtatgaagaagactcttgttttctatcgtggaagagctcctagaggagagcgtactaattggattatgcatgag

SEQ ID NO: 146939 - DNA, 420 bp, Arabidopsis thaliana
ggcaaaagggtcattatctgatgatgccggttaacgtggtgcataacatgacggaggaggaactcttgctacgtgcttcgaagattcaagaaaagacgttgaagatgacaaagaaagcggcgtttatgttcctgacgagagggaagcttcctttggctaaactgtgggagagatttttcaaaggccatgaaggtcttttctctatttacattcatacgagtgaccctttttactttgacgatcatacgcccgaaacttcgccgttttatcgccggaggattccaagcaaggtcagtagtcaatttcctcattaattcccctcagattatataattgatatagtcgaattcttcatagataaacttaattagcctagataatcttgatatagatatttaaagatatatttgcgatattcgg

SEQ ID NO: 146940 - DNA, 414 bp, Arabidopsis thaliana
ctctgatccattgttgaagatgtcgaagagataaactaaggagccaaaggttgagactgtgactcttggaccttctgttcgtgaaggagagcaagtttttggtgttgttcacatctttgcatctttcaatgacactttcattcatgtgactgatctctccggtagagaaactctcgtccgcatcaccggtggcatgaaggtgaaggctgaccgtgatgagtcctctccttatgctgctatgcttgcagctcaagatgttgctcaaagatgcaaggagcttggcatcactgccatgcacgtgaagctccgtgctactggaggaaacaaaaccaagactccaggtcctggtgctcagtctgctcttagagcccttgctcgttctggcatgaagattggtcgtattgaggatgttac

SEQ ID NO: 146941 - DNA, 355 bp, Arabidopsis thaliana
attttccagagataaaaccctagagagattctcatcttcttttcttcaatctctctgagaatgtctaggttttcgttaccgattgggtcaatctggtgaaactcaaggttgagatcagataatttaattggaagattttaggttatggagaacagaggccagaaacgaatggaggttgtggaagagttacctgctgataagagagcttgtaactctcaggattttagaccaagcacatccggatcatctgttcaagctcaagctaatgatacgaatccaggacatgaaaacgttgacgctgatatggatacttcttcatctgcttcgccttcgagtcgatcagatgaagaagaac

SEQ ID NO: 146942 - DNA, 130 bp, Arabidopsis thaliana
aataaagtatggtcagtttgtaatcacgtccttttacctttaacgtacgtgtaaaatatgtgtctgcggcacctcacttgtaataacactttcttctcataaataaaagggaagtttcgagttacatact

SEQ ID NO: 146943 - DNA, 429 bp, Arabidopsis thaliana
ctgacagcaaatagttttggcgtctttctaactcaacccatcatctctgttgcattttatcgagagaatatttgaggtggatatggcctcgacccttttctccagaactttcttggctgctagtcaccgactgattactccttctcttccgcaaaagatctttaatccagccacctttctcagtaggtcactccactctcagttaggctccgcttctacagcctataaatcaactacttgggctcgtcgagctatggcttctactggagttgagacaaaagccggttactccacatcatccgtatcaaccagtgaacctgttgtttctgttgattggcttcatgctaatcttagagagcctgatttgaagattttggatgcttcatggtatatgccggatgagcagagaaatccgatccaagaatatca

SEQ ID NO: 146944 - DNA, 446 bp, Arabidopsis thaliana
aatttatggacgcagaacggaaatggtgtgagatggcttgttctacggcgaaccagaaacctctcctggtgtcgtgatcatccggatctctgtctctgcgacacttcacgtcctcaccttcactccatccctatcccaggtgccaccgttgccatcaagtgccacactggatccaaaaggaggtccaaatggattaaggctgttactgatgaattgggagagtttgaaatcgatcttccctcccaactccatgcgattccacaccttgaaaacacttgtttcatcaagccagtatatgtgcctaggccctatagatgctataacacctctaccaatatacacaaacctatcaaacttgtttcctctaccaatggtttccgtgtctacacctcagggaagatcaggttacagggccacagttcgagatcatagcaagctcgttgaga

SEQ ID NO: 146945 - DNA, 434 bp, Arabidopsis thaliana
attcaccacagtaccaccaatgaaggacatacttggccacatctctcggttcttaagcatcatactgtctgttgacatccaatgctgagattgatcattactctgatggttattgctgttgttgttgttgttagtatcccaaatctggcttaaggatttgatcactttggtctcgtcgtctttggcttcttggtcgttttctcgagcttcttccgcttcagcttgctctttaatagctgcccagctttctgagttgacaagaagatatgatttactatctattttcatttgtagtgcctcggctgctcgttgaacgtctttcagaatctctcctaggcttaggcttagcttctccattttctctactttttctccaaacaaacgtaatacttttgctccttcattaccaactctccgaagctcgttactgaaaa

SEQ ID NO: 146946 - DNA, 442 bp, Arabidopsis thaliana
  unsure (1)..(442): unsure at all n locations
tccgggaaagaagagcgtcttcataaacgcccttcgtcttcttccctgcaaatctattttctagatctttctttcttccgcgaaacgacaatgagagagtgcatttcgatccacattggtcaggctggtattcaagtcggaaatgcttgctgggagctttactgtcttgaacatggcattcagcctgatggccagatgcctggtgacaagactgttggtggaggtgatgatgctntcaacaccttcttcagtgaaaccggtgcaggtaagcacgtcccacgtgctgtctttgttgatcttgagccaactgtgatcgacgaggtcaggactggtacttaccgtcagcttttccaccctgaacaactcatcagtggtaaagaagacgctgctaacaatttcgnccgtggtcattacaccattgggaaagagattgttgatctct

SEQ ID NO: 146947 - DNA, 401 bp, Arabidopsis thaliana
atctcaacaagaagacattgaagtagtccgttagcaagtcgagacagaaactgctagaaccattcttgagttgcaggaagaggtgattgctctccagtctgaatttcaaagaagaatctgtaacttgaccgaggaaaatcagtcgataaaagatactataactgctagagagtcagaaataagagcacttaaccaagactgggaaaaggctaccttagaactgactaatttcatcgtcgatgggtccaaatccatcaaaaatgcctctacacagattgaaagtatcatctgttcatttccacaagtgaatgcgtggataggtgattatgttgagaaggctgcaaaaaattgtataaaaaaggaagaaacaattttacttctacagaaaagcttggaagatg

SEQ ID NO: 146948 - DNA, 439 bp, Arabidopsis thaliana
caaaaatgaggaaatgccgtaaggtgtttcataatagaacaacacctaagagcttgccagcagttgatgctccagcaagcaaggcaaggccacaacgatgagtttgatttcgaagacgacatggagaacccacagggacaacagccggaacaacagctattccagcactgctgcaacgagcttccccaggaagagccagattgtgttttccccacctcgaaacaagctggcacagccgttagactccagcgtcagcaccaaccaatgccatgtaagaaaatttaccatacatgccaacacttgcccaacttttgcgacatcccacaagttgatggttgtgcctctaacattccttcatttccttgtttctactaaatatcaaacaaaaccctaaagcgtatgaaaagggggcagttgatatatacacgttgacacttga

SEQ ID NO: 146949 - DNA, 434 bp, Arabidopsis thaliana
gataaaaatggctcgagtctcttctcttctttctttctccttaacacttttgatccttttccatggctacgcggctcaacagggtcagcagggtcagcagtttccgaacgagtgccagctcgaccagctcaatgcgctcgagccttcacacgtactgaagagcgaggctggtcgcatcgaggtgtgggaccaccacgctcctcagctccgttgctcaggtgtctcctttgcacgttacatcatcgagtctaagggtctctacttgccctctttctttaacaccgcgaagctctccttcgtggctaaaggacgaggtcttatgggaaaagtgatccctggatgcgccgaaacattccaagactcatcagagttccaaccacgcttcgaaggtcaaggtcaaagccagaggttccgtgacatgcaccagaaagtgg

SEQ ID NO: 146950 - DNA, 438 bp, Arabidopsis thaliana
  unsure (1)..(438): unsure at all n locations
caccaccacttcctctacctatctaattccgtatctgtatttggatttggatctcatttcgattcaacgatgaaggtggttgataagatcaaatccgtgacggagcaaggccaaacagctttctccttcgagtttttcccaccgaagacagaagatggcgtcgagaatctctttgaacgaatggatcgattggtctcttatggacctaccttctgcgatatcacttggggtgctggtggatccacagctgatctcactctcgagattgcttctaggatgcagaatgttatctgcgtcgagactatgatgcatctcacttgtaccaacatgccgattgagaagattgatcacgcgcttgagacgattagatctaatggaattcagaatgtgcttgctcttagaggagatcctnctcatggacaagataaagttgttcag

SEQ ID NO: 146951 - DNA, 417 bp, Arabidopsis thaliana
cgaagaaaccgagagacatttttttttttttggaggatcatcaaattcaaacatcatttctgcggcaaattcgccgtcggaattatctcagagagggattgagctgcgaagtggtgatttttgtctctaaatgtcgagtagctcggggagtttctcgggaagcagtagctcggcgtgtagttccagaagtgattgtgagaactcgtttgatgttgaagatcttttgcagattgggactacacgcagggagctaaggaaacaaaaggacttgctgagagaatcacagccccatagtattgaactagtcagaaggttggaacttcacacgaagtcattatctgaatctcgcttagaagacacagcaagaattcagatgatggagaaagaattattgaattgctataaagaaattgatta

SEQ ID NO: 146952 - DNA, 411 bp, Arabidopsis thaliana
  unsure (1)..(411): unsure at all n locations
ggtcaacacacgttgacttactcaaaggctctcatactggtcgagccactacgaaccaccgcgtctcaatcttaggggttcttatggttcttggcagtaacgtttccacctcactttggttactattgcaggcaaaaataggcaaggaacttggaggactttattggaacacaagtttgatgaatggggtgggaagtttggtgtgcgtgattgttgctctctgttcggatcatgactgggagcaatggcaattaggatgggatattaacctcttagctacgctntattcgggaatcgtggtttcgggaatggtcgtgcctcttgttgcatggtgcatcgcaacaaaaggaccattatttgttacagtctttagccctataaggcttgtgatcgtagccctaataggatcat

SEQ ID NO: 146953 - DNA, 437 bp, Arabidopsis thaliana
aaagaaaatggttaagctcagcaatctcctcgttgcaaccttcggggttctcctcgtccttaacgggtgccttgcgaggcagtcacttggggttcctcctcagctacagaacgagtgtaacctcgacaacctagatgttctccaagccaccgaaactatcaagagtgaagccggtcagatcgagtactgggaccacaaccaccctcagctccgatgtgttggtgtttccgttgctcgttatgtaattgaacaaggcggtctttacttgcccaccttcttcacttccccaaaaatttcctacgtcgttcaaggaacgggtatcagcggaagagtggtccctggatgtgccgagaccttcatggactcgcagccgatgcaaggacaacaacaaggccaaccatggcaaggacgacagggacaacaaggccaaccatggg

SEQ ID NO: 146954 - DNA, 446 bp, Arabidopsis thaliana
  unsure (1)..(446): unsure at all n locations
cgcagcaattctcctcgttgcaacccttcggggttcttcctcgtnccttaacgagctgccttgcgaggcgagtcacgttggggtgtcctcctgagctacagaacgagtgtaacctcgacaacctagatgttctccaagccaccgaaactatcaagagtgaagccggtcagatcgagtactgggaccacaaccaccctcagctccgatgtgttggtgtttccgttgctcgttatgtaattgaacaaggcggtctttacttgcccaccttcttcacttccccaaaaatttcctacgtcgttcaaggaacgggtatcagcggaagagtggtccctggatgtgccgagaccttcatggactcgcagccgatgcaaggacaacaacaaggccaaccatggcaaggacgacagggacaacaaggccaaccatgggaaggacagggacaacag

SEQ ID NO: 146955 - DNA, 426 bp, Arabidopsis thaliana
cgctatcctttagctctatagtttaaatagtaagtgaaagtcacacagccctaatagaatgatatgttttgtgcaagtaaccatgcaaaagcttacctatcatatccactttcatggagatcacatataatatctaaataatactagaactcatgatcaataaataaagatcatgatggtatgaacagatttttacctgtaaaccaagattcgccttcaaattgaccaacgcaaactttctgtagagaaaagaaaacgacaaaactgaataacctagagacatatcacatgatgcataaactcccaccagaaagtttcacctgccggcactgatcaaaatctgaagaaatttgcaaagtatagacaacatccacagatattcaacaagcataaacagcagctacaatgaaccttcacgactttctc

SEQ ID NO: 146956 - DNA, 438 bp, Arabidopsis thaliana
caaatacaaatagcaaaaaaaatggcaaacaagctcttcctcgtctgcgcaactttcgccctgtgcttcctcctcaccaacgcttccatctaccgcactgttgtcgagttcgacgaagatgacgccagcaaccccatgggcccaagacagaaatgtcagaaggagtttcagcaatcacagcacctaagagcttgccagaaattgatgcgcatgcaaatgaggcaaggccgtggtggtggtccctccctcgacgatgagttcgatttggaagacgacatcgagaacccacaaggcccccagcagggacaccagatcctccagcagtgctgcagcgagcttcgccaggaagagccagtttgtgtttgccccaccttgagacaagctgccagggccgttagcctccagggacaacacggaccattccaatccaggaaaatt

SEQ ID NO: 146957 - DNA, 367 bp, Arabidopsis thaliana
aagaaaacatacacaaatagcaaaacatggcttacaagctcttcctcgtctgcgcaactctggccctctgcttcctcctcaccaacgcttccatctaccgcaccgttgtcgaattcgaagaagatgacgccagcaaccccgtaggtccaagacagagatgccagaaggagtttcagcaatcacaacacctaagagcttgccagagatggatgagcaagcaaatgaggcaaggacgtggtggtggtccttccctcgacgatgagttcgatttcgagggcccccagcagggataccagctactccagcagtgctgcaacgagcttcgccaggaagagccagtttgcgtttgccccaccttgaaacaagc

SEQ ID NO: 146958 - DNA, 431 bp, Arabidopsis thaliana
caaaaagaaaatggttaagctcagcaatctcctcgttgcaaccttcggggttctccgcgtcggtaacggctgccttgcgaggcgagtcacttggggttcctcctcagctacagaacgagtgtaacctcgacaacctagatgttctccaagccaccgaaactatcaagagtgaagccggtcagatcgagtacggggaccacaaccaccctcagctccgatgtgttggtgtttccgttgctcgttatgtaattgaacaaggcggtctttacttgcccaccttcttcacttccccaaaaatttcctacgtcgttcaaggaacgggtatcagcggaagagtggtccctggatgtgccgagaccttcatggactcgcagccgatgcaaggacaacaacaaggccaaccatggcaaggacgacagggacaacaaggc

SEQ ID NO: 146959 - DNA, 435 bp, Arabidopsis thaliana
caataaagaggaagaaaaatgggtcgagtctcatctattatctctttctctttgacactcttgatccgcttcaatggctacactgcccaacagtggcccaacgagtgccagctcgatcaactcaatgcgctcgaaccatcccaaatcatcaagagcgagggtggtcgcatcgaggtctgggaccaccatgcaccccagctccgttgctccggctttgcctttgagcgtttcgtcattgagcctcagggtcttttcttgcccactttcttgaacgccggcaaactcacgtttgttgttcacggaaggggtctaatgggaagagttattccgggatgcgccgagacgttcatggagtcaccggtatttggagaaggtcaaggtcagggtcagagtcaagggttccgtgacatgcaccagtaagtagagcacctacgg

SEQ ID NO: 146960 - DNA, 280 bp, Arabidopsis thaliana
  unsure (1)..(280): unsure at all n locations
gcctaatcacaaacacacacaaatctctgaagtaaaatgacgtcccnctctttctggctggttctctttttgccttcatattcgttacgcatgcattcgacctcagcatcatccagatgcaacagggaacatgtccgtacacggtggttgtcatgacaagctgtctttctccggagtcgacaagagatcagatcagcattgtttttggcgatgccgactgtaacaaggtgtatgcaccgaaactagggggtttggtaagaggaccagggggtttggggaa

SEQ ID NO: 146961 - DNA, 364 bp, Arabidopsis thaliana
  unsure (1)..(364): unsure at all n locations
gagaagaagacacacggacgacactgtatttcttaaggagaccatntcacgccaggggcaccgataacctcgatgatccgtctcggctgacgtgtacaagccacagctcggttacatagcactctaacagttacgatctccccatccttcgttatccgtctctagccctccgtggatctatccgtcaaaacgcaatggtgcttcacagtggaacgcaaacgcgaacgccattctttatgtgacagacggtgaagcccaaatccagatcgtaaacgacaatggtaacagagtgtttgacggacaagtctctcaaggacagctcataaccgtaccacaaggtttctcggtggtgaaacgcgcaaca

SEQ ID NO: 146962 - DNA, 434 bp, Arabidopsis thaliana
aagaaaaatgggtcgagtctcatctattatctctttctctttgacactcttgatcctcttcaatggctacactgcccaacagtggcccaacgagtgccagctcgatcaactcaatgcgctcgaaccatcccaaatcatcaagagcgagggtggtcgcatcgaggtctgggaccaccatgcaccccagctccgttgctccggctttgcctttgagcgtttcgtcattgagcctcagggtcttttcttgcccactttcttgaacgccggcaaactcacgtttgttgttcacggaaggggtctaatgggaagagttattccgggatgcgccgagacgttcatggagtcaccggtatttggagaaggtcaaggtcagggtcagagtcaagggttccgtgacatgcaccagaaagtagagcacctacggtgcggtgaca

SEQ ID NO: 146963 - DNA, 448 bp, Arabidopsis thaliana
  unsure (1)..(448): unsure at all n locations
cactcacnatagtcacaactcataataatctttgttcttccttcctaccaaatanntggggttttctccggtcattggtcnttgcatgtgctattaggagcgcctannattttgggttgcctnnntctgcttcaagcatcaaacctcnttaatgctcagttgaggccctgatttctaccttcgggaccgtgcccatttgtttnttgatatcnnattggaaatatcatcgtcgatgaactgcagactgatcctcgtattgccgcgagcctccttcgtcttcactttcacgactgctttgttcgtggttgtgatgcatcgatcttgcttgacaattccacatcattccggactgagaaagatgctgctccgaacgcaaattcggctcgagggtttaatgtcatagatagaatgaaagtagcccttgagagagcttgcccaggaagagtct

SEQ ID NO: 146964 - DNA, 449 bp, Arabidopsis thaliana
cccggcgtacgctaagaagatgaaagtcgactacgagtctactcgtgtttttttctatatgcttaacactttagagcctggggcatggatacgcggctcaacagggtcagcagggtcagcagtttccgaacgagtgccagctcgaccagctcaatgcgctcgagccttcacacgtactgaagagcgaggctggtcgcatcgaggtgtgggaccaccacgctcctcagctccgttgctcaggtgtctcctttgcacgttacatcatcgagtctaagggtctctacttgccctctttctttaacaccgcgaagctctccttcgtggctaaaggacgaggtcttatgggaaaagtgatccctggatgcgccgaaacattccaagactcatcagagttccaaccacgcttcgaaggtcaaggtcaaagccagaggttccgtgacatgcaccag

SEQ ID NO: 146965 - DNA, 299 bp, Arabidopsis thaliana
aaacaaaaagaaaatggttaagctcagcaatctcctcgttgcaaccttcggggttctcctcgtccttaacggctgccttgcgaggcagtcacttggggttcctcctcagctacagaacgagtgtaacctcgacaacctagatgttctccaagccaccgaaactatcaagagtgaagccggtcagatcgagtactgggaccacaaccaccctcagctccgatgtgttggagtttccgctgctcgttatgtaattgaacaaggcggtctttacttgcccacctctttcacttacccaaaaa

SEQ ID NO: 146966 - DNA, 427 bp, Arabidopsis thaliana; identical to SEQ ID NO: 119286

SEQ ID NO: 146967 - DNA, 364 bp, Arabidopsis thaliana
  unsure (1)..(364): unsure at all n locations
agcagaggttgatcttcgctggaaagcagttggaggatggcagaactcttgctgactacaacatccagaaggagtccacacttcatcttgttctcaggctccgtggtggtatgcagatctttgtcaagacgttgactggaaagactatcactttggaggtggagagctctgacactatcgacaatgtcaaagccaagatccaggacaaagagggtatcccaccggaccagcagagattgatcttcgccggaaaacaactngaagatggtagaactttggctgactacaacattcagaaggagtctacacttcacttgggtgtgcgtctgcgtggaggtatgcagattttcgtgaagactctcac

SEQ ID NO: 146968 - DNA, 409 bp, Arabidopsis thaliana
  unsure (1)..(409): unsure at all n locations
catctactgaagtatcatgctcgttttcctaatggtgacacgaggatttcgagtcctctgcggaaaagctatgtctacctttactgaaggatcattatcatgtgacacagggattttcagtcccccgcaattaagctatgccgaccattactgaggtatcatctactgaagtatcatcttgcttttactaatggtgacataaggattttcagtcctctgcaactaaggtatgtcgaccattaccgaaggatcatcttgcttttactaatggtgacacaaggattttcagtcccccgcaattaagctatgtgtaccattaccgaagtataatctactgaagtatcagtatcattttaatatatgacttaggtctatgtcaatgaaaagaaactcanaagtagtaaattca

SEQ ID NO: 146969 - DNA, 428 bp, Arabidopsis thaliana
gctcttagcctttactctatagttttatatcatatcaatcgacatggcgaatgtggaccgtgatcggcgtgtgcatgtagaccgtactgacaaacgtgttcatcagccaaactacgaagatgatgtcggttttggtggctatggcggttatggtgctggttctgattataagagtcgcggcccctccactaaccaaatcttggcacttatagcaggagttcccattggtggcacactgctaaccctagctggactcactctagccggttcggtgatcggcttgctagtctccatacccctcttcctcctcttcagtccggtgatagtcccggcggctctcactattgggcttgctgtgacgggaatcttggcttctggtttgtttgggttgacgggtctgagctcggtctcgtgggtcctcaactacc

SEQ ID NO: 146970 - DNA, 431 bp, Arabidopsis thaliana
gaaaacatacacaaatagcaaaacatggcttacaagctcttcctcgtctgcgcaactctcgccctctgcttcctcctcaccaacgcttccatctaccgcaccgttgtcgaattcgaagaagatgacgccagcaaccccgtaggtccaagacagagatgccagaaggagtttcagcaatcacaacacctaagagcttgccagagatggatgagcaagcaaatgaggcaaggacgtggtggtggtccttccctcgacgatgagttcgatttcgagggcccccagcagggataccagctactccagcagtgctgcaacgagcttcgccaggaagagccagtttgcgtttgccccaccttgaaacaagctgccagggcagttagcctccagggacagcacggaccattccaatccaggaaaatttaccagtcagc

SEQ ID NO: 146971 - DNA, 374 bp, Arabidopsis thaliana
aagaaataacaaaatggctcgagtctcttctcttctttctttcttcttaacacttttgatgcttttccatggctacgcggctcaacagggtcagcagggtcagcagtttccgaacgagtgccagctcgaccagctcaatgcgctcgagccgtcacacgtactgaagagcgaggctggtcgcatcgaggtgtgggaccaccacgctcctcagctccgttgctcaggtgtctcctttgcacgttacatcatcgagtctaagggtctctacttgccctctttctttaacaccgcgaagctctctttcgtggctaagggacgaggtcttatgggaaaagtgatccctggatgcgccgaaacattccaagactcatcag

SEQ ID NO: 146972 - DNA, 430 bp, Arabidopsis thaliana
catttaatagattccaactgtagtaatatctgaaagcaatttatgaatgcgtgacgcattggtttgttatactatatgattatttaatttttataaagaaaattcacgaaaaatacataacttccattgattgccattgactcaatgaaaagaaaaagtctcaatttaactataagagaatccgattcgaacaacaatagctactagaatgccttttagtttattggaaaatacattaaccaattgatgattttctagtggctatacttttgttgattcaaaccaaatgatatcaattttgactagatgaacacatttgacccactgtaaattccataaaatggttgtgaagtaacttccattaggattatcgtgaactaactttatcacatatctcaaagaatactactctcatgattctttcgttttt

SEQ ID NO: 146973 - DNA, 436 bp, Arabidopsis thaliana
agaaaatggttaagctcagcaatctcctcgttgcaaccttcggggttctcctcgtccttaacggctgccttgcgaggcagtcacttggggttcctcctcagctacagaacgagtgtaacctcgacaacctagatgttctccaagccaccgaaactatcaagagtgaagccggtcagatcgagtactgggaccacaaccaccctcagctccgatgtgttggtgtttccgttgctcgttatgtaattgaacaaggcggtctttacttgcccaccttcttcacttccccaaaaatttcctacgtcgttcaaggaacgggtatcagcggaagagtggtccctggatgtgccgagaccttcatggactcgcagccgatgcaaggacaacaacaaggccaaccatggcaaggacgacagggacaacaaggccaaccatggga

SEQ ID NO: 146974 - DNA, 431 bp, Arabidopsis thaliana
ctttaattcataagagtgatgattatcgctgttggttcttaaaaaagtaaggaacaaacatctgtttcgtaagtttcagcaatgtacagtggaactgtgaagagggtatcaccactgcaagatattaaactgcgtgtgcagattacagtttctttggaaatggaggataatgatccgaataaagaatatttgtatgctaaaggcttaagtgattttgttacttggctaaatgctgataagaaaccgcttcacgatgtgctgggatttagaaaagagataaatggtaccaccataaacatcgcgcttcaatggtgcgtagatggatattcaaacaaaattctgggatacgccaatggcatccgcaccatggatggtggaacatacatagatggtgtgaaagcgtcaataacaagaaccctgaacagccttgt

SEQ ID NO: 146975 - DNA, 238 bp, Arabidopsis thaliana
ttttctttatccaactttcttcaccaaatcgtttcttcttcaaccatgtcttccttcacctgcaaattcgccgatgagctgattgctaacgctgcttacatcggaacacctggaaaaggtatccttgcggcagatgaatcaactggtactattgggaaacgtctcgctagcatcaacgttgagaacgttgaatccaacagacgtgctcttcgtgagcttctcttcactactcctggag

SEQ ID NO: 146976 - DNA, 426 bp, Arabidopsis thaliana
attttacatacatgtttttttgaaaaaactataaatttttataaagcgaaaattgtcgtaaatgtgatcaaacagagcactatgccttgtatgaagggctaaaatgacaaaaaaaaattatcttcctaaatagttatttattagtttaaatgacgagactaaccttggaaatttggctccgagaatatccttctggccgtactttctccaactgaatccatcgtccagcgttctatcaacaccagctccaggggcaattctgacttttgaactccaccttggcattgacttcttcgaactatagtacattttcaaataactatgagtttatgagaaataaaacaaaaatacgttaggacagtttatagatatgaatgtacctcttgatgacaagtggttcttgatcggaatcatcgctcttggggc

SEQ ID NO: 146977 - DNA, 430 bp, Arabidopsis thaliana
catacacacatagcaaaaaatggcaaacaagttgttcctcgtctgcgcagctctcgctctctgcttcctcctcaccaacgcttgcatctaccgcaccgtcgttgagttcgaagaagatgacgccactaaccccataggcccaaaaatgaggaaatgccgcaaggagtttcagaaagaacaacacctaagagcttgccagcaattgatgctccagcaagcaaggcaaggccgtagcgatgagtttgatttcgaagacgacatggagaacccacagggacaacagcaggaacaacagctattccagcagtgctgcaacgagcttcgccaggaagagccagattgtgtttgccccaccttgaaacaagctgccaaggccgttagactccagggacagcaccaaccaatgcaagtcaggaaaatttaccagaca

SEQ ID NO: 146978 - DNA, 421 bp, Arabidopsis thaliana
ggaagaaaaatgggtcgagtctcatctattatctctttctctttgacactcttgatgctctgcaatggctacactgcccaacagtggcccaacgagtgccagctcgatcaactcaatgcgctcgaaccatcccaaatcatcaagagcgagggtggtcgcatcgaggtctgggaccaccatgcaccccagctccgttgctccggctttgcctttgagcgtttcgtcattgagcctcagggtcttttcttgcccactttcttgaacgccggcaaactcacgtttgttgttcacggaaggggtctaatgggaagagttattccgggatgcgccgagacgttcatggagtcaccggtatttggagaaggtcaaggtcagggtcagagtcaagggttccgtgacatgcaccagaaagtagagcacc

SEQ ID NO: 146979 - DNA, 428 bp, Arabidopsis thaliana
gttttatatcatatcaatcgacatggcgaatgtggaccgtgatcggcgtgtgcatgtagaccgtactgacaaacgtgttcatcagccaaactacgaagatgatgtcggttttggtggctatggcggttatggtgctggttctgattataagagtcgcggcccctccactaaccaaatcttggcacttatagcaggagttcccattggtggcacactgctaaccctagctggactcactctagccggttcggtgatcggcttgctagtctccatacccctcttcctcctcttcagtccggtgatagtcccggcggctctcactattgggcttgctgtgacgggaatcttggcttctggtttgtttgggttgacgggtctgagctcggtctcgtgggtcctcaactacctccgtgggacgagtgatacag

SEQ ID NO: 146980 - DNA, 435 bp, Arabidopsis thaliana
aacctaacggaaataattattttactaatcggataatgtctgattaaaacattttatgatattacactaagagagttagagacgtatggatcacaaaacatgaagctttcttagatggtatcctaaaactaaagttaggtacaagtttggaatttaggtcaaatgcttaagttgcattaatttgaacaaaatctatgcattgaataaaaaaaagatatggattattttataaagtatagtccttgtaatcctaggacttgttgtctaatcttgtcttatgcgtgcaaatctttttgatgtcaatatataatccttgtttattagagtcaagctctttcattagtcaactactcaaatatactccaaagtttagaatatagtcttctgactaattagaatcttacaaccgataaacgttacaatttggttatcatt

SEQ ID NO: 146981 - DNA, 430 bp, Arabidopsis thaliana
gtggctccatccgtaaaaacgctatggtgctaccgcaatggaacgtaaacgcaaacgcgggactctacgtgacaaacggaaaggctcatatacaaatggtgaacgacaacggagaaagagtgttcgaccaagagatctccagcggacagttactagtcgtgccacaaggcttttcggtcatgaaacatgccataggcgaacagttcgagtggatcgaattcaagacaaacgaaaacgcacaggtcaacacactcgcgggccgtacctcagtcatgagaggtttgccgcttgaggttataaccaatgggtaccagatctctcccgaagaagctaaacgagtaaagtttagcacgattgagaccacactgacccatagcagtccaatgagctacggaagggcctaggcttgaggcttgatgagcgcgtggtg

SEQ ID NO: 146982 - DNA, 340 bp, Arabidopsis thaliana
gaatgataagcgggactggatcgtcactgtttgaagaactcggtctttactatattggtccagttgatgggcacaacatagatgatttggtagccattcttaaagaagttaagagtaccagaaccacaggacctgtacttattcatgtggtgacggagaaaggtcgtggttatccttacgcggagagagctgatgacaaataccatggtgttgtgaaatttgatccagcaacgggtagacagttcaaaactactaataagactcaatcttacacaacttactttgcggaggcattagtcgcagaagcagaagtagacaaagatgtggttgcgattcatgc

SEQ ID NO: 146983 - DNA, 422 bp, Arabidopsis thaliana
gaaaatggttaagctcagcaatctcctcgttgcaaccttcggggttctcctcgtccttaacggctgccttgcgaggcagtcacttggggttcctcctcagctacagaacgagtgtaacctcgacaacctagatgttctccaagccaccgaaactatcaagagtgaagccggtcagatcgagtactgggaccacaaccaccctcagctccgatgtgttggtgtttccgttgctcgttatgtaattgaacaaggcggtctttacttgcccaccttcttcacttccccaaaaatttcctacgtcgttcaaggaacgggtatcagcggaagagtggtccctggatgtgccgagaccttcatggactcgcagccgatgcaaggacaacaacaaggccaaccatggcaaggacgacagggacaacaag

SEQ ID NO: 146984 - DNA, 437 bp, Arabidopsis thaliana
gaagaaggacgacatggacgacacggtaatggcttataggagaccatctgcagcgccaggtgcaccgataacctcgatgacccgtctcgtgctgacgtgtacaagccacagctcggttacatcagcactctcaacagttacgatctccccatccttcgcttcatccgtctctcagccctccgtggatctatccgtcaaaacgcaatggtgcttccacagtggaacgcaaacgcgaacgctattctttacgtgacagacggggaagcccaaatccagatcgtaaacgacaatggtaacagagtgtttgacggacaagtctctcaaggacagctcatagccgtaccacaaggtttctcggtggtgaaacgcgcaacaagcaaccgattccagtgggttgagttcaaaacaaacgctaacgcgcaaatcaacactctggc

SEQ ID NO: 146985 - DNA, 392 bp, Arabidopsis thaliana
caaaaagaaaatggttaagctcagcaatctcctcgttgcaaccttcggggttctcctcgtcgttaacggctgccttgcgaggcagtcacttggggttcctcctcagctacagaacgagtgtaacctcgacatcctagatgttctccaagccaccgaaactatcaagagtgaagccggtcagatcgagtactgggaccacaaccaccctcagctccgatgtgttggtgtttccgttgctcgttatgtaattgaacaaggcggtctttacttgcccaccttcttcacttccccaaaaatttcctacgtcgttcaaggaacgggtatcagcggaagagtggtccctggatgtgccgagaccttcatggactcgcagccgatgcaaggacaacaac

SEQ ID NO: 146986 - DNA, 424 bp, Arabidopsis thaliana
ggagaacagccacttgtcatcatcgctcttctcgacatcgccaactaccaaaaccaactcgaccgcaaccctagagtgttccatttggccggaaacaaccagcagggaggctttggcggttcacagcaacaacaagaacagaaaaacttgtggagcgggttcgacgcacaggtcatagctcaagcattgaaaattgacgttcagttggctcagcagcttcagaaccaacaagacagcagaggaaacatcgttcgtgttaagggacctttccaggtcgtgaggccacctctaagacagccctacgagagcgaggagtggagacacccacgtagcccacagggcaacggccttgaggagactatctgcagcatgaggtcccacgagaacattgacgaccctgctcgtgctgacgtgtacaagccca

SEQ ID NO: 146987 - DNA, 433 bp, Arabidopsis thaliana
ccaggactttgagaaggctgggacacttcgggatagagaaattgaactcagagctgaggtatgtgcaatccaagcgaaaggcaaggagatgagcaaagcagagagtgagaccggtgaggaaggccctatggtcacggagtcagacatccaacacattgtgtcttcatggactggtattcctgttgagaaagtatcaaccgatgagtctgaccgtctcctcaagatggaagaaaccctccacaaacgtatcataggccaagacgaagctgtgaaagccataagccgagccattcgccgtgcacgtgttggactcaagaatcctaaccgtccaatcgctagtttcatattctcgggtccaaccggtgttgggaaatctgagcttgccaaagctttagcagcttactacttcggttccgaagaagccatgattcgt

SEQ ID NO: 146988 - DNA, 429 bp, Arabidopsis thaliana
aacgagtaagaatacaaatacaaatagcaaataaaatggcaaacaagctcttcctcgtctgcgcaactttcgccctctgcttgctcctcaccaacgcttccatctaccgcactgttgtcgagttcgacgaagatgacgccagcaaccccatgggcccaagacagaaatgtcagaaggagtttcagcaatcacagcacctaagagcttgccagaaattgatgcgcatgcaaatgaggcaaggccgtggtggtggtccctccctcgacgatgagttcgatttggaagacgacatcgagaacccacaaggcccccagcagggacaccagatcctccagcagtgctgcagcgagcttcgccaggaagagccagtttgtgtttgccccaccttgagacaagctgccagggccgttagcctccagggacaacacg

SEQ ID NO: 146989 - DNA, 436 bp, Arabidopsis thaliana
caaaaagaaaatggttaagctcagcaatctcctcgttgcaaccttcggggttctcctcgtccttaacggctgccttgcgaggcagtcacttggggttcctcctcagctacagaacgagtgtaacctcgacaacctagatgttctccaagccaccgaaactatcaagagtgaagccggtcagatcgagtactgggaccacaaccaccctcagctccgatgtgttggtgtttccgttgctcgttatgtaattgaacaaggcggtctttacttgcccaccttcttcacttccccaaaaatttcctacgtcgttcaaggaacgggtatcagcggaagagtggtccctggatgtgccgagaccttcatggactcgcagccgatgcaaggacaacaacaaggccaaccatggcaaggacgacagggacaacaaggccaacca

SEQ ID NO: 146990 - DNA, 363 bp, Arabidopsis thaliana
ccggcgataatctcggagaagtcaccgggaacagaggcagaagctgcggctcagaatctctcggagttgaaatcggagaccggtgcaggtaataacccttgtctgcgatacctctctcttcctccgataatggcgacatcttgtcgaaaggatcgccttcgtttccgttggttccctgctttaacggcgtcacgggactgttaagtgcaagcttggggaaatcaagacagctaggcgacaaaatctcctgatttctcggcgagaatcttggacttccggcgccaccaccaccgatcatgagtgtattaatcatgagactgttcttgaggttgttgttaaatccgccgtgtgatcttctctcgt

SEQ ID NO: 146991 - DNA, 431 bp, Arabidopsis thaliana
gcgaattcgtaggttcaattcctactggattcacgccaatcggaccctccaataagtctattggaattggctctgtatcaatggaatcttctcatcatctatacataacgaattggtgtggtatattcatatcataacatatgaacagtaagaactagcattcttattgagactagaactcatagggaagaaaatcgatttatggatggaatcaaatatgcagtatttacagacaaaagtattcggttattggggaaaaatcaatatacttttaatgtcgaatcaggattaactaggacagaaataaagcattgggtcgaactcttctttggtgtcaaggtaatagctatgaatagtcatcgactccccggaaaggttaaaagaatgggacctattctgggacatacaatgcattacagacgtatgatcat

SEQ ID NO: 146992 - DNA, 435 bp, Arabidopsis thaliana
gaaaaaacaacagatccgaattttatctttaatcagccggaaaaaatggagaaagcgatcgagagacaacgcgttcttcttgagcatctccgaccttcttcttcttcttcgcacaattacgaggcttctctatctgcttctgcttgcttggctggggacagtgctgcatatcagaggacctctctctatggagatgatgttgtcattgtcgcggcacataggactccactatgcaagtccaaacgtggcaatttcaaggatacatatcccgatgatttgctcgcacctgttttgagggcattgatagagaagacgaatctaaacccaagtgaagtaggtgacattgttgtgggtactgttttggcacctggatctcagagagccagtgaatgcaggatggctgcgttctatgctggtttccctgaaaccgtggct

SEQ ID NO: 146993 - DNA, 430 bp, Arabidopsis thaliana
ggcggttaaacctgtccggttatgaatgttccggtttactgcagaacattttaccaatatcgttactgctttgaatctgttctgatatgctgctatgtgtaaggctgtgttaccgtcttgatcacgtttgttcaaaaactgcatctctaacgattcagcgtctgtttgacgaagtctttgtacccatcccaagagtacttcaagctcttcgtatctatcgtttgaaaccgcgatgtgtagagcggtttcaccgttcacgtttgcatctctaatgcaaccaggacaagctaagaggaactctgtcataagatcagtttctcctcttcttactacttgatgaaacggcgtcataccttgtattcgaaatcaaactatttcaaccatttatagtaataacaaaagatcaaacaatttcaagaaaacaaaacac

SEQ ID NO: 146994 - DNA, 435 bp, Arabidopsis thaliana
aaaaagaaaatggttaagctcagcaatctcctcgttgcaaccttcggggttctcctcgtcctgaacggctgccttgcgaggcagtcacttggggttcctcctcagctacagaacgagtgtaacctcgacaacctagatgttctccaagccaccgaaactatcaagagtgaagccggtcagatcgagtactgggaccacaaccaccctcagctccgatgtgttggtgtttccgttgctcgttatgtaattgaacaaggcggtctttacttgcccaccttcttcacttccccaaaaatttcctacgtcgttcaaggaacgggtatcagcggaagagtggtccctggatgtgccgagaccttcatggactcgcagccgatgcaaggacaacaacaaggccaaccatggcaaggacgacagggacaacaaggccaacca

SEQ ID NO: 146995 - DNA, 377 bp, Arabidopsis thaliana
agaaaacatacacaaatagcaaaacatggcttacaagctcttcctcgtctgcgcaactctcggcctgggcttcctcctcaccaacgctgccatctaccgcaccgttgtcgaattcgaagaagatgacgccagcaaccccgtaggtccaagacagagatgccagaaggagtttcagcaatcacaacacctaagagcttgccagagatggatgagcaagcaaatgaggcaaggacgtggtggtggtccttccctcgacgatgagttcgatttcgagggcccccagcagggataccagctactccagcagtgctgcaacgagcttcgccaggaagagccagtttgcgtttgccccaccttgaaacaagctgccagggcag

SEQ ID NO: 146996 - DNA, 431 bp, Arabidopsis thaliana
agaaataacaaaatggctcgagtctcttctcttctttctttcttcttaacacttttgatcctgttgcatggctacgcggctcaacagggtcagcagggtcagcagtttccgaacgagtgccagctcgaccagctcaatgcgctcgagccgtcacacgtactgaagagcgaggctggtcgcatcgaggtgtgggaccaccacgctcctcagctccgttgctcaggtgtctcctttgcacgttacatcatcgagtctaagggtctctacttgccctctttctttaacaccgcgaagctctctttcgtggctaagggacgaggtcttatgggaaaagtgatccctggatgcgccgaaacattccaagactcatcagagttccaaccacgcttcgaaggtcaaggtcaaagccagaggttccgtgacatgcacca

SEQ ID NO: 146997 - DNA, 433 bp, Arabidopsis thaliana
agaaaaatgggtcgagtctcatctattatctctttctctttgacactcttgatcctcttcaatggctacactgcccaacagtggcccaacgagtgccagctcgatcaactcaatgcgctcgaaccatcccaaatcatcaagagcgagggtggtcgcatcgaggtctgggaccaccatgcaccccagctccgttgctccggctttgcctttgagcgtttcgtcattgagcctcagggtcttttcttgcccactttcttgaacgccggcaaactcacgtttgttgttcacggaaggggtctaatgggaagagttattccgggatgcgccgagacgttcatggagtcaccggtatttggagaaggtcaaggtcagggtcagagtcaagggttccgtgacatgcaccagaaagtagagcacctactgtgcggtgaca

SEQ ID NO: 146998 - DNA, 391 bp, Arabidopsis thaliana
aagaaataacaaaatggctcgagtctcttctcttctttctttcttcttaacacttttgatcgttttccatggctacgcggctcaacagggtcagcagggtcagcagtttccgaacgagtgccagctcgaccagctcaatgcgctcgagccgtcacacgtactgaagagcgaggctggtcgcatcgaggtgtgggaccaccacgctcctcagctccgttgctcaggtgtctcctttgcacgttacatcatcgagtctaagggtctctacttgccctctttctttaacaccgcgaagctctctttcgtggctaagggacgaggtcttatgggaaaagtgatccctggatgcgccgaaacattccaagactcatcagagttccaaccacgcttc

SEQ ID NO: 146999 - DNA, 433 bp, Arabidopsis thaliana
catttacaagaatattgacaagatcggtgcttttacctgtcctgtcttagtaatccatgggactgcagatgaagtggttgattgttctcatggaaaacaactttgggaactttcaaaagaaaagtatgagcctttatgggtatctggaggaggacactgcaatctagaactctatccagagttcataaaacatctgaagaaatacgtaatttctatttccaagggaccaagaactggttcgaacaagactgcaacgacggatgcagccaaaaaacagagcaagcctgcagagaacgggcgtgctgatacgtttcaacttggctgttgccttccagaagtttctagaaacagtgtagacagtcagctggagaaatctaagaagactagtaaacccgagaagtctcgtatgagcattgataggtttagaaggaaa

SEQ ID NO: 147000 - DNA, 417 bp, Arabidopsis thaliana
cttagacttatctctatatacccccttttaatttgtgtgctcttagcctttactctatagtgttatatcatatcaatcgacatggcgaatgtggaccgtgatcggcgtgtgcatgtagaccgtactgacaaacgtgttcatcagccaaactacgaagatgatgtcggttttggtggctatggcggttatggtgctggttctgattataagagtcgcggcccctccactaaccaaatcttggcacttatagcaggagttcccattggtggcacactgctaaccctagctggactcactctagccggttcggtgatcggcttgctagtctccatacccctcttcctcctcttcagtccggtgatagtcccggcggctctcactattgggcttgctgtgacgggaatcttggcttctggt

SEQ ID NO: 147001 - DNA, 427 bp, Arabidopsis thaliana
taaacactctggtcaaaatgggagtatactttagagcggttgcgttttcggtctttgtgtcgtttctgctgtttttcactgcttattctaagagaaatgatggaacattcagagttggcctgaaaaaactgaagttggatcctaacaaccgactcgcaacacgctttggttccaagcaagaagaggccttgagatcttctttgcgttcgtacaacaacaatcttggtggtgattctggagatgctgatattgtcccgctcaagaattacttggatgctcagtactatggtgagattgctattggtactccaccgcagaagttcactgtcatttttgataccggaagctctaacctttgggtgccatcaggaaaatgttttttctcgctgtcttgttactttcatgctaagtacaagtcctcgcgatc

SEQ ID NO: 147002 - DNA, 351 bp, Arabidopsis thaliana
  unsure (1)..(351): unsure at all n locations
ggacagaggcacgccacagagaggtgccggttgcaaccgccggccgtttcagccaaatcaacaggctgtcgcccgatgaggcgactaagttcgaagccggtcagatggaagtatgggaccacatgagccctgagctccgatgcgccggtgtaacggtggctcgcatcacccttcagcccaattccattttcttgcccgctttctttagcccacctgcccttgcttacgttgtccaaggagaaggagttatggggacgattgcttctggttgtcctgagacttttgcagaagttgaaggatcatcangaagaggaggaggaggagacccgggtcgacgttttgaggacatgc

SEQ ID NO: 147003 - DNA, 430 bp, Arabidopsis thaliana
  unsure (1)..(430): unsure at all n locations
cggcgatcgattttcacggcgagaaatgtcgtcggttcttggctttgctttacttaccaccttcacggtgctcttgtcgtatttaagtttttctaatgggttactgcaacctcgtaggatttctcatggattgtccaaaagtagcaagtacttgacgagggatgagctctggttcactcaaaccttagatcactactctctatctgatcatcgcaaattcagacagagatactatgaatatcttgaccatttacgagttcctgacggacctatctttctcatgatttgcggcgaaggaccttgcaatggaatcaccaataactatattagtgtgttggcaaagaagtttgatgcaggcattgtttcactcgagcatcgttactatggaaagagctcaccatntaagtcgttagccactaagaatctcaag

SEQ ID NO: 147004 - DNA, 435 bp, Arabidopsis thaliana
aaaaagaaaatggttaagctcagcaatctcctcgttgcaaccttcggggttctcctcgtccttaacggctgccttgcgaggcagtcacttggggttcctcctcagctacagaacgagtgtaacctcgacaacctagatgttctccaagccaccgaaactatcaagagtgaagccggtcagatcgagtactgggaccacaaccaccctcagctccgatgtgttggtgtttccgttgctcgttatgtaattgaacaaggcggtctttacttgcccaccttcttcacttccccaaaaatttcctacgtcgttcaaggaacgggtatcagcggaagagtggtccctggatgtgccgagaccttcatggactcgcagccgatgcaaggacaacaacaaggccaaccatggcaaggacgacagggacaacaaggccaacca

SEQ ID NO: 147005 - DNA, 444 bp, Arabidopsis thaliana
catacacacatagcaaaaaatggcaaacaagttgttcctcgtctgcgcagctctcgctctctgcttggtgctcaccaacgcttccatctaccgcaccgtcgttgagttcgaagaagatgacgccactaaccccataggcccaaaaatgaggaaatgccgcaaggagtttcagaaagaacaacacctaagagcttgccagcaattgatgctccagcaagcaaggcaaggccgtagcgatgagtttgatttcgaagacgacatggagaacccacagggacaacagcaggaacaacagctattccagcagtgctgcaacgagcttcgccaggaagagccagattgtgtttgccccaccttgaaacatgctgccaaggccgttagactccagggacagcaccaaccaatgcaagtcaggaaaatttaccagacagccaagcacttggc

SEQ ID NO: 147006 - DNA, 397 bp, Arabidopsis thaliana
ccggctctggttccggcacgcgccacgctttagaacacgatgcttcttatgctcgcctttgtttttctattagctttggcgacttgtaaaggtgacgagtttgtttgtgaagagaacgagccattcacatgtaaccaaactaaacttttcaacagtggcaatttcgaaaaaggcttcatcttcggtgttgcatcttctgcttaccaggtggaaggcggtagaggccgtggacttaacgtttgggatagcttcactcaccgattcccagagaaaggtggagctgatttgggaaatggagacactacttgtgactcatatactctgtggcagaaagatatagacgtgatggacgagctcaactctactggctacagattctccattgcgtggtcaagac

SEQ ID NO: 147007 - DNA, 387 bp, Arabidopsis thaliana
aacaaaaagaaagtggctcgcctcagagaggtgccgtttgcaaccgtcctgccgatttactcaaactaagcggctgccttgcgaggcagtgacttggttttcctcctcagctacagaacgtgtgtcacctcgacaacctagatgttctccaagccaccgaaactatcaagagtgaagccggtcagatcgagtactgggaccacaaccaccctcagctccgatgtgttggtgtttccgttgctcgttatgtaattgaacaaggcggtctttacttgcccaccttcttcacttccccaaaaatttcctacgtcgttcaaggaacgggtatcagcggaagagtggtccctggatgtgccgagaccttcatggactcgcagccgatgcaag

SEQ ID NO: 147008 - DNA, 398 bp, Arabidopsis thaliana
ataccattgccacaacacccggtgtagcccattggttctacaacgacggacagcaaccacttgtcatcgtcagcatcttcgatctagccagtcaccagaaccagcttgaccgcaacccaaggccattttacttagccggaaacaacccacaaggtcaagtatggctacaaggacgagagcaacagccacagaagaacatcttcaatggatttggacccgaggttattgctcaagctttgaagattgatcttcagacagcgcagcaacttcagaaccaagatgacaaccgtggaaacattgtccgagtccaaagcccgttcggtgtcattaggccgcctttgaggggccagagacctcaggaggaggaagaagaagaagaaggacgacacggacgacac

SEQ ID NO: 147009 - DNA, 381 bp, Arabidopsis thaliana
atctttttgatcaatctctcattcaaaatcttattctctctagtaaacaagaacaaaaaaagggcggatacagctagaggaacgcatcacgatatcatcggcagagaccagtacccgatgatgggccgagaccgagaccagtaccagatgtccggacgaggatctgactactccaagtctaggcagattgctaaagctgcaactgctgtcacagctggtggttccctccttgttctctccagccttacccttgttggaactgtcatagctttgactgttgcaacacctctgctcgttatcttcagcccaatccttgtcccggctctcatcacagttgcactcctcatcaccggttttctttcctctggagggtttggcatt

SEQ ID NO: 147010 - DNA, 377 bp, Arabidopsis thaliana
gtcgtgtcttgtactagaacataatgtctcactaagctaagtggagtatttccactggtgcgctgccccttctatttatttgacactttgttcactttaattttcagctgttgcagatggaacgtaaagtccaatcagcgaaacatcatgagttagtgtactggcatttagcctctcacggtattcctaaaagcctccattgcctttccctcagattaactgaagagtactctgtaaatgcaatggctcgaatgcgtttgcctccgcctgagtccgtatcacgtctgaccgacccatcttttcatcatattgtcctcctgactgacaatgtccttgctgcctctgtcgtcatatcgtctactgtacaaaacgctgtg

SEQ ID NO: 147011 - DNA, 369 bp, Arabidopsis thaliana
tcacaaacgagtaagaatacaaatacaaatagcatataaaatggcaaacaagctcttcctcgtgggcgcaactttcgccctctgcttcctcctcaccaacgcttccatctaccgcactgttgtcgagttcgacgaagatgacgccagcaaccccatgggcccaagacagaaatgtcagaaggagtttcagcaatcacagcacctaagagcttgccagaaattgatgcgcatgcaaatgaggcaaggccgtggtggtggtccctccctcgacgatgagttcgatttggaagacgacatcgagaacccacaaggcccccagcagggacaccagatcctccagcagtgctgcagcgagcttcgccaggaaga

SEQ ID NO: 147012 - DNA, 453 bp, Arabidopsis thaliana
ctcgccaaaaaccttgaaacctttaaaaaatcgaaactatggctaagctcattctcgttttcggaactcttgccctcttgatcctgctagccaacgcatccatctaccgcacagtggtggagttcgaggaagatgatgacgtgagcaacccacaacaaggtaagtgccagagggagtttatgaagcatcagcaactaagaggttgcaagcaatggatccgcaagagagctcaacaaggaagaatcggatacgaagctgatgactttgagctcactcttgatgtcgatcttgaggacgatgagaacccaatggggcctcaacaacagtcatctcttaaaatgtgttgtaatgaattaaggcaagtggacaagatgtgtgtgtgtcctacactgaaaaaggcggctcaacaagtcagattccagggaatgcatggacagcaacaggtgcaacatg

SEQ ID NO: 147013 - DNA, 445 bp, Arabidopsis thaliana
cgcgtccgccgtcggatgctgacgtgtacaagccatcactcggatacattagcacacttaacagctacaaggggtgctatcctcagactgctccgccttagcgctcttcgtggctccatccgtaaaaacgctatggtgctaccgcaatggaacgtaaacgcaaacgcggcactctacgtgacaaacggaaaggctcatatacaaatggtgaacgacaacggagaaagagtgttcgaccaagagatctccagcggacagttactagtcgtgccacaaggcttttcggtcatgaaacatgccataggcgaacagttcgagtggatcgaattcaagacaaacgaaaacgcacaggtcaacacactcgcgggccgtacctcagtcatgagaggtttgccgcttgaggttataaccaatgggtaccagatctctcccgaagaagctaaac

SEQ ID NO: 147014 - DNA, 427 bp, Arabidopsis thaliana
  unsure (1)..(427): unsure at all n locations
gcgtccgaagaaaatggttaagctcagcaatctcctcgttgcaaccttctgngttctcctcgnccttaacggctgccttgcgaggcagtcagtgggggttcctcctcaactacagaacgagtgtaacctccacaacctagatgttctccaagccaccgaaactatcaagagtgaagccggtcagatcgagtactgtgaccacaaccaccctcagctccgatgtgttggtgtttccgttgctcgctatgtaattgaacaaagcggtctttacttgcccaccttcttcattnctcaaaaatttcctacgtcgttcaaagaacgggtatcagcggaagaatggtccctggatgtgccgagaccttcatggactcgcaagccatgcaaggacaacaacaaggccaaccattgcaaggacgacagggacaac

SEQ ID NO: 147015 - DNA, 378 bp, Arabidopsis thaliana
gcaacagcaacaacaacaataacagcactgttactagcaataacaccagtttctcctgcgggaatgcatccaccatcagcgcgattctctcctcccactatggaggaaaccaagagagtatcttaagccagattttgtctccggcgaggctaatgaatcctacttacaatcatctcggagatctcacaagtaatacaaaaacagacaacaacatgagcttgttgaactatggaggattgagtcaagacttgaggtcaatccacatgggagcttctggtggctcgcttatgagctgtgttgatgaatggagatcggcgtcttatcatcagcagtcaagtatgggcggtgggaacttggaggattcttctaaacctaatc

SEQ ID NO: 147016 - DNA, 421 bp, Arabidopsis thaliana
ggaagaaaaatgggtcgagtctcatctattatctttttctctttgacactcttgatcctcttgaatggctacactgcccaacaggggcccaacgagtgccagctcgatcaactcaatgcgctcgaaccatcccaaatcatcaagagcgagggtggtcgcatcgaggtctgggaccaccatgcaccccagctccgttgctccggctttgcctttgagcgtttcgtcattgagcctcagggtcttttcttgcccactttcttgaacgccggcaaactcacgtttgttgttcacggaaggggtctaatgggaagagttattccgggatgcgccgagacgttcatggagtcaccggtatttggagaaggtcaaggtcagggtcagagtcaagggttcccggacatgcaccagaaagtagagcacc

SEQ ID NO: 147017 - DNA, 456 bp, Arabidopsis thaliana
gacgacagggacaacaaggccaaccatgggaaggacagggacaacagggacaacaaggaagacagggccaaccatgggaaggacagggacaacagggacaacaaggacgacagggacaacaaggccaaccatgggaaggacagggacagcagggacaacaagggttccgtgacatgcaccagaaggtggaacatgtgagacgcggagacgtctttgccaacactccaggctctgcccactggatctacaactcaggagaacagccacttgtcatcatcgctcttttcgacatcgccaactaccaaaaccaactcgaccgcaaccctagagtgttccatttggccggaaacaaccagcagggaggctttggcggttcacagcaacaacaagaacagaaaaacttgtggagcgggttcgacgcacaagtcatagctcaagcattgaaaattgacgttc

SEQ ID NO: 147018 - DNA, 420 bp, Arabidopsis thaliana
aacatacacaaatagcaaaacatggctaacaagctcttcctcgtctgcgcaactctcgccctgtgcttcctcctcaccaacgctggcatctaccgcaccgttgtcgaattcgaagaagatgacgccagcaaccccgtaggtccaagacagagatgccagaaggagtttcagcaatcacaacacctaagagcttgccagagatggatgagcaagcaaatgaggcaaggacgtggtggtggtccttccctcgacgatgagttcgatttcgagggcccccagcagggataccagctactccagcagtgctgcaacgagcttcgccaggaagagccagtatgcgtttgccccaccttgaaacaagctgtcagggcagttagccttcagggacagcacggaccattccaatccaggaaaatttac

SEQ ID NO: 147019 - DNA, 443 bp, Arabidopsis thaliana
aaaaatgggtcgagtctcatctattatctctttctctttgacactcttgatcctcttcaatggcgtacactgcccaacagtggccgaacgagtgccagctcgatcaactcaatgcgctcgaaccatcccaaatcatcaagagcgagggtggtcgcatcgaggtctgggaccaccatgcaccccagctccgttgctccggctttgcctttgagcgtttcgtcattgagcctcagggtcttttcttgcccactttcttgaacgccggcaaactcacgtttgttgttcacggaaggggtctaatgggaagagttattccgggatgcgccgagacgttcatggagtcaccggtatttggagaaggtcaaggtcagggtcagagtcaaggtgtccgtgacatgcaccagaaagtagagcacctacggtgcggtgacaccattgcaaca

SEQ ID NO: 147020 - DNA, 247 bp, Arabidopsis thaliana
aacaagggttccgtgacatgcaccagaaggtggaacatgtgatacgcggagacatctttgccaacactgcaggctctgcccactggagcgacaactcaaaataacatccacttgtcatcatcgctcttctcgacatcgtcaactaccaaaaccaactcgaccgcaaccctagagtgttccatttggccggaaacaaccagcaaggaggcttttgcggttcacaacatcaacaattatcacaaaaact

SEQ ID NO: 147021 - DNA, 217 bp, Arabidopsis thaliana
gaaggccgaagaggggaaaggttccatgtgaacggtacttgcacatgggttagtctatgctaagagtccgtggaaacgccgggtgatagctcttaagcgcgaacttcgaaaggggatccggttaaaatttctgaaccgggacgtggcgtttgacggtaacgttagggagttcgttgacgttctttttgtccttggtatgtgtttttttatctgttta

SEQ ID NO: 147022 - DNA, 404 bp, Arabidopsis thaliana
caaaaatggcttctcttgctcccggaatcctcttttatactccttcaatgcatgaactgcggcgctcgtcccaccggagatcacagatctgcaatcttacaagtcaccggaatcgtcccagctctcgccggctccgatctatggcctaaccaaggcttctacgtccaaatctccgattctctcaactccacttacgtctctctctctgaacgcgacacagatctaatcctcagtaaccgtctccagttaggtcaattcatatacctagaacgcttagaattcgctactccagtcccacgcgccgccggaattcgtcccgtctctggtcgtcatgccttcgtcggaaaaccagagccgttgattgcaagagtttctaacggatcttaacgagatttcgttattca

SEQ ID NO: 147023 - DNA, 503 bp, Arabidopsis thaliana
  unsure (1)..(503): unsure at all n locations
ntccgaagaanaaatgnggtcgaggtctcatcnntattatctctttttctctttgacannctcttgatcctcgtgcaggggggctacactgcgccaacgaggggcgccaacnnagtgctcagctcgatctaactcaatgncgctcgaacccatcccaaatcatcaagangcgangggtggtcgcatncgaggtcttgggaccaaccatgcanccccagnctccgttgcttccggctttgnctctttgagcgtttcgtcaattgagcccctcaagggtcttttctttgcccaactttcttgaaccgccggcannaactcacgtttgttgttcactggaagggtgtcttaattggaaggagttattctcgggaatgccccgagaccgttcatggagttcaccggtatttggagaaggtcaaggtcagggtcagagtcaagggttccgtgacatgcaccagaaagttgagcacctactgtgcggtgacaccattgcaacaccattt

SEQ ID NO: 147024 - DNA, 452 bp, Arabidopsis thaliana
  unsure (1)..(452): unsure at all n locations
cacatagcaaaaaatggcaaacaagttgttccttgtctgcgcagctctcgctctctgcggcgggctcaccaacgctggcgggtgccgcaccgtcgttgagttcgaagaagatgacgccactaaccccataggcccaaaaatgaggaaatgccgcaaggagtttcagaaagaacaacacctaagagcttgccagcaattgatgctccagcaagcaaggcaaggccgtagcgatgagtttgatttcgaagacgacatggagaacccacagggacaacagcaggaacaacagctattccagcagtgctgcaacgagcttcgccaggaagagccagattgtgtttgccccaccttgaaacaagctgccaaggccgttagactccagggacagcaccaaccaatgcaagtcaggaaaanttaccagacagccaagcacttgcccaacgtttgcgaca

SEQ ID NO: 147025 - DNA, 458 bp, Arabidopsis thaliana
cgtccgttcaagcattgaaaattgacgttcagttggctcagttgtttcagaaccaacaagacagcagaggaagacatcgttcgtgttaaggggcgctttccaggtcgtgaggccacctctaagacagccctacgagagcgaggagtggagacacccacgtagcccacagggcaacggccttgaggagactatctgcagcatgaggtcccacgagaacattgacgaccctgctcgtgctgacgtgtacaagcccagcctaggtcgcgtgaccagcgtcaacagctataccttgcccatcttggagtatgtcaggctcagtgccactcgtggcgttctccagggtaatgcgatggtgcttcctaaatacaacatgaacgctaacgagatcttgtactgcactggaggacaaggaaggatccaagtggtcaacgacaacggacagaacgtgttggaccaac

SEQ ID NO: 147026 - DNA, 313 bp, Arabidopsis thaliana
ggcgaccaggcgtccgatcaaggaggtgtcttcatacctgaagaaggtttttacataccctgacaaaatcccatttgtgccagtctctgtattcgagggagacagcatgattgataggtcaaccaaccttgactggtacaagggaccaactcttcttgaggctcttgaccagatcaacgagcccaataagccatcagacaagccccttcgtctttcacttcaggatgtctacaagattggtggtattggaacggtgccagtgggacgtgttgagactggtatgatcaagcctggtatggttgttacctttgct

SEQ ID NO: 147027 - DNA, 426 bp, Arabidopsis thaliana
  unsure (1)..(426): unsure at all n locations
cgtccgacacatagaaaaaaatgtcaaacacattgtttctcttttctccaggtctcgctctctgcttggtgctcaccaaccctgggatgggccggaccttcnttgaattcaaacaatatcacgccactaaccccataggcccaacaatgatgaaattccgcaaggagtctcataaagaacaacacctaagagcttgccagcaattgatgctccagcaagcaaggcaaggccataacgattagtttcatttcgaagaccacatgtagaacccacaggtacaacagcacgaacatcagctattccaacagatctgcaacgagcttcttcacaaagaaccacattttgtttgccccacctttgaacacgctttcaatgtccttagactcctaggacagcaccaaccaatgcaagtcaggaaaatttacc

SEQ ID NO: 147028 - DNA, 317 bp, Arabidopsis thaliana
  unsure (1)..(317): unsure at all n locations
aattttnnttttttaaataactattaaaatcctttttataacccaaaatattacttttggcgggtttataaatccgatgagatgacacaaaataccattaatcaatttattctttaataaaaaatataaacttatagacattctacacttctccacatttacatcaacaatgttttaaaaaaacaacatcattcaacatcatcatcactaatatattccaatcatatataaaatctccttttccttatattttcatataaaaaacatcctctttgctttactctcctccattttcatcactctccctccactctttg

SEQ ID NO: 147029 - DNA, 444 bp, Arabidopsis thaliana
gaaaatggttaagctcagcaatctcctcgttgcattcttcggggttctcctcgtccttaacggctgccttgcgaggcagggacttggggttcctcctcagctacagaacgagtgtaacctcgacaacctagatgttctccaagccaccgaaactatcaagagtgaagccggtcagatcgagtactgggaccacaaccaccctcagctccgatgtgttggtgtttccgttgctcgttatgtaattgaacaaggcggtctttacttgcccaccttcttcacttccccaaaaatttcctacgtcgttcaaggaacgggtatcagcggaagagtggtccctggatgtgccgagaccttcatggactcgcagccgatgcaaggacaacaacaaggccaaccatggcaaggacgacagggacaacaaggccaaccatgggaaggacaggg

SEQ ID NO: 147030 - DNA, 458 bp, Arabidopsis thaliana
cgcgtccgcaaaaagaaaatggttaagctcagcaatctcctcgttgcaaccttcggggttctcctcgtccttaacggctgccttgcgaggcagtcacttggggttcctcctcagctacagaacgagtgtaacctcgacaacctagatgttctccaagccaccgaaactatcaagagtgaagccggtcagatcgagtactgggaccacaaccaccctcagctccgatgtgttggtgtttccgttgctcgttatgtaattgaacaaggcggtctttacttgcccaccttcttcacttccccaaaaatttcctacgtcgttcaaggaacgggtatcagcggaagaagtggccctggatgtgccgagaccttcatggactcgcaaccgatgcaaggacaacaacaaggccaaccatggcaaggaccacagggacaacaaggccaaccatgggaaggacaggg

SEQ ID NO: 147031 - DNA, 449 bp, Arabidopsis thaliana
  unsure (1)..(449): unsure at all n locations
caagaacagaaaaacttgtggagcgggttctacgcacaggtcatagctcaagcattgagaatggacgttcagttgggtcgggaggttcagaaccaacaagacagcanaggaaacatcgttcgtgttaagggacctttccaggtcgtgaggccacctctaagacagccctactagagcgaggagtggagacacccacgtagcccacagggcaacggccttgaggagactatctgcagcatgaggtcccacgagaacattgacgaccctgctcgtgctgacgtgtacagcccagcctaagtcgcgtgaccagcgtcaacagctataccttgcccatcttggagtatgtcaggctcagtgccactcgtggcgttctccagggtaatgcgatggtgcttcctaaatacaacatgaacgctaacgagatcttgtactgcacttgaggacaagga

SEQ ID NO: 147032 - DNA, 453 bp, Arabidopsis thaliana
tacacacatagcaaaaaatggcaaacaagttgtttctcgtctgcgcagctctcgctcggtgcgtcctcctcaccagcgggggcgggtaccgcaccgtcgttgagttcgaagaagatgacgccactaaccccataggcccaaaaatgaggaaatgccgcaaggagtttcagaaagaacaacacctaagagcttgccagcaattgatgctccagcaagcaaggcaaggccgtagcgatgagtttgatttcgaagacgacatggagaacccacagggacaacagcaggaacaacagctattccagcagtgctgcaacgagcttcgccaggaagagccagattgtgtttgccccaccttgaaacaagctgccaaggccgttagactccagggacagcaccaaccaatgcaagtcaggaaaatttaccagacagccaagcacttgcccaacgtttgcg

SEQ ID NO: 147033 - DNA, 391 bp, Arabidopsis thaliana
  unsure (1)..(391): unsure at all n locations
ggccggcccacgcgnccgataagaaataacaaanagtctcgtgtcttaatacttttttctttcatcttaacacttgtggaggctttttcatgggggcggggctcaacacggtcagcatggtcagcagttttcgaacgagtgccagctcgaccagctcaatgcgctcgagccgtcacacgtactgaagagcgaggctggtcgcatcgaggtgtgggaccaccacgctcctcagctccgttgctcaggtgtcttctttgcacgttacatcatctagtctaagggtctctacttgccctctttctttaacacctctaatctttcttgcgtggctaaggtactaggtcttattggaaaagtgatccctgtatgctccgaaacatttcaagactta

SEQ ID NO: 147034 - DNA, 453 bp, Arabidopsis thaliana
gtccggttctctccgcccatctctgctctcttttattttcccagaaagatttttttttttttttccgggtgccgttaatctcattggggttgccattgatagcaatggcgacggctttcgctcccactaagctcactgccacggttcctctgcatggatcccatgagaatcgtctcttgctcccgatccgattggctcctccttcttctttcctcggatccacccgttccctctcccttcgcagactcaatcactccaacgccacccgtcgatctcccgtcgtctctgtccaggaagttgtcaaggagaagcaatccaccaataataccaacctgttgataaccaaagaggaaggattggagttgtatgaagatatgatacttggtagatctttcgaagacatgtgtgctcaaatgtattaccgaggcaagattgttggttttgttcacttgt

SEQ ID NO: 147035 - DNA, 405 bp, Arabidopsis thaliana
  unsure (1)..(405): unsure at all n locations
cgtccgataaaaatggctcgagtctcttctcttctttctttctccttaacacttttgatccttttccagtggctgctcnactcaacagggtgagcanggtcagcaatttccgaacgagtgccagctcgaccagctcaatgcgctcgagccttcacacgtactgaagagcgaggctggtcgcatcgaggtgtgggaccaccacgctcctcagctccgttgctcaggtgtctcctttgcacgttacatcatcgagtctaagggtctctacttgccctctttctttaacaccgcgaagctctccttcttggctaaaggacgaggtcttatgggaaaagtgatccctggatgcgccgaaacattccaagacttatcagagtttcaaccacgcttctaaggtcaaggtca

SEQ ID NO: 147036 - DNA, 434 bp, Arabidopsis thaliana
  unsure (1)..(434): unsure at all n locations
cgtccgcggcaaactcacntttgttgttcacggaaggggtttatttttaagagttattccggnatccggcgagacgttcatggggggaggggtgtttgtanaatttcaaggtcagggtcagagtcaagggttccgtgacatgcaccagatagtatagcacctactgtgcggtgacaccattgcaacaccatctgttgtagctcaatggttctacaacaatggaaatgagcctctcattcttgttgcagccgcggatctcgccagcaaccacaaccagcttgaccgcaaccttagaccatttttgatagccggaaacaacccacaagggcaagaatggctacaaggccgaaagcaacagaagcaaaacaacattttcaatggctttccacctgagatcttggctcaagccttcaagatcaatgtcgtgactgctc

SEQ ID NO: 147037 - DNA, 446 bp, Arabidopsis thaliana
cgcaggttagcttcttctaccattattgctttcgcattcgttctggggtaagggtttgggcatgaactttcgccagtgcggaggttgtaacttttagaaaccacactgttaatttgcacatatattactgttccatggctggtactgataaccgccgctctcgccacgacgactaaagccctaaaaatcccaacaagaagaagaaaggaaaccgtaatccagaaaagagtctccttatcaatcttcattcatgttccaagagaaaggatctctcagctgcattggctctttatgatgcagctatcactttcagtgacattcgccttaaccagcaacacttccaatcccttctttacctctgctccgcgttcattagtgacccattttttcaaaccgttgccatttaccgtggctttcaaatttttgaccgtattgttaagttttgg

SEQ ID NO: 147038 - DNA, 464 bp, Arabidopsis thaliana
  unsure (1)..(464): unsure at all n locations
ntccgcaaaaaatgggcaaacannagttgttctctcgtttgtcgtatgtctctcgctctctgggcttcctcctcacgcaacgnncttccatctacgcgcacgcgtcnngttgagttctgaagaagatgactgctcactaaccccatagggcccaaaaatganggaaatgccgcaagggagtttcagaaagaaccaacacctaagagcnttgcctagcaattgatgctccagcaagcaaaggcaagggcctgtagcgatgaggtttgatttcgaagacgacattggagaacccacagtggacaaccagcagggaacaacagnctattccagcnagtgctgcaaccgagcttcgctcaggaagaggccagattgtgttttgccccaaccttgaaacaaagctgccaagggccgttagactccagggacagcaccaaccaatgcaagtcaggaaaaattaccagaca

SEQ ID NO: 147039 - DNA, 313 bp, Arabidopsis thaliana
cattaatgaacagagctcatttcttctagtcctttttttttccttcctcccttttcccgttaattccagaccttttcttggagggaagaaggattggagttgaaagaccagggtttgagtatgaggtggtctctggttctcggtaacgctttaatgctaaactgcgccccttgggctttaacggctctatgctctttctttgctagagctcttctctcaggtactgtcttgaaggtgatgtatagagaatgatatgaggtgttgatcagtggaggcaatggaacaatgatgatatggtgatgatggaggagaa

SEQ ID NO: 147040 - DNA, 452 bp, Arabidopsis thaliana
  unsure (1)..(452): unsure at all n locations
gaaacccaaaccctcattccaaataatggtgtcttgctctcaaaacctctcctttatcgtccgcctcctccttggcttcgttgccgtctcctatgcttgcgactgtacccctcctaaaccatcaccagcacctcacaaaccaccaaaacatccagtcaaaccgcctaaacctcctgccgtcaaaccacctaaaccaccggcagtaaaaccacctactccaaaacctcccaccgtgaaaccccatcctaaaccaccaaccgtcaaaccccatcctaaaccaccaaccgtcaaaccccaccctaagccacccaccgtcaaaccaccccaccctaaaccacccaccaaaactcacccccacccaaaacctcccatcgtaaagccaccaaccaagcctnctncgtccacccctaaacctcccaccaaacctnccccgttcacacctaaaccttcca

SEQ ID NO: 147041 - DNA, 437 bp, Arabidopsis thaliana
ttctttttgcttttgttgttttgggttctgttctttgattctttcaagatggagaaatcaacaagctcggatttgaaatcctccgttaacggtggcgttgttgatgtgtatggagaagattcagccaccattgagcacaacataactccttggtctctctctgtttctagtggatattcattgctgagagatcctcgctacaacaaaggacttgctttcactgagaaagagcgagacactcattacttgcgtggtcttctccctccagttgttcttgatcaaaagcttcaggagaagaggctgatgaacaatatccgccaatatcaatttccattacaaaagtacatggccttgacagaacttcaggaaagaaacgagagactgttttacaagttgttgatagaatatgttgaagagcttcttcctattgtttatac

SEQ ID NO: 147042 - DNA, 375 bp, Arabidopsis thaliana
gagattattgagtctctttgttgttgtttttgcttgcagtctttgagttgaggttaagagaactggcggtggctgtgccattaatgtgctgctccgcagatatgatctctgttccgtcgaggaaacaagttgtattggttggttctaagtcttccccagagcttaccaacatgctttctgcagcacattcagtctatgatcctaataaaacggtaagagcttaaaaaattatccaaatttctagattcaagatttgtgacttttggtggttttactgagcaggtgattcacatagatccctctagttctgatgaaatcgagttttgggaagagcataacagtaatgtagctgagatggctaagaagaacagaaac

SEQ ID NO: 147043 - DNA, 442 bp, Arabidopsis thaliana
gcgcgccacacgcgcccgaaaaaggggcaaacaggtggtctctggtgggcgcttttttcgctctgtgcttcctcctaaccaacgcttccatctaccgcaccgtcgttgagttcgaagaagatgacgccactaaccccataggcccaaaaatgaggaaatgccgcagggagtttcagaaagaacaacacctaagagcttgccagcaattgatgctccagcaagcaaggcaaggccgtagcgatgagtttgatttcgaagacgacatggagaacccacagggacaacagcaggaacaacagctattccagcagtgctgcaacgagcttcgccaggaagagccaagatgtgtttgccccaccttgaaacaagctgccaaagccgttagactccagggacagcaccaaccaatgcaagtcagggaaaattaccagacagccaagca

SEQ ID NO: 147044 - DNA, 447 bp, Arabidopsis thaliana
gtcgtaatgccagaggaataattaccgcaaggcttatagttggaggtcataagcgtttatacggaaaaatagattttcgacgaaatgcaaaagacatatatggtagaatcgtaaccatagaatacgaccctaatcgaaatgcatacatttgtctcatacactatggcgatggtgagaagagatatattttacatcccagaggggctataattggagataccattgtttctggtacagaagttcctataaaaatgggaaatgccctacctttgagtgcggtttgaactatttgatttacgtaattggaagtaaccaattaggtttacgacgaaacctagaaatcgatcactgatccaatttgagtacctctacaggatagacctcaacagaaaactgaagagtaacggcagcaagtgattgagttcagtagttcctcatataaaatta

SEQ ID NO: 147045 - DNA, 453 bp, Arabidopsis thaliana
gttctctaagacttatctctatatacccccttttattttttgtgctcttagcctttactctatagttttatatcatatcaatcgacatggcgaatgtggaccgtgatcggcgtgtgcatgtagaccgtactgacaaacgtgttcatcagccaaactacgaagatgatgtcggttttggtggctatggcggttatggtgctggttctgattataagagtcgcggcccctccactaaccaaatcttggcacttatagcaggagttcccattggtggcacactgctaaccctagctggactcactctagccggttcggtgatcggcttgctagtctccatacccctcttcctcctcttcagtccggtgatagtcccggcggctctcactattgggcttgctgtgacgggaatcttggcttctggtttgtttgggttgacgggtctgagctcggtct

SEQ ID NO: 147046 - DNA, 406 bp, Arabidopsis thaliana
caaaaagcctctctttctctctcttttgttttttgttaccatggctaagtcttgctatttcagaccagctcttcttcttctgttagttcttttggttcatgccgagtcacgcggtcggttcgagccaaagattcttatgccgacagaggaagctaacccggctgaccaagacgaagatggtgtcggtacaagatgggcggttctcgtcgctggttcttctggatatggaaactacagacaccaggctgacgtgtgtcacgcatatcaaatactaagaaaaggaggtttaaaggaagagaacatagtcgttttgatgtatgatgatatcgcaaaccacccacttaatcctcgtccgggtactctcatcaaccatcctgacggtgacgatgtttacgccggagtccct

SEQ ID NO: 147047 - DNA, 355 bp, Arabidopsis thaliana
aacaaacaaaaagaaaatggttaagctcagcaattttctcgttgcaaccttcggggttctcctcgtccttaacggctgccttgcgaggcagtcacttggggttcctcctcagctacagaacgagtgtaacctcgacaacctagatgttctccaagccaccgaaactatcaagagtgaagccggtcagatcgagtactgggaccacaaccaccctcagctccgatgtgttggtgtttccgttgctcgttatgtaattgaacaaggcggtctttacttgcccaccttcttcacttccccaaaaatttcctacgtcgttcaaggaacgggtatcaagccgagagtggtccctggatgt

SEQ ID NO: 147048 - DNA, 220 bp, Arabidopsis thaliana
tgcagcatgaggtcccacgagaacattgacgaccctgctcgtgctgacgtgtacaagggcagcctaggtcgcgtggcgcagggtcaacagctataccttgcccatcttggagtatgtcaggctcagtgccactcgtggcgttctccagggtaatgcgatggtgctttctaaatacaacatgaacgcttactagatcttgtactgcacttgaggacaagga

SEQ ID NO: 147049 - DNA, 257 bp, Arabidopsis thaliana
aacaaacaaaaagaaaatggttaagctcagtaatctcctcgttgcaaccttcggggttgtgctcgtccttaacgggtgggtggcgaggcaatcacttggggttcctcctcagctacagaacgagtgtaacctcgacaacctagatgttctccaagccaccgaaactattaagagtgaagccggtcagatcgagtactgtgaccacaaccactctcagcttcgatgtgttggtgtttccgttgctcgttatgtaattg

SEQ ID NO: 147050 - DNA, 443 bp, Arabidopsis thaliana
ctctcaatcatatctctctctctcacagagattgtgacttcacgcacacgtaacctaagtcgagagatggtgagaaaatgtggaagagctaaaggaattgtagaagctggagtttcgtcaacgtatatgcagctacggagccggagaattgtttatgttagatcggaaaaatcaagctctgtctccgtcgtcggtgataatggagtttcatcgtcttgtagtgggagcaatgaatataagaagaaagaattaatacatctggaggaggaagataaagatggtgacactgaaacgtctacgtatcgacggggtacgaagagtgaagcttttgaaaatctgagagaggaggtgaaagaagaattaagtataatccatggagaattattcatcggaatttgaatccggtggttaagaatctttagattgttgttgttgcgggagga

SEQ ID NO: 147051 - DNA, 456 bp, Arabidopsis thaliana
  unsure (1)..(456): unsure at all n locations
gtccgcatttcttaaatttctctccctaaatattccgagtttttgatttttgataacttcaggtcaggatgggagtatactcgagagcggttgcgttttcngtctttgtgtcgtttctgctgtttttcactgcttattctaagagaaatgatggaacattcagagttggtctgaaaaaactgaagttggatcctaacaaccgactcgcaacacgctttggttccaagcaagaagaggccttgagatcttttttgcgttcgtacaacaacaatcttggtggtgattctggagatgctgatattgtccccctcaagaattacttggatgctcagtactatggtgagattgctattggtactccaccccagaagttcactgtcatttttgataccggtagctttaaccttttggtgccatcaggaaaaatgtttttttcgctgccttggtactttcatg

SEQ ID NO: 147052 - DNA, 450 bp, Arabidopsis thaliana
  unsure (1)..(450): unsure at all n locations
gcgtccgggttctcgtatgaatctgaggtttcaattgattagttaagtagggtcttaacaagagaattcctatgaataataaagaaagcaagaagagatccctgtccccgttccatacaaataccaaataaaaaaagacaataaagataggtaatctagaagattcaagaggcctgtaacgatcaacacaacataaagacgaatgagcttacttgattttttggcatttaaccacaaagacgagctttcgcattttgactctttcatatctttaaataataaaaaataatattgaatgagagacaagtttaaaactttatattccatatctgtttcaatcagtanttgggtctttttttgtttgagctgtacgagatgaaattctcatatacagttccttggagggggagtaaccttgggttacctatctcaataaagattatgattggt

SEQ ID NO: 147053 - DNA, 334 bp, Arabidopsis thaliana
attatctatttctctttgtcactcttgaattttcttaatggctacactgcccaacagggggccaacgagtgccaggtggatcaactcaatgcgctctaaccattccaaaccatcaagagcacagggtggtcgcatcgaggtctgggaccaccatgcaccccaactccggcgtttcggctttgcctttgagcgattcttcattgagactcaggggctcttattgcccactttcatgaacgccgccaaactcacgtactttgttcacggaagactgtctaaagggaagacatataaccccctgcgccgtgacaaacacggagttagggaatatgcc

SEQ ID NO: 147054 - DNA, 172 bp, Arabidopsis thaliana
acgcgtacaaaaaaaaatggtgaaagatctggttgcgtatagattttatccaaccggacattaattcatacgccattatctaaagaacaggatgttgggtaaaacattcctcgtctactaaaccattaactagatcaacatctgtagttactaccctatttacttgccttct

SEQ ID NO: 147055 - DNA, 194 bp, Arabidopsis thaliana
ctctggaagatccaagttgtatttcctaatggaacttcttctatgaacacaagagtctccggaggagatgtcttctggatccggagagtgacttctcgatattccataacctatctcttaccgtaccatttgcgtttgcaggattcaccacatcagctcacatgaatagacctcatttcctagttggaccaaac

SEQ ID NO: 147056 - DNA, 353 bp, Arabidopsis thaliana
agaaaaatgggtcgagtctcatctattatctctttttctttgacactcttgatcctcttgaatggctacactgcccagacaggggcccaactagtgccagctcgatcaactcaatgcgctcgaaccatcccaaatcatcaagagcgagggtggtcgcatcgaggtctgggaccaccatgcaccccagctccgttgctccggctttgcctttgagcgtttcgtcattgagcctcagggtcttttcttgcccactttcttgaacgccggcaaactcacgtttgttgttcacggaaggggtcttatgggaagagttattccgggatgcgccgagacgttcatggagtaaccggtat

SEQ ID NO: 147057 - DNA, 319 bp, Arabidopsis thaliana
ccggggcggcccacgcgtacgctctctctaaactctctctcacatctctctttttttttcattcaacaacggccgtttcctcgggttcatttctatagacgggtggactaaccaattccaaatccaacatttcattaccttcctcactatccccattcctccgcagcgtccttttccgctccacgactctcccgacttctcaccgtcgttcaatcacggtccgatctaagactcacgaaattttcatgccgccgttatcatcaaccatgacggaaggcaaaatcgcatcctggatcaaaactgacagcgacaaactctc

SEQ ID NO: 147058 - DNA, 434 bp, Arabidopsis thaliana
gaacgcctccaagcaaatcagcactgccatatttttttatcaaaatacacaagctttcgaggaggttgcaatcataaggcaggccggtgtaggtaaatatgcatttggcttcattacatcaactgttgttctccagaactacccaaccgaggaggaactttgctgtgtatacgttcccacgaaccacctttacattggagatatactacttgtcaacagtaatgacgttatcaggccaaacctctctgtccgggaaggaattgagattgttgtttccggtggaatgtcaatgccgcagattctatcgactcttgataaacctttggcctcgattggaaatgaatcttaaagtgactattcaaaaacctttggccgatcgataggaaaaaaacaaaaatcagaagagacgtttcacaaaatctgagcgaatagag

SEQ ID NO: 147059 - DNA, 414 bp, Arabidopsis thaliana
gggcggcccacgcgtacgaacaaacaaaaagaaaatggttaagctcatttattttctcgttgcaaccttcggggttgggctggtccttaacgggtggcgtgcgaggcaatcacttggggttcctcctcagctacagaacgagtgtaacctcgacaacctagatgttctccaagccaccgaaactatcaagagtgaagccggtcagatcgagtactgggaccacaaccaccctcagctccgatgtgttggtgtttccgttgctcgttatgtaattgaacaaggcggtctttacttgcccaccttcttcactttcccaaaaatttcctacgttgttcaaagaacgggtattagcgcgaagagtgtttcctggatgtgccgagaccttcatggacttgcagtcgatgcaaggacaac

SEQ ID NO: 147060 - DNA, 463 bp, Arabidopsis thaliana
cgcgtacgaaaaagaaaatggttaagctcagcaatcttctcgttgcaaccttcggggttctcctcgggctgtaacggctgccttgcgaggcagtcacttggggttcctcctcagctacagaacgagtgtaacctcgacaacctagatgttctccaagccaccgaaactatcaagagtgaagccggtcagatcgagtactgggaccacaaccaccctcagctccgatgtgttggtgtttccgttgctcgttatgtaattgaacaaggcggtctttacttgcccaccttcttcacttccccaaaaatttcctacgtcgttcaaggaacgggtatcagcggaagagtggtccctggatgtgccgagacctttatggactcgcagtcgatgcaaggacaacaacaaggccaaccatggtaaggactacagggacaacaaggccaaccatgggaaggacagggtcaac

SEQ ID NO: 147061 - DNA, 448 bp, Arabidopsis thaliana
  unsure (1)..(448): unsure at all n locations
aatcctccacaagatgaaggaatccgtcatttttttagttgggcttggggcatctgctggatgtgcagattcagggagaggggagagcaagatgtcnaagcagatcacacatggttttcatttggtgaaagggaaagcttttcacgagatggaagattatgtggttgccaaattcaaggaagttgatgataatgagcttggtctgtttgctatcttcgatggccatcttagccacgagattccggactacttgtgctcccatttgtttgagaacatcttgaaagagccgaatttctggcaagaacctgagaaagcgataaagaaagcttactatataacggatacaacgattctagacaaggcagatgatttgggaaaaggaggttctactgctgtgactgcgatattgatcaattgccagaaacttggggttgctaatgttggtgac

SEQ ID NO: 147062 - DNA, 434 bp, Arabidopsis thaliana
  unsure (1)..(434): unsure at all n locations
gcgtccgaggaatcaatgcttgtttactatttggggatgaggattatttatacatttttcaagaagctgggggatctgcaatgcagaaccgtgcacaaggatccttggtatgtagaagtcaatatggattccgcagctattgtctggccagtatttaacagccttcaagctttctggccaggacttcaggttttagctggagacgttgatccagcaataagaactcacactgccttctttagcgtctggaaacgatatggtttcacccctgagggttttaatcttgctacacttagtgtccagtatgggcaaaagagttatcccttaaggccggaattaatcgagagtacatactggttgtacaaagctaccagagatcccaggtatcttgatgcangacgtgactttgtggctagtttgcaatacggggcaaa

SEQ ID NO: 147063 - DNA, 315 bp, Arabidopsis thaliana
  unsure (1)..(315): unsure at all n locations
gcgtncgattanttctatacttctttctttctctctctagtttttgttctctatctctctctcgcatgcggcagatcatattacgagacggtgccgttaagaacattccatcactcttccttcttcacatctctgattttctatatttggggattgtttccacgatatacatatctcaggtcttgagatgcctaattgacagataatgctggaagtttccgtagaactggctgcaccttgcttgggtcactggctccctcacgtttacattctgagtctatctctattgttttttgcccaattgtcacatatttt

SEQ ID NO: 147064 - DNA, 369 bp, Arabidopsis thaliana
  unsure (1)..(369): unsure at all n locations
agaacattgacgaccctgctcgtgctgacgtgttcaattccagcctaggtcgcgtgaccagggggagacagctataccttgggggtcttggagtatgtcaggctcagtgccactcgtggcgttctccagggtaatgcgatggtgcttcctaaatacaacatgaacgctaacgagatcttgtactgcactggaggacaaggaaggatccaagtggtcaacgacaacggacagaacgtgttggaccaacaggtgcagaagggacagctcgtggtcatcccacaagggttcgcatacgttgtccagtcccacggaaacaagtncgagtggatctctttcaaaactaatgaaaacgcattgatcagcactttt

SEQ ID NO: 147065 - DNA, 316 bp, Arabidopsis thaliana
  unsure (1)..(316): unsure at all n locations
acgagaaaacatacacnaaatagctaaaacatggcttttctattctcttccntcgtcntgcgcaacctctcgcggcgtcttcttactacgcgagggacggcttccatataccgcaccgttgtcgaattcgaagaagatgaccccagcaaccccgcatgtccaagacagagattccagaaggagtttcatcaatcacaacacctaagagcttgccagagatggatgagcaagcaaattaggcaaggacgtggtggatttccttctacttgcgctcacatctgttttaaaacacctcaacaaagatcccattttcttc

SEQ ID NO: 147066 - DNA, 455 bp, Arabidopsis thaliana
cacgcgtccggctttcctcaaaggttttttcatcactttatgcttcacaagcgagctagtgaagctaacgatggagaacgataataccatcatcgggtccgatttagcatcatctaagaaacgccgtatcgatttcactgaatcttcgtctgataagtcttcttcgattttagcttctggtagtagcaggggttttcacggcgatagcgtcgttcagcaaatcgacatggcttttggtaattcgaaccgtcaggagattgatgaagatctgcacagtcgccagctcgccgtctatggtcgtgagactatgaggcgtctctttgcttccaatgttctcatctcggggatgcacggtcttggtgccgagattgccaagaatcttatacttgctggtgtgaagtctgtgaccttgcatgatgaaagagttgtagagctatgggacttatcaagcaact

SEQ ID NO: 147067 - DNA, 449 bp, Arabidopsis thaliana
aacggtttggcctttgtctctgagagctgttgcaactgtggctgcagctccttggagatctttgtccaacgcacacactatgttctctacttcttgtcccagttctggcaacaaatccttctctttgagcaactaaatgaaagtggcaaaaataagaaccagatattcagagacacataactattcgctgcgggttataatagtgaccagaagcaaatttaacttacttcaactattacagcatcgccgaaaccaaaaccacaagcaggaaagtcatcacctccataagtagagagtaacctatcatatctcccaccaccacatatagctcgcagcttcccttttcgatcaaatccctatcacaaaacgttgtctatcagttgctattacaaaactatagaccagtattcatgtatggagaaaatctaaccttgaagacgataccagtg

SEQ ID NO: 147068 - DNA, 326 bp, Arabidopsis thaliana
aaacaacaagaaaaagtggcaataaccaacaaatttatcataacacttcttctccttatctccatagctgtcgtccactgcttatccttccgtgtggagatcgacgagttcgagccaccacagcaaggagaacaagaaggtccccgtcgccgtcctggtggtggctctggcgagggatgggaggaagagtcgacgaatcatccataccacttcaggaagcggagtttcagtgattggttccagtcaaaggaagggtttgtgagagtgctgcctaagttcacaaaacatgcaccggctctctttcgaggaatcgagaactacagaat

SEQ ID NO: 147069 - DNA, 460 bp, Arabidopsis thaliana
gcgtccgcaggtaattaactaacaacaaatggcgaacaagcttttcctcgtctgcgcagctctcgccctgtgtttcatcctcaccaacgctggcgtctatcgcacggttgtcgagttcgacgaagatgacgccagtaaccccataggcccaatacagaaatgtcagaaggagtttcagcaagaacagcacctaagagcttgccagagatggatgcgcaagcaaatgtggcaaggacgtggtggtggtccttccctcgacgatgagttcgatatggaagacgacatcgagaacccgcagagacgacagctactccagaagtgctgcagcgagcttcgccaagaagagccagtttgcgtttgccccaccttgagacaagctgccaaggccgtttgatttcagggacagcaacaccaaccagagcaagtcaggaaaatttaccaggcagctaagtacttggct

SEQ ID NO: 147070 - DNA, 456 bp, Arabidopsis thaliana
caattatccaataattaattatggccaaatccaagttctagagttttctctagaaatatcatcatttccacctccttaaaagatgctagaaattttctagaatcatcttccacctccttaaacataaaaatctagatactctaatagaataatctagataatttgaataatgtaatctagatcttatgtaagaactctctagacttaggattaaaatattttagatattttgtagtttggaggctataaatacctcctccccctctcaaatgttgcaatgttgtgaagttgtattcaagtttaaagcaaagtaataaaagttctatttcctaaaaaactctctcaaaacacttaaacactttctccattacctctaaaagaattttactctaacaagcttttcagggaatctaactacccttcgatccgatatctcatccgagaattatctccatg

SEQ ID NO: 147071 - DNA, 458 bp, Arabidopsis thaliana
ccacgcgtccgagcgtcaacagctataccttgcccatcttggagtatgtcatgctcagtgccactcgtggcgttctccagggtaatgcgatggtgcgttgctaaatacaacatgaacgctaacgagatcttgtactgcactggaggacaaggaaggatccaagtggtcaacgacaacggacagaacgtgttggaccaacaggtgcagaagggacagctcgtggtcatcccacaagggttcgcatacgttgtccagtcccacggaaacaagttcgagtggatctctttcaaaactaatgaaaacgcaatgatcagcactttggcgggtagaacctcgctcttgagggcattgccattggaggtcatatcaaatggttttcagatctcttccgaggaagctaggaagatcaagttcaacacacttgagaccactttgacccgcgctgtcggtaggcaaca

SEQ ID NO: 147072 - DNA, 413 bp, Arabidopsis thaliana
agaaaacatacacaaatagcaaaacatggctaacaagctcttcctcgtctgcgcaactctcgccctctgcttcctcctcaccaacgcttgcatctaccgcaccgttgtcgaattcgaagaagatgacgccagcaaccccgtaggtccaagacagagatgccagaaggagtttcagcaatcacaacacctaagagcttgccagagatggatgagcaagcaaatgaggcaaggacgtggtggtggtccttccctcgacgatgagttcgatttcgagggcccccagcagggataccagctactccagcagtgctgcaacgagctttgccaggaagagccagtttgcgtttgccccaccttgaaacaagctgccagggcagttagcctccagggacagcacggaccattccaatcca

SEQ ID NO: 147073 - DNA, 450 bp, Arabidopsis thaliana
  unsure (1)..(450): unsure at all n locations
cgattttactgcgagaaatgttgtcggcgcttggttatgctttactcagcatcttcgggagcctcttgtcggtaggaacgcggtgtctaatggattacttcaacctcgtaggatttctcatggcttgacggaaagtagcaagtacttgacgagggatgagctctggttcaatcaaaccctagatcattactctccttctgatcatcgcgaattcaaacagcgatactatgaatatctagaccatttacgagntcctgatggacctatctttatgatgaactgtggcgaaggaccttgcaatggaatccccaatgactatataactgtgttagcatagaagtttgatgcaggcctttgtttacttgagcatcgttattaccgtaagagctcaccgctttagtcattatccactgagaatctcaagtatctttcttctaaacaggctctttt

SEQ ID NO: 147074 - DNA, 429 bp, Arabidopsis thaliana
aaacgagtaagaatacaaatacaaatagcaaaaaaaatggcaaacaagctcttcctcggctgcgcaactttcgccctctgcttcctcctcaccaacgcttccatctaccgcactgttgtcgagttcgacgaagatgacgccagcaaccccatgggcccaagacagaaatgtcagaaggagtttcagcaatcacagcacctaagagcttgccagaaattgatgcgcatgcaaatgaggcaaggccgtggtggtggtccctccctcgacgatgagttcgatttggaagacgacatcgagaacccacaaggcccccagcagggacaccagatcctccagcagtgctgcagcgagcttcgccaggaagagccagtttgtgtttgccccaccttgagacaagctgccagggccgttagccttcagggacaacac

SEQ ID NO: 147075 - DNA, 418 bp, Arabidopsis thaliana
ttcccgcaaccttcgattttcgtttattcgcatccatcggagagagaaaacaatcaataagcgaccatgttggtgtaccaagatcttctcaccggtgatgagcttctgtctgactctttcccttacaaggagattgagaatggaatcctctgggaagtagaaggaaagtgggttactgtgggagctgtagatgttaacattggtgccaatccatctgctgaagaacgtggtgaggatgaaagtgttgatgactctgctcaaaaggctgttgacattgtcgacaccttcagacttcaggagcaaccaacttatgacaagaacggattcatcgcttacattaagaaatacattaagcttttgacacccaagctcagcgaagaagatcaagctgtcttcaagaagggtattgagggagcta

SEQ ID NO: 147076 - DNA, 430 bp, Arabidopsis thaliana
gtaacctacaaagcggattttctctcaagaaagacgcagagagcgagtttgagatccctgaaatcgtggccacattcaggaagaacaaagagagagtcaacgagatgattaaagagagtcttcaaggcaatacaattggtcagagtttgttgagtttgatggcggaaactgtgtcagagtcaacggagatagaccgatacataatgtctagctggtgcagaaagcctttctacgaggttgacttcggatcgggtagtccggtctgggtgggatacgcgtcacataccatttacgacaacttggtgggtgtcgtgttgattgattcaaaagaaggtgatggtgtagaagcatggataagcttacctgaggaagacatgtccgtgtttgtcgatgaccaagaattgcttgcttatgcccgtctaaatccccc

SEQ ID NO: 147077 - DNA, 420 bp, Arabidopsis thaliana
ggctttggctcggattcgtccgtcttctttcttcttagccgagtacttcggtagattagttggaacgattgatgattttgagttaattgaacgttcggcgtatgagtggtgatcggatagctagtgttcgtaggctccatgctcgcgcatcgaactacctaccacctatccttctcagttaattcacgggcgatgttacgctcgatgatgagttccggggcctgtgtttcgtacctaatttgaaggaattgttgagtttggtttacacctttgcccgcggcttctccttcgtggggaagtcgtgggcacaaacatcggcgcttgttcacctctcgtcatcgcatttgttgccttgctcgcattggtgaatgagttgcgggttgaaatctcggatgcggaaaagttgtcgacggtgactcg

SEQ ID NO: 147078 - DNA, 430 bp, Arabidopsis thaliana
gtaaaacactaactaagagatcaatatggctggagtgatgaagttggcatgcatggtcttggcttgcatgattgtggccggtccaatcacagcgaacgcgcttatgagttgtggcaccgtcaacggcaacctggcagggtgcattgcctacttgacccgaggtgctccacttacccaagggtgctgcaacggcgttactaaccttaaaaacatggccagtacaaccccagaccgtcagcaagcttgccgttgccttcaatctgccgctaaagccgttggtcccggtctcaacactgcccgtgcagctggacttcctagcgcatgcaaagtcaatattccttacaaaatcagcgccagcaccaactgcaacaccgtgaggtgatgagcgacggtcaaatgaagctactagcggatgtttcgaatattatat

SEQ ID NO: 147079 - DNA, 434 bp, Arabidopsis thaliana
aaaactgctctctgaatctcagtgagttctcatttaatgagagggatggtgagttttgccgcttgggctctctttgctgctttactctcacagcagctctttgcttctgttgcttccgtaaggtttgaggatgccaaaacatactacttatctcctccctctggctcacatggaactcctccatcacacacgcctacttcttctaactgtggaagtccaccttacgacccttctccttcaactccttctcacccttcacctccatcacatactccaactccttccactccatcacacactccaactccacacactccatcacacacgccaacttcacacaccccttcttgtaactgtggaagtccacctttccacccttccacgccttcacacccttacactccttcgcacccaacgccatcacaccctccttc

SEQ ID NO: 147080 - DNA, 431 bp, Arabidopsis thaliana
caaacaaaaagaaaatggttaagctcagcaatcttctcgttgcaaccttcggggttctcctcgtccttaacggctgccttgcgaggcagtcacttggggttcctcctcagctacagaacgagtgtaacctcgacaacctagatgttctccaagccaccgaaactatcaagagtgaagccggtcagatcgagtactgggaccacaaccaccctcagctccgatgtgttggtgtttccgttgctcgttatgtaattgaacaaggcggtctttacttgcccaccttcttcacttgcccaaaaatttcctacgtcgttcaaggaacgggtatcagcggaagagtggtccctggatgtgccgagaccttcatggactcgcagccgatgcaaggacaacaacaaggccaaccatggcaaggacgacagggacaacaa

SEQ ID NO: 147081 - DNA, 233 bp, Arabidopsis thaliana
gttcacggaaggggtctaatgggaagtttttattccgggatgcgccgagacgttcatggagtcaccggtatttggagaaggtcaaggtcagggtcagagtcaagggttccgtgacatgcaccagaaagtagagcacctacggtgcggtgacaccattgcaacaccatctggtgtagctcaatggttctacaacaatggaaatgagcctctcattcttgttgcagccgcggatc

SEQ ID NO: 147082 - DNA, 425 bp, Arabidopsis thaliana
aaagaaaatggttaagctcagcaatcttctcgttgcaaccttcggggttctcctcggccttaacggctgccttgcgaggcagtcacttggggttcctcctcagctacagaacgagtgtaacctcgacaacctagatgttctccaagccaccgaaactatcaagagtgaagccggtcagatcgagtactgggaccacaaccaccctcagctccgatgtgttggtgtttccgttgctcgttatgtaattgaacaaggcggtctttacttgcccaccttcttcacttccccaaaaatttcctacgtcgttcaaggaacgggtatcagcggaagagtggtccctggatgtgccgagaccttcatggactcgcagccgatgcaaggacaacaacaaggccaaccatggcaaggacgacagggacaacaag

SEQ ID NO: 147083 - DNA, 432 bp, Arabidopsis thaliana
acctattttcctcagccatggccgtcgggaaaaacaagagaatctctaagggtaggaagggaggaaagaagaaggctgttgatcctttctccaagaaagattggtatgatgttaaggctccttcaatcttcactcacaggaatgttggaaagacacttgtttccagaactcagggtaccaaaattgcctcagaaggcttgaaacacagagtttttgaggtttctcttgctgatcttcaaggtgatgaggataacgcttacaggaagatccgtctcagagctgaagatgtccagggcaggaacgttctgtgccaattctggggcatggacttcaccaccgataaacttaggtcattggttaagaagtggcagactttgattgaggctcatgttgatgttaaaaccaccgacagttacactctcaagctattct

SEQ ID NO: 147084 - DNA, 434 bp, Arabidopsis thaliana
ccaaaaccaactcgaccgcaaccctagtttgttccatttggccggaaacaaccagcagggaggctttggcggttcacagcaacaacaagaacagaaaaacttgtggagcgggttcgacgcacaggtcatagctcaagcattgaaaattgacgttcagttggctcagcagcttcagaaccaacaagacagcagaggaaacatcgttcgtgttaagggacctttccaggtcgtgaggccacctctaagacagccctacgagagcgaggagtggagacacccacgtagcccacagggcaacggccttgaggagactatctgcagcatgaggtcccacgagaacattgacgaccctgctcgtgctgacgtgtacaagcccagcctaggtcgcgtgaccagcgtcaacagctataccttgcccatcttggagtatgtca

SEQ ID NO: 147085 - DNA, 433 bp, Arabidopsis thaliana
cgatcttcagacagcgcagcaacttcagaaccaagatgacaaccgtggaaacattgtccgagtccaaggcccgttcggtgtcattaggccgcctttgaggggccagagacctcaggaggaggaagaagaagaagaaggacgacatggacgacacggtaatggcttagaggagaccatctgcagcgccaggtgcaccgataacctcgatgacccgtctcgtgctgacgtgtacaagccacagctcggttacatcagcactctcaacagttacgatctccccatccttcgcttcatccgtctctcagccctccgtggatctatccgtcaaaacgcaatggtgcttccacagtggaacgcaaacgcgaacgctattctttacgtgacagacggggaagcccaaatccagatcgtaaacgacaatggtaacagagtg

SEQ ID NO: 147086 - DNA, 390 bp, Arabidopsis thaliana
gtctagctacttttgctctctcagtgttagtaacacaaggaagcatttttagtttgtgtttggcctcctctgcttctacaaactctgttcctaattggtttcatcattggccgccgtttaaatggggaccaaaatttccatattctccacctaaaccgccgccaatcgagaaatatcctccaccggtgcagtatccaccaccgatcaagaagtatccaccgccaccatacgagcatccaccggtgaagtatccaccaccgatcaagacttaccctcatccgccggtgaagtatcctccaccagaacagtatccaccgccgatttagaaggattcttcaccagaacagtattcaccggcgattaaaaagtattcttcaacagaacagtatt

SEQ ID NO: 147087 - DNA, 389 bp, Arabidopsis thaliana
ggaagaaaaatgggtcgagtctcatctattatttctttctctttgacactcttgagcctcttcaatggctacactggccaacagtggcccaacgagtgccagctcgatcaactcaatgcgctcgaaccatcccaaatcatcaagagcgagggtggtcgcatcgaggtctgggaccaccatgcaccccagctccgttgctccggctttgcctttgagcgtttcgtcattgagcctcacggtcttttcttgcccactttcttgaacgccggcaaactcacgtttgttgttcacggaaggggtctaatgggaagagttattccgggatgcgccgagacgttcatggagtcaccggtatttggagaaagtcaaggtcaaggtcagagtcaagg

SEQ ID NO: 147088 - DNA, 400 bp, Arabidopsis thaliana
gtttgatcctctcacttaaattaggattatatatggctacatctgctagaagagcatatggattcgggagagctgacgaggcgactcacccggactccattagagccactttggctgagtttctttccacgttcgtcttcgtctttgctggagaaggctcaatcctcgctctagacaagttgtattgggacacggcggctcacacggggacaaacacgcctggagggttagttctggtggcgttagctcatgcattggccttgttcgcggctgtttctgcagccatcaatgtctctggtggccacgtcaaccccgctgtcacttttgctgctctaatcggaggcaggatctcggtcattcgagctatctactattgggttgctcagcttataagtgctat

SEQ ID NO: 147089 - DNA, 431 bp, Arabidopsis thaliana
ctccatccgtaaaaacgctatggtgctaccgcaatggaacgtaaacgcaaacgcggcactctacgtgacaaacggaaaggctcatatacaaatggtgaacgacaacggagaaagagtgttcgaccaagagatctccagcggacagttactagtcgtgccacaaggcttttcggtcatgaaacatgccataggcgaacagttcgagtggatcgaattcaagacaaacgaaaacgcacaggtcaacacactcgcgggccgtacctcagtcatgagaggtttgccgcttgaggttataaccaatgggtaccagatctctcccgaagaagctaaacgagtaaagtttagcacgattgagaccacactgacccatagcagtccaatgagctacggaaggcctaaggcttgaggcttgatgagcgcgtggtggaata

SEQ ID NO: 147090 - DNA, 381 bp, Arabidopsis thaliana
caacaacaaatcttaaacgttttactttgtgctgcactactcaacctcaatggccgcctcaacaatggctctctcctcccctgccttcgccggtaaggccgtcaagctttcccccgcggcatctgaagtccttggaagcggccgtgtgacaatgaggaagactgttgccaagccaaagggcctatcaggcagcccatggtacggatctgaccgtgtcaagtacttgggtccattctctggcgaatcaccgagctaccttaccggagagttccccggagactacggatgggacaccgccggactttcagctgaccccgagacattcgcaaggaaccgtgagctagaagttatccacagcaggtgggctatgctcggagccct

SEQ ID NO: 147091 - DNA, 332 bp, Arabidopsis thaliana
cgatgcttgaggtgataactcaattgttgttttctgtttcagatagcgagagatttggtgtcccggagcaagttgttgttatggattcgagcgtcttgagcggtggaggagctttaggggagcttaagtttccggtgattgctaagccgttggatgctgatgggagtgctaaatctcataagatgtttttgatttatgatcaagaagggatgaagattttgaaagctcctattgtgttgcaggagtttgtgaatcatggtggtgtgatctttaaggtctatgtggttggagatcatgtcaaatgtgtaaagagaagatccttacctgatatc

SEQ ID NO: 147092 - DNA, 508 bp, Arabidopsis thaliana
  unsure (1)..(508): unsure at all n locations
ggaatnnnccgggtgcgacgccaacgcgtccccggaaaaaggtggggtnncatgctggaacactttgatctctcatggcttactcggtctatnntaatcgtgctgcgnntcggtaaagaccacctaagggggttgttgacacgatacccaacggtgattgatcaaagcgttatacgnccggacgtttttcgtctttggttgaagccccacttcaactcttagacgcttgactctcctcgtgattcaagcgagagtcttgggagcatataaaaagatgatgacattatagaaagctttgacatcatttcttggagaaatatggcaagttccaccgatgttctctgcgataaaagttggaggtgagaagatgtacgagaaggcaagaagaggagaaaccgtagagctttctccaagaagaatttcaattttccagtttgacattgaacgcagtttagatgacagacaaaatctgatattccgggttatatgctctaagggtacatacata

SEQ ID NO: 147093 - DNA, 433 bp, Arabidopsis thaliana
gcaacaacaggaacagaaaaacttgtgtagcgtgttcgacgcacaggtcatagctcaagcattgaaaattgacgttcagttggctcaccagcttcagaaccaacaagacagcataggaaacatcggtcgtgttaagggacctttacaggtcgtgaggccacctctaagacagccctacgagagcgaggagtggagacacccacgtagcccacaaggcaacggacttgaagagactatctgcagcatgaggtcccacgagaacattgacgaccctgctcgtgctgacgtgtacaagcccagcctaagtcgcgtgaccagcgtcaacaggtataccttgcccatcttggagtatgtcaggcttagtgccactcgtggcgttcttcaaggtaatgcgatggtgcttcctaaatacaacatgaacgctaacgagatc

SEQ ID NO: 147094 - DNA, 429 bp, Arabidopsis thaliana
cttgtttgctccgaacaatcaagagatcgaaaatggctgatgttcacaaaggaaaggtttgtgtaaccggtgccggagggtttttgggttcgtgggtcgtcgatcttcttctctctaaggattacttcgtccatggcactgtcagagaccctgataatgaaaagtatgctcatttgaagaagctcgagaaagctggtgacaaactcaagctcttcaaggctgatttgttggactacggctctcttcaatctgctattgcaggttgcagcggagtcttccatgtcgcttgcccggttccaccagcttcagtccctaatcctgaggtagaattgatcgcacctgctgtggatggcacgctgaatgtgcttaaggcatgcattgaagcgaatgttaagcgtgttgtgtatgtttcctcttgagctgcggctt

SEQ ID NO: 147095 - DNA, 351 bp, Arabidopsis thaliana
ctctttgtacgaacaaactgcttcgagtttttgttaacctttttctctgatctaatggcgatggaagatcaatcggcggcgagatctatcggaaaagttagttggtttagcgatggaaaaggctacggtttcattactcccgatgatggcggcgaagagctttttgttcatcaatcctcaattgtctccgatggatttcgtagcttgactcttggtgaatcggttgaatacgaaatcgcgcttggaagcgacgggaagaccaaggccattgaagttactgctcccggcggcggttcacttaataagaaggaaaacagctccccgggatccggaggtaattgttttaattgc

SEQ ID NO: 147096 - DNA, 416 bp, Arabidopsis thaliana
caaccacttgtcattgacagcattttttatctagccagtcaccagaaccagcttgaccgaaacccaaggccattttacttaaccggaaacaacccacaaggtcaagtatggctacaaggacgagagcaacagccacagaagaacatcttcaatggatttggacccgaggttattgctcaagctttgaagattgatcttaagacaaggtaacaactgtagaaccaagatgacaaccgtggaaacattgtccgagtccaaggcccgttcggtgtcattaggccgcctttgaggggccagagacctcaagaggaggaagaagaagaagaaggacgacacggacgacacggtaatggcttaaaggagaccatcttgagcgccaggtgcacccataaccttcatgatccgtctcgtgctga

SEQ ID NO: 147097 - DNA, 402 bp, Arabidopsis thaliana
caacgagtgccagctcgatcaactcaatgcgctcgaaccatcccaaatcatcaagagcgagggtggtcgcatcgaggtctgggaccaccatgcaccccagctccgttgctccggctttgcctttgagcgtttcgtcattgagcctcagggtcttttcttgcccactttcttgaacgccggcaaactcacgtttgttgttcacggaaggggtctaatgggaagagttattccgggatgcgccgagacgttcatggagtcaccggtatttggagaaggtcaaggtcagggtcagagtcaagggttccgtgacatgcaccagaaagtagagcacctacggtgcggtgacaccattgcaacaccatctggtgtagctcaatggttctacaacaatggaaatgagcc

SEQ ID NO: 147098 - DNA, 428 bp, Arabidopsis thaliana
agcggtttttcatcaattttcaagcaatcgagaaaaaagcaatggcgtcagacaaacaaaaggcggagagagccgaggttgcggcgaggctagcggctgaggacttgcatgacattaacaaatccggtggtgctgatgtcacaatgtataaggtgacggagagaacaactgaacatccaccggagcaagataggcccggtgtgataggatcagtgttcagggctgtccaaggaacgtatgagcatgcgagagacgctgtagttggaaaaacccacgaagcggctgagtctaccaaagaaggagctcagatagcttcagagaaagcggttggagcaaaggacgcaaccgtcgagaaagctaaagaaaccgctgattatacggcggagaaagtgggtgggtataaagactatacggttgataaagctaaa

SEQ ID NO: 147099 - DNA, 430 bp, Arabidopsis thaliana
aaaacatacacaagtaattaactaacatcaaatggcgaacaagctcttcctcgtctgcgcagctctcgccctgtgtttcatcctcaccaacgcttccgtctatcgcacggttgtcgagttcgacgaagatgacgccagtaaccccataggcccaatacagaaatgtcagaaggagtttcagcaagaacagcacctaagagcttgccagagatggatgcgcaagcaaatgtggcaaggacgtggtggtggtccttccctcgacgatgagttcgatatggaagacgacatcgagaacccgcagagacgacagctactccagaagtgctgcagcgagcttcgccaagaagagccagtttgcgtttgccccaccttgagacaagctgccaaggccgttagattccagggacagcaacaccaaccagagcaagtc

SEQ ID NO: 147100 - DNA, 421 bp, Arabidopsis thaliana
aagaaaaatgggtcgagtctcatctattatctctttctctttgacactcttgatcctcttcaatggctacactgcccaacagtggcccaacgagtgccagctcgatcaactcaatgcgctcgaaccatcccaaatcatcaagagcgagggtggtcgcatcgaggtctgggaccaccatgcaccccagctccgttgctccggctttgcctttgagcgtttcgtcattgagcctcagggtcttttcttgcccactttcttgaacgccggcaaactcacgtttgttgttcacggaaggggtctaatgggaagagttattccgggatgcgccgagacgttcatggagtcaccggtatttggagaaggtcaaggtcagggtcagagtcaagggttccgtgacatgcaccagaaagtagagcaccta

SEQ ID NO: 147101 - DNA, 434 bp, Arabidopsis thaliana
cagaggcatttttggtcataaaatccacacagaggtggttcgacatccaggtgaatgcaagtaataaattgcaggattctctctctataatatatatagatatagcttgcaatcatttcctgcgtttggatcggtctgggttttgtcgagggttttttggggaagacgaaattagggtttagttggggcaaagtaagtagtaaagaagaagaagatgcagcagcagcagtctccgcaaatgtttccgatggttccgtcgattccccctgctaacaacatcactaccgaacagatccaaaagtaccttgatgagaacaagaagctgattatggccatcatggaaaaccagaatctcggtaaacttgctgagtgcgcccagtaccaaactcttctccagaagaacttgatgtatcttgctgcaattgctgatgctc

SEQ ID NO: 147102 - DNA, 438 bp, Arabidopsis thaliana
ctttaagcctctcaacgtgtttttttatatatattttgaaaatcttttacgccttaaaaggatctacgataattaaaaaaaaaatggcaacggaatgcattgcaacggtccctcaaatattcagtgaaaacaaaaccaaagaggattcttcgatcttcgatgcaaagctccttaatcagcactcacaccacatacctcaacagttcgtatggcccgaccacgagaaaccttctacggatgttcaacctctccaagtcccactcatagacctagccggtttcctctccggcgactcgtgcttggcatcggaggctactagactcgtctcaaaggctgcaacgaaacatggcttcttcctaatcactaaccatggtgtcgatgagagcctcttgtcttgtgcctatctgcatatggactctttctttaaagccccggctt

SEQ ID NO: 147103 - DNA, 427 bp, Arabidopsis thaliana
gttccttttgcattttacacttttggttctgttaatgtggttctctgtttcgcccgttaccgtttagattcagttctgttttttttcttacccgatcgcttgattcggactgtgatctttgatcttttttcttctccagtgccgtgaaggatgtgtggtcttgctaagaagctggatatagaggatactttgacatcactgtcagaccaagagaatgaatctttggccaaacccaggaatgatgctgctgaatgggaacattcgttttctgccttgcttgagtttgctgcagacaacgatgtggaggggtttaggcggcaactctctgatgtgtcttgtatcaaccagatgggtctttggtacagacggcagaggtttgttagaagaatggttcttgagcaaagaaccccgctgatggttgcttcgt

SEQ ID NO: 147104 - DNA, 427 bp, Arabidopsis thaliana
aagaaaaatgggtcgagtctcatctattatctttttctctttgacactcttgatcctcttcaatggctacactgcccaacagtggcccaacgagtgccagctcgatcaactcaatgcgctcgaaccatcccaaatcatcaagagcgagggtggtcgcatcgaggtctgggaccaccatgcaccccagctccgttgctccggctttgcctttgagcgtttcgtcattgagcctcagggtcttttcttgcccactttcttgaacgccggcaaactcacgtttgttgttcacggaaggggtctaatgggaagagttattccgggatgcgccgagacgttcatggagtcaccggtatttggagaaggtcaaggtcagggtcagagtcaagggttccgtgacatgcaccagaaagtagagcacctacggtgc

SEQ ID NO: 147105 - DNA, 426 bp, Arabidopsis thaliana
gggaccacaaccaccctcagttccgttgtgttgttgtttccgttgctcgttatgtaattgaacaaggcggtctttacttgcccaccttcttcacttccccaaaaatttcctacgtcgttcaaggaacgggtatcagcggaagagtggtccctggatgtgccgagaccttcatggactcgcagccgatgcaaggacaacaacaaggccaaccatggcaaggacgacagggacaacaaggccaaccatgggaaggacagggacaacagggacaacaaggaagacaaggccaaccatgggaaggacagggacaacagggacaacaaggacgacagggacaacaaggccaaccatgggaaggacagggacagcagggacaacaagggttccgtgacatgcaccagaaggtggaacatgtgagacgcggag

SEQ ID NO: 147106 - DNA, 433 bp, Arabidopsis thaliana
gtagaagaaaaatggcgactcttaagtgtttctgattctgttcctgctccttctgatgatgctgagcaattgagaaccgcttttgaaggatggggtacgaacgaggacttgatcatatcaatcttggctcacagaagtgctgaacagaggaaagtcatcaggcaagcataccatgaaacctacggcgaagaccttctcaagactcttgacaaggagctctctaacgacttcgagagagctatcttgttgtggactcttgaacccggtgagcgtgatgctttattggctaatgaagctacaaaaagatggacttcaagcaaccaagtgcttatggaagttgcttgcacaaggacatcaacgcagctgcttcacgctaggcaagcttaccatgctcgctacaagaagtctcttgaagaggacgttgctcaccaca

SEQ ID NO: 147107 - DNA, 431 bp, Arabidopsis thaliana
ccactgtcttaaatttcactatcttcttcttcattttccttccttctcacttcaaatccataatcgctctacttctctctctctctagattcgaaaaaatggcgaaactggtgatgttgttggttctctgtatcttaccggcgatagccatggcggcaaggaggggaaatattggaaagaatacaatggtggttcaaggtagcacctactgtgacatttgcaaattcggcttcgagactcctgaatcctcctacttcatccccggtgcaacggtgaagctatcatgcaaagacaggaagacaatggaagaggtttacacagacaaagctgtatcagacaaagaaggaaagtataagttcattgtccacgacgatcacagagaccagatgtgcgatggtttgcttgtgaaaagctcggataaaacctgctct

SEQ ID NO: 147108 - DNA, 422 bp, Arabidopsis thaliana
ggaagaaaaatgggtcgagtctcatctattatctctttctctttgacactcttgatcctcttcaatggctacactgcccaacagtggcccaacgagtgccagctcgatcaactcaatgcgctcgaaccatcccaaatcatcaagagcgagggtggtcgcatcgaggtctgggaccaccatgcaccccagctccgttgctccggctttgcctttgagcgtttcgtcattgagcctcaaggtcttttcttgcccactttcttgaacgccggcaaactcacgtttgttgttcacggaaggggtctaatgggaagagttattccgggatgcgccgagacgttcatggagtcaccggtatttggagaaggtcaaggtcagggtcagagtcaagggttccgggacatgcaccaaaaagtagagcacct

SEQ ID NO: 147109 - DNA, 430 bp, Arabidopsis thaliana
ctcgaccagctcaatgcgctcgagccttcacacgtactgaagagcgaggctggtcgcatcgaggtgtgggaccaccacgctcctcagctccgttgctcaggtgtctcctttgcacgttacatcatcgagtctaagggtctctacttgccctctttctttaacaccgcgaagctctccttcgtggctaaaggacgaggtcttatgggaaaagtgatccctggatgcgccgaaacattccaagactcatcagagttccaaccacgcttcgaaggtcaaggtcaaagccagaggttccgtgacatgcaccagaaagtggagcacattaggagcggtgataccattgccacaacacccggtgtagcccagtggttctacaacgacggacagcaaccacttgtcatcgtcagcatcttcgatctagccagtcacc

SEQ ID NO: 147110 - DNA, 428 bp, Arabidopsis thaliana
atcgaatatttattatttcgccccgtttattctatttctgatcatttacacccctaaaaagagtagagctttcgtgaagccaccatgtgtggaggagctataatctccgatttcatacctccgccgaggtccctccgcgtcactaacgagtttatctggccggatctgaaaaacaaagtgaaagcttcaaagaagagatcgaataagcgatccgatttcttcgatcttgacgatgatttcgaagctgatttccaagggtttaaggatgactcggcttttgactgcgaagacgatgatgatgtcttcgtcaatgttaagcctttcgtcttcaccgcaactactaagcccgtagcttccgctttcgtctccactgtaggttcagcatatgccaagaaaactgtagagtcccgtgagcaagcttggaaatc

SEQ ID NO: 147111 - DNA, 423 bp, Arabidopsis thaliana
aaaacgcaatttttgtttttcttctatacgaatacgatattgagatttttttacggagcgtgattggtttctaagatcgcttcctgccttaggccttttactagttagtcccggtaaagcccccagacggcgtatttttttaaaacgaggccctcggtaacgtgacataaagactccttttttgattgaaattgtacaaaactaaataaaattaaaactgaactaaatgataatgataaatgacgtgaaatacactccactattggaatacaaagagtaagaagatatattctctcaatatacagattttttttattgtatatacaatatatataaatcaactaaatcacaaaaattttcctttattttcttgattaattttgcaaagatcaaactcttttacccaatatatattcctaatat

SEQ ID NO: 147112 - DNA, 427 bp, Arabidopsis thaliana
gtgaaactagtaggttgtctcagtcgtctgaatcgttgttaagaactgtggctcctacgaaaagggttgtgtattccactactaggccgggtgatatcaaaacaccgtatgagaagatgcttgggaataatgtggaatttggatcgcctgagaagcgttctggtggcttcttcaactctgcattgatagctcttttctacatagcggtacttgctgggcttattcgattccctgttagcttctccacgagttcaaccggccagcttaggacccgaaaggctggtggtcctgatgggggaaaagtctctggtggaggtgaaacaatcacttttgcggatgttgcaggtgttgatgaagcaaaagaagagctagaagaaatcgtggaatttcttaagaatcctgaaaagtatgtccgtctaggtgcacg

SEQ ID NO: 147113 - DNA, 424 bp, Arabidopsis thaliana
  unsure (1)..(424): unsure at all n locations
cgnnagcagggaggcttttttggcgtgttcaccagctatacaactatagaacangnnaaaaacctttgtggacgcggggtnttncgacgcaccacggtcatggagctcaacgcnnattgaaaattgaccgttcacgttggcgtcacgcagcttcagaacccaacaatgacacgcagagggaaacaactcgttcgtgttaacgggaccctttccacggtcgttgaggcccacctctaagacacgccctacgaggagcgaggagtggagacancccacgtagcccacagggcaacggccttgaggagactatctgcagcatgaggtcccacgagaacattgacgaccctgctcgtgctgacgtgtacaagcccagcctaggtcgcgtgaccagcgtcaacagctataccttgcccatcttggagta

SEQ ID NO: 147114 - DNA, 377 bp, Arabidopsis thaliana
atttttctctactcaattcactcacactccaaaagcggtagcaatgtcagccaccggcgccgcctcctcctcgatcgccgttgccaccaactctctcaggaacgtgactctgtcttccagatcgccccttccatcagccatctccgtggctttcccttcccgtggacgcaatactcttcagcgacgcctcgttctcgtttcctgcagtactggagacggatctaagcctacgattctcgtggcggagaagctcggtgacgctggtattaagcttttggaggatgtcgcgaatgtcgactgttcgtataacatgactcctgaggagctcaacattaagatctcgctctgtgacgccttgatcgtgaggagtgggacta

SEQ ID NO: 147115 - DNA, 428 bp, Arabidopsis thaliana
atcttcttcttcttctttgagttttttttttttatcattcttgacgtcatgataaagatactcaacccccactcacaccattctcaaaccacaactcttaaaacagctgagatcttgtctaaatacagacccattgcaccaaagcccgggacgcctcgagtgaacgacgatgatccttcttcctctatgtctcacaaaatcagccaatctccttaccttcgtaacctctggcctcagcttcaagcgcgacctacaagaacccgcaagcgaggccgaggcgggatgggtccctcttctcttgctatgaagagaccaaagtcgtcatgcggttcttctagtacttctactatttctacacaacgggttcttggacctattaaaacactgtcgtttcaagctttcactcatcataggttacctaacctacc

SEQ ID NO: 147116 - DNA, 428 bp, Arabidopsis thaliana
ctcccaaactcatttctctacgttcatcgatctctctctttctcgtttgctctacgaaaatcagccatggatgaagagtacgaggttattgttctcggcaccggtctcaaggagtgtatcctcagcggtctcctttccgtcgatggtgtcaaggtgcttcacatggacaggaatgactactatggtggagaatcaacttctcttaatctcaatcagctttggaagaagttcaggggagaagagaaggctcctgagcatttaggtgctagccgggattacaatgttgacatgatgcctaagtttatgatgggaaatggcaagcttgttcgtacccttattcatacagatgttacaaagtatttgtccttcaaagctgttgatggaagctatgttttcgtcaaaggaaaggttcaaaaggtgccagctac

SEQ ID NO: 147117 - DNA, 432 bp, Arabidopsis thaliana
ctcctgtcttgtctaaagaaaaaagagtgaggaagaaatggagacttttgaggaaagctctgatttggatgttatacagaaacatctatttgaagacttgatgatccctgatggtttcattgaagattttgtctttgatgatactgcttttgtctccggactctggtctctagaaccctttaacccagttccgaaactggaacctagttcacctgttcttgatccagattcctatgtccaagagattctgcaaagggaagcagaatcatcatcatcatcaacaacaacatcacctgaggttgagactgtctcaaatcggaaaaaaacaaagaggtttgaagaaacgagacattacagaggcgtgagaaggaggccatgggggaaatttgcagcagagattcgagatccggcaaagaaaggatccaagatttg

SEQ ID NO: 147118 - DNA, 427 bp, Arabidopsis thaliana
aacatacattggcactcattctagattcaaagagagagagagatggggtcaaagacggagatgatggagagagacgcaatggctacggtggctccctatgcgccggtcacttaccatcgccgtgctcgtgttgacttggatgatagacttcctaaaccttatatgccaagagcattgcaagcaccagacagagaacacccgtacggaactccaggccataagaattacggacttagtgttcttcaacagcatgtctccttcttcgatatcgatgataatggcatcatttacccttgggagacctactctggactgcgaatgcttggtttcaatatcattgggtcgcttataatagccgctgttatcaacctgacccttagctatgccactcttccggggtgggtaccttcacctttcttccctatat

SEQ ID NO: 147119 - DNA, 424 bp, Arabidopsis thaliana
aaaacatacacaaatagcaaaacatgtttaacaagctcttcctcgtctgcgcaactctcgccctctgcttcgtcctcaccaacgcttccatctaccgcaccgttgtcgaattcgaagaagatgacgccagcaaccccgtaggtccaagacagagatgccagaaggagtttcagcaatcacaacacctaagagcttgccagagatggatgagcaagcaaatgaggcaaggacgtggtggtggtccttccctcgacgatgagttcgatttcgagggcccccagcagggataccagctactccagcagtgctgcaacgagcttcgccaggaagagccagtttgcgtttgccccaccttgaaacaagctgtcagggcagttagccttcaaggacagcacggaccatttcaatccaggaaaatttacca

SEQ ID NO: 147120 - DNA, 430 bp, Arabidopsis thaliana
gtccctttcacaagagataaataggtttatcaaagaacaagggtttaattgatttggctccttgaagcattcaaaatcgatgagtggcttccatgtcaagactaattccaaaaccaacaaagcatttcttttgtagtggcctaatgggtaatggcaaccattataggtcccccaaatctcacatctctcctttttttcataatcaagaattttataaagaaacaaacaaacagagatttatgaaattgatatacttcacttagcaattaattgtggttggatcgggtagtcatggatcccacaattatgacgtggactccacactctctttgatgaaaagtttcaatgaaaagtttgataaatctgaagaatttttgttaattttatatgaatcttgaaaacaggaaccatatccattttctaattgatc

SEQ ID NO: 147121 - DNA, 354 bp, Arabidopsis thaliana
gcgaccagatgtccatgagaggcgtctttgtacctcttccacaatcacaaagccttggccctgtgcggaaagcaacagaaatccttgagttacttcaagtagaactactaagatataatgtaacacatgtaatagttgttttcttttgtggaaatatgtatctcatatgattataacctgagccaactccaaaatctggttatggtctttgttcagctctgtgggtactgaacggacaagctttttcttgccaatagtgataacctcaaatccgctacccaatacctgaggagaaaatcccaagataccagcaagaacagttcaaaattttcccattgattaaaaatctgaaag

SEQ ID NO: 147122 - DNA, 430 bp, Arabidopsis thaliana
attagctcaggcaattacgttgtcaacttgtattgttgctcacaacaatgccttgttggcccttctggtgtcaaataactttgctgagatcaagagcagtgtctttaagcgtttcagcaaggacaacattcatggtctagtatatgcggattcaatagagagattccacatatcggccttcttggtgtcagttttggctcaaaatattctcgagtctgaaggtgcatggtttggaaatttcatctacaatgctactacggtcttcttctgtgagatgatgatagacatcatcaagcattcatttcttgccaagttcaatgacatcaaacctatagcgtactctgagtttcttcaagccctctgcgagcagactttgaacattcgtccggaagatagaaagacaaatctcacctttgttccccttgcacct

SEQ ID NO: 147123 - DNA, 433 bp, Arabidopsis thaliana
gattatagcgcagagagattagttgatttgaaggagaaacatgaagagaatctttggagcgaagaataacaaagagcctcctccgtctattcaagatgcctctgatcggatcaataaaagaggagattcagtggaagagaaagttaagaggcttgatgctgagctctgcaaatacaaagatcagatcaaaaggactagacctggtcctgctctagaagctatcaaagctcgtgctatgagagttctcaagcaaaagaagatgtatgaaggacaacgtgacatgctctataatcagacttttaaccttgatcaagtttcatttgctgctgaaggccttaaagatgctcaacaaactatgacagcgctaaaatctgctaacaaggagctgaaaggaatgatgaaaaccgtcaagattcaagatatagataatttg

SEQ ID NO: 147124 - DNA, 433 bp, Arabidopsis thaliana
cacaatctaatccaaaaaatcaaaagatgaatgccacaaagtttgttgtgcttctcgtgattggcgttttgtgtgccattgtcaccgcaaggcaggtcaaagatttgtccacggagaccaaattaggggcctctcttccaaaaactactaccaaaggcattggagctcagctttctgcaactggcacaacttacagcaccagcagtgtcgttagctatgctaatggttttaacaatcccaaaggtccaggggccaattcattcgaaagtgccaacacatttaccagcggacaagtcactgccaagggtcgcaaggcaagagtttcttctgcaagtgcttctgccgctgaaggcgatgctgcagctgcagtgactcgcaaagctgctgctgcacgtgcaaagggtaaggtagcttccgcatcaagggtcaaggg

SEQ ID NO: 147125 - DNA, 436 bp, Arabidopsis thaliana
caacgcttccatctaccgcaccgttgttgaattcgaagaagatgacgccagcaaccccgtaggtccaagacagagatgccagaaggagtttcagcaatcacaacacctaagagcttgccagagatggatgagcaagcaaatgaggcaaggacgtggtggtggtccttccctcgacgatgagttcgatttcgagggcccccagcagggataccagctactccagcagtgctgcaacgagcttcgccaggaagagccagtttgcgtttgccccaccttgaaacaagctgccagggcagttagcctccacggacagcacggaccattccaatccaagaaaatttaccagtcagctaagtacttgcctaacatttgcaagatccagcaagttggtgaatgtcccttccagaccaccatccctttcttccctccttactac

SEQ ID NO: 147126 - DNA, 439 bp, Arabidopsis thaliana
  unsure (1)..(439): unsure at all n locations
tccgaaccgggtaggattccaaatccaatttttaattaaagtggcaaacaagctcttcctggtttgcgcaactttcgccctctgtttcctcctcaccaacgcttccatctaccgcactgttgtcgagttcgacgaagatgacgccagcaaccccatgggcccaagacagaaatgtcagaaggagtttcagcaatcacagcacctaagagcttgccagaaattgatgcgcatgcaaatgaggcaaggccgtggtggtggtccctccctcgacgatgagttcgatttggaagacgacatcgagaacccacaaggcccccagcagggacaccagatcctccagcagtgctgcagcgagcttcgccaggaagagccagtttgtgtttgccccaccttgagacaagctgccagggccgttagcctncagggacaacacggacca

SEQ ID NO: 147127 - DNA, 396 bp, Arabidopsis thaliana
gtcacatttaagcttcaactatatatttgcatgttatttgccaaaaggatttgacaataatgcaacaagagtttcattgaaaatttcaagaaccctagttaataacgataatgggttcgagagttttggcttccttctttgttttcttaatcttcacggtcatcacattgcctcccacgatccaagcttgcactccttgtactcgtcctcatcctccggttccgaaacctccacaacacggcggtggtggaggtggtggtagcaagcccgcttcacatcacggtggaaaaggtggtggtaaacccccaccccacggtggaaaaagtggaggacccgcccatcattgtggaggaagaggaggaggagggaaatcacccccggttgttagaccttctt

SEQ ID NO: 147128 - DNA, 433 bp, Arabidopsis thaliana
cgatgtcaattttaaagctaagaaatttatcgttactaagatcggcggcaaatagtgcccggatcggagtttcatcgaggggtttctcaaagctcgcggaaggcactgacataaccacggcggcgcctggcgtttctctccagaaagctcgcagctgggacgaaggtgtttcctccaaattctccaccacgccattgtcagatatcttcaaggggaagaaagtcgtcatctttggtcttcctggggcttacacgggagtttgttcacagcagcatgtgcctagctacaagagccacattgataagtttaaagccaaaggcattgattctgtcatctgtgtctctgttaatgatccctttgctatcaatggttgggcagagaagcttggtgccaaagatgcaattgagttttatggagattttgatgggaaatt

SEQ ID NO: 147129 - DNA, 429 bp, Arabidopsis thaliana
ttctctgagaatctggtgctttagctttggtaaaatgaagatatactctagaatggttgctgtttcactcattgtgtcattcctcctgtgtttctctgcctttgctgagcgcaatgacgggaccttcagagttggactgaaaaaactcaagttggattcgaaaaatcggcttgcagcacgcgtcgaatccaagcgagaaacgcccctgagagcttacagacttggagattctggagatgctgatgttgtcgtgcttaagaattatctagatgctcagtactatggtgagatcgccattggtactccacctcaaaagttcactgtggtttttgacactgggagctctaacctctgggtgccatcatcaaaatgctatttctcacttgcatgtctcttgcatcccaaatacaagtcgtctcgttcaagcac

SEQ ID NO: 147130 - DNA, 430 bp, Arabidopsis thaliana
aaaatggttaagctcagcaatctcctttttgcaaccttcggggttctcctcgtccttaacggctgccttgcgaggcagtcacttggggttcctcctcagctacagaacgagtgtaacctcgacaacctagatgttctccaagccaccgaaactatcaagagtgaagccggtcagatcgagtactgggaccacaaccaccctcagctccgatgtgttggtgtttccgttgctcgttatgtaattgaacaaggcggtctttacttgcccaccttcttcacttccccaaaaatttcctacgtcgttcaaggaacgggtatcagcggaagagtggtccctggatgtgccgagaccttcatggactcgcagccgatgcaaggacaacaacaaggccaaccatggcaaggacgacagggacaacaaggccaaccat

SEQ ID NO: 147131 - DNA, 433 bp, Arabidopsis thaliana
cggacgcgtggggtctcgtgctgacgtgtacatgccacagctcggttacatcagcactctcaacagttacgatctgcccatccttcgcttcatccgtctctcagccctccgtggatctatccgtcaaaacgcaatggtgcttccacagtggaacgcaaacgcgaacgccattctttacgtgacagacggggaagcccaaatccagatcgtaaacgacaatggtaacagagtgtttgacggacaagtctctcaaggacagctcatagccgtaccacaaggtttctcggtggtgaaacgcgcaacaagcaaccgattccagtgggttgagttcaaaacaaacgcaaacgcgcaaatcaacactcttgcgggacgaacctcagtcttgagaggtttaccacttgaagttataaccaatgggttccaaatctcacct

SEQ ID NO: 147132 - DNA, 417 bp, Arabidopsis thaliana
aatttgtgtgctcttagcctttactttatagttttatatcatatcaatcgacatggcgaatgtggaccgtgatcggcgtgtgcatgtagaccgtactgacaaacgtgttcatcagccaaactacgaagatgatgtcggttttggtggctatggcggttatggtgctggttctgattataagagtcgcggcccctccactaaccaaatcttggcacttatagcaggagttcccattggtggcacactgctaaccctagctggactcactctagccggttcggtgatcggcttgctagtctccatacccctcttcctcctcttcagtccggtgatagtcccggcggctctcactattgggcttgctgtgacgggaatcttggcttctggtttggttgggttgacgggtctgagctcggt

SEQ ID NO: 147133 - DNA, 219 bp, Arabidopsis thaliana
cccgcaagttgatgtttgtcccttcaacatcccttcattcccttctttctactaaatctcaaacaaaccctcaaagcgtatgagagtgtggttgttgatatatacatgttgacacttgacacataccacacctcatcgtgtgttttatgataaatgtaagcttttggatgtttgagggtaatgtaagcactacttaataaataagagttttgtttattt

SEQ ID NO: 147134 - DNA, 430 bp, Arabidopsis thaliana
ctcaaggtagtgttgttaccttggagttttcctctgcctcctgctgtagaagcttggattcttggacaactctctccatgatcgcttcttgttcagcaaatgccttgcgtgcagacccttctttttcctgtttttcttgctcagcagcattttttatccccaaagctgtcgctagtcttatttcaagatctacacgcatctaaaagtaaaaacaaaagaaacacaatcagcaaaatcttacagtgtgaaacaacagatattagtagcgtgtattgttaaaggttaatggagctgcaaatgaacaaaacagaaatactgagtaaatcaagtaggatctaatcgtgtggcctgcacggacctcatcaagaacagagagagagttgtctcgttcttctgataagctgatcaagcgattttcaagctcattaac

SEQ ID NO: 147135 - DNA, 428 bp, Arabidopsis thaliana
gaaagaggaagaaaaatgggccgagtttaatttataatctctttctctaagacactctggatcctattcaatggctacactgcccaacagtggcccaacgagtgccagctcgatcaactcaatgcgctcgaaccattccaaatcatcaagagcgagggtggtcgcatcgaggtctgagaccaccatgcaccccagataacgtgctccggctttgcctttgagcgtttcgtcattgagcctcacgggacttttcttgcccactttcttgaacgccggcaaactcacgtttgttgttcacggaaggggtctaatgggaagagttattccgggatgcgccgagacgttcatggagtcaccggtatttggagaaggtcaaggtcagggtcagagtcaacggctccctgacatggaccataaagtagagcacc

SEQ ID NO: 147136 - DNA, 425 bp, Arabidopsis thaliana
caaaaagaaaatggttaagctcagcattttctttgttgcaaccttcggggttctcctcgtccttaacggctgccttgcgaggcagtcacttggggttcctcctcagctacagaacgagtgtaacctcgacaacctagatgttctccaagccaccgaaactatcaagagtgaagccggtcagatcgagtactgggaccacaaccaccctcagctccgatgtgttggtgtttccgttgctcgttatgtaattgaacaaggcggtctttacttgcccaccttcttcacttccccaaaaatttcctacgtcgttcaaggaacgggtatcagcggaagagtggtccctggatgtgccgagaccttcatggactcgcagccgatgcaaggacaacaacaaggccaaccatggcaaggacgacagggacaac

SEQ ID NO: 147137 - DNA, 387 bp, Arabidopsis thaliana
  unsure (1)..(387): unsure at all n locations
caacgcgttccatgctacccgcaccnnngtcgttgagttcgaagaaagaatgacgccgactaacctccatgaggcccgaaaaatgagggaaatggccgcaaggggacgtttcagaaaggaacccaacacctacnagagcttggccacgcaattgatggctccagcaaggcaatgggcaaggcccgtanngcgatgagtttggatttcgaagaacgacatgtgagaacccacaagggacaaccagcagggaacaaccagctattccacgcagtgctgcaacgaggcttcgccaggaagagccagattgtgtttgccccaccttgaaacaagctgccaaggccgttagacttcanggacagcaccaaccaatgcaagtcaagaaaattt

SEQ ID NO: 147138 - DNA, 434 bp, Arabidopsis thaliana
cacaaacgagtaagaatacaaatacatttagcaaaaaaaatggcaaacaagctcttcctcgtctgcgcaactttcgccctctgcttcctcctcaccaacgcttccatctaccgcactgttgtcgagttcgacgaagatgacgccagcaaccccatgggcccaagacagaaatgtcagaaggagtttcagcaatcacagcacctaagagcttgccagaaattgatgcgcatgcaaatgaggcaaggccgtggtggtggtccctccctcgacgatgagttcgatttggaagacgacatcgagaacccacaaggcccccagcagggacaccagatcctccagcagtgctgcagcgagcttcgccaggaagagccagtttgtgtttgccccaccttgagacaagctgccagggccgttagccttcagggacaacacgg

SEQ ID NO: 147139 - DNA, 430 bp, Arabidopsis thaliana
aagaggaagaaaaatgggtcgtgtcttatctattatctctttctctttgacgactcttgatcctcttcaatggctacactgcccaacagtggcccaacgagtgccagctcgatcaactcaatgcgctcgaaccatcccaaatcatcaagagcgagggtggtcgcatcgaggtctgggaccaccatgcaccccagctccgttgctccggctttgcctttgagcgtttcgtcattgagcctcagggtcttttcttgcccactttcttgaacgccggcaaactcacgtttgttgttcacggaaggggtctaatgggaagagttattccgggatgcgccgagacgttcatggagtcaccggtatttggagaaggtcaaggtcagggtcagagtcaaggtgtccgtgacatgcaccagaaagtagagcacctacc

SEQ ID NO: 147140 - DNA, 130 bp, Arabidopsis thaliana
gctagacgaactgcgagctaggaaagctacagacgaactgggagctaggaaggctttaggtcggttgacttatgtataagattcgagaagaatattttagttctacgtagaaaatatacaaatgttcctc

SEQ ID NO: 147141 - DNA, 434 bp, Arabidopsis thaliana
gggacagcagggacaacaaggggtccgtgacatgcaccagaaggtggaacatgtgagacgcggagacgtctttgccaacactccaggctctgcccactggatctacaactcaggagaacagacacttgtcatcatcgctcttctcgacatcgccaactaccaaaaccaactcgaccgcaaccctagagtgttccatttggccggaaacaaccagcagggaggctttggcggttcacagcaacaacaagaacagaaaaacttgtggagcgggttcgacgcacacgtcatagctgaagcattgaaaattgacgttcagatggctcagcagcttcagaaccaacaagacagcagaggaaacatcgttcgtgttaagggacctttccaggtcgtgaggccacctctaagacagccctacgagagcgaggagtggagac

SEQ ID NO: 147142 - DNA, 434 bp, Arabidopsis thaliana
cgcaatggagacgggggctccatatgctccggtgacttatcaccgccgtgttcgtggtgacttggatgacacacttcctaaaccttatttgccgagagcactacaagcacctgacatggaacacccacaaggaacaccagatcatagacataatggccttagtgttcttcagcaacatgtcgctttcttcgatttggacaataatggcatcatttatccctttgaaaccttctctgggttccggttactcggtttcaatttactcgcgtcgcttatcttggctgctggtatcaacatagctcttagctatgctactctcccgggatggttaccgtctccgttcttccctatatatattcacaacattcacaaggcaaagcacggaagcgactctaaaacatatgacaatgaaggaaggtatacaccagcgaatc

SEQ ID NO: 147143 - DNA, 277 bp, Arabidopsis thaliana
gttcttggtttcctttttctggaaaagttatttttgttcctttcttccatcctggggttatgtctatcttcaagatctcttccactggctttgactttctgatatcaaaacatgactagatatattgacacgaagctaagaaaaatcaaacgtagcaacaagaaaatagtaaggaagatcaatcatcaaacaatattaacatcactagagataaaaacgcaattaaacaaaggaaaactgtcaaaaaaaaaaaaaaaaaaaaaaaaaaaaaaaataa

SEQ ID NO: 147144 - DNA, 423 bp, Arabidopsis thaliana
ggaagaaaaatgggtcgagtctcatctattatctctttctctttgacactcttgatcctcttcaatggctacactgcccaacagtggcccaacgagtgccagctcgatcaactcaatgcgctcgaaccatcccaaatcatcaagagcgagggtggtcgcatcgaggtctgggaccaccatgcaccccagctccgttgctccggctttgcctttgagcgtttcgtcattgagcctcagggtcttttcttgcccactttcttgaacgccggcaaactcacgtttgttgttcacggaaggggtctaatgggaagagttattcccggatgcgccgagacgttcatggagtcaccggtatttggagaaggtcaaggtcagggtcagagtcaagggttccgtgacatgcaccaaaaaggagagcaccta

SEQ ID NO: 147145 - DNA, 430 bp, Arabidopsis thaliana
cggacgcgtggggtttcagggaattgttgttgcctacaagaacctgttacaagaaattgcacagaaagagagttctctgttaccattttatgcaactgctacatctggtccatcgcatgcgcctacttttacttcaactgttgagtttgctggtaaagttttcagtggagaagaggcgaaaaccaaaaagttggctgaaatgagcgctgctaaagttgcattcatgagtatcaaaaatgggaactcgaaccagaccggatcgcctactttgcctagtgagagacaagaagatgtaaattcaaatgtgaagagcagtccacaagagatccattctcaaccttcttccaaggtggtgatgacccctgataccccatcaaaggggattaaagtgaatgaagatggttagttttctttgaatactacactacat

SEQ ID NO: 147146 - DNA, 421 bp, Arabidopsis thaliana
aagaaaaatgggtcgagtctcatctattatctctttctctttgacactctggatcctcttcaatggctacactgcccaacagtggcccaacgagtgccagctcgatcaactcaatgcgctcgaaccatcccaaatcatcaagagcgagggtggtcgcatcgaggtctgggaccaccatgcaccccagctccgttgctccggctttgcctttgagcgtttcgtcattgagcctcagggtcttttcttgcccactttcttgaacgccggcaaactcacgtttgttgttcacggaaggggtctaatgggaagagttattccgggatgcgccgagacgttcatggagtcaccggtatttggagaaggtcaaggtcagggtcagagtcaagggttccgggacatgcaccaaaaagtagagcaccta

SEQ ID NO: 147147 - DNA, 408 bp, Arabidopsis thaliana
  unsure (1)..(408): unsure at all n locations
cttagacttatctctatatacccccttttaatttgtgtgctcttagcctttactcgggagttttatatcatatgaagcgacatggcgaatgtggaccgtgatcggcgtgtgcatgtagaccgtactgacaaacgtgttcatcagccaaactacgaagatgatgtcggttttggtggctatggcggctatggcgctggatctgattataagagtcgcgtgccctccactaaccaaatcttggcacttatagcaggagttcccattggtggcacactgctaaccctagctggactcactctagccggttcggtgatcggcttgctagactccatacccctcttnctactcttcagtccggggatagtcccggcggctcttactattgggcttgctgtgacgggaatcttg

SEQ ID NO: 147148 - DNA, 387 bp, Arabidopsis thaliana
cggacgcgtgggcacaacacacgcagatgagagagagagaacaaaaaaaagaaggagcggttacatattctctggtctgtcacaagaaaaatggatatctgtatggacaaggagccagatggtgtggtggtctatgcgaacggtgattcgtgtaatccaaaccaagaaaatgtttctgagcctctcttagattcagtatcacgcgatgatgctaatgtacatacagagcttcgatatggggaagagaacatcgaagtaaacgaatatgatgttaaagagtgtactagtgagatccccgttggtaagccgataggagatgattttgagtctaaagatgtcactaagtcaagtttacatgcaaagcatgcttcaaaatcaggtagaggg

SEQ ID NO: 147149 - DNA, 356 bp, Arabidopsis thaliana
ctcgaccattagatcattccatgaattaatcggaccgggtaagcaccaatgaagacaatcgttctgaacctgattcagctccttgttcttcagcccagcgaaaggatttggataccggtacggtcccggatgtccatctggtcggagaagcgacattgaagttgtgtcaagtaatacaatgtttgaattggaaccttcttgttgtgtagtagtagtcttatagaactcttcaagctcgatatcacgcatcgatacatcctcgctcttcatctctccttcgctgccttccgtaaacggcattgttcggttacagaaaccaccagagtcccactctccattctcgaaatgatcaggtg

SEQ ID NO: 147150 - DNA, 432 bp, Arabidopsis thaliana
acgtaaagaggaagaaaaaggggtcgagtctcatctataatctctttctctttgacactgttgatcctcttcaatggctacactgcccaacagtggcccaacgagtgccagctcgatcaactcaatgcgctcgaaccatcccaaatcatcaagagcgagggtggtcgcatcgaggtctgggaccaccatgcaccccagctccgttgctccggctttgcctttgagcgtttcgtcattgagcctcagggtcttttcttgcccactttcttgaacgccggcaaactcacgtttgttgttcacggaaggggtctaatgggaagagttattccgggatgcgccgagacgttcatggagtcaccggtatttggagaaggtcaaggtcagggtcagagtcaagggttccgtgacatgcaccagaaagtagagcaccta

SEQ ID NO: 147151 - DNA, 432 bp, Arabidopsis thaliana
gtacaagcccagcctaggtcgcgtgatcagcgtcaacagctataccttgcccatcgtggagtatgtcaggctcagtgccactcgtggcgttctccagggtaatgcgatggtgcttcctaaatacaacatgaacgctaacgagatcttgtactgcactggaggacaaggaaggatccaagtggtcaacgacaacggacagaacgtgttggaccaacaggtgcagaagggacagctcgtggtcatcccacaagggttcgcatacgttgtccagtcccacggaaacaagttcgagtggatctctttcaaaactaatgaaaacgcaatgatcagcactttggcgggtagaacctcgctcttgagggcattgccattggaggtcatatcaaatggtttccagatctctcccgaggaagctaggaagatcaagttcaa

SEQ ID NO: 147152 - DNA, 415 bp, Arabidopsis thaliana
cgcggagacgtctttgccaacactccatgctctgcccactggatctacaactcaggagaacagccacttgtcatcatcgctcttctcgacatcgccaactaccaaaaccaactcgaccgcaaccctagagtgttccatttggccggaaacaaccagcagggaggctttggcggttcacagcaacaacaagaacagaaaaacttgtggagcgggttcgacgcacaggtcatagctcaagcattgaaaattgacgttcagttggctcagcagcttcagaaccaacaagacagcagaggaaacatcgttcgtgttaagggacctttccaggtcgtgaggccacctctaagacagccctacgagagcgaggagtggagacacccacgtagcccacagggcaacggccttgaggagacta

SEQ ID NO: 147153 - DNA, 413 bp, Arabidopsis thaliana
  unsure (1)..(413): unsure at all n locations
gttcgagccaccacagcaaggagaacatgaaggtccccgtcgccgtcctggtggtggctctggcgagggatgggaggaagagtcnacnaatcatccataccacttcaggaagcggagtttcagtgattggttccagtcaaaggaaggttttgtgagagtgctgcctaagttcacaaaacatgcaccggctctcttccgaggaatcgagaactacagattctcgttggtggagatggagccaacaactttctttgtgcctcaccatttggatgccgatgctgtttttatagtcctacaaggtaaaggagtgatcgagtttgtgacggataaaacaaaagaatcgttccacataactaaaggtgatgtggtaagaatcccttctggtgtcaccaactttatcaccaacactaacc

SEQ ID NO: 147154 - DNA, 410 bp, Arabidopsis thaliana
gaattcgcgcgacgcgccacgaataaagaggaagaaaaatgggtcgagtctcatctattatctctttctctttgacactcttgatcctcttcaatggctacactgcccaacagtggcccaacgagtgccagctcgatcaactcaatgcgctcgaaccatcccaaatcatcaagagcgagggtggtcgcatcgaggtctgggaccaccatgcaccccagctccgttgctccggctttgcctttgagcgtttcgtcattgagcctcaaggtcttttcttgcccactttcttgaacgccggcaaactcacgtttgttgttcacggaaggggtctaatgggaagagttattccgggatgcgccgagacgttcatggagtcaccggtatttggagaaggtcaaggtcagggtcag

SEQ ID NO: 147155 - DNA, 420 bp, Arabidopsis thaliana
cacgcgtacgtaaagaggaagaaaaaggggtcgagtctcatctattatctctttctctttgacactggtgatcctcttcaatggctgcactgcccaacagtggcccaacgagtgccagctcgatcaactcaatgcgctcgaaccatcccaaatcatcaagagcgagggtggtcgcatcgaggtctgggaccaccatgcaccccagctccgttgctccggctttgcctttgagcgtttcgtcattgagcctcagggtcttttcttgcccactttcttgaacgccggcaaactcacgtttgttgttcacggaaggggtctaatgggaagagttattccgggatgcgccgagacgttcatggagtcaccggtatttggagaaggtcaaggtcagggtcagagtcaagggttccgtgacatgca

SEQ ID NO: 147156 - DNA, 429 bp, Arabidopsis thaliana
aagaaaatggttaagctcagcaatcttctcgttgcaaccttcggggttctcctcggccttaacggctgccttgcgaggcagtcacttggggttcctcctcagctacagaacgagtgtaacctcgacaacctagatgttctccaagccaccgaaactatcaagagtgaagccggtcagatcgagtactgggaccacaaccaccctcagctccgatgtgttggtgtttccgttgctcgttatgtaattgaacaaggcggtctttacttgcccaccttcttcacttccccaaaaatttcctacgtcgttcaaggaacgggtatcagcggaagagtggtccctggatgtgccgagaccttcatggactcgcagccgatgcaaggacaacaacaaggccaaccatggcaaggacgacagggacaacaaggccaa

SEQ ID NO: 147157 - DNA, 299 bp, Arabidopsis thaliana
cttctttctttgggttagctgagaaatggatgtaatgaagcttgatcacgacagtgtattaaaagagcttgagaggatcacctcgaaagctgctgaagttcaagataacattttacgtgggatcttggaaagaaacaaggacacagagtacttgagtaagtacatgaatggctctaaggatgttctggagtttaaacgcgctgtgccaattattacatacaaagatatctatccgtacattcagagaattgctaatggagaagactcatctttttattactggccattctattactgaa

SEQ ID NO: 147158 - DNA, 418 bp, Arabidopsis thaliana
aaacctaactctttctctatacaagagcgcaagctcgaaggcgctcttgttctttcttcattttctccttaacaatcaccctcatagtaactttaaaacctctctgtttctagtaattcacacacaaaatggctattaaactagcaattctatttaccacatttgttctttttagcctcgccgacgctagaatccccgggatttactcccgcggcgcatggcaaaacgcacacgccactttttacggggggagcgacgccttccgcacaatgggagggagcttggggtacgggtaacctatacagccaagggtacgggaccaacacggctgctttgagtccggcgctgttaacaatggtatgaggtggggagcctgctttgagctaaaatgcgccaacgaccctcaatggtgtcactc

SEQ ID NO: 147159 - DNA, 453 bp, Arabidopsis thaliana
aagaataacggttcgagtataatctatcatctgtttctctgtgacactgttgatcctctacaatggctacactgcccaacagtggcccaacgagagccagctctatcaactcaatgcgctcgaaccatcccaaatcatcaagagcgagggaggtcgcatagaggtccgggaccaccatgcaccccatctacgttgctgcggctacgcctttgagcgcatggtaattgagcctcacggccttttcttgcccactttcttgaacgccggcaaactcacgttctgtggtcaccggaggggtctaatgcgaagagtcattaccggatgcgcctggacgagcatggagccaccggacattggagaaagtcagggtcagggttagagtcaagggtgccgcgacatgcaccagtgaggagagcacctacgtggcggtgacctccattgcagcaccatatg

SEQ ID NO: 147160 - DNA, 404 bp, Arabidopsis thaliana
cgaccacgcgtccggacggagatgatggagagagacgcaatggctacggtggctctctatgcgccggtcacttaccatcgccgcgctcgtgttgacttggatgatagacttcctaaaccttatatgccaagagcattgcaagcaccagacagagaacacccgtacggaactacaggccataagaattacggacttagtgttcttcaacagcatgtctacttcttcgatatcgatgataatggcatcatttacccttgggagacctactctggactgcgaatgcttgtgttcaatatcattggttcgcttataatagccgctggtatcaacctgaccctcagctatgccactcttacggggtggttaccttcacctttcatccctatatacatacacaacataca

SEQ ID NO: 147161 - DNA, 431 bp, Arabidopsis thaliana
ggtacacttatttacatcaaatgcttgtgctttgatctaatgcactgtcaaactctgctttgtgtttaatgaatggtctagcttttacctttcatggtggtgtaaagtttgaaccaaaatttacaaccctttcgttgcagcttctctagcaagcagtagccctctaccggaagtagttttatcttcttgctgttggatattaccggactggggaactcgataataggatcatggtgttaaatttttgtcacaactcgataataggctcatgatattaaatttttgtctacttcttactcgtttaatggttggttccatagattcaacatcattggaggcaatctttggtcttaaagaaatccattgaagacaagatcgcttagggtaattgatattcggttttgaatcattttcacacacaatctgaacaa

SEQ ID NO: 147162 - DNA, 440 bp, Arabidopsis thaliana
catacacacatagcaaaaaatggcaaacaagttgttcctcgtctgcgcagctctcgctctctgcttcctcctcaccaacgcttccatctaccgcaccgtcgttgagttcgaagaagatgacgccactaaccccataggcccaaaaatgaggaaatgccgcaaggagtttcagaaagaacaacacctaagagcttgccagcaattgatgctccagcaagcaaggcaaggccgtagcgatgagtttgatttcgaagacgacatggagaacccacagggacaacagcaggaacaacagctattccagcagtgctgcaacgagcttcgccaggaagagccagattgtgtttgccccaccttgaaacaagctgccaaggccgttagactccagggacagcaccaaccaatgcaagtcaggaaaatttaccagacagccaagcact

SEQ ID NO: 147163 - DNA, 488 bp, Arabidopsis thaliana
aaggattcccaaccaattttttcttttctcaaacaattaaaactcttgttttttaaagagaaaaaaagaaccgttatatacgaacaaaaatgtcaccccgaaaagcttttaagctctagcatatttttgttatggtcaagcaaaatttgcggtgaagaagacaaataatatatttttaatataaaaccatctataggcatcaaatactctgcttaaacccacatctagattcacatggaataactaagaacaatatgtcattcaaataaaaatcatatatatactaacaacaattttccaaagttaaatggtacgagaataaagttattatgtatattataagtcctagattacaatcatggggtcttgcatgcttcacgaacagtaaaggtacggcgttttcatcaataactaagaaccatcgaatcatcgttaagtccacttgtctttaaaagccacagattcaccctcaaactctaaaatcatgt

SEQ ID NO: 147164 - DNA, 429 bp, Arabidopsis thaliana
acgaaagagtttctctcgattatacaaaaagctgaatcggatcttcgtcagcttctcgagattcctcaggaatattccgttttgttcttacaaggtggtgccactactcaattcgctgctttacctctcaatctctgcaaatcggatgatacagtcgatttcgttgttactggttcgtggggtgataaagctgtcaaggaagcgaagaagtattgcaagactaatgtgatttggtctgggaaatctgagaaatacacaaaggttccatcttttgaggagttggagcaaactccggacgctaagtatttgcatatatgcgccaatgagactattcatggagttgagtttaaagattaccctgttcctaaaaatgggttcttggttgctgatatgtcttctaacttctgttcgaaacctggtgatgtatct

SEQ ID NO: 147165 - DNA, 381 bp, Arabidopsis thaliana
tacaaacgagtaagaatacaaatacaaatagcaaaaaaaatggcaatcaagctcttcctcgtctgcgcaactttcgccctctgcttcctcctcaccaacgcttacatctaccgcactgttgtcgagttcgacgaagatgacgccagcaaccccatgggcccaagacagaaatgtcagaaggagtttcagcaatcacagcacctaagagcttgccagaaattgatgcgcatgcaaatgaggcaaggccgtggtggtggtccctccctcgacgatgagttcgatttggaagacgacatcgagaacccacaaggccctcagcagggacaccagatcctccagcagggctgcagcgagcttcgccaggaagagccagtttgtgtt

SEQ ID NO: 147166 - DNA, 417 bp, Arabidopsis thaliana
caaaaagaaaatggttaagctcagcaatctcctcgttgctttcttctttgttctcctcgtccttaacgggtgccttgcgaggcagtcacttggggttcctcctcatctacagaacgagtgtaacctcgacaacctagatgttctccaagccaccgaaactatcaagagtgaagccgctcagatcgagtactgggaccacaaccaccctcagctccgatgtgttggtgtttccgttgctcgttatgtaattgaacaaggcggtctttacttgcccaccttctttacttgctcaaaaatggcctacgatcgtcaaggaactgctataatcggaagagtggtccctggatgtgccgagaccttcatggactcgcaaccgatgcaaggtcatcaacaaggtcatccatgtcatggactaca

SEQ ID NO: 147167 - DNA, 349 bp, Arabidopsis thaliana
  unsure (1)..(349): unsure at all n locations
caataaagaggaagaaaaatgggtcgagtctcatctattatctctttctctttgacactcttgatcctcttcaatggctacactgcccaacagtggcccaacgagtgccagctcgatcaactcaatgcgctcgaaccatcccaaatcatcaagagcgagggtggtcgcatcgaggtctgggaccaccatgcaccccagctccgttgctccggctttgcctttgagcgtttcgtcattgagcctcagggtcttttcttgcccactntcttgaacgccggcaaactcacgtttgttggtcacggaaggggtctaatggggagaagtattccggatgcgcccgagacgtcat

SEQ ID NO: 147168 - DNA, 528 bp, Arabidopsis thaliana
cacccacgtagcccacagggcaacggccttgaggagactatctgcagtatgaggtcccacgagaacattgacgaccctgctcgtgctgacgtgtacaagcccagcctaggtcgcgtgaccagcgtcaacagctataccttgcccatcttggagtatgtcaggctcagtgccactcgtggcgttctccagggtaatgcgatggtgcttcctaaatacaacatgaacgctaacgagatcttgtactgcactggaggacaaggaaggatccaagtggtcaacgacaacggacagaacgtgttggaccaacaggtgcagaagggacagctcgtggtcattccacaagggttcgcatacgttgtccagtcccacggaaacaagttcgagtggatctctttcaaaactaatgaaaacgcaatgatcagcactttggcgggtagaacctcgctcttgagggcattgccattggaggtcatatcaaatggtttccagatctctttcgaggaagcttggaagatcacagtcaacaca

SEQ ID NO: 147169 - DNA, 531 bp, Arabidopsis thaliana
cgcctctgaaaaattcttggtgaacatccttgagaactttcaaaacattcgccaatgatccctggttcctactctcgtctctcttctcctctgcgtaagattttgactccttatcatgactataatctctgaagtaactgtacttggtaatctgtagcagattcctctcatgatcaggccaaacatgacgagtgtcatccacaatcacaactccacactcatcagccaacacaagatcaagcgtcttcgaaaaaccactctcgtctctggtaatgactctatccccaaagtatactttcttcggatcaatccatttcagcacagcctgagcgtagtcacgattccccatcgtgtagacatacatggagaaaatctcgttggcttctttcagaaactcgtgaacaaaaggtcgaagttttatcagcatctctctgtcaagtgtccaaagatcttccctaaaatctgactcttccaatagatacttctctccttcggaaagccgtgaaatcataatagaatggagaagcgtgt

SEQ ID NO: 147170 - DNA, 529 bp, Arabidopsis thaliana
acttagtctctttcgaataattaaattaatgattccatattctgagagtttaagctccatatatactataatgttgcatgtagtctatacgcatggatatgtgtgtgttcacacatgcgtgtctttgtgtgcttttaaactttttatttgttgaaataatataaacacagaaatgcatgcgaaaatgtatacacactaatctatatgcatatagtatatacattcgtaacaattattagcattcagtttgatttttgctaataatatagtatggaatttcatactgaaactcattctaaaatttgaaatatgtagaaaaacagttaagtagacacctgtttccagttttgctaatatatattgcaaattcaaaatatatattcaccggctaaccatatataacaggaaaacttgataattagtcttctaaatatgtatgaatcaaaaaatttagtaatataatatgtatatatacatattttgaagaacaatatacgactagtactcataaaacatagagaatgttctt

SEQ ID NO: 147171 - DNA, 326 bp, Arabidopsis thaliana
gataaacctgcgtttcattcccctacaaagctctaatctttcaatctgtatacctctctctctatctctgagaatgtatggcggcggctgcagcggcgatgatcgggttgacacatgcgtatctggaagggaaggaggagaaggaaactagtgcgatggttactgcactctgccgccagttatatactcaacgcactgagtttggcacatatagtagcatcacgcttaacgatcatgatgcttcaatttgtaaatcgctgcaaatatacgatatgatttcatacggagacctattctagaggatgcaatctgtggtaaagcacata

SEQ ID NO: 147172 - DNA, 515 bp, Arabidopsis thaliana
  unsure (1)..(515): unsure at all n locations
cttagttgttgagagggttgcccaaaggcagtatatagagcatacccagtaaaacttacaagtaacccagatataaagatggcgactagggttgctgtttccattattatagaattgaaagaccacaccggatctatgctaagatcatttatttacaacggaatggtatacaaagtcaacagatcgtaatgaatacaaaataagatttatggctacacaaactgttgaagatagttctagatctggtccaagaagcactactgtaaggaagttattgaaaccattgaattccgaatatggtaaagtagctcccggatggggaacgacccccttgatgggtgttgcaatggctctatttgcggtattcctatctattattttggagatttataattcttctgttctactggatggaaattcagtgaattagactgagaagaatcctgagttctagcttttagctcgatacaaaaaagtaaagtatgcangtctaacaattttagnctattcttctt

SEQ ID NO: 147173 - DNA, 455 bp, Arabidopsis thaliana
gaatttcggtcgaccacgcgtccgaaaacataccccccattggcaaaaaggggacaaggtggtgctcgtctgcgcagctctcgctctctgcttcctcctgaccaacgcttccatctaccgcaccgtcgttgagttcgaagaagatgacgccactaaccccataggcccaaaaatgaggaaatgccgcacggagtttcataaagaacaacacctaagagcttgccagcaattgatgctccagcaagcaaggcaaggccgtagcgatgagtttgatttcgaagacgacatggagaacccacagggacaacagcaggaacaacagctattccagcagtgctgcaacgagcttcgccaggaagagccagattgtgtttgccccaccttgaaacaagctgccaaggccgttagacttcagggacagcaccaaccaatgcaagtgaggaaaagttaccaga

SEQ ID NO: 147174 - DNA, 394 bp, Arabidopsis thaliana
cggacgcgtgagtaaaaatgaaagtatcatttaagttaatatttttaatatcttctgtcattgcatataggcgtatgtgagaaatgatctttgttgcctatcaaaaataattaacaattaacaaaacataattaactaaaaaacagaaatccacatgaatatttagaagccaaacattgttgaaaatatctattttttatatgccataattgcgcaagtaaaagttacatcatggcaattaattgtaaatgagttaaaagtcataaaggaaaatattctcattcaacgtcattgacaagatatattctatcagcggtttttcttaaaatatcctatagagacttatggagacatgagttcattgatacaagaatgacaacagtcggtatagtaa

SEQ ID NO: 147175 - DNA, 489 bp, Arabidopsis thaliana
  unsure (1)..(489): unsure at all n locations
atcatcacaaacgagtaagaatacaaatacaaatagcaaaaaaaatggcaaacaagctcttcctcgtctgcgcagcgttcgccctctgcttcctcctcaccaacgcttccatctaccgcactgttgtcgagttcgacgaagatgacgccagcaaccccatgggcccaagacagaaatgtcagaaggagtttcagcaatcacagcacctaagagcttgccagaaattgatgcgcatgcaaatgaggcaaggccgtggtggtggtccctccctcgacgatgagttcgatttggaagacgacatcgagaacccacaaggcccccagcagggacaccagatcctccagcagtgctgcagcgagcttcgccaggaagagccagtttgtgtttgccccaccttgagacaagctgccagggccgttagcctccagggacaacacggaccattccaatccaggaaaanttacaagacagctaagtacttgcctaaca

SEQ ID NO: 147176 - DNA, 342 bp, Arabidopsis thaliana
taccacactggcattttttttttttacggcgctcgaaatgggtgaatagtgtttgtcaagcctacgaccccaccatccttccctacattgtatcacatcaccattttcattaccatgctgcggcagaacaagagttcccaaattgtatcaagactttacaagatggtaagactgagaaacttatatcttcctcagaggttagagccatactactctacaaagtctgctgacaaagaatccactctacaatgccttcccataaaacaaaagcgtcatataaatcctaagttctacagaaattatccttaaccaacaaaaagcatgtttgaaatataataccta

SEQ ID NO: 147177 - DNA, 375 bp, Arabidopsis thaliana
gcgtccgcaaaaagaaaatggttaagctcagcaatctcctcgttgcaaccttcggggttctcctcgtccttaacggctgccttgcgaggcagtcacttggggttcctcctcagctacagaacgagtgtaacctcgacaacctagatgttctccaagccaccgaaactatcaagagtgaagccggtcagatcgagtactgggaccacaaccaccctcagctccgatgtgttggtgtttccgttgctcgttatgtaattgaacaaggcggtctttacttgcccaccttcttcacttccccaaaaattttctacgtcgttcaaggaacgggtatcaagcggaagagtggtcccttggatgtgcccgagacccttcatg

SEQ ID NO: 147178 - DNA, 477 bp, Arabidopsis thaliana
attaattcacaaaattttgctatagtgatcatttatataacctttgtaagattcctaaattgttcaaacatagacattaaaatagacaatagtacttctgattggatacatgtcataatcatggaatgacataaagtaaagttaaagtacggtatgaaacaattctagagatcaaaagtttcataatgaaataagctatcatggaatgacataaagtaaagttaaagtacggtatgaaacaattctagaggtcaaaagtttcataatgagtaagctactacatccatagttatttgcatgataaatttttgacttgtgtttttaggccaaatcttgcatttttaagttttatttagcattatatccatagttatatatctgcattaagaacgtcgtgacgccattatgcggaacaccaatcgaaaccacatcacaaactgcttctgtgcacaaaatctagctataaacctgatcaaa

SEQ ID NO: 147179 - DNA, 543 bp, Arabidopsis thaliana
gcgtccgattaattcacaaaattttgctatagtgatcatttatataacctttgtaagattcctaaattgttcaaacggggacattaaaatagacaatagtacttctgattggatacatgtcataatcatggaatgacataaagtaaagttaaagtacggtatgaaacaattctagagatcaaaagtttcataatgaaataagctatcatggaatgacataaagtaaagttaaagtacggtatgaaacaattctagaggtcaaaagtttcataatgagtaagctactacatccatagttatttgcatgataaatctttgacttgtgtttttaggccaaatcttgcatttttaagttttatttatcattatatccatagttatatatctgcattaagaacgtcgtgacgccattatgctgaacaccaattgaaaccacatcacaaactgcttctgtgcacaaaatctatcttttaaacctgatcaaaatccttccattcttctacgcagtctgtggacacctaaaaggccttaaacttaaatata

SEQ ID NO: 147180 - DNA, 398 bp, Arabidopsis thaliana
gcgtccgagaagaggaagagccggtcgtgttcgacctggacagtgttaccatctttacccaaagtgcgtatatgatgcttttgcagaatatcagttgcctgaaattttgaggacgcctttacactcactgtgcctgcaaatcaaaagcttaaacctcggaagcatatccgagttcttgtcaagggcgctgcaatctcctgaactactagccgttcaaaaggccatcgcatttctgaagataattggcgcattggatgagaatgaagacctcacgactctaggtcgttatttgtccaagcttcccatggagccaaagcttggaaaaatgctcatactaggagctattcttggttgccttgatcccatattgactgttgcggctggcctgagtgtgagag

SEQ ID NO: 147181 - DNA, 446 bp, Arabidopsis thaliana
tttgtcttctccgcctcctccgatctcactccgatctctctacgattcattcttctatggcttccattgctacttctgcttctacttctctccaagctcgtcctcgtcaactggtgattggggctaaacaagttaaaagctttagctatggaagcagaagcaatctttcttttaatcttcgccagcttcctacccgcttgactgtttactgcgctgcaaaacctgagacagtggacaaggtgtgtgcagttgtcagaaagcaactctcactcaaagaggctgacgaaattaccgctgccaccaaatttgctgcacttggtgctgattcccttgatacggtggagatagttatgggattagaaggaggagtttgggatgaaatggcggaggagaaagcacagtctatcgccacagttgagcaagcagctgcactcaatgaggagctc

SEQ ID NO: 147182 - DNA, 470 bp, Arabidopsis thaliana
  unsure (1)..(470): unsure at all n locations
ctttcagccgccgctttcactacctcttcctcttccttcttcttcttctaccttcttctcgtaaaggttttgctacacactggagctcgcaaatctggctatcgaaaaccacaatcacaaactcaacttcggggccttcaaggccaatcacaagaaagtcatgggaccaatgataagaacagaggaagaagaagactatacaagtccaccgtggctaatgccaatgctacgagggagttacttcgtcccttgttccatccatgtcgattcaaacaaaaacgaatgcaatttgctctgtcttgattgtgctggaaatgccttttgctcttactgtttagtcaaacataanagaccatcgtgttgttcagatacgaagatcttcgtaccataacgttgtgagagtgaatgagattccaaagttcatagacatcgcttgtgtcagacatatataatcaacaacgcaaagatcg

SEQ ID NO: 147183 - DNA, 508 bp, Arabidopsis thaliana
atcgactcccgcgtccggaaatgcgggaggggttgaggtagttgatacagaacgtttcctttctattggtctgagaaaaaagcaagagtctgggaatattttttggagcgtggttttatttagatgggaggtcaatgctctagcctgagttgttgcaggaacacttcacacaagacagctgttcttgaagctcctgatgttgataatggagagagtagtgagatcactgatgttcctaatttccgggagtatactttagaacagcttaaggcagctacttttggttttgccgtggagtatattgtatctgaacatggagaaaaggctccaaatgttgtctataaagggaaattggagaaccaaaagaagattgctgtcaagcgttttactagaatggcctggcctgattcacgacagttcttggaggaagcgaggtcggttggtcagctacggagtgagagaatggtcaatttactcggatgtcgttgcgaagtgaccagaggttact

SEQ ID NO: 147184 - DNA, 541 bp, Arabidopsis thaliana
tataatcacaggcaaaacatataggctaagaatatcaaacgtgggtctcaaaacatgcttaaacttcagaatccaagaccacgatatgcttctagttgagacagagggtacgtatgttcaaaaacgtgtttactcgagcctggacatccacgtaggccaatcatactctattcttgtcactgccaaaaccgacccggttggaatttaccggtcttactacatattcgccacagctcggttcactgattcctaccttggcggtatagctttaattcgatatcccggttccccacttgacccagtcggacaaggtccactcgcacctgctttgcaagattttggttcctcagttgaacaagccctttccattaggtaaagaaatactctttttttataccaaagaataaaaacttttatatgaaatatttcgtttagtatttgttcttgactaataaacgttaagtgtacgacacagaatggaccttgacgttggagcagcaagatcgaaccctcaaggtcgtaccactatggacgaataaac

SEQ ID NO: 147185 - DNA, 401 bp, Arabidopsis thaliana
cgactcacgcgtccgaaacctaactctttctctatacaagagcgcaagctcgaatgttctcttgatctcatctctaaaacctccggagcaaggaccctcataggaactttaaaacactatgtttctagtaattcacacacaaaatggctattaaactagcaattctatttaccacatttgctctttttagcctagtcgacgctagaatccccgggatttactccggcggcgcatggcaaaacgcacacgccactttatacagtggtagctacgcctcctgcacaatgggaggagcttgtggttaccgttacctatacagccacggggtccggaccaacacggttgctatgagtacggcgctgtttaacaatggtctgagttgatgagccttgctattgtgc

SEQ ID NO: 147186 - DNA, 516 bp, Arabidopsis thaliana
agaaaacatacacaaatagcaaaacatggctaacaagctcttcctcgtctgcgcaactctcgccctctgcttcctcgtcaccaacgcttccatctaccgcaccgttgtcgaattcgaagaagatgacgccagcaaccccgtaggtccaagacagagatgccagaaggagtttcagcaatcacaacacctaagagcttgccagagatggatgagcaagcaaatgaggcaaggacgtggtggtggtccttccctcgacgatgagttcgatttcgagggcccccagcagggataccagctactccagcagtgctgcaacgagcttcgccaggaagagccagtttgcgtttgccccaccttgaaacaagctgccagggcagttagcctccagggacagcacggaccattccaatctcaggaaaattaccagtcagctaagtacttgcctaacatttgcaagatccagcaagttggtgaatgtccctttcagaccaccatcccttttttcctcttactact

SEQ ID NO: 147187 - DNA, 522 bp, Arabidopsis thaliana
attccgacagatagacagagggcgcgaaacagagagaaaattataagaagaaggacgatccagatatggaggatccttctaacccacaaccaaaccagagcaatctctcgcaatgcccgcctttagccacagctccgacacctgcgccagttcgtggtccgtaccaccggagagcacattcggaggtccaattccgtctccctgaagatctggatctctctgaaccattcggaggattcgatgagcttggatccgaagatgatctcttttgctcatacatggacattgagaaacttggatccggatccggatccgcatccgattcggctggtccttctgcttctaggtctgataacccgttttccgctgagaatggaggtgcggaggctgggaattcgagacctcgacacaggcatagcctctccgttgatggctcttcgactttggagtcaattgaggctaagaaagctatggctcctgataagctcgctgagctttgggtcgtcgaccctaaaagagcta

SEQ ID NO: 147188 - DNA, 520 bp, Arabidopsis thaliana
ctcagatctcacgattttcttcttcctctcacattaacacacatcatcatgagattaccaacgacgctgctcctctttatcggagctctcatcttctccggcgccggtactgtcagatccgatgcctccgaccaccgttacaaggacggtgactccgttcctctctacgccaacaaggtcggcccctttcacaatcccagtgagacgtatcgctatttcgatctccccttttgtattccagagggtgtgaaagataagaaggaagctcttggtgaggttttgaatggggataggcttgttagtgctccatacaagcttaactttagagatgagaaagactcagaggtgtactgtaaaaagaagcttagtagagaagaagttgaacactttcgaagagctgttgaaaaaagattattactttcagatgtattatgatgatttgcctatttggggaatcattgggaaggtggacaaagagagcaaatctgatcctagcgaggttaaaatattttttacaaca

SEQ ID NO: 147189 - DNA, 513 bp, Arabidopsis thaliana
agcggcatttagcactgagacaactcctgttacagctgagaaaaccttataaccaactcagaccaagataacaactgaagcttcagctggtgttgagacaacaccagccccggtgttttcagaaccagaggttaacgctgtgccattcgctagtgatgaagatgagaaagagaaagttgatgatgttagagacatagctggtcttgatagttcagtggttgcatgtgatgcagcagttgtgcaagtggcgtctagtgagcacaaatctgagaataatgaaccatttagtggattggatggtgggattctaaggctcaaccatcagaggcagtgcttgaaaaatctgctatgtacaaccaggtatctgaggtcatccccgttacagggtttgaggtaaaatctgattgtatttctactgattctgtgtcaaataatgaaaacatagaactaaaggataacacaattgttgataatgtcaaattagaacaaaatgttaataagttcccagagcca

SEQ ID NO: 147190 - DNA, 322 bp, Arabidopsis thaliana
  unsure (1)..(322): unsure at all n locations
cttccncaaaaatttcctacgtcgttcaaggaacgggtatcagcggaagagtggtccctggatgtgccgagaccttgatggactcgcagccgatgcaaggacaacaacaaggccaaccatggcaaggacgacagggacaacaaggccaaccatgggaaggacagggacaacagggacaacaaggaagacatggccaaccatgggaaggacagggacaacagggacaacaaggacgacagggacaacatggccaaccatgggaaggacagtgacagcagggacaacaagggttccgtgacatgcaccagaaggtggaacatgt

SEQ ID NO: 147191 - DNA, 369 bp, Arabidopsis thaliana
cgtccgggagaaaaacgggtcgagtctcatctattatctctttctcttggactcttttgatcctcttcaatggctacactgccgggcagtggcccaacgagtgccagctcgatcaactcaatgcgctcgaaccatcccaaatcatcaagagcgagggtggtcgcatcgaggtctgggaccaccatgcaccccagctccgttgctccggctttgcctttgagcgtttcgacattgagcctcagggtcttttcttgcccactttcttgaacgccggcatactcacgtttgttgttacggaaggggtctaatgggaagagttattcctggattgcccgagacgttcatggagttaccggtattttggagaag

SEQ ID NO: 147192 - DNA, 373 bp, Arabidopsis thaliana
  unsure (1)..(373): unsure at all n locations
acccacgcgnccggtctgcttctttttatttaatctcccattgattcgcctcagatctctcgctctttcgtcttattttgtggtgctggccgatttgcccatcgtgctctgtcatcgatttcaccgagaaagttaccgaattttcgtgctttctctggtaccgctatgacagatactaaagatgctggtatggatgctgctcagagacgtcttatgtttgaggatgaatgcattcttgacgatgaaactgatcgcgtcgtggcgtaagacagctggtatcagttacatctgatggaatgtatagcagccaactatttgctggacacgactttacgtattcatcatacacttcgatctaagagtggttaatcta

SEQ ID NO: 147193 - DNA, 290 bp, Arabidopsis thaliana
gcccgggtattgctgcaatgattcgtttgtctcgctctccaccttgcaggaggttttatcagagaaagcttatatcctgtttttcagccgttcaaaccagaggccagcgtttgttaaaactctggtaccatccaatgggactccatttaatgaagttaatggttgggggacatcaaatcccaagaggttaatggggcccttaaagggtttaaccatgaaacctaaggccgggcagtctttccagaggggtaccctgcttttttaaaggcccattaaattaatagggccca

SEQ ID NO: 147194 - DNA, 470 bp, Arabidopsis thaliana
caaaacacacccaaatatgcataagcttttgttttctcttctctccgtcgtctcactctcatttctcctcttcttgcatggcgccgaggcacgccagcgagaggcgccgtttccaaacgcctgccatttcagccaaatcaacagcctcgcgcccgctcaggcgacgaagttcgaagccggtcagatggaagtatgggaccacatgagccctgagctccgatgcgccggtgtaacggtggctcgcatcacccttcagcccaattccattttcttgcccgctttctttagcccacctgcccttgcttacgttgtccaaggagaaggagttatggggacgattgcttctggttgtcctgagacttttgcagaagttgaaggatcatcaggaagaggaggaggaggagacccgggtcgacgttttgaggacatgcaccagaagttggagaattttcggcgaggggatgtgttgc

SEQ ID NO: 147195 - DNA, 410 bp, Arabidopsis thaliana
aacaacacacccagatatgcatgcgctaacgaacactcttattatatctactctcactcttaatcctcatggttgttgcatactgtttatgcactccagcgagaggcgacgagttcaaacgcactgccatttgagacaacagaacagtctccggcgccgtcatgctactgaatctcgaagccggacagatggaagtgtgggaccacattagctctgagctccgatgcgccggtgtaacggtgggttgcatcacccttcagcccaattccattgtcttgcccgctttctttagcccacctgcgcttgtttacgttgtccaaggagaatgagttatgttgacgattgcttctggttgtcctgagacttttgcagtagctgatggatcatcaggtagtggaggaggaggagac

SEQ ID NO: 147196 - DNA, 449 bp, Arabidopsis thaliana
cggacgcgtgggcaagcccagcctaggtcgcgtgaccatgattcattttctataccttgcccatcttggagtatgtcaggctcagtgccactcgtggcgttctccagggtaatgcgatggtgcttcctaaatacaacatgaacgctaacgagatcttgcactgcactggaggacaaggaaggatccaagtggtcaacgacaacggacagaacgtgttggaccaacaggtgcagatgggacagctcgtggtcattccacaagggttcgtattcgttgtccagtcccacggaaacaatttcgagtggatctctttcaaaactaatgaaaacgcattgatcagcactttggcgggtagaacctcgcttttgagggcattgtcattgaaggtcatattaaattgtgtttcagatctctcccgaggtagctaggaagatcaagttcatcactct

SEQ ID NO: 147197 - DNA, 419 bp, Arabidopsis thaliana
  unsure (1)..(419): unsure at all n locations
atctcctcttgcaaaccaacgtaaaacactaactaagagatcaatatggctggagtgatgaagttggcatgcatggcctgggcttgcatgattgtggccggtccaatcacagcgaacgcgcttatgagttgtggcaccgtcaacggcaacctggcaggttgcattgactacttgacccgaggtgctccacttacccaagggtgctgcaacggcgttactaaccttaaaaacatggccagtacaaccncagaccgtcagcaagcttgcacgtgcctataatctgcacgtaaaagccgtggtcccggtctcaacactgaccgtgcagctggacttactagcgcatgcaaagtcaatattccttacaaaatcagcgccagcaccaacttgcacaccgtgaggtgatgagcgacggtcaaatg

SEQ ID NO: 147198 - DNA, 222 bp, Arabidopsis thaliana
aaacacacagtttaatccaaaaaaagatcaaacgatggatgccacatttttttatgtgcttctcgtgattggcgtgtgttgtgtgccattgtcactgcaaggcaggtggaagaagtgtccaaagagaccaaattaggtatctctactccaaaaactactatcaaaggcgtctgatctcacctttgtgctagggtcacaactttcagctactctggggtctct

SEQ ID NO: 147199 - DNA, 449 bp, Arabidopsis thaliana
  unsure (1)..(449): unsure at all n locations
agaaaacatacacaaatagcaaaacatggctaacaagctcttcctcgtctgcgcaactctcgccctctgcttcctcctcaccaacgcttccatctaccgcaccgttgtcgaattcgaagaagatgacgccagcaaccccgtaggtccaagacagagatgccagaaggagtttcagcaatcacaacacctaagagcttgccagagatggatgagcaagcaaatgaggcaaggacgtggtggtggtccttccctcgacgatgagttcgatttcgagggcccccagcagggataccagctactccagcagtgctgcaacgagcttcgccaggaagagccagtttgcgtttgccccaccttgaaacaggctgccagggcagttagcctccagggacagcacggaccattccaatccaggaaanattaccagtcagctaagtacttgcctaaca

SEQ ID NO: 147200 - DNA, 406 bp, Arabidopsis thaliana
cggacgcgtgggcattgacatcaacagggttgaagaagaacaacatcattcaacatcagcatcacgaatattttcgagtcatggagagaagcgccgttgcctcaggttttcatagaaattacatcctctgtgcttcacgcgccgccacttccacgacgcgcctccactctttgtcctccctcagaaactttccctcttcctctctcaggattcgtcactgtccttctcccatctcttccaatttcatcgttagtgaagtttcccgaaaccgacgatgcgacgccgtttcttccagcaccaccgatgtgactgaattagccgaaattgattgggacaagattgattttgggcttaaaccaacggattacatgtacgccatgaaatgtagccgtgatggtgattctct

SEQ ID NO: 147201 - DNA, 473 bp, Arabidopsis thaliana
ccaaattttaaccgaacaaaccgaattctcaagtaattgagtgcaatgtaaactctctttaactcttacaattcattcctagagttaagcaatcgaaagtagacatttttctggaaatcagaaccaaaaatgaataattgaacttatcaaattcttaaacacatagagtacaatcttagttgatgttagacgaacctgataatctaaatctgaattcaaaaaggaaggatcttttaaaagcatcaaatagaaacagacataaactctaacaacgataaaccctcgaaatgaattgagagatgaaaagggattgataccggagacgatgagattggcgctaggttcagcctgaggacgagccggtgttagatattcagcttgtggtgacagaaaagagaaccttgaagcatttgaacagaacagtcgtttcagaccaactcgcgctgacgctacttccgtcacagctatagata

SEQ ID NO: 147202 - DNA, 426 bp, Arabidopsis thaliana
ctgagatcttggctcaagccttcaagatcaatgtcgagacggctcagcagctccagaaccagcaagatagccgtggcaacatcgtcaaggtcaacggacctttcggcgtcattaggccacccttgagacgcggcgaaggcggccaacaaccacatgaaatagctaatggtttagaggagactttgtgcaccatgcgatgcactgaaaacctcgatgacccgtcggatgctgacgtgtacaagccatcactcggatacattagcacacttaacagctacaatcttcctatcctcagacttctccgccttagcgctcttcgtggctccatccgtaaaaacgctatggtgctaccgcaatggaacgtaaacgcaaacgcggcactctacttgacaaacgggaaggcttaatatacaaatggtgaacgac

SEQ ID NO: 147203 - DNA, 461 bp, Arabidopsis thaliana
aagcttgtggtctcaacctcctgctctcttctccacaccgctgttgatcttatcaatgagactaagcttgatgatgaaatcaagtcatggatggcgtttgctgcccagaaggtcgttgaagtgaatgcattggccaaggctttggctggtcagaaggacgaggcccttttctctgccaatgctgcggctttggcttcaaggagatcttccccaagagtcaccaacgagggtgtccagaaggctgctgctgctttgaagggatctgaccaccgtcgtgcaaccaatgttagtgctaggctagatgctcagcagaagaagctcaatctcccaattcttaccaaccacaaccatcggatccttcccacagactgtagagctcaggagagttcgtcgtgagtacaaggccaaaaaggtctctgaggaggactacgttaaggccatcaaggaagagatccagaaag

SEQ ID NO: 147204 - DNA, 302 bp, Arabidopsis thaliana
cttagacttatctctatatacccccttttaatttgcgtgctcttagcctttactctatagatttatatcgtatgaatcgacatggcgaatgtggaccgtgatcggcgtgtgcatgtagaccgtactgacaaacgtgttcatcagccaaactacgaagatgatgtcggttttggtggctatggcgggtatggtgctggatctgattatatgagtcagtgaccatccactaaccaaatattggcactgatagtaggagtggccattggtggcacactgctaaccctagctgggctcactttagc

SEQ ID NO: 147205 - DNA, 133 bp, Arabidopsis thaliana
gtcgaagataagcggagagagagagagacagagagagattcaaaaatccgattccggatccattcctgggcaaacaaaggttggtgtttctcttaatctcaaagcttttttcaaattcggaaaaagcaaatcg

SEQ ID NO: 147206 - DNA, 581 bp, Arabidopsis thaliana
  unsure (1)..(581): unsure at all n locations
caccccaaacatcacaatttcacattcnnttttgcatatttctttcttttcttcttccattatggagataccggagctgtgatgtgtgtctantgaacccctaantttatnncttcctttgagcctcnntctcgccctnngtatctcctctnncactcgctcactagtnntccgttccgatcccgactaaaccctagttccccgcttnnccatttctagggtnnttcggcgtcgatccttccaccccgaatnagtgaaacctgacannagatctccgttaaaccctgtttaccgtcccgacgtctncccaatcgcgaactccggacctcctcacatgtggataccatttncgatggaaccacctcggaaggttcttcgagggatggtatttcagggtttccatcccagagaagagggagagtttttgttttatgtattctgtggagaatcctgcatttcggcagagtttgtcaccattggaagtggctctatatggacctagattcactggtgttggagctcagattcttggcgctaatgataaatatttatgccaatacgaacaagactctcacaatttc

SEQ ID NO: 147207 - DNA, 494 bp, Arabidopsis thaliana
tctctcttctactttatgtaggagagttcaagaaacaatggcaaagatgcaattatcaatctttatcgctgtcggtgcggttatcgtctgctctgcatctgctaaaaccgcaagccctccagctccagtgctgccaccgacaccagctccagcaccagccccggaaaatgtgaatctcaccgagcttttaagtgtagctggtccgttccacacattcctcgactaccttctctcgactggagtcattgagactttccaaaaccaagctaacaacactgaggaaggcatcacaatctttgtccctaaagatgatgctttcaaagctcagaagaatcctcctttgtcaaatctcacaaaggatcagcttaagcagcttgttctcttccatgctctgcctcattactattcgctttcggaattcaagaacttgagccaatctggtccagtgagcacctttgctggtggtcaatactccttgaaatcactgatgtttc

SEQ ID NO: 147208 - DNA, 475 bp, Arabidopsis thaliana
aaacaaaacacacccaaatatgcataagcttttgttttctcttctcttcgtcgtctcactctcatttctcctcttcttccatggcgccgaggcacgccagcgtgaggcgccgtttccaaacgcctgccatttcagccaaatcaacagcctcgcgcccgctcaggcgacgaagttcgaagccggtcagatggaagtatgggaccacatgagccctgagctccgatgcgccggtgtaacggtggctcgcatcacccttcagcccaattccattttcttgcccgctttctttagcccacctgcccttgcttacgttgtccaaggagaaggagttatggggacgattgcttctggttgacctgagacttttgcagaagttgaaggatcatcacgtagaggaggatgaggagacctgggtcgacgatttgaggacatgcaccagaagtaggagaatctctggcgaggggatgtgtttgct

SEQ ID NO: 147209 - DNA, 462 bp, Arabidopsis thaliana
  unsure (1)..(462): unsure at all n locations
gtaattaactaacaacaaatggcgaacaagctcttcctcgtctgcgcagctctcgccctgtgtttcatcctcaccaacgcttccgtctatcgcacggttgtcgagttcgacgaagatgacgccagtaaccccataggcccaatacagaaatgtcagaaggagtttcagcaagaacagcacctaagagcttgccagagatggatgcgcaagcaaatgtggcaaggacgtggtggtggtccttccctcgacgatgagttcgatatggaagacgacatcgagaacccgcagagacgacagctactccagaagtgctgcagcgagcttcgccaagaagagccagtttgcgtttgccccaccttgagacaagctgccaaggccgttagattccagggacagcaacaccaaccagagcaagtcaggaaaatntaccaggcaggtaagtacttgcctaacatttgcaaa

SEQ ID NO: 147210 - DNA, 486 bp, Arabidopsis thaliana
gaaggatccaagtggtcaacgacaacggacagaacgtgttggaccaattggtgcagaagggacagctcgtggtcatcccacaagggttcgcatacgttgtccagtcccacggaaacaagttcgagtggatctctttcaaaactaatgaaaacgcaatgatcagcactttggcgggtagaacctcgctcttgagggcattgccattggaggtcatatcaaatggtttccagatctctcccgaggaagctaggaagatcaagttcaacacacttgagaccactttgacccgcgctgccggtaggcaacaacaacagttgatcgaggagattgtcgaggcttaaatcaaaacgtttttctttttcttaataaagtatggtcagtttgtaatcacgtccctttacctttaacgtacgtgtaaaatatgtgtctgcggcacctcactcgtaataacactttcttctcataaataaaaaggaagtttcagtt

SEQ ID NO: 147211 - DNA, 544 bp, Arabidopsis thaliana
  unsure (1)..(544): unsure at all n locations
cttcttcctcactgtagctcgtcgtcgctacaccatctagaagacccttaaccatggctgtcgggaagaacaagaggatttcaaagggtaggaaaggaggaaagaagaaggctgttgatcccttctccaagaaggattggtatgacgtgaaggctcctggttctttcacgaacaggaatgttgggaagactcttgtttccaggactcagggtaccaagattgcctctgagggactgaaacacagggtgtttgaggtttctcttgctgatctacaaaatgatgaggataatgcctacaggaagatccgtcttagagctgaagatgttcagggaaggaatgtgttgacccagttctggggtatggatttcacaaccgacaagctaaggtcattggtgaagaagtggcagactttgattgaagcccatgtcgatgtgaaaaccacagacggctacanccttgagatgttctgcatcgccttcacaaagagacgtgctaaccaagtgaagcgtacctgttacgctcaatccagccaaatccgtcagat

SEQ ID NO: 147212 - DNA, 338 bp, Arabidopsis thaliana
aatgactagatttgcggtattgccactctctgttctccttctcgttctcttgttcctctgcactgagtcgttggcgtaagtcggaggagtctgaagaatacgacgtcgctgtgccttcatgttgcgggttttcgtctcctcttctgattaagaaagatcaatggaaaccaatcttcgagacgaagtttggacagatttcaaccgttcaaatcggcattggatgcggtggaatgggaccttacaagatacattccataacgttggagccaaacacatttttgctccctctttttcttcattccgacatggtcttcttcgatgactttggaagtgggatt

SEQ ID NO: 147213 - DNA, 381 bp, Arabidopsis thaliana
gaccactggatctacaactaggagaacagccacttgcattattttcttctgacatcgccaactacggaggcgactcgaccgcaaccctagagtgttccatttggccggaaacaaccagcagggaggctttggcggttcacagtaacaacatgaacagaaaaacttgtggagcgggttcgacgcacaggtcatagctcaagcattgaaaattgacgttcagttggctcagcagctttagaaccaacaagacatcagaggaaacatcgctcgtgttaaggtacctttacaggtcgtgaggccacctttaatacagtcctactagagcgaggagtggagacactccacgtagcccacagggtaacggtcttgaggagactattt

SEQ ID NO: 147214 - DNA, 363 bp, Arabidopsis thaliana
aagaaaacatacacaaatagcaaaacatggctaacaagctcttcctcgtctgcgcaactctcgccctctggttcctgctcaccaacgcttccatctaccgcaccgttgtcgaattcgaagaagatgacgccagcaaccccgtaggtccaagacagagatgccagaaggagtttcagcaatcacaacacctaagagcttgccagagatggatgagcaagcaaatgaggcaaggacgtggtggtggtccttccctcgacgatgagttcgaattcgagggcccccaacaagggataccagctactccagcagtgctgcaacgagcttcggcagggaagagcccagttggggttggcccaacttgga

SEQ ID NO: 147215 - DNA, 450 bp, Arabidopsis thaliana
tgacactcttgatcctcttcaatggctacactgcccaacagtggcccaacgagtgccagctcgatcaactcaatgcgctcgaaccatcccaaatcatcaagagcgagggtggtcgcatcgaggtctgggaccaccatgcaccccagctccgttgctccggctttgcctttgagcgtttcgtcattgagcctcagggtcttttcttgcccactttcttgaacgccggcaaactcacgtttgttgttcacggaaggggtctaatgggaagagttattccgggatgcgccgagacgttcatggagtcaccggtatttggagaaggtcaaggtcagggtcagagtcaagggttccgtgacatgcaccagaaagtagagcacctacggtgcggtgacaccattgcaacaccatctggtgtagctcaatggttctaccacaattggaaatgagcct

SEQ ID NO: 147216 - DNA, 523 bp, Arabidopsis thaliana
  unsure (1)..(523): unsure at all n locations
cggacgcgtgggtttcatctctagaaaagggcacaaaaaaccaaactttacgatttctcctctctggaatctcgattctgtatgatctcttcgatctaatcgagtcttctaaacgttccgtgtagaatttcaaatctagggtttgctaaagcttgaacctttcttacccttttctctcgaagaggttttgattcctgggcatgaatttttccctaatcttgttaccttcgaagcataacaacaacgaaagatgtcagattcaatccaggaaagatacttagttggatacgcactcgcagccaagaaacagcatagtttcatccaaccttctttgatcgaacactcaaggcaacgaggcattgatctggtcaagcttgatccgacgaaatcgttgttggagcaagggaagcttgattgcataatccacaagctttacgatgtgtattggaaggagaatcttcatgagtttcgcgagaaatgtcctggtgttcctgtaatcganttgcctgaggctatcgagcga

SEQ ID NO: 147217 - DNA, 518 bp, Arabidopsis thaliana
aagaaaacatacacaaatagcaaaacatggctaacaagctcttcctcgtctgcgcaactctcgccctctgcttcctcctcaccaacgcttccatctaccgcaccgttgtcgaattcgaagaagatgacgccagcaaccccgtaggtccaagacagagatgccagaaggagtttcagcaatcacaacacctaagagcttgccagagatggatgagcaagcaaatgaggcaaggacgtggtggtggtccttccctcgacgatgagttcgatttcgagggcccccagcagggataccagctactccagcagtgctgcaacgagcttcgccaggaagagccagtttgcgtttgccccaccttgaaacaagctgccagggcagttagcctccagggacagcacggaccattccaatccaggaaaatttaccagtcagctaagtacttgcctaacatttgcaagatccagcaagttggtgaatgtccctttcagaccaccatccctttctttccttcttactac

SEQ ID NO: 147218 - DNA, 431 bp, Arabidopsis thaliana
caaacacacacaaatctctgaagtaaaatgacgttcccttctctttctgtcttatttctcttctttgccttcatattcgtgacgcatgcattcgacctcagcatcatccagatgcaacagggaacatgtccgtacacggtggttgtcatgacaagctgtctttctccggagtcgacaagagatcagatcagcattgtttttggcgatgccgacggtaacaaggtgtatgcaccgaaactagggggtttggtaagaggaccagggggtttgtggaagtgttcaacgaacacattccaagtcagaggtcaatgtttgaatgaccctatctgctctctctatatcaaccggaatggacccgacggttgggttccggagttcattgagatctactcagaaagttcaaagtccgttaaattcgatttaagcaagag

SEQ ID NO: 147219 - DNA, 471 bp, Arabidopsis thaliana
cttgaagttaaaatgatctcagaagcgcacaaaatggggctgttgaccactccatatgctttcaacccaaaagaaggagaagaaatggcaaaagcgggagctgatatcatagtagcccacatgggtctaacgacatccggaaatattggggcgaaaaccgcagtttcagtggaagaaagcgttgttcgtgtacaagctattgcagatgctgctcgtagattcaacccagacattatcgtcctctgccacggaggtccgatatcgggtccagaagaggcagagtttgtgttgaagagaacacagggttgtgtccatggcttctacggagcatcaagcatggaaaggctacctgtagaacaagcaataacaaaccactgttcaaaaatacaagtccatatcgatcaagtgaagtcaaaataataagttcacttagaaaaccttatctttggtgtttctaggatatttgcatgt

SEQ ID NO: 147220 - DNA, 551 bp, Arabidopsis thaliana
  unsure (1)..(551): unsure at all n locations
aaacaagaaaacatacacaaatagcaaaacatggctaacaagctcttcctcgtctgcgcaactctcgccctctgcttcctcctcaccaacgcttccatctaccgcaccgttgtcgaattcgaagaagatgacgccagcaaccccgtaggtccaagacagagatgccagaaggagtttcagcaatcacaacacctaagagcttgccagagatggatgagcaagcaaatgaggcaaggacgtggtggtggtccttccctcgacgatgagttcgatttcgagggcccccagcagggataccagctactccagcagtgctgcaacgagcttcgccaggaagagccagtttgcgtttgccccaccttgaaacaagctgccagggcagttagcctccagggacagcacggaccattccaatccaggaaaatttaccagtcagctaagtacttgcctaacatttgcaagatccagcaagttggtgaatgtcccttccagaccaccatccctntcttccctccttactactagagtccaagcccggcctagcacgatga

SEQ ID NO: 147221 - DNA, 548 bp, Arabidopsis thaliana
atggttaagctcagcaatctcctcgttgcaaccttcggggttctcctcgtccttaacggctgccttgcgaggcagtcactgggggttcctcctcagctacagaacgagtgtaacctcgacaacctagatgttctccaagccaccgaaactatcaagagtgaagccggtcagatcgagtactgggaccacaaccaccctcagctccgatgtgttggtgtttccgttgctcgttatgtaattgaacaaggcggtctttacttgcccaccttcttcacttccccaaaaatttcctacgtcgttcaaggaacgggtatcagcggaagagtggtccctggatgtgccgagaccttcatggactcgcagccgatgcatggacaacaacaaggccaaccatggcaaggacgacagggacaacatggccaaccatgggaaggacagggacaacagggacaacaaggaagacaaggccaaccatgggaaggacagtgacaacagggacaacatggacgacaggtacaacaaggccaaccatgggaaggacagggaca

SEQ ID NO: 147222 - DNA, 539 bp, Arabidopsis thaliana
acaacaaacaaaaagaaaatggttaagctcagcaatctcctcgttgcaaccttcggggttctcctcgtccttaacggctgcgttgcgaggcagtcacttggggttcctcctcagctacagaacgagtgtaacctcgacaacctagatgttctccaagccaccgaaactatcaagagtgaagccggtcagatcgagtactgggaccacaaccaccctcagctccgatgtgttggtgtttccgttgctcgttatgtaattgaacaaggcggtctttacttgcccaccttcttcacttccccaaaaatttcctacgtcgttcaaggaacgggtatcagcggaagagtggtccctggatgtgccgagaccttcatggactcgcagccgatgcaaggacaacaacaaggccaaccatggcaaggacgacagggacaacatggtcaaccatgggaaggacagggacaacagggacaacaaggaagacatggccaaccattgggaggacagggacaacagggacaacatggacgacagggacaaca

SEQ ID NO: 147223 - DNA, 465 bp, Arabidopsis thaliana
  unsure (1)..(465): unsure at all n locations
aagaaaatggttaagctcagcaatctcctcgttgcaaccttcggggttctcctcgtccttaacggctgccttgcgaggcagtcacttggggttcctcctcagctacagaacgagtgtaacctcgacaacctagatgttctccaagccaccgaaactatcaagagtgaagccggtcagatcgagtactgggaccacaaccaccctcagctccgatgtgttggtgtttccgttgctcgttatgtaattgaacaaggcggtctttacttgcccaccttcttcacttccccaaaaatttcctacgtcgtttcaaggaacgggtatcagcggaagagtggtccctggatgtgccgagaccttcatggactcgcagncgatgcaaggacaacaacaaggccaaccatggcaaggacgacagggacaacaaggtcaacccatggaaggacagggacaacagggaccacaagg

SEQ ID NO: 147224 - DNA, 469 bp, Arabidopsis thaliana
aaaattgtattgggggttaggtcgctggacatgacatcctattgcttgtttggtatttatggatcaaatcgacggagaccaaaaacaaatatgaaagaatcctatacaccaaaagtggaggagctcgaaatagccataagaactatattagcaataatattgtacggccttggaatgaatacaaaagagatataagcaaaagagttccaaagcaaagctaaatcatgaattgtgtgcaaattgtgtctaagggtattagtaatgacaattgcggaattgttacataaaactatatgctaaatctcttttgtgttgcccctttgatataatagatgagtaatgactgttgctgtttctcaatgataatgctccaacgtctgaatcgttttagagaacaaattccgggtggaacctaattaaacaactgtgacccgaagtatggactcacctaatatttaaaacgggaaag

SEQ ID NO: 147225 - DNA, 450 bp, Arabidopsis thaliana
agcacaatgactagatttgcggtattgccactctctgttctccttctcgttctcttgttcctctgcactgagtcgttggctaagtcggaggagtctgaagaatacgacgtcgctgtgccttcatgttgcgggttttcgtctcctcttctgattaagaaagatcaatggaaaccaatcttcgagacgaagtttggacagatttcaaccgttcaaatcggcaatggatgcggtggaatgggaccttacaagatacattccataacgttggagccaaacacaattttgctccctcttcttcttcattccgacatggtcttcttcgttgactctggaagtgggattctgaattgggttgacgaggaagcgaagagtactgagattagactaggggacgtttacaggctacgtcccggggtcgttttctacttacagagcaaaccggtggatatc

SEQ ID NO: 147226 - DNA, 583 bp, Arabidopsis thaliana
  unsure (1)..(583): unsure at all n locations
cgtcccgcannaagcgtgaggtganngatcggnngaatcagacccatcgcctcncnngtctctcaaatttcaaaccgtctatctcnncatctcnncttcctcgcgcccgcgcgctccatggnnaatctcnncgaagaannttctctganntcccgagccttccnnntctattcnnatcatctntnncatctccgagannntctttcctnncctcgacccaggtgcctnncaattccaacctnnncaacgctgcatnntcgagaaatnnctccttctccggccccccgcgtnntcctctcctacccgtcgatgtatttcttcggaagggaatttccttattgggcatctcccaccgagcnccagggaaggggatccgagatgtanttcacctgccttctacgctgcttgtacctttggtggaattctcagctgtggtcttactcacatgaccgtgactcctctcgatctcgtcaagtgcaatatgcagattgatccagcgaagtacaagagcatctcgtctggttttggaattttgctgaaagagcaaggagtcaaaggctttttccgtggatgggttcctact

SEQ ID NO: 147227 - DNA, 489 bp, Arabidopsis thaliana
caaccttcgccggaaataatggctttcccgcgatttctttctctccttgccgtcgtcactctctctcttttcctcaccaccactgatgcttcctctcgctctctatccactccacctaaaacgaacgtactcgacgtcgtttcatctctccagcaaacacaaactatcctctcactcgacccgactcgttcctcactcaccaccaccaaacccgaatccctatccgacccggttttcttcaattcatcttcaccactatctctagagcttcactctcgagacactatcgtcgcgtcacagcacaaagactacaaaagcttaacactcagtcgactcgagcgcgactcatcccgagtcgccggaatcgtcgcgaagatccgtttcgccgtcgaaggagtcgatagatccgatctcaaacccgtttacaacgtagatacacgataccaaaccgaggatctaacgacacctgtcgtcttcggagccctttaa

SEQ ID NO: 147228 - DNA, 361 bp, Arabidopsis thaliana
gccacgagaagttgctggaatcatgtacttctgcattagaaaaatattttgtcggttcttgtgggcctggtggattctatggtacaattgatgtccaccttgactgcgaaaccagaatatccaaatttttgggtactcctgattcaatcctttactcttatggactttccacgatgttcagcacaattccttgtttctgtaagaaaggcgatgtcattgttgctgatgagggtgttcactggggaatacaaaatggacttcagctttcaagaagtacaatcgtgtactttaagcacaatgacatggaattccttcgaattacccttgaaaaaatcatgacagagtacaagcgctcaaagaa

SEQ ID NO: 147229 - DNA, 520 bp, Arabidopsis thaliana
agaaaacatacacaaatagcaaaacatggctaacaagctcttcctcgtctgcgcaactctcgccctctgcttcctcctcaccaacgcttccatctaccgcaccgttgtcgaattcgaagaagatgacgccagcaaccccgtaggtccaagacagagatgccagaaggagtttcagcaatcacaacacctaagagcttgccagagatggatgagcaagcaaatgaggcaaggacgtggtggtggtccttccctcgacgatgagttcgatttcgagggcccccagcagggataccagctactccagcagtgctgcaacgagcttcgccaggaagagccagtttgcgtttgccccaccttgaaacaagctgccagggcagttagcctccagggacagcacggaccattccaatccaggaaaattaccagtcagctaagtacttgcctaacatttgcaagatccagcaagttggtgaatgtcccttccagaccaccatccctttcttcccttcttactactaga

SEQ ID NO: 147230 - DNA, 332 bp, Arabidopsis thaliana
  unsure (1)..(332): unsure at all n locations
aattccnggttggaccaacccgcccggaaggaaaaatgggtcgagtctaatctataatctctttctctttgacactcttgatcctcttcaatggctacactgcccaacagtggcccaacgagtgccagctcgatcaactcaatgcgctcgaaccatcccaaataatcaagagcgagggtggtcgaatcgaggtctgggaccaccatgcaccccagttccgttgttccgcttttgcctttgagcggttcgtcattgagcctcagggtcttttcttgcccactttcttgaacgccggcaaactcacgtttgtggttaacggaaggggtctaatg

SEQ ID NO: 147231 - DNA, 481 bp, Arabidopsis thaliana
atctgagaaaatggttgctcgtaaatttgtcgtccgccatgaagattttagcttcgatgtcgactacaacactgaagatggtcttgaggttttacgatatcaaatctttaccctcactttggttcctcctgaagaacaaaagatcgttgcggaagatgataatcgattggtgtctgatgagtctgatcttgcttctttatctgagagacttcgattagtttcagttggagaagattctgtatagaactcacatgcggaaatgttgaaatcagattaagaatcggctttaatgttgcaggcagaagaagatgcgattatgtttcaacagcttgtcgctgcacgagataacggcggatttcaaaggagaatttggccttatgttagttaagatcttatgtatgaagatccatttcgtccagatgcttgtttgaaagcatgtttcttaagactagcttggggagaaagccattggttctctggc

SEQ ID NO: 147232 - DNA, 550 bp, Arabidopsis thaliana
cgcgcccgggttgcgtgacggctgaactgctgcttggacaggttggagcactatttttgttttagctatatgcttggtattggatttctgcaccctcttactcatttttgctctcgcggacttgttttacagcctctgtttcctggcgaaagtggagtcgatcaacttgttgaaatcataaaggtagtatttttgctatcaattcttttagggttagttgtatttacaaagaaaatgacatctttagagctggcactgactaatagtttctcactgctgattatatttttttcataaaactttaccaccatttctgtagtaggactcgtacattctctcttcatggtttgctaatcgtcatgcaggttttgggtacaccaacaagggaggagatcaaatgcatgaatccaaactacacagaatttaaattttctcagataaaacctcatgcttggcacacggtgtaccgactagagcatcaattatcacctaatagggagctctctatcgatatatgaccaagcttgtctcggttaatcgaggtgattga

SEQ ID NO: 147233 - DNA, 442 bp, Arabidopsis thaliana
tacacgaatagcaaaacatggctaacaagctcttccttttttgcgtcttctctcgccctctgcttccggcgcaccaacgcttccatctaccgcaccgttgtcgaattcgaagaagatgacgccagcaaccccgtaggtccaagacagagatgccagaaggagttccagcaatcacaacacctaagagcttgccagagatggatgagcaagcaaatgatggcaaggacgtgagggtggtccttccctaaaccatgaggtccatttcgagggcccccagccgggataccacctactccaccatggctgcaacgagcttcgccttacccttgagaaaatcatgacaaagtacaagcgctcaaagaacttgaggcgttatattgtagctgaagctgtatcattacaatcaagtaaaattgaccattcagatgagattgtaaactaa

SEQ ID NO: 147234 - DNA, 482 bp, Arabidopsis thaliana
cgactcacgcgtccgagaaaacatacacagatagcaacacatggctaacaaggtcttattagtatgcgcaacactggccctctgctgcgtgtgtcaccagcgcttgcatctaccgcaccgttgtcgaattcgaagaagatgacgccagcaaccacgtcggtccaagacagagatgccagaaggagtttcagcaatcacaacacctaagagcttgccagagatggatgagcaagcaaatgaggcaaggacgtgcaggtggtacttccctcgacgctgagttcgatttcgagggaccataggagggataccagctactccagcagtgctagaacgagcttcgccaggaagagccagtttgcgtttgcctcaacttgatacaagctgccagggcagtctgctctccgggacagcacggaccattccaattcaggaaaatttaccagtcagctaagtacttgcctaacatttgcaagatccagcaa

SEQ ID NO: 147235 - DNA, 521 bp, Arabidopsis thaliana
  unsure (1)..(521): unsure at all n locations
agaaaacatacacaaatagcaaaacatggctaacaagctctttctcgtctgcgcaactctcgccctctgcttcctcctcaccaacgcttccatctaccgcaccgttgtcgaattcgaagaagatgacgccagcaaccccgtaggtccaagacagagatgccagaaggagtttcagcaatcacaacacctaagagcttgccagagatggatgagcaagcaaatgaggcaaggacgtggtggtggtccttccctcgacgatgagttcgatttcgagggcccccagcagggataccagctactccagcagtgctgcaacgagcttcgccaggaagagccagtttgcgtttgccccaccttgaaacaagccggccagggcagttagcctccagggacaggacggaccattccaaatcaggaaaanttaccagtcagctaagtacttgcctaacatttgcangatccaacaagttggtgaatgtcccttccagaccaccatccctttcttccttcatactactaga

SEQ ID NO: 147236 - DNA, 452 bp, Arabidopsis thaliana
agaaaacatacacaaatagcaaaacatggctaacaagctcttcctcgtctgcgcaactctcgccctctggtgcctggtcaccaacgcttgcatctaccgcaccgttgtcgaattcgaagaagatgacgccagcaaccccgtaggtccaagacagagatgccagaaggagtttcagcaatcacaacacctaagagcttgccagagatggatgagcaagcaaatgaggcaaggacgtggtggtggtccttccctcgacgatgagttcgatttcgagggcccccagcagggataccagctacttcagcagggctgcaacgagcttcgccaggaagagccagtttgcgtttgccccaccttgaaacaagctggcagggcagttagccttcagggacagcacggaccattccaatccaggaaaatttaccagtcagctaagtacttgcctaacattt

SEQ ID NO: 147237 - DNA, 320 bp, Arabidopsis thaliana
agaaaacatacacaaatagcaaaacatggctaacaagctcttcctcgtctgcgcaactctcgccctctgcttgctgctcaccaacgcttccatctaccgcaccgttgtcgaattcgaagaagatgacgccagcaaccccgtaggtccaagacagagatgccagaaggagtttcagcaatcacaacacctaagagcttgccagagatggatgagcaagcaaatgaggcaaggacgtggtggtggtccttccctcgacgatgaggtcgatttcgagggcccccagcaaggataccagctactccagcagtgctgcaacgagc

SEQ ID NO: 147238 - DNA, 424 bp, Arabidopsis thaliana
gatatccatgaggagaagtattctaatgcttttcttggttttggacctgaaacatctaactttgttgtggagctgacatataactatggcgtttgctgatatgatattgaaactggctatgagcattttgccatttcaactgacgatgtcagcaaactggttgagaacgtccgcgccaagggcggatatgtgactagcaaacctggatgcggccaaaggaggaggcacgtgccattgcgtttgtgaaggaccctgatggctacacttttgagctgatccaaagaggtacacctgctgcacctttctggcaagacatgctttgtgtaggagaagtcgaccgggccatgaaatactatgaaaagggcctgcggatgagactcttgagaaagattgagagacctgtgtacaagaacaccatttgcct

SEQ ID NO: 147239 - DNA, 293 bp, Arabidopsis thaliana
cgggaagaaaaatgggtcgagtctcatctattatctctttctctttgacactcttgatcctcttcaatggctacactggccaacagtggcccaacgagtgccagctcgatcaactcaatgcgctcgaaccatcccaaatcatcaagagcgagggtggtcgcatcgaggtctgggaccaccatgcaccccagctccgttgctccggctttgcctttgagcgtttcgtaattgagcctcagggtcttttcttgcccactttcttgaacgccggcaaactcacgttagttgctcac

SEQ ID NO: 147240 - DNA, 395 bp, Arabidopsis thaliana
agatcttcgagaaagatggactcttgtataactgtgccttctcgatatgcgatttgggaaaagggcgtaatgagtattgtattatgcagctagtcacggtacccgatagtaacctgaacatgtacttcaagagagggaaagtaggagatgaccctaatgccgaagagaggctcgaggaatgggaggacgaagaagctgcgatcaaagagtttgcaaggctttttgaggagatagcagggaatgagtttgagccatgggaacgtgagaagaagattcaaaagaagcctcataagtttttcccaattgatatggatgatggaatcgaaagaaggagtggggctcttggtctaaggcaagctggcatagattctgctcattgcaagcttgattcgttg

SEQ ID NO: 147241 - DNA, 350 bp, Arabidopsis thaliana
  unsure (1)..(350): unsure at all n locations
ngaagagccagtttgcgtttgccccaccttgaaacaagctgccagggcagttagcctccagggacagcacggaccattccaatccaggaaaatttaccagtcagctaagtacttgcctaacatttgcaagatccagcaagttggtgaatgtcccttccagaccaccatccctttcttccctccttactactagagtccaagcccggcctagcacgatgatcatgagtgttgctattgatgtatgttaatactatacacagacatcgtgtgtgttttataaaactgtaagcttaggatgtttgaggctaatgtaattagcactacaccgtaataaatgagaggtttacttt

SEQ ID NO: 147242 - DNA, 365 bp, Arabidopsis thaliana
catacacacatagcaaaaaatggcaaacaagttgttcctcgtctgcgcagctctcgctctctgcttcctcctcaccaacgcttccatctaccgcaccgtcgttgagttcgaagaagatgacgccactaaccccataggcccaaaaatgaggaaatgccgcaaggagtttcagaaagaacaacacctaagagcttgccagcaattgatgctccagcaagcaaggcaaggccgtagcgatgagtttgatttcgaagacgacatggagaacccacagggacaacagcaggaacaacagctattccagcagtgctgcaacgagcttcgccaggaagagccagattgtgtttgccccaccttgaaacaag

SEQ ID NO: 147243 - DNA, 509 bp, Arabidopsis thaliana
cttagacttatctctatatacccccttttaatttgtgtgctcttagcctttactctatagttttatatcatatcaatcgacatggcgaatgtggaccgtgatcggcgtgtgcatgtagaccgtactgacaaacgtgttcatcagccaaactacgaagatgatgtcggttttggtggctatggcggttatggtgctggttctgattataagagtcgcggcccctccactaaccaaatcttggcacttatagcaggagttcccattggtggcacactgctaaccctagctggactcactctagccggttcggtgatcggcttgctagtctacatacccctcttcctcctcttcagtccggtgatagtcccggcggctctcactattgggcttgctgtgacgggaatcttggcttctggtttgtttgggttgacgggtctgagctcggtctcgtgggtcctcaactaccttcgggggacgagtgatacagtgccagagcaattggactacgc

SEQ ID NO: 147244 - DNA, 405 bp, Arabidopsis thaliana
ttacaaactcgtggtgcgcgtttgacgcacacgtcatagctgatgcatcgaaaattgacgctcacgtggctcaacagcttcagaaccaacaagacagcagcagaaacatcgttcgtgttaagggacctttccaggtactgaggccacctctaagacagccctactagagccaggagtggagacacccacgtagcccacagggcaacgggcttgatgagactatctgcagcatgaggtcccacgagaacattgacgaccctgctcgtgctgacgtgtacaagcccaacctatggcgcgtgaccagccgtaacagctataccttgcccatcttggagtatgttaggctcactgccactcgtggcgtctccaggtaatgcatggtcttcctaatacacatgacgctac

SEQ ID NO: 147245 - DNA, 516 bp, Arabidopsis thaliana
acatagcaaaaaatggcaaacaagttgttcctcgtctgcgcagctcttgctctctgcttcctcctcaccaacgcttgcatctaccgcaccgtcgttgagttcgaagaagatgacgccactaaccccataggcccaaaaatgaggaaatgccgcaaggagtttcagaaagaacaacacctaagagcttgccagcaattgatgctccagcaagcaaggcaaggccgtagcgatgagtttgatttcgaagacgacatggagaacccacagggacaacagcaggaacaacagctattccagcagtgctgcaacgagcttcgccaggaagagccagattgtgtttgccccaccttgaaacaagctgccaaggccgttagactccagggacagcaccaaccaatgcaagtgaggaaaatttaccagacagccaagcacttgcccaacgtttgcgacatcccgcaagttgatgtttgtgccttcaacataccttcattcccttctttctactaaatctcaaac

SEQ ID NO: 147246 - DNA, 278 bp, Arabidopsis thaliana
aaaaaagaaaatggctaagctcagcaatctcctagctgcaatcttctttgttctactcgtccttaacggatggcttgcgaggcaggcacttggggttcctcctcagatacagaacgagtgtaacctctacaacctaaatgttctccaagccaccgaaactatcaagagtgaagccggtcagatcgagtactgggaccacaaccaccctcagctgcgatgtgctggtgtttccgttgctcgttatataattgaacaaggacgtctttactctgccacct

SEQ ID NO: 147247 - DNA, 398 bp, Arabidopsis thaliana
  unsure (1)..(398): unsure at all n locations
agcgggcgaaacatcgnacgagttaagggacctttccaggtcgtgaggccacctttattacagccctaccagagccaggagtgggggcgcccacgtagcccacagggcaacggtcttgaggagactatctgcagcatgaggtcccacaagaacattgacaaccactgctcgtgctgacgtgtacaagcccagcctaggtcgcgtgaccagccgcaacagctataccttgaccatcttgaagtatgtcaagctcagagccactcgtggcgttctccagggtaatgcgatggtgcttcctaaatacaacatgaacgctaacgagatcttgtactgcactggaggacaaggaaggatccaagtggtgaacgacaactgacagaacgcgttggaccaacagg

SEQ ID NO: 147248 - DNA, 312 bp, Arabidopsis thaliana
tgggggtttccgtggttcgttatgtaattgaacaaggcggtctttacttgcccaccttcttcacttccccaaaaatttcctacgtcgttcaaggaacgggtatcagcggaagagtggtccctggatgtgccgagaccttcatggactcgcagccgatgcaaggacaacaacaaggccaaccatggcaaggacgacagggacaacaaggccaaccatgggaaggacagggacaacagggacaacaaggaagacatggccaaccatgggaaggacagggacaacagggacaacaaggacgacagggacaacaag

SEQ ID NO: 147249 - DNA, 311 bp, Arabidopsis thaliana
gagaaacagagagaagagaaaatctgtgatggctctttccaacgccttctttctctccaccagatctatctacggcggtggtctttctcaccgtccaagcaaccgtcaatcatacttcacatttcatcccgccgtcaacaccaagcctaaatccgtcaacctcgtcacggctgtacacgcggctgagccagctagaaacgctgtttcagtcaaggaatccgatgcgtcttcttcgtctggtgcattgaaacggactccagagagctggaaactgaagaaggctatgaaacttcctgattatcctaacgcca

SEQ ID NO: 147250 - DNA, 518 bp, Arabidopsis thaliana
ggagaccatctgcagcgccaggtgcaccgataacctcgatgacccgtctcgtgctgacgtgtacaagccacaggtcggttacatcagcactctcaacagttacgatctccccatccttcgcttgatccgtctctcagccctccgtggatctatccggcaaaacgcaatggtgcttccacagtggaacgcaaacgcgaacgctattctttacgtgacagacggggaagcccaaatccagatcgtaaacgacaatggtaacagagtgtttgacggacaagtctctcaaggacagctcatagccgtaccacacggtttctcggtggtgaaacgcgcaacaagcaaccgattccagtgggtagagttcaaaacaaacgctaacgcgcatatcaacactctggcgggacgaacctcagtcttgagaggtttaccacttgaagtcataaccaatgggttccaaatctcacccgaagaagcaaggagggtcaagttcaacacgctcgagaccactttgactcaca

SEQ ID NO: 147251 - DNA, 391 bp, Arabidopsis thaliana
gggacaacaaggccaaccatgggaaggacagggacagcagggacaacaagggttccgtgacatgcaccagaaggtggaacatgtgagacgcggagacgtctttgccaacactccaggctctgcccactggatctacaactcaggagaacagccacttgtcatcatcgctcttctcgacatcgccaactaccaaaaccaactcgaccgcaaccctagagtgttccatttggccggaaacaaccagcagggaggctttggcggttcacagcaacaacaagaacagaaaaacttgtggagcgggttcgacgcacaggtcatagctcaagcattgaaaattgacgttcagttggctcagcagcttcagaaccaacaagacagcagaggaaacatc

SEQ ID NO: 147252 - DNA, 345 bp, Arabidopsis thaliana
aacaagggttccgtgacatgcaccagaaggtggaacatgtgagacgcggagacgtctttgccaacactccaggctctgcccactggatctacaactcaggagaacagccacttgtcatcatcgctcttctcgacatcgccaactaccaaaaccaactcgaccgcaaccctagagtgttccatttggccggaaacaaccagcagggaggctttggcggttcacagcaacaacaagaacagaaaaacttgtggagcgggttcgacgcacaagtcatagctcaagcattgaaaattgacgttcagttggctcaacagcttcagaacccacaagacagcagaggaaaca

SEQ ID NO: 147253 - DNA, 464 bp, Arabidopsis thaliana
cccacgcgtccgcacatagcaaaaaatggcaaacaagttgttcctcgtctgcgcagctctcgctctctgggggctcctcaccaacgcttccatctaccgcaccgtcgttgagttcgaagaagatgacgccactaaccccataggcccaaaaatgaggaaatgccgcaaggagtttcagaaagaacaacacctaagagcttgccagcaattgatgctccagcaagcaaggcaaggccgtagcgatgagtttgatttcgaagacgacatggagaacccacagggacaacagcaggaacaacagctattccagcagtgctgcaacgagcttcgccaggaagagccagattgtgtttgccccaccttgaaacaagctgccaaggccgttagactccagggacagcaccaaccaatgcaagtcaggaaaatttaccagacagccaagcacttgcccaacgtttgcgaca

SEQ ID NO: 147254 - DNA, 531 bp, Arabidopsis thaliana
caaaaagaaaatggttaagctcagcaatctcctcgatgcaacctttgttgttctcctcgtccttaacggctgccttgcgaggcaggcacttggggttcctcctcagctacagaacgagtgtaacctcgacaacctagatgttctccaagccaccgaaactatcaagagggaagccggtcagatcgagtactgggaccacaaccaccctcagctccgatgtgttggtgtttccgatgctcgttatgtaattgaacaaggcggcctttacttgcccaccttcttcacttacccaaaaatttcctacgtcgttcaaggaacgggtatcagcggaagagtggaccctggatgtgccgagaccttcatggactcgcagccgatgcaaggacaacaacaaggccaacccatggaaggacgacagggacaacaaggccaaccatgggaaggacagggacaacagggacaacaaggaagacacggccaaccatgggaaggacagggacaacagggacaacatggacgacagggacaaca

SEQ ID NO: 147255 - DNA, 369 bp, Arabidopsis thaliana
  unsure (1)..(369): unsure at all n locations
atccaaaagnnaagggggaaacaacgggnncaaacgctgnnacagaagnagctgcgaacatgggagagaatgtaaaatttaggagaggtttcttgatgtcaaaatcttcaaaanccgtcctttctgcatatcttcacacaagtcctcaaccagggttgggtcgtatagctgggattgtatctctcgaagtagaaggtgaaaatactcaactagaggctattcagcgtgtaggctcagagctggctatgcatgttgtagcagcaaagcctttgtttttgagcaaagaccttgtttcttctgaagcaatggcaaatgaacgcgagattctaaagtctcaggcagaaagtacaggcaagaatcagatggcga

SEQ ID NO: 147256 - DNA, 437 bp, Arabidopsis thaliana
gtgaagaagtcgattcaggcttatgtctctcgtgtgggaggttctactgttgaggttaggttacctttccctgtaaattcgaacgaagagattatctccaagtttagagaaggactagagaaaggtagagcgaatggtagaacggttaggttagctatcattgatcatataacgtcgatgccgtgtgttttgatgccggtacgagaattggttaagatctgcagagaggaaggtgtggagcaggtttttgttgatgcagctcatgccattggtagtgttaaagttgatgtgaaagaaatcggagctgattactatgtgagtaatctgcataaatggttcttttgtccaccgtctatcgcgtttttctattgtaagaaacgtggttctgagtctgatgttcatcaccctgtggtgtctcatgagttttggaaatggtt

SEQ ID NO: 147257 - DNA, 345 bp, Arabidopsis thaliana
aagaggaagaaaaatgggtcgagtctcatctattatctctttctctttgacactcttgatcctcttcaatggctacactgcccaacagtggcccaacgagtgccagctcgatcaactcaatgcgctcgaaccatcccaaatcatcaagagcgagggtggtcgcatcgaggtctgggaccaccatgcaccccagcttcggtgctccggctttgcctttgagcgtttagtcattgagcctcatggacttttattgcccactttgttgaacgccggcgaactcacgtttgttgttcacggaaggggtctaatgggaagagatatttcgggatgcgccgagacaatcat

SEQ ID NO: 147258 - DNA, 528 bp, Arabidopsis thaliana
aagaaaatggttaagctcagcaatctcctcgttgcaaccttcggggttctcctcgtccttaacggctgccttgcgaggcagtcacttggggttcctcctcagctacagaacgagtgtaacctcgacaacctagatgttctccaagccaccgaaactatcaagagtgaagccggtcagatcgagtactgggaccacaaccaccctcagctccgatgtgttggtgtttccgttgctcgttatgtaattgaacaaggcggtctttacttgcccaccttcttcacttccccaaaaatttcctacgtcgttcaaggaacgggtatcagcggaagagtggtccctggatgtgccgagaccttcatggactcgcagccgatgcaaggacaacaacaaggccaaccatggcaaggacgacagggacaacaaggccaaccatgggaaggacagggacaacagggacaacaaggaagacaaggccaaccatgggaaggacagggacaacagggacaacaaggacgacagggacaacaa

SEQ ID NO: 147259 - DNA, 403 bp, Arabidopsis thaliana
gtagaagtcttagctctgctgatgaacaagtctcgcagctgctacattcatcactgtatttgaaagatctgcatgcgaggatttcgtttacagatgaaggtcctcctgggaaagtgaagtactctgtgacgtgttattatgctaaggagtttgaagccctgaggatgatttgctgtccttcagaaacagatttcattagatctcttggtcgttgtagaaaatggggagcccagggtggaaagagcaacgtcttctttgcaaaaagtttggatgaccgttttatcatcaagcaagttacaaagacagagcttgagtccttcatcaaatttgggccagcttacttcaaatacctgactgagtccatcagtactaaaagccctacaagccttgcaaagatcttggg

SEQ ID NO: 147260 - DNA, 434 bp, Arabidopsis thaliana
ccgaaacattccaagactcatcagagttccaaccacgcttcgaaggtcaaggtcaaagccagaggttccgtgacatgcaccagaaagtggagcacattaggagcggtgataccattgccacaacacccggtgtagcccagtggttctacaacgacggacagcaaccacttgtcatcgtcagcatcttcgatctagccagtcaccagaaccagcttgaccgcaacccaaggccattttacttagccggaaacaacccacaaggtcaagtatggctacaaggacgagagcaacagccacagaagaacatcttcaatggatttggacccgaggttattgctcaagctttgaagattgatcttcagacagcgcagcaacttcagaaccaagatgacaaccgtggaaacattgtccgagttcaaagccccgttcggtgt

SEQ ID NO: 147261 - DNA, 395 bp, Arabidopsis thaliana
ggacaacagggacaacaaggaagacaaggccaaccatgttatggacagggacaacagggacaacagggacgacagggacaacaaggccaaccatgggaaggacagggacagcagggacaacaagggttccgtgacatgcaccagaaggtggaacatgtgagacgcggagacgtctttgccaacactccaggctctgcccactggatctacaactcaggagaacagccacttgtcatcatcgctcttctcgacatcgccaactaccaaaaccaactcgaccgcaaccctagagtgttccatttggccggaaacaaccagcaaggaggctttggcggttcacagcaacaacaagaacagaaaaacttgtggagcgggttcgacgcacaggtcatagc

SEQ ID NO: 147262 - DNA, 467 bp, Arabidopsis thaliana
ggaaatgcgatttgaagcacccccctggggatgaaatctatcgaagctctactttgtcaatgtttgaggtggatggcaagaagaataaggtctatgcacagaacctctgttatctggcaaagttatttcttgaccacaaaactctttactatgacgttgatttgttcctgttctatattctctgagaatgtgatgatccgggatgccacatggttggatacttttcaaaggaaaaacactcagatgaagcttacaacttggcttgcatccttacacttgctccatattaaaagaagggctatggcaaattcttaatagccttctcctatgaactcttaaagaaagagggcaaagtcggtacaccggaaaggcccgtctctgatctaaggttaggggggtacaaaggttactgggctcgggttttatttgacattttgaaaaagcaccagggaaacatatctattaag

SEQ ID NO: 147263 - DNA, 384 bp, Arabidopsis thaliana
ttcgagttaagggacctttccaggtcgtgaggccacctataagacagtcctacgagagcgaggagtggggacacgcacgtagcccacagggcaacggccttgaggagactatctgcagcatgaggtcccacgagaacattgacgaccctgctcgtgctgacgtgtacaagcccagcctaggtcgcgtgaccagcgtcaacagctataccttgcccatcttggagtatgtcaggctcagtgccactcgtggcgttctccagggtaatgcgatggtgcttcctaaatacaacatgaacgctaacgagatcttgtactgcactggaggacaaggaaagatccaagtggtcaacgacaacggacagaacgtgttggaccaacaagtgc

SEQ ID NO: 147264 - DNA, 423 bp, Arabidopsis thaliana
gaaaaacttgtggagcgggttcgacgcacaggtcatagctcatgcattgaaaattgacgttcagttggctgagcggcttcagaaccaacaagacagcagaggaaacatcgttcgtgttaagggacctttccaggtcgagaggccacctctaagacagccctacgagagcgaggagtggagacacccacgtagcccacagggcaacggccttgaggagactatctgcagcatgaggtcccacgagaacattgacgaccctgctcgtgctgacgtgtacaagcccagcctaggtcgcgtgaccagcgtcaacagctataccttgcccatcttggaatatgtcaagctcagtgccactcgtggcgttctccaaggtaatgcgatggtgcttcctaaatacaacatgaacgcttacgagatcttgta

SEQ ID NO: 147265 - DNA, 428 bp, Arabidopsis thaliana
ccggaaaaacttgtggagcgggttcgacgcacaggtcatagctcaagcattgaaaattgacgttcagttggctcagcagctgcagaaccaacaagacagcagaggaaacatcgttcgtgttaagggacctttccaggtcgtgaggccacctctaagacagccctacgagagcgaggagtggagacacccacgtagcccacagggcaacggccttgaggagactatctgcagcatgaggtcccacgagaacattgacgaccctgctcgtgctgacgtgtacaagcccagcctaggtcgcgtgaccagcgtcaacagctataccttgcccatcttggagtatgtcaggctcagtgccactcgtggcgttctccagggtaatgcgatggtgcttcctaaatacaacatgaacgctaacgagatcttgtact

SEQ ID NO: 147266 - DNA, 369 bp, Arabidopsis thaliana
tcaccacattattttcactgagcgcataacatttttgagacaagagactctctctctctctcttctctctttctctccccctctctccggcgatggttgttgctatggaccaacgcaccaatgtgaacggagatcccggcgccggagaccggaagaaagaagaaaggtttgatccgagtgcacaaccaccgttcaagatcggagatataagggcggcgattcctaagcactggtgggttaagagtcctttgagatcaatgagttacgtcgtcagagacattatcgccgtcgcggctttggccatcgctgccgtgtatgttgatagctggttcctttggcctctttattgggccgcccaaggaacacttt

SEQ ID NO: 147267 - DNA, 481 bp, Arabidopsis thaliana
tccgggcgaccacgcgtccgacaatgctaaattcttcatatctatccttcgcacttatctttttctgctgcattttgttctccgctctcgcttcgtctttgcccgtttccgaccctgagcttgttgtcgaggaagtacacaggtatatattctaacaaaaatgttaaaacattttacatacactactcaaatgtttggtattaaatattgtttccaagttctttctattcaaggctaattttgatcttgatcacaaactcacttgttactattgctgcattaatagctatgacttatgagtacgcctaattacgtacgtcaagaatatataattaatgctaatatattggctggtggttaatgctttaggaaaataaacgagtctatatcaagaaggaagctaggtttcttctcgtgcgggagtggtaatccaatcgatgattgttggcgatgcgacaaggattgggagaaaaaccgaaaa

SEQ ID NO: 147268 - DNA, 436 bp, Arabidopsis thaliana
  unsure (1)..(436): unsure at all n locations
ccattcactcactatcttgctcctagaaaaagatggcgagaatgtgtgtgatgatgatgatgattatggttgctatgaccatgattaacattgctaagagtgatcccattgcaccatgttacttcatatttggtgactctttggttgataatggcaacaataatcagcttcagtcattagctagagctaattactttccttacggtattgactttgctgccggtccaaccggtcggtttagcaacggcttaaccactgtcgatgttatcgctcagcttttgggtttcgaggactacattacaccttacgcttctgcaagaggacaagacattctccgaggagttaactatgcttncgctgctgccggaatccgagacgaaaccggcagacaattgggaggtcgaatagcatttgcagggcaagtagcaaatcacgt

SEQ ID NO: 147269 - DNA, 504 bp, Arabidopsis thaliana
  unsure (1)..(504): unsure at all n locations
ctcataagagaataaaaggatttttgattgagtaagttcaacaaagtctttttagactatctttctttattttttccttatataaaaaatatattaaaaactcaatcaaaattaaattatccacaagaacaccaatttttgttatgcttaatatatttaatttgatctgtattttttttaattctacccttttttcaagcacttttttagtcgccaaattgccagaggcctacgcctttttgaatccaatcgtagatgttatgcccgtaatacctcttttctttcttctcttagcctttgnttggcaagccgcttgaagttttcgataaaattcttaatactgtcttaaacaaattcacgattnttgatttttcaacaattcaaaagatccaaaaaatcttgacgtatgaacgaactctcaattcaaacattttaattttttggtagccatactaaatctggatcatttctatttcctaaattgtatcctcttttccctaaatg

SEQ ID NO: 147270 - DNA, 415 bp, Arabidopsis thaliana
taatattgcgcggagcttccgagacagatggatacctaagcattttagaaaaccttggcgcatcaacagggaggagagatcggagtctatgaggtcacctataaacagaaggttcagagcatcacaagaacctcgatatgatcatcagtccccaagacctgcagaaccagctgcgtctgtcacatcatcaaaggctgcaactcctgaaacagcatctgtatctgagggatattcagaacctaattccggtcttcctgagacaaatggacgcaagcgcaaaagcagatgggaccagccgtctaagacaaaagaacaaagaatcatgactatcttgtcccaacaaacagatgaaactaatggaaatcaggatgtccaagatgaccttccacccgggttttcatcaccctgcacagat

SEQ ID NO: 147271 - DNA, 315 bp, Arabidopsis thaliana
cgcgtccgcaaaaagaaaatggttaagctcagcaatctcctcgttgcaaccttcggggttctcctcgtccttaacgggtggcttgcgaggcagtcacttggggttcctcctcagctacagaacgagtgtaacctcgacaacctagatgttctccaagccaccgaaactatcaagagtgaagccggtcagatcgagtactgggaccacaaccaccctcagctccgatgtgttggtgtttccgatgctcgttatgtaattgaacaaggcggtctttacttgcccaccttcttcactttcccaaaaatttcctacgtc

SEQ ID NO: 147272 - DNA, 392 bp, Arabidopsis thaliana
cggtatcttagttcctcccacgtgtccggaactccaaaaccactatgttattttttttgtattttttgccgtctcgtaatgttttgattatataatatttgtttcggattcaaattagaaaatcactcttttagttatctaaactttgggtggtttaccatttcaacatgacagatatacgtaacaggtgtgcacactatacacaaccaaagcgttagataaagagtatagtaccacgatttatatttacgataatatatacttttgtacattaatttagacaaattgcaatgattataattgtatatataattcaaacatctaaacagacttaatcgcttgctgaatgctgatcgcgaacgcttacatatcatatgagtcatatcccaaac

SEQ ID NO: 147273 - DNA, 424 bp, Arabidopsis thaliana
  unsure (1)..(424): unsure at all n locations
cacaagctaatgcaaaaaatcaaaagatgaatgccacaaagatcgttgtgtttctcgtgatcggcgtgccgtnngccggggtcactttaaggcaggccaaagattactccacggagaccaaattaggggcctatattacaaaaactactaccaaaggcattggagctcaactttctgcaactggcacaacttacagcaccagcagagccgttagctatgctaatggttttaacaattccaaaggtccaggggccaattcattcgaaagtgccaacacatttaccagcggacaactcactgccaagggtcgcaaggcaagagtttcttctgcaagtgcttatgccgctgaaagcgatgctgcagctgcactgactcgcaaagctgctgctgcacgtgcaaagggtaaggtagcttacgcatcaag

SEQ ID NO: 147274 - DNA, 350 bp, Arabidopsis thaliana
cggacgcgtgggcagagatttcgaaaccctagtcgatttcgagatccaaccaactctgctccttatctgagcttgttgaatttgcgaagtatgggagacgctagagacaacgaagcctacgaggaggagctcttggactatgaagaagaagacgagaaggtcccagattctggaaacaaagttaacggtgaagccgtgaaaaaagggtacgtgggaatacacagttctggattcagagacttacttttaaaaccggagcttctcagagctattgttgactctggatttgaacatccatctgaagtgcaacatgaatgtatccctcaagctatcttgggcattgatgtcat

SEQ ID NO: 147275 - DNA, 408 bp, Arabidopsis thaliana
ggaacaatcgttacgaatcttactttcaaattaaggtggtgtctctctctctgtgtcttgttcttcttcgtggtgtgcttctctcgtctcgccaacaagaatgtgtttcaagatcctagtacgaccttgttaatttctcttataaagggcatgtaaagactaaaaagaggcatatgtcctacactaagtaggactctctttttttttcctacaaaagtaaatttgcattatttttactttttagccttccaaatagtgcaattctttcctaatctttgattttttttttattgataaaaactaaaacaacctaacaaaattgaaatgagaattaatgtgccaattcagcttataaagactaacataaaaacctaacctagcttcaatttattgaaaaattaaaaggtt

SEQ ID NO: 147276 - DNA, 379 bp, Arabidopsis thaliana
aacaaacaaaaagaaaatggttaagctcagcaatctcctcgttgtttctcttcggggttctcctcgtccttaacggctgccttgcgaggcagtcacttggggttcctcctcagctacagaacgagtgtaacctcgacaacctagatgttctccaagccaccgaaactatcaagagtgaagccggtcagatcgagtactgggaccacaaccaccctcagctacgatgtgttggtgtttccgatgctcgctatgtaattgaacaaggcggtctttacttgcccaccttcttcacttgcccaaaaatttcctacggcgttcaagggacgggtatcaacggaagagtggtccctggatgtgccgagaccttcatggactcgca

SEQ ID NO: 147277 - DNA, 477 bp, Arabidopsis thaliana
agggttccgtgacatgcaccagaaagtagagcacctacggggcggtgacaccattgcaacaccatctggtgtagctcaatggttctacaacaatggaaatgagcctctcattcttgttgcagccgcggatctcgccagcaaccagaaccagcttgaccgcaaccttagaccatttttgatagccggaaacaacccacaagggcaggaatggctacaaggccgaaagcaacagaagcaaaacaacatcttcaatggcttcgcacctgagatcttggctcaagccttcaagatcaatgtcgagacggctcagcagctccagaaccagcaagataaccgtggcaacatcgtcaaggtcaacggacctttcgggtcattaggccacccttgagacgcggcgaatgcggccaacaaccacatgaaatagctaatggtttagaggagactttgtgcaccatgcgatgcactgaaaacctcgat

SEQ ID NO: 147278 - DNA, 529 bp, Arabidopsis thaliana
catgcaccaaactgaacagcacctacggtgcattgtctccattgcaacaccatctgaactggcggagtggtagtacaacactggaaatgagcctctaattacagaaccagccgaacatctcgacagcaaccagaaccagctcgaccgcaaccttagaccatgattgatagccgaaaacaacccacaacgccaggaatggctacatggcctaaagcaacagaagcaaaacaacatcttcaatggctacacacctgagatcttggctcaagccttcaagatcaatgtcgagacggctcagcagctccagaaccagcaagataaccgtggcaacatcgtcaaggtcaacggacctttcggcgtcattaggccacccttgagacgcggcgaaggcggccaacaaccacatgaaatagctaatggtttagaggagactttgtgcaccatgcgatgcactgaaaacctcgatgacccgtacgatgctgacgtgtacaagccatcactcggatacattagcacacttaacagctac

SEQ ID NO: 147279 - DNA, 355 bp, Arabidopsis thaliana
atcaatatgttcgtagtgatataattgtcattaacttttttttcttttaactgagaaaatatatctcaaaacattgctcatttatattttatctagacatttaatatccaaaattctttggttggaaaaaaaattatacagttaaattgtgcaatttaattccaaacaaaatacaaaaaaattgttacttttgtactcacaatctcataacaaaaataaattcaaatttactcaaatcatctcaatttataattatttctaaataattgttattaatatttcgtttttattaccaattgttttaagaaatttaaataaaaattaaaagaataacaattttcattttcaatccact

SEQ ID NO: 147280 - DNA, 434 bp, Arabidopsis thaliana
gtgaacgacaacggagaaagagtgttcgaccaagagatctccagcggacagttactagtcgtgccacaaggctttgcggtcatgaaacatgccataggcgaacagttcgagtggatcgaattcaagacaaacgaaaacgcacaggtcaacacactcgcgggccgtacctcagtcatgagaggtttgccgcttgaggttataaccaatgggtaccagatctctcccgaagaagctaaacgagtaaagtttagcacgattgagaccacactgacccatagcagtccaatgagctacggaaggcctaaggcttgaggcttgatgagcgcgtggtggaatagcgtttgaatctaaaggtcggtttggtacgacttgtaatatgaaataataatgtacaaagaagttctacgcttaaaggaacttgtttgttttgagct

SEQ ID NO: 147281 - DNA, 471 bp, Arabidopsis thaliana
ggacggattgggaaacgactcacgcgtccgatcacaaacgagtaagaatacaaatacaaatagcaaaaaaaatggcatacaagctcttcctcgtctgcgcaactggcgccctctgcttcctcctcaccaacgcttccatctaccgcactgttgtcgagttcgacgaagatgacgccagcaaccccatgggcccaagacagaaatgtcagaaggagtttcagcaatcacagcacctaagagcttgccagaaattgatgcgcatgcaaatgaggcaaggccgtggtggtggtccctccctcgacgatgagttcgatttggaagacgacatcgagaacccacaaggcccccagcagggacaccagatcctccagcagtgctgcagcgagcttcgccaggaagagccagtttgtgtttgccccaccttgagacaagctgccagggccgttagcctccaaggacaacacggaccat

SEQ ID NO: 147282 - DNA, 384 bp, Arabidopsis thaliana
cagcagaggaaacatcgttcgtgttaagggacctttccaggtcgtgaggccacctctaagacagccctacgagagcgaggagtggagacacccacgtagcccacagggcaacggccttgaggagactatctgcagcatgaggtcccacgagaacattgacgaccctgctcgtgctgacgtgtacaagcccagcctaggtcgcgtgaccagcgtcaacagctataccttgcccatcttggagtatgtcaggctcagtgccactcgtggcgttctccaaggtaatgcgatggtgcttcctaaatacaacatgaacgctaacgagatcttgtactgcactggaagacaaggaaggatccaagtggtcaacgacaacggacagaacgt

SEQ ID NO: 147283 - DNA, 526 bp, Arabidopsis thaliana
gggatttgccattggctctgctgccctagtctccttggctctctttgttgtctttgttagccgtgcagggatccacagggtagatgttttgacccctaaagttatcattgggctccttgttggtgccatgcttccttactggttctctgccatgacaatgaagagtgtgggaagtgcagctcttaagatggttgaagaagttcgcaggcagttcaacaccatccctggacttatggaaggaaccgcaaaaccagactacgccacatgtgtcaagatctccaccgatgcttccatcaaggaaatgatacctcctgggtgccttgtcatgctcacacctctcattgttggtttcttctttggagttgagaccctctctggtgtcctcgccggctctcttgtatccggtgttcagatcgccatatcaacatctaacactggtggtgcctgggacaacgcctagaaatacatcgaggctggtgtatcagagcacgcaaagagccttggaccataaggttcagagccacac

SEQ ID NO: 147284 - DNA, 422 bp, Arabidopsis thaliana
catcacgagttccaaccacgcttcgaaggtcaaggtcaaagtttgttgttccgtgacatgcaccagaaagtggagcacattaggagcggtgataccattgccacaacacccggtgtagcacagtggttctacaacgacggacaggaaccacttgtcatcgtcagcgtcttcgatctagccagtcaccagaaccagcttgaccgcaacccaaggccattttacttagccggaaacaacccacaaggtcaagtatggctacaaggccgagagcaacagccacagaagaacattttcaatggatttggacccgaggttattgctcaagctttgaagatcgatcttcagacagcgcagcaacttcagaaccaagatgacaaccgtggaaacattgtccgagtccaaaggcccgatcggtgtcatta

SEQ ID NO: 147285 - DNA, 367 bp, Arabidopsis thaliana
caaaaagaaaatggttaagctcagcaatctcctcgttgcaaccttcggggttctactcgtacttaacggctgccttgcgaggcagtcacttggggttcctcctcagctacagaacgagtgtaacctcgacaacctagatgttctccaagccaccgaaactatcaagagtgaagccggtcagatcgagtactgggaccacaaccaccctcagctccgatgtgttggtgtttccgttgctcgttatgtaattgaacaaggcggtctttacttgcccaccttcttcacttccccaaaaatttcctacgtcgttcaaggaacgggtatcagcggaagagtggtccctggatgtgccgagaccttcatggac

SEQ ID NO: 147286 - DNA, 347 bp, Arabidopsis thaliana
gtgctcttagcctttactctatagttttatatcatatcaatcgacatggcgaatgtggaccgtgatcggcgtgtgcatgtagaccgtactgacaaacgtgttcatcagccaaactacgaagatgatgtcggttttggtggctatggcggttatggtgctggttctgattataagagtcgcggcccctccactaaccaaatcttggcacttatagcaggagttcccattggtggcacactgctaaccctagctggactcactctagccggttcggtgatcggcttgctagtctccatacccctcttcctcctcttcagtgcggtgatagtaccggcggctctcactat

SEQ ID NO: 147287 - DNA, 540 bp, Arabidopsis thaliana
ctttagacacacaatccaccaacataaataggcagtgatataagttaatatcatagaaaacaatcagaaaataattcagaagagaaaacacaacaaaaaaaagaaagaaaaagaaagaaagaagaagagatgagtgagcttctctactctctccccacttgggatatccataaccttggatcactcttcaagcccgattttaatcttggtaatatatacattaatatatagacacaaacatattttgtgttttttcaatcgtaaaatattgatacatatacgcatatgtaatatatgaatcgacgcgcatgtatttatttacaagttattcaagaactttcttattaaagtgtaatatgtttgcagatacatgtggtttcatgaatagatcgccggaacatattttcggatcaccggagattgattacctccacgtctccacaggttaccctcgaagacgcacttatcgagtccggtgagagaagcaaaaggagacgtctcttggttcgaggatccgtccaaatcttttaacgatgatga

SEQ ID NO: 147288 - DNA, 399 bp, Arabidopsis thaliana
  unsure (1)..(399): unsure at all n locations
cttttcagattttttgtacacttccttcatcccccacccatctctctctctctctcatccttcctctttcttctgtgcttgcccttttctttttattttattcttccaaaatcaaatagttccttctttgatctcattgggataactaaaagtttcaagaagagaaacatatcattgaagagagaacccacacaaaaaaaaatgtctgtagatttctcatctgagcgtgtttgctatgtccactgcagcttctgcaccacgattntagcggtaagtgtaccatacgcaagtttgttcacacttgtgacggtgagatgtggccattgtaccaatttgctatccctcaacattggagtttcacttcatcaaacctcagctcctcccattcaccaagatctt

SEQ ID NO: 147289 - DNA, 412 bp, Arabidopsis thaliana
taaagaggaagaaaaatgggtcgagtctcatctattatctctttctttttgacactctggatcctcttcaatggctacactgcccaacagtggcccaacgagtgccagctcgatcaactcaatgcgctcgaaccatcccaaatcatcaagagcgagggtggtcgcatcgaggtctgggaccaccatgcaccccagctccgttgctccggctttgcctttgagcgtttcgtcattgagcctcaaggtcttttcttgcccactttcttgaacgccggcaaactcacgtttgttgttcacggaaggggtctaatgggaagagttattccgggatgcgccgagacgttcatggagtcaccggtatttggagaaggtcaaggtcagggtcagagtcaaggggtccgtgacatgcacc

SEQ ID NO: 147290 - DNA, 464 bp, Arabidopsis thaliana
cggacgcgtgggcggacgcgtgggcggacgcgtgggttcgaacgtgtggatcgctggaaaaattaaactttagggtcgctagattacgattgcttcgctttttagtagtagtaggctacaatcgattggcaaacatctctatatcggccataactccgtcaagctctgcagaggctgcttcatcagtattgagagacttcctggtgattgattctcatgtctatgtctgagtttggcattgtctacgccatccatatcatcaccgtccaattcggctccgtcgtctcgaaagtttgtgaatgtcttctacgtaaaggacctctttcctcacgagacatctctcgtttagctgaatcagatatcaaccataacaaagttaaagatattctctatctcttgattcagcacaaatgtgttcaagctttctccattgaacctcctgatggttctgagagcaaagctat

SEQ ID NO: 147291 - DNA, 394 bp, Arabidopsis thaliana
  unsure (1)..(394): unsure at all n locations
cggacgcgtgggtttttcctcgcttaatttctcaataacgctctcagagagaccatttgatgaagcttctcgcttctggaatttgaaaaggaacttgttatggagataatctcactgaacgttgtgccccagtgctctgtggttacttggagtagtaaattagcaacgaaaagattggtcccaaatcggtcaagtttgttattctcaggggtcaaaaaatccagacttgtgattcgaagtggaaattccgatggttatgtntgtggtgagaatgatgactngngtcgtatagccagaagaggagaatcaacgtcaaaggttttgattcctggttngcctgatgaatcaaatggtgaaattgctgctcgaatcagtcattctcactgcgagtgga

SEQ ID NO: 147292 - DNA, 512 bp, Arabidopsis thaliana
  unsure (1)..(512): unsure at all n locations
cgatcggattggatcatataagattttagggatttggaaaaaatcttgagctatggaggcgaatgcggcggtggacggaacggggaatccgatccctacgtcggcggttttaacagcttcggcgaagcatataggaatcaggtgtatgccggaaaacatggcgttcctgaaatgtaagaagaatgatcctaacccagagaaatgcctcgagaagggacgtgacgtcactcgctgtgttcttggcctgctgaaggatcttcaccagagatgcccaaaggagatggatgcttacgttggatgcatgtattactacaccaacgagtttgagttgtgtcggaaagagcaagaagcttttgagaaagtgtgtccgttgaaatgagaaagtcaagtttttatctgtctcctaataagcaaatgttcattttgactctggggcgttactctaatcactcttncatcgctgcctgcttcttttccttttctggtaatggaagacctttaaaccatgtaat

SEQ ID NO: 147293 - DNA, 334 bp, Arabidopsis thaliana
agtactttgatggcattgggacacttgtgcagcatccactgtttccttaaaatagggaaacaagaagagcttgttgtcctagatattgagttgcctattcccagtttcttcctcattaactttattggtagcagagcctcattcatctcgtgaacttgcgaagcttcctatgtgattcttttggcgattggttagaaatatgggttcttctcagtgttctggtgccaacaaaaaccagactgggaagccgtttcagaaacatctatctttatccatcagccctccaaaatctgtcttgggtgataaccttgagcttgaattctctgatgtattt

SEQ ID NO: 147294 - DNA, 527 bp, Arabidopsis thaliana
aaaacaagaaaacatacacaaatagcaaaacatggctaacaagctcttcctcgtctgcgcaactctcgccctctgcttcctcctcaccaacgcttccatctaccgcaccgttgtcgaattcgaagaagatgacgccagcaaccccgtaggtccaagacagagatgccagaaggagtttcagcaatcacaacacctaagagcttgccagagatggatgagcaagcaaatgaggcaaggacgtggtggtggtccttccctcgacgatgagttcgatttcgagggcccccagcagggataccagctactccagcagtgctgcaacgagcttcgccaggaagagccagtttgcgtttgccccaccttgaaacaagctgccagggcagttagcctccaaggacagcacggaccattccaatccaggaaaatttaccagtcagctaagtacttgcctaacatttgcaagatccagcaagttggtgaatgtcccttccagaccaccatccctttcttccctccttactactaga

SEQ ID NO: 147295 - DNA, 407 bp, Arabidopsis thaliana
caaatcttaaacgttttactttgtgctgcactactcaacctcaatggccgcctcaacaatggctctctcctcccctgccttcgccggtaaggccgtcaagctttcccccgcggcatctgaagtccttggaagcggccgtgtgacaatgaggaagactgttgccaagccaaagggcccatcaggcagcccatggtacggatctgaccgtgtcaagtacttgggtccattctctggcgaatcaccgagctaccttaccggagagttccccggagactacggatgggacaccgccggactttcagctgaccccgagacattcgcaaggaaccgtgagctagaagttatccacagcaggtgggctatgctcggagccctaagctgcggtctccctgagcttttggctaggg

SEQ ID NO: 147296 - DNA, 302 bp, Arabidopsis thaliana
acacacccactcatggcgtctcgaagagttttatcatctcttctccgttcatcttccggtagatctgccgccggattagtcaaccgaaaccgcaggcttgcttctccttcacccgcgcgtcacgccggtccatgtagctacctcctcggccgcgtcgccgagtatgcgacctgttcaccggcaagctctgctgcgccataacttgctcctgctaaggatgaggggaaaaagacctatgattacggtggcaaaggtgcgatcgggcgtggttgtcaagtcatcggtgccattgtcgatgtgag

SEQ ID NO: 147297 - DNA, 514 bp, Arabidopsis thaliana
aacaaaaagaaaatggttaagctcagcaatctcctcgttgcaaccttcggggttctcctcgtccttaacggctgccttgcgaggcagtcacttggggttcctcctcagctacagaacgagtgtaacctcgacaacctagatgttctccaagccaccgaaactatcaagagtgaagccggtcagatcgagtactgggaccacaaccaccctcagctccgatgtgttggtgtttccgttgctcgttatgtaattgaacaaggcggtctttacttgcccaccttcttcacttccccaaaaatttcctacgtcgttcaaggaacgggtatcagcggaagagtggtccctggatgtgccgagaccttcatggactcgcagccgatgcaaggacaacaacaaggccaaccatggcaaggacgacagggacaacatggccaaccatgggaaggacagggacaacagggacaacaaggaagacaaggccaaccatgggatggacagggacaacagggacaac

SEQ ID NO: 147298 - DNA, 448 bp, Arabidopsis thaliana
  unsure (1)..(448): unsure at all n locations
aaaaacttctctctgaatctcagtgagttctcataaaatgagagggatggtgagttttgccgtttgggctctgtttgctgctttactctcacagcagctctttgcttctgttgcttccgtaaggtttgaggatgccaaaacatactacttatctcctacctctggctcacatggaactcctccatcacacacgcctccttcttctaactgtggaagtccaccttacgacccttctccttcaactccttctcacccttcacctccatcacatactccaactccttccactccatcacacactccaactccacacactccatcacacacgccaactgcacacacccttgcttgtaactgtggaagtccaccttcccacccttncacgccttcacacccttncactccttcgcacccaacgccatcacaccctgctttctgtggatattac

SEQ ID NO: 147299 - DNA, 430 bp, Arabidopsis thaliana
aacaaaaagaaaatggttaagctcagcaatctcctcgttgcaaccttcggggttctcctcgtccttaacggctgccttgcgaggcagtcacttggggttcctcctcagctacagaacgagtgtaacctcgacaacctagatgttctccaagccaccgaaactatcaagagtgaagccggtcagatcgagtactgggaccacaaccaccctcagctccgatgtgttggtgtttccgttgctcgttatgtaattgaacaaggcggtctttacttgcccaccttcttcacttccccaaaaatttcctacgtcgttcaaggaacgggtatcagcggaagagtggtccctggatgtgccgagaccttcatggactcgcagccgatgcaaggacaacaacaaggccaaccatggcaaggacgacagggacaacaag

SEQ ID NO: 147300 - DNA, 379 bp, Arabidopsis thaliana
cgagaacaatggctacctgtatgctctcttccgctactatggatgcttctccggctcaggccactatggtcgctgcttggaacggacttaagtcctccgctgccttcccagccacccgcaaggctaacaacgacattacttacatcacaagcaacggcggaagagttaactgcatgcaggtgtggcctgcgattggaaagaagaagtttgagactctctcttaccttgctgaccttaccgattccgaattggctaaggaagttgactaccttatccgcaacaagtggattccttgtgttgaattcgagttggagcacggatttgtgtaccgtgagcacggtaactcacccggatactatgatggacggtactggacaat

SEQ ID NO: 147301 - DNA, 515 bp, Arabidopsis thaliana
gccgactcagattaaattggaaagtcgttttagtcagtacgttgtaacaaattcaccgacttggttccagcattaaaaaaaaataatcacccatcccttaattcatattgcatctttattaattagtagtaatatagtaatcttaatttatttctttgatctgttcgtattattgaccgacgaactatacatgtacggtgttaccaatattttatattgaatttttttggttgaatgtagaatttttattggttaaatgttgattattgtgtacatattatatatgtgacatctcatgtataaacaaacaataatataaaggaatttttttcgtctgactacatataattgtgatttaaatacagtggtcatatatcaaaaattaaatcgttaataaaatagatttttttttaaaacataactttttaatcacaatttttttttaatcactaattacaacgccgtgaaaattggtgatttgtcgtaaaatggttgaaggtccaaaactcaaatgt

SEQ ID NO: 147302 - DNA, 478 bp, Arabidopsis thaliana
gtggtggacaaggaaaacacaagatcatctagtggtcttcgagacgcgggttgtcctgcatgtgaaatggcggttgtgtggatacagagccaattgaggcagaacatgactcaagagaggatagtgaactacattaatgagatatgcgagcgcatgcctagtccaaatggagagtctgctgttgactgctcacaactttctaaaatgcctactgtttcattcaccattggaggcaaagtctttgatcttgctcccgaagagtacgtactgaagattggggaaggaccagtggcacaatgtattagcggctttaccgcacttgatatccctccacctcgtggacctctctggatacttggagatgtgtttatgggaaaataccacactgtctttgacttcggaaacgagcaagttggcttcgcagaagccgtgtgaaaaatgtaacatcgatcttttgttgatatgtttttggtgtgag

SEQ ID NO: 147303 - DNA, 539 bp, Arabidopsis thaliana
cttgtgcaactctctctgcttcgatccaaaagggacgatggaagacgctcgccgccggattctccgttactcctcttcccgccgttaacttcagtctccggcgatcgattcctcggattcttgcttccgctagttcctcctcctctccatcgtcttcgtctctcgaagctggtgagaacaatgagctaaatgctgtttcagcttttagtgagattgttcctgatactgtcgttttcgatgactttgagaggtttccgccgactgcagctactgttagctctgctcttcttctgggtatctgtggtctacctgataccattttccgcaatgctgtggacatggctttggcggattcttcttgtgcagggcttgaaaccactgaatctcgactctcttgctttttcaataaggctattgtcaacgtaggtggcgatcttgtcaaactcgttccaggtcgagtttctactgaagtggatgcacgtcttgcttatgacacaaacggcattatccgcaaggtgcatgatctgctgagactatac

SEQ ID NO: 147304 - DNA, 518 bp, Arabidopsis thaliana
  unsure (1)..(518): unsure at all n locations
gtgacaagtatcatttcagggacgtttttttcgtggctgacaaaggggagcggtcgtaagagtgatcagatacgataggaagacgaaagaagccaaagttatcatggacaatctcgtttgtaacaacggtttggctctaaacaaagaccggtcttttctaattacatgcgagtccggcacaagtcttgtccaccgatactggattaaaggtcccaaagccgggactcgtgatatctttgcgaaggtcccaggttaccctgacaacatccggctgacatcagctggagactnttggattggtttacactgcaagaaaaatctgatagggagattgattgtgaattacaaatggctcgtgaaattggtagaaaagacaatgaaactggagtacgtgattgcttttattaacggatttaaaccgaacggagtcgccgtgaaaatctccggcgagacgggagaggtacttgagttacttgggacaaagaaggaaagacaatgaagatgtaagcgaggcttat

SEQ ID NO: 147305 - DNA, 204 bp, Arabidopsis thaliana
gatccgggcaccacgcgtccgggacgcggggcgggttatcggttttggtgtgaaaacaaaatggcgtcgagcgatgagcgtccaggagcgtattcggcacgtgacggatcagagaacttacctccgggagatccaaagacgatgaagacggtggtgatggataatggagcggcgatgatgcaatcgttgaaaccgatcaaacag

SEQ ID NO: 147306 - DNA, 456 bp, Arabidopsis thaliana
cgaaccaagcgaccgaagctcttcctcgcctgcgcaactttcgccctctgcttcctcctcattaactcttacatctaccgcactgatgtcgaggtgcgcgaagatgacgccagcaaccccatgggcccaagacagaaatgtcagaaggagtttcagcaatcacagcacctaagagcttgccagaaattgatgcgcatgcaaatgaggcaaggacgttgtggtggtccctccctcgacgaatagtgcgatctggaagactacatttagaacccacaacgtccccagcatagacaccagattctacagcagtgctttagccagcttttacaggaaaagccagttttgtgttgccccaccttgagacaagcttccaggtgcctttgttctctaggacaactcgggccatttcaatgcactaaaatttacaacgacacttaggacttggctgaaatttgc

SEQ ID NO: 147307 - DNA, 433 bp, Arabidopsis thaliana
  unsure (1)..(433): unsure at all n locations
ccggaanggatggccgacccgaccgacgcgttcggagatagaatgaatctcttaattgttgagagggttgcccatttgttgtatatatagcatacccagtaaaactgcgagttacccagatataaagatggcgactacgggttgctgtttccattattatagaattgaaagaccacaccggatctatgctaagatcatttatttacaacggaatggtatacaaagtcaacagatcgtaatgaatacaaaataagatttatggctacacaaactgttgaagatagttctagatctggtccaagaagcactactgtagggaagttattggaaccattgaattccgaatatggtaaagtaacttccggatggggaacgacccctttgatgggtgttgcaatggctctatttgccggatttctatctattattttgg

SEQ ID NO: 147308 - DNA, 475 bp, Arabidopsis thaliana
agcttgaacttggaggatcaatggccgacgttcgcattctctctcaccagcttcaagtgcaccctggacgccagcatgaaggaggcatcaaagtcctttatcctcagagtggcccttcttccactcaggtgctagccgtgtttgtcggtgtaccgataggaggaacgctgctgactatagccggtttgacattagccggttcggttataggactaatgctagcattcccgttgcttctcatctttagtccggttattgtaccagcagcctttgtcatcggtctagctatgactggattcctggcttcaggggccataagtcttaccggactatcatccatgtcgtgggtactcaactacatccgccgggccgggcagcatattccggaggagcttgaggaagcgaagcatcgattggctgacatggcccagtatgtgggacagaggacttaagatgctggacaaaccatagaaga

SEQ ID NO: 147309 - DNA, 545 bp, Arabidopsis thaliana
aaacgttacgttctcgttttctcaaattccaaacaataccaagaaacctctacttgaaaagagaagattatcgccgcgtgtgtgcctaagagcgatggcgtctgagaaacaaaaacaacatgcacaacctggcaaagaacatgtcatggaatcaagcccacaattctctagctcagattaccaaccttccaacaagcttcgtggtaaggtggcgttgataactggtggagactctgggattggtcgagccgtgggatactgttttgcatccgaaggagctactgtggctttcacttacgtgaagggtcaagaagaaaaagatgcacaagagaccctacaaatgttgaaggaggtcaaaacctcggactccaaggaacctatcgccattccaacggatttaggatttgacgaaaactgcaaaagggtcgttgatgaggtcgttaatgcttttggccgcatcgatgttttgatcaataacgcagcagagcagtacgagagcagcacaatcgaagagattgatgagcctaggcttgagcgagtctttc

SEQ ID NO: 147310 - DNA, 447 bp, Arabidopsis thaliana
cgtaggtccaagacagagatgccagaaggagtttcagcaatcacaacacctaagagcttgccagagatggatgagcaagcaaatgaggcaaggacgtggtggtggtccttccctcgacgatgagttcgatttcgagggcccccagcagggataccagctactccagcagtgctgcaacgagcttcgccaggaagagccagtttgcgtttgccccaccttgaaacaagctgccagggcagttagcctccaaggacagcacggaccattccaatccaggaaaatttaccagtcagctaagtacttgcctaacatttgcaagatccagcaagttggtgaatgtcccttccagaccaccatccctttcttccctccttactactagagtccaagcccggcctagcacgatgatcatgagtgttgctattgatgtatgttaatactatacac

SEQ ID NO: 147311 - DNA, 394 bp, Arabidopsis thaliana
gctcagcaatctcctcgttgcaaccttcggggttctcctcgtccttaacggctgccttgcgaggcagtcacttggggttcctcctcagctacagaacgagtgtaacctcgacaacctagatgttctccaagccaccgaaactatcaagagtgaagccggtcagatcgagtactgggaccacaaccaccctcagctccgatgtgttggtgtttccgttgctcgttatgtaattgaacaaggcggtctttacttgcccaccttcttcacttccccaaaaattttctacgtcgttcaaggaacgggtatcagcggaagagtggtccctggatgtgccgagaccttcatggactcgcagccgatgcaaggacaacaacaaggccaaccatggtaagga

SEQ ID NO: 147312 - DNA, 392 bp, Arabidopsis thaliana
ggcgattactgctgaccaatctccttttgattactacgtggtagtttcgtctcgggggacggataaaatcataaccaccaccggggttcttcgctacagaggctcgtgtacccctgcttctggtcctattcctggcgggcccactattcaggttgattggtccttgaaccaagcacgtgccatcagggacttatctttcttgcatatgtgattaagtgctttatgctcctctccaataagtgctatgaataatttttctttcgtagaaccaatatgacagctagtggaccaagaccaaacccgcaaggcttataccattatggtcttataccgctcattaggacaattgtgttcggttgatcagccggtcagataaacgggaaacatagata

SEQ ID NO: 147313 - DNA, 381 bp, Arabidopsis thaliana
acaaaacaacgattcttttaaaataagaacctctctctgtttctctctctctctatatatatctccctccccgctgatcgatggcggcttctgttgatcctttggtggtcggaagagtgatcggagatgtgttggacatgttcatcccaaccgccaatatgtctgtctactttggccccaaacacatcactaacggctgcgagatcaaaccctccaccgcagtcaatcctccaaaagtcaacatttcgggccattccgatgagctttacactcttgtgatgactgacccggacgcacctagcccaagcgagccgaacatgagagaatgggtccactggattgtcgtggatattcccggaggcacaaattcctcaagaggaa

SEQ ID NO: 147314 - DNA, 352 bp, Arabidopsis thaliana
atcttcttcttcaagaaacttctctttttctttagaaagaacatgtctgaagtctccactctcccctctgttccagtggtaccagggtttcctgttattgggaacttgctgcaactaaaagagaagaaacctcacaagactttcactagatggtcagagatttatggtcctatttactctataaagatgggttcttcttctcttattgacctcaattctactgagactgccaaagaggccatggtgacgcggttttcgtctatttcaacgaggaagatgtcaaatgcgttgacagtccttacttgtgacaaatctatggttgctactagtgattatgatgattttcacaagt

SEQ ID NO: 147315 - DNA, 402 bp, Arabidopsis thaliana
ctcgattaagcttgaacttggaggatcaatggccgacgttcgcacacactcgcaccagcttcaagtgcaccctcaacgccagcatgaaggaggcatcaaagtcctttatcctcagagtggcccttcttccactcaggtgctagccgtgtttgtcggtgtaccgataggaggaacgctgctgactatagccggtttgacattagccggttcggttataggactaatgctagcattcccgttgtttctcatctttagtccggttattgtaccagcagcctttgtcatcggtctagctatgactggattcctggcttcaggggccataggtctcaccggactatcatccatgtcgtgggtactcaactacatccgccgggccgggcagcatattccggaggagct

SEQ ID NO: 147316 - DNA, 404 bp, Arabidopsis thaliana
ataccattgccacaacacccggtgtagtccagtggttctacaacgacggacagcagccacttgtcatcgtcagcatcttcgatctagccagtcaccagaaccagcttgaccgcaacccaaggccattttacttagccggaaacaacccacaaggtcaagtatggctacaaggacgagagcaacagccacagaagaacatcttcaatggatttggacccgaggttattgctcaagctttgaagattgatcttcagacagcgcagcaacttcagaaccaagatgacaaccgtggaaacattgtccgagtccaaggcccgttcggtgtcattaggccgcctttgaggggccagagacctcaggaggaggaagaagaagaagaaggacgacacggacgacacggtaat

SEQ ID NO: 147317 - DNA, 409 bp, Arabidopsis thaliana
accgtggcaacatcgtcaaggtcaactttatttttcggcgtcattaggccacccttgagacgcggcgaaggcggccaacaaccacatgaaatagctaatggtttagaggagactttgtgcaccatgcgatgcactgaaaacctcgatgacccgtcggatgctgacgtgtacaagccatcactcggatacattagcacacttaacagctacaatcttcctattcttagacttctccgtcttagcgctcttcgtggctccatccgtaaaaacgctatggtgctacctgaatggaacgtaaacgcaaacgcggcactctacgtgacaaacggaaaggctcatatacaaatggtgaacgacaacggagaaagagtgttcgaccaagagatctccagcggacagttactagttt

SEQ ID NO: 147318 - DNA, 401 bp, Arabidopsis thaliana
aaaaacctcactcttaaccattaacattttttttttcggcgactactatcaccttctttttcttcttcactctctcatccttcttctacatcacttcttcactccagaacaacaacaacaacaacaaacacacagcaaccgttaactccttaaatatcccctccgccgcggcggagattacgctagtaaacccaaagcttccgccgcggagtctctccctcacattcttcaaaaaattcgaaggatcttcaaatatagtccaccttcgttaccacatgggaccagtcctctcaacttttccgatcaacatctacgttatctggtacggacaatggtcacgctcacacaaatccctaatcagagatttcctcaattttatttgcgacgcttaagcacctttt

SEQ ID NO: 147319 - DNA, 238 bp, Arabidopsis thaliana
gtccgatcacatactagtaagaatacttttcttttatcaaaaaaaatggcaaacaggggcggttctattctgcgcaactttcgccctctgcttcctcctcaccaacgcttccatctaccgtactgttgtcgagttccacgaagatgacgccagcaaccccatgggcccaagacagaaatgtcataaggcgtttcagcaattacagcacctaagagcttgctcagaaaatgatgcgctt

SEQ ID NO: 147320 - DNA, 335 bp, Arabidopsis thaliana
  unsure (1)..(335): unsure at all n locations
ggcgaccccacgctgtccgggagagcaaggcaaagngtgatctttattctttgaggaaaattcttaagatgtacgggtactgtattatgtatctaaaatggcaatccgtgaacctcgatgcacccgtcaacatttgacaccatggctatgaacgaagagctaaagcggtctgtgatgggagatcttgaccggtttatcagaaggaaagatttttacaaaagagttgggaaaccctgtaaaaggggttacattgttgttatggaccacctgggactgggaagactagcctagttgcagccatcgctaactacctcaagttttgaaatctatgaact

SEQ ID NO: 147321 - DNA, 374 bp, Arabidopsis thaliana
ggaagaaaaatgggtcgagtcttatctattatctctttctctttgacactcgggatcctcttcaatggctacactgcccaacagtggcccaacgagtgccagctcgatcaactcaatgcgctcgaaccatcccaaatcatcaagagcgagggtggtcgcatcgaggtctgggaccaccatgcaccccagctccgttgctccggctttgcctttgagcgtttcgtcattgagcctcagggtcttttcttgcccactttcttgaacgccggcaaactcacgtttgttgttcacggaaggggtctaatgggaagagttattccgggatgcgccgagacgttcatggagtcaccggtatttggagaaggtcaaggtca

SEQ ID NO: 147322 - DNA, 408 bp, Arabidopsis thaliana
agaaaacatacacaaatagcaaaacatggctaacaagctcttcctcgtctgcgcaactctcgccctctgcttcctcctcaccaacgcttccatctaccgcaccgttgtcgaattcgaagaagatgacgccagcaaccccgtaggtccaagacagagatgccagaaggagtttcagcaatcacaacacctaagagcttgccagagatggatgagcaagcaaatgaggcaaggacgtggtggtggtccttccctcgacgatgagttcgatttcgagggcccccagcagggataccagctactccagcagtgctgcaacgagcttcgccaggaagagccagtttgcgtttgccccaccttgaaacaagctgccagggcagttagcctccagggacagcacggaccattcca

SEQ ID NO: 147323 - DNA, 399 bp, Arabidopsis thaliana
agaaaaatgggtcgagtctcatctattatctctttctctttgacactcttggggctgttcaatggctacactgcccaacagtggcccaacgagtgccagctcgatcaactcaatgcgctcgaaccatcccaaatcatcaagagcgagggtggtcgcatcgaggtctgggaccaccatgcaccccagctccgttgctccggctttgcctttgagcgtttcgtcattgagcctcagggtcttttcttgcccactttcttgaacgccggcaaactcacgtttgttgttcacggaaggggtctaatgggaagagttattccgggatgcgccgagacgttcatggagtcaccggtatttggagaaggtcaaggtcagggtcagagtcaagggttccgtgacatg

SEQ ID NO: 147324 - DNA, 390 bp, Arabidopsis thaliana
  unsure (1)..(390): unsure at all n locations
gacccacgcgnccgacatagcaaaaaatggcaaacaagttgttcctcgtctgcgcagctctcgctctctggttgcttctcaccaacgcttccatctaccgcactgtcgttgagttcgaagaagatgacgccactaaccccataggcccaaaaatgaggaaatgccgcaaggagtttcagaaagaacaacacctaagagcttgccagcaattgatgctccagcaagcaaggcatggccgtagcgatgagtttgatttcgaagacgacatggagaacccacagtgtcaacagcaggaacatcagcttttccagcagtgctgcaacgagctttgccaggaagagccagattgtgtttgccctaccttgaaacatgctgtcaaggccgttagac

SEQ ID NO: 147325 - DNA, 389 bp, Arabidopsis thaliana
tgacgttcccttctctttctgtctcatttctcttctttgccttcatattcgttacgcatgcattcgacctcagcatcatccaggttcttcttgttttctactttctggctaacaaagtaaccagaaccggttttctcacttgtatatttgtttttttgagaaaatcatgtagatgcaacagggaacatgtccgtacacggtggttgtcatgacaagctgtctttctccggagtcgacaagagatcagatcagcattgtttttggcgatgccgacggtaacaaggtgtatgcaccgaaactagggggtttggtaagaggaccagggggtttggggaagtgttcaacgaacacattccaagtcagaggtcaatgtttgaatgaccctatct

SEQ ID NO: 147326 - DNA, 410 bp, Arabidopsis thaliana
gtcaaagacggagatgatggagagagacgcaatggctacggtggctccctatgcgccggtcacttaccatcgccgtgctcgtgttgacttggatgatagacttcctaaaccttatatgccaagagcattgcaagcaccagacagagaacacccgtacggaactccaggccataagaattacggacttagtgttcttcaacagcatgtctccttcttcgatatcgatgataatggcatcatttacccttgggagacctactctggactgcgaatgcttggtttcaatatcattgggtcgcttataatagccgctgttatcaacctgacccttagctatgccactcttccggggtggttaccttcacctttcttccctatatacatacacaacatacacaagtcaaagcatg

SEQ ID NO: 147327 - DNA, 411 bp, Arabidopsis thaliana
cgcagatgtttggtaaaaagaataattttattctttgagaataatcaaaaatagaaagtgttcagttggaacatgaaaacgtgaccgagtttgtcctagttactcttcgggacggagtggaagaagggaggagattcgcgaacgaggaaagggacccaatgacttcgaaagaattgaacgaggagccgtatgaggtgaaaatctcatgtacggttctgtagagtggcagtaagggtgacttatctgtcaacttttccactatcacccccaaaaaaccaaactctgctttacgtaaagttgccagagtacgattaacctcgggatttgaaatcactgcttatatacccggtattggccataatttacatgaacattctgtagtcttagtaagagggggaagggttaaggatt

SEQ ID NO: 147328 - DNA, 199 bp, Arabidopsis thaliana
cttattatagacatccacaaaaaaaaatatgtaattggtttggccctacttttgtattttgtaacaaatttgtgggaatcagtggagccaatcagttgcctccacgtcatcgtttgcacgccatgttagccaaaatgtggtcatgcatcacccatctaacaagtcaggtgtaatcgaagcatccgagatctcgtcagac

SEQ ID NO: 147329 - DNA, 412 bp, Arabidopsis thaliana
ccacgcgtccgagaaaaatgggtcgagtctcatctattatctctttctctttgacactcttgatcctcttgaatggctacactgcccaacagtggcccaacgagtgccagctcgatcaactcaatgcgctcgaaccatcccaaatcatcaagagcgagggtggtcgcatcgaggtctgggaccaccatgcaccccagctccgttgctccggctttgcctttgagcgtttcgtcattgagcctcagggtcttttcttgcccactttcttgaacgccggcaaactcacgtttgttgttcacggaaggggtctaatgggaagagttattccgggatgcgccgagacgttcatggagtcaccggtatttggagaaggtcaaggtcagggtcagagtcaagggttccgtgacatgca

SEQ ID NO: 147330 - DNA, 311 bp, Arabidopsis thaliana
gacgccagcaaccccatgggcccaagacagaaatgtcagaaggagtttcagcaatcacagcacctaagagcttgccagaaattgatgcgcatgcaaatgaggcaaggccgtggtggtggtccctccctcgacgatgagttcgatttggaagacgacatttagaacccacaaggcccccagcagggacaccagatcctccagcagtgctgcagcgagcttcgtcaggaagagccagtttgtgtttgccccaccttgtgacaagctgccagggcctgttgccttcaaggacaacacgggccattccaattcag

SEQ ID NO: 147331 - DNA, 271 bp, Arabidopsis thaliana
cttatattccctgaggaggttctactcttttggaaacgctctgtaatggaacgggagctttagctggtcgcgaccaagaaaccaccggatttgcttggtgggccgggaatgcccgacttatcaatttatctggtaaacttttgggagctcatgtagcccatgccggtttaatcgtattctgggccggagcaatgatcttatttgaagtggcccattttgtacctgaaaagcccatgtgtgaacaaggattaattgtacttccccacctagc

SEQ ID NO: 147332 - DNA, 322 bp, Arabidopsis thaliana
ggaagaaaaatgggtcgagtcttatttattatctctttctctatgacactctggatcctctttaatggctacactgcccaacagtggcccaacgagtgccagctcgatcaactcaatgcgctcgaaccatcccaaatcatcaagagcgagggtggtcgcattgaggtctgggaccaccatgcaccccagctccgatgctccggctttgcctttgagcgtttcgtcattgagcctcagggtcttttcttgcccactttcttgaacgccggcaaactcacttttgttgtttacggaaggggtctaatgggaagagttattccgt

SEQ ID NO: 147333 - DNA, 410 bp, Arabidopsis thaliana
aacaacaagaaaaaatggcaataaccaacaaattaatcataacacttcttctccttatctccatagctgtcgtccactgcttatccttccgtgtggagatcgacgagttcgagccaccacagcaaggagaacaagaaggtccccgtcgccgtcctggtggtggctctggcgagggatgggaggaagagtcgacgaatcatccataccacttcaggaagcggagtttcagtgattggttccagtcaaaggaaggttttgtgagagtgctgcctaagttcacaaaacatgcaccggctctcttccgaggaatcgagaactacagattctcgttggtggagatggagccaacaactttctttgtgcctcaccatttggatgccgatgctgtttttatagtcctacaaggtaaa

SEQ ID NO: 147334 - DNA, 399 bp, Arabidopsis thaliana
  unsure (1)..(399): unsure at all n locations
cttgccttagagtttgtctcaagcttctccttttttggtattttgtcttaagcttccttgcttctctttcttcttcttctctactctttctctctatttcaaaccttcgttttctttccttttttgtaaaatcttaaaatcaaccaagacaatggaaatgaaattgctctttacatcggctttcacccaaatgttcggctactcgaaccatatggatcaagccagcaactgccaaagcacccgcaacaaaattataaagatgatgaagaaagaagaattcccaagtggattccaagtccctcttcactaccctaaatactccaagtctgattacgaagttatggatgatctccgccttgactngctccttaaacaatatggattctcctttcgaggatc

SEQ ID NO: 147335 - DNA, 401 bp, Arabidopsis thaliana
atttgtgtgctcttagcctttactctatagttttatatcatatcaatcgacatggggaatgtggaccgtgatcggcgtgtgcatgtagaccgtactgacaaacgtgttcatcagccaaactacgaagatgatgtcggttttggtggctatggcggttatggtgctggttctgattataagagtcgcggcccctccactaaccaaatcttggcacttatagcaggagttcccattggtggcacactgctaaccctagctggactcactctagccggttcggtgatcggcttgctagtctccatacccctcttcctcctcttcagtccggtgatagtcccggcggctctcactattgggcttgctgtgacgggaatcttggcttctggtttgtttgggttgac

SEQ ID NO: 147336 - DNA, 390 bp, Arabidopsis thaliana
ctctcaggccaggaagactatgggattgggcggcgatcaatcctttattcccgtcatggattccggccaagtccgcctcaaggagctcggctacaagcaagagctcaagcgcgatctctcggtcttctccaatttcgccatctccttctccatcatatcggtgctcactggtatcaccaccacctacaacaccggcttaagattcggcggcactgtcactctggtctacggatggttcctggccggctccttcacaatgtgcgttgggttatctatggccgagatctgctcctcttaccctaccttcggtggtctctactactggagtgctatgctcgctggcccttgttgggcttctcttgcctcttggatgactggctggttcaacat

SEQ ID NO: 147337 - DNA, 412 bp, Arabidopsis thaliana
aacatacacacatagcaaaaaatggcaaacaggttgttcctcgtctgcgcagctctcgctctctgcttcctcctcaccaacgcttccatctaccgcaccgtcgttgagttcgaagaagatgacgccactaaccccataggcccaaaaatgaggaaatgccgcaaggagtttcagaaagaacaacacctaagagcttgccagcaattgatgctccagcaagcaaggcaaggccgtagcgatgagtttgatttcgaagacgacatggagaacccacagggacaacagcaggaacaacagctattccagcagtgctgcaacgagcttcgccaggaagagccagattgtgtttgccccaccttgaaacaagctgccaaggccgttagactccagggacagcaccaaccaatgcaag

SEQ ID NO: 147338 - DNA, 412 bp, Arabidopsis thaliana
ggccacctctaagacagccctacgagagcgaggagtggagacacccacgtagcccacagggcaacggccttgaggagactatctgcagcatgaggtcccacgagaacattgacgaccctgctcgtgctgacgtgtacaagcccagcctaggtcgcgtgaccagcgtcaacagctataccttgcccatcttggagtatgtcaggctcagtgccactcgtggcgttctccagggtaatgcgatggtgcttcctaaatacaacatgaacgctaacgagatcttgtactgcactggaggacaaggaaggatccaagtggtcaacgacaacggacagaacgtgttggaccaacaggtgcagaagggacagctcgtggtcatcccacaagggttcgcatacgttgtccagtcccacgg

SEQ ID NO: 147339 - DNA, 411 bp, Arabidopsis thaliana
  unsure (1)..(411): unsure at all n locations
gcgaaaccgaagcaaccggcgttaccgatgattcggctccagcgattgagactgaaactgtttctgatgcgatggagcatacagcgatcggagtggttgaatcggtggaaggagccatagaaggagcagagaaatgggtgggtgatttgcaacggacggtgaaggaatcgaaggataccgcaatgcgttctgctcgttccctccgtgaaaattctacctctcagttccgctctatacaggatttcattccacatgctttgactcagtataagacctatgagaatgctttcttcagtaaagttacagacgaattgatatacgcaaaagagcatccggctgctgctattgngattggtgtcgctgctagtctcgttctgatgcgaggcccaagaagattcttgtttcgtaata

SEQ ID NO: 147340 - DNA, 396 bp, Arabidopsis thaliana
aacaaaccattatatttggattaatcgagtattcagcaaatattcatattgtcttgttaatgattaagagcctagaagtctttaaaatatccatcaagattcaaacattatgactcaaactagtgtggttttgtccattatactcgaaacgaaatggtattttttcaacttttgcttgtaaaacttagccagtgcatggcctttattaaatcaactattgggtcactgcatgacccatttatcaacctgtaactgaatattgggctttggcaaagatccaattagcttcattcgtatttcagaaatttgattttatatccgactgagtaggtacgtatatgcaatacgttatgtcctattagccttatgggactcacgggtacttatgcaggagat

SEQ ID NO: 147341 - DNA, 405 bp, Arabidopsis thaliana
caacccacaaggtcaagtatggctacaaggacgagagcaacagccacagaagaacatcttcaatggatttggacccgaggttattgctcaagctttgaagattgatcttcagacagcgcagcaacttcagaaccaagatgacaaccgtggaaacattgtccgagtccaaggcccgttcggtgtcattaggccgcctttgaggggccagagacctcaggaggaggaagaagaagaagaaggacgacacggacgacacggtaatggcttagaggagaccatctgcagcgccaggtgcaccgataacctcgatgatccgtctcgtgctgacgtgtacaagccacagctcggttacatcagcactctcaacagttacgatctccccatccttcgcttcatccgtctctc

SEQ ID NO: 147342 - DNA, 344 bp, Arabidopsis thaliana
aagaaaaatgggtcgagtctcatctattatctctttctctttgacactcttgatcctcttcaatggctacactgcccaacagtggcccaacgagtgccagctcgatcaactcaatgcgctcgaaccatcccaaatcatcaagagcgagggtggtcgcatcgaggtctgggaccaccatgcaccccagctccgttgctccggctttgcctttgagcgtttcgtcattgagcctcagggtcttttcttgcccactttcttgaacgccggcaaactcacgtttgttgttcacggaaggggtctaatgggaagagttattccgggatgcgccgagacgttcatggagt

SEQ ID NO: 147343 - DNA, 300 bp, Arabidopsis thaliana
taaagaggaagaaaaatgggtcgtgtttcatctattatctctttctctttgggagctgttgatcctcttcaatggctacactgcccaacagtggcccaacgagtgccagcttgatcaactcaatgcgctcgaaccatcccaaattatcaagagcgagggtggtcgcatcgaggtctgggaccaccatgcaccccagctccgttgctccggttttgcctttgagcgattcgtcattgagacttaaggtctttatttgcctactatcttgaacgccggcaaactcatcgttgttgttcacgg

SEQ ID NO: 147344 - DNA, 296 bp, Arabidopsis thaliana
gaaatcacaaaattctggattttttttgtagtttttttaattctatcaagatttaactcctacaattattcattgagacaacaatccttgggaaggactaatttgaggatggggaattagcacatcgattcgctttcttccttccccttattcttttagtttaatagaaactttattttaaggagtgttgcgaaaaaagtaggtttaggttttttgaactttgacataaaacttggtctcaaattctagcttaattttaataagttttattattattattgaatattttaaaattt

SEQ ID NO: 147345 - DNA, 402 bp, Arabidopsis thaliana
aaaaaaaatggcaaacaagctcttcctcgtctgcgcaactttcgccctctgcttgctcctcaccaacgcttccatctaccgcactgttgtcgagttcgacgaagatgacgccagcaaccccatgggcccaagacagaaatgtcagaaggagtttcagcaatcacagcacctaagagcttgccagaaattgatgcgcatgcaaatgaggcaaggccgtggtggtggtccctccctcgacgatgagttcgatttggaagacgacatcgagaacccacaaggcccccagcagggacaccagatcctccagcagtgctgcagcgagcttcgccaggaagagccagtttgtgtttgccccaccttgagacaagctgccagggccgttagccttcagggacaacacgg

SEQ ID NO: 147346 - DNA, 283 bp, Arabidopsis thaliana
atcactttcgattctctcaaaaaatcctatttctttcccaacgaaaaatgttccgatcaatgattgttcgatctgcttccccagtgaagcagggtcttctccgcagaggattcgcctctgaatctgttcccgatcgcaaagtcgtcatcctcggtgccgtcggtgggatcggccagccactttctcttctcatgaagcttaaccctctcgtctcttctctttccctctatgattattgccaacactcccggcgttgcttgctgacttctggttacatcaacac

SEQ ID NO: 147347 - DNA, 392 bp, Arabidopsis thaliana
caaaagtgcagaaatggacgtaagctaaacagtcacaactagaaaaaataaattaaaaagggttttaaggaggatttaagttttaatttctaatgaaatagttgattttttcgttgccttactgcatcgtatgtagaaatatagacattcataataaatattttttgtcttttaattactaagaggttcggatctaggtctgtttctcgggtaggaaaccataacatttaatatagtttccccttaaatgttattcgtatcagtgacttctaaactttgcatagatgtattatcaattaagctattaacacttaattacatgcataatatctcaaaaacttaacaagacttagttcaattcatgaaaacatttataaaagatatcttaatgt

SEQ ID NO: 147348 - DNA, 358 bp, Arabidopsis thaliana
  unsure (1)..(358): unsure at all n locations
ctataattagtgtactcgaattaaatatataatttcttaacgtaataataagatacaacaagttgcaccaaatcccactctctcactctagaaaccaaatgtcgttgataataatagaacactttctttctctctctaaaaagcaaaagtagtctagtcactgatttcttctaatcctccggtggagtgagagatgatatctccgacgttgtttcctctcctctgcgctttatttctatgtcttccagtggctgttatcttcacagtccaatcagaacttaactgcggtatctcgccggagtttggtttccgctctctttccgncttctctctttactctcgaaatgtccccgactct

SEQ ID NO: 147349 - DNA, 396 bp, Arabidopsis thaliana
agagagtcataaatggctcttagttctatttgtcggataccttgtatccaaagccttgtgggtgcaattaaatatttcaggagaattccaaaacggcgcgctacctggacttctctctttgtcaaccaaattcattccaacggtcatgaacctcctcaaaaagctcgcggaagaaggacaagcaccacccacaaatagcaaccaatcaatgaactctacagctcaatccgaggttacaaccaatggagaaagcagcagcagcagtagctctggttcatctccagcaaaaaacgtacccattgatacaagtgcatagaacaaagaagtatacaagcttaagctgttgtgctagcccacgaagctagaaacttaaaattcgttaccttttcaaaaagg

SEQ ID NO: 147350 - DNA, 383 bp, Arabidopsis thaliana
gataaaaagggctcgggtctctctttttttttctttctccttaccacttttgatccttggcatggctacgcggctcaacagggtcagcagggtcagcagtttccgaacgagtgccagctcgaccagctcaatgcgctcgagccttcacacgtactgaagagcgaggctggtcgcatcgaggtgtgggaccaccacgctcctcagctccgttgctcaggtgtctcctttgcacgttacatcatcgagtctaagggtctctacttgccctctttctttaacaccgcgaagctctccttcgtggctaaaggacgaggtcttatgggaaaagtgatccctggatgcgccgaaacattccaagactcatcagagtttcaaccacgctt

SEQ ID NO: 147351 - DNA, 217 bp, Arabidopsis thaliana
attggtggaggagattgctttttttttatcacttcttcttccatcctccaggggagttggaacttggaagtggtctttcttcaatctgtataagaagatgggaagtttgaaatttgctcggctttgattttgagtatagcgagcggaactatgggaagtgtttctcctgatgctcaaaagtatgatcttgagcttgcagattcattttacattgatt

SEQ ID NO: 147352 - DNA, 228 bp, Arabidopsis thaliana
cccaaatatgcataagcttttgtttttttttctctccgtcgtctcactctgagttgtgctcttcttccatggcgccgaggcacgccagcgagaggcgccgtttccaaacgcctgccatttcagtcaaatcaacagtcttgcgcccgttcaggcgacgaatgtcgaagccggtcagatggaagtatgggaccacatgagccctgagctccgatgcgccggtgtaacggt

SEQ ID NO: 147353 - DNA, 391 bp, Arabidopsis thaliana
ataaagaggaagaaaaatgggtcgagtctcatctattatctctttctctttgacactcttgatcctcttcaatggctacactgcccaacagtggcccaacgagtgccagctcgatcaactcaatgcgctcgaaccatcccaaatcatcaagagcgagggtggtcgcatcgaggtctgggaccaccatgcaccccagctccgttgctccggctttgcctttgagcgtttcgtcattgagcctcagggtcttttcttgcccactttcttgaacgccggcaaactcacgtttgttgttcacggaaggggtctaatgggaagagttattccgggatgcgccgagacgttcatggagtcaccggtatttggagaaggtcaaggtcagggtcagagt

SEQ ID NO: 147354 - DNA, 412 bp, Arabidopsis thaliana
cacaaacgagtaagaatacaaatacaaatagcaaaaaaaatggcaaacaagctcttcctcgtctgcgcaactttcgccctctgcttcctcctcaccaacgcttccatctaccgcactgttgtcgagttcgacgaagatgacgccagcaaccccatgggcccaagacagaaatgtcagaaggagtttcagcaatcacagcacctaagagcttgccagaaattgatgcgcatgcaaatgaggcaaggccgtggtggtggtccctccctcgacgatgagttcgatttggaagacgacatcgagaacccacaaggcccccagcagggacaccagatcctccagcagtgctgcaacgagcttcgccaggaagagccagtttgcgtttgccccaccttgaaacaagctgccagggcag

SEQ ID NO: 147355 - DNA, 404 bp, Arabidopsis thaliana
gcaaggacaacaacaaggccaaccatggcaaggacgacagggacaacaaggccaaccatgggaaggacagggacaacagggacaacaaggaagacaaggccaaccatgggaaggacagggacaacagggacaacaaggacgacagggacaacaaggccaaccatgggaaggacagggacagcagggacaacaagggttccgtgacatgcaccagaaggtggaacatgtgagacgcggagacgtctttgccaacactccaggctctgtccactggatctacaactcaggagaacagccacttgtcatcatcgctcttctcgacattgtcaactaccaaaaccaactcgaccgcaaccttagagtgttccatttggccggaaacaaccagcaaggaggctttggcg

SEQ ID NO: 147356 - DNA, 354 bp, Arabidopsis thaliana
agaagaagaaggacgacatggacgactttgtaatggcttagaggagaccatctgcagcgccaggtgcaccgataacctcgatgacccgtctcgtgctgacgtgtacaagccacagttcggttacataagcactattaacagttacgagctgtcgatgcttcgttacaaccgattattaggccttcaagcatccattctttaaaaaacgttggtgcttttacatgttgtatctatatggcaacgttattgtttaatggcttaagtgattaacctaagttattatatcttgaaagctgtttttttctagtgttatgtttcaatactgtttctgtataattcatttgaatgtttttt

SEQ ID NO: 147357 - DNA, 367 bp, Arabidopsis thaliana
ggaagaaaaatgggtcgagtctcatctattatctatttctctttgacactcttgatgctcttcaatggctacactgcccaacagtggcccaacgagtgccagctcgatcaactcaatgcgctcgaaccatcccaaatcatcaagagcgagggtggtcgcatcgaggtctgggaccaccatgcaccccagctacgttgctccggctgtgcctttgagcgtatcgtgattgagcctcagggtcttttcttgcccactttcttgaacgccggcaaactcacgtttgttgatcacggaaggtgtctaatgggaagagctatttcgggatgcgccaagacgttcatggagtcaccggcatttggagaaggtc

SEQ ID NO: 147358 - DNA, 406 bp, Arabidopsis thaliana
gagaaacgatagcaacaaactttctagaggtgaaatttgaagctggtgggttcttcacgaagattgaaaaagacgatcgaaacggtgcgtttttaacagtttctcaaacgcgccgttttaagagattaccggttctattgtaaccggacatcaccggttgactttcaaatgtgctaattatgaagataccgaaccggtgaagctctttctcaatccataaaggaaactctttcaatatgtatcattatatattctggttcattctctagtcaactaagagacatttgctctgtatgtatgatatagatgatgtgtacacaattgtaaaagacgtcgataaggttgaacatggatcatatgacaaaacctcttccatgctttggttggggaatcggatggttccgtg

SEQ ID NO: 147359 - DNA, 375 bp, Arabidopsis thaliana
cttctcactccacttatagagagtaattatacactagggaaatgaaaggtggcatgttaaaatgttgagttagaagttcaagctatgaatattgtaatcaataccactactttgagggagtatggccaggtgatgcctcatgaccgccgtcagatttttacgtgtttttatgtaaagtataaagtgcaaagttggtcaaaatgagctagtcacaatttactttcattgtcctttagcattccaagacagattcttaggtaaatgcaaattaattcgaatatcacctggcgtgatatagtatcttgacggtcccgattatgcaacattaaccgatcgaggcacatggaccatatcaccatgatctctcccaagagt

SEQ ID NO: 147360 - DNA, 387 bp, Arabidopsis thaliana
cgtgacatgcaccagaaagtagagcacctacggtgcggtgacaccattgcaacacgatctggtgtagctcaatggttctacaacaatggaaatgagcctctcattcttgttgcagccgcggatctcgccagcaaccagaaccagcttgaccgcaaccttagaccatttttgatagccggaaacaacccacaagggcaggaatggctacaaggccgaaagcaacagaagcaaaacaacatcttcaatggcttcgcacctgagatcttggctcaagccttcaagatcaatgtcgagacggctcagcagctccagaaccagcaagataaccgtggcaacatcgtcaaggtcaacggacctttcggcgtcattaggccacccttgagacgc

SEQ ID NO: 147361 - DNA, 349 bp, Arabidopsis thaliana
  unsure (1)..(349): unsure at all n locations
ccacgcgnccgatccatttgctgatatctttgtaatccgatcgtttttgagatgcggataacgttgcgagatctgccgttccatcgaccaaacgctcgtttcaaaatccacacacacatcgtatttaactaacaaataacaatttcttgtaattacctgaacggtgagaatagaattgcatggaccagttaattgaatagacttaaggagataagtattccctttaggaactaggagattaacagctccatttgaagaacatgctttcttccacgcattcacgaacgcctaaacaatgcatgcatggatcattagtactaaaaacagttttctaattaattatacgatg

SEQ ID NO: 147362 - DNA, 414 bp, Arabidopsis thaliana
aatgggtcgagtctcatctattatctctttctctttgacactcttgatcctcttcaatggctacactgcccaacagtggcccaacgagtgccagctcgatcaactcaatgcgctcgaaccatcccaaatcatcaagagcgagggtggtcgcatcgaggtctgggaccaccatgcaccccagctccgttgctccggctttgcctttgagcgtttcgtcattgagcctcagggtcttttcttgcccactttcttgaacgccggcaaactcacgtttgttgttcacggaaggggtctaatgggaagagttattccgggatgcgccgagacgttcatggagtcaccggtatttggagaaggtcaaggtcaggggcagagtcaagggttccgtgacatgcaccagaaagtagagcacct

SEQ ID NO: 147363 - DNA, 222 bp, Arabidopsis thaliana
cgacccagcgtccgtctcgtcttaagttaacagatttttttataccctaagaaactgaagatgggggcgttcctgatgaatggacatgaacatccattgacgttacttaggtacaacagagaaggagatctgttttcttcttgcgccaaggaccacacacccaccctatggtttgtcgataacggcgagcgccttggaacttaccgtggtcacaactgtgct

SEQ ID NO: 147364 - DNA, 398 bp, Arabidopsis thaliana
gatggtgcttcctaaatacaacatgaacgctaacgagatcttgtactgcactggaggacaaggaaggatccaagtggtcaacgacaacggacagaacgtgttggaccaacaggtgcagaagggacagctcgtggtcatcccacaagggttcgcatacgttgtccagtcccacggaaacaagttcgagtggatctctttcaaaactaatgaaaacgcaatgatcagcactttggcgggtagaacctcgctcttgagggcattgccattggaggtcatatcaaatggtttccagatctctcccgaggaagctaggaagatcaagttcaacacacttgagaccactttgacccgcgctgccggtaggcaacaacaacagttgatcgaggagattgtcgagg

SEQ ID NO: 147365 - DNA, 412 bp, Arabidopsis thaliana
gaaaacatacacaaatagcaaaacatggctaacaagctcttcctcgtctgcgcaactctcgccctctgcttcctcctcaccaacgcttccatctaccgcaccgttgtcgaattcgaagaagatgacgccagcaaccccgtaggtccaagacagagatgccagaaggagtttcagcaatcacaacacctaagagcttgccagagatggatgagcaagcaaatgaggcaaggacgtggtggtggtccttccctcgacgatgagttcgatttcgagggcccccagcagggataccagctactccagcagtgctgcaacgagcttcgccaggaagagccagtttgcgtttgccccaccttgaaacaagctgccagggcagttagcctccagggacagcacggaccattccaatcca

SEQ ID NO: 147366 - DNA, 389 bp, Arabidopsis thaliana
caaaaagaaaatggttaagctcagcaatctcctcgttgcaaccttcggggttctcctcgtccttaacggctgccttgcgaggcagtcacttggggttcctcctcagctacagaacgagtgtaacctcgacaacctagatgttctccaagccaccgaaactatcaagagtgaagccggtcagatcgagtactgggaccacaaccaccctcagctccgatgtgttggtgtttccgttgctcgttatgtaattgaacaaggcggtctttacttgcccaccttcttcactttcccaaaaattttctacgtcgttcaaggaacgggtatcagcggaagagtggtccctggatgtgccgagaccttcatggactcgcagccgatgcagggacaac

SEQ ID NO: 147367 - DNA, 377 bp, Arabidopsis thaliana
cgcgttccttgacgaagaagacgatacttcttctccttccatcacagcttcacgcaaatccttctacagttacatcttcttaagattctgagtttcgacttatttcgtggaaggatttttatatttcaacagtgattttaattttatactggaacttaagcatcacttaatcttccggataaaatgatgtcgccgaagcaaatctccgacgatcgaggatcttcacatttcaggcatacacctttccagataatccaccttattgggaacttttttaggatatggtcagtatattcgatgtaccgatacttgaatcagacgggagcgcctggtggtctctttctcttctgctggctggtgccttcaataatcatctt

SEQ ID NO: 147368 - DNA, 400 bp, Arabidopsis thaliana
aagaaaaccaacaaaaatccaactcattatcgaagaccgtgaagagcttgaacagatggcgcaaatctcaaccatccaccaccacaaccaccgcaccatcttcctcctccgccgcctcctctctccaccacctcatagacccaaaacacaaaaacccttcctccaaatccgaccgaatcggtctctcttaaaacactctatggaagtcgaagtcaagctccgtctcctaaccgccgctgctcatctccgtctcaccactctcctcactccataccacctcaaaacccttcaccaacgcaacaccttcttcgacacacccaaaaacgacctcttttttcgccgcgccgttcttcgtctcccgtttcttcaaaacgccgcccgttccgcggcttttccttct

SEQ ID NO: 147369 - DNA, 406 bp, Arabidopsis thaliana
tttcgatttgggagggagagagaaagagagcttcatggtgatgattgttacctaggaaattatccggcgagagtcgctacagtcgacacttttggttttgagaggtggtaattcatcatataaccagtttactgggcctatgggccatccctcatttagcacgtgtcttccttttttgttttgcctatgggccagggtttttattttttgttttgtctgttattaacacttccattattattattatttttatttttattttaaaaaacactaacttcagaaaaaataaaaataaaaaccttcagtaaatcttataaaaatcaggtcttgaatccactacgtttcagttttcactcatttatgcgttcattatcattttatcgacaattattgtgaaagcgtggtg

SEQ ID NO: 147370 - DNA, 409 bp, Arabidopsis thaliana
aacaaaaagaaaatggttaagctcagcattctcctcgttgcaaccttcggggttcggctcgtccttaacggctgccttgcgaggcagtcacttggggttcctcctcagctacagaacgagtgtaacctcgacaacctagatgttctccaagccaccgaaactatcaagagtgaagccggtcagatcgagtactgggaccacaaccaccctcagctccgatgtgttggtgtttccgttgctcgttatgtaattgaacaaggcggtctttacttgcccaccttcttcacttccccaaaaatttcctacgtcgttcaaggaacgggtatcagcggaagagtggtccctggatgtgccgagaccttcatggactcgcagccgatgcaaggacaacaacaaggccaaccatggc

SEQ ID NO: 147371 - DNA, 313 bp, Arabidopsis thaliana
agaaaatggttaagctcagcaatctcctcgttgcaaccttcggggttctcctggggcgttaacggctgccttgcgaggcagtcacttggggttcctcctcagctacagaacgagtgtaacctcgacaacctagatgttctccaagccaccgaaactatcaagagtgaagccggtcagatcgagtactgggaccacaaccaccctcagctccgatgtgttggtgtttccgttgctcgttatgtaattgaacaaggcggtctttacttgtccacctttttcacttccccataaattgcctacttctttcaaggta

SEQ ID NO: 147372 - DNA, 374 bp, Arabidopsis thaliana
cgtttttctttacccttttgatttgatcttctcttctcggttgaaattagggattgctgtaaaattgtaatgtgtttctgagtaaatcatgagcaagcccgaagaaacttccgacccgaacccaaccggacccgatctgtctcgatcttcctccgatgaggtcaccgtcaccgtcgccgatcgggctccttctgatctcaatcacgtttctgaggagctaagtgatcaattgaggaatgtgggtttggatgattctgcggaagagctgagtgttccgattagtgtctctcaaggtaatgtagaaacggattcgagggcattattaggcagtaatcaaaaggaggaagaagaagggagcgagaagagaatgatga

SEQ ID NO: 147373 - DNA, 403 bp, Arabidopsis thaliana
ggaatcgcggcgagagaagaatccgatgacggaggaggaatctgatgggctaattgcggcgaggcggatccaacgattgtctttacacctatctccctccttgacgccgtcgccgtcgttaccgttggtgcagacggagacgtgttcggcgaggtcgaagaagctggatgtcaacggcgaagctttgtcgctgtatatgagaggaaaacatatagatatacaagagaaaattttcgactttttcaattcccgacccgatttgcagacgccgatcgagatctccaaggatgatcatcgggaattgtgtatgaatcagcttatagggcttgttagagaagctggggtaaggcccgttaggtatgttgctgatgatcctgagaagtatttcgcaatcatggaagct

SEQ ID NO: 147374 - DNA, 252 bp, Arabidopsis thaliana
aaaccacttctgttatagaattcttctattttagaacaaaaataggaaaacacgttggaaatggtttaagagactaaatctaagttaaccaaacttaatttaatgaaatataaaatcgcagcaagaaaatacgttgttaactagctactgcaaagacttttagcgacccttttttatatattctgtaactttcgtataaagactatcgagacctaaactattatttaatagcactaaactattactagcaag

SEQ ID NO: 147375 - DNA, 402 bp, Arabidopsis thaliana
cggacgcgtgggcggggaagcccaaatccagatcgtaaacgacaatggtaacagagtgtttgacggacaagtctctcaaggacagctcatagccgtaccacaaggtttctcggtggtgaaacgcgcaacaagcaaccgattccagtgggttgagttcaaaacaaacgcaaacgcgcaaatcaacactcttgcgggacgaacctcagtcttgagaggtttaccacttgaagttataaccaatgggttccaaatctcacctgaagaagcaaggagggtcaagttcaacacgctcgagaccactttgactcacagcagtggcccagctagctacggaaggccaagggtggctgcagcttaagagcttaaaaccgcggctcaacaatgaacctctagtactgtaaa

SEQ ID NO: 147376 - DNA, 206 bp, Arabidopsis thaliana
ataagaaataacaaaagggctcgaggctcttctcttctttctttcttcttaacacttttgatccttttccatggctacgcggctcaacagggtcagcagggtcagcagtttccgaacgagtgccagctcgaccagctcaatgcgctcgagccgtcacacgtactgaagagcgaggctggtcgcatcgaggtgtgggaccaccacgc

SEQ ID NO: 147377 - DNA, 414 bp, Arabidopsis thaliana
cacaaatagcaaaacatggctaacaagctcttcctcgtctgcgcaactctcgccctctgcttgctcctcaccaacgcttgcatgtaccgcaccgttgtcgaattcgaagaagatgacgccagcaaccccgtaggtccaagacagagatgccagaaggagtttcagcaatcacaacacctaagagcttgccagagatggatgagcaagcaaatgaggcaaggacgtggtggtggtccttccctcgacgatgagttcgatttcgagggcccccagcagggataccagctactccagcagtgctgcaacgagcttcgccaggaagagccagtttgcgtttgccccaccttgaaacaagctgccagggcagttagcctccagggacaggacggaccattccaatccaagaaaatttac

SEQ ID NO: 147378 - DNA, 390 bp, Arabidopsis thaliana
agaaaacatacacaaatagcaaaacatggctaacaagctcttcctcgtctgcgcaactctcgccctctgcttcctcctcaccaacgcttccatctaccgcaccgttgtcgaattcgaagaagatgacgccagcaaccccgtaggtccaagacagagatgccagaaggagtttcagcaatcacaacacctaagagcttgccagagatggatgagcaagcaaatgaggcaaggacgtggtggtggtccttccctcgacgatgagttcgatttcgagggcccccagcagggataccagctactccagcagtgctgcaacgagcttcgccaggaagagccagtttgcgtttgccccaccttgaaacaagctgccagggcagttagcctccaggg

SEQ ID NO: 147379 - DNA, 491 bp, Arabidopsis thaliana
gtaccggaccggaggttcggccacgacccacgcgtacgcagacactatacacgacaagcggaaagggttatatacaaatggtgaacgacaacggagaaagagtgttcgaccaagagatctccagcggacagttactagtcgtgccacaaggcttttcggtcatgaaacatgccataggcgaacagttcgagtggatcgaattcaagacaaacgaaaacgcacaggtgaacacactcgcgggccgtacctcagtcatgagaggtttgccgcttgaggttataaccaatgggtaccagatctctcccgaagaagctaaacgagtaaagtttagcacgattgagaccacactgacccatagcagtccaatgagctacggaaggcctaaggcttgaggcttgatgagcgcgtggtggaatagcgtttgaatctaaagttcggtttggtacgacttgtaatatgaaataataatgtacaaagaagtctacgcttaa

SEQ ID NO: 147380 - DNA, 467 bp, Arabidopsis thaliana
cgtacgcaattaactaacaacaaatggcgaacaagctcttcctcgtctgcgcagctctcgccctgtgggggatgctcaccaacgctgccgtgtatcgcacggatgtcgagttcgacgaaaatgacgccagtaaccccataggcccaatacagaaatgtcagaaggagtttcagcaagaacagcacctaagagcttgccagagatggatgcgcaagcaaatgtggcaaggacgtggtggtggtgcttccctcgacgatgagttcgatatggaagacgacatcgagaacccgcagagacgacagctactccagaagtgctgcagcgagcttcgccaagaagagccagtttgcgtttgccccaccttgagacaagctgacaaagccgttagattccaaggacagcaacaccaaccagagcaagtgaggaaaacttaccaggcagctaagtacttgcctaacatttgcaaa

SEQ ID NO: 147381 - DNA, 193 bp, Arabidopsis thaliana
tttgtcactctcagcaccccacattggcaaacaaagctcattattcaagaaaaagaccacttgagaggactcaaacatgcaaaagatgggattagattaatattcaatcaacttcatcattccaaaagcatttacaaactacaaatctctctaaagctttttaagcaatgcacaaaaacatataactaacccc

SEQ ID NO: 147382 - DNA, 426 bp, Arabidopsis thaliana
cggacgcgtggggaaaccagaaatagtcttcttcttcttcctcacacacatacttctctcaccttatcctccgagatcggaaaagatggagaaatccggctacggcagagacggaatttaccgatcacttcgtccaacactcgttcttcccaaagatccaaacacatcgttagtctctttcctcttccgtaactcctcatcttacccatcaaaactcgctatcgccgattccgataccggcgattccttaaccttctctcagctcaaatacgccgtcgctagactcgctcacggattccaccgtttaggtattcgcaaaaacgacgtcgtgttgattttcgctcctaactcttaccagttccctctctgtttcctcgccgtaaccgcgatcggcgggttttcaccaccgcgaaatcctcttacact

SEQ ID NO: 147383 - DNA, 449 bp, Arabidopsis thaliana
aaatataagaaaaacaaaatggctcgagtctcttctcttctttctttcttcttaacacttttgatccttttccatggctacgcggctcaacagggtcagcagggtcagcagtttccgaacgagtgccagctcgaccagctcaatgcgctcgagccgtcacacgtactgaagagcgaggctggtcgcatcgaggtgtgggaccaccacgctcctcagctccgttgctcaggtgtctcctttgcacgttacatcatcgagtctaagggtctctacttgccctctttctttaacaccgcgaagctctctttcgtggctaagggacgaggtcttatgggaaaagtgatccctggatgcgccgaaacattccaagactcatcagagttccaaccacgcttcgaaggtcaaggtcaaagccagaggttccgtgacatgcaccagaaagtggagca

SEQ ID NO: 147384 - DNA, 228 bp, Arabidopsis thaliana
aaaaacatacacaaatggcaaaacacggctaacaagctattactcttctgctcaacgtttgcattgtggttgctcacggccaacgcttccatgtaccgaaccgctggcgaattcgaagacaatgacgccagcaaccacgtacgtgcaagacagatatggcaggatgtgtgttaggaatgacaacaactaaaagcttgtcatacatggatgtgcaagcaaatgaggcaa

SEQ ID NO: 147385 - DNA, 446 bp, Arabidopsis thaliana
cacaaatagcaaaacatgggtaacaagctcttcctcgtctgcgcaactctcgccctctgcttgctcctcaccaacgctggatctaccgcaccgttgtcgaattcgaagaagatgacgccagcaaccccgtaggtccaagacagagatggcagaaggaggttcaggaatcacaacaccttaaaacttggcaaagatgggtgagcaagcaaatgaggcaaggacgtggtgggggtccttccctcgacgatgagttcgatttcgagggcccccagcagggataccagctactccagcagtgctgcaacgagcttcgccaggaagagccaggttgcgtttgccccaccttgaaacaagctgccagggcagttagccttcaaggacagcacggaccattccaatccaagaaaatttaccagtcagctaagtacttgcctaacatttgcaag

SEQ ID NO: 147386 - DNA, 453 bp, Arabidopsis thaliana
gaaggatccaagtggtcaacgacaacggacataacgtgttggaccaacaggtgcagaagggacagctcgtggtcatgccggaggggttcgcatacgttgtccagtcccacggaaacaagttcgagtggatctctttcaaaactaatgaaaacgcaatgatcagcactttggcgggtagaacctcgctcttgagggcattgccattggaggtcatatcaaatggtttccagatctctcccgaggaagctaggaagatcaagttcaacacacttgagaccactttgacccgcgctgccggtaggcaacaacaacagttgatcgaggagattgtcgaggcttaaatcaaaacgtttttctttttcttaataaagtatggtcagtttgtaatcacgttcctttacctttaacgtacgtgtaaaatatgtgtctgcggcacctcacttgtaataacac

SEQ ID NO: 147387 - DNA, 400 bp, Arabidopsis thaliana
  unsure (1)..(400): unsure at all n locations
gataaaaatggctcgagtctcttctcttctttctttctccttaacacttttgatccttttcgatggctacgcgggtcaggaggggcagcanggtcagcagtttccgaacgagtgccagctcgaccagctcaatgcgctcgagccttcacacgtactgaagagcgaggctggtcgcatcgaggtgtgggaccaccacgctcctcagctccgttgctcaggtgtctcctttgcacgttacatcatcgagtctaagggtctctacttgccctctttccttaacaccgcgaagctctccttcgtggctaaaggacgaggtcttatgggaaaagtgatccctggatgcgccgaaacattccaagacttatcagagttccaaccacgcttcgaaggtcaaggtcaa

SEQ ID NO: 147388 - DNA, 394 bp, Arabidopsis thaliana
acgcaaaaagaaaatggttaagctcagcaatctcctcgttgcaaccttcggggttctcctcggcctgaacagctgccttgcggggcgggcacttggggttcctcctcagctacagaacgagtgtaacctcgacaacctagatgttctccaagccaccgaaactatcaagagtgaagccggtcagatcgagtactgggaccacaaccaccctcagctccgatgtgttggtgtttccgttgctcgttatgtaattgaacaaggcggtctttacttgcccaccttcttcacttccccaaaaatttcctacgtcgttcaaggaacgggtatcagcggaagagtggtccctggatgtgccgagaccttcatggactcgcagccgatgcaaggacaacaa

SEQ ID NO: 147389 - DNA, 463 bp, Arabidopsis thaliana
gcggacctttccaggtcgtgaggccacctctaaaaaattcctactagagcgaggagtggaaacaccgacggtgcccacaggggagcgggcttgaggagactatctgcagcatgaggtcccacgagaacattgacgaccctgctcgtgctgacgtgtacaagcccagcctaggtcgcgtgaccagcgtcaacagctataccttgcccatcttggagtatgtcaggctcagtgccactcgtggcgttctccacggtaatgcgatggtgcttcctaaatacaacatgaacgctaacgagatcttgtactgcactggaggacaaggaaggatccaagtggtcaacgacaacggacagaacgtgttggaccaacaggtgcagaagggacagctcgtggtcatcccacaagggttcgcatacgttgtccaatcccacggaaacatgttcgagtggatctctttcaaaac

SEQ ID NO: 147390 - DNA, 462 bp, Arabidopsis thaliana
  unsure (1)..(462): unsure at all n locations
aacaaacaaaaagaaaatggttaagctcagcaatcttctcgttgcaaccttcggggttctccgcgtcgttaacaactgccttgcggggcgagtcacttgnggttcctcctcagctacagaacgagtgtaacctcgacaacctagatgttctccaagccaccgaaactatcaagagtgaagccggtcagatcgagtactgggaccacaaccaccctcagctccgatgtgttggtgtttccgttgctcgttatgtaattgaacaaggcggtctttacttgcccaccttcttcacttacccaaaaatttcctacgtcgttcaaggaacgggtatcagcggaagagtggtccctggatgtgccgagaccttcatggactcgcagccgatgcaaggacaacaacaaggccaaccatggcaaggacgacagggacaacatggccaaccatgggaaggacagggacaac

SEQ ID NO: 147391 - DNA, 447 bp, Arabidopsis thaliana
  unsure (1)..(447): unsure at all n locations
aaaaagggccggcccgcgcgtccgaaccgacccactttcatcttatctctactcttcacactcaccgnctcgactacgaccctcttgtctgcgcgttttaggaggagccgtcggcgacanaattcgatatcacttggggtgatggtcgtggcaaggttcttaacaacggagagcttctcactctctccctcgacagaacctacggctctggttttcaaaccaagaaagagtatttgttcgggaaaatcgacatgcagctcaaactcgtccctggaaactccgccggaaccgtcactgcctactacttgaagtcaaaaggtgatacgtgggacgaaatcgatttcgagtttcttggtaatctaactggtgatccgtataccatgcatacgaatgtgtatactcaaggcaaaggtgatagagaacaacaatttcattttctggttcgat

SEQ ID NO: 147392 - DNA, 454 bp, Arabidopsis thaliana
  unsure (1)..(454): unsure at all n locations
ccgctcaacatcnccaactaccaaaaccaactcgaccgtaactttaaagtgttccatttgnccggggacggccagcagggagggtttggcgggtcacancaacaacaagaacagaaaaacttgtggagcgggttcgacgcacaggtcatagctcaagcattgaaaattgacgttcagttggctcagcagcttcagaaccaacaagacagcagaggaaacatcgttcgtgttaagggacctttccaggtcgtgaggccacctctaagacagccctacgagagcgaggagtggagacacccacgtagcccacaaggcaacggccttgaggagactatctgcagcatgaggtcccacgagaacattgacgaccctgctcgtgctgacgtgtacaagcccagcctaagtcgcgtgaccagcgtcaacaactatacctttgcccatcttggagtatgtc

SEQ ID NO: 147393 - DNA, 430 bp, Arabidopsis thaliana
  unsure (1)..(430): unsure at all n locations
cgtccggaacagaaaaacttgtggagcgggttcgacgcacatgtcatagctcaagcattgaaaattggcgttgagttngatcaggagctggcgggccaacaagacagcanaggaaacatcgttcgtgttaagggacctttccaggtcgtgaggccacctctaagacagccctacgagagcgaggagtggagacacccacgtagcccacagggcaacggccttgaggagactatctgcagcatgaggtcccacgagaacattgacgaccctgctcgtgctgacgtgtacaagcccagcctatgtcgcgtgaccagcgtcaacagctataccttgcccatcttggagtatgtcaggctcagtgccactcgtggcgttctccacggtaatgcgatggtgcttcctaaatacaacatgaacgctaacgagatct

SEQ ID NO: 147394 - DNA, 454 bp, Arabidopsis thaliana
  unsure (1)..(454): unsure at all n locations
agaaaaatgggtcgagtctcatctattatctctttctctttgacactcttgatcctctgcagtggctacactgcccagcggggggccaacgagtgccaactcnatcaactcaatgcgctcgaaccatcccaaatcatcaagagcgagggtggtcgcatcgaggtctgggaccaccatgcaccccagctccgttgctccggctttgcctttgagcgtttcgtcattgagcctcacggtcttttcttgcccactttcttgaacgccggcaaactcacgtttgttgttcacggaaggggtctaatgggaagagttattccgggatgcgccgagacgttcatggagtcaccggtatttggagaaagtcaaggtcagggtcagagtcaagggttccgtgacatgcaccagaaagtagagcacctacggtgcggtgacaccattgcaacaccatcttgtg

SEQ ID NO: 147395 - DNA, 453 bp, Arabidopsis thaliana
ggaagaaaaatgggtcgagtctcatctattatctctttctctttgacactcttgatcctctgggatgactacactggccggcgggggcccaacgagtgccagctcgatcaactcaatgcgctcgaaccatcccaaatcatcaagagcgagggtggtcgcatcgaggtctgggaccaccatgcaccccagctccgttgctccggctttgcctttgagcgtttcgtcattgagcctcagggtcttttcttgcccactttcttgaacgccggcaaactcacgtttgttgttcacggaaggggtctaatgggaagagttattccgggatgcgccgagacgttcatggagtcaccggtatttggagaaggtcaaggtcagggtcagagtcaagggttccgtgacatgcaccagaaagtagagcacctacggtgcggtgacaccattgcaacaccatct

SEQ ID NO: 147396 - DNA, 454 bp, Arabidopsis thaliana
  unsure (1)..(454): unsure at all n locations
aaaaagaaaatggttaagctcagcaatctcctcgttgcaaccttcggggttctcctcggcctgaacggctgccttgcgaggcgggcacttgangttcctcctcagctacagaacgagtgtaacctcgacaacctagatgttctccaagccaccgaaactatcaagagtgaagccggtcagatcgagtactgggaccacaaccaccctcagctccgatgtgttggtgtttccgttgctcgttatgtaattgaacaaggcggtctttacttgcccaccttcttcacttccccaaaaatttcctacgtcgttcaaggaacgggtatcagcggaagagtggtccctggatgtgccgagaccttcatggactcgcagccgatgcaaggacaacaacaaggccaaccatggcaaggacgacagggacaacaaggccaaccatgggaaggacagggacaac

SEQ ID NO: 147397 - DNA, 457 bp, Arabidopsis thaliana
  unsure (1)..(457): unsure at all n locations
ctcctcgtccttaacggctgccttgcaaggcagtaatttgttgttcctcctaaattacaaaacgggggtaacctcgacagcctgggggtgctccaagccaccgaaactatcaagagtgaagccggtcagatcgagtactgggaccacaaccaccctcagctccgatgtgttggtgtttccgntgctcgttatgtaattgaacaaggcggtctttacttgcccaccttcttcactttcncaaanatttcctacgtcgttcaaggaacgggtatcagcggaagagtggtccctggatgtgccgagaccttcatggactcgcagccgatgcaaggacaacaacaaggccaaccatggcaaggacgacagggacaacatggccaaccatgggaaggacagggacaacaaggacaacatggaagacaaggccaaccatgggaaggacagggacaacaaggac
